United States Patent Application Publication US 2025/0084491 A1 - sequence listing, part 15

SEQ ID NO: 274125 - DNA, 75 bp, synthetic construct
  source 1..75: mol_type = other DNA
ggaatttactacttctttgttcatgataaagataagcatattatgactttagcagatgatcctgcgtctcatcct

SEQ ID NO: 274126 - DNA, 75 bp, synthetic construct
  source 1..75: mol_type = other DNA
gacaggactacagaattacgtcgttatctctccatgctgtcaacaatgatatccgtgacaggattacgtgtgcgg

SEQ ID NO: 274127 - DNA, 75 bp, synthetic construct
  source 1..75: mol_type = other DNA
ctcctgtgtctgacgatcattacaaataccaagataagcattttattcggttgcatggctgttgtttatctttat

SEQ ID NO: 274128 - DNA, 75 bp, synthetic construct
  source 1..75: mol_type = other DNA
atcgcgtcatggctatatcagggaatggtctttcacagaaagtctcaaatgtccttctgtgacactttcaggtta

SEQ ID NO: 274129 - DNA, 75 bp, synthetic construct
  source 1..75: mol_type = other DNA
acgatcattataaattccagagtgaacattttatccggttgcacggctgtgatatatcattatttccacttgaga

SEQ ID NO: 274130 - DNA, 75 bp, synthetic construct
  source 1..75: mol_type = other DNA
attatgaaataaaaaaggggatgacaagcttattcttaaagaaggtgatctgcataatgatgtacatggtaatat

SEQ ID NO: 274131 - DNA, 75 bp, synthetic construct
  source 1..75: mol_type = other DNA
tcattaactgttgcggaagggcgtaattatgaaataaaaaaggggatgacaagcttattcttaaagaaggtgatc

SEQ ID NO: 274132 - DNA, 75 bp, synthetic construct
  source 1..75: mol_type = other DNA
agggagaaggtcatcaactggtttttgatgacaaagaaaatgaggaaaaaatcatattaacttcttctggtgatt

SEQ ID NO: 274133 - DNA, 75 bp, synthetic construct
  source 1..75: mol_type = other DNA
aaactggcgaaagcgcaggaactgggcattgaagtcatcgacgaagcggaaatgctgcgtttgctgggtagctga

SEQ ID NO: 274134 - DNA, 75 bp, synthetic construct
  source 1..75: mol_type = other DNA
gatgcgccggaaattcccgacgctgaatacgacaggctgatgcgcgaactgcgcgagctggaaaccaaacatcca

SEQ ID NO: 274135 - DNA, 75 bp, synthetic construct
  source 1..75: mol_type = other DNA
gacagcgaagacgaagacatccaagccgatattcgcaaaacgctggtgcagttgcttggcgagctgccaccgcgt

SEQ ID NO: 274136 - DNA, 75 bp, synthetic construct
  source 1..75: mol_type = other DNA
atgtgcacaacttctttgccgaagaaagtaaccgtaatgtcatcagtgaactgctggcggaaggcgttcactggc

SEQ ID NO: 274137 - DNA, 75 bp, synthetic construct
  source 1..75: mol_type = other DNA
tggccttgccgtcagcatactgtatgagaatggcgtactggtgagtgcagcaacccgtggcgatggcactaccgg

SEQ ID NO: 274138 - DNA, 75 bp, synthetic construct
  source 1..75: mol_type = other DNA
gacgttgagtttcaggttgggcgtaccggcgctattacgcccgttgcgcgtctggaacctgtacatgttgcaggc

SEQ ID NO: 274139 - DNA, 75 bp, synthetic construct
  source 1..75: mol_type = other DNA
atggatgaaatttttccgagaagagaaactcactctgaccaatagatatccagcaacaatggtttatagctggct

SEQ ID NO: 274140 - DNA, 75 bp, synthetic construct
  source 1..75: mol_type = other DNA
cgactggcagacgctggagctggtgttcaccgccagcagtgccacggttactccgaaactgaatggagtggctgg

SEQ ID NO: 274141 - DNA, 75 bp, synthetic construct
  source 1..75: mol_type = other DNA
cgcattgttacccgaaacagagaaggcaaagatcgaaagttacattgaatttgtcatcaaccagaacgaaaaaaa

SEQ ID NO: 274142 - DNA, 75 bp, synthetic construct
  source 1..75: mol_type = other DNA
aattgcgggtataagcgtgcccaaaggcgaattggggggaaaaaatgcaaggtttgggaaccgctggaaccacgc

SEQ ID NO: 274143 - DNA, 75 bp, synthetic construct
  source 1..75: mol_type = other DNA
catcagcaacgcagccaaagcagtagtacgccctgattttgtggacatcgatattcgctttgaccagttccgcga

SEQ ID NO: 274144 - DNA, 75 bp, synthetic construct
  source 1..75: mol_type = other DNA
ggccacgtaacagtcaatctgtaaataaatatattctgagtgttcaggatatctatcgtaactcacctgttcctg

SEQ ID NO: 274145 - DNA, 75 bp, synthetic construct
  source 1..75: mol_type = other DNA
tcactcagtggataaaaagagaatttagcttacaaggaatactgacggggatttatcaggatttgatgcatcgag

SEQ ID NO: 274146 - DNA, 75 bp, synthetic construct
  source 1..75: mol_type = other DNA
atgtccggcaagcgtatctctcgtgaaaaactgacgattaaaaaaatgatcgatctttatcaagcgaaatgcccg

SEQ ID NO: 274147 - DNA, 75 bp, synthetic construct
  source 1..75: mol_type = other DNA
gctctgactgccagtgaagagttcatttcagccctccctcactttcgtttcataagtgacgtaattcagaccttc

SEQ ID NO: 274148 - DNA, 75 bp, synthetic construct
  source 1..75: mol_type = other DNA
cgccgtgtcttattgggcatggggcattatcttctcccgtcacgcagactgcctgttttctgaaactggcggaag

SEQ ID NO: 274149 - DNA, 75 bp, synthetic construct
  source 1..75: mol_type = other DNA
caatattgcttttgtgccactggcaatgccaagtaccgccggaccgggaaccattgcgatgatcattagctcggc

SEQ ID NO: 274150 - DNA, 75 bp, synthetic construct
  source 1..75: mol_type = other DNA
catttcccgcctgatgggattccttctggtttgtatgggcgtgcagtttattatcaacggcattctggaaattat

SEQ ID NO: 274151 - DNA, 75 bp, synthetic construct
  source 1..75: mol_type = other DNA
cgtccggtgccagaactgccggaaaaatatcgtccgaaaaaactcgtgaatagtatgccggacaggcagatctgt

SEQ ID NO: 274152 - DNA, 75 bp, synthetic construct
  source 1..75: mol_type = other DNA
gctgagaagaaagcggctgctgaaaaggctgcagctgataagaaagcggcagcagagaaagcggcagccgacaaa

SEQ ID NO: 274153 - DNA, 75 bp, synthetic construct
  source 1..75: mol_type = other DNA
gcagacgagttgggtttaaccacttccgccattagctacaccattaagcgtatggaaacggggctggatgtggtg

SEQ ID NO: 274154 - DNA, 75 bp, synthetic construct
  source 1..75: mol_type = other DNA
tataccttgctggataatggcaaccatagctggagtctcacagagaatcgcgtacaaatgcccccttcaaccacg

SEQ ID NO: 274155 - DNA, 75 bp, synthetic construct
  source 1..75: mol_type = other DNA
atcccgaacgacagcgcgctgaacggtaaaaatgtctggctgggcgatatttcccgggcagttgcgcaccctgag

SEQ ID NO: 274156 - DNA, 75 bp, synthetic construct
  source 1..75: mol_type = other DNA
cgctgcgacagcaccggttgctgccagcggtccgaaacgcgtagttgcggtgactgcttgcccgactggcgtagc

SEQ ID NO: 274157 - DNA, 75 bp, synthetic construct
  source 1..75: mol_type = other DNA
cgccgcaaggcggtccactgtctccgctgttggccaatgtgttgttggacgaagtagatcgggcgctgcaacagc

SEQ ID NO: 274158 - DNA, 75 bp, synthetic construct
  source 1..75: mol_type = other DNA
cgcacagacgccgctgtatgcagccatcaacagcacgcagtgtgtggtgcacgtcagcgacagaccgggagactg

SEQ ID NO: 274159 - DNA, 75 bp, synthetic construct
  source 1..75: mol_type = other DNA
acgcgctcaacgcgcgcctccccaatacggatagcggcagaaaaagtaccgcgctgctgctcagcgccgccagcg

SEQ ID NO: 274160 - DNA, 75 bp, synthetic construct
  source 1..75: mol_type = other DNA
ggggaaggttcgcttaagctggcaaaacgaagccttttcccgcggtcagatgcgcgttgaagcccgtcatcctgc

SEQ ID NO: 274161 - DNA, 75 bp, synthetic construct
  source 1..75: mol_type = other DNA
aaattcggccaccaatggatgcttgcattgccagcgcggacaataaaacgattgcccgacaaatgaacaaaacag

SEQ ID NO: 274162 - DNA, 75 bp, synthetic construct
  source 1..75: mol_type = other DNA
ctggtcgtcggatcgaaaaaggagagtgggcaaaaaacagtgttcggcactggcgcacacgcaaagatcctctgg

SEQ ID NO: 274163 - DNA, 75 bp, synthetic construct
  source 1..75: mol_type = other DNA
ggttgaacgttacaacctagcgcagcagcccatgagctttgttcagaatgagaaagcgaaagcatttctcgaagc

SEQ ID NO: 274164 - DNA, 75 bp, synthetic construct
  source 1..75: mol_type = other DNA
gggcgattcgtcagggctggcccaaattctcacagtggcttgatgccgtgattcagcgtatcgaaatgtacaacg

SEQ ID NO: 274165 - DNA, 75 bp, synthetic construct
  source 1..75: mol_type = other DNA
ttatatcccgcgctcggtgttggttgactatctcaaaactctgatggctttccatctggcactatatcatctcaa

SEQ ID NO: 274166 - DNA, 75 bp, synthetic construct
  source 1..75: mol_type = other DNA
cgattagaccaacaggttacgcaggatatgaaggattccaaggagcccgcacgtttccaacctctgtgtatcggg

SEQ ID NO: 274167 - DNA, 75 bp, synthetic construct
  source 1..75: mol_type = other DNA
ttttcggcccgctggttcttccgctacaggatctcgacgcccgcgaaggtgagttattcctcaccaccgctcagt

SEQ ID NO: 274168 - DNA, 75 bp, synthetic construct
  source 1..75: mol_type = other DNA
aatcaggccctgctccaactttacgctgccggcgtcgctctaccgtgggccgacctactggcgggcgatggacaa

SEQ ID NO: 274169 - DNA, 75 bp, synthetic construct
  source 1..75: mol_type = other DNA
taacaaagaggcgagcgttgtcctcaatcaggccctgctccaactttacgctgccggcgtcgctctaccgtgggc

SEQ ID NO: 274170 - DNA, 75 bp, synthetic construct
  source 1..75: mol_type = other DNA
tgtttatcgtaacgactacgaccagacccacacgccgatgttccatcagatggaaggcctgattgttgataccaa

SEQ ID NO: 274171 - DNA, 75 bp, synthetic construct
  source 1..75: mol_type = other DNA
atcagggcacgctgatctttgtttctcacgaccgtgagtttgtaagctccctggcgacccgtattctggaaatca

SEQ ID NO: 274172 - DNA, 75 bp, synthetic construct
  source 1..75: mol_type = other DNA
caggttgcacgaaaaattgaagctgccgccaataaaccccgtaactggcttgatatcgatcgctcgctttctcag

SEQ ID NO: 274173 - DNA, 75 bp, synthetic construct
  source 1..75: mol_type = other DNA
cgccattgaatggaacgtggcgattaacgacagtgatattttgatctccgaccatgtcatcgagcgcatcaactg

SEQ ID NO: 274174 - DNA, 75 bp, synthetic construct
  source 1..75: mol_type = other DNA
attgaaaacggcgggctgcatccggtgacccgtaccatcgaccgtatcgaaagtttcttcggtgagcttggcttt

SEQ ID NO: 274175 - DNA, 75 bp, synthetic construct
  source 1..75: mol_type = other DNA
catccgaacgtgttgcgtaacgttggcatcgacccggaagtttactctggtttcgccttcgggatggggatggag

SEQ ID NO: 274176 - DNA, 75 bp, synthetic construct
  source 1..75: mol_type = other DNA
gcgacattaccaatcattggacgtctgatgaacatcagtcaggctatgattataccacttttcccggtttatgat

SEQ ID NO: 274177 - DNA, 75 bp, synthetic construct
  source 1..75: mol_type = other DNA
cttacgataataactacccggaagaccaggcagtgaaaaactttgtcgtggcgaatatcacgggatcggattgtc

SEQ ID NO: 274178 - DNA, 75 bp, synthetic construct
  source 1..75: mol_type = other DNA
cttaatatagatcttactctagatttttggcaggatttagaaaaaaacctaaaaataattataggaaatagaggt

SEQ ID NO: 274179 - DNA, 75 bp, synthetic construct
  source 1..75: mol_type = other DNA
gtggatgtcacctttgaagatgaaaagggtgataaacacaccgtgacgctggagaacggtgataacggctggaca

SEQ ID NO: 274180 - DNA, 75 bp, synthetic construct
  source 1..75: mol_type = other DNA
agaactgaaggctgagaataacggttctgtttctgttgtcttgccgggtgacgccaataaaggcgacaccgtgga

SEQ ID NO: 274181 - DNA, 75 bp, synthetic construct
  source 1..75: mol_type = other DNA
atggtgtgcagacggaagtcacggtaccgaaaggcagtgctgaaggtgataccctgacgctgacggtcaccaaac

SEQ ID NO: 274182 - DNA, 75 bp, synthetic construct
  source 1..75: mol_type = other DNA
aagatcttcttttaaaatcagaagaagacgagaaaaagcgacaagaaaaagatcgagaattaatttcaaaagttc

SEQ ID NO: 274183 - DNA, 75 bp, synthetic construct
  source 1..75: mol_type = other DNA
gtggatgtcacctttgaagatgaaaagggtgttaaacacaccgtgacgctggagaacggagataacggctggaca

SEQ ID NO: 274184 - DNA, 75 bp, synthetic construct
  source 1..75: mol_type = other DNA
gtggatgtcacctttgaagatgaaaagggtgataatcacaccgtgacgctggagaacggagataacggctggaca

SEQ ID NO: 274185 - DNA, 75 bp, synthetic construct
  source 1..75: mol_type = other DNA
gtcaccggagatgaggttactgccggtaaggtatccatggatattcctgaggatgctgttgttgacggtcagaac

SEQ ID NO: 274186 - DNA, 75 bp, synthetic construct
  source 1..75: mol_type = other DNA
ctgttgagccatggaaccatgctccagaaaaaattgaatctaatgaaaccgtacgaacttcaatcaatttacaga

SEQ ID NO: 274187 - DNA, 75 bp, synthetic construct
  source 1..75: mol_type = other DNA
ggttataagtctatttgcaataaaatatgcgctagacgcatcaaagattaatataaccaataacatattcccata

SEQ ID NO: 274188 - DNA, 75 bp, synthetic construct
  source 1..75: mol_type = other DNA
caacggcaacaactgttaaagcaactgcgttagatggtattgagcatacttatacgttatacagcagtgtaagtg

SEQ ID NO: 274189 - DNA, 75 bp, synthetic construct
  source 1..75: mol_type = other DNA
cggtatttaatattgttggggaagatggacaggtcaccgaagccgtactgactcaggatggcccggtgctggatg

SEQ ID NO: 274190 - DNA, 75 bp, synthetic construct
  source 1..75: mol_type = other DNA
gaagatggtaaagcgaatgtaaccattccggcggataaagtggcaactgacggtgagtattccgtgacagcggaa

SEQ ID NO: 274191 - DNA, 75 bp, synthetic construct
  source 1..75: mol_type = other DNA
accgcttttaccctcaaaacaggccaacatttggtgaattattagatcataatgttgacgacaaatatattttga

SEQ ID NO: 274192 - DNA, 75 bp, synthetic construct
  source 1..75: mol_type = other DNA
cctcggtgcaggatcgcgcggcgattctgtttaagattgccgatcgaatggaacaaaaccttgagctgttagcga

SEQ ID NO: 274193 - DNA, 75 bp, synthetic construct
  source 1..75: mol_type = other DNA
tataagatggggcgcggcattcaggcagggcgcgtgtggaccaactgttatcacgcttacccggcacatgcggcg

SEQ ID NO: 274194 - DNA, 75 bp, synthetic construct
  source 1..75: mol_type = other DNA
gcgaaacccataagatgatgctggagcattatcagcaaaccaagtgcttgctggtgagctactcggataaaccat

SEQ ID NO: 274195 - DNA, 75 bp, synthetic construct
  source 1..75: mol_type = other DNA
ttaggtgctggtgatgatctaatggtcattcgtggtaacatgctggctaatacaagagtatatactggtgagggt

SEQ ID NO: 274196 - DNA, 75 bp, synthetic construct
  source 1..75: mol_type = other DNA
tggtaaagaaacaacatcgtatagtaatgttgctaactcacaggataatgggccagacggaacaaaaaccgatgg

SEQ ID NO: 274197 - DNA, 75 bp, synthetic construct
  source 1..75: mol_type = other DNA
gtaatgccatttcattacgtaatctggacggtgattttacactgaaatattcactatcatcttctatcgccgaaa

SEQ ID NO: 274198 - DNA, 75 bp, synthetic construct
  source 1..75: mol_type = other DNA
gtatttgaagctgttgccagacttctggaaccctatatcctcaaagctgtttctgctgatgctggtaagactggg

SEQ ID NO: 274199 - DNA, 75 bp, synthetic construct
  source 1..75: mol_type = other DNA
atagtgaagggagcgggaactatagaaagtttttaaagagtgagcagaagaatatcttattaatttttatgggtt

SEQ ID NO: 274200 - DNA, 75 bp, synthetic construct
  source 1..75: mol_type = other DNA
taactacgccaaaaagcacgcagctaagggtaacggattcggttttggcctcgttaatcctgaaaataaagaaag

SEQ ID NO: 274201 - DNA, 75 bp, synthetic construct
  source 1..75: mol_type = other DNA
tagcgcctgccgacggcgagtattaccagaacctgacgccggtgaccgggcagctactgtgcgaagtggcgtctt

SEQ ID NO: 274202 - DNA, 75 bp, synthetic construct
  source 1..75: mol_type = other DNA
taatagaccgtggctgggatatggctgctggggaagtagatttttcgaatgttgaaaaccaagctcgccgcccac

SEQ ID NO: 274203 - DNA, 75 bp, synthetic construct
  source 1..75: mol_type = other DNA
ggctgacacacctgcaggacggtgtacttctggatgagcaaaactgcctgatgctgcatgaactctggctgcaga

SEQ ID NO: 274204 - DNA, 75 bp, synthetic construct
  source 1..75: mol_type = other DNA
gttgtttctggccggaagtgccggacttctgcaaaccactgaagatgtgcggtttgaaccatgccccggactgag

SEQ ID NO: 274205 - DNA, 75 bp, synthetic construct
  source 1..75: mol_type = other DNA
actgctggatgagcaaaactgcctgatgctgcataaactctggctgcagagcggtactggacagtgtcgctggga

SEQ ID NO: 274206 - DNA, 75 bp, synthetic construct
  source 1..75: mol_type = other DNA
aaaaagttcagaagagcatgtcagtggacgcgatgggcacaatcatttcagtgctggaagcgtccaaaaaactgg

SEQ ID NO: 274207 - DNA, 75 bp, synthetic construct
  source 1..75: mol_type = other DNA
tgccgccctcaatcagcaacgtgcagccattcgccagttaacccagcagcagaaaggcgagcagacacagcttaa

SEQ ID NO: 274208 - DNA, 75 bp, synthetic construct
  source 1..75: mol_type = other DNA
ggggatgatgcgcagaaacttgccaacaacctgccagaactgcgccgccagatagaactgacgcagggcgcagcc

SEQ ID NO: 274209 - DNA, 75 bp, synthetic construct
  source 1..75: mol_type = other DNA
ctggcgcgagcgtgcgatggctgtctgaacggtgaatttgctgcgctgatcacaggccccgtgcataaaggcgtc

SEQ ID NO: 274210 - DNA, 75 bp, synthetic construct
  source 1..75: mol_type = other DNA
atcattcccgttctcgacgaactgcggacgcaggggatgaaactcaacgggccgttgccggcagataccctgttt

SEQ ID NO: 274211 - DNA, 75 bp, synthetic construct
  source 1..75: mol_type = other DNA
tgaacggtgaatttgctgcgctgatcacaggccccgtgcataaaggcgtcattaacgacgcaggcattccgttta

SEQ ID NO: 274212 - DNA, 75 bp, synthetic construct
  source 1..75: mol_type = other DNA
ccccagtctggggtctgattgccctgtttgctggcgtcgctattgcgatcatccagttctggcaacctatcaagg

SEQ ID NO: 274213 - DNA, 75 bp, synthetic construct
  source 1..75: mol_type = other DNA
tccagctttgaccggctgaccgcagccaataagaagaccaccgatcaactggctcaggcaaagacgcaggcgcgt

SEQ ID NO: 274214 - DNA, 75 bp, synthetic construct
  source 1..75: mol_type = other DNA
ccggtcgaactggttgtttgtgccgatgccttttttacttctccttaccgaccgggcctagcgatgctcggtttg

SEQ ID NO: 274215 - DNA, 75 bp, synthetic construct
  source 1..75: mol_type = other DNA
agaaagtccagaaaagcatgtcagtggacgcgatgggcacgatcatttcagtgctggaagcgtccaaaaaacttg

SEQ ID NO: 274216 - DNA, 75 bp, synthetic construct
  source 1..75: mol_type = other DNA
ccggctgaacgatccggcagctattaaccgtaagcgtcgtctcagcaccgtctggcagatcctgaaattcctgag

SEQ ID NO: 274217 - DNA, 75 bp, synthetic construct
  source 1..75: mol_type = other DNA
aaagatgtcgtaaccggcaaggatatcgccgggctgaaaactgagcttgagcagaaaaaaattaagtttgattac

SEQ ID NO: 274218 - DNA, 75 bp, synthetic construct
  source 1..75: mol_type = other DNA
tttgatcgccataacttaccactccaacgcattgcaatttgaacgtcagatgtatgtctggaccccgccaggata

SEQ ID NO: 274219 - DNA, 75 bp, synthetic construct
  source 1..75: mol_type = other DNA
gccggtcctggcgacggtggtgaccctgcgcactatctggatgttctacatgtttgctgatgtttatctgctgac

SEQ ID NO: 274220 - DNA, 75 bp, synthetic construct
  source 1..75: mol_type = other DNA
gcgcgttcgctggtgatcctctcctacgtaacgccgtccatttcgctggtgttcgcctggaaatacatgttcaac

SEQ ID NO: 274221 - DNA, 75 bp, synthetic construct
  source 1..75: mol_type = other DNA
gctgtacgaagcggcagagatggatggcgctaatgcctggcaacggtttcgcatcgtcacgctgcccgcgattat

SEQ ID NO: 274222 - DNA, 75 bp, synthetic construct
  source 1..75: mol_type = other DNA
agaaacatcaacaacgaatggagcagttgcgcgacgtgacgcaatggcaaaaaagttcatcgttgaagctattga

SEQ ID NO: 274223 - DNA, 75 bp, synthetic construct
  source 1..75: mol_type = other DNA
ccggagcagcaagcggttttaaacgagaaacatcaacaacgaatggagcagttgcgcgacgtgacgcaatggcaa

SEQ ID NO: 274224 - DNA, 75 bp, synthetic construct
  source 1..75: mol_type = other DNA
ggcgatgatgcgcagaaacttgcgaacaacctgcccgaactacgccgccagatagaactgacgcagggcgcagcc

SEQ ID NO: 274225 - DNA, 75 bp, synthetic construct
  source 1..75: mol_type = other DNA
tgaatgaagacaattgtaaaataagaagagggaacgccgctgaattattttcagggagacggtacatcgctatta

SEQ ID NO: 274226 - DNA, 75 bp, synthetic construct
  source 1..75: mol_type = other DNA
aaatccgtcttcatattgtttgcgatgtccctgatgaacttattgatttcacgtttgaatggaaaggactgaaga

SEQ ID NO: 274227 - DNA, 75 bp, synthetic construct
  source 1..75: mol_type = other DNA
atcggcataggccttgcgggaagcacttatgataacaactacccggaagaccaggcagtgaaaaactttgtcgtg

SEQ ID NO: 274228 - DNA, 75 bp, synthetic construct
  source 1..75: mol_type = other DNA
tgtacagcagtggagaaggatgagagaccagcagttcattaacagggactcctttttgcttaagcggctcaatgg

SEQ ID NO: 274229 - DNA, 75 bp, synthetic construct
  source 1..75: mol_type = other DNA
gcagaagccgatgatgcagggttgctgggacgattttcagtcgatatgaaggttgctcagtggcgatggctgtat

SEQ ID NO: 274230 - DNA, 75 bp, synthetic construct
  source 1..75: mol_type = other DNA
atgctcatcgcagatcctgataatggcttcattgtatctgctatgggacgagaagggcttgaacttcttctggat

SEQ ID NO: 274231 - DNA, 75 bp, synthetic construct
  source 1..75: mol_type = other DNA
tgtcaccgcagaacgggagccattcagatgatatggccgggagcaatgacaatgatttgtcagttgcagcatttg

SEQ ID NO: 274232 - DNA, 75 bp, synthetic construct
  source 1..75: mol_type = other DNA
caaaaattacgcgctggtaaacagcgtagaagagttagggccgtcagttgtcactgagctatctcgtatcattct

SEQ ID NO: 274233 - DNA, 75 bp, synthetic construct
  source 1..75: mol_type = other DNA
taccaatgcactcaccagtcgaccgctaccgtatggtgccagaaggcagaaaactctttgaactgaaaatcgaaa

SEQ ID NO: 274234 - DNA, 75 bp, synthetic construct
  source 1..75: mol_type = other DNA
tggagaaaaaaacaaaatgattctgtactgcgtaaacaatctgccgtttggatacagcaatcccctaagtgttat

SEQ ID NO: 274235 - DNA, 75 bp, synthetic construct
  source 1..75: mol_type = other DNA
gcaagcgaagcggtgaaagacgctgctctgagctgcgaccagttcttcgtgaaccatcgttggctgggcggtatg

SEQ ID NO: 274236 - DNA, 75 bp, synthetic construct
  source 1..75: mol_type = other DNA
tgctcaaggctggtgttcacttcggtcaccagacccgttactggaatccgaaaatgaagccgttcatcttcggtg

SEQ ID NO: 274237 - DNA, 75 bp, synthetic construct
  source 1..75: mol_type = other DNA
aagacaagaacggcaccattgatatccctaacgataacggaactacagatcgcgcagttatttataaggggaagc

SEQ ID NO: 274238 - DNA, 75 bp, synthetic construct
  source 1..75: mol_type = other DNA
gcgcaagccgacgaagcaggattactgggtaaacttccggttgagatgaaggttgctcagtggcgatggttgtat

SEQ ID NO: 274239 - DNA, 75 bp, synthetic construct
  source 1..75: mol_type = other DNA
cgaagggcttgaactccttctggatgaaatgattcacgatctgaatactcatggtatgccagaagcgccagtgac

SEQ ID NO: 274240 - DNA, 75 bp, synthetic construct
  source 1..75: mol_type = other DNA
atataattccgtttgtatttcaggatctatccactttaactaatgttatacctatagcaatattgttaacggtaa

SEQ ID NO: 274241 - DNA, 75 bp, synthetic construct
  source 1..75: mol_type = other DNA
gccagtggcggcctccccgggacaccgacagggttcagtgaactggacgcgatgacctgtggtctccagcctggc

SEQ ID NO: 274242 - DNA, 75 bp, synthetic construct
  source 1..75: mol_type = other DNA
tatgcgggcattgtggtggagaaaagcgttctgcgtcagttacaggccaccggaaacaccctgattgctgatgtg

SEQ ID NO: 274243 - DNA, 75 bp, synthetic construct
  source 1..75: mol_type = other DNA
gtgaacaaggccccctctttaattgccgctatcgtcctcggactggggattagcgcctgtggttattttgttggc

SEQ ID NO: 274244 - DNA, 75 bp, synthetic construct
  source 1..75: mol_type = other DNA
tatcttcattggcaggtagcaataatggttttgagtctgttactgtttcaggaacaacaatacagctaccaaatg

SEQ ID NO: 274245 - DNA, 75 bp, synthetic construct
  source 1..75: mol_type = other DNA
atctaatatggaaagagttgcggattatattgacaaccttaataaagagttaatcagacaggtgacagttaatgt

SEQ ID NO: 274246 - DNA, 75 bp, synthetic construct
  source 1..75: mol_type = other DNA
ggccacgtgcgcgcactcgtgcggtttttgtaccaagacccaaagcaggcaatttttcaacaccagctcagcctg

SEQ ID NO: 274247 - DNA, 75 bp, synthetic construct
  source 1..75: mol_type = other DNA
ggaaattgcggaaatatcccgcgcgcttaaggcgttaggtaaagagctgggatgcccggtactggcactgtctca

SEQ ID NO: 274248 - DNA, 75 bp, synthetic construct
  source 1..75: mol_type = other DNA
ctgttcttgaatccgctgaacgtcggctcttttcactttcacagactggcatgttgcatgagcgatgtgaagtca

SEQ ID NO: 274249 - DNA, 75 bp, synthetic construct
  source 1..75: mol_type = other DNA
atgtcagagctggcaaccagcggtcagccgttcgacctcatcacgctgagtgagcatattgagaaaacaaacaat

SEQ ID NO: 274250 - DNA, 75 bp, synthetic construct
  source 1..75: mol_type = other DNA
attgaaacgcagactgacattgatttgatggcaattggcatcatgactgacgcaccggagagattttactcaaat

SEQ ID NO: 274251 - DNA, 75 bp, synthetic construct
  source 1..75: mol_type = other DNA
ttcatgtgtccaacaaaatgagagaaaaaggacgcgtcccttcctggtcgctatggaatgccttagaagacgtgt

SEQ ID NO: 274252 - DNA, 75 bp, synthetic construct
  source 1..75: mol_type = other DNA
atcatgagacaccctcatcgttagataatcacaaatctattaaatcagagtcacatagtaagcacaaacatgata

SEQ ID NO: 274253 - DNA, 75 bp, synthetic construct
  source 1..75: mol_type = other DNA
tcagtgcgcaactgaataatctgcaggacacggcaacgtctgccttaagcgatatcagtaaaacggtgggagggc

SEQ ID NO: 274254 - DNA, 75 bp, synthetic construct
  source 1..75: mol_type = other DNA
caatatgcaatgctggaagcgataattgaattcttacgcgaggagtgctgcgtaaatagcaaaacacatggcgaa

SEQ ID NO: 274255 - DNA, 75 bp, synthetic construct
  source 1..75: mol_type = other DNA
caggttgttgttgattacgccgtcgcttttccggcacacggtcagcaccggaccagcaacgagctgcgtaaacag

SEQ ID NO: 274256 - DNA, 75 bp, synthetic construct
  source 1..75: mol_type = other DNA
ctgaataatttgcaggacacggcaacgtctgccttaagtgatatcagtaaaacggtgggagggctgctgtcgtga

SEQ ID NO: 274257 - DNA, 75 bp, synthetic construct
  source 1..75: mol_type = other DNA
actaaaacggagttcttccgcgacggtatgccgcgcaggattgagttcaccctgtcgctaaaacgcgtggatgaa

SEQ ID NO: 274258 - DNA, 75 bp, synthetic construct
  source 1..75: mol_type = other DNA
atgatgatggtgctgggattgtacgtgtttatgctgcgcaccgtgccgtatcaggaactgcagtatcaacgcagc

SEQ ID NO: 274259 - DNA, 75 bp, synthetic construct
  source 1..75: mol_type = other DNA
atgatgatggtgctgggattgtacgtgtttatgctgcgcaccgtgccatatcaggagctgcagtatcaacgcagc

SEQ ID NO: 274260 - DNA, 75 bp, synthetic construct
  source 1..75: mol_type = other DNA
atacggtttctctgaatcatgtcactacaacagatgtaacagttacagttacattgggtagcggagctgggcatt

SEQ ID NO: 274261 - DNA, 75 bp, synthetic construct
  source 1..75: mol_type = other DNA
aaggatgattccactggactggtttatacggtttctctgaatcatgtcactacaacagatgtaacagttacagtt

SEQ ID NO: 274262 - DNA, 75 bp, synthetic construct
  source 1..75: mol_type = other DNA
tcggtaaacaggcagaatcgctcatcggtaaggctggcagtatggcgactaaattcacggatatgacgggggcgg

SEQ ID NO: 274263 - DNA, 75 bp, synthetic construct
  source 1..75: mol_type = other DNA
tcggtaaacgggatgcctaccagtttctcggtgtgggtgaggaaaacatcacgcttgccggtgtgctttatcccg

SEQ ID NO: 274264 - DNA, 75 bp, synthetic construct
  source 1..75: mol_type = other DNA
actaaaacggagtttttccgcgatggtatgccgcgccggattgagttcaccctgtcgctcaaacgggtggatgaa

SEQ ID NO: 274265 - DNA, 75 bp, synthetic construct
  source 1..75: mol_type = other DNA
gtcgttgctggcactggagcagatggcagaacaggggaaagcatggcctctgattgaaggcagcggcacgattta

SEQ ID NO: 274266 - DNA, 75 bp, synthetic construct
  source 1..75: mol_type = other DNA
atctttttatgcgtaatatcaaagtgatgcaggaatcctctgttggacccgcattgagcatgaacttcgacatgc

SEQ ID NO: 274267 - DNA, 75 bp, synthetic construct
  source 1..75: mol_type = other DNA
aggaggtctagctattggtgctactgataacgcactgggtgaaaactccattgttctgggagataacgacaccgg

SEQ ID NO: 274268 - DNA, 75 bp, synthetic construct
  source 1..75: mol_type = other DNA
ttttggatcatgcacactatatggaattatggaccgggggcggacttgccgcgggaagtgcacgggaaggagtaa

SEQ ID NO: 274269 - DNA, 75 bp, synthetic construct
  source 1..75: mol_type = other DNA
aacgaagctctggctgaactgaacaagattgcttctcgcaaaggtaaaatccttttcgttggtactaaacgcgct

SEQ ID NO: 274270 - DNA, 75 bp, synthetic construct
  source 1..75: mol_type = other DNA
ctgactaactggaaaaccgttcgtcagtccatcaaacgtctgaaagccctggaaactcagtctcaggacggtact

SEQ ID NO: 274271 - DNA, 75 bp, synthetic construct
  source 1..75: mol_type = other DNA
ccgggtaacgacgacgcaatccgtgctgtaaccctgtacctgggcgctgttgctgcaaccgttcgtgaaggccgt

SEQ ID NO: 274272 - DNA, 75 bp, synthetic construct
  source 1..75: mol_type = other DNA
atgacaatcacaaaacaacgggtagaagaaatcatatcgcgtattgaaatgtatgggcatggtgccgggtatacc

SEQ ID NO: 274273 - DNA, 75 bp, synthetic construct
  source 1..75: mol_type = other DNA
agatcctgatggcgattatgtcctgtttgatgacgtggttaagttgtttgagtttgatacattcgaaagcccagc

SEQ ID NO: 274274 - DNA, 75 bp, synthetic construct
  source 1..75: mol_type = other DNA
atgccatttaaaaaactctcccgacgcaacttcctgacggcaagctcggcgcttgccttccttcatacccttagg

SEQ ID NO: 274275 - DNA, 75 bp, synthetic construct
  source 1..75: mol_type = other DNA
atgacgatcacaaaacaacgtgtagaaaaaatcatatatcgccatgaaatgggactgaacagcgatgtcactgcc

SEQ ID NO: 274276 - DNA, 75 bp, synthetic construct
  source 1..75: mol_type = other DNA
aagcctgcagcttctttgctgatgtagaacccgtggcgcgacctctgcgcctgctgggcgaaatcggtctgggat

SEQ ID NO: 274277 - DNA, 75 bp, synthetic construct
  source 1..75: mol_type = other DNA
agagcgacactggatcctgtttactgaagataccccgacggtgccggtctaccccggactcagcccggaagacac

SEQ ID NO: 274278 - DNA, 75 bp, synthetic construct
  source 1..75: mol_type = other DNA
cggtgattcaggcaaaccagggaaaaattaatgtgatgcatagctatcattcgctggggcgggtattacgcgatg

SEQ ID NO: 274279 - DNA, 75 bp, synthetic construct
  source 1..75: mol_type = other DNA
gaaacttgagcttttaaatacagaaattgaaatgcaaaaaatcaagttaaaaagaggagaggtgttaacgagcag

SEQ ID NO: 274280 - DNA, 75 bp, synthetic construct
  source 1..75: mol_type = other DNA
ttgcggatcttcttattattgaggacgaattttatttccgctatcttgaagggcaggatttgcctgtggtgaagg

SEQ ID NO: 274281 - DNA, 75 bp, synthetic construct
  source 1..75: mol_type = other DNA
agccgcaaaatctgtctgctgtatgagctgttccaacctgtaaaccctgtctgtgcggtgtcggtacgtttgcag

SEQ ID NO: 274282 - DNA, 75 bp, synthetic construct
  source 1..75: mol_type = other DNA
cggtgttggagagtccgaactacgggatgctgaatatgccgcactctaccgtgaacaacttccccggctcgacct

SEQ ID NO: 274283 - DNA, 75 bp, synthetic construct
  source 1..75: mol_type = other DNA
cgttgcagcaaccactttccggcctgccccaatgggtctctgaacgcattctgcagcagataaatcagcttactc

SEQ ID NO: 274284 - DNA, 75 bp, synthetic construct
  source 1..75: mol_type = other DNA
atgcccgcgaaaaaggcgaaaaaagcgcagcagagctggaatgagaagtttgccgcctataaaaaggctcatccg

SEQ ID NO: 274285 - DNA, 75 bp, synthetic construct
  source 1..75: mol_type = other DNA
ggataatgttattgaattactgagacgtctggggcttgagcgctttattcgtgtaaaagaggaaataaataaaga

SEQ ID NO: 274286 - DNA, 75 bp, synthetic construct
  source 1..75: mol_type = other DNA
tcgcgctgatcttattcctaatcttgtcgccagtattaaaggttactccagtcatgaaaaaggcgttttggaagc

SEQ ID NO: 274287 - DNA, 75 bp, synthetic construct
  source 1..75: mol_type = other DNA
tattgttgtcattttttgcccgtgcgacagaaccagttcaggtgtttaccgatgatttagggcgcaaagtcacag

SEQ ID NO: 274288 - DNA, 75 bp, synthetic construct
  source 1..75: mol_type = other DNA
tgagagcattcctgaaggtgggcgaatggatgtgagcgcagagcgtttacctgaactggatgccgattttgtttt

SEQ ID NO: 274289 - DNA, 75 bp, synthetic construct
  source 1..75: mol_type = other DNA
ggagcaattgaaggattaaaagctctaaaaatgcgcggaactggtgtatcaatgccgaacaaacaactggcttgt

SEQ ID NO: 274290 - DNA, 75 bp, synthetic construct
  source 1..75: mol_type = other DNA
tgataccagccccggttcggaccatcattcaggctgtacgcgataccgtggtgtcggtcgcccgggccgtctgga

SEQ ID NO: 274291 - DNA, 75 bp, synthetic construct
  source 1..75: mol_type = other DNA
ccagcagaattttatggcaaagcggcacgactgcagttagtcgaaaacgctttgaccgttcaaccgttaaattga

SEQ ID NO: 274292 - DNA, 75 bp, synthetic construct
  source 1..75: mol_type = other DNA
cccccgcaccgcaggctccagcgcaaaatacaacgccggtcacaaaaacgcgtttaattgataccccagtgcgtt

SEQ ID NO: 274293 - DNA, 75 bp, synthetic construct
  source 1..75: mol_type = other DNA
ctcgatagcgtcagtgcctttcccctgataccagccccagtgcgggccgtcattcaggccgtgcgcatcgccgta

SEQ ID NO: 274294 - DNA, 75 bp, synthetic construct
  source 1..75: mol_type = other DNA
ggtaatgacggagaccagacttatgctcgtctcggctttaaaggcgaaacgcagattaatgatcaactgaccgga

SEQ ID NO: 274295 - DNA, 75 bp, synthetic construct
  source 1..75: mol_type = other DNA
caaacatcaaaaacaaaatggcaggaatttatggttgtccgccagagttgctgatatgcccttactggatgacgg

SEQ ID NO: 274296 - DNA, 75 bp, synthetic construct
  source 1..75: mol_type = other DNA
atcgaaaagacggaacggcttagttcaaacatcaaaaacaaaatggcaggaatttatggttgtccgccagagttg

SEQ ID NO: 274297 - DNA, 75 bp, synthetic construct
  source 1..75: mol_type = other DNA
tgataccggctccggtacgggccgtaatacaggccgtccgtgacaccgtggtgtccgttgcccgggctgtctgga

SEQ ID NO: 274298 - DNA, 75 bp, synthetic construct
  source 1..75: mol_type = other DNA
atttttaccatcaggtgattggtgaagcttaccggcataaagtgctgtttgttataagccagtcggacaaggccg

SEQ ID NO: 274299 - DNA, 75 bp, synthetic construct
  source 1..75: mol_type = other DNA
catttcagcagtcgcttgatggtctgccacaatgggtctcagaacgagtcatgcagcaaattcgtcaactgacaa

SEQ ID NO: 274300 - DNA, 75 bp, synthetic construct
  source 1..75: mol_type = other DNA
cattaaaccattcgctttccggcctgccgcagtgggtgtctgaacgtatattgcagcaggtaaatcagttaaccc

SEQ ID NO: 274301 - DNA, 75 bp, synthetic construct
  source 1..75: mol_type = other DNA
cgtttcagcaatcgctttccggcctaccgcagtgggtaacagagcggattctgcaacaaattaaccagttaactg

SEQ ID NO: 274302 - DNA, 75 bp, synthetic construct
  source 1..75: mol_type = other DNA
tgatacccgccccggtgcgggccgtcattcaggccatgcgcaccaccgtggtgtcagtgacccgtgccgtctggg

SEQ ID NO: 274303 - DNA, 75 bp, synthetic construct
  source 1..75: mol_type = other DNA
gattcgttccatgaataaaacctgtgaaaaggcttacgagtatgttgatgctctgagaacgaataaaggaaatta

SEQ ID NO: 274304 - DNA, 75 bp, synthetic construct
  source 1..75: mol_type = other DNA
tttttacgctgtttgtggatggtgaaaacgaagtgggtaacgtgacctccgtcactctgcccaaactgacgcgca

SEQ ID NO: 274305 - DNA, 75 bp, synthetic construct
  source 1..75: mol_type = other DNA
tttttacgttgtttgtggatggtgaaaacgaagtgggtaaagtgacctccgtcactccgcccaaactgacgcgca

SEQ ID NO: 274306 - DNA, 75 bp, synthetic construct
  source 1..75: mol_type = other DNA
tcggtgactctgcttttctggagcaaatcctgattgcagtatcaatgatcaccggcaccggggatttcgagaaga

SEQ ID NO: 274307 - DNA, 75 bp, synthetic construct
  source 1..75: mol_type = other DNA
ctcggcctggacgattccgcgcttgatgcgagttttgtcatgggtggcgccgttcgtgcgctgttccttaaatat

SEQ ID NO: 274308 - DNA, 75 bp, synthetic construct
  source 1..75: mol_type = other DNA
ctgaacttcatttaccggaaggacggcaaggacattgtgcccgatcgcatccgttccgcgcttgggcttggctga

SEQ ID NO: 274309 - DNA, 75 bp, synthetic construct
  source 1..75: mol_type = other DNA
tctatacaaatagtatccccaacatatacggtaaaagatatcgatactgaaactttaactaattcagtaaagaga

SEQ ID NO: 274310 - DNA, 75 bp, synthetic construct
  source 1..75: mol_type = other DNA
ttgcattccaggctgttatcaaagctggtcagtatgcttaccgtgaccgtcgtcaacgtaagcgtcagttccgtc

SEQ ID NO: 274311 - DNA, 75 bp, synthetic construct
  source 1..75: mol_type = other DNA
gcgcaggtggaatgcaaacagtagatatatcgctaataaatgcccatgtcatgggtacaggagcccggagattct

SEQ ID NO: 274312 - DNA, 75 bp, synthetic construct
  source 1..75: mol_type = other DNA
tttttacgatgtttgtggatggtgaaaacgaagtgggtaatgtgacctccgtcactccgcccaaactgacgcgca

SEQ ID NO: 274313 - DNA, 75 bp, synthetic construct
  source 1..75: mol_type = other DNA
gatgccaggctctgcgtcggtggatctcggtcttgatgatggtgcactggatctctcctttgcggttggtggcgt

SEQ ID NO: 274314 - DNA, 75 bp, synthetic construct
  source 1..75: mol_type = other DNA
agaaaaggttttatataaacaaaatcaagattaattttcttgcttttttatttcgtaagaaaatcaatcatcaag

SEQ ID NO: 274315 - DNA, 75 bp, synthetic construct
  source 1..75: mol_type = other DNA
gtctttcagggcgcaaagcaaatcaacctccagcaagtgctggtaggttggattctatatgcctgtttcttcggc

SEQ ID NO: 274316 - DNA, 75 bp, synthetic construct
  source 1..75: mol_type = other DNA
gtcgatatgccacgaatggaaaaaataatggcggctgctggtccgctggccgtcacttttcatcgtgccttcgat

SEQ ID NO: 274317 - DNA, 75 bp, synthetic construct
  source 1..75: mol_type = other DNA
acagcatggagtgcgcgctgaccgcgcaacaaaacggcgcagacagaattgaattatgcgcagccccaaaagaag

SEQ ID NO: 274318 - DNA, 75 bp, synthetic construct
  source 1..75: mol_type = other DNA
aattgagcctgggcgcgacgccgaaacaggcgtctgcaatattgattcgtgacagtatccgtgcggcattaattc

SEQ ID NO: 274319 - DNA, 75 bp, synthetic construct
  source 1..75: mol_type = other DNA
cagaagtattaaatcaatatcaacgtcgcaccgatcttattcctaatcttgtcgctagtattaaaggttactcca

SEQ ID NO: 274320 - DNA, 75 bp, synthetic construct
  source 1..75: mol_type = other DNA
gtgtaaaagaggaaataaataaagatgccattctgaatgaaaaagaggccgtaaaaaatattcccggtattacca

SEQ ID NO: 274321 - DNA, 75 bp, synthetic construct
  source 1..75: mol_type = other DNA
aacgtatcaaggccgcagcagcactctgggtgccggggacacgtgaagaggtcattgagggcatcagactgctcg

SEQ ID NO: 274322 - DNA, 75 bp, synthetic construct
  source 1..75: mol_type = other DNA
gcaggacgttatcaggacctccaggattatggctctgcattgatggtcaaccaggctattcagcaacggaacaca

SEQ ID NO: 274323 - DNA, 75 bp, synthetic construct
  source 1..75: mol_type = other DNA
cgtcaactggagacaacgctctaacgaagctgaccgattcgcttcaagcgatgggtgccacaactacgtcatcaa

SEQ ID NO: 274324 - DNA, 75 bp, synthetic construct
  source 1..75: mol_type = other DNA
attcgggaatgcacgttaaccaaagtcgatctcaacctaatgtcccttgatgagttgatgaaccgttcaactgac

SEQ ID NO: 274325 - DNA, 75 bp, synthetic construct
  source 1..75: mol_type = other DNA
gagatcaaaattgatgatgtcgccgccgctgctggaacggtgggctatgaattgatgtgcgcactggcgttacgc

SEQ ID NO: 274326 - DNA, 75 bp, synthetic construct
  source 1..75: mol_type = other DNA
tgtttatgctgagtcttttgatacaaacgaaggccgcatgaaccaggcaattcagaatctgaaaatggaatatgc

SEQ ID NO: 274327 - DNA, 75 bp, synthetic construct
  source 1..75: mol_type = other DNA
gagatgtctagcctcagtgctggtggtctcaactccatgtacgctctttcctcaactggagatgttctgcaacac

SEQ ID NO: 274328 - DNA, 75 bp, synthetic construct
  source 1..75: mol_type = other DNA
aactagaaaatgtctgctatgacatccgcggtccagtgctaaaagaagcaaaacgcctggaagaagaaggtaaca

SEQ ID NO: 274329 - DNA, 75 bp, synthetic construct
  source 1..75: mol_type = other DNA
tacgcaacctcccgacagctcagggctattgcgattccaaaggcctttattccgcgcgtaaagccatcatgcagc

SEQ ID NO: 274330 - DNA, 75 bp, synthetic construct
  source 1..75: mol_type = other DNA
tgttcccgaaaatcgacgccaaacgctttaatattcacgacgatcagaaaatggtgctggatttcctgttgcagg

SEQ ID NO: 274331 - DNA, 75 bp, synthetic construct
  source 1..75: mol_type = other DNA
atgaataccgcattatccccggtgtcaacgcagcctgaactctttccactgattatggccccgcatggttatttg

SEQ ID NO: 274332 - DNA, 75 bp, synthetic construct
  source 1..75: mol_type = other DNA
gctgtttctgggcaccatcaacactatcacagtgcatccgcgtgaaatcgttaaggcgggcctgaagcacaatgc

SEQ ID NO: 274333 - DNA, 75 bp, synthetic construct
  source 1..75: mol_type = other DNA
aacctcattatcttcgctgatgaaatttacgataaaatcctctacgacgacgccgagcatcactcgatcgcgccg

SEQ ID NO: 274334 - DNA, 75 bp, synthetic construct
  source 1..75: mol_type = other DNA
gagttttcttactgggaagatagccgtcggcgaattgatttattggcaatcgataaacaggcaaatttagtggtt

SEQ ID NO: 274335 - DNA, 75 bp, synthetic construct
  source 1..75: mol_type = other DNA
tgacggtcgttcgctgggtgagctggtcaaagaagagatggggccaaccgccggggtgatagcgctggtggcctg

SEQ ID NO: 274336 - DNA, 75 bp, synthetic construct
  source 1..75: mol_type = other DNA
aagaaattcgtcgaaaaagaagtgagctagctggtgagatgtctcattgtgagtggaagagatatgctgaagtgc

SEQ ID NO: 274337 - DNA, 75 bp, synthetic construct
  source 1..75: mol_type = other DNA
cagtgaacacctcttatgtaccattcaacggtcagcaaattatcaccgccatggctgccggagttgcatatgttg

SEQ ID NO: 274338 - DNA, 75 bp, synthetic construct
  source 1..75: mol_type = other DNA
ctcatagagcattgttaatctctgataacactcctcccgtcatcatttcttcaacaaataaatctgcggctttta

SEQ ID NO: 274339 - DNA, 75 bp, synthetic construct
  source 1..75: mol_type = other DNA
ttctaatatacagttaccaactcaggtaaaagaattgcttttccaatgtttagatacgaatccttgtgagagacc

SEQ ID NO: 274340 - DNA, 75 bp, synthetic construct
  source 1..75: mol_type = other DNA
actggagagtgaaacgctatttgccggttcggttaaccatgtccaggtccatccccgtgaggtggtgaagtcagc

SEQ ID NO: 274341 - DNA, 75 bp, synthetic construct
  source 1..75: mol_type = other DNA
agggcgtttttatctccggcagtggtgtccgttctgtctggttacgccataaccttgagaatttcaaaaaacgtc

SEQ ID NO: 274342 - DNA, 75 bp, synthetic construct
  source 1..75: mol_type = other DNA
tgataaaataactgagtctgaatggtgggactatgatgtgatcagctttgctggattagattataaagatccaat

SEQ ID NO: 274343 - DNA, 75 bp, synthetic construct
  source 1..75: mol_type = other DNA
ataaccattggaaatggggcaatcattgcctctaatacaacggtaactaaagatgtacctccatatgcggttgta

SEQ ID NO: 274344 - DNA, 75 bp, synthetic construct
  source 1..75: mol_type = other DNA
caggacagagaaacgctgttctactataacgtacgggaaattccgcctcgcactaaagaacagaatgtgatgcaa

SEQ ID NO: 274345 - DNA, 75 bp, synthetic construct
  source 1..75: mol_type = other DNA
atgcttcgaataaaagcgcaacggttcgcctgaccaaccaaagtaaaatcgatccctatctggctcagtcgtgga

SEQ ID NO: 274346 - DNA, 75 bp, synthetic construct
  source 1..75: mol_type = other DNA
tccgagtgaataatattcaactggataacacccatcttgcttacaaattgcgcggtatccaaatctccgccggga

SEQ ID NO: 274347 - DNA, 75 bp, synthetic construct
  source 1..75: mol_type = other DNA
aggcggcttatcactctatactggcccggtgatcaccaggtaccgctatacccaatatgactccagcgatgcagg

SEQ ID NO: 274348 - DNA, 75 bp, synthetic construct
  source 1..75: mol_type = other DNA
cggcaatttttagcgcattacccgtttatgccgggttaacttccattaccgcgggctacgattttaccgattatt

SEQ ID NO: 274349 - DNA, 75 bp, synthetic construct
  source 1..75: mol_type = other DNA
gaagcgctggcactggttgatgtgaacactctcgatcatctggttatcggttcagatggaattgtgtcgtttgca

SEQ ID NO: 274350 - DNA, 75 bp, synthetic construct
  source 1..75: mol_type = other DNA
attggctctgaaacacaatgccgctgcggtaattctggcgcataaccatccatcaggtacgacagaaatcagtca

SEQ ID NO: 274351 - DNA, 75 bp, synthetic construct
  source 1..75: mol_type = other DNA
aggcggcgtatcactctatactggcccggtgatcaccaggtaccgctatacccattatgactccagcgatgcagg

SEQ ID NO: 274352 - DNA, 75 bp, synthetic construct
  source 1..75: mol_type = other DNA
aggcggcgtatcactctatactggcccggtgatcaccagttaccgctatacccaatatgactccagcgatgcagg

SEQ ID NO: 274353 - DNA, 75 bp, synthetic construct
  source 1..75: mol_type = other DNA
gcttatcgcacatgcgatggtggggactttcctcggcattttattggcttacggatttatttccccattagcgag

SEQ ID NO: 274354 - DNA, 75 bp, synthetic construct
  source 1..75: mol_type = other DNA
attgaaaatccccgtgagagcgagatcttcgccagctacccacgcatccttgcggatagcgtcatgcttgatttt

SEQ ID NO: 274355 - DNA, 75 bp, synthetic construct
  source 1..75: mol_type = other DNA
aagtcccggcgaacagtctggcgctggtcggggactcacttccggcgtttggtattgtcgcggctgtaatggggg

SEQ ID NO: 274356 - DNA, 75 bp, synthetic construct
  source 1..75: mol_type = other DNA
aatttggtcgcaaaacgctctactccagcgagcgcccgtcgttcgtcgaactggaagagcacgttcgtgcagtga

SEQ ID NO: 274357 - DNA, 75 bp, synthetic construct
  source 1..75: mol_type = other DNA
atgtatatggatctgctggctctgctttatcggttgatggcgaaatcgcggcagatggggatgttttcgctggaa

SEQ ID NO: 274358 - DNA, 75 bp, synthetic construct
  source 1..75: mol_type = other DNA
cagtgaacggccatcgtttgttgagctggaagaacacgttcgcgcggtaaaaaatccgcaacagcagacgacaac

SEQ ID NO: 274359 - DNA, 75 bp, synthetic construct
  source 1..75: mol_type = other DNA
ttttgcacactagctgtctataccatctctatcatcatcatgattgccgaacattttgattgttcaggcaatggt

SEQ ID NO: 274360 - DNA, 75 bp, synthetic construct
  source 1..75: mol_type = other DNA
ggttcgatgatttttttgatttgttatttttccactttcagtatgctaatgcttgcacctactgattcatcaaaa

SEQ ID NO: 274361 - DNA, 75 bp, synthetic construct
  source 1..75: mol_type = other DNA
ataccaagtcagatcgtaccgataagcaggttcaggggttgaatggtactgcagatgttcttgatcctgaatcag

SEQ ID NO: 274362 - DNA, 75 bp, synthetic construct
  source 1..75: mol_type = other DNA
aatcgaagccctgatggatgaagagattgagacgcacgaaagcgaggcagaagtcccggcgaacagtctggcgct

SEQ ID NO: 274363 - DNA, 75 bp, synthetic construct
  source 1..75: mol_type = other DNA
cgaacattttgactgttccggtaatggtccgatgatttttttgattttttatttttccacctttggcatgttagt

SEQ ID NO: 274364 - DNA, 75 bp, synthetic construct
  source 1..75: mol_type = other DNA
atgttacgtatgtttatcccaacatctaacggtaagatttccagacgtcgttatatattttcatttattttaata

SEQ ID NO: 274365 - DNA, 75 bp, synthetic construct
  source 1..75: mol_type = other DNA
aatttgtacttggtggcgcagggcttgtcatgttcggcatggtgctggcgacagggatccgtattctgtcgcgtt

SEQ ID NO: 274366 - DNA, 75 bp, synthetic construct
  source 1..75: mol_type = other DNA
tctgattgttacaagccatgtgagtgcaggcgcagagctgatcgccgatggtaatattcatgtctatggcatgat

SEQ ID NO: 274367 - DNA, 75 bp, synthetic construct
  source 1..75: mol_type = other DNA
cgaaactgaaagctgaaatcgaaaaaatggggttgccaatcctgactgaaggaaaggaaaaagcgccgcgtccag

SEQ ID NO: 274368 - DNA, 75 bp, synthetic construct
  source 1..75: mol_type = other DNA
ggcatcctgcctgacggtatttttaaacgttatggcgatgtggtcgaactgaaggccgaaaagattgatgacgat

SEQ ID NO: 274369 - DNA, 75 bp, synthetic construct
  source 1..75: mol_type = other DNA
aagaaattagtcaaaaattgaagtggctttctgggtatatggatgaatgtgaatgggatatatacattgatatgc

SEQ ID NO: 274370 - DNA, 75 bp, synthetic construct
  source 1..75: mol_type = other DNA
ctggttatacgcaactatggctaagccgcggaacaggggcttacagctatgactggatgccagagacacgctacg

SEQ ID NO: 274371 - DNA, 75 bp, synthetic construct
  source 1..75: mol_type = other DNA
cctttgtgccatctgtctcggaaataaaaactttatgttcttcggcggcgagcgcagtgcactgttgtatgggct

SEQ ID NO: 274372 - DNA, 75 bp, synthetic construct
  source 1..75: mol_type = other DNA
tgtattctctgatgtaaataacagcacaaataatgcagcataccttgaacctaaagctggtgataccagtgctgg

SEQ ID NO: 274373 - DNA, 75 bp, synthetic construct
  source 1..75: mol_type = other DNA
tgggctggtgatgttcggcatggtactggcgacagggattcgaattctgtcgcgctgtaactacaccaccaaccg

SEQ ID NO: 274374 - DNA, 75 bp, synthetic construct
  source 1..75: mol_type = other DNA
cgtctctgataaagatttaaaagtcaggacagtacgtatgtggcttctgatgcgcaagctgaagaaaaatgagca

SEQ ID NO: 274375 - DNA, 75 bp, synthetic construct
  source 1..75: mol_type = other DNA
gtgtctgatggctgggtggataacagcaagggcagcgatggcgacgccaccgttctggtgcgttgcggcaaagcc

SEQ ID NO: 274376 - DNA, 75 bp, synthetic construct
  source 1..75: mol_type = other DNA
tattctgacagcctctttgattataaaaaatgaggggggctacgctatcaactggcaagattttgatcttaagat

SEQ ID NO: 274377 - DNA, 75 bp, synthetic construct
  source 1..75: mol_type = other DNA
aaaccatctgccgccgtttacgcgcagcccagagcgatgaagagctgtatcaaatcattacggataccgaaggtg

SEQ ID NO: 274378 - DNA, 75 bp, synthetic construct
  source 1..75: mol_type = other DNA
gacgttcattaacagcatcgtagacagcgaacatgtcgatcctgccatcgtcagtcgaaataatacggcctggcg

SEQ ID NO: 274379 - DNA, 75 bp, synthetic construct
  source 1..75: mol_type = other DNA
gtaacccgctggcggaaccgacgacgttgggcgttgcaacaggcgcgcaactggggattaccgtcaccacgctct

SEQ ID NO: 274380 - DNA, 75 bp, synthetic construct
  source 1..75: mol_type = other DNA
ccgctggctgaccattttaccgctgggtggtgataccgcacgagccgtggggatggcgctgacgccgacgcgaat

SEQ ID NO: 274381 - DNA, 75 bp, synthetic construct
  source 1..75: mol_type = other DNA
cggcgttattgctggcgctgttagtgattgtcgctacggcgctcacctggatgaacttctcgcaggcgctgccgc

SEQ ID NO: 274382 - DNA, 75 bp, synthetic construct
  source 1..75: mol_type = other DNA
gtgggcgcgggtctggggctggtgggcgtgctgtttcagcaagtgctgcgtaacccgctggcggagccgacgacg

SEQ ID NO: 274383 - DNA, 75 bp, synthetic construct
  source 1..75: mol_type = other DNA
gcttggcgttgctacaggcgcgcaactgggaattaccgtcaccacactttgggcgatcccaggtgctatggcgag

SEQ ID NO: 274384 - DNA, 75 bp, synthetic construct
  source 1..75: mol_type = other DNA
gtgagtaaacgaattgcgcttttcccggcgttattactggcgctgctggtgattgccgctgcggcgttgacctgg

SEQ ID NO: 274385 - DNA, 75 bp, synthetic construct
  source 1..75: mol_type = other DNA
aagctgcccagcgcgcccggcaagccgctgctggtgggcgtaaatttgagctcatacttgatacgcaggaaatgg

SEQ ID NO: 274386 - DNA, 75 bp, synthetic construct
  source 1..75: mol_type = other DNA
agcgatgttgcccgatagccaacatggttttgctccggtgattcatggtatagcccgtggcacagcccaagtcag

SEQ ID NO: 274387 - DNA, 75 bp, synthetic construct
  source 1..75: mol_type = other DNA
tgtcaaacgatttgaaaggcggcatgaccaacctatcaggggtttatggcactctgctgccggataataacctga

SEQ ID NO: 274388 - DNA, 75 bp, synthetic construct
  source 1..75: mol_type = other DNA
ttcgtccgttaaccctgatggggcttgatgatggcgtggcgcgcaatctcgggctggccttatcgctcgcgcgtc

SEQ ID NO: 274389 - DNA, 75 bp, synthetic construct
  source 1..75: mol_type = other DNA
ttcctgtggagcaccggaacgctgacgcaaaccgactggggcggcgttgagcgtttatggccgcagctgctgggc

SEQ ID NO: 274390 - DNA, 75 bp, synthetic construct
  source 1..75: mol_type = other DNA
cagatgatttttcactacagcttgttgccgcgtctggcgatttcgctgctggtgggcgcaggcctggggctggtg

SEQ ID NO: 274391 - DNA, 75 bp, synthetic construct
  source 1..75: mol_type = other DNA
gattttatcaaaaagaaatctatttatgagaaacttaatagtaaaagctcttttgatttaacaaaagatgtttgt

SEQ ID NO: 274392 - DNA, 75 bp, synthetic construct
  source 1..75: mol_type = other DNA
aaatataggttgcccggcatctcctactggttggttaactacaggaagtaatggcggagcaataacaacagccca

SEQ ID NO: 274393 - DNA, 75 bp, synthetic construct
  source 1..75: mol_type = other DNA
acattaatacattggtatctcgtggccgagttacggcgttaagcggctctactcaaggcactgctggcattcaaa

SEQ ID NO: 274394 - DNA, 75 bp, synthetic construct
  source 1..75: mol_type = other DNA
acgagtgtctctggtgctctcactaatgcggagtttatctatgtatttaatggcacagattattctccgggatgg

SEQ ID NO: 274395 - DNA, 75 bp, synthetic construct
  source 1..75: mol_type = other DNA
gctgctggcgacaaagctcgtgaggcggcggccagtgctgccgcagcagcagaaagcgccaataccgctggagaa

SEQ ID NO: 274396 - DNA, 75 bp, synthetic construct
  source 1..75: mol_type = other DNA
tgggcttacgccaacaataattatatagacgacactggttgcggtaggatcgatctatctggttccgtgattgag

SEQ ID NO: 274397 - DNA, 75 bp, synthetic construct
  source 1..75: mol_type = other DNA
cagccaatgacaatgcgaatagcagggtgccatctaaccgaaaagttaacggaaaagcactgactgcggatatca

SEQ ID NO: 274398 - DNA, 75 bp, synthetic construct
  source 1..75: mol_type = other DNA
tggttgtggcattattccactggcgggtgctgtgatagaagtattcagcaataataccaacaattacaccattcg

SEQ ID NO: 274399 - DNA, 75 bp, synthetic construct
  source 1..75: mol_type = other DNA
aagcgggttgctttcccgcacagataaaaacaggtgtgagagcaatcgcctttattgaaagtgaggtggatgcgt

SEQ ID NO: 274400 - DNA, 75 bp, synthetic construct
  source 1..75: mol_type = other DNA
aatagcatttattgaaagtgagattgatgaatggattgaagctattattcgaaactcacgccagaacgttgcata

SEQ ID NO: 274401 - DNA, 75 bp, synthetic construct
  source 1..75: mol_type = other DNA
tacactttttcagcgcctgcaaatgcagtaagcggtaagtggtatcctatagtctttcgccgatctggaggcagt

SEQ ID NO: 274402 - DNA, 75 bp, synthetic construct
  source 1..75: mol_type = other DNA
tacaaaacttcagacggcaagaactatcggcggcgtgagctttgatggtactgcgaatattaatttgccaggtgt

SEQ ID NO: 274403 - DNA, 75 bp, synthetic construct
  source 1..75: mol_type = other DNA
tttcaaaatatgcaaatggtttccgcattgcttacggtaactttgggttctttatccgtaatgatggggcgaaca

SEQ ID NO: 274404 - DNA, 75 bp, synthetic construct
  source 1..75: mol_type = other DNA
cgaattacgcagccgcgatggcgggatcattggcgaagcgacgctcgattttatctcccagttccgccttgattt

SEQ ID NO: 274405 - DNA, 75 bp, synthetic construct
  source 1..75: mol_type = other DNA
aagtggcggagcaaatccccaatggctcgacgctgtttatcgatatcggcaccacgccggaagcggtggcgcacg

SEQ ID NO: 274406 - DNA, 75 bp, synthetic construct
  source 1..75: mol_type = other DNA
taaatgatgacagggattttagaacattaatgagggaaactgatgatccagatatacttgagttattgtcaacgg

SEQ ID NO: 274407 - DNA, 75 bp, synthetic construct
  source 1..75: mol_type = other DNA
ttagacaggcaggtgaaggtcttcatccgtagatacgaaagcgagcatggtagctacgaagttccgcttccgcag

SEQ ID NO: 274408 - DNA, 75 bp, synthetic construct
  source 1..75: mol_type = other DNA
gcgcgtttgacagctatctgctgctgcgcgggttgcgaacgctggtgccgcgaatggagctggcgcagcgcaacg

SEQ ID NO: 274409 - DNA, 75 bp, synthetic construct
  source 1..75: mol_type = other DNA
atttccgcattattctcgccggtggtgaattgcgtagccgcgatggcgggatcattggcgaagcgaccctggatt

SEQ ID NO: 274410 - DNA, 75 bp, synthetic construct
  source 1..75: mol_type = other DNA
attttcgcattattctcgccggtggcgaattacgtagccgcgatggtgggatcataggcgaagcgacgctcgatt

SEQ ID NO: 274411 - DNA, 75 bp, synthetic construct
  source 1..75: mol_type = other DNA
gatctcccgcctgatggggttcttactggtttgtatgggtgtgcagtttattattaacggcatcctggaaattat

SEQ ID NO: 274412 - DNA, 75 bp, synthetic construct
  source 1..75: mol_type = other DNA
agagttatttagatatctttctgatatggggaaagatataaattctgtcctgaatgatgacagggattttagaac

SEQ ID NO: 274413 - DNA, 75 bp, synthetic construct
  source 1..75: mol_type = other DNA
gatgcggtttataccgacacgatgccgccagcaggcgtgatgcaggtgctaacggaccaccatattcaactggag

SEQ ID NO: 274414 - DNA, 75 bp, synthetic construct
  source 1..75: mol_type = other DNA
gtattattgaactggttaaacagcagggttatgtcagtaccgaggaactggtagaacacttctctgtcagcccgc

SEQ ID NO: 274415 - DNA, 75 bp, synthetic construct
  source 1..75: mol_type = other DNA
ggggccaccgatggctttgcattacttaacctggaagaggcaataacgttacgtgagcgcggctggaaaggaccg

SEQ ID NO: 274416 - DNA, 75 bp, synthetic construct
  source 1..75: mol_type = other DNA
ggtaggtgatagttataccgatggcgatatttttgatagtgtgaactttcgtggcctcaaaataaattcaacaga

SEQ ID NO: 274417 - DNA, 75 bp, synthetic construct
  source 1..75: mol_type = other DNA
tgcatctggtgtgcgtaagctggagattgtgcttgatgctcaggaaattgaaatgcttgagcgtaactgtgccgc

SEQ ID NO: 274418 - DNA, 75 bp, synthetic construct
  source 1..75: mol_type = other DNA
attgtgcttgatgctcaggaaattgaaatgctggagcgtaactgtgccacgcgtcgccccgggcgtgcgccttac

SEQ ID NO: 274419 - DNA, 75 bp, synthetic construct
  source 1..75: mol_type = other DNA
caggccttcaaccttggtattggtaaagatttgggactgtttggtgccttttctttcgatatcacgcaagccaat

SEQ ID NO: 274420 - DNA, 75 bp, synthetic construct
  source 1..75: mol_type = other DNA
tgcattattagacaataaggaacattcggcagaaaaacatgtgtcggacaacagcgcatgcacaccacttcggga

SEQ ID NO: 274421 - DNA, 75 bp, synthetic construct
  source 1..75: mol_type = other DNA
ctcctaccggagacaccaatgagcagacacaatttattgattattttaatctgttctacagtaagcgtggtcagg

SEQ ID NO: 274422 - DNA, 75 bp, synthetic construct
  source 1..75: mol_type = other DNA
gagtttggtgagtacatcgcgttactgagccgccaggatgatgcacgtgtgcgctggcgtataaaatcgatcagc

SEQ ID NO: 274423 - DNA, 75 bp, synthetic construct
  source 1..75: mol_type = other DNA
acactgcatcggggaaaagtgatttttttgataccggccacatggagattatctctgcatatatatccccctgtt

SEQ ID NO: 274424 - DNA, 75 bp, synthetic construct
  source 1..75: mol_type = other DNA
cacagattcacccacgttgactttgacacacaatcggggaaaagtgattttattgatacctgccattcggagatc

SEQ ID NO: 274425 - DNA, 75 bp, synthetic construct
  source 1..75: mol_type = other DNA
cgccgccggtgagcgcaaaattgaactggtgctggataagcaggagcaggaaatgctggagcgtaactgtgccgc

SEQ ID NO: 274426 - DNA, 75 bp, synthetic construct
  source 1..75: mol_type = other DNA
gacatgaacgagtacatcgcgttgcttatccgccaggacgatgcgcgagtgcgtggccgtatcaagtcaatcagt

SEQ ID NO: 274427 - DNA, 75 bp, synthetic construct
  source 1..75: mol_type = other DNA
acgtcgccccgggcgtgcgccttacgaatttggtgagtatatagcgttactgatccgccaggatgatgcacgcgt

SEQ ID NO: 274428 - DNA, 75 bp, synthetic construct
  source 1..75: mol_type = other DNA
aaggcgatgaagtggaaatccgcagggtcatacgtcacaaccgccgcattcatgacgagctgccgctggtggcag

SEQ ID NO: 274429 - DNA, 75 bp, synthetic construct
  source 1..75: mol_type = other DNA
attatcagttgaataatgacaactttgcaccaggaaaaacggcggctgattattcgttttcaagctcggcctcct

SEQ ID NO: 274430 - DNA, 75 bp, synthetic construct
  source 1..75: mol_type = other DNA
cgattaccagtctggagatacctgaaggtcaggtaatggtcgcacaagacgtagcagttaaagctcacgttaacg

SEQ ID NO: 274431 - DNA, 75 bp, synthetic construct
  source 1..75: mol_type = other DNA
ccatgaccgcattttcgcgagataaatccaataatctgcgcaagctgtgtaaaatgatcagagcctggaagaacc

SEQ ID NO: 274432 - DNA, 75 bp, synthetic construct
  source 1..75: mol_type = other DNA
ccctcgatcccaacgagcgcattggtaagctgcgtcaggatcagtttgcctttgaagagttcactgtgctggata

SEQ ID NO: 274433 - DNA, 75 bp, synthetic construct
  source 1..75: mol_type = other DNA
tccctccattttggagcgctatgacttaggcaacaactgggagcgcgacgaagaggggggattccgcaacactgg

SEQ ID NO: 274434 - DNA, 75 bp, synthetic construct
  source 1..75: mol_type = other DNA
cccgcgcttttgtgatgcgtgactggattttgagtacgtcagtcggtgttttccatcgtaatgacaacggtggcg

SEQ ID NO: 274435 - DNA, 75 bp, synthetic construct
  source 1..75: mol_type = other DNA
caacccggtagaaggcataaaagttaatttccgcggaacctccgtcacgctaagcagcaccagcgttgaaacgga

SEQ ID NO: 274436 - DNA, 75 bp, synthetic construct
  source 1..75: mol_type = other DNA
atcggtcctcactgaaaggggactttaccgatagtgctgagctacatcttgttttgcacgatatatcaggcaatc

SEQ ID NO: 274437 - DNA, 75 bp, synthetic construct
  source 1..75: mol_type = other DNA
agaaacgcgccagcattcgttacagcggagatgttacttgtagtgtggtgacttattcacaattaccggagtcga

SEQ ID NO: 274438 - DNA, 75 bp, synthetic construct
  source 1..75: mol_type = other DNA
gggaatcgtgaattaatgttgttgcctggcaagctgcgctatcgcgaagtgtctgccagctttaactacaactat

SEQ ID NO: 274439 - DNA, 75 bp, synthetic construct
  source 1..75: mol_type = other DNA
taatttgggagccagtggtacagacgatttgctgggtgcggtactggtggatgtgaaaggcttctctgaacagga

SEQ ID NO: 274440 - DNA, 75 bp, synthetic construct
  source 1..75: mol_type = other DNA
agccctcgccagagacttttttgaatatctgtcaaatgaggagagaaaggaaaggtatctcgcgttaggcagtaa

SEQ ID NO: 274441 - DNA, 75 bp, synthetic construct
  source 1..75: mol_type = other DNA
ttgggaagaaatgacctgcttattcgcaccttccctaacgttacgcgtggcgctatctactggcacttcgaaaac

SEQ ID NO: 274442 - DNA, 75 bp, synthetic construct
  source 1..75: mol_type = other DNA
accgaacgctcgccgtcggagtatcgtcggcagtaccacagccaactgacagaaaaaccgactactccagaataa

SEQ ID NO: 274443 - DNA, 75 bp, synthetic construct
  source 1..75: mol_type = other DNA
tgggatggcaaacaatatcaaaatctggcgaagcaacacgtcgcccgacgcggcccacgtataggttcttttctg

SEQ ID NO: 274444 - DNA, 75 bp, synthetic construct
  source 1..75: mol_type = other DNA
gtcactgcccggcgaactggccgataccttcgggtttacgggatggcaggcaacaacaatactgcgtcaaatcca

SEQ ID NO: 274445 - DNA, 75 bp, synthetic construct
  source 1..75: mol_type = other DNA
gctttaatccgcagactctccgcgaagtattgcaggcatgtcagcaactagactggccccctgaatctccagaca

SEQ ID NO: 274446 - DNA, 75 bp, synthetic construct
  source 1..75: mol_type = other DNA
gtgatgattattattgatggtgccttcagcggaattgttcaaaactggttaatgaatatggcgggttatgatctt

SEQ ID NO: 274447 - DNA, 75 bp, synthetic construct
  source 1..75: mol_type = other DNA
cgcctgcggctttgtcgacagcaactacttctgccgtctgtttcgtaaaaacaccgaacgctcgccgtcggaata

SEQ ID NO: 274448 - DNA, 75 bp, synthetic construct
  source 1..75: mol_type = other DNA
ggaattttccacaatggcaagcccccgccaccacctttagcgtgctgtttggcaaacagcaactcggcttcagcg

SEQ ID NO: 274449 - DNA, 75 bp, synthetic construct
  source 1..75: mol_type = other DNA
cgaatcccgtatgatgcgccaactatcaagcaacatggtatgtcttaacatcaaacttgctcaatatattattgg

SEQ ID NO: 274450 - DNA, 75 bp, synthetic construct
  source 1..75: mol_type = other DNA
ccaggcactattcgaagctattcgcgattatatcgacgaacgctatgcctccgcgcttacccgcgaatctgtcgc

SEQ ID NO: 274451 - DNA, 75 bp, synthetic construct
  source 1..75: mol_type = other DNA
gcccgatcttgcgtatcaggtcgattttccacggctggaaattgtgctggaaggtgagtttgttgataccggcgc

SEQ ID NO: 274452 - DNA, 75 bp, synthetic construct
  source 1..75: mol_type = other DNA
gattatatcgacgaacgctatgcctccgcgcttacccgcgaatctgtcgcacaggcattctatatttcgccaaat

SEQ ID NO: 274453 - DNA, 75 bp, synthetic construct
  source 1..75: mol_type = other DNA
gacgggcggcgcgtttgacagctatctgctgctacgtgggttgcgaacgctggtgccgcgtatggagctggcgca

SEQ ID NO: 274454 - DNA, 75 bp, synthetic construct
  source 1..75: mol_type = other DNA
tgctgattctctctgggtcgattgaatttatcccgatgcaggtgatccctatcgccgggatgatagccggtaacg

SEQ ID NO: 274455 - DNA, 75 bp, synthetic construct
  source 1..75: mol_type = other DNA
tggcttagtgagtttaccgggaatgatgtccgggctgatatttgccgggattgatccggtgaaggcgattaaata

SEQ ID NO: 274456 - DNA, 75 bp, synthetic construct
  source 1..75: mol_type = other DNA
gaatcaggtggtttgtagggcgccggataaagatctcgctcatctgactgcagaagcagtattaaaaaaaaccaa

SEQ ID NO: 274457 - DNA, 75 bp, synthetic construct
  source 1..75: mol_type = other DNA
gaatcagatggtttgtagggctccgctaaagagtttaaataatttagaagcagcggctgtttataaagaaattac

SEQ ID NO: 274458 - DNA, 75 bp, synthetic construct
  source 1..75: mol_type = other DNA
cgtcgatgggcgatgttctccatacgttgcccgcactcactgatgcccagcaggcaatcccagggattaagtttg

SEQ ID NO: 274459 - DNA, 75 bp, synthetic construct
  source 1..75: mol_type = other DNA
tacgatccgtataacaacggccacaacgacgagtgtctctggtgctctcactaatgcggagtttatctatgtatt

SEQ ID NO: 274460 - DNA, 75 bp, synthetic construct
  source 1..75: mol_type = other DNA
ctgcggatatcacattaacgccgaaagatattggtactttaaattcagtaacgatgtctttctctggcggggcag

SEQ ID NO: 274461 - DNA, 75 bp, synthetic construct
  source 1..75: mol_type = other DNA
atttcctcaaatggtatggtcgctgaaggggtgatgtatgagcgtttggttgtaccactcattcatcatattcag

SEQ ID NO: 274462 - DNA, 75 bp, synthetic construct
  source 1..75: mol_type = other DNA
atttcatgctaacagcatcaggagatacgttaggttcatggaacagtttgcgaccgattataattaataatagca

SEQ ID NO: 274463 - DNA, 75 bp, synthetic construct
  source 1..75: mol_type = other DNA
tacagctgtcggattaacgaatttcgcctggatcaacacatccggcgatacatatgatatttacgttgaaattgg

SEQ ID NO: 274464 - DNA, 75 bp, synthetic construct
  source 1..75: mol_type = other DNA
taatacgactggtaatcagaatacaacgggcaacgcggctactgctacgaagttgcaaaccgcaagaaccatcaa

SEQ ID NO: 274465 - DNA, 75 bp, synthetic construct
  source 1..75: mol_type = other DNA
agtatgtctcttgcagatttgccagctcaaaccgtttttcaaaatttaaatcttgaaataataaccaataagttg

SEQ ID NO: 274466 - DNA, 75 bp, synthetic construct
  source 1..75: mol_type = other DNA
aacgcagtatcgatactatttcgcagggcatagaagcgcgtgtgcgcatttgtattaatcagctgctttatacgc

SEQ ID NO: 274467 - DNA, 75 bp, synthetic construct
  source 1..75: mol_type = other DNA
ttttttccgcaaagctaccgacctgctgaatgatttttatgccatcaaacgtagcatcgatactatttcgcaggg

SEQ ID NO: 274468 - DNA, 75 bp, synthetic construct
  source 1..75: mol_type = other DNA
ttttttgccggattacatggttcgcgaagcgatggcgcaatcactgctggttacccgccaaattcataacccgcg

SEQ ID NO: 274469 - DNA, 75 bp, synthetic construct
  source 1..75: mol_type = other DNA
ctgttcactcgcagtacccgcagcattgagttaaccgagtccgggcgttattttttccgcaaagctaccgacctg

SEQ ID NO: 274470 - DNA, 75 bp, synthetic construct
  source 1..75: mol_type = other DNA
ataacggcgtctgggatgcgattatcaataaccaggcgaatatcgccatcggcgcgcccgatacgctgctggacg

SEQ ID NO: 274471 - DNA, 75 bp, synthetic construct
  source 1..75: mol_type = other DNA
aacacaccgcgcgcttattacaggtgctgaaaaagcagtttcctacctgccagattaccgtcaccaccgaagtgt

SEQ ID NO: 274472 - DNA, 75 bp, synthetic construct
  source 1..75: mol_type = other DNA
ttaacagcggtgaccgatcaaaacggaatcgcgacaacaagcgtgaaaggagcgataacggggagcgtcactgta

SEQ ID NO: 274473 - DNA, 75 bp, synthetic construct
  source 1..75: mol_type = other DNA
ctatcgccgccaccaacactgatttaagtaccttaaaggcaacggttgaggatggcagtggtaacctgatcgaag

SEQ ID NO: 274474 - DNA, 75 bp, synthetic construct
  source 1..75: mol_type = other DNA
atgcaaagacgggattcagggccaaccagcagtctttttgaacgtattcgtgaggcggccaacccgccttcatac

SEQ ID NO: 274475 - DNA, 75 bp, synthetic construct
  source 1..75: mol_type = other DNA
tggcgcaattcgctgggcttttgctatcgccccggatcacccattagcctttgtgccggaacccatcgccgaaag

SEQ ID NO: 274476 - DNA, 75 bp, synthetic construct
  source 1..75: mol_type = other DNA
tcagttacgtctctatcccaatatcatggtggaagacaccgcacatacgattaataaaaaagtgggctggttgct

SEQ ID NO: 274477 - DNA, 75 bp, synthetic construct
  source 1..75: mol_type = other DNA
ggcgcgcccgatacgctactggacggtggcggtattgattacaccgagattggtgcgattcgctgggcctttgcc

SEQ ID NO: 274478 - DNA, 75 bp, synthetic construct
  source 1..75: mol_type = other DNA
tgaacggtgaatttgccgcgctgatcaccgggccggtgcataaaggcgtcattaacgacgccggtattccgttta

SEQ ID NO: 274479 - DNA, 75 bp, synthetic construct
  source 1..75: mol_type = other DNA
taccgccagttaacggcacagtaaccggacggcgtaccggaagcggcactggatgaagtcatggccacgctgacc

SEQ ID NO: 274480 - DNA, 75 bp, synthetic construct
  source 1..75: mol_type = other DNA
ttcatagcctggacgaactgaacgcgctggcggtgaaatggcgcagccactttaacgccacagcggtccacagcc

SEQ ID NO: 274481 - DNA, 75 bp, synthetic construct
  source 1..75: mol_type = other DNA
atttcttggggatgacgcaggaagaagcgcgagcatgggaaaagcatgttgagcgtgagtttagattatgggctg

SEQ ID NO: 274482 - DNA, 75 bp, synthetic construct
  source 1..75: mol_type = other DNA
aagttccggccggttcacagtctggaagaactcaaagcgctggccgcgaaatggcgcagccactttaacgccacg

SEQ ID NO: 274483 - DNA, 75 bp, synthetic construct
  source 1..75: mol_type = other DNA
tgcacccggaacaactggatgcccctgcaccacatactgaagtggccagtctgcatcccaatcatgtctggcaga

SEQ ID NO: 274484 - DNA, 75 bp, synthetic construct
  source 1..75: mol_type = other DNA
taccgccagttaacggcacagtagccggacggcgtaccggaagcagcactggatgaagtcatggccacgctgacc

SEQ ID NO: 274485 - DNA, 75 bp, synthetic construct
  source 1..75: mol_type = other DNA
tggcaggagatgaccggacccatgaaaggtgcatgtgtgggcgcatgtctgttcgaaggctgggcgaaagatgaa

SEQ ID NO: 274486 - DNA, 75 bp, synthetic construct
  source 1..75: mol_type = other DNA
tgccctcgtcggcctgcaacccgcgatgctcgacgactacggcggtagcctgagcgaactggctcgggagcaact

SEQ ID NO: 274487 - DNA, 75 bp, synthetic construct
  source 1..75: mol_type = other DNA
tgccgcaaccggctaatgaatcgcgctgtctcaattatgactgtctgtcgatggaaaattacgaaggcgttcgct

SEQ ID NO: 274488 - DNA, 75 bp, synthetic construct
  source 1..75: mol_type = other DNA
catctggtggaagaagttcgtaagaatgaatacggctttgcccaggatgctgcggtactgggccagaaccataag

SEQ ID NO: 274489 - DNA, 75 bp, synthetic construct
  source 1..75: mol_type = other DNA
ctgaatatgatgtgtcgtcggtgccgggtgtgatggtgggtgagaaactgatgatcacccgcaatccgtggcgca

SEQ ID NO: 274490 - DNA, 75 bp, synthetic construct
  source 1..75: mol_type = other DNA
ttggcttccttgccaataccgcgccagaaggggtacaggtgtccaccgacatcgccagctacttaagcttcgtta

SEQ ID NO: 274491 - DNA, 75 bp, synthetic construct
  source 1..75: mol_type = other DNA
tactgctgagcagctgaaaaaagcgccttccgttgaggtatgtcgtgaactggctgtggcggcaccagaactccg

SEQ ID NO: 274492 - DNA, 75 bp, synthetic construct
  source 1..75: mol_type = other DNA
gcatgaaggactgtccccgcgggtgacttacggaaagggcgcagaggcgttctccctggtatggacagagaaggg

SEQ ID NO: 274493 - DNA, 75 bp, synthetic construct
  source 1..75: mol_type = other DNA
ctggctgaagattactgctgaccagttgaaaaaagcgccttccgttgaggtatgccgtgaactggctgtggcggc

SEQ ID NO: 274494 - DNA, 75 bp, synthetic construct
  source 1..75: mol_type = other DNA
gatgcagctgctgcacgcaaggcgaaggcgctgccgttcggcgggcggcttgacccgtataaacatattgatgac

SEQ ID NO: 274495 - DNA, 75 bp, synthetic construct
  source 1..75: mol_type = other DNA
gtgcagcaggaaaccaaactaccactcaatttcttttacgttgtggtgcaaccggtggtagttataacttccgct

SEQ ID NO: 274496 - DNA, 75 bp, synthetic construct
  source 1..75: mol_type = other DNA
atggttataaaaaaggttggtttgggagaagcggcaaaacggaatgtgggcaacggggaaaaccaaatccctgat

SEQ ID NO: 274497 - DNA, 75 bp, synthetic construct
  source 1..75: mol_type = other DNA
accattgacgttgtggtgcatatggaaaagcggaaaatcaaagaaatttattttgaccctgaatataaaatgcag

SEQ ID NO: 274498 - DNA, 75 bp, synthetic construct
  source 1..75: mol_type = other DNA
gtgactgataaacgcaaaaaacgcgctgatgccggccgcagcgccctgacccgcgacgaagccgcgctgatatct

SEQ ID NO: 274499 - DNA, 75 bp, synthetic construct
  source 1..75: mol_type = other DNA
gcactggatgaagtcatggccacgctgaccacgccggctcgcagcagcgttatcagcattgttaacggcaactga

SEQ ID NO: 274500 - DNA, 75 bp, synthetic construct
  source 1..75: mol_type = other DNA
cggtgaaaaactgatgattacccgtaacccgtggcgcagcgatgtggcacaggtggttctgaccggtgaggacgg

SEQ ID NO: 274501 - DNA, 75 bp, synthetic construct
  source 1..75: mol_type = other DNA
accggaactccgtaaggtcacaccaaaactgcgcgtctcgttccggggcaatgagtttgacgtttcgacggtacc

SEQ ID NO: 274502 - DNA, 75 bp, synthetic construct
  source 1..75: mol_type = other DNA
aaaccaccctgaccacgccggagggacgagaggggctttctccccgggtctgttacggaaagggcactgagggtt

SEQ ID NO: 274503 - DNA, 75 bp, synthetic construct
  source 1..75: mol_type = other DNA
tgcacccggaacaactggatgcacctgcaccgcataccgaagtggccagtctgcaccccaatcatgtctggcaga

SEQ ID NO: 274504 - DNA, 75 bp, synthetic construct
  source 1..75: mol_type = other DNA
gcacagattactgctctccgtcagcagaatgcaaaactgcaggagagtcagaaaggctcagccgatgcgttagct

SEQ ID NO: 274505 - DNA, 75 bp, synthetic construct
  source 1..75: mol_type = other DNA
gagctggaaaaaacaactgacgttatttttcctgaaaatatatccgcgatcctctccgagtctgaaaagacccgc

SEQ ID NO: 274506 - DNA, 75 bp, synthetic construct
  source 1..75: mol_type = other DNA
cgaacgcaaagtcatcagcaagttaagcccccgaagttacctaaaaagaagcctgatcccgataaaaaagattga

SEQ ID NO: 274507 - DNA, 75 bp, synthetic construct
  source 1..75: mol_type = other DNA
cattattgataaggtgaaggatgaggtatgcaatacggttaaatcgaagattaatgagaagtgggggagcctgac

SEQ ID NO: 274508 - DNA, 75 bp, synthetic construct
  source 1..75: mol_type = other DNA
tttaatatgtttgagaaaaaacttgacgggacacctgtcaaaaataccatgaatgcatctgttttatacaaaaaa

SEQ ID NO: 274509 - DNA, 75 bp, synthetic construct
  source 1..75: mol_type = other DNA
gctgtcctattcgttaggaacatactatttgcaaaaggccatgatggattcgaaggaactggaaatcaatggact

SEQ ID NO: 274510 - DNA, 75 bp, synthetic construct
  source 1..75: mol_type = other DNA
gcctgcacaaccgcgaacagataaaacagcacccggagtggtttcctggtccgctcaaggcgaacgaccgacgct

SEQ ID NO: 274511 - DNA, 75 bp, synthetic construct
  source 1..75: mol_type = other DNA
ctccacggccttccggctggctggacaatatatggtggaacgcaactggcggatcgttatcgtgcttttaatttc

SEQ ID NO: 274512 - DNA, 75 bp, synthetic construct
  source 1..75: mol_type = other DNA
ccgtaccctattcgtcagtcccgcttttgcaacgtgaagggcatactcgttattccattacggcaggagaatacc

SEQ ID NO: 274513 - DNA, 75 bp, synthetic construct
  source 1..75: mol_type = other DNA
agtagtaaagtacaatggaaaattgtaactgattacggtggggttagtgagttttttgaaactgatataaattta

SEQ ID NO: 274514 - DNA, 75 bp, synthetic construct
  source 1..75: mol_type = other DNA
ctagacatacaagtttctgttaaaagttgcattaaattatttgtccgtccgaaaatggtgaaaggtcatccagat

SEQ ID NO: 274515 - DNA, 75 bp, synthetic construct
  source 1..75: mol_type = other DNA
ttctgcgcctgggcgtgttttctttgtccctttggcttcctatatttgccaacgccactcccacatcacacacct

SEQ ID NO: 274516 - DNA, 75 bp, synthetic construct
  source 1..75: mol_type = other DNA
ataatgccctcctctgttgcttgaaaaaatatccttcatttgggtttgcatggaatagattaggcgtatatttac

SEQ ID NO: 274517 - DNA, 75 bp, synthetic construct
  source 1..75: mol_type = other DNA
gatgcggcaattgtcgggcgtcatgccggaaccaccttgatggtggcgcgttatgcggtcaacaccttgaaagaa

SEQ ID NO: 274518 - DNA, 75 bp, synthetic construct
  source 1..75: mol_type = other DNA
gcgggccagatgctgaaaaaagaaggcgtcacgctgatggttgaagctattcacgccagcccgggcagtgagttt

SEQ ID NO: 274519 - DNA, 75 bp, synthetic construct
  source 1..75: mol_type = other DNA
ggtgattctgaactccatcttccgccgcgccagcgcgtatcaggattatggctattacgaatataagtcggatgc

SEQ ID NO: 274520 - DNA, 75 bp, synthetic construct
  source 1..75: mol_type = other DNA
gccgtcgcctcaccgaaactttgcaaaaaccgctacagatccgccacggcacgccagatgcgcgtctgctggctg

SEQ ID NO: 274521 - DNA, 75 bp, synthetic construct
  source 1..75: mol_type = other DNA
aaatctcgatgtgtatacatgaatatactctaaataagtcaagttgcaggaagggaacaaataatgaatttccag

SEQ ID NO: 274522 - DNA, 75 bp, synthetic construct
  source 1..75: mol_type = other DNA
tcacgccagcccgggcagtgagtttaccgtcaccaaatactctacgttggggatgattaatcaactgcaaaacag

SEQ ID NO: 274523 - DNA, 75 bp, synthetic construct
  source 1..75: mol_type = other DNA
ctggttatccctaatgtcattctgatgatcatcattgagaaactgttaaaaggaaattatctctcccagtccacc

SEQ ID NO: 274524 - DNA, 75 bp, synthetic construct
  source 1..75: mol_type = other DNA
atctggactgacagtatcagtaccggaaagttggcggccggggcggatgcctgttttgcccggcacgacataatg

SEQ ID NO: 274525 - DNA, 75 bp, synthetic construct
  source 1..75: mol_type = other DNA
cctggcaacggctgggcattaccccggagccggatgatgagacggagccttcactggtatacgtgcaactgtggg

SEQ ID NO: 274526 - DNA, 75 bp, synthetic construct
  source 1..75: mol_type = other DNA
aaaggatgtagctggtcttctcgcataccttggtttgggagaattatctctggctggcactgcatcgggtgtcat

SEQ ID NO: 274527 - DNA, 75 bp, synthetic construct
  source 1..75: mol_type = other DNA
cgtgctgggcgcgccggactttatcaccgttccgaccattctttactctttccttggctactccttcgtccgccc

SEQ ID NO: 274528 - DNA, 75 bp, synthetic construct
  source 1..75: mol_type = other DNA
gggtggtgacgatttcgctgatcttcttcgtggtcgctaatctgatctggctgggtatgccgttcggcatggcga

SEQ ID NO: 274529 - DNA, 75 bp, synthetic construct
  source 1..75: mol_type = other DNA
tctggatggagtaaggggccggatggggtaattacacaatggggcattttcggtttccccgttggacagacaggg

SEQ ID NO: 274530 - DNA, 75 bp, synthetic construct
  source 1..75: mol_type = other DNA
atgccatttgctcgttatttctgcattttcataaacgttggtttgggagaagcggcaacgaggaacgtcggaacg

SEQ ID NO: 274531 - DNA, 75 bp, synthetic construct
  source 1..75: mol_type = other DNA
acaaccacttcgttttattacggtgcgcagctcaaacgggtagttattactataactggattgctattgggtatt

SEQ ID NO: 274532 - DNA, 75 bp, synthetic construct
  source 1..75: mol_type = other DNA
gggcgatctgaataaaccactgagcaaccaaaatcttattacctggaaagatacgccggtatataacgcgcccga

SEQ ID NO: 274533 - DNA, 75 bp, synthetic construct
  source 1..75: mol_type = other DNA
cgatgtttttgatttccagtcacatacccattttttacatcgggttgatggttatcgacgaccaatattactcag

SEQ ID NO: 274534 - DNA, 75 bp, synthetic construct
  source 1..75: mol_type = other DNA
cactgggtggtgtttggtgtttgcatttatggattgtcaacaagccaggcgttagcgaactttgctggcttcgtg

SEQ ID NO: 274535 - DNA, 75 bp, synthetic construct
  source 1..75: mol_type = other DNA
ttttagttccgacccggttaaatttatatccagagccagtactcctggcctcggcgcttcatttttagcgttagg

SEQ ID NO: 274536 - DNA, 75 bp, synthetic construct
  source 1..75: mol_type = other DNA
aaaggaatgtagggacaggggcgaatcagatacctgatatgggtagcttcacgctttctgtttcaggtactggat

SEQ ID NO: 274537 - DNA, 75 bp, synthetic construct
  source 1..75: mol_type = other DNA
tctggcgttttatcgtgggggcattggtcagccaccaacagccaattccagagaactttctttctcgtggtttgc

SEQ ID NO: 274538 - DNA, 75 bp, synthetic construct
  source 1..75: mol_type = other DNA
caactaactggacgaaaacaggtttcgttgctcattgtaactatggatttgaaggtggagccttctacgcgaaag

SEQ ID NO: 274539 - DNA, 75 bp, synthetic construct
  source 1..75: mol_type = other DNA
agtcaataaggttattcggcaggccagctttattgctgcagctctggcccagtttgtaagtgataaaacgcaacg

SEQ ID NO: 274540 - DNA, 75 bp, synthetic construct
  source 1..75: mol_type = other DNA
aaatcggatggcacggtgaaaacggctctcgaaaaccttggtttgggagaagcggcgaaaagggatgtgggcaca

SEQ ID NO: 274541 - DNA, 75 bp, synthetic construct
  source 1..75: mol_type = other DNA
cgtccgggataatcaccgcaaatacagcgatatcagcaatccgaaaattgaggcgtttcggccaccaaatatggc

SEQ ID NO: 274542 - DNA, 75 bp, synthetic construct
  source 1..75: mol_type = other DNA
tggcattcactttcctatgatagctggtcacaatggggggagaatgctgaagtttgtgatgcggcccgtaatgct

SEQ ID NO: 274543 - DNA, 75 bp, synthetic construct
  source 1..75: mol_type = other DNA
atggaaggtaaaaatggcctgaaaatagtgtgcgatagcggtgcggggttttcgacggagcaagctgttttcctt

SEQ ID NO: 274544 - DNA, 75 bp, synthetic construct
  source 1..75: mol_type = other DNA
atggtgaaaatattattattggtaaggtcggagctctttgcggaaacgttcggtatgttcaaggtaatatttggg

SEQ ID NO: 274545 - DNA, 75 bp, synthetic construct
  source 1..75: mol_type = other DNA
ggagatagccgcaaaacttgagcaggagcttcgtcaacactaccgctgcggcgactatcttcccgccgagcagca

SEQ ID NO: 274546 - DNA, 75 bp, synthetic construct
  source 1..75: mol_type = other DNA
ctggcaaccggagcggttatctggtcgggacaaaaaaagctgggtgaagatgacggcctggtggcactgcatcta

SEQ ID NO: 274547 - DNA, 75 bp, synthetic construct
  source 1..75: mol_type = other DNA
gcatctagcggtaatcgaatccttatcatgggtgaagatattaatggcaaaacagatgatctgagtgccattctt

SEQ ID NO: 274548 - DNA, 75 bp, synthetic construct
  source 1..75: mol_type = other DNA
taaaaacaagaaaaaacataggctccatcattacaacaaactacgaccaactcgtagagaatatcttcgaattta

SEQ ID NO: 274549 - DNA, 75 bp, synthetic construct
  source 1..75: mol_type = other DNA
actataaaaaccaccctgttctattcattggaacaggatttagcctacggtatctagaaaactcatttagctggg

SEQ ID NO: 274550 - DNA, 75 bp, synthetic construct
  source 1..75: mol_type = other DNA
ggcgtgtgtaggactggtactgatgatttggctgtatcaggcgctgaaattcagaaaccgcgcgctgacgctgga

SEQ ID NO: 274551 - DNA, 75 bp, synthetic construct
  source 1..75: mol_type = other DNA
tttatagattttttagagtcagcaaaaaatagaacaataactgaacactcctggattatcaatattagtgataca

SEQ ID NO: 274552 - DNA, 75 bp, synthetic construct
  source 1..75: mol_type = other DNA
ttctcgatagatataaaaaatataaaccacgacatgcttgaaaatctcaggagtaagataggttttttaattaat

SEQ ID NO: 274553 - DNA, 75 bp, synthetic construct
  source 1..75: mol_type = other DNA
tgaaagagatattcgtgtagtctctattttaaataacctaggttataaggtcattgttgtttgggaatgcgcttt

SEQ ID NO: 274554 - DNA, 75 bp, synthetic construct
  source 1..75: mol_type = other DNA
taaagctaccgcagccgaatttggtatcgaactgacagcgattggcgaactggtgcctgcgcgcggtggtcgtgc

SEQ ID NO: 274555 - DNA, 75 bp, synthetic construct
  source 1..75: mol_type = other DNA
tcatgccggaagcagaaaatgaggttaaaactacagccgccgagtttggcattgaactgacggcgattggcgaac

SEQ ID NO: 274556 - DNA, 75 bp, synthetic construct
  source 1..75: mol_type = other DNA
gactatgacgcgatcccaaaattgccgggggttgaagagtacattaagttgggcgcagtgcctggcggcaccgaa

SEQ ID NO: 274557 - DNA, 75 bp, synthetic construct
  source 1..75: mol_type = other DNA
tttcctgttattggttatgccggttctgctacaactatgatttggggatggtcactgttggcaagcaataatgtg

SEQ ID NO: 274558 - DNA, 75 bp, synthetic construct
  source 1..75: mol_type = other DNA
aagcgatggaactccgcttcaggcttattcttcgcttattggtaattgcttaattgccgtgccactacttctgac

SEQ ID NO: 274559 - DNA, 75 bp, synthetic construct
  source 1..75: mol_type = other DNA
gtctctgctggcaagtgattatgtgatggcggatgaatttgttgccgggcacgttatttttggtgttgggatgat

SEQ ID NO: 274560 - DNA, 75 bp, synthetic construct
  source 1..75: mol_type = other DNA
aatggcatgatcgcttctaaagcagcccgcatgcgttccatcgtcgttcctgcgccagaagcgcaaaatgatcca

SEQ ID NO: 274561 - DNA, 75 bp, synthetic construct
  source 1..75: mol_type = other DNA
atctttggtacgcccggcaaccgtggaatgggccaagccgtcaggaagtagtagaacgggttattgctcgtgcca

SEQ ID NO: 274562 - DNA, 75 bp, synthetic construct
  source 1..75: mol_type = other DNA
agccgcaagaatccgtttggcgatatcaaatcggatggcacggtgcaaacggctctcgaaaaccttggtttggga

SEQ ID NO: 274563 - DNA, 75 bp, synthetic construct
  source 1..75: mol_type = other DNA
tgcggttctcggtggcttccttggaaataccgttggcggcggaaccgggcgttctctggctaccgcggcaggtgc

SEQ ID NO: 274564 - DNA, 75 bp, synthetic construct
  source 1..75: mol_type = other DNA
gattgcaggcggcgtagccggtcagggtgtgcagagcgccatgaataaaacgcagggcgtcgagctggaaattcg

SEQ ID NO: 274565 - DNA, 75 bp, synthetic construct
  source 1..75: mol_type = other DNA
caatggtaggtctgtctcttgccggttgtgttaacaacgataccctttcaggagatgtttataccgcgtctgaag

SEQ ID NO: 274566 - DNA, 75 bp, synthetic construct
  source 1..75: mol_type = other DNA
tcttctcgtataccttggtttgggagaagcggcgaaaagggatgtgggcacaggagataatcagataccggatat

SEQ ID NO: 274567 - DNA, 75 bp, synthetic construct
  source 1..75: mol_type = other DNA
agcggcaaaacgggatgtggggacaggggaaaatcagataccggacatggcctcttttgccagtggtgatggatg

SEQ ID NO: 274568 - DNA, 75 bp, synthetic construct
  source 1..75: mol_type = other DNA
gtgacgtactacacccattactacagggttaatttccccagacaattcccaaatgcacaaatagcaacgctggca

SEQ ID NO: 274569 - DNA, 75 bp, synthetic construct
  source 1..75: mol_type = other DNA
gcacctactgcgacacagtcggtcaacaatacacagattgccaccacggcatttgtgaaatcggcgattgcggca

SEQ ID NO: 274570 - DNA, 75 bp, synthetic construct
  source 1..75: mol_type = other DNA
agataccggacatggcctcttttgccagtggtgatggatggatgaaattacccaacgggaaaatcctgcaatatg

SEQ ID NO: 274571 - DNA, 75 bp, synthetic construct
  source 1..75: mol_type = other DNA
tacagcgcttcgtgcgctgctgttaagccgcaagaatccgtttggtgatatcaaatcggatggcacggtgaaaac

SEQ ID NO: 274572 - DNA, 75 bp, synthetic construct
  source 1..75: mol_type = other DNA
gtgatgactccagaaggccctacgttaaccggctttaattctgcttacagaacgtcatcaaccagtgacacggta

SEQ ID NO: 274573 - DNA, 75 bp, synthetic construct
  source 1..75: mol_type = other DNA
accggatatgggtagcttcatgctttctgtttcaagtgttgggtatcaaaaattgccatccggtttgattcttca

SEQ ID NO: 274574 - DNA, 75 bp, synthetic construct
  source 1..75: mol_type = other DNA
acagtatatgcaattactacaacaagccgaaccactatcactgcgacggcgacgtgcttagatgctggctcagtg

SEQ ID NO: 274575 - DNA, 75 bp, synthetic construct
  source 1..75: mol_type = other DNA
gaagcggcgaaaagggatgtgggcacaggagataatcagataccggatatgggagcattcgcttctggttcggga

SEQ ID NO: 274576 - DNA, 75 bp, synthetic construct
  source 1..75: mol_type = other DNA
taatccccggtcttcatgacgtgaccggggctgtggaattaccagaagataactggttttttactgcatctgaaa

SEQ ID NO: 274577 - DNA, 75 bp, synthetic construct
  source 1..75: mol_type = other DNA
ttttcataaacgttggtttgggagaagccagatatgtcattcagcgaggagctaatgtcaatggtgcatggatac

SEQ ID NO: 274578 - DNA, 75 bp, synthetic construct
  source 1..75: mol_type = other DNA
cttccctataccattccctaatcaaccgcttgtttcagtcagtgtcatgtctgatgccgttcagtcagaaccgtc

SEQ ID NO: 274579 - DNA, 75 bp, synthetic construct
  source 1..75: mol_type = other DNA
cgatgtgctgcgtatcccgggagagccaccgcgtcgatggatggatatgaccctgttgcgtgaggtgatggccga

SEQ ID NO: 274580 - DNA, 75 bp, synthetic construct
  source 1..75: mol_type = other DNA
ctcaacgatgtgcaatctggcgtgctgaatatcatcttccgcattgctgacgatcagggattgttgctgctcgac

SEQ ID NO: 274581 - DNA, 75 bp, synthetic construct
  source 1..75: mol_type = other DNA
ggcggtggatgacggtattctcggtggattgaaggatattttgtttggcactaccggaccacgcggcgggaagaa

SEQ ID NO: 274582 - DNA, 75 bp, synthetic construct
  source 1..75: mol_type = other DNA
tcgcgttcagcacgctttgcgggcttttacgcccaaagatcagaaagctgtgaaggcagcggcgcaaaccatgcg

SEQ ID NO: 274583 - DNA, 75 bp, synthetic construct
  source 1..75: mol_type = other DNA
ttaaaagactatttggttgatggtttttccaaaaaagaagcgtgcgaaaagaacggtgtgtcactcagctatttt

SEQ ID NO: 274584 - DNA, 75 bp, synthetic construct
  source 1..75: mol_type = other DNA
aaaagcgccgcccgccaggtgacaaatcagattgtgcgcggtgtgctggggagtttgctcggggggagaaaaagg

SEQ ID NO: 274585 - DNA, 75 bp, synthetic construct
  source 1..75: mol_type = other DNA
gcgaggcgttaatctcgtttctcgatgcgaaaggaagcccttcagtggtggaacgggcgatggtgattgccccct

SEQ ID NO: 274586 - DNA, 75 bp, synthetic construct
  source 1..75: mol_type = other DNA
catcccgtactgaaagcatgagtgggcagatgagtgaagacctgtcgcaacagtttgcacagtatgtgatgaaac

SEQ ID NO: 274587 - DNA, 75 bp, synthetic construct
  source 1..75: mol_type = other DNA
gccggatagcagttcatccggcgcgtcagcgggaaggcacagggcggcaacttattgctggtgctttgcaatata

SEQ ID NO: 274588 - DNA, 75 bp, synthetic construct
  source 1..75: mol_type = other DNA
gtcaggcggtatgggcgggttttcgtcgcccgcggggtaatctggtggcccagtcgctggcggcgcacggcagca

SEQ ID NO: 274589 - DNA, 75 bp, synthetic construct
  source 1..75: mol_type = other DNA
aggaagtccttcagtggtggaacgggcgatggttatcgcgccttgttcgcgaatggggccggtgacggaagatga

SEQ ID NO: 274590 - DNA, 75 bp, synthetic construct
  source 1..75: mol_type = other DNA
cttgataaagaggatgttactcttcttatggactattaccatgagcaaagcatcctgctggagtgtgtaaaatct

SEQ ID NO: 274591 - DNA, 75 bp, synthetic construct
  source 1..75: mol_type = other DNA
cagaataataaatataatgaagagcgagaaagtcaaaagataatacctgagccatcagaagaggctgtgaaaaaa

SEQ ID NO: 274592 - DNA, 75 bp, synthetic construct
  source 1..75: mol_type = other DNA
tggcgtttgccatcgcggcgagctgtaacttcccgatcattctgctttctatgtactggtcgaaactgaccacgc

SEQ ID NO: 274593 - DNA, 75 bp, synthetic construct
  source 1..75: mol_type = other DNA
ggcgtatgcaatatggaggggacagcacagcaaatagctgccggagaaagtcagaagcgtcgctgggtctggaat

SEQ ID NO: 274594 - DNA, 75 bp, synthetic construct
  source 1..75: mol_type = other DNA
atgatttacatcggtttgccacaatggtcgcatcctaaaggggtggggttggggatccccagccttgaagagtat

SEQ ID NO: 274595 - DNA, 75 bp, synthetic construct
  source 1..75: mol_type = other DNA
ggtcgcatcctaaatgggtgcggttggggatcaccagccttgaagagtatgcccgccactttaactgtgtggagg

SEQ ID NO: 274596 - DNA, 75 bp, synthetic construct
  source 1..75: mol_type = other DNA
tggctcgcgtaaaagatccgggtctggtggcggcgcttgagctggcgcggctgatgggcttacgttcgcaggaag

SEQ ID NO: 274597 - DNA, 75 bp, synthetic construct
  source 1..75: mol_type = other DNA
tgggtaagttaggcggtgagatgaaagcgttggcaaagcactgtggaggtagccataaaacggtgaacgatcgca

SEQ ID NO: 274598 - DNA, 75 bp, synthetic construct
  source 1..75: mol_type = other DNA
acggcccaaataacaaaatgcagcattctatgggcaagctgaatatgttgcactacttcccggataaactgttca

SEQ ID NO: 274599 - DNA, 75 bp, synthetic construct
  source 1..75: mol_type = other DNA
gggctggcgattgccggtgactatatgtccgccgcctcatttttggggatctccgcgctggtgtttacctccggc

SEQ ID NO: 274600 - DNA, 75 bp, synthetic construct
  source 1..75: mol_type = other DNA
cgcatgacctgtacgctaacgtcttcaaaaaaggcgcgaccgaacgtgaagagctgcgggtatcgaaaatcaccg

SEQ ID NO: 274601 - DNA, 75 bp, synthetic construct
  source 1..75: mol_type = other DNA
cgctttaccttatcgcccagatggtgggcgcaggtaaactcatcgagctgctgtttggccttaactatcacattg

SEQ ID NO: 274602 - DNA, 75 bp, synthetic construct
  source 1..75: mol_type = other DNA
atgatttacatcggtctgccacaatggtcgcatcctaattgggtgcgtctggggataaccagcctggaagaatat

SEQ ID NO: 274603 - DNA, 75 bp, synthetic construct
  source 1..75: mol_type = other DNA
aaaaataggtccgaggtgtgtcgcttttgttgaaagtgagattgatgaatggattgaagcggctattcgaaactc

SEQ ID NO: 274604 - DNA, 75 bp, synthetic construct
  source 1..75: mol_type = other DNA
cggcgcaatcatgctggttggtgcgaatccggaatataaagacgcggcgggccatctgattggtggtaacaacat

SEQ ID NO: 274605 - DNA, 75 bp, synthetic construct
  source 1..75: mol_type = other DNA
agaaacgcttgaggattttgatgagctgctggcggctcaggaaagcgaaaatgcacttttgccgcagaaagctgc

SEQ ID NO: 274606 - DNA, 75 bp, synthetic construct
  source 1..75: mol_type = other DNA
caccagggactagttcatttccctgctaatggacgttacatcctggatattaacgatcctgatttccctgagcag

SEQ ID NO: 274607 - DNA, 75 bp, synthetic construct
  source 1..75: mol_type = other DNA
tgagctggaattacaaaaccaggtcgccctgcaaatttggcagtaaaattatcattaacaacctggtaaggtggg

SEQ ID NO: 274608 - DNA, 75 bp, synthetic construct
  source 1..75: mol_type = other DNA
aacgttggtcgccgtttacaggcgcgactggaagcgttagggattacaaccttgctttgcgatccgcctcgcgcc

SEQ ID NO: 274609 - DNA, 75 bp, synthetic construct
  source 1..75: mol_type = other DNA
gccagagtttggtcgcattacgctgcatggcccgctcgatcaaccgacgctgaaaaggctggtgcatttggtgta

SEQ ID NO: 274610 - DNA, 75 bp, synthetic construct
  source 1..75: mol_type = other DNA
atgacaactgttaaccagatccctgatgtaaacattacaccttccctcccgccgaaaattcgcgaagcggtagaa

SEQ ID NO: 274611 - DNA, 75 bp, synthetic construct
  source 1..75: mol_type = other DNA
atgtcagatatcacaatctcccgtccggaagtggtcaacgggcatacggacgttatctgttccacctcaatcaga

SEQ ID NO: 274612 - DNA, 75 bp, synthetic construct
  source 1..75: mol_type = other DNA
tccctgttatttcggtaagaagattatcgttaacaatctggtgaagtatgacagatggggctacagcctgaactg

SEQ ID NO: 274613 - DNA, 75 bp, synthetic construct
  source 1..75: mol_type = other DNA
aacccaacatccgctgggtaaagagattattgatcaggaaagccagtggcaaagctatgttcactggccgttgga

SEQ ID NO: 274614 - DNA, 75 bp, synthetic construct
  source 1..75: mol_type = other DNA
cacgttcaggaaaccagaactggttgacaggcttaatgatattattgcgaaatactatccaaatgtattgaccga

SEQ ID NO: 274615 - DNA, 75 bp, synthetic construct
  source 1..75: mol_type = other DNA
caacagggaaaacataactattcatctggacgatcacatccggtctcttcagggaaaagaatgctatgaagatga

SEQ ID NO: 274616 - DNA, 75 bp, synthetic construct
  source 1..75: mol_type = other DNA
tggaattataaaaccaactctccctgtaaatttggaagtaaaatcattatcaacaatctggtgaaatgggaccgg

SEQ ID NO: 274617 - DNA, 75 bp, synthetic construct
  source 1..75: mol_type = other DNA
gactggaagcgttagggatcaaaaccttactttgcgatccgccccgcgccgaccgtggggatgagggtgatttcc

SEQ ID NO: 274618 - DNA, 75 bp, synthetic construct
  source 1..75: mol_type = other DNA
tagtgggacactgaaagcgggaagttggttggttttgttgcttcctgtatgggaagaatgggaaaaccatcccga

SEQ ID NO: 274619 - DNA, 75 bp, synthetic construct
  source 1..75: mol_type = other DNA
gtatcacgctttccgcgtactttgttaaccactacggtgcagggctatgaaggcaccgggcgtggctttttgctg

SEQ ID NO: 274620 - DNA, 75 bp, synthetic construct
  source 1..75: mol_type = other DNA
taaccactacggtgcagggctatgaaggctccggacgtggctttttgctgaagttttgtgcgcgttttccgcatt

SEQ ID NO: 274621 - DNA, 75 bp, synthetic construct
  source 1..75: mol_type = other DNA
tctgacgacgactggcttgaactggccggttttgctttcgctcatcgtccgctattaacatcgttaggttgctta

SEQ ID NO: 274622 - DNA, 75 bp, synthetic construct
  source 1..75: mol_type = other DNA
gatgcgcaaattctcgcgcagtggaatggcgaaactattccggttgatcggctaaacgacaccgtgctttctgac

SEQ ID NO: 274623 - DNA, 75 bp, synthetic construct
  source 1..75: mol_type = other DNA
atttacggcggatgatggacgcacccgggcaacatttcctacaggcgacttgcgaaaacgagatcgccggggcgc

SEQ ID NO: 274624 - DNA, 75 bp, synthetic construct
  source 1..75: mol_type = other DNA
tctctgtatgtgatctgtgatgacgccagcgcggcggcattactgtgtaaactgggttttaacgccgttcatcat

SEQ ID NO: 274625 - DNA, 75 bp, synthetic construct
  source 1..75: mol_type = other DNA
aacgtcggtcgtcgattacaggcgcgcctggaagccttgggcattcgcactttgttgtgcgacccgccacgcgcc

SEQ ID NO: 274626 - DNA, 75 bp, synthetic construct
  source 1..75: mol_type = other DNA
tggattttcactgcacgagcgtaccgtggggatcgtgggcgttggtaacgttggtcgccgtttacaggcgcgact

SEQ ID NO: 274627 - DNA, 75 bp, synthetic construct
  source 1..75: mol_type = other DNA
attttgtccggcacctcaaacgcgtacttacggcggatcacgacgctatcctctggcggcaaaaccagccgttca

SEQ ID NO: 274628 - DNA, 75 bp, synthetic construct
  source 1..75: mol_type = other DNA
cgttggcgcattttactccccgtactgactggcaccccgcgaccggcgcaccacaaccagaacaacagcaactct

SEQ ID NO: 274629 - DNA, 75 bp, synthetic construct
  source 1..75: mol_type = other DNA
gcaatatttgcatttaccgcaacgcgtcattatagtaatgatgaaattgaagatgcctataaagcatggatacct

SEQ ID NO: 274630 - DNA, 75 bp, synthetic construct
  source 1..75: mol_type = other DNA
gcccgtattgatttacgctcaaaatactatgttaaacctaaagctgaccatccctggcttacgcgccgaacgcaa

SEQ ID NO: 274631 - DNA, 75 bp, synthetic construct
  source 1..75: mol_type = other DNA
tgcgcacccttaaccaccgtgacggtgaaagcagcccggcggaatactccgtcagcctgacacgcgccgacatga

SEQ ID NO: 274632 - DNA, 75 bp, synthetic construct
  source 1..75: mol_type = other DNA
caaagctacagccgccgagtttggcattgaactgacggcgattggcgaactggtgccagtgcgcggcggtcgtgc

SEQ ID NO: 274633 - DNA, 75 bp, synthetic construct
  source 1..75: mol_type = other DNA
ttttttatgcctacaacaagatccttgaggcgaaactcccgcgcacggccaatgagatgtatcactaccgtcggg

SEQ ID NO: 274634 - DNA, 75 bp, synthetic construct
  source 1..75: mol_type = other DNA
atgaacgagtggataatgcccgtattgatttacgctcaaaatactatgttaaacctaaagctgaccatccctggc

SEQ ID NO: 274635 - DNA, 75 bp, synthetic construct
  source 1..75: mol_type = other DNA
aatcaataacccatctatatctattattttggaatccaatagcgaccttgaagcaaaggtagttgataatataac

SEQ ID NO: 274636 - DNA, 75 bp, synthetic construct
  source 1..75: mol_type = other DNA
cgaataactacctgtttttgccgggtcagaaaaaatggtgttgccgcgccatctgccaccagccagctatcaact

SEQ ID NO: 274637 - DNA, 75 bp, synthetic construct
  source 1..75: mol_type = other DNA
acagcaatgctgtttcactggtcatgcgacggatccgaaaagaaaacgttgatgccggtgaacgtgcaaaacagg

SEQ ID NO: 274638 - DNA, 75 bp, synthetic construct
  source 1..75: mol_type = other DNA
ttacggggcaaaagatgactctggtcagcgatacctggcctggtctggacatagtgcccgtgtcggtgccgcgcg

SEQ ID NO: 274639 - DNA, 75 bp, synthetic construct
  source 1..75: mol_type = other DNA
tttataccctgaaaaacgaactttatgatcgtagtcatcgaaagtatcagcaaaccattaccgataaaacagtgt

SEQ ID NO: 274640 - DNA, 75 bp, synthetic construct
  source 1..75: mol_type = other DNA
tataagcatctgtttgcccatggtgagtatattaaaggcataacttcattaattaagtacaagcttaagaaataa

SEQ ID NO: 274641 - DNA, 75 bp, synthetic construct
  source 1..75: mol_type = other DNA
gtaatgcagaaaaacaaagagaacgtcaggaatcaaaaaacaaagtgcttcaaaaaaatcgcaatgaatacgctt

SEQ ID NO: 274642 - DNA, 75 bp, synthetic construct
  source 1..75: mol_type = other DNA
catattcacagccgcgaaattgctgaccatatgggcgtgtatctgggcgatggtcagtttattgagtcgccgcgc

SEQ ID NO: 274643 - DNA, 75 bp, synthetic construct
  source 1..75: mol_type = other DNA
ttgaccatgtttgatttacgcgacagtttcgatgccctcgcctcggctgaaaaactgccttacagcaagccgcat

SEQ ID NO: 274644 - DNA, 75 bp, synthetic construct
  source 1..75: mol_type = other DNA
cagcactgatgctggcggtgacagcaggcaacacacaggctgtcctgactgccacagcaacgctgacgattaatg

SEQ ID NO: 274645 - DNA, 75 bp, synthetic construct
  source 1..75: mol_type = other DNA
tgttgaggaagttgttttgcaaacgaccagttatacagacaccggggtgaccctttccctgagagaaaaggtgag

SEQ ID NO: 274646 - DNA, 75 bp, synthetic construct
  source 1..75: mol_type = other DNA
gacgatgacgacaatttaccgtttgtcctcgatgccatcctgaacaaaggggcgcgctacagtgccgttgagttc

SEQ ID NO: 274647 - DNA, 75 bp, synthetic construct
  source 1..75: mol_type = other DNA
gggaatggctgacggagccggagattcaggctgtaacggattgcctgtcccgcgccgtgcgggatgtatcccggc

SEQ ID NO: 274648 - DNA, 75 bp, synthetic construct
  source 1..75: mol_type = other DNA
tgcgccagaagcgcaaaatgatccacgttttgtgttggcaaacgtgaagctttcatctctcaccgaactcaccgc

SEQ ID NO: 274649 - DNA, 75 bp, synthetic construct
  source 1..75: mol_type = other DNA
actattttgttatttatttgaaatttcgcgaaagcgtgtaaatcgtattttgatattcctgttggcatgtatttt

SEQ ID NO: 274650 - DNA, 75 bp, synthetic construct
  source 1..75: mol_type = other DNA
cgggtaagtcggttagctgaacctttctggcaggatcattttttaggcgcgcggcggattttgacggaagagacg

SEQ ID NO: 274651 - DNA, 75 bp, synthetic construct
  source 1..75: mol_type = other DNA
ataacgacctgcgccggggagatttgctgtttttccatattcacagccgcgagattgccgaccatatgggcgtgt

SEQ ID NO: 274652 - DNA, 75 bp, synthetic construct
  source 1..75: mol_type = other DNA
ggaattatttctgcagtgatacggcagagaccactggcatacgcacctgtacgctaacaccggtgacagaggtta

SEQ ID NO: 274653 - DNA, 75 bp, synthetic construct
  source 1..75: mol_type = other DNA
agcatttcgcagcttgccgcggcaggtttaacgccacagcagccgctgggcaaccatcaacaagccagcctgctg

SEQ ID NO: 274654 - DNA, 75 bp, synthetic construct
  source 1..75: mol_type = other DNA
gcgtaccgccggaaattatcgtcgggattatcggcgttgaaacccgctgggggcgcgtgatggggaaaactcgca

SEQ ID NO: 274655 - DNA, 75 bp, synthetic construct
  source 1..75: mol_type = other DNA
tgaagggggaattttccccgcactcactgcgttatgcatgggcacaggacgcgatccgttattatctggcgcagg

SEQ ID NO: 274656 - DNA, 75 bp, synthetic construct
  source 1..75: mol_type = other DNA
gattcagcgaaaaagaggcgctggcaatggtggcaatggacctggggcatggcgacggacgtggtcgctgggtga

SEQ ID NO: 274657 - DNA, 75 bp, synthetic construct
  source 1..75: mol_type = other DNA
tggcggcggcgctggaactggcgcggctgatggggctacgctcgcaggaggcggtacagagtgtgcagtcactga

SEQ ID NO: 274658 - DNA, 75 bp, synthetic construct
  source 1..75: mol_type = other DNA
attctcggtaaaattggcgggctggcaacaggacttaaaggttctgctgaagggcatctcaagacggattataca

SEQ ID NO: 274659 - DNA, 75 bp, synthetic construct
  source 1..75: mol_type = other DNA
gtgccggagcaggcggaagtgctcagatttctttcgattccgatcgacaagttctgggtaaagttgctggactgg

SEQ ID NO: 274660 - DNA, 75 bp, synthetic construct
  source 1..75: mol_type = other DNA
atccggacacgcaatattatggacctggtcaaatgggccgggttttatgtcctggtgattgccgttctggtcggg

SEQ ID NO: 274661 - DNA, 75 bp, synthetic construct
  source 1..75: mol_type = other DNA
agcggctggcgcagcaggcgggcggcagctacaaaactgtggatgaccgcatcaggctggcgcagcggttttgtg

SEQ ID NO: 274662 - DNA, 75 bp, synthetic construct
  source 1..75: mol_type = other DNA
gttcgccatatcgaatgctacattgaggaacggctggagcaggatattggtttacgaacgctgcaaaacgatatg

SEQ ID NO: 274663 - DNA, 75 bp, synthetic construct
  source 1..75: mol_type = other DNA
tggcggcagcgctggaactggcgcggctgatgggattgcgctctcaggaggcagtgcaaagcacacaatcactga

SEQ ID NO: 274664 - DNA, 75 bp, synthetic construct
  source 1..75: mol_type = other DNA
ccaggccgatgccgagcacgtttaccgtgcggaagtggcgcgcctgtttgatagcgagcttgaggtgattgcagg

SEQ ID NO: 274665 - DNA, 75 bp, synthetic construct
  source 1..75: mol_type = other DNA
gcagtacgctgttccggttcgctgaaaacctggcgcgaagcactggagaaaggtgatacccggctaaccgtggta

SEQ ID NO: 274666 - DNA, 75 bp, synthetic construct
  source 1..75: mol_type = other DNA
ggcgatgacgtcgatggatttgggccacggcgacgggcgcgggcggtatgtggcgcaggtttacgggcgaaggga

SEQ ID NO: 274667 - DNA, 75 bp, synthetic construct
  source 1..75: mol_type = other DNA
cgatggatgtggtggcctccagccgtgtcactgacagtggcagccacacggacaatgcgtcagcttccctggcca

SEQ ID NO: 274668 - DNA, 75 bp, synthetic construct
  source 1..75: mol_type = other DNA
aaaatttacctgcattaccggtcgatgcaacgagtgatgaggttcgcaagaacctgatggacatgttcagggatc

SEQ ID NO: 274669 - DNA, 75 bp, synthetic construct
  source 1..75: mol_type = other DNA
cgtaaatattgtcatgaactacattcgtaacctggatagtgaaacgggggcaatggtgcgcctgctggaagatgg

SEQ ID NO: 274670 - DNA, 75 bp, synthetic construct
  source 1..75: mol_type = other DNA
gttcctgttcctgttcctgttcctgttcctgttcctgttcctgttcctgttcctgttcctgttcctgttcctgtt

SEQ ID NO: 274671 - DNA, 75 bp, synthetic construct
  source 1..75: mol_type = other DNA
cccccagcggcaaatcgcaaaaacaatcagtgcgatcgaaatggcagccactacaattgcaaatgcttcaggcta

SEQ ID NO: 274672 - DNA, 75 bp, synthetic construct
  source 1..75: mol_type = other DNA
tcgtgggcggcatggtgcaagttgaataaccggaaatggtttcccgcagaaactgaagatgttcgcgattatctt

SEQ ID NO: 274673 - DNA, 75 bp, synthetic construct
  source 1..75: mol_type = other DNA
caaaagaatgcagccaaacagcaaaagcatctcaggctcaccggctggattccctttttacaacggctcatagag

SEQ ID NO: 274674 - DNA, 75 bp, synthetic construct
  source 1..75: mol_type = other DNA
aatcaataccgactccagcgatatcagtggagctaacccgcaaccattcctgcagcaagtcctgaacatgactca

SEQ ID NO: 274675 - DNA, 75 bp, synthetic construct
  source 1..75: mol_type = other DNA
agtatgcccggctggccagctatgcagagaacaacagcgctaacattaaccagaactactcgcaggagtttgtcg

SEQ ID NO: 274676 - DNA, 75 bp, synthetic construct
  source 1..75: mol_type = other DNA
aatggggtttagtgatactcaccttcgttgttatgtattacacgatgacagtgtgggccagcatatacacatcat

SEQ ID NO: 274677 - DNA, 75 bp, synthetic construct
  source 1..75: mol_type = other DNA
ctggacggctaacattgcttctaccggtaagatgaacggcttctcattcgaataccgcgatatcgctttcaaggc

SEQ ID NO: 274678 - DNA, 75 bp, synthetic construct
  source 1..75: mol_type = other DNA
ctgaaatcgaactgcgactcagcgaagacagacgaaacgagatcgttgaaaagattcttcaaaagaatgcagtta

SEQ ID NO: 274679 - DNA, 75 bp, synthetic construct
  source 1..75: mol_type = other DNA
tggcgctgacactgcccgtggcagcatattgtgttcacacttccctgccagtactggtctctggtgttccataac

SEQ ID NO: 274680 - DNA, 75 bp, synthetic construct
  source 1..75: mol_type = other DNA
atggtgaattaccgtcttatatcactggcgctaacaatgagagaggggaaacatttatgtccgggaaaaaccact

SEQ ID NO: 274681 - DNA, 75 bp, synthetic construct
  source 1..75: mol_type = other DNA
aaaactgagcttgagcagaaaaaaattaagtttgattaccaggaatatcccggtctgaaccatgaaatggatgtc

SEQ ID NO: 274682 - DNA, 75 bp, synthetic construct
  source 1..75: mol_type = other DNA
attcaggagatccctggagatattttcgcggcggcagcaacttacgacggtgaagtcattaccattcatccggac

SEQ ID NO: 274683 - DNA, 75 bp, synthetic construct
  source 1..75: mol_type = other DNA
tgatcgacgatgcaaaacccagaagccgtcacctcaccggcctttcgctttcgcttcagtctcaggggtatatcg

SEQ ID NO: 274684 - DNA, 75 bp, synthetic construct
  source 1..75: mol_type = other DNA
atgcctgaagccgtagaagtcagtggcgggtatttttcaggtggcgcaattcacattattgatacgttagaggta

SEQ ID NO: 274685 - DNA, 75 bp, synthetic construct
  source 1..75: mol_type = other DNA
atcagcagaaagtcctgatctccaaatggctgtgctgttgcccggaagtgattattttcgatgaacctacccgcg

SEQ ID NO: 274686 - DNA, 75 bp, synthetic construct
  source 1..75: mol_type = other DNA
caaaaaccctcgaaccgcttactggcgttttcgctaggatttgcggcggggatcatgttgctcatctcattaatg

SEQ ID NO: 274687 - DNA, 75 bp, synthetic construct
  source 1..75: mol_type = other DNA
atgaatcaatcttatggacggctggtcagtcgggcggcgattgctgcgacggcgatggcttcgctgctattgctg

SEQ ID NO: 274688 - DNA, 75 bp, synthetic construct
  source 1..75: mol_type = other DNA
taagatggagcggcgtaaagttcaacttgataaccagccggttgatttcaccagctttcttgccgatctggaaaa

SEQ ID NO: 274689 - DNA, 75 bp, synthetic construct
  source 1..75: mol_type = other DNA
gcggacgtttattcgccagaagccgcagcgaaagtcatggaaaccgatgagaaagtgttccgtcataatgtgtcc

SEQ ID NO: 274690 - DNA, 75 bp, synthetic construct
  source 1..75: mol_type = other DNA
agtactatgttgatctgatgatgaagttggggctggtgcgcttctcaatgttgctggcgctggctctcgtcgttc

SEQ ID NO: 274691 - DNA, 75 bp, synthetic construct
  source 1..75: mol_type = other DNA
atgagtaattcactgttaccgccatcagccagcagtttcatgcgttgcaccgaagctgtcggagcgcgcattaca

SEQ ID NO: 274692 - DNA, 75 bp, synthetic construct
  source 1..75: mol_type = other DNA
gtggccaaaaattgaggcatttattacctggctaagagagcaggtatgtcagtcttgtcagtacccgtgataccg

SEQ ID NO: 274693 - DNA, 75 bp, synthetic construct
  source 1..75: mol_type = other DNA
gtggccaaaaattgaggcatttattacctggctaagagagcaggtatgtcagtcttgtcagtatcggggataccg

SEQ ID NO: 274694 - DNA, 75 bp, synthetic construct
  source 1..75: mol_type = other DNA
gtggccaaaaattgaggcatttattacctggctaagagagcaggtatgtcagtcttgtcagtatccgcgataccg

SEQ ID NO: 274695 - DNA, 75 bp, synthetic construct
  source 1..75: mol_type = other DNA
gatcgctctgatttagccgttatcgccgcgatgaatcatattggggtggcgatgggaaggaaacgcctggtacaa

SEQ ID NO: 274696 - DNA, 75 bp, synthetic construct
  source 1..75: mol_type = other DNA
agcagcttaaggaggccggattgcaagcatcaacagggcgtacaggcgactcgtatggcagcgcgatggcggaga

SEQ ID NO: 274697 - DNA, 75 bp, synthetic construct
  source 1..75: mol_type = other DNA
gtggccaaaaattgaggcatttattacctggctaagagagcaggtatgtcagtcttgtcagtagcggtgataccg

SEQ ID NO: 274698 - DNA, 75 bp, synthetic construct
  source 1..75: mol_type = other DNA
ttttccgccagactcgctacggcatggatggcaaaccgatcaaagtgtggaagttccgttccatgaaagtgatgg

SEQ ID NO: 274699 - DNA, 75 bp, synthetic construct
  source 1..75: mol_type = other DNA
aaaatggaaaaacgcgtcgagttcgaccttgagtacatccgcgaatggagcgtctggttcgatatcaaaatcgtt

SEQ ID NO: 274700 - DNA, 75 bp, synthetic construct
  source 1..75: mol_type = other DNA
catcagcacaaaggaaccaccagtaccgtgcggcgggtggtggagccgttcggctttctgatccgcattattgag

SEQ ID NO: 274701 - DNA, 75 bp, synthetic construct
  source 1..75: mol_type = other DNA
gtggccaaaaattgaggcatttattacctggctaagagagcaggtatgtcagtcttgtcagtatcagagataccg

SEQ ID NO: 274702 - DNA, 75 bp, synthetic construct
  source 1..75: mol_type = other DNA
gtggccaaaaattgaggcatttattacctggctaagagagcaggtatgtcagtcttgtcagtaacagtgataccg

SEQ ID NO: 274703 - DNA, 75 bp, synthetic construct
  source 1..75: mol_type = other DNA
gctgtgctgtattgcgctggcggtgaaactcagttcaccagggccggttattttccgccagactcgctacggcat

SEQ ID NO: 274704 - DNA, 75 bp, synthetic construct
  source 1..75: mol_type = other DNA
ttaaccagtcgtttactcaggaagccctgatgtacgagctggatgcctttctggggcgctccggcccggctgcgc

SEQ ID NO: 274705 - DNA, 75 bp, synthetic construct
  source 1..75: mol_type = other DNA
ccccaactgacgctcagcggcgttcagaacgggcattattcatgggcgaccatggtgtcgccattcgtttcccct

SEQ ID NO: 274706 - DNA, 75 bp, synthetic construct
  source 1..75: mol_type = other DNA
ttaggtgataccatatcaaaagggctcttcaattcaggcacagcaaatacattaatcgtatttggactggctttt

SEQ ID NO: 274707 - DNA, 75 bp, synthetic construct
  source 1..75: mol_type = other DNA
aagttgtcgccgatcagatgattacggaatctggcgttgagccgttatatcactcctgggttgtggacgtgatca

SEQ ID NO: 274708 - DNA, 75 bp, synthetic construct
  source 1..75: mol_type = other DNA
ccgttatcgcctggtgtgcgcaactggccttaggcggttggcaaatttctcgttttaaccgtgccttcgacacac

SEQ ID NO: 274709 - DNA, 75 bp, synthetic construct
  source 1..75: mol_type = other DNA
ccgaccggcaacccgacactgaaaacactccgtagtgttgtccacgcagcaggttttcagttctctgcgctggca

SEQ ID NO: 274710 - DNA, 75 bp, synthetic construct
  source 1..75: mol_type = other DNA
gcaaagccagctttacaccgctaaacaactggtcagcgaattgattggtatggacagcaaactgtccagcgtact

SEQ ID NO: 274711 - DNA, 75 bp, synthetic construct
  source 1..75: mol_type = other DNA
caccaacccaggtcagccaatgcagcctattgccaaagtcgcatccggtggtgaattgtcccgcatcgcactggc

SEQ ID NO: 274712 - DNA, 75 bp, synthetic construct
  source 1..75: mol_type = other DNA
ccgatcgtattgagtttcgggtaaccaccaacccaggtcaaccaatgcagcctattgccaaagtcgcatccggtg

SEQ ID NO: 274713 - DNA, 75 bp, synthetic construct
  source 1..75: mol_type = other DNA
gtgaattgtcgcgtatcgccctggcgattcaggttattacagcgcgtaaaatggaaacgccagcgctcattttcg

SEQ ID NO: 274714 - DNA, 75 bp, synthetic construct
  source 1..75: mol_type = other DNA
tatcaatcactgctggaagaacaacagcaactcgacgatcaggccgactcacaagaaactctcgcgctggccgta

SEQ ID NO: 274715 - DNA, 75 bp, synthetic construct
  source 1..75: mol_type = other DNA
acgaaacatcatcagcaggcgctggaaacggcgcgcgcattacacctgcaacgccagcactatgcaactgagctg

SEQ ID NO: 274716 - DNA, 75 bp, synthetic construct
  source 1..75: mol_type = other DNA
tcgtatgacaacgcgatggcggagagcatcaatggtctttacaaagcggaggtaaataaagaatgttatggtgtg

SEQ ID NO: 274717 - DNA, 75 bp, synthetic construct
  source 1..75: mol_type = other DNA
ttgatccagaagtgattcataccacgactatcaacgcgacccgcggtgtcagccacttcgtgcgctttggcgcgt

SEQ ID NO: 274718 - DNA, 75 bp, synthetic construct
  source 1..75: mol_type = other DNA
tctcagagtgttgagttgttcttcaggcgtacattcaaaaaccccggctttcgcacaacgtctgaaagagattat

SEQ ID NO: 274719 - DNA, 75 bp, synthetic construct
  source 1..75: mol_type = other DNA
ttactaaaacgactttatatcttaagaacggattcgctggagacgatgtcgcggctggtgagtaaccagccgcag

SEQ ID NO: 274720 - DNA, 75 bp, synthetic construct
  source 1..75: mol_type = other DNA
tgattagcaagcgttttaatgtccgtaaagatgccgatggtcgcgcactggcagggctttcacaaggtgggtatc

SEQ ID NO: 274721 - DNA, 75 bp, synthetic construct
  source 1..75: mol_type = other DNA
acattcagtggtgttaccacgacaaccgtaccggatgaaggtgtcgctgcccggctgaacgatccggcagctatt

SEQ ID NO: 274722 - DNA, 75 bp, synthetic construct
  source 1..75: mol_type = other DNA
aatgttgatggtgtacgcagcattgatacaggtacagcaatgactaagcctcagcgccaggttaactccagtatg

SEQ ID NO: 274723 - DNA, 75 bp, synthetic construct
  source 1..75: mol_type = other DNA
ttcctgttaaggatgtattaagtgaatcccagagagctctttgtggttctgatctgaaatacgccctttctgatt

SEQ ID NO: 274724 - DNA, 75 bp, synthetic construct
  source 1..75: mol_type = other DNA
attcaaagacagaaaactaactttataaatcaggtccaaaacctagcggataaaacctttgtcgaaaaggactac

SEQ ID NO: 274725 - DNA, 75 bp, synthetic construct
  source 1..75: mol_type = other DNA
cacacgatcatagttgccggtgggtagaaccctttataggcggtggtgccgtttttctgaacatgtttgcacaaa

SEQ ID NO: 274726 - DNA, 75 bp, synthetic construct
  source 1..75: mol_type = other DNA
cccaaaatcgctgcaatttatgagcgtttctgaacttaacgaaattcgcgatgtatttgatttccagtcacatac

SEQ ID NO: 274727 - DNA, 75 bp, synthetic construct
  source 1..75: mol_type = other DNA
ggtgacggtggggaatattcgggccggacaaatcattgccgtggagcccactgccgcaagttattacgtatttaa

SEQ ID NO: 274728 - DNA, 75 bp, synthetic construct
  source 1..75: mol_type = other DNA
cgaccaatacacaagcgatgatcgccactatcgccagcggcaatgtgcatataataagccatcccggaaatccca

SEQ ID NO: 274729 - DNA, 75 bp, synthetic construct
  source 1..75: mol_type = other DNA
gcgcaacattatgcggttaatttgccgacatcttctggaattggctttgatcgttctgatttagctgttatcgcc

SEQ ID NO: 274730 - DNA, 75 bp, synthetic construct
  source 1..75: mol_type = other DNA
aatatcgcgttcacccgctggctgacacacctgcagaacggtgtactgctggatgagcaaaactgcctgatgctg

SEQ ID NO: 274731 - DNA, 75 bp, synthetic construct
  source 1..75: mol_type = other DNA
gttctgcccacccgccttgatgttgaagtgaatggctttaacggtggtgttctggacggtgttccttctgcatat

SEQ ID NO: 274732 - DNA, 75 bp, synthetic construct
  source 1..75: mol_type = other DNA
cttccccgacagatgacgatgagctgccggaagtcaccggacctgcgtggatagtcgacaaggtggcgcattatg

SEQ ID NO: 274733 - DNA, 75 bp, synthetic construct
  source 1..75: mol_type = other DNA
atcgcgttcacccgctggctgacacacctgcagaacggtgtactgctggatgaacaaaactgcctgatgctgcat

SEQ ID NO: 274734 - DNA, 75 bp, synthetic construct
  source 1..75: mol_type = other DNA
attacatcaccacattaccgggcaggcagtggccaaaaattgaggcatttattacttggttaagagaacaggtaa

SEQ ID NO: 274735 - DNA, 75 bp, synthetic construct
  source 1..75: mol_type = other DNA
caaacacttcgtcatccgtaatatcaaggctcataatattacgccagctttcagcaagaaagcgggtattgataa

SEQ ID NO: 274736 - DNA, 75 bp, synthetic construct
  source 1..75: mol_type = other DNA
atacaacaaagcccgatggagcccctcgaaaactacttgatgtaacgcttcttcatcaactaggttggaatcata

SEQ ID NO: 274737 - DNA, 75 bp, synthetic construct
  source 1..75: mol_type = other DNA
cgggatcaaactgtgcgaatcttacaaccgccagtacggacgcgattaccgctcagtcatgccgaccaacctgta

SEQ ID NO: 274738 - DNA, 75 bp, synthetic construct
  source 1..75: mol_type = other DNA
cgcacttttcacccaaaaagaggtgactggtggctctggagtaacgaggatgtatcggtgtggtggaaccgtctg

SEQ ID NO: 274739 - DNA, 75 bp, synthetic construct
  source 1..75: mol_type = other DNA
gaggatgtatcggtgtggtggaaccgtctgtgtgacaacgtactgccggaaaaaccatgccgtttgacctgctga

SEQ ID NO: 274740 - DNA, 75 bp, synthetic construct
  source 1..75: mol_type = other DNA
agagctcgttgatgtgctgtggggggaactggaatggtcttccccgacagatgacgatgagctgccggaagtcac

SEQ ID NO: 274741 - DNA, 75 bp, synthetic construct
  source 1..75: mol_type = other DNA
tggctgacacacctgcaggacggtgtactgctggatgagcaaaactgcctgatgctgcatgaactctggctgcag

SEQ ID NO: 274742 - DNA, 75 bp, synthetic construct
  source 1..75: mol_type = other DNA
gcggtactgaacagcgtcgctgggaaggattaccggacgatgtcagggataccatcaccgcacttttcaccgcaa

SEQ ID NO: 274743 - DNA, 75 bp, synthetic construct
  source 1..75: mol_type = other DNA
cccgacagatgatgatgagctgccggaagtcaccggacctgcgtggataatcgacaatgtggcgcattatggcgg

SEQ ID NO: 274744 - DNA, 75 bp, synthetic construct
  source 1..75: mol_type = other DNA
agtttgaaccgtgccccggactgacggctgccggacgtggcgttgtatcgccggagaatatcgcgttcacccgct

SEQ ID NO: 274745 - DNA, 75 bp, synthetic construct
  source 1..75: mol_type = other DNA
gctctgtcatgccgaccaacctgtacgggccgcacgacaacttccatccgaataattcgcatgtgatccccgcat

SEQ ID NO: 274746 - DNA, 75 bp, synthetic construct
  source 1..75: mol_type = other DNA
cgcggtgatgtggaactggtattacgcacccgcgacgagctgaaccttctggatagccgtgcggtgcatgatttc

SEQ ID NO: 274747 - DNA, 75 bp, synthetic construct
  source 1..75: mol_type = other DNA
gtatctacccgaaactggcaaaacagccgatggcagaaagcgagttgttgcagggcacgctggagccgaccaacg

SEQ ID NO: 274748 - DNA, 75 bp, synthetic construct
  source 1..75: mol_type = other DNA
ggtggtgttctgaacggtgttccttctgcgtatcactggtatacggaacagtatggcgtgaagtggcctgtgggg

SEQ ID NO: 274749 - DNA, 75 bp, synthetic construct
  source 1..75: mol_type = other DNA
gcatgaactctggctgcagagtggtactggccagcgtcgctgggaaggattaccggatgaggtcagggaaaccat

SEQ ID NO: 274750 - DNA, 75 bp, synthetic construct
  source 1..75: mol_type = other DNA
aaccttacgccattgccaaaattgccgggatcaaactgtgcgaatcttacaaccgccagtatggacgcgattacc

SEQ ID NO: 274751 - DNA, 75 bp, synthetic construct
  source 1..75: mol_type = other DNA
ccgccgtttcagctgcacgctggagcactggtacgccgaacagggctgcaatttctgtggctggcagttgtatga

SEQ ID NO: 274752 - DNA, 75 bp, synthetic construct
  source 1..75: mol_type = other DNA
atgctgcatgaactctggctgcagagcggtattggccggcgtcgctggaaaggattaccggatgatgtcagggaa

SEQ ID NO: 274753 - DNA, 75 bp, synthetic construct
  source 1..75: mol_type = other DNA
accatcaccgcacttttcaccgcaaaaagaggtgactggtgtgacatctggggtaacgaggatgtatcggtgggc

SEQ ID NO: 274754 - DNA, 75 bp, synthetic construct
  source 1..75: mol_type = other DNA
gctgaagtttgcctttggcttactgctgatggcttgtggctttatgttgttggcatttgatgcccgacatgcagc

SEQ ID NO: 274755 - DNA, 75 bp, synthetic construct
  source 1..75: mol_type = other DNA
gacgtgatggcggtttttcgctgctgtatgctgcgggcaatatcggttctatcgccgccccaatcgcctgcggcc

SEQ ID NO: 274756 - DNA, 75 bp, synthetic construct
  source 1..75: mol_type = other DNA
aatctgggagtacttcagtttttacggcatgcgtgccttactcattctctatctcacccatcagcttggttttga

SEQ ID NO: 274757 - DNA, 75 bp, synthetic construct
  source 1..75: mol_type = other DNA
aaagaactgattgtctatcgccatatccagcattggatgccggaagtggatctgctgttgagcacgctatcactg

SEQ ID NO: 274758 - DNA, 75 bp, synthetic construct
  source 1..75: mol_type = other DNA
ttcaatattgaagtacctacagcactattccagtcggtgaatgcaattgcggtgatgctcgctggggttgttctg

SEQ ID NO: 274759 - DNA, 75 bp, synthetic construct
  source 1..75: mol_type = other DNA
atccacgcgaggtatggataaaaaagcgctcactcgcgtgaagtttgccttgccggtatggagttggttggtggt

SEQ ID NO: 274760 - DNA, 75 bp, synthetic construct
  source 1..75: mol_type = other DNA
ggatagcgaaaccggtgttgtaactggtgttgcggctggtactgccacaatcgaggttactacccaagatggtag

SEQ ID NO: 274761 - DNA, 75 bp, synthetic construct
  source 1..75: mol_type = other DNA
cggcttcaccgtcagttttggttgggaaaactgttcaacttagtgcaggtattactatgggtaagagtgccagtt

SEQ ID NO: 274762 - DNA, 75 bp, synthetic construct
  source 1..75: mol_type = other DNA
aatttgccgacatcttctggaattggctttgatcgctctgatttagccgttatcgccgcgatgaatcatattggg

SEQ ID NO: 274763 - DNA, 75 bp, synthetic construct
  source 1..75: mol_type = other DNA
gtttaagtaaggaattcaagcagcaattacatgatttaggtgccttaaaattatacgatgacgttgcttatgagg

SEQ ID NO: 274764 - DNA, 75 bp, synthetic construct
  source 1..75: mol_type = other DNA
aaagcctgccaagaaatttattgaaaaatattctctccttcaggggtttagtttaagtaaggaattcaagcagca

SEQ ID NO: 274765 - DNA, 75 bp, synthetic construct
  source 1..75: mol_type = other DNA
aatgctcgtgtgcgggattgtaataattatattgttacggtttaccagtattttaagtggttacgagagtgtatt

SEQ ID NO: 274766 - DNA, 75 bp, synthetic construct
  source 1..75: mol_type = other DNA
acttcaattgttcgtgaaggagtaataaaaacatggggtaatgaaggtattacaattaagaaacagccgatcatt

SEQ ID NO: 274767 - DNA, 75 bp, synthetic construct
  source 1..75: mol_type = other DNA
atgccaaactggtgcagtaaccgtatgcatttttctggtgaaccggcacaggtcgctgagattaaacgactggcc

SEQ ID NO: 274768 - DNA, 75 bp, synthetic construct
  source 1..75: mol_type = other DNA
atttctggactggcagagattctcggtggtgttctggcgtggttaatcctcggtagcatgatttctccagtggta

SEQ ID NO: 274769 - DNA, 75 bp, synthetic construct
  source 1..75: mol_type = other DNA
gccacctttgtcacagcgagcagtaacctggagctgggctttggtatcgctctggcagtggcgttgcacaatatt

SEQ ID NO: 274770 - DNA, 75 bp, synthetic construct
  source 1..75: mol_type = other DNA
gtgcatgatttctttgccagcgaacgtattgaccaggtctatctggcggcggcgaaagtgggcggcattgttgcc

SEQ ID NO: 274771 - DNA, 75 bp, synthetic construct
  source 1..75: mol_type = other DNA
aggtttaggctggaagtatcagattaaccttgaagcaggcttggcacggacttatgaatggtttttaagaaatca

SEQ ID NO: 274772 - DNA, 75 bp, synthetic construct
  source 1..75: mol_type = other DNA
acggtggtgttctgaacggtgttccttctgcatatcactggtataccgaacagtatggcgtgaagtggcctgtgg

SEQ ID NO: 274773 - DNA, 75 bp, synthetic construct
  source 1..75: mol_type = other DNA
aggaggggatcgaccgttatctcacgccctcccgggcgcaaccacgtaacggtagtgccgtgaccggtgaatacc

SEQ ID NO: 274774 - DNA, 75 bp, synthetic construct
  source 1..75: mol_type = other DNA
cccgccagcctgctggatgcggcgttccgcgtcgccgatgacgagagcaaccgctttacgctaccgcaggcggtg

SEQ ID NO: 274775 - DNA, 75 bp, synthetic construct
  source 1..75: mol_type = other DNA
gcgaatttcgattatctctacctgagcgggattagcctggcgatcttaagcccgaccagccgcgaaaagctgctt

SEQ ID NO: 274776 - DNA, 75 bp, synthetic construct
  source 1..75: mol_type = other DNA
caggaattatggtggcgctctcggttgatgaattaatgccgctcgccaaagagattgaccctaataataacccca

SEQ ID NO: 274777 - DNA, 75 bp, synthetic construct
  source 1..75: mol_type = other DNA
atttctgggctggcggaaatactcggcggcattctggcgtggttgatcctcggcagcatgatttcacccgtcgtt

SEQ ID NO: 274778 - DNA, 75 bp, synthetic construct
  source 1..75: mol_type = other DNA
tcgcttgaaagggcccgcgtggcggctgcacaggccgacccggctgaccgtggccgctttttctttgattaccgt

SEQ ID NO: 274779 - DNA, 75 bp, synthetic construct
  source 1..75: mol_type = other DNA
cattgctgaaacctcccgccgaagcaattaaagatcctgccaccttcaaaacgggctgggttgttttattgcttt

SEQ ID NO: 274780 - DNA, 75 bp, synthetic construct
  source 1..75: mol_type = other DNA
aaaaaaataacaggatttttgctaacataacctttactaacaatagctctaccacgtatttttttctaaacatta

SEQ ID NO: 274781 - DNA, 75 bp, synthetic construct
  source 1..75: mol_type = other DNA
ccaccgagggtgaacgctgggataatctggcgttccgctattatggcgatccgatgggctatgagcgcatcatta

SEQ ID NO: 274782 - DNA, 75 bp, synthetic construct
  source 1..75: mol_type = other DNA
aaatatatcaagacattttctcaactatatctcctcagcattatcatttagagattcaacgcgaaatctacataa

SEQ ID NO: 274783 - DNA, 75 bp, synthetic construct
  source 1..75: mol_type = other DNA
tggctttgatatctggcgttgtgcatgtaagcgatattccggtggtgtggaatatcgtctggaacgcgacagcga

SEQ ID NO: 274784 - DNA, 75 bp, synthetic construct
  source 1..75: mol_type = other DNA
tctattcaacagagactggacgtatcgacgaaccgaaagccgcacctgtgcgccctaaaggcgacggcgtagtgc

SEQ ID NO: 274785 - DNA, 75 bp, synthetic construct
  source 1..75: mol_type = other DNA
tctactcaacggaaactggacgtattgatgaacccaaagcgacccctgtacgaccaaaaggcgacggagtggtgc

SEQ ID NO: 274786 - DNA, 75 bp, synthetic construct
  source 1..75: mol_type = other DNA
acttatggttgccaacgccggggagagctggacaaccccgcatgaagcggagcgcggtttcaccatcctgttcga

SEQ ID NO: 274787 - DNA, 75 bp, synthetic construct
  source 1..75: mol_type = other DNA
ctgcacattcgggatatttctctatattcgcgcttcatcagaaaactgaaggaacctccattgaatcgaactaat

SEQ ID NO: 274788 - DNA, 75 bp, synthetic construct
  source 1..75: mol_type = other DNA
tttcattattggcgagacaaactgcacggcgaacctgctgaacgctagtcaggtaagcaccatcattcgctatga

SEQ ID NO: 274789 - DNA, 75 bp, synthetic construct
  source 1..75: mol_type = other DNA
atgacgatcgcaaaccgtggttacaggcactgaacgacgccgcgtttgccatgcagcgcactaataaagtgtcgc

SEQ ID NO: 274790 - DNA, 75 bp, synthetic construct
  source 1..75: mol_type = other DNA
caaatcaccgccgcaagttacttgtgggcggcttcgctggggtatggttatccggagctgttcagcattcccggt

SEQ ID NO: 274791 - DNA, 75 bp, synthetic construct
  source 1..75: mol_type = other DNA
catattgggcatcagcgcgccagatcgggagcgccttgccttctatctgcgcctcgacccgctgacgtggggctg

SEQ ID NO: 274792 - DNA, 75 bp, synthetic construct
  source 1..75: mol_type = other DNA
tctgacgccgatagtcatcgctatgctgctggcattagggttcagcaaaggcaccacgctggcattcgtcatggc

SEQ ID NO: 274793 - DNA, 75 bp, synthetic construct
  source 1..75: mol_type = other DNA
cctttattgccgtgattatcattagcctgttgcttgatgagtccggctttttcgaatgggcagcgctgcacgttt

SEQ ID NO: 274794 - DNA, 75 bp, synthetic construct
  source 1..75: mol_type = other DNA
tggagtgcaatgctgggcgcgggactggctctgatttctggcgttgtgcatgtaagcgatattccggtggtgtgg

SEQ ID NO: 274795 - DNA, 75 bp, synthetic construct
  source 1..75: mol_type = other DNA
tactgtggctgcacgttctgtcgcagaaaaatatcaaaattacctggggatattacttccgggtgggcattgtca

SEQ ID NO: 274796 - DNA, 75 bp, synthetic construct
  source 1..75: mol_type = other DNA
ttcctgacagctttcctgtcttccatcatgaacaatatgcctaccgtgctggttggcgctctctctattgatggc

SEQ ID NO: 274797 - DNA, 75 bp, synthetic construct
  source 1..75: mol_type = other DNA
aatatcgtctggaacgcgacggcgacctttattgccgtgattattatcagcctgctgcttgatgaatcaggcttt

SEQ ID NO: 274798 - DNA, 75 bp, synthetic construct
  source 1..75: mol_type = other DNA
ctttggactgggcttcaccgagtatgcgtcggtaatggtgccggtggatattgcagccattgttgccacgctggt

SEQ ID NO: 274799 - DNA, 75 bp, synthetic construct
  source 1..75: mol_type = other DNA
gatcatgctgcatctcttcttccgcagggatattccggcaacgtatgacgtttcgctgctgaagacgcctgccag

SEQ ID NO: 274800 - DNA, 75 bp, synthetic construct
  source 1..75: mol_type = other DNA
tgatggctggttaccggaaaacgcattgaaaattatggaaaacgcgctaaccgccaataataacaaaattgatgc

SEQ ID NO: 274801 - DNA, 75 bp, synthetic construct
  source 1..75: mol_type = other DNA
tcctgaccatcgtattggttatctggcagccgaaaggtttaggcatcggctggagtgcgacactgggcgccgtac

SEQ ID NO: 274802 - DNA, 75 bp, synthetic construct
  source 1..75: mol_type = other DNA
cagatagtgtggaatgcgaccgccacctttatcgccgtgatcatcatcagtcttctgctcgacgaatccggcttc

SEQ ID NO: 274803 - DNA, 75 bp, synthetic construct
  source 1..75: mol_type = other DNA
gtctggcaacactgctgtggctgcatgtgcttgcccagaaaaatattactatcacctggggatattacttccgta

SEQ ID NO: 274804 - DNA, 75 bp, synthetic construct
  source 1..75: mol_type = other DNA
ggctggagcgcgagtatcggggctgtgctggcgctgggaaccggtgtcatccatatctctgatattcccgttgtc

SEQ ID NO: 274805 - DNA, 75 bp, synthetic construct
  source 1..75: mol_type = other DNA
tatgcagctcattttcattggccgagtgaaacgttgataccgccgactgtgggtgatgccctctttgacttaatg

SEQ ID NO: 274806 - DNA, 75 bp, synthetic construct
  source 1..75: mol_type = other DNA
gaatgtggcgctgaatatcaagtcactggatgatttttcaccagatagcgtggcccggcaggttccggaagtgaa

SEQ ID NO: 274807 - DNA, 75 bp, synthetic construct
  source 1..75: mol_type = other DNA
tggcaccaaaaccggcgaccactactaccgttacccgtggcggttttggtgaatctgttgccaaacaaagcacta

SEQ ID NO: 274808 - DNA, 75 bp, synthetic construct
  source 1..75: mol_type = other DNA
ttattccttcgcgagttctggtcggtttgggagcggtatgctttacgttgttctcaatcgtttcaatattagaag

SEQ ID NO: 274809 - DNA, 75 bp, synthetic construct
  source 1..75: mol_type = other DNA
gtgaacatatatatcgggtggcttttcaaattaatccctttgattatgggattaatttgcatcgcgttaggtggc

SEQ ID NO: 274810 - DNA, 75 bp, synthetic construct
  source 1..75: mol_type = other DNA
tatagctcctacacttgttggcggctcccataagcatggtgggccagatcttggcccgacaagagccaaaagatc

SEQ ID NO: 274811 - DNA, 75 bp, synthetic construct
  source 1..75: mol_type = other DNA
tatctcttttaaattttcaaaaatatcctatgggctggagcgctaccattcatttcatagcacaagaccactttg

SEQ ID NO: 274812 - DNA, 75 bp, synthetic construct
  source 1..75: mol_type = other DNA
ttttccttttttggacaatacaaaacactcatccaggatctgattgatcattttagatatggaaatggcaacagt

SEQ ID NO: 274813 - DNA, 75 bp, synthetic construct
  source 1..75: mol_type = other DNA
tgcgcaccctgcgccgggtcaacggcgttgcgctctgtttaatcgaccactacttcgcagatctcacgctctggc

SEQ ID NO: 274814 - DNA, 75 bp, synthetic construct
  source 1..75: mol_type = other DNA
atgaaacggacaaaatccatacgccacgcatcgttccgcaaaaactggagcgcacgccatctgacacctgtcgct

SEQ ID NO: 274815 - DNA, 75 bp, synthetic construct
  source 1..75: mol_type = other DNA
accatgaccgtaccgaaaacagccatggcgccgaaaccggccaccaccaccaccgttacccgtggcggctttggt

SEQ ID NO: 274816 - DNA, 75 bp, synthetic construct
  source 1..75: mol_type = other DNA
tggcgaaggtcagtgccagcaggcgcctgttcaggcaggaatggcgcctgaaaatcaggcgcaagcccagcaatc

SEQ ID NO: 274817 - DNA, 75 bp, synthetic construct
  source 1..75: mol_type = other DNA
ttacagcatattctcaaaagtctggctactggcactggtctggagacgtacctgttcgttagccaacagaatacc

SEQ ID NO: 274818 - DNA, 75 bp, synthetic construct
  source 1..75: mol_type = other DNA
cttgccttttgggtggaagagcatcatggagagcgagcagtggcaccctttaaacgctttattgaacaactctaa

SEQ ID NO: 274819 - DNA, 75 bp, synthetic construct
  source 1..75: mol_type = other DNA
actcggcaaacgcgatatttatcaacgtagcggcatccagtttctggcccttcaatacgctttatcagttgcgtg

SEQ ID NO: 274820 - DNA, 75 bp, synthetic construct
  source 1..75: mol_type = other DNA
actcggcaaacgcgatatttatcaacgtagcggcatccacagtttctgcccttcaatacgctttatcagttgcgt

SEQ ID NO: 274821 - DNA, 75 bp, synthetic construct
  source 1..75: mol_type = other DNA
gaactcgcagataatcttgttcagttttcaactgtcacgccaggggccgacggaaacaactggattgtcgaaatc

SEQ ID NO: 274822 - DNA, 75 bp, synthetic construct
  source 1..75: mol_type = other DNA
ggtaactatctgtgtagcctcagtccccaatggtcctttgaatgcgttcgtcggacagctgacgtaattgaggat

SEQ ID NO: 274823 - DNA, 75 bp, synthetic construct
  source 1..75: mol_type = other DNA
tccaaagatgcaagcaacattcaagcaaaaattaacatggcccaagagatcataccgcttgcacaaaaattactg

SEQ ID NO: 274824 - DNA, 75 bp, synthetic construct
  source 1..75: mol_type = other DNA
ggggaagatgaaagtgatatgacagcaatgggatttgagctagacccagtagagtggcaggctttcgttgaatct

SEQ ID NO: 274825 - DNA, 75 bp, synthetic construct
  source 1..75: mol_type = other DNA
gacggggagctggttacggtcaccattaagacagctgctgcgaccggtaccctgaatgttctgctgcgttatacc

SEQ ID NO: 274826 - DNA, 75 bp, synthetic construct
  source 1..75: mol_type = other DNA
ctgcaaaatttgccagatatgtgcccgtggagccgtacaccacactgcgtgacggggagctggttactgtcacca

SEQ ID NO: 274827 - DNA, 75 bp, synthetic construct
  source 1..75: mol_type = other DNA
aaatccatcgttttaacaatgggctgcatagtcagaacggctatgtcacctgggatgtggatagccttgaaggtg

SEQ ID NO: 274828 - DNA, 75 bp, synthetic construct
  source 1..75: mol_type = other DNA
atgatttaatcacaaatcctgtatttatgctgtcttttgcagttttttgggtgtctacgggaacacttttaatca

SEQ ID NO: 274829 - DNA, 75 bp, synthetic construct
  source 1..75: mol_type = other DNA
accgtatctaatcacgaggaggaggaaaaggattttacagtagaactagaattattctttgaaatagacgaaggc

SEQ ID NO: 274830 - DNA, 75 bp, synthetic construct
  source 1..75: mol_type = other DNA
ccgtctccatttttggttttcataccacctggggcgcgtttagctttccgtttatctttctcgctactgacctga

SEQ ID NO: 274831 - DNA, 75 bp, synthetic construct
  source 1..75: mol_type = other DNA
ggcccgtcgtatcatctttgcggtgatgatcccggcgttactgatctcctacgtcatctcgtcgctgttctatat

SEQ ID NO: 274832 - DNA, 75 bp, synthetic construct
  source 1..75: mol_type = other DNA
acttccggagcagaaactgctggcaccacgcccgctgtttacggctgcccgtgaagtgaaaacgattgttccggt

SEQ ID NO: 274833 - DNA, 75 bp, synthetic construct
  source 1..75: mol_type = other DNA
tgtccggttttagtgtaaagcatacacagtcgttattttccatacaatgtggttttacaattggaaaatatataa

SEQ ID NO: 274834 - DNA, 75 bp, synthetic construct
  source 1..75: mol_type = other DNA
gggttcatggcagggattcggcgttctcgcccacttcaacctgtttgtcgcccgtatcgctaccgccagctttat

SEQ ID NO: 274835 - DNA, 75 bp, synthetic construct
  source 1..75: mol_type = other DNA
gtcagagtcgtcgctggtggctggctccgacggcttccacactgtttggtaacgtcagcgatacgctggccttct

SEQ ID NO: 274836 - DNA, 75 bp, synthetic construct
  source 1..75: mol_type = other DNA
tatattgataatcaggatgtttatcatcagccatccagtgtgttttttgttattaaaccgtctgcgtggggaaaa

SEQ ID NO: 274837 - DNA, 75 bp, synthetic construct
  source 1..75: mol_type = other DNA
aatgagaaggccaaaaaactggagcagtcctcagaagcaaagccggttgcggcatcactgccgcgcctggctgaa

SEQ ID NO: 274838 - DNA, 75 bp, synthetic construct
  source 1..75: mol_type = other DNA
ccccgtccgctaagaacgggtgagcagacggctgcattatggatagcgccttatattgataatcaggatgtttat

SEQ ID NO: 274839 - DNA, 75 bp, synthetic construct
  source 1..75: mol_type = other DNA
gcagcaggcctgctgtgacagcacttccggagcagaaactgctggcaccacgcccgctgtttaccgctgcccggg

SEQ ID NO: 274840 - DNA, 75 bp, synthetic construct
  source 1..75: mol_type = other DNA
ctctgctggggaccttattactttccggctgtgccggaactaatacggaatttgagtgtaacgccaccacatcag

SEQ ID NO: 274841 - DNA, 75 bp, synthetic construct
  source 1..75: mol_type = other DNA
gggaagtgaaaacgattgttccggtcagttcagttgcgccggtaacacctcctcgtccgctaagaacgggtgagc

SEQ ID NO: 274842 - DNA, 75 bp, synthetic construct
  source 1..75: mol_type = other DNA
aaatttcaactatcggcggaacatattataaaatgatatttaatggttctttcaacgattatataaatataggga

SEQ ID NO: 274843 - DNA, 75 bp, synthetic construct
  source 1..75: mol_type = other DNA
ggtacggttaattgtgacaccagcgaactgggtggtgctcgcttctcgtttagctggccgttatggcataacatc

SEQ ID NO: 274844 - DNA, 75 bp, synthetic construct
  source 1..75: mol_type = other DNA
tacaccgccagcgagacgttgctgctggacgtgtcccgtgccatctacccggacaccacgcaactggagctgcgc

SEQ ID NO: 274845 - DNA, 75 bp, synthetic construct
  source 1..75: mol_type = other DNA
cagcattaccgtctggcgcgtgatgtggaaattgtcgttattgatggtgtgcgtcgctttggcaatggctggtgg

SEQ ID NO: 274846 - DNA, 75 bp, synthetic construct
  source 1..75: mol_type = other DNA
ttcctgactgcattcctgtcttccatcatgaataacatgcctaccgtgctggttggcgctctctctattgatggc

SEQ ID NO: 274847 - DNA, 75 bp, synthetic construct
  source 1..75: mol_type = other DNA
catcaaagatccagcaacattcaaaacgggctggattgttttagtccttttgttagtcggtttttttgtactcga

SEQ ID NO: 274848 - DNA, 75 bp, synthetic construct
  source 1..75: mol_type = other DNA
ctaacagaatacctttctggcgtacttaatgtattggcagataacggtctgtgggccgcgacgctgggcaccgga

SEQ ID NO: 274849 - DNA, 75 bp, synthetic construct
  source 1..75: mol_type = other DNA
cggtggcgcacaacgaacagtaccgtcaactgattgaaggctacatgctgcgccacaaagtgaagcctggtatta

SEQ ID NO: 274850 - DNA, 75 bp, synthetic construct
  source 1..75: mol_type = other DNA
gacgcaaaacgacccgcgtgtgacccgtgtcggcaacttcctgcgccgcacctcgctggatgaattgccgcagtt

SEQ ID NO: 274851 - DNA, 75 bp, synthetic construct
  source 1..75: mol_type = other DNA
tagtcgtgcattcaagaaagagttttctttatctccaatgaaataccgaaaacggagcattattgatagtcaaaa

SEQ ID NO: 274852 - DNA, 75 bp, synthetic construct
  source 1..75: mol_type = other DNA
gcgcttttttgccacgctgaagatgtgtggtgtgcaaccggaaaaatgtgtgccgttgtccgatcatcagtcttt

SEQ ID NO: 274853 - DNA, 75 bp, synthetic construct
  source 1..75: mol_type = other DNA
atggtcgatattacccgggtacgccgcgaatccctgcgctggagtctgctggttgccctgaacaaaacccgccct

SEQ ID NO: 274854 - DNA, 75 bp, synthetic construct
  source 1..75: mol_type = other DNA
acctggaatacattcgcgaatggagcctgtggtttgatatcaaaattgttttcctgacggtgttcaaaggcttcg

SEQ ID NO: 274855 - DNA, 75 bp, synthetic construct
  source 1..75: mol_type = other DNA
atggggcgcggcattcaggctgggcgcgtgtggaccaactgttatcacgcttacccggcacatgcggcgtttggc

SEQ ID NO: 274856 - DNA, 75 bp, synthetic construct
  source 1..75: mol_type = other DNA
aagggcgggactcgcacgacctgaataaatacatctggcgttttatcgccctgagcacggctaagccgcgcgtga

SEQ ID NO: 274857 - DNA, 75 bp, synthetic construct
  source 1..75: mol_type = other DNA
tggtgaatatcgtttcggcagatttctttagcctcggctttcgcgaatacgcctcggtgatggtgccggtggata

SEQ ID NO: 274858 - DNA, 75 bp, synthetic construct
  source 1..75: mol_type = other DNA
agcagtgttcgctgaccgaagccaaagacgcctttagggaaggtgcgaataagcaggtcatgtcttcccaagctg

SEQ ID NO: 274859 - DNA, 75 bp, synthetic construct
  source 1..75: mol_type = other DNA
aagggcgggactcgcacaacctgaataaatatatctggcgttttatcgccctgagcacagcacaaccgcgcgtga

SEQ ID NO: 274860 - DNA, 75 bp, synthetic construct
  source 1..75: mol_type = other DNA
gataaatgggcgcacacctcggtgcaggatcgcgcggcgattctgtttaagattgccgatcgaatggagcagaat

SEQ ID NO: 274861 - DNA, 75 bp, synthetic construct
  source 1..75: mol_type = other DNA
ctgctggcattagggttcagtaaaggcaccacgctggcattcgtcatggcggccgggtttattgccgatacggcc

SEQ ID NO: 274862 - DNA, 75 bp, synthetic construct
  source 1..75: mol_type = other DNA
aatattgtctggaacgcgacggcaacatttatcgccgttattatcatcagcctgttgctggatgagtcaggcttt

SEQ ID NO: 274863 - DNA, 75 bp, synthetic construct
  source 1..75: mol_type = other DNA
ggtctacggtctacgcaacgccgggctaaccgaatacctttcaggtgtgctgaacgtactggcggataaaggact

SEQ ID NO: 274864 - DNA, 75 bp, synthetic construct
  source 1..75: mol_type = other DNA
ctttaggccttaaaatgacaagctcaaagtattattttaagtcttttttaacaattccttctcttaaatcgttat

SEQ ID NO: 274865 - DNA, 75 bp, synthetic construct
  source 1..75: mol_type = other DNA
gacggtctgatagttaccggcgcgccgctgggcctggtggagtttaatgatgtcgcttactggccgcagatcaaa

SEQ ID NO: 274866 - DNA, 75 bp, synthetic construct
  source 1..75: mol_type = other DNA
acgtcacctcaacgctgtttgtctgttgggcggttcaggccgcactcaatattctttacggcattcctaagcaaa

SEQ ID NO: 274867 - DNA, 75 bp, synthetic construct
  source 1..75: mol_type = other DNA
atacctcgcgaaaactgatagtattgatgccagagtgctttcccgtaagcgtcaacggagcaccgtattgacgct

SEQ ID NO: 274868 - DNA, 75 bp, synthetic construct
  source 1..75: mol_type = other DNA
gcgacgaagagattgaaaacttcgtggcgaaagacttctttgaagtcaaagcgcatatcgtgacacctgccgatg

SEQ ID NO: 274869 - DNA, 75 bp, synthetic construct
  source 1..75: mol_type = other DNA
gcagccgctggtggggacgctgcatcagctaattgatcaagccaaacgtacgccggtgcggcagtttcgcggcat

SEQ ID NO: 274870 - DNA, 75 bp, synthetic construct
  source 1..75: mol_type = other DNA
gcgcatatcgtgacgcctgccgatgagcgatttaccgctatctggcaaccgagcgaagcgtgtgagccgtaccag

SEQ ID NO: 274871 - DNA, 75 bp, synthetic construct
  source 1..75: mol_type = other DNA
ccggcagcagacctgcggtgacagcacatccggagcagaaactgctggcaccacgtccgttgtttacggctgccc

SEQ ID NO: 274872 - DNA, 75 bp, synthetic construct
  source 1..75: mol_type = other DNA
ccccggccattgcgaacgggtgagcagacggcggcattatggatagcgccttatattgataaccaggatatttat

SEQ ID NO: 274873 - DNA, 75 bp, synthetic construct
  source 1..75: mol_type = other DNA
cattgtcccggaaaagtggcaattacagccccgaccctccgtgactaaacaacttaatgtcatcaaacgctttct

SEQ ID NO: 274874 - DNA, 75 bp, synthetic construct
  source 1..75: mol_type = other DNA
tatacgtaatcgctgctgggatgacaaaaaggtggatgcgcaccacgctatcatcccgaccgctcgcagttctgc

SEQ ID NO: 274875 - DNA, 75 bp, synthetic construct
  source 1..75: mol_type = other DNA
ttcgctttcggcgttgcagattgaagcggcaaaacgctttggtctgagcgcgcagaacgtgcttgatatctgcca

SEQ ID NO: 274876 - DNA, 75 bp, synthetic construct
  source 1..75: mol_type = other DNA
tcgttcagtaaataacagctatagcgccctttataatttgagctggacgtttatttgttttttatttttgcagta

SEQ ID NO: 274877 - DNA, 75 bp, synthetic construct
  source 1..75: mol_type = other DNA
aatcagaatccgcgccgctgcctttttcgctttcagcgttgcagattgaagcggcaaaacgttttggtctgagtg

SEQ ID NO: 274878 - DNA, 75 bp, synthetic construct
  source 1..75: mol_type = other DNA
cgcagaacgtgcttgatatctgtcagaaattgtacgaaacgcacaagctgattacctatccacgttccgattgtc

SEQ ID NO: 274879 - DNA, 75 bp, synthetic construct
  source 1..75: mol_type = other DNA
agtatctgatgcaattctgcccggatgccgtgttccgtaaatgtgttatcgaactggaaatcgccaaaggcaaat

SEQ ID NO: 274880 - DNA, 75 bp, synthetic construct
  source 1..75: mol_type = other DNA
cactgatgcctggtgcggacagtattatggtggcaccatttgcttctgcgactcaacacttaaacaacctgccct

SEQ ID NO: 274881 - DNA, 75 bp, synthetic construct
  source 1..75: mol_type = other DNA
agattgatgaatcagttttacaggtcaggcaaagcctgcgtgaagagttttatccgcaggagattgaacaagagc

SEQ ID NO: 274882 - DNA, 75 bp, synthetic construct
  source 1..75: mol_type = other DNA
acggatactggggaaatggcgactcctgattatctggttattctccggcatctttggtgggctcatcagcgcctg

SEQ ID NO: 274883 - DNA, 75 bp, synthetic construct
  source 1..75: mol_type = other DNA
gaaccctggcgcttattgagcagtgtctttctgcacagtagtttttcccatttgctgatgaatatgtttgcactc

SEQ ID NO: 274884 - DNA, 75 bp, synthetic construct
  source 1..75: mol_type = other DNA
aaacctgatgcgcggcttgtcgaaccgcaacaggagcgtgcttcatgagcgaaacttttttccatctgctggggc

SEQ ID NO: 274885 - DNA, 75 bp, synthetic construct
  source 1..75: mol_type = other DNA
cagtgacccgaaacgcacgccagaggtcagcgataatccggtaatgattggcgaattactgcgcgagtttcccga

SEQ ID NO: 274886 - DNA, 75 bp, synthetic construct
  source 1..75: mol_type = other DNA
gatgaccaaagacgaccatctggttgtcctgcatgaccattatctcgatcgtgttactgatgttgccgatcgttt

SEQ ID NO: 274887 - DNA, 75 bp, synthetic construct
  source 1..75: mol_type = other DNA
tcacaagatgaacgggcggctattaacgcaatttgcgctaaagttaaatttattagtctttattcgctcaagtga

SEQ ID NO: 274888 - DNA, 75 bp, synthetic construct
  source 1..75: mol_type = other DNA
cttaaaagacctggaaaaccacatcttccccattctaggtaaaaggccaattaacgagatcacaaccatggatct

SEQ ID NO: 274889 - DNA, 75 bp, synthetic construct
  source 1..75: mol_type = other DNA
cgatggcagaacatctgccccggtatgaggatgatattatgactatcgctgaacgacttgaactggcgggtatcg

SEQ ID NO: 274890 - DNA, 75 bp, synthetic construct
  source 1..75: mol_type = other DNA
aaatggacaggacgctctcgcttgatccgcaggcaattattcgtcatccccaatatggcaatgtggcttgtatcc

SEQ ID NO: 274891 - DNA, 75 bp, synthetic construct
  source 1..75: mol_type = other DNA
ggcaattagtgatgatgctaaggcgcgcgaggaatttctaactaaattccgccgcgcgcaggcgtccagtgctga

SEQ ID NO: 274892 - DNA, 75 bp, synthetic construct
  source 1..75: mol_type = other DNA
gccgcgtttctgctgatgcccattccgcgctacagcctgcatcgcttgcgccactggattgccctgccgatcggc

SEQ ID NO: 274893 - DNA, 75 bp, synthetic construct
  source 1..75: mol_type = other DNA
gctttaacggtcagcatgtggcgatgctcggctttatgttgactctggcagcggcatttagttgggcgagtggca

SEQ ID NO: 274894 - DNA, 75 bp, synthetic construct
  source 1..75: mol_type = other DNA
ccgataagcgggccattgaattactggaacagcgcaggctgcaacgactgaacaacgaggacaacaaccatgctg

SEQ ID NO: 274895 - DNA, 75 bp, synthetic construct
  source 1..75: mol_type = other DNA
aaaagccgctatggtgaaaatgaagagatcctgtcgctgctcaatctttatcataatctgctgcgggaatggtcg

SEQ ID NO: 274896 - DNA, 75 bp, synthetic construct
  source 1..75: mol_type = other DNA
gcgcaatctcgtgaaaccggaattgcctccgttaaagcaaatggcacaagccagacggtgaaagacaatacgtaa

SEQ ID NO: 274897 - DNA, 75 bp, synthetic construct
  source 1..75: mol_type = other DNA
ttctggtgtgcgttgggggcattgtgtttcttatttatcagcagtttgtttaaatcacagcacagaaaaaattaa

SEQ ID NO: 274898 - DNA, 75 bp, synthetic construct
  source 1..75: mol_type = other DNA
gataagaacggtaacagagtaacggtaaaagaactgatgtttgaccgtgtgtattttatccgtgatggctattca

SEQ ID NO: 274899 - DNA, 75 bp, synthetic construct
  source 1..75: mol_type = other DNA
aatcccgctttccagaaaaaaccatgtgtcacgtgtgaatgtggataaaaaactacaggaactgaaaaacatgat

SEQ ID NO: 274900 - DNA, 75 bp, synthetic construct
  source 1..75: mol_type = other DNA
gatgtatctggcgggttgcaccgttatcgttactggtgcccgtagtcggactggcaagtgcggcactattgttgg

SEQ ID NO: 274901 - DNA, 75 bp, synthetic construct
  source 1..75: mol_type = other DNA
cgctgcttggacgctatgaaacatggcgtgtcgcaccattatcattactggtgccggtagtcggtctggcaagtg

SEQ ID NO: 274902 - DNA, 75 bp, synthetic construct
  source 1..75: mol_type = other DNA
atcgatatgaccaccatcttgtctctgatgtatctggcgtttgtggcgacaattgttggttatgggatctggggg

SEQ ID NO: 274903 - DNA, 75 bp, synthetic construct
  source 1..75: mol_type = other DNA
agacatttaaaaagcacactaatgataatatatgggatatcaaacatagatgctaatagttatagaaacatatca

SEQ ID NO: 274904 - DNA, 75 bp, synthetic construct
  source 1..75: mol_type = other DNA
agcgctaacgacttttaccggtctgccgcatcgctttgaagtggtgcttgagcacaatggcgtacgctggattaa

SEQ ID NO: 274905 - DNA, 75 bp, synthetic construct
  source 1..75: mol_type = other DNA
cgctactggttgtggtggtgtgggggcttaattttgtggtcatcaaagtgggacttcacaacatgccaccgctga

SEQ ID NO: 274906 - DNA, 75 bp, synthetic construct
  source 1..75: mol_type = other DNA
gaccagactggccgacatcgaaaaacggttacatcaactcaaggcaatacaagcacaatggcagcgtcgagctaa

SEQ ID NO: 274907 - DNA, 75 bp, synthetic construct
  source 1..75: mol_type = other DNA
aaacagaccggccaactggcggccacggaacacatggcaatggataataccatcaaagccaacctgcatactttt

SEQ ID NO: 274908 - DNA, 75 bp, synthetic construct
  source 1..75: mol_type = other DNA
ggaatctttatggatttatggcggctcgcgaatgacgaaagttgtctgcgccatcagaccttctggcatagttgg

SEQ ID NO: 274909 - DNA, 75 bp, synthetic construct
  source 1..75: mol_type = other DNA
cgactgatgtacctggacctggagtatcgacagggccagtgccgtctgctgtccggcagccgtcagcgggaactg

SEQ ID NO: 274910 - DNA, 75 bp, synthetic construct
  source 1..75: mol_type = other DNA
atcatagcaactctgtcgtctcgcaaaatctatgttggccttgttacttgtccggcgttagaaaacgggctttca

SEQ ID NO: 274911 - DNA, 75 bp, synthetic construct
  source 1..75: mol_type = other DNA
atgaccgacgcagaaatcaacggtgaatatgagtgggaaaccggtaacgtcatcgtagaaaccttcgaaaaacag

SEQ ID NO: 274912 - DNA, 75 bp, synthetic construct
  source 1..75: mol_type = other DNA
atgaccaaccactgggtcgacatcaagaatgccaacctcgtcgtggtgatgggcggtaatgccgctgaagctcac

SEQ ID NO: 274913 - DNA, 75 bp, synthetic construct
  source 1..75: mol_type = other DNA
tgacggtacaacttcctgtggttgctggattttcgccggtagctggacgccggaaggcaaccagatggcacgccg

SEQ ID NO: 274914 - DNA, 75 bp, synthetic construct
  source 1..75: mol_type = other DNA
cgtctgccatcgacctgcttcgcggaagagaacggttcaatcgttaactccggtcgctggttgcagtggcactgg

SEQ ID NO: 274915 - DNA, 75 bp, synthetic construct
  source 1..75: mol_type = other DNA
ctgggcgatggaagccaaaattcacaatggcgcgaagctgattgtgatcgatcctcgctttacgcgtacggcggc

SEQ ID NO: 274916 - DNA, 75 bp, synthetic construct
  source 1..75: mol_type = other DNA
ctcgttcctttacgccctcggctggacgcaacactccatcggtgcgcagaacatccgtacgatggcgatgatcca

SEQ ID NO: 274917 - DNA, 75 bp, synthetic construct
  source 1..75: mol_type = other DNA
ctgcggtacgccaaaagacgcgttcctgaaagtctgcgaatacatcgccgaaaccagtgctcacgataaaacagc

SEQ ID NO: 274918 - DNA, 75 bp, synthetic construct
  source 1..75: mol_type = other DNA
ttgtctttctggcgactgattcaggccattaccgggtgcaggcgggtgacgctgattgcagaaggacggcgctgc

SEQ ID NO: 274919 - DNA, 75 bp, synthetic construct
  source 1..75: mol_type = other DNA
ggacgacacgagattcaggccggggcagcaatgcagtttgcccgtcagtcaggcactgacgcgctgtttcctgag

SEQ ID NO: 274920 - DNA, 75 bp, synthetic construct
  source 1..75: mol_type = other DNA
acccggagctgattacccgtctgtccgatcgctttggcgtgcagtgtattgttgtcgggatcgacacctggtatg

SEQ ID NO: 274921 - DNA, 75 bp, synthetic construct
  source 1..75: mol_type = other DNA
gtgtggtagataaaagctgggtatctcgcgtggcagaagtgatcgacattccgttctgcgtggcgggtgggatta

SEQ ID NO: 274922 - DNA, 75 bp, synthetic construct
  source 1..75: mol_type = other DNA
acagcctgaactggctggactgtctggatgatccagcgcttggtcgggagctttacggcgaaggaaagccgcccc

SEQ ID NO: 274923 - DNA, 75 bp, synthetic construct
  source 1..75: mol_type = other DNA
tgaggatgatctaatgactatcgctgaacgactggaactggctggtatcgagaagggccgcctggaaggtatcga

SEQ ID NO: 274924 - DNA, 75 bp, synthetic construct
  source 1..75: mol_type = other DNA
ggcccgtcgcatgcagcagatgggtatatcgtcagagaaaatcaaacaaatactgcagttctcggatgatgattt

SEQ ID NO: 274925 - DNA, 75 bp, synthetic construct
  source 1..75: mol_type = other DNA
gatatcaccgcctccagcgatggccgggtggtcgataaaagctgggtttcccgtgttgccgaagtgattgatatt

SEQ ID NO: 274926 - DNA, 75 bp, synthetic construct
  source 1..75: mol_type = other DNA
gcctggacgtgcgtgatggtcaggtcgtcaagggcgtgcagttccgtaatcacgaaattatcggcgatatcgtcc

SEQ ID NO: 274927 - DNA, 75 bp, synthetic construct
  source 1..75: mol_type = other DNA
aggcgctgacgaactggtgttctacgatatcaccgcttccagcgatggccgtgtggtagataaaagctgggtatc

SEQ ID NO: 274928 - DNA, 75 bp, synthetic construct
  source 1..75: mol_type = other DNA
tccattaactcccctgcgctggcggacccgacgttaatcactcgcctggccgatcgctttggcgtgcagtgtatt

SEQ ID NO: 274929 - DNA, 75 bp, synthetic construct
  source 1..75: mol_type = other DNA
gacggtgcgctggcagcttctgtattccacaaacaaataatcaatattagtgaattaaaagcgtacctggcaaca

SEQ ID NO: 274930 - DNA, 75 bp, synthetic construct
  source 1..75: mol_type = other DNA
tctctccttcggcgccgataaaatttccatcaactccccggcgctggccgacccggagctgatcacccgtctggc

SEQ ID NO: 274931 - DNA, 75 bp, synthetic construct
  source 1..75: mol_type = other DNA
gccacaaggtcatgcgccagtaatccgcgccagtcaggttaacggcagtaacatttatgccttccgcgccaattg

SEQ ID NO: 274932 - DNA, 75 bp, synthetic construct
  source 1..75: mol_type = other DNA
acatcgaaacacgcccccggcgttcactcttcagagggcatcccgtggaatgagctgccagcttcgcacagggga

SEQ ID NO: 274933 - DNA, 75 bp, synthetic construct
  source 1..75: mol_type = other DNA
actcatcagaaggtatcccgtggcatgagctgccagcttcacacaggggaaacaatcagatgagtttgcctttat

SEQ ID NO: 274934 - DNA, 75 bp, synthetic construct
  source 1..75: mol_type = other DNA
actgccattgacgggataccggtgtaccgcgaggagctgatgatcgtcacgccacaaggacatgcgccagtaacc

SEQ ID NO: 274935 - DNA, 75 bp, synthetic construct
  source 1..75: mol_type = other DNA
acgtggggcgaagacacgcccgcttgaggcgtttattgaattgttgggtatgtctgagtcgacaaaacgtcacga

SEQ ID NO: 274936 - DNA, 75 bp, synthetic construct
  source 1..75: mol_type = other DNA
ggttaacgacctggctggtctggcgtcgcggggcgaaaacgcgtccgcttgaggcgtttattgaactgctggatg

SEQ ID NO: 274937 - DNA, 75 bp, synthetic construct
  source 1..75: mol_type = other DNA
attatattcaacgacttccggcagggttaagcgttgaacagatcatccgtcagttagcgcaaccgttggttgccg

SEQ ID NO: 274938 - DNA, 75 bp, synthetic construct
  source 1..75: mol_type = other DNA
ttaaataccaatagtacctggatgggacaacacggtctgcgaataatctccggcgaaaagatcgacaccattgtc

SEQ ID NO: 274939 - DNA, 75 bp, synthetic construct
  source 1..75: mol_type = other DNA
atgaatataaagacgattaacgtcagccttttgtctttttctattattacagcattgtttccgttgaacgcgttg

SEQ ID NO: 274940 - DNA, 75 bp, synthetic construct
  source 1..75: mol_type = other DNA
aacactggaagctttccataaattcacatcgaaacacgcctccggcgctcactcttcagaaggtatcccgtggca

SEQ ID NO: 274941 - DNA, 75 bp, synthetic construct
  source 1..75: mol_type = other DNA
tgcaatgtcacgtaccgcaggccgataccgcgccaatcgtggggaatacctttaccccatcaaaaggttacggga

SEQ ID NO: 274942 - DNA, 75 bp, synthetic construct
  source 1..75: mol_type = other DNA
tccacgtcgttacttctgtctgcaatgtcacgtgccgcaggctgataccgcgccaatcgtggggaatacctttac

SEQ ID NO: 274943 - DNA, 75 bp, synthetic construct
  source 1..75: mol_type = other DNA
ggatgagtttattggcatgtggatcaccctgatggcgctgccgaccaatgactggcagtgggtcgccgccgggtt

SEQ ID NO: 274944 - DNA, 75 bp, synthetic construct
  source 1..75: mol_type = other DNA
cggtcagtggttgatggtgctggtactttcagccgttaccggtggggcgataggtctgttgttcgaaaacgtgtt

SEQ ID NO: 274945 - DNA, 75 bp, synthetic construct
  source 1..75: mol_type = other DNA
cgattgtcagtgtggtggttgtgctgctgctcgccggattaatgggcggcagtatgctgctctgggcggtgctgg

SEQ ID NO: 274946 - DNA, 75 bp, synthetic construct
  source 1..75: mol_type = other DNA
ccttttcgctctcctttatgctgctggcattgctgttggtgttgcgtggcgatttgcttgaccgttggcaacaac

SEQ ID NO: 274947 - DNA, 75 bp, synthetic construct
  source 1..75: mol_type = other DNA
tccttgcaaactgttgctgacaaccccaggtattgatgcacgtaacggcgaatatgaagcgttcggtgtacccgc

SEQ ID NO: 274948 - DNA, 75 bp, synthetic construct
  source 1..75: mol_type = other DNA
cctcgctggcagcgcaggagcgcgacgggcaaacgctgcaggataccgggcgtctgatggggtcggtatcaaccg

SEQ ID NO: 274949 - DNA, 75 bp, synthetic construct
  source 1..75: mol_type = other DNA
ttactgtggcaaatccggatatcgaaaccgcgcaacgcttgttcaagtttccgggtatcggcctgctggtggtaa

SEQ ID NO: 274950 - DNA, 75 bp, synthetic construct
  source 1..75: mol_type = other DNA
gaaatcaaaccgtaccgtctcgatttactgcatagcgtgacggctgaaagcgaagagccactgagcgccgggcag

SEQ ID NO: 274951 - DNA, 75 bp, synthetic construct
  source 1..75: mol_type = other DNA
gttaccacatgtggcgcatgattggcgccggagcacatctggcggtaggtattgatcctacgcaactgttcctct

SEQ ID NO: 274952 - DNA, 75 bp, synthetic construct
  source 1..75: mol_type = other DNA
agcagcacgggctgtttaagcagtggtccaacgcggtggaatttctgcctgaaattaaaccgtatcgtctggatt

SEQ ID NO: 274953 - DNA, 75 bp, synthetic construct
  source 1..75: mol_type = other DNA
tcgcggtggcgatgaatcattactgtcgcagtcgctacgacttggtggcgatcctcaagacgctgggggcagggc

SEQ ID NO: 274954 - DNA, 75 bp, synthetic construct
  source 1..75: mol_type = other DNA
cgcaggcgcgcacctcgcggtggggatcgaccctacgcaactgtttctgtgccagtttgaagcggtgcgtaaact

SEQ ID NO: 274955 - DNA, 75 bp, synthetic construct
  source 1..75: mol_type = other DNA
atgatcgactttggtaacttttattctctgattgccaaaaatcacctttcgcactggctggaaacactgcctgcg

SEQ ID NO: 274956 - DNA, 75 bp, synthetic construct
  source 1..75: mol_type = other DNA
taccggcaacaaaaccacaaagccgccaaatacctcgctgttgaaaagcattacgggtaatggggcatcattact

SEQ ID NO: 274957 - DNA, 75 bp, synthetic construct
  source 1..75: mol_type = other DNA
aaaaaaccgtctgaagtggtgatggaggtcggtttcgctggtggtggatcgttgctggattttgccagtaacctg

SEQ ID NO: 274958 - DNA, 75 bp, synthetic construct
  source 1..75: mol_type = other DNA
ggctgctgtcgctgatcatgcctataaaaaaccgtcagaagtggtgatggaggttggtttcgccggtggcggcgc

SEQ ID NO: 274959 - DNA, 75 bp, synthetic construct
  source 1..75: mol_type = other DNA
catcggtacgaaaacgccagttccagtgagcaacacctcgctgctgcaaaaatttatcggtttcctggggtctgc

SEQ ID NO: 274960 - DNA, 75 bp, synthetic construct
  source 1..75: mol_type = other DNA
cacatcggcggtgcagaattccgggactaaatccaccaccccagtaaatgaatcggtaattaagtcaacagggtg

SEQ ID NO: 274961 - DNA, 75 bp, synthetic construct
  source 1..75: mol_type = other DNA
attattacctccacgcagtcagtcagggttgccccgaaaaacaatatgaccgagggagtcggaacgtctgctgtg

SEQ ID NO: 274962 - DNA, 75 bp, synthetic construct
  source 1..75: mol_type = other DNA
accgaagagacaccagaagattacgccttgcgtattggtgatgaagaaattcagctgaacgctgacgatgatgat

SEQ ID NO: 274963 - DNA, 75 bp, synthetic construct
  source 1..75: mol_type = other DNA
acgaaaaagtaagagtgttgctaaccattgaaaatggaaaggtaacttactcaagacacctgttggataatgaat

SEQ ID NO: 274964 - DNA, 75 bp, synthetic construct
  source 1..75: mol_type = other DNA
cacataaaaaagtaagagtgttgctaaccattgaaaatggtgaagtaatttactcaaaacatctgctggataatg

SEQ ID NO: 274965 - DNA, 75 bp, synthetic construct
  source 1..75: mol_type = other DNA
caaatccttccagactttgtctggtggtgagaagcgtaaggtacgtattgcgtgctctctggctttgcaggatct

SEQ ID NO: 274966 - DNA, 75 bp, synthetic construct
  source 1..75: mol_type = other DNA
aaaattttatggcaatcgccagcgcagaagtcgagttagaccagcgtggactggtgctgatccagggtgtgaaca

SEQ ID NO: 274967 - DNA, 75 bp, synthetic construct
  source 1..75: mol_type = other DNA
agggtagaagcgcataaacaacgggcagccaaacttcctgtgaaagattatcaggaaatggaggccattgttctt

SEQ ID NO: 274968 - DNA, 75 bp, synthetic construct
  source 1..75: mol_type = other DNA
aatcactggcagcgtgcagtccaggccatcgacgaggccatcattgaagcgcgacacaaccccgagacggcacgc

SEQ ID NO: 274969 - DNA, 75 bp, synthetic construct
  source 1..75: mol_type = other DNA
tctcgttaatcggccctaacggtgccggaaaaaccacggtctttaactgcctgaccggattctacaaacccaccg

SEQ ID NO: 274970 - DNA, 75 bp, synthetic construct
  source 1..75: mol_type = other DNA
gcggcactattttactgcgcgatcagcatctggaaggtttgcccggccagcaaatcgcccgcatgggcgtggtgc

SEQ ID NO: 274971 - DNA, 75 bp, synthetic construct
  source 1..75: mol_type = other DNA
gcccagagcgaagcgctcgaccgcgccgccacctggcttgagcgtattggtttgctggaacacgccaaccgtcag

SEQ ID NO: 274972 - DNA, 75 bp, synthetic construct
  source 1..75: mol_type = other DNA
cgaagatgtttatagttatgaaagtggtgctcatagtgattttgacagtattcgcactgtaataagaccggcctg

SEQ ID NO: 274973 - DNA, 75 bp, synthetic construct
  source 1..75: mol_type = other DNA
gggattgaaaactgggcacttggtgtagggctgtttgatatgtccttaagccgtgatgatgtcgatgtttactct

SEQ ID NO: 274974 - DNA, 75 bp, synthetic construct
  source 1..75: mol_type = other DNA
tgctggactggaaaaccttaaccacggatgtcgccgcgggtgtggggattgaaaactgggcgcttggtgtagggc

SEQ ID NO: 274975 - DNA, 75 bp, synthetic construct
  source 1..75: mol_type = other DNA
aaatctgccctgtcataccttcccgaccgatgacggcggcgtggatatgaaatgcccgacagaaattgccatctc

SEQ ID NO: 274976 - DNA, 75 bp, synthetic construct
  source 1..75: mol_type = other DNA
tcaaagccccatgttcaaaaagctgtatgaagccgaatatgggcagttaggcggagaaccttacggttgtatcat

SEQ ID NO: 274977 - DNA, 75 bp, synthetic construct
  source 1..75: mol_type = other DNA
aaaccgcaggagtattacgatccggacgctacggccaacgccaatctctcagctcgtttgccatatcttttcgcc

SEQ ID NO: 274978 - DNA, 75 bp, synthetic construct
  source 1..75: mol_type = other DNA
gcaacgctgcctatgcgatgggcgtgaatatcaatcgttcctttaaacattatggctggtgtacgttgatccgcg

SEQ ID NO: 274979 - DNA, 75 bp, synthetic construct
  source 1..75: mol_type = other DNA
atggtaaacgatactcttctggcgactggcgatctctctgctgcgcaaaccactgcctatcaggacactgaattt

SEQ ID NO: 274980 - DNA, 75 bp, synthetic construct
  source 1..75: mol_type = other DNA
ctattggtctggagtaactcgcggggaaaatccattaaccgaagttttggccagtggcattggatatatcaacga

SEQ ID NO: 274981 - DNA, 75 bp, synthetic construct
  source 1..75: mol_type = other DNA
atacgctggcaattaccaccccgaaaaagacgctggtactgaacaataacggtaaataccgcacttacaacttac

SEQ ID NO: 274982 - DNA, 75 bp, synthetic construct
  source 1..75: mol_type = other DNA
cagcaacttcaccggctcagtgttgttcagggtatgctgaagcacattgatttttcgacggccagcccgactgtc

SEQ ID NO: 274983 - DNA, 75 bp, synthetic construct
  source 1..75: mol_type = other DNA
cattcagcagaacgggctcacacctgaagatatcagcaaggaaattaacgggtattactgctgtttttatactgc

SEQ ID NO: 274984 - DNA, 75 bp, synthetic construct
  source 1..75: mol_type = other DNA
ggcactaacattgacgacagcaatcagcaggcatttgcacggaaatatagccgggcggcaggcaatgtcgatgac

SEQ ID NO: 274985 - DNA, 75 bp, synthetic construct
  source 1..75: mol_type = other DNA
actacagacaacggcatctttggcctgttctatggcatctcgccgagctatatggacggcattctgtcgacccgt

SEQ ID NO: 274986 - DNA, 75 bp, synthetic construct
  source 1..75: mol_type = other DNA
ttgagcaaggtaatccagacgccgtttccgttcagtatccgttaagcgaactgcgctatcgcgatatgggcaccg

SEQ ID NO: 274987 - DNA, 75 bp, synthetic construct
  source 1..75: mol_type = other DNA
tcacaaccggccctgacatgatcaaaatgttgcggggacggatctccggtgcgcagttcatcaggaatcttgccg

SEQ ID NO: 274988 - DNA, 75 bp, synthetic construct
  source 1..75: mol_type = other DNA
cccgtagcgtcggtgcggcattcgacggacaaaacggacagtatcgttacatgggaaatcatggtcccatgcaac

SEQ ID NO: 274989 - DNA, 75 bp, synthetic construct
  source 1..75: mol_type = other DNA
tggagaactgagggaatttgaactggcagacggaaactggctactggacaatgcctggtatgaaagaaacatggc

SEQ ID NO: 274990 - DNA, 75 bp, synthetic construct
  source 1..75: mol_type = other DNA
gacgaacgcgcctgatgaagacccggacgatttaagcacgggatattacggttcagcgtaccggtcaccggagaa

SEQ ID NO: 274991 - DNA, 75 bp, synthetic construct
  source 1..75: mol_type = other DNA
acaccctcaacactttaatcatatggttgaagcctttcgtagggatctaaaacaataccattctcagcttaataa

SEQ ID NO: 274992 - DNA, 75 bp, synthetic construct
  source 1..75: mol_type = other DNA
tttttcgacggccagcccgactgtccgactggctcttcagaaggggaccggtgcaggaaatatcagtgccctgaa

SEQ ID NO: 274993 - DNA, 75 bp, synthetic construct
  source 1..75: mol_type = other DNA
gtgaaagacgaaaaaccacagttaagtttgttattgcaagtgctgacagacgagaagcgtttcatcgctaactga

SEQ ID NO: 274994 - DNA, 75 bp, synthetic construct
  source 1..75: mol_type = other DNA
ggcctgaacacggggcgggcggcgcggaaaaaggcgcattttttgatttttatggcaccatcaccaccagtgtaa

SEQ ID NO: 274995 - DNA, 75 bp, synthetic construct
  source 1..75: mol_type = other DNA
ggaatatgatgcatcccatctcggcaatatggttaaccgactggaagaaacattacccccggagttaccggcata

SEQ ID NO: 274996 - DNA, 75 bp, synthetic construct
  source 1..75: mol_type = other DNA
caaagggcaattattagttacccgccgcgcccttagcaaaaaagcgtggccgggcgtgtggactaactcggtttg

SEQ ID NO: 274997 - DNA, 75 bp, synthetic construct
  source 1..75: mol_type = other DNA
cgactggtcatggctgaaggtggtgagatcgcgtgggagctggatgatggttctcgcatggtgttgaaggcagaa

SEQ ID NO: 274998 - DNA, 75 bp, synthetic construct
  source 1..75: mol_type = other DNA
catcttccggtgtggcagggggggctgtcggggcagtggcggggggggactgttcagtccactgggaccatttgg

SEQ ID NO: 274999 - DNA, 75 bp, synthetic construct
  source 1..75: mol_type = other DNA
tgttcaactgcagcccgtagcgtcggtgcggcattcgacggacaaaacggacagtatcgttacatgggaaataat

SEQ ID NO: 275000 - DNA, 75 bp, synthetic construct
  source 1..75: mol_type = other DNA
tgaactggcagacggaaactggctactggacaatgcctggtatgaaagaaacatggcgggtttcaacgaaaagct

SEQ ID NO: 275001 - DNA, 75 bp, synthetic construct
  source 1..75: mol_type = other DNA
aacgcacggatcctcggtgataataatgccagaaatggagcagacagactggtcagcggaacagaaatccagacg

SEQ ID NO: 275002 - DNA, 75 bp, synthetic construct
  source 1..75: mol_type = other DNA
gaggcatataaacaacaggttgcgcgcgccgttgcggagatccgccgtggcgagtatgtcaaagtgattgtctcg

SEQ ID NO: 275003 - DNA, 75 bp, synthetic construct
  source 1..75: mol_type = other DNA
caaggggcaattattagttacccgccgcgcactgagcaaaaaagcatggcctggcgtgtggactaactcggtttg

SEQ ID NO: 275004 - DNA, 75 bp, synthetic construct
  source 1..75: mol_type = other DNA
gtatcaggaaaaattgccggagcgctggttgaagaagatcgcgtcaaaattctggcaatgattcaggagcaggtg

SEQ ID NO: 275005 - DNA, 75 bp, synthetic construct
  source 1..75: mol_type = other DNA
gtatgctgaagcatattgatttttcgacggccagcccgactgtccggcaggcgcttcagaaggggaccggtgcag

SEQ ID NO: 275006 - DNA, 75 bp, synthetic construct
  source 1..75: mol_type = other DNA
ttctggccgcacgatgtccacgtaaccaaagtggcgtgcgccagctgccattccctgcatccacagcaagatacg

SEQ ID NO: 275007 - DNA, 75 bp, synthetic construct
  source 1..75: mol_type = other DNA
gtcacctgcaccaactgtcacggccagccatcaccgcaacaccgcgaaggggtgaaagatgtgatgcgctttaac

SEQ ID NO: 275008 - DNA, 75 bp, synthetic construct
  source 1..75: mol_type = other DNA
cattgtgcatacccactcgcgccacgcgaccatctggtcacaggccgggctggatctccccgcctggggcaccac

SEQ ID NO: 275009 - DNA, 75 bp, synthetic construct
  source 1..75: mol_type = other DNA
gtgcaaaattcagagataacttgaagcgggtcaaggaagctcttaaagaatcgcgttttgataagcagttactta

SEQ ID NO: 275010 - DNA, 75 bp, synthetic construct
  source 1..75: mol_type = other DNA
attcgagtattgctgctctggcgctggaagccaacgtcagcgaaccgacggtgaaccgattctgtcgcagcatgg

SEQ ID NO: 275011 - DNA, 75 bp, synthetic construct
  source 1..75: mol_type = other DNA
tcggattaggctcttcagccgccgttgcccacgatgcgatgaataagttctttcgttttaatgttccggtggtgt

SEQ ID NO: 275012 - DNA, 75 bp, synthetic construct
  source 1..75: mol_type = other DNA
gccaccatctggtcgcaggccgggctggatctccccgcctggggcaccacgcacgctgattatttctatggtgcc

SEQ ID NO: 275013 - DNA, 75 bp, synthetic construct
  source 1..75: mol_type = other DNA
tctcgcgccagcttgcgccgcagctccctgcgatgcaaaacgaactgctggataagcactacctgcgtaagcatg

SEQ ID NO: 275014 - DNA, 75 bp, synthetic construct
  source 1..75: mol_type = other DNA
cgttcaacagcatgttgatgtcttactggctgacggaaaaacacgcctgaaagtcgcaattaccgcacaaagcgg

SEQ ID NO: 275015 - DNA, 75 bp, synthetic construct
  source 1..75: mol_type = other DNA
gcactacctgcgtaagcatggggccaatgcctattacgggcagtcatccctcacgccggggcttcatcgccccgg

SEQ ID NO: 275016 - DNA, 75 bp, synthetic construct
  source 1..75: mol_type = other DNA
gtgcgcctatatgggcctgttctcgcgccagcttgcgccgcagctccctgcgatgcaaaacgaactgctggataa

SEQ ID NO: 275017 - DNA, 75 bp, synthetic construct
  source 1..75: mol_type = other DNA
aaaaccttcgaagagcgtgggttgaacccggcacaaatcccggcggtactggtgcattctcacggcccgttcgcc

SEQ ID NO: 275018 - DNA, 75 bp, synthetic construct
  source 1..75: mol_type = other DNA
gggatgccttgaacgatcgtatcccagaagcggaacccagccatgcgattgaaaactttcgcattgccgccggac

SEQ ID NO: 275019 - DNA, 75 bp, synthetic construct
  source 1..75: mol_type = other DNA
atgagcgcccgcattggctttaaggtgacagtgcatatgtctgctgatgcccgggcatggaaaaaagcgaaactg

SEQ ID NO: 275020 - DNA, 75 bp, synthetic construct
  source 1..75: mol_type = other DNA
ggaaattcgacttccataatcacactccggcatcggacgattatggaaaagtgaaccgccccgggtttcctggag

SEQ ID NO: 275021 - DNA, 75 bp, synthetic construct
  source 1..75: mol_type = other DNA
ttttgcaatacgctgtttcatgagtcatttcttacacaagatcaaagtgctgaaaaatggcttctgtcgcagaga

SEQ ID NO: 275022 - DNA, 75 bp, synthetic construct
  source 1..75: mol_type = other DNA
gcggtactgacccgctatggtcagcggctgattcagctttacgatcttctcgcccagatccagcaaaaagccttt

SEQ ID NO: 275023 - DNA, 75 bp, synthetic construct
  source 1..75: mol_type = other DNA
cagttcgcagaagaagagtgttatgtctatgagcgtcaaccctgttggtatttaggcaaagggtgccaggcacgg

SEQ ID NO: 275024 - DNA, 75 bp, synthetic construct
  source 1..75: mol_type = other DNA
gtcagcgttaaataagttcgtacagcgccagacaggtgtcgcccggcttgagtggctgaataatcaacaggctag

SEQ ID NO: 275025 - DNA, 75 bp, synthetic construct
  source 1..75: mol_type = other DNA
tgcgggttagcgggaactatccgtggcaggagcaggtgacgattgcggtcgaatcgccccagccggtacgtcata

SEQ ID NO: 275026 - DNA, 75 bp, synthetic construct
  source 1..75: mol_type = other DNA
ctgccgaatgacacggtttacgccgaaagttgtgcttccatcggcctgatgatgttcgcccggcgaatgctggaa

SEQ ID NO: 275027 - DNA, 75 bp, synthetic construct
  source 1..75: mol_type = other DNA
gaagagccgcgctacctggcgctgacgaactattttgtcgaacagcgtggtgcgcaaccgcactattacgaccag

SEQ ID NO: 275028 - DNA, 75 bp, synthetic construct
  source 1..75: mol_type = other DNA
gttctcatcgttccttgttgccgtggcggatcggcttttaccgcaggctgcgaaggaacatattcagaacagcac

SEQ ID NO: 275029 - DNA, 75 bp, synthetic construct
  source 1..75: mol_type = other DNA
ttagccaatattattttcgtcggcttccagcaacaaggtgaaagagggctgacgaacgagccagatgaagatccg

SEQ ID NO: 275030 - DNA, 75 bp, synthetic construct
  source 1..75: mol_type = other DNA
atggcttacggggaagggcttccgcttccggattcatacgatgctccggatccgcgcattaaacagctggcgcgc

SEQ ID NO: 275031 - DNA, 75 bp, synthetic construct
  source 1..75: mol_type = other DNA
cgagattatagcatatactttgataataaacctggccatgtagatcgttatgatacaatgtacaggaaggttaaa

SEQ ID NO: 275032 - DNA, 75 bp, synthetic construct
  source 1..75: mol_type = other DNA
ttacagcgatccggacagtatcaccaacatccgacaggtactggcgtatatgaccaaaattcagcaaaagcatgg

SEQ ID NO: 275033 - DNA, 75 bp, synthetic construct
  source 1..75: mol_type = other DNA
gatcaccagcagctcgaatgggatatccgaaagctgatgaaccgtatgatgcaactcgaagcggtggtcggtttc

SEQ ID NO: 275034 - DNA, 75 bp, synthetic construct
  source 1..75: mol_type = other DNA
gctccatcagcaaaaggggatgataagtttatcaccaccgactatttgcaacagtgcccgctccacggtttataa

SEQ ID NO: 275035 - DNA, 75 bp, synthetic construct
  source 1..75: mol_type = other DNA
ttctccattgtttgtcacagggtttagacgatacttaggcgaatactgtttagatattttattgcataaagactt

SEQ ID NO: 275036 - DNA, 75 bp, synthetic construct
  source 1..75: mol_type = other DNA
gtttcatctgcatcatgtcaactggatcggcgaaattcaggagctggtggtgatgccgcaggcgcgcggtctgaa

SEQ ID NO: 275037 - DNA, 75 bp, synthetic construct
  source 1..75: mol_type = other DNA
aaactgctcacttccctgcccgcacaccatttccagattgtgctggaaattaccgagcgcgatatgttgaaagag

SEQ ID NO: 275038 - DNA, 75 bp, synthetic construct
  source 1..75: mol_type = other DNA
ggcctgctctgctattacctgatgagcgtgcgtatgcgccctggcagagaaattatgatggccatcaaacgtgag

SEQ ID NO: 275039 - DNA, 75 bp, synthetic construct
  source 1..75: mol_type = other DNA
cagcgaaggctacgccacttttgaagatgaggtgatgtatctcgacgcattggttattgcccaggcggtgcacaa

SEQ ID NO: 275040 - DNA, 75 bp, synthetic construct
  source 1..75: mol_type = other DNA
gcacgccggtacgtgaaaccaaaatcgcaggcattccgctgactgttcgactttatgctaacgactggacatgga

SEQ ID NO: 275041 - DNA, 75 bp, synthetic construct
  source 1..75: mol_type = other DNA
gccgaaaaatcctgcaaacctgcgtccttgcaggaataatcattgcacttctggtcagtggtcttcagtttctga

SEQ ID NO: 275042 - DNA, 75 bp, synthetic construct
  source 1..75: mol_type = other DNA
gcaaggttactggattagtcgccccctgccgctggatgattttatccgctggctggagaaacctcatacgccaca

SEQ ID NO: 275043 - DNA, 75 bp, synthetic construct
  source 1..75: mol_type = other DNA
gaaacgtctgtgctggcgcattacaggctggcggggacgtgcggaacagcgacaaaaccacacgatatgcaggca

SEQ ID NO: 275044 - DNA, 75 bp, synthetic construct
  source 1..75: mol_type = other DNA
cccacaccgcttgaaatcggcgcttacagcatatccgaagtaaaccagatgacccgtaactttgttacgtcaacg

SEQ ID NO: 275045 - DNA, 75 bp, synthetic construct
  source 1..75: mol_type = other DNA
ttcgaataacaacagccacgacgacaagtgtctctgacgccctcactaatgcggaatttatctatgtgtttaacg

SEQ ID NO: 275046 - DNA, 75 bp, synthetic construct
  source 1..75: mol_type = other DNA
acgtcggctccccacagcaggcaggcatttcagaactggttctacgagcaggcaatggaaaccccaaagggatta

SEQ ID NO: 275047 - DNA, 75 bp, synthetic construct
  source 1..75: mol_type = other DNA
gaccttaaagatatgttttttagtactaaaaacgaagtaactaaaaacctgttcaacttattacacgctagttaa

SEQ ID NO: 275048 - DNA, 75 bp, synthetic construct
  source 1..75: mol_type = other DNA
gtgtgccactacatacagatagtcggcgcgctgatcctgctgatcgcaggatttgccattcttcgccttttgttc

SEQ ID NO: 275049 - DNA, 75 bp, synthetic construct
  source 1..75: mol_type = other DNA
cgcagcgaagacatccgaaacgaacgcgaaagcgtcggaaaccagcgcagaatcctcaaaaacggctgccgcatc

SEQ ID NO: 275050 - DNA, 75 bp, synthetic construct
  source 1..75: mol_type = other DNA
ctgcaatggtccaccatccgccgcctgaccgaagaggtgatgcagcggatgacggtcaaggccgccagtagcgaa

SEQ ID NO: 275051 - DNA, 75 bp, synthetic construct
  source 1..75: mol_type = other DNA
cgcactgccagtgccgattgacgaaaacgaggtgctggactggctgggcggacaatttctcggtgtgccagtatc

SEQ ID NO: 275052 - DNA, 75 bp, synthetic construct
  source 1..75: mol_type = other DNA
gaaaaagatgtcggcactgggcgtggcggtgatttatgtcagccaccggatggaagaaattcgccgcattgcctc

SEQ ID NO: 275053 - DNA, 75 bp, synthetic construct
  source 1..75: mol_type = other DNA
agcgaagggaagtgccacgacggcatccacgaaggcgacagaggctgctggcagtgcgacagcggcagctcagag

SEQ ID NO: 275054 - DNA, 75 bp, synthetic construct
  source 1..75: mol_type = other DNA
cgcagcgaagacatctgagacgaatgcgaaagcgtcggaaacccgtgcagaatcctcaaaaacggcagccgcatc

SEQ ID NO: 275055 - DNA, 75 bp, synthetic construct
  source 1..75: mol_type = other DNA
gagtaatagtgaaacagaatggcaatataatatatgaaaaaaatgttcctgcaggtgagtttgaatttaatgatg

SEQ ID NO: 275056 - DNA, 75 bp, synthetic construct
  source 1..75: mol_type = other DNA
agacggtaccatactggatagcattcctcttgagggtataacaatatcctcagataatgggatgttaaaaccaat

SEQ ID NO: 275057 - DNA, 75 bp, synthetic construct
  source 1..75: mol_type = other DNA
ttaaagaattttagtaattatgtgagaagtagttatagaaaaaaatttaaatctgttagctcttatttagaaaga

SEQ ID NO: 275058 - DNA, 75 bp, synthetic construct
  source 1..75: mol_type = other DNA
ttaatggtggagtttcttttcatgaggatggactcacgctatcacataagctatctctaaacagtggtaatgctt

SEQ ID NO: 275059 - DNA, 75 bp, synthetic construct
  source 1..75: mol_type = other DNA
ttatgatgtcgcgttcggtcgatacagaagtaactatgatgggataaattacgaaccaaattttttcaatgcctc

SEQ ID NO: 275060 - DNA, 75 bp, synthetic construct
  source 1..75: mol_type = other DNA
gcaggatataagtatcaaagtagtggatattatgattttaatgattttcaatatgtgaataatgggcttgatttt

SEQ ID NO: 275061 - DNA, 75 bp, synthetic construct
  source 1..75: mol_type = other DNA
aatacctgcccatgccgcttatggacgggtacgggtttaagcccatatcacctttactgcgaacggagatgacgt

SEQ ID NO: 275062 - DNA, 75 bp, synthetic construct
  source 1..75: mol_type = other DNA
atgacaaaggttacaccgtctgacgtgctacgcctgtcaggcctattcgactcctgcaatgtattgaatttgcat

SEQ ID NO: 275063 - DNA, 75 bp, synthetic construct
  source 1..75: mol_type = other DNA
tgtgcctggtgtcatatccctgcatcgttgcatgggttatctataaaaacagatttgtcgattacttgtttttaa

SEQ ID NO: 275064 - DNA, 75 bp, synthetic construct
  source 1..75: mol_type = other DNA
ttgccagtacacctcacccggttgttccatattcgctggctggctggctggctggctggctggctggcaggcgta

SEQ ID NO: 275065 - DNA, 75 bp, synthetic construct
  source 1..75: mol_type = other DNA
acccaaacagatctggcctggattttttctgatgcccaggcgcaggcttttgaggcgtggtttcgggatgagtta

SEQ ID NO: 275066 - DNA, 75 bp, synthetic construct
  source 1..75: mol_type = other DNA
tcagttaaatggatttttaaaactgatgctctggcgcaggtgtttgaggcgtttttcagggatgcgcttaaagat

SEQ ID NO: 275067 - DNA, 75 bp, synthetic construct
  source 1..75: mol_type = other DNA
gtcgcggtgttaatcgaagatagtctgaacggtcagcatgtggcgatgctcggctttatgttgaccctggcggca

SEQ ID NO: 275068 - DNA, 75 bp, synthetic construct
  source 1..75: mol_type = other DNA
aaatcgcccctggtgtcgatttacaaaaagatattctcgacaaaatggatttcaccccggttatttcgccagaac

SEQ ID NO: 275069 - DNA, 75 bp, synthetic construct
  source 1..75: mol_type = other DNA
cgtatttctgatcttgcagaacaaaataaaattgccgcttataattatccgcaaggcgtgcttactcaaacactg

SEQ ID NO: 275070 - DNA, 75 bp, synthetic construct
  source 1..75: mol_type = other DNA
cgtatttctgaactcgcagaacaaaataaaattattgcttataactatccacaaggtgtacttacacaaacctta

SEQ ID NO: 275071 - DNA, 75 bp, synthetic construct
  source 1..75: mol_type = other DNA
atttaatcgaaatcgcccctggcgtcgatttacaaaaagatattctcgacaaaatggatttcaccccagtgattt

SEQ ID NO: 275072 - DNA, 75 bp, synthetic construct
  source 1..75: mol_type = other DNA
caatggcaaaatcatgggcactggtggatttattgatatcagcgccacctcgaagaaaattattttctgcggcac

SEQ ID NO: 275073 - DNA, 75 bp, synthetic construct
  source 1..75: mol_type = other DNA
tcggtattgctgacggtattggcctggtcgcccgggaagaaggttgtgctgatgactttattctgacggtagaaa

SEQ ID NO: 275074 - DNA, 75 bp, synthetic construct
  source 1..75: mol_type = other DNA
gctacgaaggcggcgattctgaactacagccgaggcctggcaaaacaggtcgcggagaaaggtattcgggtgaat

SEQ ID NO: 275075 - DNA, 75 bp, synthetic construct
  source 1..75: mol_type = other DNA
caaacagaaacaaccgacgccaggcatccaggcgaagatgacaccggtaccggattgcggcgagaaaacctatgt

SEQ ID NO: 275076 - DNA, 75 bp, synthetic construct
  source 1..75: mol_type = other DNA
tcatacgacgcctgcgaagaagagcatacatgctatgaatgcgagcgtaagttcaagcttacagctgagcattca

SEQ ID NO: 275077 - DNA, 75 bp, synthetic construct
  source 1..75: mol_type = other DNA
ccgcgatccggggcgtttcaccatacgctcgggcagctgggcgatgcgcggctgttcagcgttgaggccaccggt

SEQ ID NO: 275078 - DNA, 75 bp, synthetic construct
  source 1..75: mol_type = other DNA
tagtcgctattacttgtggtatatccttatacattggacaaaattcagtcaggtgtgctattatcaataacaaag

SEQ ID NO: 275079 - DNA, 75 bp, synthetic construct
  source 1..75: mol_type = other DNA
ccgtcagcaatgccccgcaggaggctgctttaataaaattacgtctgttcacggttattcctcccgtgagtcagc

SEQ ID NO: 275080 - DNA, 75 bp, synthetic construct
  source 1..75: mol_type = other DNA
acggttacggtggagttattaacgaagggcataacgatcaatacgaatttgaaattgctttctccagtgaacagc

SEQ ID NO: 275081 - DNA, 75 bp, synthetic construct
  source 1..75: mol_type = other DNA
tcatcgcccccctaccaccatcaaaccggttaacgccgaagttgccgccttacagcagcaaacggcagatctgtt

SEQ ID NO: 275082 - DNA, 75 bp, synthetic construct
  source 1..75: mol_type = other DNA
gccgggcttaaattcacggatatccagcccacttacctgacgcctgccgatgcccgcgccgcgttccagcaaggt

SEQ ID NO: 275083 - DNA, 75 bp, synthetic construct
  source 1..75: mol_type = other DNA
tgaaggtacgatggaaaaaatatcggtcggctatgacattaaagagtatcacatcgattacgctaaaggacaatt

SEQ ID NO: 275084 - DNA, 75 bp, synthetic construct
  source 1..75: mol_type = other DNA
gcagaagaagtaaaagaagaacgtgaagccgctccggttgaagaagaaaaaatcgaagaagtggctgaacgttcc

SEQ ID NO: 275085 - DNA, 75 bp, synthetic construct
  source 1..75: mol_type = other DNA
ctgaatcctacatcgaaatgctgcttcctgcttcgtgtctgggtcgtctgggtgtgaccgttctgtctggtctga

SEQ ID NO: 275086 - DNA, 75 bp, synthetic construct
  source 1..75: mol_type = other DNA
cgccgacatgctcggccgccttacagaagaagctcgatattatgctgagcgatctgacgaaagctaccgggctgg

SEQ ID NO: 275087 - DNA, 75 bp, synthetic construct
  source 1..75: mol_type = other DNA
caatgatttcgatctgaactggatcccggtcgattccatcgaacgtattgaagtggttcgtggcccgatgtcgtc

SEQ ID NO: 275088 - DNA, 75 bp, synthetic construct
  source 1..75: mol_type = other DNA
ggcgtacaactgacgaacgaaggggataaccgtaagggcgttagtattcgtggtctggacagcagctaccaccct

SEQ ID NO: 275089 - DNA, 75 bp, synthetic construct
  source 1..75: mol_type = other DNA
aagccgaagtgattctggtgccagaaaacagcccgatcaaaaccgtagccgatcttaaaggtcacaaagttgcct

SEQ ID NO: 275090 - DNA, 75 bp, synthetic construct
  source 1..75: mol_type = other DNA
tactacgacggttgagaaagcccataaaatcattgagatgtttccagtagaggaaacggaatctggtggtgttta

SEQ ID NO: 275091 - DNA, 75 bp, synthetic construct
  source 1..75: mol_type = other DNA
atgccgataacttatccaaaaaacgaaggctcgttgattgaagcgggcatcccgattgaatttgcgggctatttg

SEQ ID NO: 275092 - DNA, 75 bp, synthetic construct
  source 1..75: mol_type = other DNA
ttatgtcggaatcaaaatttagacgtagtgtgtctgttcctgcccctgattatatcgaagaaaaagaagatcgaa

SEQ ID NO: 275093 - DNA, 75 bp, synthetic construct
  source 1..75: mol_type = other DNA
ctctgttgcacgcacggttctgcgtgccgtccgtgactctgtggtctctgttgcccgcgcagtatggaactggat

SEQ ID NO: 275094 - DNA, 75 bp, synthetic construct
  source 1..75: mol_type = other DNA
ctctgttgcacgcacggttctgcgagccgtccgtgactctgtggtctctgttgcccgcgctgtatggaactggat

SEQ ID NO: 275095 - DNA, 75 bp, synthetic construct
  source 1..75: mol_type = other DNA
tcatgctcagagcgggcttcaagaaaacggcaatctactcatgggttaagacgggcacgtttccacagccagtta

SEQ ID NO: 275096 - DNA, 75 bp, synthetic construct
  source 1..75: mol_type = other DNA
attcagggtgtgctgacaacctttagtgaggccgatgcgttaacccgcagccagcgcgaacaaagcatcgcttta

SEQ ID NO: 275097 - DNA, 75 bp, synthetic construct
  source 1..75: mol_type = other DNA
ctctgttgcacgcacggttctgcgggccgtccgtgactcggtggtctctgttgcccgcgccgtatggaactggat

SEQ ID NO: 275098 - DNA, 75 bp, synthetic construct
  source 1..75: mol_type = other DNA
ctctgttgcacgcacggttctgcgggccgtccgtgactccgtggtctctgttgcccgcgcggtatggaactggat

SEQ ID NO: 275099 - DNA, 75 bp, synthetic construct
  source 1..75: mol_type = other DNA
gctgatgcctcagagtgttttaggccgcctcggggtgactgtttatagtggcttgacttctccgaccgctattcc

SEQ ID NO: 275100 - DNA, 75 bp, synthetic construct
  source 1..75: mol_type = other DNA
ggctctgtattcgttccggctgctgctctgcgtgctgctgctgatggtaacaccaaaactactctgaccgctgta

SEQ ID NO: 275101 - DNA, 75 bp, synthetic construct
  source 1..75: mol_type = other DNA
cgacgctggcgttcctgctcaggcgatcaagtttgcaatgagcggtgcaactgctgctgaactggaatctaccct

SEQ ID NO: 275102 - DNA, 75 bp, synthetic construct
  source 1..75: mol_type = other DNA
gaatttagtaagactatcgatctggaaactgctggcggagtcattgatcgggacaccattaaatggtcgcacaat

SEQ ID NO: 275103 - DNA, 75 bp, synthetic construct
  source 1..75: mol_type = other DNA
ctctgcgtgctgctgctgctggtaacactaaagctactctggaagctgtaaccgacgaaaaactgctgactgaat

SEQ ID NO: 275104 - DNA, 75 bp, synthetic construct
  source 1..75: mol_type = other DNA
gctgtaaccgacgaaaaactgctgaatgattcctatgtagcgatgctgttgccggaatccgttctgggtcgtctt

SEQ ID NO: 275105 - DNA, 75 bp, synthetic construct
  source 1..75: mol_type = other DNA
gccaaaagccgatgaagtgtcgatggaagaggggctggcaaaacgcctgaacgttggtctgggcgataccgtcac

SEQ ID NO: 275106 - DNA, 75 bp, synthetic construct
  source 1..75: mol_type = other DNA
aggagccggattccggttttaatcccttccagatagccccacgcctgatgatgaatctggcagatgtcgataaaa

SEQ ID NO: 275107 - DNA, 75 bp, synthetic construct
  source 1..75: mol_type = other DNA
ggttgcgccggaacttaccgcagcctttgaaaactttatggacatgcacagcccgcaagccgtatcagctggcat

SEQ ID NO: 275108 - DNA, 75 bp, synthetic construct
  source 1..75: mol_type = other DNA
ttcgcagccattgtactggcctttgttttacctatagcaggtttcagcggaagctggggagtactcacaacatta

SEQ ID NO: 275109 - DNA, 75 bp, synthetic construct
  source 1..75: mol_type = other DNA
accgcatgcggtcagaccggtggcggcaactgccctgattgcggcactgtgatgggcgacgcaacataccaggaa

SEQ ID NO: 275110 - DNA, 75 bp, synthetic construct
  source 1..75: mol_type = other DNA
acaaaattatgcaggcagccaataccagccagcctgacaccaatcagttgcttgcagtatcacgtggtgaatttg

SEQ ID NO: 275111 - DNA, 75 bp, synthetic construct
  source 1..75: mol_type = other DNA
ttgccgggattgcaatatgggggaaaagggggaagggtatgcaataaatgaagctgagcagtcacttcatccatt

SEQ ID NO: 275112 - DNA, 75 bp, synthetic construct
  source 1..75: mol_type = other DNA
attgcgctttactcagcaattaagagtcaaatgtcaccgagcagtgtcgttctcattttagctggcgtttatgct

SEQ ID NO: 275113 - DNA, 75 bp, synthetic construct
  source 1..75: mol_type = other DNA
gaatttttaaggaaacaatgcggctatgttattgataaccagaatggcgtaaagacggtctattggtttatatga

SEQ ID NO: 275114 - DNA, 75 bp, synthetic construct
  source 1..75: mol_type = other DNA
cgatggatgcgctggattcgcagcagatgtctttgtggtttatgaatggcggcgactggttcgcagcactgacag

SEQ ID NO: 275115 - DNA, 75 bp, synthetic construct
  source 1..75: mol_type = other DNA
ctgtatatggtggaaatggattaagaggatattattcttattttacacacaatggtgaatatgttcttattggta

SEQ ID NO: 275116 - DNA, 75 bp, synthetic construct
  source 1..75: mol_type = other DNA
ggtgaccaaagggctaaatcctgatgtgccgatgaaagattctggtttaacaggattaggcgaagcaccctccca

SEQ ID NO: 275117 - DNA, 75 bp, synthetic construct
  source 1..75: mol_type = other DNA
cgctgttgccttcttaggcacggcaattgatgctacgcgtactgatgtactggctctgcagagttctgctgcagg

SEQ ID NO: 275118 - DNA, 75 bp, synthetic construct
  source 1..75: mol_type = other DNA
gtgcgctcaccattatggaaagtaagaagatgtggcgtagtaactatgccccacttttgctacgtctcgcatgga

SEQ ID NO: 275119 - DNA, 75 bp, synthetic construct
  source 1..75: mol_type = other DNA
caatatggagtcgattggtcgggcggtaaattccgcactgcaactgtcgaaacgcggcggcggcgtagcattttt

SEQ ID NO: 275120 - DNA, 75 bp, synthetic construct
  source 1..75: mol_type = other DNA
ccatgtcgatcaggggctgtcgctgacgctgtttttccccgataccgccaccactcgcgatatcaacaaagcgca

SEQ ID NO: 275121 - DNA, 75 bp, synthetic construct
  source 1..75: mol_type = other DNA
atgcgcaacagaaatctgctgaaatttctgccagggctgcttatctgtctgatagtgttaaccagttgcgtgccg

SEQ ID NO: 275122 - DNA, 75 bp, synthetic construct
  source 1..75: mol_type = other DNA
gcactatgtcgaactacgtttttcgccaggctacatggcgatgacgcatcagttgcctgttgcgggcgtggtcga

SEQ ID NO: 275123 - DNA, 75 bp, synthetic construct
  source 1..75: mol_type = other DNA
atgattgataccaccctgccattaactgatattcatcgccaccttgatggcaacattcgtccccagaccattctt

SEQ ID NO: 275124 - DNA, 75 bp, synthetic construct
  source 1..75: mol_type = other DNA
ccccgataccgccaccactcgcgatatcaacaaagcgcagatttacgcctggcgcaaaggtatcaaaacgctcta

SEQ ID NO: 275125 - DNA, 75 bp, synthetic construct
  source 1..75: mol_type = other DNA
tgacgcaggaaacgacggattaccacgctctgaatgcgatgcttaatatttacgataacgcgggtcgcattcagt

SEQ ID NO: 275126 - DNA, 75 bp, synthetic construct
  source 1..75: mol_type = other DNA
ggttttaacattcaactgaacgattgtgacactactgttgcagataaagctgctattgccttccttggtaccgca

SEQ ID NO: 275127 - DNA, 75 bp, synthetic construct
  source 1..75: mol_type = other DNA
gcagccgaaaaccgcgaaagttggcggactgtttgcccgtagcggtattacgttacctacccgtgagatgtgggc

SEQ ID NO: 275128 - DNA, 75 bp, synthetic construct
  source 1..75: mol_type = other DNA
aaagagaatgcgcagatggcgctgttttcgccctatgacgttgagcgagtttatggcaagccgtttgccgatatc

SEQ ID NO: 275129 - DNA, 75 bp, synthetic construct
  source 1..75: mol_type = other DNA
ttcctatgccaaccagctcggcgcgcgtcagggtgctggcgcagtctatttacatgcccatcatcccgatattct

SEQ ID NO: 275130 - DNA, 75 bp, synthetic construct
  source 1..75: mol_type = other DNA
atccgtgcaagctgttactgactacgccaggtatcgatgccgaaaccggtgaatatagcgattttggcgtaccgg

SEQ ID NO: 275131 - DNA, 75 bp, synthetic construct
  source 1..75: mol_type = other DNA
atccgtgcaagctgctactgaccacgcccggtatcgatgccgaaaccggtgaatatagcgactttggtattcctg

SEQ ID NO: 275132 - DNA, 75 bp, synthetic construct
  source 1..75: mol_type = other DNA
tggaagccgcgcgtaacccgttcggttttatcggcggtattgatgcgcattgttttaatgaagactatttgcgcc

SEQ ID NO: 275133 - DNA, 75 bp, synthetic construct
  source 1..75: mol_type = other DNA
ccagtcggtgcacaaacagcaggcgggcttctcgcagacatcgcagatccataaaaaagataaccatattcgcgg

SEQ ID NO: 275134 - DNA, 75 bp, synthetic construct
  source 1..75: mol_type = other DNA
cggggttttcgccggagctacaaggtgtctatagcgaaaccgatgcggatggcatgaaacggttgtacggttatg

SEQ ID NO: 275135 - DNA, 75 bp, synthetic construct
  source 1..75: mol_type = other DNA
cgatggcaaattgtggcaggattatccgacgtcagtgttggccagtgaccgccgtttcttcagctttgagccagg

SEQ ID NO: 275136 - DNA, 75 bp, synthetic construct
  source 1..75: mol_type = other DNA
atgaaaatccttgtaaccggtggagccggttttatcggttctgctgttgttcgccatatcatccgtgatacccag

SEQ ID NO: 275137 - DNA, 75 bp, synthetic construct
  source 1..75: mol_type = other DNA
caggatttattggttctgctgttgttcgtcacataataaataatacgcaagatagtgttgttaatgtcgataaat

SEQ ID NO: 275138 - DNA, 75 bp, synthetic construct
  source 1..75: mol_type = other DNA
aaaggggatcaaattcgcgattggttgtatgtcgaggatcatgctcgagcgttatatatagttgttactgaaggt

SEQ ID NO: 275139 - DNA, 75 bp, synthetic construct
  source 1..75: mol_type = other DNA
atgctcaggtttcagaacgccagtatccagacaaatacactagacggaacagataacgtgaaaattcttgtgacg

SEQ ID NO: 275140 - DNA, 75 bp, synthetic construct
  source 1..75: mol_type = other DNA
aggtaaatcattaccgatttatggcaaaggcgatcagattcgcgactggctttatgtcgaggaccatgcttgcgc

SEQ ID NO: 275141 - DNA, 75 bp, synthetic construct
  source 1..75: mol_type = other DNA
cgttatgtttttgttcatgctgatatttgcgatgcgaaagcattagacgcaatcttatcaacacataaacctgat

SEQ ID NO: 275142 - DNA, 75 bp, synthetic construct
  source 1..75: mol_type = other DNA
tccgcccgtttattccgcccgttgtcgatggcaaattgtggcaggattatccgacctcagtgttggcttccgacc

SEQ ID NO: 275143 - DNA, 75 bp, synthetic construct
  source 1..75: mol_type = other DNA
ttggagaggaattttgaaatttcattcagatataaaagcgctataaaaaatgcgaagaaatttaaaggtgtttta

SEQ ID NO: 275144 - DNA, 75 bp, synthetic construct
  source 1..75: mol_type = other DNA
caggaagtggggacaggttacttcgataaagtgacgaccattattcagggcggcacgtcgtcggttaccgcactg

SEQ ID NO: 275145 - DNA, 75 bp, synthetic construct
  source 1..75: mol_type = other DNA
tgtcgatattggcgtgcatcaggacggcctggttcacatctcttcattgtcgaacaagtttgtggaagatccgca

SEQ ID NO: 275146 - DNA, 75 bp, synthetic construct
  source 1..75: mol_type = other DNA
gcgtgcgctacattttaaaagctaataataacgatctggtgcgtattctggcgctgggcaatgccgaagccaccg

SEQ ID NO: 275147 - DNA, 75 bp, synthetic construct
  source 1..75: mol_type = other DNA
cagcttagcgcctgggaagcgggtattctgacgcgccgctatggactggataaagagatggtaatggatttcttt

SEQ ID NO: 275148 - DNA, 75 bp, synthetic construct
  source 1..75: mol_type = other DNA
atctggctaatacaaattgggttgagaatgtgaaaagcggtgcttatcagtcatggattgaacagaactatgagg

SEQ ID NO: 275149 - DNA, 75 bp, synthetic construct
  source 1..75: mol_type = other DNA
aaaaatcttatcgtgagcaaattacttatgtcgctgaccgcccgggacatgatcgccgttatgccattgatgccg

SEQ ID NO: 275150 - DNA, 75 bp, synthetic construct
  source 1..75: mol_type = other DNA
atctggcgaacaccatatgggttgagaatgtgaagagcggcgcctacaaaacctggattgaccagaattacggag

SEQ ID NO: 275151 - DNA, 75 bp, synthetic construct
  source 1..75: mol_type = other DNA
gaaaagcataatgttgaactggtggcgatcggtaacggtacagcttcccgcgaaactgagcgtttctatctcgac

SEQ ID NO: 275152 - DNA, 75 bp, synthetic construct
  source 1..75: mol_type = other DNA
ctgcgtgcaacgatgggcctcgatccgggtctgcgtaccggggtaaaagtagcggtggtcgatgccactggcaaa

SEQ ID NO: 275153 - DNA, 75 bp, synthetic construct
  source 1..75: mol_type = other DNA
ttgttggatgagattgtaccgaaagagaaatcttaccgcgagcaaattacttatgttgccgatcgtccgggacac

SEQ ID NO: 275154 - DNA, 75 bp, synthetic construct
  source 1..75: mol_type = other DNA
cactgcgccaggtgtgcaaactgtcggtgcgtaaacaaaggcaggtgcaggagtttatttgggtgattagtagca

SEQ ID NO: 275155 - DNA, 75 bp, synthetic construct
  source 1..75: mol_type = other DNA
actcgcttcaacccggcactttcaatcatgagaaagagcatgttaagtctgtaattaattctcttattttgaatc

SEQ ID NO: 275156 - DNA, 75 bp, synthetic construct
  source 1..75: mol_type = other DNA
tgtttctcctgctggacttgcggatgatctcaccgctataaaaacggcaattatgctacttgctgctaagttgcc

SEQ ID NO: 275157 - DNA, 75 bp, synthetic construct
  source 1..75: mol_type = other DNA
cactgcgccaggtgtgcaagctgtcagcgcgtaaacaaaagcaggtgcgggaatttattggggtgattgccggta

SEQ ID NO: 275158 - DNA, 75 bp, synthetic construct
  source 1..75: mol_type = other DNA
cgctgcactatgagggtaatgatattaatgccaccagcatgatgaatattatgcgcgccggaataaaaggcggaa

SEQ ID NO: 275159 - DNA, 75 bp, synthetic construct
  source 1..75: mol_type = other DNA
atgttgagtaaaaccgtggaggtcagaaacagtactggcctgcatgcacgtccggcggcctgtctggcgaaagcc

SEQ ID NO: 275160 - DNA, 75 bp, synthetic construct
  source 1..75: mol_type = other DNA
attttcgacaccatcgaacaactgcgcgagcaggggatgaccatcttccttgtcgagcagaacgctaaccaggcg

SEQ ID NO: 275161 - DNA, 75 bp, synthetic construct
  source 1..75: mol_type = other DNA
tgctggaaaacggccatgtggtgctctccgatactggtgatgcactactggcgaacgaagcggtgagaagtgcgt

SEQ ID NO: 275162 - DNA, 75 bp, synthetic construct
  source 1..75: mol_type = other DNA
tgcaacccacgctgaacgaccctatcccgtcccatctgactgacagcctgaccgttgatgctctacctgccgata

SEQ ID NO: 275163 - DNA, 75 bp, synthetic construct
  source 1..75: mol_type = other DNA
acgacggtaaatggtgggacagttcactttaaaggggaggttgttaacgccgcttgtgcggttgatgccggctct

SEQ ID NO: 275164 - DNA, 75 bp, synthetic construct
  source 1..75: mol_type = other DNA
ctgaagctggcggatcgcggctacgtgctggaaaacggccacgtcgtgctcgaagacaccggcgatgcgctgctg

SEQ ID NO: 275165 - DNA, 75 bp, synthetic construct
  source 1..75: mol_type = other DNA
gctggcaccgattatcatccagcaaattttcgacaccatcgaacaactgcgcgagcaggggatgaccatcttcct

SEQ ID NO: 275166 - DNA, 75 bp, synthetic construct
  source 1..75: mol_type = other DNA
cactgcgccaggtgtgcaagctgtcggcgcgtaaacaaaagcaggtgcaggagtttattggagtgattgccggta

SEQ ID NO: 275167 - DNA, 75 bp, synthetic construct
  source 1..75: mol_type = other DNA
ttatacggtgttgttagaaagcgataatgttaatgatcctattggcgatgaagtccgctctattcttgatgggca

SEQ ID NO: 275168 - DNA, 75 bp, synthetic construct
  source 1..75: mol_type = other DNA
tggcgcatccgcagatattattgtccttgctcttatcggcgaacgtggtcgcgaagtaaatgaattcctcgcgct

SEQ ID NO: 275169 - DNA, 75 bp, synthetic construct
  source 1..75: mol_type = other DNA
gcttcttcccgttacccgaaacactggctgaccgtgggcgatccggcccgtgaattcaccatgacgcagtctgca

SEQ ID NO: 275170 - DNA, 75 bp, synthetic construct
  source 1..75: mol_type = other DNA
atccacccgctggctatcccgctattgttgatgattgttttcagtattacggtgaagacatcctgagtcagtcca

SEQ ID NO: 275171 - DNA, 75 bp, synthetic construct
  source 1..75: mol_type = other DNA
cgccaaaaggttcaataactgcgatttatacggtgctgttagaaagcgataatgtgaatgatcccatcggtgatg

SEQ ID NO: 275172 - DNA, 75 bp, synthetic construct
  source 1..75: mol_type = other DNA
tttacctcaatccacgctttctaaatgtgtgctggtcgtcacaacgtcagaccgccccgcgctggaaaggatgaa

SEQ ID NO: 275173 - DNA, 75 bp, synthetic construct
  source 1..75: mol_type = other DNA
tgcaaactgtcggtgcgtaaacaaaggcaggtgcaggagtttattggggtgattagtagcaaaacgccacgctaa

SEQ ID NO: 275174 - DNA, 75 bp, synthetic construct
  source 1..75: mol_type = other DNA
aagctgtcggcacgtaaacaaaagcaggtgcaggagtttattggggtgattgcgggtaaacagaaagttgcctga

SEQ ID NO: 275175 - DNA, 75 bp, synthetic construct
  source 1..75: mol_type = other DNA
gccgaagagagcgaactgatgcagtcgctgcgccaggtgtgcaagctgtcggcacgtaaacaaaagcaggtgcag

SEQ ID NO: 275176 - DNA, 75 bp, synthetic construct
  source 1..75: mol_type = other DNA
aagtctggactacgaccggcgatccggcagtgacgcagacaatgacccaatccgcgccagcgatggtcctcaccg

SEQ ID NO: 275177 - DNA, 75 bp, synthetic construct
  source 1..75: mol_type = other DNA
aacataacgccgtcgtcgtgtgcaaagagctgtcaagcccgaacgcgcgctgcttctctggcggcgaatacgatg

SEQ ID NO: 275178 - DNA, 75 bp, synthetic construct
  source 1..75: mol_type = other DNA
atgaattcgacaatctggctggcgcttgccctggttttggtactggaaggtttagggccgatgctttacccgaag

SEQ ID NO: 275179 - DNA, 75 bp, synthetic construct
  source 1..75: mol_type = other DNA
cccggtaaaaattattcgctgcataaataacaccgtgttgtacagaagaatggatgggcgaacacagtcggtaaa

SEQ ID NO: 275180 - DNA, 75 bp, synthetic construct
  source 1..75: mol_type = other DNA
gctggttgccgggcttacccaaagtgcaaccggcaaatccccggaaatcacaatcaccacctgggagaaatggta

SEQ ID NO: 275181 - DNA, 75 bp, synthetic construct
  source 1..75: mol_type = other DNA
acgaatacctttgggcttgtcagtccccaaagtgaagagcaaataagagaactggtttcggggctcagccaaagt

SEQ ID NO: 275182 - DNA, 75 bp, synthetic construct
  source 1..75: mol_type = other DNA
cgcggtaatggcgatgtcgatcaggctcgactgcactactggctgcgtttcgccaatcagatgggatttactcgt

SEQ ID NO: 275183 - DNA, 75 bp, synthetic construct
  source 1..75: mol_type = other DNA
ctgacgacaccatagaaagagagttgttacgactaggttttgcgcccgtggctaaagaactgcatcgttactgga

SEQ ID NO: 275184 - DNA, 75 bp, synthetic construct
  source 1..75: mol_type = other DNA
ccatgcacctcgtgcagaggggtataacaaagttcggataaccggctggatgttgaaatacgatgatgagctacg

SEQ ID NO: 275185 - DNA, 75 bp, synthetic construct
  source 1..75: mol_type = other DNA
tgctgcaacatcccggtcttatctttcatccaccgctgctttatctcgggtatggcggtttgatggtggcggcga

SEQ ID NO: 275186 - DNA, 75 bp, synthetic construct
  source 1..75: mol_type = other DNA
ccatccgccgctgctctatctcggctatggtggtttgatggtggcggcgagtgtggcgctggcgagtctactgcg

SEQ ID NO: 275187 - DNA, 75 bp, synthetic construct
  source 1..75: mol_type = other DNA
agtacgttgagatgggcaacagcacttttgcttgccctgggcatcaacacggtgcgttctttaaaaagcatcctg

SEQ ID NO: 275188 - DNA, 75 bp, synthetic construct
  source 1..75: mol_type = other DNA
gtttactgcgcggcgagtttgatgcagccagcgcccgtgtctgctggcgatgggcgctgccggggtggtgtgcat

SEQ ID NO: 275189 - DNA, 75 bp, synthetic construct
  source 1..75: mol_type = other DNA
agccgttttatctctcatactcgccgcgctgctgctgtttgtgttgctgtggtctgatccctttgtgcgcatatt

SEQ ID NO: 275190 - DNA, 75 bp, synthetic construct
  source 1..75: mol_type = other DNA
agataaatgcatgtttgacgcagaacacaaaataacaaaaaggtttgatgaaatctgcgcattgcaacaaaaact

SEQ ID NO: 275191 - DNA, 75 bp, synthetic construct
  source 1..75: mol_type = other DNA
ttcctgtttgctggggcacagatgattggccgcaagaagtgaagcttctagaacaaaatgatgggatctattatt

SEQ ID NO: 275192 - DNA, 75 bp, synthetic construct
  source 1..75: mol_type = other DNA
ctggtgttaaccgccgtatccacgcttttaagcaacggatcgataagcttacgcatataaatctgccaactccta

SEQ ID NO: 275193 - DNA, 75 bp, synthetic construct
  source 1..75: mol_type = other DNA
tggctgtaattgcttatcgtatttgttttgcaggtgaatcattactgactcctggacagatgcctgaatggagag

SEQ ID NO: 275194 - DNA, 75 bp, synthetic construct
  source 1..75: mol_type = other DNA
aattgtctcgtggattattctgccgtgggctatcagcgccatgctactacctgatttctgggcatattatagctc

SEQ ID NO: 275195 - DNA, 75 bp, synthetic construct
  source 1..75: mol_type = other DNA
tgacaccacggcgttatgaatcaggcagtagtgtgagaggggcaagccggttgagtaaagccggacatgtgtcgc

SEQ ID NO: 275196 - DNA, 75 bp, synthetic construct
  source 1..75: mol_type = other DNA
acctgtgccactgacaccagaaggattgattaaagcagtgcgcttctatgaactggtaaagcgtgagaatccgcc

SEQ ID NO: 275197 - DNA, 75 bp, synthetic construct
  source 1..75: mol_type = other DNA
tcatgcaaccatgctgcgtctttatcacccgatctccggcatcgaaatggaatggcatgcgcctattccacaaga

SEQ ID NO: 275198 - DNA, 75 bp, synthetic construct
  source 1..75: mol_type = other DNA
actgagcttgaagaagtaacaaagttaaagaaccagcttgcacttgacgccagagttgttgcgtttggcggtaaa

SEQ ID NO: 275199 - DNA, 75 bp, synthetic construct
  source 1..75: mol_type = other DNA
aacaaagatgctttcaagaaagcgggattagacccggaacagccgccgaaaacctggcaggatctggcagactat

SEQ ID NO: 275200 - DNA, 75 bp, synthetic construct
  source 1..75: mol_type = other DNA
aaagtgctccatatattttgcccgaagatgcttttgaagaagcagttgagccctatcgcctagatgtattcatgt

SEQ ID NO: 275201 - DNA, 75 bp, synthetic construct
  source 1..75: mol_type = other DNA
tggctgcaaaatggtaagtcacgaggcaaaagtccctatcagatcaagcgtgagcatgcactgcgactaaaagat

SEQ ID NO: 275202 - DNA, 75 bp, synthetic construct
  source 1..75: mol_type = other DNA
gaaatgttcccggattattcacgttcgcgaataaaagaatggatcctcgaccagcgtgtgctggttaacggcaaa

SEQ ID NO: 275203 - DNA, 75 bp, synthetic construct
  source 1..75: mol_type = other DNA
attaccatatgttgattgaggagacatcgcagccgggtaatatcaaactcactggcatggtgcaagatgctcagc

SEQ ID NO: 275204 - DNA, 75 bp, synthetic construct
  source 1..75: mol_type = other DNA
actggatgtttaagccgggcgccatgaagcaggtggcggaatatgctgacggcattggccccgattaccatatgg

SEQ ID NO: 275205 - DNA, 75 bp, synthetic construct
  source 1..75: mol_type = other DNA
catctatccagaaattaaagcgccgtggtttcatcatcaggaagggaaggatattgcggctaagactctggaagt

SEQ ID NO: 275206 - DNA, 75 bp, synthetic construct
  source 1..75: mol_type = other DNA
ctaaaattgcagtagcttcaacagcgctttttgtttctgcgagttcttttgcggcagatggggctacaggcggta

SEQ ID NO: 275207 - DNA, 75 bp, synthetic construct
  source 1..75: mol_type = other DNA
gctttttgtttctgcgagttcttttgcggcagatgggtctacaggcgggactgattatgcaggtcaggcaatgga

SEQ ID NO: 275208 - DNA, 75 bp, synthetic construct
  source 1..75: mol_type = other DNA
catctacccggagattaaagcgccgtggttccatcaccaggaagggaaagatatagcggctaaaactctggaagt

SEQ ID NO: 275209 - DNA, 75 bp, synthetic construct
  source 1..75: mol_type = other DNA
tatcgacgtgcggattatttccgccactcaccgtgacctgccaaaggcgatgtcgcgcggggaattccgtgaaga

SEQ ID NO: 275210 - DNA, 75 bp, synthetic construct
  source 1..75: mol_type = other DNA
atgagccataaacctgcgcatttattattggtggatgatgatcctggattgctgaaattacttggcctgcgtttg

SEQ ID NO: 275211 - DNA, 75 bp, synthetic construct
  source 1..75: mol_type = other DNA
ccgggaatgccagtaattattcttaccgcgcatggttctattcccgatgccgttgctgcaacacagcagggcgtt

SEQ ID NO: 275212 - DNA, 75 bp, synthetic construct
  source 1..75: mol_type = other DNA
acacgacacctgaaaacctgacgctggcgcttactggtaaatctgaaacgccgtgcgacgtccggttgcgcaata

SEQ ID NO: 275213 - DNA, 75 bp, synthetic construct
  source 1..75: mol_type = other DNA
cgagatccgcatagaaattaaatttagcacaggtaaagagataatcctttacacgacacctgaaaacctgacgct

SEQ ID NO: 275214 - DNA, 75 bp, synthetic construct
  source 1..75: mol_type = other DNA
tggcgcgcggggaattccgcgaagatctctattaccgcctcaacgttgtcagcctgaaaattccggcactggcgg

SEQ ID NO: 275215 - DNA, 75 bp, synthetic construct
  source 1..75: mol_type = other DNA
cataacgaatacacgttggggaaaatatcggccatggttgctttttatgtcaataccgtttgggataagcatttg

SEQ ID NO: 275216 - DNA, 75 bp, synthetic construct
  source 1..75: mol_type = other DNA
gcactggcgttgtttcagggagataactggcaggctcgtgaaacattgtgtcaggcgctggcatatagcgtgcaa

SEQ ID NO: 275217 - DNA, 75 bp, synthetic construct
  source 1..75: mol_type = other DNA
tcaggcgttggcatacagtgtgcaatctggcgactggtattcgatgttagcggcgcttaatcatgagcaagctcc

SEQ ID NO: 275218 - DNA, 75 bp, synthetic construct
  source 1..75: mol_type = other DNA
ggtacgtgaggtcaccgaaaagctgaatgagcacgcacgcctaggtggtgcgaaagttgtctgggtaaccgatgc

SEQ ID NO: 275219 - DNA, 75 bp, synthetic construct
  source 1..75: mol_type = other DNA
actacggcgtaggcatgatgccttacgacgccgatgcgaaagatgcaccgcaaaatgccattatcggtggagcca

SEQ ID NO: 275220 - DNA, 75 bp, synthetic construct
  source 1..75: mol_type = other DNA
gtggtcattgtcgcggatgccagttgatgcaggcggggacgcatcccgattattacactcttgctcccgaaaaag

SEQ ID NO: 275221 - DNA, 75 bp, synthetic construct
  source 1..75: mol_type = other DNA
ctatcaggccggaaggggtcaccatgcgctactgattcaggcattacctggcatgggcgatgatgccttaatcta

SEQ ID NO: 275222 - DNA, 75 bp, synthetic construct
  source 1..75: mol_type = other DNA
ctggaagaaggggtgaatttgttgccgggattttcgccggagctgcaaggtgtctatagcgaaaccgatgcggat

SEQ ID NO: 275223 - DNA, 75 bp, synthetic construct
  source 1..75: mol_type = other DNA
cagttcacggtgaaggtgaaaccagccatcatcgagaaggacgacggcagaaccgtgctgatctacgcggggcag

SEQ ID NO: 275224 - DNA, 75 bp, synthetic construct
  source 1..75: mol_type = other DNA
cctgggctacctatgtgttacttaccttgacctatacgttaatcgctattccttatgtttcattaatcagcgtta

SEQ ID NO: 275225 - DNA, 75 bp, synthetic construct
  source 1..75: mol_type = other DNA
atgacgacacgcatcctgtcgtgcctgctcctttttatctgttttctttttcttccggcacacacgcaggctgcc

SEQ ID NO: 275226 - DNA, 75 bp, synthetic construct
  source 1..75: mol_type = other DNA
tcgccgctgctgttagagcttaacgaaaacgatccggggatctttgtgacgcagtcggtgcataaacagcaggcg

SEQ ID NO: 275227 - DNA, 75 bp, synthetic construct
  source 1..75: mol_type = other DNA
ctggcgcagtttgaacagcatattgaggatgactcgccgctggctgaggtgttgccgagcgtttataacaaatat

SEQ ID NO: 275228 - DNA, 75 bp, synthetic construct
  source 1..75: mol_type = other DNA
gcggcagaaataataccacgttactaagtgccataacgctggaagccgcattacagcaacgttgtcgggaaaata

SEQ ID NO: 275229 - DNA, 75 bp, synthetic construct
  source 1..75: mol_type = other DNA
cgggcatccgtcggaaaaatacaaagaggaattttatctcggtatgcagcgcggcagaaataacaccacattatt

SEQ ID NO: 275230 - DNA, 75 bp, synthetic construct
  source 1..75: mol_type = other DNA
agccacgcaagcaccttaaaatcaccatcatacactaaatcagtaagttggcagcattaccatgccaatgaagcc

SEQ ID NO: 275231 - DNA, 75 bp, synthetic construct
  source 1..75: mol_type = other DNA
ggtgattggcgggttgatcatcggcaccatcaacaacggtctgaatattttgaggtacaaacctattaccaactg

SEQ ID NO: 275232 - DNA, 75 bp, synthetic construct
  source 1..75: mol_type = other DNA
gtcgccagaatattttctgaccaccaataatattacccagatttttgttcaaagctccgtgacggtattgatcgg

SEQ ID NO: 275233 - DNA, 75 bp, synthetic construct
  source 1..75: mol_type = other DNA
aaggggcgcattttctctgtggtgattggcgggttgatcatcggcaccatcaacaacggtctgaatattttgcag

SEQ ID NO: 275234 - DNA, 75 bp, synthetic construct
  source 1..75: mol_type = other DNA
cgtaaggatgaatccaccgagaagttctataacggtgattgcgcgatgaccaccgcctcttccggttctcttgca

SEQ ID NO: 275235 - DNA, 75 bp, synthetic construct
  source 1..75: mol_type = other DNA
gcgcagcatctgtttgctggcagagcgcggcaagctggcggaactgcgtttgctggtaatccctggccaggtgga

SEQ ID NO: 275236 - DNA, 75 bp, synthetic construct
  source 1..75: mol_type = other DNA
tctcacctgtctggtggacagtaacggcatgttgagcgaaaccggctgggaaaaattgctcccggtgtgcgacgg

SEQ ID NO: 275237 - DNA, 75 bp, synthetic construct
  source 1..75: mol_type = other DNA
aaatggatccgtctgtggcgtaaagaaggccgggtattccgccggctgccagctcccgttccatctgtatcccct

SEQ ID NO: 275238 - DNA, 75 bp, synthetic construct
  source 1..75: mol_type = other DNA
ttttagaaattgatgcaaataatgtgcggcagcgtgtgtttcagactggatgcagcacttttgaagcaattacat

SEQ ID NO: 275239 - DNA, 75 bp, synthetic construct
  source 1..75: mol_type = other DNA
taaagaatgatttctggtgccggaccctctccttcagtccgaacaaaccccggcactatgaacgttatctgcagc

SEQ ID NO: 275240 - DNA, 75 bp, synthetic construct
  source 1..75: mol_type = other DNA
cagcgaagacacaggaacaggaaatagctgaagcggagggaatgaaaagtatacttattgaacaggccaacgaat

SEQ ID NO: 275241 - DNA, 75 bp, synthetic construct
  source 1..75: mol_type = other DNA
cctaatctggtgttgttaccggcggcgctgttgttcggacttgcagtgatcgtggccacagcctcatttaaaaaa

SEQ ID NO: 275242 - DNA, 75 bp, synthetic construct
  source 1..75: mol_type = other DNA
ctggcccacggcagtatacccgaacctgctgatatggccggcggccatgcttctgggggtggccatcaccgtgac

SEQ ID NO: 275243 - DNA, 75 bp, synthetic construct
  source 1..75: mol_type = other DNA
caggaagtggatactctgggccgctggctggcgcattacctgcatgattacctgatggccacggtatatgtgacg

SEQ ID NO: 275244 - DNA, 75 bp, synthetic construct
  source 1..75: mol_type = other DNA
gccctggttgaggggctggggcggcgtgatctgcggcgttatggggcggggtatgaaagtgcttttgtctatcac

SEQ ID NO: 275245 - DNA, 75 bp, synthetic construct
  source 1..75: mol_type = other DNA
agcagcaaacgctgccggagcgcaaacacggcatgctgtataacctgctctggggctggccatgggccctggtgg

SEQ ID NO: 275246 - DNA, 75 bp, synthetic construct
  source 1..75: mol_type = other DNA
cctggtgtgcctgggcagtacagattgcatatgaatacctgatggcgacgatgtatgtgtcgctggtcttcctga

SEQ ID NO: 275247 - DNA, 75 bp, synthetic construct
  source 1..75: mol_type = other DNA
atcagccagcatatggccgcgctggcgctggaacaggaaaaaagccgtcagcatattgaacaactcatccaattt

SEQ ID NO: 275248 - DNA, 75 bp, synthetic construct
  source 1..75: mol_type = other DNA
gcaatcgcgcatttaccgaaatgtttggttactgcattagcgaagccagcggtatgcagcccgatacactcctga

SEQ ID NO: 275249 - DNA, 75 bp, synthetic construct
  source 1..75: mol_type = other DNA
gtgtagattctggattggacgtgcgtgttgccgatcttgattactactggctacaggagaggggcagcatgtgtc

SEQ ID NO: 275250 - DNA, 75 bp, synthetic construct
  source 1..75: mol_type = other DNA
tcgatgggtatcattagcgtatcagtggctgtttgttgacagtgggtttactggctggataaagcagcagaatgt

SEQ ID NO: 275251 - DNA, 75 bp, synthetic construct
  source 1..75: mol_type = other DNA
gtggcagatatcagtcagcatatggccgcgctggcgctggaacaggaaaaagccgccagcatattgaacaactca

SEQ ID NO: 275252 - DNA, 75 bp, synthetic construct
  source 1..75: mol_type = other DNA
ctgttctcaacgaatcgcatgtttcgctgttcgcactgcgcaacgggatgccgatacactgggcgtcatcttcgc

SEQ ID NO: 275253 - DNA, 75 bp, synthetic construct
  source 1..75: mol_type = other DNA
atcaacggcctgctgaccatcggcaaaggccagcgtgtcgggctgatggcgggcagcggcgtcgggaaaagcgtg

SEQ ID NO: 275254 - DNA, 75 bp, synthetic construct
  source 1..75: mol_type = other DNA
agcaacgggtgtgtatgcagttgcgggctttacctttgtttatgcggtgggctatctctcgccgaatccgatggt

SEQ ID NO: 275255 - DNA, 75 bp, synthetic construct
  source 1..75: mol_type = other DNA
ggattgacccggacatccgtacactggtggccgcgatgaacgttcacggcttccggacatatgcgtcctgtcagg

SEQ ID NO: 275256 - DNA, 75 bp, synthetic construct
  source 1..75: mol_type = other DNA
ggattaaagtttgctctggcggcattgtgggcctgggcgaaacggtgaaagatcgcgccggattattactacaac

SEQ ID NO: 275257 - DNA, 75 bp, synthetic construct
  source 1..75: mol_type = other DNA
tggtgatgattcaggctggcatttctatagtcagcgaaatacagataactcagtaatatttgctgttaacggtca

SEQ ID NO: 275258 - DNA, 75 bp, synthetic construct
  source 1..75: mol_type = other DNA
aagccggtggcgggagaacctggtgccgaacatgtcgctgctgctcgccatcctgatttctagcagggatggagt

SEQ ID NO: 275259 - DNA, 75 bp, synthetic construct
  source 1..75: mol_type = other DNA
cggcgcagtatgactacatcagttggatgctgcatatgagcttctatgtattgtgcggcggtatcgtcgggctgg

SEQ ID NO: 275260 - DNA, 75 bp, synthetic construct
  source 1..75: mol_type = other DNA
cgtggattattctgccgtgggccatcagcgccctgttactaccgaatttctgggcgtattacagctcgtttagtc

SEQ ID NO: 275261 - DNA, 75 bp, synthetic construct
  source 1..75: mol_type = other DNA
gacgccaattatcaacggcaatttcgatgtgctgattaacaccgaaggcggacgcatgacgttgctcggcgttct

SEQ ID NO: 275262 - DNA, 75 bp, synthetic construct
  source 1..75: mol_type = other DNA
ctcgcagtaaattccctgctctgttagtggttgcgttggcgctggttgcccttgttttcgttatctggcgcgtag

SEQ ID NO: 275263 - DNA, 75 bp, synthetic construct
  source 1..75: mol_type = other DNA
cggagattgataagaccattgctgggttctgtaaggagctgggaattgatgcgccgtttgcgctggcggaggaaa

SEQ ID NO: 275264 - DNA, 75 bp, synthetic construct
  source 1..75: mol_type = other DNA
acgcatctgaaatttgacgccatcgttgctaacccaccgttctccgccaagtggagcgccagcccgctgtttatg

SEQ ID NO: 275265 - DNA, 75 bp, synthetic construct
  source 1..75: mol_type = other DNA
agtcagcgtgtattccgctttcagaatggagtggctattgcttttaaaaatattcaggccggggatggtaaaaaa

SEQ ID NO: 275266 - DNA, 75 bp, synthetic construct
  source 1..75: mol_type = other DNA
gttgcagagcttggtgatgattcaggctggcatttctatagtcagcgaaatacagataactcggtgatatttgct

SEQ ID NO: 275267 - DNA, 75 bp, synthetic construct
  source 1..75: mol_type = other DNA
ttcaggatacagggtccaactctgccgataatatagcgggcgtttattacagacccgttcaaaagtatataaatg

SEQ ID NO: 275268 - DNA, 75 bp, synthetic construct
  source 1..75: mol_type = other DNA
atatcggcccattaaggccattcgctataaatctgagaacaggtgctatatctgtcagccacggggccaaaattg

SEQ ID NO: 275269 - DNA, 75 bp, synthetic construct
  source 1..75: mol_type = other DNA
cggaagacgttgagaggttggctgatgcattacgggagcgcggagtgagcaggttgatatttccggcgctgtatc

SEQ ID NO: 275270 - DNA, 75 bp, synthetic construct
  source 1..75: mol_type = other DNA
tgtgatacctgcctgaagatgtgtccgcaacatgccacgccaatggcgcaatccatgagcgtggacgaagtgctt

SEQ ID NO: 275271 - DNA, 75 bp, synthetic construct
  source 1..75: mol_type = other DNA
atcaggcgttgcagattgttgacagcaaagtggtgtggaacgttgcagtctgcgagcagtgcgatacctgcctga

SEQ ID NO: 275272 - DNA, 75 bp, synthetic construct
  source 1..75: mol_type = other DNA
tggttaggccgcgtggtgaacggcctcggcgagccgctggatagcaaaggccgcctgaaaggcaacgaccttctg

SEQ ID NO: 275273 - DNA, 75 bp, synthetic construct
  source 1..75: mol_type = other DNA
aggcaacagcgaaagcgcgggatcgatgaccgccatctacaccgtgctggcggaaggtgacgaccagcaagatcc

SEQ ID NO: 275274 - DNA, 75 bp, synthetic construct
  source 1..75: mol_type = other DNA
accgctggacgtgggcgtgaaagcgatcaacggcctgctgaccatcggcaaaggccagcgcgtcgggctgatggc

SEQ ID NO: 275275 - DNA, 75 bp, synthetic construct
  source 1..75: mol_type = other DNA
agagtcccttcatttcatccctacggctgaaggacaaggcgaaaacggtgatatcggcccattaaggccattcgc

SEQ ID NO: 275276 - DNA, 75 bp, synthetic construct
  source 1..75: mol_type = other DNA
tacagataactcggtgatatttgctgtaaacggtcagatacaacccagcaactgggggaattttgattcacgcta

SEQ ID NO: 275277 - DNA, 75 bp, synthetic construct
  source 1..75: mol_type = other DNA
actacggcgtaggcatgatgccttacgacgctgacgcgaaagatgcgccacaaaacgccattatcggcggagcca

SEQ ID NO: 275278 - DNA, 75 bp, synthetic construct
  source 1..75: mol_type = other DNA
tttgctaacgacccggattatgaccgtcacggcatcgtaactccggctggtttgatgaatccgaaccattacctg

SEQ ID NO: 275279 - DNA, 75 bp, synthetic construct
  source 1..75: mol_type = other DNA
cacgatgctctacagcgatgccctggatcaacgactggcgatgtttaaatcaggcaaaaatgggccacgcataaa

SEQ ID NO: 275280 - DNA, 75 bp, synthetic construct
  source 1..75: mol_type = other DNA
tgcctggcgtggggagcgaactttgtcgctgttggcgttgacacgatgctctacagcgatgccctggatcaacga

SEQ ID NO: 275281 - DNA, 75 bp, synthetic construct
  source 1..75: mol_type = other DNA
tcgactacttcttatatggcagaaattgccgccacctccggttatgactggttgctgattgacggggagcacgcg

SEQ ID NO: 275282 - DNA, 75 bp, synthetic construct
  source 1..75: mol_type = other DNA
ataacctggacgaaatcctcgacgtcgaagggattgatggcgtgtttattggacctgcggatctttctgcgtcgt

SEQ ID NO: 275283 - DNA, 75 bp, synthetic construct
  source 1..75: mol_type = other DNA
tcaacgactgcctatatggcagaaattgccgccacttccggttatgactggttgctgattgacggggagcacgcg

SEQ ID NO: 275284 - DNA, 75 bp, synthetic construct
  source 1..75: mol_type = other DNA
gacctgcggatctttctgcgtcgttgggctacccggataacgccgggcacccggaagtgcagcgaattattgaaa

SEQ ID NO: 275285 - DNA, 75 bp, synthetic construct
  source 1..75: mol_type = other DNA
cttaatcaggttggtccggtggtcggtcgccagatgctgatgctgggtaaacgcctgacggcgcaggaagctcag

SEQ ID NO: 275286 - DNA, 75 bp, synthetic construct
  source 1..75: mol_type = other DNA
tgatttatacgctgaccgttgtcagggataccgttattccggcaggaacactcagcatgaacatcgatgtttctg

SEQ ID NO: 275287 - DNA, 75 bp, synthetic construct
  source 1..75: mol_type = other DNA
aacatcgttcttgagtaccgcaaatctgaagtgatccgtattgctctgcctgagcgtattgaaggcaagggcggt

SEQ ID NO: 275288 - DNA, 75 bp, synthetic construct
  source 1..75: mol_type = other DNA
gacgttcagggatggctcgttccttaaaattggttggccctcggtcaacattatgtcgtcgtcggattaccggtt

SEQ ID NO: 275289 - DNA, 75 bp, synthetic construct
  source 1..75: mol_type = other DNA
tggtgtatttcaacctttgagatatgagcgtgactgtgaaagggcggttgtggccgctggcggtgtagttaattg

SEQ ID NO: 275290 - DNA, 75 bp, synthetic construct
  source 1..75: mol_type = other DNA
ttaattgatgaagtggtagaaaaagaacaggtggaaagctggatggcgaaccagttagcgcagctggaaaaatgc

SEQ ID NO: 275291 - DNA, 75 bp, synthetic construct
  source 1..75: mol_type = other DNA
gggccagcggatctctctgcatcgttaggttacccggataacgccgggcacccggaagtgcagcatattattgaa

SEQ ID NO: 275292 - DNA, 75 bp, synthetic construct
  source 1..75: mol_type = other DNA
aatgacgagatcttaggcattgatattgagaagatcagaacggcatttcgtctctgctttggtattctcgataag

SEQ ID NO: 275293 - DNA, 75 bp, synthetic construct
  source 1..75: mol_type = other DNA
tattgcccccggcgacagtgtacagggctggcaactgctgcaactggacggcagtcacgccactttccgtaaagg

SEQ ID NO: 275294 - DNA, 75 bp, synthetic construct
  source 1..75: mol_type = other DNA
aggttgccgtaaaaaacatcaccgaacgcacggaagcccttgccagacagcttaacgatgccgccagcgtgcagg

SEQ ID NO: 275295 - DNA, 75 bp, synthetic construct
  source 1..75: mol_type = other DNA
aaagatattctttttatcaaagaggatgagtttattcaccatttcgatcaattgattcagataacccgttcagca

SEQ ID NO: 275296 - DNA, 75 bp, synthetic construct
  source 1..75: mol_type = other DNA
gatataccacagtcttgggtcaatcgttctgccgcgcttattgagctaaaccttgtttcatcttcatactctatt

SEQ ID NO: 275297 - DNA, 75 bp, synthetic construct
  source 1..75: mol_type = other DNA
tttttattataattatgctaatgccttgtctaataagattagtgtcgataatcctcacgaccacacattccagtc

SEQ ID NO: 275298 - DNA, 75 bp, synthetic construct
  source 1..75: mol_type = other DNA
gcacgcatatcaggaatacaagaagcataaagagcagttggaaaaattgtcgattgagctggatgctgcaaaaca

SEQ ID NO: 275299 - DNA, 75 bp, synthetic construct
  source 1..75: mol_type = other DNA
aactctactgatcccgatggtcgacactggcgaacaggcgcgtcagatagtgtctgcaactcgctatccaccgta

SEQ ID NO: 275300 - DNA, 75 bp, synthetic construct
  source 1..75: mol_type = other DNA
ccaaataccattcagaacctttatcaccaacttcaggcggtagcgccctatggcagccaacccgtgatccgccca

SEQ ID NO: 275301 - DNA, 75 bp, synthetic construct
  source 1..75: mol_type = other DNA
ggcgcgctgagccgcagcggctttgaggatatcgccagcaatattctcaatatgctgcgccagcgggtcaccggc

SEQ ID NO: 275302 - DNA, 75 bp, synthetic construct
  source 1..75: mol_type = other DNA
ccatcgccatccgcaacaaggcggcacgcgccattcaggcagtgttccgcgaactgggcctgccgctgattagcg

SEQ ID NO: 275303 - DNA, 75 bp, synthetic construct
  source 1..75: mol_type = other DNA
gtttatgaaaaatatctacctgatggccgcgccgccgaatatcaaagtggactgctttagcaaccagagcttcgc

SEQ ID NO: 275304 - DNA, 75 bp, synthetic construct
  source 1..75: mol_type = other DNA
atggtgacgacccagcaagattgaggcctttacagtattgcattaatggaacttggtatacagcagccacagcat

SEQ ID NO: 275305 - DNA, 75 bp, synthetic construct
  source 1..75: mol_type = other DNA
agcgtaagacttggcgcatataaaactcataccatgcagaaaggcacgatgtttgaaactgctggttatgtcatt

SEQ ID NO: 275306 - DNA, 75 bp, synthetic construct
  source 1..75: mol_type = other DNA
agaatgatcagaccggtggcattttcattaatccatccggccaccatcaacacgtctgaggttgaagagatatga

SEQ ID NO: 275307 - DNA, 75 bp, synthetic construct
  source 1..75: mol_type = other DNA
acttcgtctggctggtatgccggaagaggatattcaaaggctgcgttcaacccgcacaatccagacccgttttac

SEQ ID NO: 275308 - DNA, 75 bp, synthetic construct
  source 1..75: mol_type = other DNA
tcgcctgcgcaatttgccccaattaacggttgcgaatctcaacggacacaccatcggtggcggtattgaacttgc

SEQ ID NO: 275309 - DNA, 75 bp, synthetic construct
  source 1..75: mol_type = other DNA
tgtccgccactcaggattgccagcaagcgacgcgcgcctttgccgaaaaagccggcgtgagcttccataatcaat

SEQ ID NO: 275310 - DNA, 75 bp, synthetic construct
  source 1..75: mol_type = other DNA
atatgtttaatggtgatcgcttaaccttcatgaaaacttattacttgaaggacaaaaataaaaaaaccaaaaaaa

SEQ ID NO: 275311 - DNA, 75 bp, synthetic construct
  source 1..75: mol_type = other DNA
aatgaaaatacaggagaacaggttggacatggtggtttctttcagtcaatggaagtagacaagacacagttcgtg

SEQ ID NO: 275312 - DNA, 75 bp, synthetic construct
  source 1..75: mol_type = other DNA
gtggtactactgaccagtgccagtgaaaaagcattttgtgtcggcgcggatattcatcgctggtcctctctttct

SEQ ID NO: 275313 - DNA, 75 bp, synthetic construct
  source 1..75: mol_type = other DNA
gagtggttgcaggcctgtcacgatgccggcattgatatccgcctgcagatcaacgaaagcacctcgcctgaacag

SEQ ID NO: 275314 - DNA, 75 bp, synthetic construct
  source 1..75: mol_type = other DNA
cgctacagaggcgcgtgctgattgtgctggccgcactcgatgccggacgtccggggccggtggcaacacgggata

SEQ ID NO: 275315 - DNA, 75 bp, synthetic construct
  source 1..75: mol_type = other DNA
ctattgaaggtttgtcttcctccggaaaaaaagtgttcaagatactttatcttgccatcagagataataaagata

SEQ ID NO: 275316 - DNA, 75 bp, synthetic construct
  source 1..75: mol_type = other DNA
gcctggcagtatgtaaactcatcacaaaaaacagtacaaaccgaacaaaaggcaccggagcgaaaggtacttttc

SEQ ID NO: 275317 - DNA, 75 bp, synthetic construct
  source 1..75: mol_type = other DNA
taccgccgtttgttattcgctaaatacctttctggcgctgaaagagaaacccccattgccgcgcatttctgtgcg

SEQ ID NO: 275318 - DNA, 75 bp, synthetic construct
  source 1..75: mol_type = other DNA
acatgaatgaagacaagcacttcaaagtggtctccatttcggctttctgcacggttcacgattttgccgacagcc

SEQ ID NO: 275319 - DNA, 75 bp, synthetic construct
  source 1..75: mol_type = other DNA
atgggtaagttagcgttagccgccaagatcacgcacgtaccgtcgatgtatctctctgaactaccaggaaaaaac

SEQ ID NO: 275320 - DNA, 75 bp, synthetic construct
  source 1..75: mol_type = other DNA
ccttcaaaccggctggaaatattgtgactcgttccctgaaggccactaaatcacaggcaaagccaacaaacactg

SEQ ID NO: 275321 - DNA, 75 bp, synthetic construct
  source 1..75: mol_type = other DNA
tttgatattatggtaagcgattgttgcccggaagatgaatatgtgaagtacgcgcagacgcagcgtattaagttg

SEQ ID NO: 275322 - DNA, 75 bp, synthetic construct
  source 1..75: mol_type = other DNA
gttttaatcttgaagagttgccggtaaaacactgggccatgtcgatggcgcaaaagcatgtgctggttgtcgacc

SEQ ID NO: 275323 - DNA, 75 bp, synthetic construct
  source 1..75: mol_type = other DNA
acgggaaatggagtaagccgggtcgcggtgccaacgaagcttttgacctgatggtgtatgccgaggctctggtca

SEQ ID NO: 275324 - DNA, 75 bp, synthetic construct
  source 1..75: mol_type = other DNA
gcctggcagtatgtaaactcatcaccaaaaacagtacaaacagaaaaaacggcaccggagcgaaaggtacttttc

SEQ ID NO: 275325 - DNA, 75 bp, synthetic construct
  source 1..75: mol_type = other DNA
ataaaagcagtggcgggatccgtatcgacccaacccaggttcagaatctgggattaaaaacgcaaaaagtcacgc

SEQ ID NO: 275326 - DNA, 75 bp, synthetic construct
  source 1..75: mol_type = other DNA
aggtggagtttatcaccgagctattcccaagctctggcaccggtcaggttaacgctgttttcccgctgcccgcgt

SEQ ID NO: 275327 - DNA, 75 bp, synthetic construct
  source 1..75: mol_type = other DNA
atgggtaagttagcgttagccgccaagatcacgcacgtaccgtcgatgtatctctctgaactgccagggaaaaac

SEQ ID NO: 275328 - DNA, 75 bp, synthetic construct
  source 1..75: mol_type = other DNA
aaaatggcggcgctccacgccccatgaagcccctccgaccaccggaattttatcgctctataaccgtggtgaccg

SEQ ID NO: 275329 - DNA, 75 bp, synthetic construct
  source 1..75: mol_type = other DNA
gaacagaaaaaacattaaaacaaaaggtggcttttgctcagcttgaacttaaccgacttaagtctctggaaaaat

SEQ ID NO: 275330 - DNA, 75 bp, synthetic construct
  source 1..75: mol_type = other DNA
gacctgaatgatattgaaagaataaagtatataaaagcagggagatggtttcttgctcaaatggatagaagacaa

SEQ ID NO: 275331 - DNA, 75 bp, synthetic construct
  source 1..75: mol_type = other DNA
gaatacgttgaagactctgccgctgaaacggacatgaacgtggtgatgaccgaagacgggcgcatcattgaagtg

SEQ ID NO: 275332 - DNA, 75 bp, synthetic construct
  source 1..75: mol_type = other DNA
ttgagtattcttccgcacgatttgtccataaatgattattatcgtaaagttaaggagttacgggcaaaaaatcaa

SEQ ID NO: 275333 - DNA, 75 bp, synthetic construct
  source 1..75: mol_type = other DNA
gaacaacacaggtagtcaaagatggcgaaactgccttcgttttggggcatgaatttagtgtaattgccacgccgg

SEQ ID NO: 275334 - DNA, 75 bp, synthetic construct
  source 1..75: mol_type = other DNA
ttgatgacaattacatctgggttttgaatgatgaagcaggtcgctgcctgattgtcgatcccggagacgcagagc

SEQ ID NO: 275335 - DNA, 75 bp, synthetic construct
  source 1..75: mol_type = other DNA
gaaagaccttgatgacgcactctctctgctgaccattctttaccaccatgtaccgtcggtcacatcgatgccggt

SEQ ID NO: 275336 - DNA, 75 bp, synthetic construct
  source 1..75: mol_type = other DNA
cacaatggcggacatcaccgctatctggcacaacatcgagtcggtgatgatagaagagatgaatcagacaccgcc

SEQ ID NO: 275337 - DNA, 75 bp, synthetic construct
  source 1..75: mol_type = other DNA
gggaagccggtgacggttatctctgatgtgtccagaccaaaaaaggtaaagcgtcagccaaagcaatttgttaag

SEQ ID NO: 275338 - DNA, 75 bp, synthetic construct
  source 1..75: mol_type = other DNA
atcaggtgcgtcccgttaccctgactcgtaactatacaaaacatgcagaaggctcggtgctggtcgaatttggcg

SEQ ID NO: 275339 - DNA, 75 bp, synthetic construct
  source 1..75: mol_type = other DNA
gctcggaaacctacctattttcatgtccgtactgaaacatactgaaccgaaaagacggcgggcaatcatggtgcg

SEQ ID NO: 275340 - DNA, 75 bp, synthetic construct
  source 1..75: mol_type = other DNA
cctcaaagaagcggtggagtacgcacaatcgcgaaaatggatagcgcatgtgcccttgttaccttcggacaagga

SEQ ID NO: 275341 - DNA, 75 bp, synthetic construct
  source 1..75: mol_type = other DNA
agcctataagataccaactcctgaatttacccatatcaatgataacaaagaaaaaatacaagaagatttcaacaa

SEQ ID NO: 275342 - DNA, 75 bp, synthetic construct
  source 1..75: mol_type = other DNA
ctgctacaggtactggagaaatgtttattagaacttcaactgcatacaatattgctgctcaggtgaaatataaaa

SEQ ID NO: 275343 - DNA, 75 bp, synthetic construct
  source 1..75: mol_type = other DNA
tggaaaaggcgctgtctttactcatgatggcaaaaacgaacttgatgctgcaattatggatggaaaaaccaaaat

SEQ ID NO: 275344 - DNA, 75 bp, synthetic construct
  source 1..75: mol_type = other DNA
tatcgcaaggttgccccgctaatcagcattgagcgttttgtgtggttggtggggtatctcaataaccgatggggg

SEQ ID NO: 275345 - DNA, 75 bp, synthetic construct
  source 1..75: mol_type = other DNA
catcttcctgaaacgaaaaatggtttaccacgcgatgttccactctcccggaaagctcgcaactacctgcaaatt

SEQ ID NO: 275346 - DNA, 75 bp, synthetic construct
  source 1..75: mol_type = other DNA
tggggaacatgccgcgataaccccgttgaactggtgcgtaagccccgtgtctctccggggcgcgaacgacgtctg

SEQ ID NO: 275347 - DNA, 75 bp, synthetic construct
  source 1..75: mol_type = other DNA
gccgcatggtggaagaagatccagcgcatccgcgttacattcagaccgtttggggcctgggctacgtctttgtac

SEQ ID NO: 275348 - DNA, 75 bp, synthetic construct
  source 1..75: mol_type = other DNA
cctgtgtgcccgtgaattttcgcgtttgatgatccgcgacgggattcagggtcgcattattcagatcaactcgaa

SEQ ID NO: 275349 - DNA, 75 bp, synthetic construct
  source 1..75: mol_type = other DNA
tggggtagatgaaatctttggtcgcgtggatttgctggtctacagcgccggaatagcaaaagcagcctttatcag

SEQ ID NO: 275350 - DNA, 75 bp, synthetic construct
  source 1..75: mol_type = other DNA
tgctgttctacgccagtccaaaggcgtcgtactgcactggacagtcgattaatgtcactggcggtcaggtcatgt

SEQ ID NO: 275351 - DNA, 75 bp, synthetic construct
  source 1..75: mol_type = other DNA
aaagaaacggctacagcgataaagctacgcggctgatattagaaaagcattatcgcaaggttgccccgctaatca

SEQ ID NO: 275352 - DNA, 75 bp, synthetic construct
  source 1..75: mol_type = other DNA
atggaatataaagatccaatgcatgagttgttgagtagcctggaacagattgtttttaaagatgaaacacagaaa

SEQ ID NO: 275353 - DNA, 75 bp, synthetic construct
  source 1..75: mol_type = other DNA
atccagacgcgtgaagccttccagtgccgaactaaaacttatgcgcctgattcaagccaatccagcattaagtaa

SEQ ID NO: 275354 - DNA, 75 bp, synthetic construct
  source 1..75: mol_type = other DNA
caatcatttgaataaagcgggtattccatgggcgattgtgacttcaggttcaatgctagttgcacgagcgcgcca

SEQ ID NO: 275355 - DNA, 75 bp, synthetic construct
  source 1..75: mol_type = other DNA
tgaaacgtggaaaaccagagcctgatgcatatctgttaggcgcgcaactgctggggcttgcaccacacgaatgcg

SEQ ID NO: 275356 - DNA, 75 bp, synthetic construct
  source 1..75: mol_type = other DNA
tagcgccggaagaggtgctggctttcattcacggtaaacaggcgatcacctctctgcgccattttatggcgggca

SEQ ID NO: 275357 - DNA, 75 bp, synthetic construct
  source 1..75: mol_type = other DNA
tatgactagccgcaaccatgacaaacttaatgtcaaactaaaagccacagatgggtccagttggacctacgggaa

SEQ ID NO: 275358 - DNA, 75 bp, synthetic construct
  source 1..75: mol_type = other DNA
accagctgacggtagaaatcacggaaagcatgatgatggaacacgataccgaaatctttaagcgcattcagatcc

SEQ ID NO: 275359 - DNA, 75 bp, synthetic construct
  source 1..75: mol_type = other DNA
ttttaaatgaacatggcgttttaagtcgtattgcagggcttttttcagggcgtggatataatattgactcgctca

SEQ ID NO: 275360 - DNA, 75 bp, synthetic construct
  source 1..75: mol_type = other DNA
gctaattcattaagaagtcaatttcggctcagtgagtcattgagatattatgatcttaccaatcttaagggatta

SEQ ID NO: 275361 - DNA, 75 bp, synthetic construct
  source 1..75: mol_type = other DNA
ctggctggggagctggttttacgacgaactgacgtatgaagagcggagtagtgacgggaaatggagtaagccggg

SEQ ID NO: 275362 - DNA, 75 bp, synthetic construct
  source 1..75: mol_type = other DNA
ccgggtgaataacgcgttatggcgtgactcgccaggtcccggctatgtgcatttccctgactggctggggagctg

SEQ ID NO: 275363 - DNA, 75 bp, synthetic construct
  source 1..75: mol_type = other DNA
ttgcgccgcaggagtgtgtggtggtggaagatgctcccgctggcgtgctttctggcctggcggcgggttgtcatg

SEQ ID NO: 275364 - DNA, 75 bp, synthetic construct
  source 1..75: mol_type = other DNA
gggtaaatcactcaggtcagcagccggagaattccgatgaaaaatacacttatccatactcactgcaagcgttgc

SEQ ID NO: 275365 - DNA, 75 bp, synthetic construct
  source 1..75: mol_type = other DNA
tcttatttcatcttcattttcaatcaagttactaaaagaagtgagagcaggatatattaaagcgtctgtatcaaa

SEQ ID NO: 275366 - DNA, 75 bp, synthetic construct
  source 1..75: mol_type = other DNA
gccgaagaagtcatcgcgatggattcggtaaaacttgccaatatgttgtgcgatccaaatgtcaaacgtagcgat

SEQ ID NO: 275367 - DNA, 75 bp, synthetic construct
  source 1..75: mol_type = other DNA
ctcgaggctcgttgcatttacatcaccaaagccgcaggcgttcagggtctgcagaatggttcggtaagctgcatc

SEQ ID NO: 275368 - DNA, 75 bp, synthetic construct
  source 1..75: mol_type = other DNA
gatgggctacgctgaaggcaaatcaatgctttatctcgaggctcgttgcatttacatcaccaaagctgctggcgt

SEQ ID NO: 275369 - DNA, 75 bp, synthetic construct
  source 1..75: mol_type = other DNA
cccgtcgaacaccatcacaacaggctcacgtcaccaacgttaaagataacccggtacaaattgccgccgacgcag

SEQ ID NO: 275370 - DNA, 75 bp, synthetic construct
  source 1..75: mol_type = other DNA
gaatattatcgaaactgtataaaaaacgaggagcaagatttcaggaatgatgtaacttcatttgtcagatcatat

SEQ ID NO: 275371 - DNA, 75 bp, synthetic construct
  source 1..75: mol_type = other DNA
gggtttcgctctcctgcgcgatgctgggtatcgacggtaaagtggtgatgccaaaaggtgcgccaaaatccaaag

SEQ ID NO: 275372 - DNA, 75 bp, synthetic construct
  source 1..75: mol_type = other DNA
ccgaccattcgtgttattggtgtgcagtcagaaaacgttcacggcatggcggcttctttccactccggagaaata

SEQ ID NO: 275373 - DNA, 75 bp, synthetic construct
  source 1..75: mol_type = other DNA
tcagggtctacagaacggttccgtaagctgcatcggcgttccatcggcagtgccgtcaggcatccgcgcagtgct

SEQ ID NO: 275374 - DNA, 75 bp, synthetic construct
  source 1..75: mol_type = other DNA
cttctggctccggctcagaagttcagatgggctatgccgaaggtaaatcaatgctttacctcgaagctcgttgca

SEQ ID NO: 275375 - DNA, 75 bp, synthetic construct
  source 1..75: mol_type = other DNA
cgaccggtgcgcgaagaagatgttatcgccatccgcaataaagccgcacgcgctttacaggctgtctttgcaggt

SEQ ID NO: 275376 - DNA, 75 bp, synthetic construct
  source 1..75: mol_type = other DNA
atgatggcgatgcagaaaatgcgcgcccgtcgaacaccatcacaacaggctcacgtcaccaacgtcaaagataac

SEQ ID NO: 275377 - DNA, 75 bp, synthetic construct
  source 1..75: mol_type = other DNA
ttaccgatgtcgcccaggacatgctcaacatgcaaaaagcaaaactgaccggcgattatctccatacctcagcca

SEQ ID NO: 275378 - DNA, 75 bp, synthetic construct
  source 1..75: mol_type = other DNA
atgatggcgatgcaaaaaatgcgcgcccgtcggacaccatcacaacaggctcacgtcacaaacgttaaagataat

SEQ ID NO: 275379 - DNA, 75 bp, synthetic construct
  source 1..75: mol_type = other DNA
cggtgaaggtattgccgtggcctcaacgcttgaagcactggctggcgctttttcctccactactcaagatgctcg

SEQ ID NO: 275380 - DNA, 75 bp, synthetic construct
  source 1..75: mol_type = other DNA
ttacctatggtcaggaaggggtcatgattgcctggcaacgtctagtgttcccagatggaaaagctcttgatttag

SEQ ID NO: 275381 - DNA, 75 bp, synthetic construct
  source 1..75: mol_type = other DNA
tggcggtagcaatgaatcattactgtcgcagatcgctacgatctggtggcgatcctcaaaacgctgggggcaggg

SEQ ID NO: 275382 - DNA, 75 bp, synthetic construct
  source 1..75: mol_type = other DNA
ggtcaggtgtttggtcaggcaattgctcaggttgttcagaaaaacctgaatatcgcgccgactctcgaaattcgc

SEQ ID NO: 275383 - DNA, 75 bp, synthetic construct
  source 1..75: mol_type = other DNA
aaaaaaaggaatgtttatataaaaatgctcctcgaagaccctcttcatttccctgcatatattgttcttgaggaa

SEQ ID NO: 275384 - DNA, 75 bp, synthetic construct
  source 1..75: mol_type = other DNA
ggacggaaaagctcttgatttaggctccatgccgggcgcagacatggcgggttattctggtttccgtgatcaggt

SEQ ID NO: 275385 - DNA, 75 bp, synthetic construct
  source 1..75: mol_type = other DNA
ccgacgcttctccgggcgttgctaacaaaaccggtgtacgccgcgttaacaaaagaccgatgtacattgctatag

SEQ ID NO: 275386 - DNA, 75 bp, synthetic construct
  source 1..75: mol_type = other DNA
agcctcaatccaggaaatgtacgactgccgggtactgggcatccggcgcaatgacctgaaggtggaggagatccc

SEQ ID NO: 275387 - DNA, 75 bp, synthetic construct
  source 1..75: mol_type = other DNA
aagcacgaaagcgatttggcgaagaggggtggtacgtcagtaaggtgtatgacgcgccgcaggccgtaatggcgc

SEQ ID NO: 275388 - DNA, 75 bp, synthetic construct
  source 1..75: mol_type = other DNA
tttggcgaagaggggtggtacgtcagtaaggtgtatgacgcgccgcaggccgtaatggcgctcctttgccacgga

SEQ ID NO: 275389 - DNA, 75 bp, synthetic construct
  source 1..75: mol_type = other DNA
aggctccccagcagaatgatcccgaactggaccagatgcgccgtaataaagcgcgtgacttcatggaagcagtca

SEQ ID NO: 275390 - DNA, 75 bp, synthetic construct
  source 1..75: mol_type = other DNA
cggctccccagcaaatcgatccagagctggatcagatgcgtcgtaataaagcgcgcgattttatggatgcagtca

SEQ ID NO: 275391 - DNA, 75 bp, synthetic construct
  source 1..75: mol_type = other DNA
tggcgtcacagatagcaatagcgatacaggtatgcaattggcatcagtgggtggcgtatccgtttctcataatga

SEQ ID NO: 275392 - DNA, 75 bp, synthetic construct
  source 1..75: mol_type = other DNA
ccaaaagctaatattgaatataccacaaagctacctcaaacctcaggattggttaagtactccgccccatctctg

SEQ ID NO: 275393 - DNA, 75 bp, synthetic construct
  source 1..75: mol_type = other DNA
cgacggcgaggattacaggttccactatgattttgctggcgggcagacggtggtaaccggcaggtcagagcagaa

SEQ ID NO: 275394 - DNA, 75 bp, synthetic construct
  source 1..75: mol_type = other DNA
acgcagacggtgctggaaatcagcccggaaatccctgactggctgcgtcaggtggtggatgtactgtttgtggtc

SEQ ID NO: 275395 - DNA, 75 bp, synthetic construct
  source 1..75: mol_type = other DNA
ccatatagtcagttcatcgggtataagccgacgatgaacaagtacgacgttgcaaaggttattctttccggtgac

SEQ ID NO: 275396 - DNA, 75 bp, synthetic construct
  source 1..75: mol_type = other DNA
ataggcgtcgattctgatgggaattatcatatagcatcaaataatgatacagtgccaagatctcaacgtgtttgg

SEQ ID NO: 275397 - DNA, 75 bp, synthetic construct
  source 1..75: mol_type = other DNA
cgaatggggcgaactgacagagcgcagggaccagcaactggagtggaacgcgcagggccagttaacgcgggtcat

SEQ ID NO: 275398 - DNA, 75 bp, synthetic construct
  source 1..75: mol_type = other DNA
cacggtgcgctttgcgtatgaccgcagcgggtggctgacggcagagcgcagcgtgcatggcagcataacgtaccg

SEQ ID NO: 275399 - DNA, 75 bp, synthetic construct
  source 1..75: mol_type = other DNA
cgttgtttcggctgcaaatcaggtgataaagcagcggcagtcggatcctgtgcagttctctcttgcctccggaca

SEQ ID NO: 275400 - DNA, 75 bp, synthetic construct
  source 1..75: mol_type = other DNA
cagttctgcttggcctgggtaaatactcagatttttttggagcgttctccctggatgtcactcatgctcgctcac

SEQ ID NO: 275401 - DNA, 75 bp, synthetic construct
  source 1..75: mol_type = other DNA
aacaaactcatataataaagagagccactggcaacccgttagtgtttatctacagcatgattattctttcctgca

SEQ ID NO: 275402 - DNA, 75 bp, synthetic construct
  source 1..75: mol_type = other DNA
ttttaatggcggcgacgttgtaatgcctttcggcatggataaatctactttcaaagatcgctataccacatctgc

SEQ ID NO: 275403 - DNA, 75 bp, synthetic construct
  source 1..75: mol_type = other DNA
gactataacggaatggggaatgttcttttgccgtggggaatgtctgcagagcaattcgataagcaggttaatcag

SEQ ID NO: 275404 - DNA, 75 bp, synthetic construct
  source 1..75: mol_type = other DNA
ggcatacgcaacaataacccaggaaatctcgaatacagcaaaactaatccgtgggtaggccagaccggtgatgat

SEQ ID NO: 275405 - DNA, 75 bp, synthetic construct
  source 1..75: mol_type = other DNA
gccgacgggcgtgtcgcggatatctctgtcaccagtccgtctccggcctgtgtcaccatctctgtgctgtcacgt

SEQ ID NO: 275406 - DNA, 75 bp, synthetic construct
  source 1..75: mol_type = other DNA
attatcggtgccaacatcaccaattgtaagttcagtgacttacagggcgacgccattgaatggaacgtggcaatt

SEQ ID NO: 275407 - DNA, 75 bp, synthetic construct
  source 1..75: mol_type = other DNA
gcacgggcggtgatgctggcctgtgcagccggtaatgaccttgatgtgattggtgccaattacaacaccacgcgc

SEQ ID NO: 275408 - DNA, 75 bp, synthetic construct
  source 1..75: mol_type = other DNA
tctatgccgccctgcatgtcgaaggtgtgcagcgtgtcgaactcgccgcgccactggctgacattgtgctcagta

SEQ ID NO: 275409 - DNA, 75 bp, synthetic construct
  source 1..75: mol_type = other DNA
cggcgcaaattacaacgttgagcgtctcgttattacgcctgctgatgagaccacgctgccgccaacgcctgccgt

SEQ ID NO: 275410 - DNA, 75 bp, synthetic construct
  source 1..75: mol_type = other DNA
ctgaccgtacagagcgccagaatcgtgacatggcggctgaatgcaaaactgtacttttaccccggcccggaatcc

SEQ ID NO: 275411 - DNA, 75 bp, synthetic construct
  source 1..75: mol_type = other DNA
gtggctgaccgcgtgaccgtgcagtctgccgccatcgttgaataccagataaacgccacgctttacctttaccct

SEQ ID NO: 275412 - DNA, 75 bp, synthetic construct
  source 1..75: mol_type = other DNA
tgtagtgaactacaagggtacgctgatcgacggtaaagagttcgataactcttacacccgtggtgaaccgctctc

SEQ ID NO: 275413 - DNA, 75 bp, synthetic construct
  source 1..75: mol_type = other DNA
actcaacacttaaacaacctgccctctacgttccagttaggctttgtggcggactacggcgggctggggatgttt

SEQ ID NO: 275414 - DNA, 75 bp, synthetic construct
  source 1..75: mol_type = other DNA
agtgatccgcacgctggaacttgaatctgaaccagtcaccaaattgttgcaggagaacgcttaccgtgagttgct

SEQ ID NO: 275415 - DNA, 75 bp, synthetic construct
  source 1..75: mol_type = other DNA
gttacgccagcgggtcaatgagggtgcacgcgcctgcatgctaagccacagcgccgggacagacctggacaacct

SEQ ID NO: 275416 - DNA, 75 bp, synthetic construct
  source 1..75: mol_type = other DNA
gattgttgcctcacttgaggtaatggatgatttctttaaagttgataatagccgttcattacagcaattgaagag

SEQ ID NO: 275417 - DNA, 75 bp, synthetic construct
  source 1..75: mol_type = other DNA
gaacgcaaggccgaatttgttgtgcttcatccgaaagatgagcaggaagccgtgatccgcacgctggaactggaa

SEQ ID NO: 275418 - DNA, 75 bp, synthetic construct
  source 1..75: mol_type = other DNA
ctgccatttatgccgctttgcatgtggaaggcgtgcagcgtgtcgaactggctgcaccgctggccgacatcgtgc

SEQ ID NO: 275419 - DNA, 75 bp, synthetic construct
  source 1..75: mol_type = other DNA
gaaatacgcgatttcaaccctgtttactctggtgatctggagatagaaattcgtgaaacgaacggtaatgtcaga

SEQ ID NO: 275420 - DNA, 75 bp, synthetic construct
  source 1..75: mol_type = other DNA
taccggaccccgccatcatcgcggagcctgactttgaggcaattctggctgacacaaaggccatgatgattgcgt

SEQ ID NO: 275421 - DNA, 75 bp, synthetic construct
  source 1..75: mol_type = other DNA
gacatcgtgctcaacaatacgcaggcgtctttctgtaccgaatacagcgtcgtgaccggaggctcggatgagtga

SEQ ID NO: 275422 - DNA, 75 bp, synthetic construct
  source 1..75: mol_type = other DNA
ctgcgtattcagcaggcttttgagggcttaagcgtcgccgggtcggtgggagcctatcagtatcatggtcgcagt

SEQ ID NO: 275423 - DNA, 75 bp, synthetic construct
  source 1..75: mol_type = other DNA
ccactggccgatatcgtgctcaacagtacgcaggcgtctttctgtaccgaataccacgtcgtgaccggaggctcg

SEQ ID NO: 275424 - DNA, 75 bp, synthetic construct
  source 1..75: mol_type = other DNA
tgacgcgacgctctacgtctaccccggcccggaatctgagcccatcaggcaggcatcagagcagacgctgcagag

SEQ ID NO: 275425 - DNA, 75 bp, synthetic construct
  source 1..75: mol_type = other DNA
gctgacgggcgtgtcgcggatatctctgtcaccagtccgtctccggcctgcgtcaccatctctgtgctgtcacgt

SEQ ID NO: 275426 - DNA, 75 bp, synthetic construct
  source 1..75: mol_type = other DNA
tgacgcgacgctctacgtttaccccggtcccgaatctgaacccatcaggcaggcatcagagcagaagctgcagag

SEQ ID NO: 275427 - DNA, 75 bp, synthetic construct
  source 1..75: mol_type = other DNA
tcctttgtggcgctgactaacattgagatgaagcgtgcgtcgctggagttacacaacaaaccgcaacatcttttt

SEQ ID NO: 275428 - DNA, 75 bp, synthetic construct
  source 1..75: mol_type = other DNA
ggtcgcgcgcacgctgacgcttgaatctgagccgattgttaagctgctgcaggaaaatgcgtatcgggaggttat

SEQ ID NO: 275429 - DNA, 75 bp, synthetic construct
  source 1..75: mol_type = other DNA
cgatgccgcgctttatctttatcccggccccgaaagtgagccagtgctcagtgcggcaaaagcgaagctacagac

SEQ ID NO: 275430 - DNA, 75 bp, synthetic construct
  source 1..75: mol_type = other DNA
catttgataaaaccggcacgctgaccgtcggcaaaccgcgcgttaccgcgattcatccagcaacgggtattagcg

SEQ ID NO: 275431 - DNA, 75 bp, synthetic construct
  source 1..75: mol_type = other DNA
aaagagaatttgtcgctgattacgcttatcgtgatgatggtaatcagctggggtctggagcagttcaatcatccg

SEQ ID NO: 275432 - DNA, 75 bp, synthetic construct
  source 1..75: mol_type = other DNA
tgcaggcgtgaatcaggtgcaggtgttgttcgccaccgaaaaactggtggtcgatgccgacaatgacatccgtgc

SEQ ID NO: 275433 - DNA, 75 bp, synthetic construct
  source 1..75: mol_type = other DNA
ataccctgcgcgccgatgctgcaactgctatcagtgaactgaacgcgctgggcgtcaaaggggtgatcctcaccg

SEQ ID NO: 275434 - DNA, 75 bp, synthetic construct
  source 1..75: mol_type = other DNA
ggcaacgggtattagtgaatctgaactgctgacactggcggcggcggtcgagcaaggcgcgacgcatccactggc

SEQ ID NO: 275435 - DNA, 75 bp, synthetic construct
  source 1..75: mol_type = other DNA
cgacaatgacatccgtgcgcaagttgaatcggcggtgcaaaaagcaggctattccctgcgcgatgaacaggccac

SEQ ID NO: 275436 - DNA, 75 bp, synthetic construct
  source 1..75: mol_type = other DNA
gccaacgactgttgctgcgacggcgcatgttccagcacgccaacgctctctgaaaacgtctccggcacccgctat

SEQ ID NO: 275437 - DNA, 75 bp, synthetic construct
  source 1..75: mol_type = other DNA
tttaaagcgggcctattgccggaagataaagtcaaagcggtgaccgagctgaatcaacatgcgccgctggcgatg

SEQ ID NO: 275438 - DNA, 75 bp, synthetic construct
  source 1..75: mol_type = other DNA
cagggcgtcagcgcgttaatggcgctgaaaccagaaaacgccacgcgcctgcgtaacggtgagcgtgaagaggtg

SEQ ID NO: 275439 - DNA, 75 bp, synthetic construct
  source 1..75: mol_type = other DNA
gcgataatccacgcgcagcggcggcaattgccggggaactggggctggagtttaaagcgggcctgttgccggaag

SEQ ID NO: 275440 - DNA, 75 bp, synthetic construct
  source 1..75: mol_type = other DNA
ggcgtcaaaggggtaatcctcacaggcgataatccacgcgcagcggcagcgattgccggggaactggggctggaa

SEQ ID NO: 275441 - DNA, 75 bp, synthetic construct
  source 1..75: mol_type = other DNA
cattgagcggtttatcgaccgtttcagccgtatctacacgcccgcgattatggccgtcgccctgctggtaacgct

SEQ ID NO: 275442 - DNA, 75 bp, synthetic construct
  source 1..75: mol_type = other DNA
cgtcgggaaaccgcgcgttaccgcgattcatccggcaacaggtattagcgaatctgaactgctggcgctggcggc

SEQ ID NO: 275443 - DNA, 75 bp, synthetic construct
  source 1..75: mol_type = other DNA
agcaaggggaaggttattccggaactggaagtgacggtcacccgcctttcccgtttgctggccgaacaggtacgt

SEQ ID NO: 275444 - DNA, 75 bp, synthetic construct
  source 1..75: mol_type = other DNA
tccgtccggaaaaacaacgcctcctcgatgccatctggccggttctggtcagcttcagtgatgcgggcacacata

SEQ ID NO: 275445 - DNA, 75 bp, synthetic construct
  source 1..75: mol_type = other DNA
gaaggctggctgattaacgaatccgcctgtaaccggatgaaagccgggctttccgccctgaatcagccgttactg

SEQ ID NO: 275446 - DNA, 75 bp, synthetic construct
  source 1..75: mol_type = other DNA
gcgtttttctggacggatgcggacaataatgacgtaccgatggacgctgaaacactgattgctctgagtgctgct

SEQ ID NO: 275447 - DNA, 75 bp, synthetic construct
  source 1..75: mol_type = other DNA
gaacatgaagaaggcactggaagcgctgaacagtgcggatgagattctggcgtataaggtgggtcaggagtcgta

SEQ ID NO: 275448 - DNA, 75 bp, synthetic construct
  source 1..75: mol_type = other DNA
ataacgacgtcccgatgacggcagaggcgctgatggcactcagtgaggcggcggagaaggcgatgttcaccaaag

SEQ ID NO: 275449 - DNA, 75 bp, synthetic construct
  source 1..75: mol_type = other DNA
atgaagacgaaaaacacgcccaaacttgcttatgccattctgaatgccatcagcctgtccgcagacggggacggt

SEQ ID NO: 275450 - DNA, 75 bp, synthetic construct
  source 1..75: mol_type = other DNA
atgacaccgccaccggtgcagtgctgcaaatccgccttgctgcgctgaccaatgaccccggtgccaccggcatga

SEQ ID NO: 275451 - DNA, 75 bp, synthetic construct
  source 1..75: mol_type = other DNA
agggtattctttattggtaggggttgtatgctcgttgttttatctaagtttaggacaagacggagaacaaaatga

SEQ ID NO: 275452 - DNA, 75 bp, synthetic construct
  source 1..75: mol_type = other DNA
gagcgccgttctggacaaggcggaacaggaaggccgcattttcaaaagcgaacgtacttatctggaacagcttgg

SEQ ID NO: 275453 - DNA, 75 bp, synthetic construct
  source 1..75: mol_type = other DNA
cgatgacggctggtgccagctattgcctgccggtcatttcagcgcccgtgatggtcgtccgtttgatgtgacagg

SEQ ID NO: 275454 - DNA, 75 bp, synthetic construct
  source 1..75: mol_type = other DNA
accggtgaccccggtctgaccggcatgaatcctgtcgccgcgctgtcggcggatgacctttataacgccttaaac

SEQ ID NO: 275455 - DNA, 75 bp, synthetic construct
  source 1..75: mol_type = other DNA
ggcaaaacctaacgcgggattagaaacactatctcagccttttaaaaataatcagattggtgtcgctacagtacc

SEQ ID NO: 275456 - DNA, 75 bp, synthetic construct
  source 1..75: mol_type = other DNA
acagtacacggaccttcagctacaaccgtcttgaccagataacggaagtgacgctcacccccacggaagaagggg

SEQ ID NO: 275457 - DNA, 75 bp, synthetic construct
  source 1..75: mol_type = other DNA
ggattgccagcctgagcaacggcaacggggcgctttaccggttcagctacgacggcgacggacggctgacgggag

SEQ ID NO: 275458 - DNA, 75 bp, synthetic construct
  source 1..75: mol_type = other DNA
atgataaaacggacgttattagcagcggcaatctttagcgcattgcccgcttatgccgggttaacttctattacc

SEQ ID NO: 275459 - DNA, 75 bp, synthetic construct
  source 1..75: mol_type = other DNA
atgacaaacatgatctcatatcagggacttgttcgcaccttccttagcgcattgcccgcttatgccgggttaact

SEQ ID NO: 275460 - DNA, 75 bp, synthetic construct
  source 1..75: mol_type = other DNA
actggactatgaaaccatccttgcggaacgcaaagcgacgctgatatcgctctatccagaagaccagcaggaggc

SEQ ID NO: 275461 - DNA, 75 bp, synthetic construct
  source 1..75: mol_type = other DNA
tcctgctgccggaaacggattttaccctgccgggccgtctgcccgtcacctgctcgcgcttttatgccagccacc

SEQ ID NO: 275462 - DNA, 75 bp, synthetic construct
  source 1..75: mol_type = other DNA
gcatattgaactggtgaaaggcgggcgtcccggtagcctggtggaatatcgctacgacgataacgggcaactgac

SEQ ID NO: 275463 - DNA, 75 bp, synthetic construct
  source 1..75: mol_type = other DNA
atatgcgaagaccattctccggaaatccgtatcgcccagggttccggcaatatctacatcaacagccagcccgcc

SEQ ID NO: 275464 - DNA, 75 bp, synthetic construct
  source 1..75: mol_type = other DNA
gcggccaaatttattggtggcgaaataaccgggatggccgtttccgaggtcgctatggggttgttcagcaaccca

SEQ ID NO: 275465 - DNA, 75 bp, synthetic construct
  source 1..75: mol_type = other DNA
tgcccgcgccgtactgagtacggtgatatgcgaagaccattctccagaaatccgtatcgcccagggttcctgcaa

SEQ ID NO: 275466 - DNA, 75 bp, synthetic construct
  source 1..75: mol_type = other DNA
tttctggctgatcagatcgcttccggagtcctgcaacttggggaggccatcgggcgctcgatacattccacagca

SEQ ID NO: 275467 - DNA, 75 bp, synthetic construct
  source 1..75: mol_type = other DNA
atggcagttattgacctgagccagctccccgcgcctgatgtggtggaaacactggattttgaagccatcctcgcc

SEQ ID NO: 275468 - DNA, 75 bp, synthetic construct
  source 1..75: mol_type = other DNA
aatgatttcggcgtgcaggcggctatagctgtgcttaatgatgcacggaaaaactcacagccaatgcctgaaccg

SEQ ID NO: 275469 - DNA, 75 bp, synthetic construct
  source 1..75: mol_type = other DNA
tgatgaaaaaactgtttgaagttaaattgctagagaagttcgttgatgacggttacgaagaagaagaagttaaac

SEQ ID NO: 275470 - DNA, 75 bp, synthetic construct
  source 1..75: mol_type = other DNA
aatgatttaggcgtgcaggcggctatatctatgcttaatgaagcacgaaaaatgtcacagccaatgcctgaacct

SEQ ID NO: 275471 - DNA, 75 bp, synthetic construct
  source 1..75: mol_type = other DNA
tgaaaacgtctccggcacccgctatagctggaaagtcagcggcatggactgcgccgcctgtgcgcgcaaggtaga

SEQ ID NO: 275472 - DNA, 75 bp, synthetic construct
  source 1..75: mol_type = other DNA
ttttcatgccattgctttacgttgaaatggtcggcaatgatatgcgtgcaaatgatctaggtgtacaggcggcta

SEQ ID NO: 275473 - DNA, 75 bp, synthetic construct
  source 1..75: mol_type = other DNA
cgttcggaagtgctgttatcttcccgttagatgaaaatcatatgggtagcgttgctctgtattctatgcgcggct

SEQ ID NO: 275474 - DNA, 75 bp, synthetic construct
  source 1..75: mol_type = other DNA
tcgggcagctgctgcaagaattaaaacgcagtgataagttacatcttaaagacgccgccgccctgcttggggttt

SEQ ID NO: 275475 - DNA, 75 bp, synthetic construct
  source 1..75: mol_type = other DNA
tggcctgaaagacaaaaagcgcgacgaaagcatggatgttgttcctggcattagtcaggaaacctgtcagttggg

SEQ ID NO: 275476 - DNA, 75 bp, synthetic construct
  source 1..75: mol_type = other DNA
atgccgcctgatgacattttcgatatctcactggcagaaggaactcagcttgatgcagatatcactgccttgaac

SEQ ID NO: 275477 - DNA, 75 bp, synthetic construct
  source 1..75: mol_type = other DNA
cgttcggcagtgctgttatcttcccgttagacgaaaaccatatgggtagcgctgcactttattctgtgcgcggcg

SEQ ID NO: 275478 - DNA, 75 bp, synthetic construct
  source 1..75: mol_type = other DNA
gttagatgaaaatcatatgggtagcgttgcgctgtattctgtgcgtggcgtaatgaaaaaagtattcgaggctaa

SEQ ID NO: 275479 - DNA, 75 bp, synthetic construct
  source 1..75: mol_type = other DNA
cgggcttaaagataaacgtgataaggccgatgaggtgaattttccccccgtcgttaataaagaagtttgccagtt

SEQ ID NO: 275480 - DNA, 75 bp, synthetic construct
  source 1..75: mol_type = other DNA
caaatcgacctacacaatatcccaaccgaagaacaagtcgactatggataagttggcctccggtctggggaaaat

SEQ ID NO: 275481 - DNA, 75 bp, synthetic construct
  source 1..75: mol_type = other DNA
gccactacggctctggcagctgtaggcacaggtattgcagcggcatgtacagcaccaggtagccaagaatcctta

SEQ ID NO: 275482 - DNA, 75 bp, synthetic construct
  source 1..75: mol_type = other DNA
tagaatcctgggtggagttttaataggtgcaggtgttctagccgctatcggtactggtatcgcagcaatgtgtgt

SEQ ID NO: 275483 - DNA, 75 bp, synthetic construct
  source 1..75: mol_type = other DNA
atggtcagctatgacaagatccgcgcaaagtatcgcgcaaagtatcgcgcttataaactagaattaatcgatgat

SEQ ID NO: 275484 - DNA, 75 bp, synthetic construct
  source 1..75: mol_type = other DNA
cgcgattgagcgcattctgcgtgcagatccggaagctgacgcactgttgcgtagcgaagccaagcagggtgctgg

SEQ ID NO: 275485 - DNA, 75 bp, synthetic construct
  source 1..75: mol_type = other DNA
ggtggcggtgctcctgctggagacaatgagcagagcattcaagacccaggcaaacagggcgagcaaaaagagcaa

SEQ ID NO: 275486 - DNA, 75 bp, synthetic construct
  source 1..75: mol_type = other DNA
ctgaccacgctgcccgtaccgggacggctgttgcctgcgtgtcgtctggcggctgaggtatatgactatgtacgc

SEQ ID NO: 275487 - DNA, 75 bp, synthetic construct
  source 1..75: mol_type = other DNA
ctattgaaacagactactccacctcggatgtcgggcagctcagcacccgcgtcgcggcctttattgagatgctgt

SEQ ID NO: 275488 - DNA, 75 bp, synthetic construct
  source 1..75: mol_type = other DNA
aggacgatgcctcacgcgcgttatggaaagccgagatgctgcgcttgcaaaaaacggtagaagaacgttttgggc

SEQ ID NO: 275489 - DNA, 75 bp, synthetic construct
  source 1..75: mol_type = other DNA
cagaaggtggaacaagtcgtaacgttagaatcctagctggagttttgataagtgtaggtactctagccgctatcg

SEQ ID NO: 275490 - DNA, 75 bp, synthetic construct
  source 1..75: mol_type = other DNA
aaagtatgtagaattgcgttggatgaactaaaaaagttgccaagcaatgaatttaagcattgctttgactttatg

SEQ ID NO: 275491 - DNA, 75 bp, synthetic construct
  source 1..75: mol_type = other DNA
gtgaaattaaatatcagagtggataaacgccagctatggcagaaaaaagagaacagcgaggcattcagggctttg

SEQ ID NO: 275492 - DNA, 75 bp, synthetic construct
  source 1..75: mol_type = other DNA
atgtataaaattaccgccactattgaaaaggaaggtggcactcctactaactggacaagatattcaaaatctaaa

SEQ ID NO: 275493 - DNA, 75 bp, synthetic construct
  source 1..75: mol_type = other DNA
cgcctgcaacaatataaccgcgaggctcaggagttcctgcataacattgccgaggtgatgggaaccagttttgaa

SEQ ID NO: 275494 - DNA, 75 bp, synthetic construct
  source 1..75: mol_type = other DNA
ggcgaacggatggcgcaacaactggaaaaaatctttgccgacagcgaagcgcgtgaaaaagcgatggcggaacag

SEQ ID NO: 275495 - DNA, 75 bp, synthetic construct
  source 1..75: mol_type = other DNA
tatgcgctaaggaggaagcaggcgcgcctaggcttactgctggtattaatgctgaattcaggcatgcggtttgtg

SEQ ID NO: 275496 - DNA, 75 bp, synthetic construct
  source 1..75: mol_type = other DNA
ttatgagcaaaatggataacacctttggtcagcagttcaccaccatgcaggagatgatggggcgttctgtggaag

SEQ ID NO: 275497 - DNA, 75 bp, synthetic construct
  source 1..75: mol_type = other DNA
cagtttatgacgtcgttacagcaaaccatgcattcaagtcaggatgccctgcgagagaaaatgaccagcggtatc

SEQ ID NO: 275498 - DNA, 75 bp, synthetic construct
  source 1..75: mol_type = other DNA
ggagcgaatttaaagagtctctacatcgccagtttgagtttgatgaaaacagcgggcaaaaaaaaattagcgcca

SEQ ID NO: 275499 - DNA, 75 bp, synthetic construct
  source 1..75: mol_type = other DNA
atggacgccattgagctcagaatgggtgaaatgcgtcgctatatcattaccatgatcgacgaacacagcgattat

SEQ ID NO: 275500 - DNA, 75 bp, synthetic construct
  source 1..75: mol_type = other DNA
atgaaaatcaccaaaattaccacgtatcgtttacctccccgctggatgttcctgaaaattgaaaccgatgaaggc

SEQ ID NO: 275501 - DNA, 75 bp, synthetic construct
  source 1..75: mol_type = other DNA
tgctctcagggaaaaaagaagatggcgtttccagagaacagaaagtaaaactgataaattttaattgcgagaaaa

SEQ ID NO: 275502 - DNA, 75 bp, synthetic construct
  source 1..75: mol_type = other DNA
ttcatgtgcatttgctggggttttattgccttatgcctgtttatcaggtggtttattgaataccatatgaggtga

SEQ ID NO: 275503 - DNA, 75 bp, synthetic construct
  source 1..75: mol_type = other DNA
gaatgctcagaaccggttaatggtgaatggaagagtttggggcggcgaaaagatacaccgtttgagatgataaaa

SEQ ID NO: 275504 - DNA, 75 bp, synthetic construct
  source 1..75: mol_type = other DNA
ggcgctcgcactaatgacgcccgtggaatatattttaaaagagaataaaaattgcaatatgtggtggacccatac

SEQ ID NO: 275505 - DNA, 75 bp, synthetic construct
  source 1..75: mol_type = other DNA
atgtcggcccgcaggcggtacaggacaaaattggcgctgacccgaccggattgccctttaactcagttatcgcct

SEQ ID NO: 275506 - DNA, 75 bp, synthetic construct
  source 1..75: mol_type = other DNA
attaccgctttgcgctggaatccatctcgaaagtctgtactttagccctcgcgctggaagatgtcggctcgcagg

SEQ ID NO: 275507 - DNA, 75 bp, synthetic construct
  source 1..75: mol_type = other DNA
gtcagcttgaagaaattgctcgcggcgactcaccgaaacaactgattgaagaaattggtgagcgtctcctcgctt

SEQ ID NO: 275508 - DNA, 75 bp, synthetic construct
  source 1..75: mol_type = other DNA
tactccgccggatatctctattgtgatgcgatggaagcctgtgacatctacacccgtcagtgctccacgctcatc

SEQ ID NO: 275509 - DNA, 75 bp, synthetic construct
  source 1..75: mol_type = other DNA
cccgaccggattgccctttaactcagttatcgccttagagttgcatggcggcaaaccgctgtcgccactggtaaa

SEQ ID NO: 275510 - DNA, 75 bp, synthetic construct
  source 1..75: mol_type = other DNA
gtggcgctttctgaggaagtgaaccagtcggaacagaccaccaacttccacaaccgggcgattgcctggctgctg

SEQ ID NO: 275511 - DNA, 75 bp, synthetic construct
  source 1..75: mol_type = other DNA
gtggttgccggacaatccggtggaggaaaatctgttccggtgaaagaactaatcgacagaattattcagaaatat

SEQ ID NO: 275512 - DNA, 75 bp, synthetic construct
  source 1..75: mol_type = other DNA
atgaacatgcgtaatattcatgttattactgcccgctctgtgccaggtaataccatatcagatgattttatgcat

SEQ ID NO: 275513 - DNA, 75 bp, synthetic construct
  source 1..75: mol_type = other DNA
atgcactctttatgataagtctgcattcatgaatctcacaagagaacatctaccccaccctctcagcagggagag

SEQ ID NO: 275514 - DNA, 75 bp, synthetic construct
  source 1..75: mol_type = other DNA
gagacgatctgctgggtgatgcctacgaatatttaatgcgccactttgctacagagtcaggtaaatccaaggggc

SEQ ID NO: 275515 - DNA, 75 bp, synthetic construct
  source 1..75: mol_type = other DNA
aattttaatatggctgctgtcggtgtgatgaagaagggaatgtcgatgagtttattttcttctccggggcatatt

SEQ ID NO: 275516 - DNA, 75 bp, synthetic construct
  source 1..75: mol_type = other DNA
gcaatcttcggacaatcctgtgcaggaaaatcaaatctgatggctgaattcatttcttctgttgtggggagtaat

SEQ ID NO: 275517 - DNA, 75 bp, synthetic construct
  source 1..75: mol_type = other DNA
gtcatcgccttagaacttcatggcggcaaaccgttgtcgccactggtgaatgcaggtgctatcgccactaccagt

SEQ ID NO: 275518 - DNA, 75 bp, synthetic construct
  source 1..75: mol_type = other DNA
aactggcttcgccagaatggcgcaaaaggcgttattgaataccagcctgtctttaattgcctgacgtgcagagaa

SEQ ID NO: 275519 - DNA, 75 bp, synthetic construct
  source 1..75: mol_type = other DNA
tgaccaaatagaacagttaaagcaacaactggcaacccaagaggcgacttataaaagtctgacaaaaactactga

SEQ ID NO: 275520 - DNA, 75 bp, synthetic construct
  source 1..75: mol_type = other DNA
cactggctgggctgttaggtgcgggaaccattggtacggcttctgctatagagggtactggtgttgtggtctacg

SEQ ID NO: 275521 - DNA, 75 bp, synthetic construct
  source 1..75: mol_type = other DNA
atggatctcaaggagcgcggcattccgctggttggcacctactgcacctttatgccgcaagagatcccgatggca

SEQ ID NO: 275522 - DNA, 75 bp, synthetic construct
  source 1..75: mol_type = other DNA
cagcactttcagtgacggcaatgaccgctcacgccgactaccagtgcagcgtcacgccgcgtgacgatgtgattg

SEQ ID NO: 275523 - DNA, 75 bp, synthetic construct
  source 1..75: mol_type = other DNA
cggcactgatttctttaatgccaaaactggcttcggcagaatggagcaaaaggtgttattgaataccagcctgtc

SEQ ID NO: 275524 - DNA, 75 bp, synthetic construct
  source 1..75: mol_type = other DNA
aaatacaaagccgaactcatccctccggcgttgatcgtcgcgcgcttttttgccgctgaacaagtcaaagtcgat

SEQ ID NO: 275525 - DNA, 75 bp, synthetic construct
  source 1..75: mol_type = other DNA
tgccagcaaaggctttgccaaagacggcaataaaaaccgcctgcgcagccaagatattcataaaatcgtcgatgt

SEQ ID NO: 275526 - DNA, 75 bp, synthetic construct
  source 1..75: mol_type = other DNA
aagagatgatcgaccgtctgtctaagctgatcggtatctttgaagggctagacctatctgccaaccgcgccgatg

SEQ ID NO: 275527 - DNA, 75 bp, synthetic construct
  source 1..75: mol_type = other DNA
agctggcggaaaaaggtgcttacgaccgtgtgatggccgaaaaagcctacaacaaccagatgcaagagctgagcg

SEQ ID NO: 275528 - DNA, 75 bp, synthetic construct
  source 1..75: mol_type = other DNA
ctgcacatcattaaaagcctaaaaagcaccggtaaaggcgcggtcattctgcctcacggcgttttgttccgtggc

SEQ ID NO: 275529 - DNA, 75 bp, synthetic construct
  source 1..75: mol_type = other DNA
gactcagatgaaaaagcggcgctaaaacaagccaaaaaactctttgatgccgagggtgatgccaaaaaagctcta

SEQ ID NO: 275530 - DNA, 75 bp, synthetic construct
  source 1..75: mol_type = other DNA
gtaagaactacctgcaaaatcaggaaggttttgttcatatttgccagctggatacggcgggcgcacgagtactgg

SEQ ID NO: 275531 - DNA, 75 bp, synthetic construct
  source 1..75: mol_type = other DNA
ccttccacttggtgtaaaattagctattgactttgacaacaaaaatatatctataacagaacaatatctatctac

SEQ ID NO: 275532 - DNA, 75 bp, synthetic construct
  source 1..75: mol_type = other DNA
aaaggcgcggtggggaatgtcggcgtcggtattgctgacggcattggcctggtcgcccgggaagaaggttgtgct

SEQ ID NO: 275533 - DNA, 75 bp, synthetic construct
  source 1..75: mol_type = other DNA
gtaaacaggaagaattatccggactcgatcctgaacagttccaccccatcagtgatgctgtcgcccagtatcagg

SEQ ID NO: 275534 - DNA, 75 bp, synthetic construct
  source 1..75: mol_type = other DNA
gcttcattcacgcctgctattcccgtcaacctgagcttgccgcgaagttgatgaaagatgttatcgctgaacctt

SEQ ID NO: 275535 - DNA, 75 bp, synthetic construct
  source 1..75: mol_type = other DNA
tcagcctgagcttgccgcgaagctgatgaaagatgttatcgctgaaccctaccgtgaacggttattgcctggctt

SEQ ID NO: 275536 - DNA, 75 bp, synthetic construct
  source 1..75: mol_type = other DNA
aggcgacgctttgatgctacgcgatattctgctgaatcacgcctggagtttgttcaaccacagcgaactgtcgct

SEQ ID NO: 275537 - DNA, 75 bp, synthetic construct
  source 1..75: mol_type = other DNA
agctggaagtggcggcaaccaccatcaagacgcatatccgcaatctgtaccaaaaactcggtgtcgcccaccgtc

SEQ ID NO: 275538 - DNA, 75 bp, synthetic construct
  source 1..75: mol_type = other DNA
cagaagctcggcgtggcccatcgccaggatgcggtacaacacgcccagcaattattgaagatgatgggatacgga

SEQ ID NO: 275539 - DNA, 75 bp, synthetic construct
  source 1..75: mol_type = other DNA
tcaccccccagacatggcaccaattcacaagtctggttaaccacttaaatattcatcctagtttaattgatgtaa

SEQ ID NO: 275540 - DNA, 75 bp, synthetic construct
  source 1..75: mol_type = other DNA
tcatcacccgtgtgaccggcgaagaaaacgggcaaatgcgcctcgaagagattgagcgccaggggctgtttttac

SEQ ID NO: 275541 - DNA, 75 bp, synthetic construct
  source 1..75: mol_type = other DNA
tggcgtttacccatcaggaagccaagcagttttttgattgtcgtctgtcatcaccgattgaagcgaccgaaagcg

SEQ ID NO: 275542 - DNA, 75 bp, synthetic construct
  source 1..75: mol_type = other DNA
atggcgcaggatgcccagcgttgtttacaggcgctgggcgttgacgttagccctgaacaacttgtatcgacgcta

SEQ ID NO: 275543 - DNA, 75 bp, synthetic construct
  source 1..75: mol_type = other DNA
aacctgcacaacagagtgatttgattaacgtcgctcaactgacggcgcaatattatgtactgaaaccagaagcag

SEQ ID NO: 275544 - DNA, 75 bp, synthetic construct
  source 1..75: mol_type = other DNA
tgccgactggttgggtaagaactacctgcaaaatcaggaaggttttgttcatatttgccggctggatacggcggg

SEQ ID NO: 275545 - DNA, 75 bp, synthetic construct
  source 1..75: mol_type = other DNA
gcctgttattttaaccgcgccgaattcaccgacgatacctcgatggcgctgtgtctggcggatgcgttgctggaa

SEQ ID NO: 275546 - DNA, 75 bp, synthetic construct
  source 1..75: mol_type = other DNA
ctactgcgaaagcttccttggcgaagcacatcgtaagcagatcgagaaagaggcggttgagattgttagcgaagt

SEQ ID NO: 275547 - DNA, 75 bp, synthetic construct
  source 1..75: mol_type = other DNA
cgccaaatggtggcccggctgataccaacgtcaccaaagtggtggaagacagggccaacgcactgatggccgatg

SEQ ID NO: 275548 - DNA, 75 bp, synthetic construct
  source 1..75: mol_type = other DNA
gcagcgcgccatagctttaacgagccgcacattctggcgatagcccaggcgattgccgaagaacgtgtgaaaaac

SEQ ID NO: 275549 - DNA, 75 bp, synthetic construct
  source 1..75: mol_type = other DNA
aaaaacgtgcttggcccgacctcaaaaattgcgcttaacgccattcgcgacggtaaacccgtcgctgaactggaa

SEQ ID NO: 275550 - DNA, 75 bp, synthetic construct
  source 1..75: mol_type = other DNA
gcctgctattttaaccgcgccgaatttaccgacgacacctcgatggcgctgtgcctggcggatgcgttgctggaa

SEQ ID NO: 275551 - DNA, 75 bp, synthetic construct
  source 1..75: mol_type = other DNA
ttaaagagaaaggatttcctcctgatgtgattgaagctgcgttagcacatatcgatacttacgaagtcaggagag

SEQ ID NO: 275552 - DNA, 75 bp, synthetic construct
  source 1..75: mol_type = other DNA
aaccttggcggcgacacagacaccatcggcgctatggcgacggcgatttgcggcgcgttgcatggcgttaacgct

SEQ ID NO: 275553 - DNA, 75 bp, synthetic construct
  source 1..75: mol_type = other DNA
tgaactggcacaaaccgacccaaaccgctgcgccgtcctgtgcgccaatcttggcggcgacacagacaccatagg

SEQ ID NO: 275554 - DNA, 75 bp, synthetic construct
  source 1..75: mol_type = other DNA
cgtccagcccgacccataaatccgatctggcggttgcgggcgcggtagtcatcgcatgggcgatttctcgtgcca

SEQ ID NO: 275555 - DNA, 75 bp, synthetic construct
  source 1..75: mol_type = other DNA
ggtttaaatatgtaagggattttttttgtttctcctggcgagtttcgtcagactggaacggatgcatcccgcaca

SEQ ID NO: 275556 - DNA, 75 bp, synthetic construct
  source 1..75: mol_type = other DNA
cattaatgctgaatcggcacgtactgatagtcttcttcttcaggagcagaatgcacgtaaacagggggataccag

SEQ ID NO: 275557 - DNA, 75 bp, synthetic construct
  source 1..75: mol_type = other DNA
cgaaaatgaacgcctcgcaaatacgttaagcgcaacttaccgcgaatcaggttcacaatttgccgaccaggtcag

SEQ ID NO: 275558 - DNA, 75 bp, synthetic construct
  source 1..75: mol_type = other DNA
tgcgatggattatttcggagcaggatgttctgtactgtcgtacctgaagcgcttcccggtcagttatataaaaat

SEQ ID NO: 275559 - DNA, 75 bp, synthetic construct
  source 1..75: mol_type = other DNA
aggggttttatttcggcagaccggaaaaagtggatacattttgttgtgagtacaggctcgtcactcctgaaaaat

SEQ ID NO: 275560 - DNA, 75 bp, synthetic construct
  source 1..75: mol_type = other DNA
attaatccttttgttgaggggggatatcttcccaacgtcgggcctgggtttattgcatcccatgaaactgaagat

SEQ ID NO: 275561 - DNA, 75 bp, synthetic construct
  source 1..75: mol_type = other DNA
ggcgctgaccttttatttactgccagatcgtccggaaaaagcccgctggcttacaccatcgcaagtcaccgcatt

SEQ ID NO: 275562 - DNA, 75 bp, synthetic construct
  source 1..75: mol_type = other DNA
agtgaatagcttttttatgttatcaatcgcagttgcatctgtgctggcggcaccaatgtctggttggattattga

SEQ ID NO: 275563 - DNA, 75 bp, synthetic construct
  source 1..75: mol_type = other DNA
atgtcggtttgattatgagtattccgtttattttcgcgatgttcagtatgccattatggggatggcattccgata

SEQ ID NO: 275564 - DNA, 75 bp, synthetic construct
  source 1..75: mol_type = other DNA
cacggtgaacgtctgcagagctataaccgggaagcacaggcctttatggaaaatgtcagtgacgtgctcgggaaa

SEQ ID NO: 275565 - DNA, 75 bp, synthetic construct
  source 1..75: mol_type = other DNA
tccatcgctaagtgctacaaatatctggaaaaattcaccgcatctctcgactcgctttatgacagcggcgttggc

SEQ ID NO: 275566 - DNA, 75 bp, synthetic construct
  source 1..75: mol_type = other DNA
cagcatttgcgattacgttctctatccttatcacctggctggagaaattctgtctggcgaaatgctacaaatatc

SEQ ID NO: 275567 - DNA, 75 bp, synthetic construct
  source 1..75: mol_type = other DNA
gcagaaggtgtggaaacacaggcgctggtgaactgtctgtgttctctgggagtggataatctgcaggggggggcc

SEQ ID NO: 275568 - DNA, 75 bp, synthetic construct
  source 1..75: mol_type = other DNA
acgccagacggtaatgtgaagtacaacggcaagcaatattctctgaacgccgcccagcgcgagcaggcgaaggat

SEQ ID NO: 275569 - DNA, 75 bp, synthetic construct
  source 1..75: mol_type = other DNA
cggagaaaaaagagttcaccaaagaaaccatgctacgcgccgcggacgagatctattttgtcccggaaggtacgc

SEQ ID NO: 275570 - DNA, 75 bp, synthetic construct
  source 1..75: mol_type = other DNA
ctggcggttgatgtcggagaaaaaagagttcaccaaagaaaccatgctacgcgccgcggacgagatctattttgt

SEQ ID NO: 275571 - DNA, 75 bp, synthetic construct
  source 1..75: mol_type = other DNA
atgctcgctggcccgtggtgatttagataacgcccgtagccagctgaaccgtctggaaaacctgctggggaatgg

SEQ ID NO: 275572 - DNA, 75 bp, synthetic construct
  source 1..75: mol_type = other DNA
gtccggttcgactcgaccatactgtggttcgtgagcgcctgctggctaaactttccggcgcgaacaacttcaggc

SEQ ID NO: 275573 - DNA, 75 bp, synthetic construct
  source 1..75: mol_type = other DNA
gagccgcgttgagaaagcccgcgtcgcactggataaaattatcgttcaggagatgggtgaaagcagtaaaatgcg

SEQ ID NO: 275574 - DNA, 75 bp, synthetic construct
  source 1..75: mol_type = other DNA
gtatttactacgtgcatcgaatagttgtgtgattcatagacatcgtttcaattttctcagttcaagttcaagctt

SEQ ID NO: 275575 - DNA, 75 bp, synthetic construct
  source 1..75: mol_type = other DNA
tattggtcacagttgtgcgttatttaatatcggtttgaagaatgtgtccaggctcaaacaagaagcgacgcctgc

SEQ ID NO: 275576 - DNA, 75 bp, synthetic construct
  source 1..75: mol_type = other DNA
aacacaggcgcaggtgaactgtctgtgctctctgggagtggattatctgcaggggttttatttcggcaggccgga

SEQ ID NO: 275577 - DNA, 75 bp, synthetic construct
  source 1..75: mol_type = other DNA
cctgtcgggatgtctcatgctgaatttattgcagcgtatgaccagctttcgcagtgggcgctgcaatcggggtat

SEQ ID NO: 275578 - DNA, 75 bp, synthetic construct
  source 1..75: mol_type = other DNA
atggctgaccagaatgttaatccgtacctttcgggcgctgatactgcgtcgcagcaatcgccatacatggctgca

SEQ ID NO: 275579 - DNA, 75 bp, synthetic construct
  source 1..75: mol_type = other DNA
ggaataatggcaacattgctaatcagcaagaccagaacgcggacagcgccggggcgcaggtgggcgatactatcc

SEQ ID NO: 275580 - DNA, 75 bp, synthetic construct
  source 1..75: mol_type = other DNA
ctggcaactctccggtcattccggatagttggataagctgtagtgagcgaatgccgaacgataaacagtatgttt

SEQ ID NO: 275581 - DNA, 75 bp, synthetic construct
  source 1..75: mol_type = other DNA
agattgaactgacgatgaattcgttaattgtccgcatgggcccacaacacttttctgttctctggcatcagacag

SEQ ID NO: 275582 - DNA, 75 bp, synthetic construct
  source 1..75: mol_type = other DNA
aatttccgcgctatctcgctggaaagaaaagccaaaacagccgaagtcaaactgggcggtgaccgggctttattt

SEQ ID NO: 275583 - DNA, 75 bp, synthetic construct
  source 1..75: mol_type = other DNA
gcgcgccgccagctcgctggcgaaaactggctacggccaatatctgctggagttacttcgtgcccgtccgcgcca

SEQ ID NO: 275584 - DNA, 75 bp, synthetic construct
  source 1..75: mol_type = other DNA
tgcgcggcctcgacaccatcgggctcacggcggccagtacctggtttgaaatcgacattgtgctcagtgaagcct

SEQ ID NO: 275585 - DNA, 75 bp, synthetic construct
  source 1..75: mol_type = other DNA
ccggttatcaatctctttaccctggaagccgacccgctgatccttaacccgctggataacgagtacctgctcagg

SEQ ID NO: 275586 - DNA, 75 bp, synthetic construct
  source 1..75: mol_type = other DNA
aaggcgttatgctttaattactttaatttgtctgactcaaatcgtaaattctaacatggctgtgattgcagccat

SEQ ID NO: 275587 - DNA, 75 bp, synthetic construct
  source 1..75: mol_type = other DNA
aaccggaagatatcacctcagaaaacggcgatattcagccggaatcaccggtggttgatgcgactgaagcacaac

SEQ ID NO: 275588 - DNA, 75 bp, synthetic construct
  source 1..75: mol_type = other DNA
gcgctcagaagatgtgcgtggagcactgaaacagaaagtccgccagacatttgaagcgcagatagaagcagatgt

SEQ ID NO: 275589 - DNA, 75 bp, synthetic construct
  source 1..75: mol_type = other DNA
ttttccgaccagagtcatttttcaacggtatttaaacaacgctttgggatgacgccaggcgagaatcggcgtaaa

SEQ ID NO: 275590 - DNA, 75 bp, synthetic construct
  source 1..75: mol_type = other DNA
ggatgccattctggatgaattgcttggtgcacagccggaaccatccccggaactgcttccggaaccacaggcgga

SEQ ID NO: 275591 - DNA, 75 bp, synthetic construct
  source 1..75: mol_type = other DNA
ggcgagcagccaggcgaacagccagagccggaaccgcaaccggaagatatcacctcagaaaacggcgatattcag

SEQ ID NO: 275592 - DNA, 75 bp, synthetic construct
  source 1..75: mol_type = other DNA
atgtcagaaattacatccctggtcactgctgaggcagtgaaggaagtcctgcgctctgaagaagtcctgagcgca

SEQ ID NO: 275593 - DNA, 75 bp, synthetic construct
  source 1..75: mol_type = other DNA
tggcggtcagcggtgggaggtggatcggatgccggagcgggaaacgctttcattacgtattacaggtaccaatgg

SEQ ID NO: 275594 - DNA, 75 bp, synthetic construct
  source 1..75: mol_type = other DNA
taacattgagatgaagcgtgcgtcgctggagttacacaacaaaccgcaacatctttttatgcgaaatatcaaagt

SEQ ID NO: 275595 - DNA, 75 bp, synthetic construct
  source 1..75: mol_type = other DNA
gcatgtcgcattcgcgatgaccggaaatcaaaagccagcaatggggcaagagagatggctcgctggcgatgggat

SEQ ID NO: 275596 - DNA, 75 bp, synthetic construct
  source 1..75: mol_type = other DNA
ttcgtccaggaacgggggcataaaattgccagttattatcgggagaacataagcggtacaaaacttgaccgtcca

SEQ ID NO: 275597 - DNA, 75 bp, synthetic construct
  source 1..75: mol_type = other DNA
catgccgatggtcgaggcagcaccaaccgctcagcaacagttgctggagcaagttcggttaggtgaagcgaccca

SEQ ID NO: 275598 - DNA, 75 bp, synthetic construct
  source 1..75: mol_type = other DNA
tactggctggcgatccagcagggcgatgctgcgctgaaagccaataatcccgaccgggcagaacgcctgttccag

SEQ ID NO: 275599 - DNA, 75 bp, synthetic construct
  source 1..75: mol_type = other DNA
aaagacagtgaggctctgggggcgctgggccaggcgtattcccagaaaggcgatcgcgccaatgcagtggtgaat

SEQ ID NO: 275600 - DNA, 75 bp, synthetic construct
  source 1..75: mol_type = other DNA
tgagcatccgtgaaacggcggaggtgacaggctatagtacttcccaagtttgtcgcattcaggcgctctataaag

SEQ ID NO: 275601 - DNA, 75 bp, synthetic construct
  source 1..75: mol_type = other DNA
gtcatcgcaatgatatcttgctggtcgagcagatagaccgcctgacccgtctcagcaacagtgactggataacgc

SEQ ID NO: 275602 - DNA, 75 bp, synthetic construct
  source 1..75: mol_type = other DNA
aagactggttaagtcgtcgccaacgtcaaaaacaaggaattgaacgagcccatacgctggggaaatatcggggaa

SEQ ID NO: 275603 - DNA, 75 bp, synthetic construct
  source 1..75: mol_type = other DNA
atggcgcaattctactctgcaaaacggcgcgtgacgacgcgtcagatcataaccgtttcagtcaatgacctcgac

SEQ ID NO: 275604 - DNA, 75 bp, synthetic construct
  source 1..75: mol_type = other DNA
tgagtatccgggaaacggcggatgctacaggctacagtgcttcacaggtttgccggatacaagcgcttcataaaa

SEQ ID NO: 275605 - DNA, 75 bp, synthetic construct
  source 1..75: mol_type = other DNA
tgagcatccgtgaaacggcagaggcgacaggctatagtacttcccaggtttgtcgcattcaggctctctataaag

SEQ ID NO: 275606 - DNA, 75 bp, synthetic construct
  source 1..75: mol_type = other DNA
atggaagtaaaaatattgatgtattcagaaaactcctgactgagtttattcagagtgatccatcttattcatggt

SEQ ID NO: 275607 - DNA, 75 bp, synthetic construct
  source 1..75: mol_type = other DNA
tcatgagttactgaagataaccagacctcatgataaaatatcatcaatagcttcacttgctgtagaaagagatga

SEQ ID NO: 275608 - DNA, 75 bp, synthetic construct
  source 1..75: mol_type = other DNA
cactgcctgccacgaaagataacacgctttcgcagcccgcccaggaaagaaaaaaactgattaccgtgctgggct

SEQ ID NO: 275609 - DNA, 75 bp, synthetic construct
  source 1..75: mol_type = other DNA
ttctcttgatttttgtgtcggttttcgttttatctgtttgctatgtcattggtgtgttcagaaactggacagata

SEQ ID NO: 275610 - DNA, 75 bp, synthetic construct
  source 1..75: mol_type = other DNA
acacttacatcataatattcctgtctttcttgccataagcggatgtgagcacattgatggatattcagcactagc

SEQ ID NO: 275611 - DNA, 75 bp, synthetic construct
  source 1..75: mol_type = other DNA
ggataatccccgagtcaaaccaacaggtacaactctgactcttgagtgtaaaacaggtaacagcagtatacgaag

SEQ ID NO: 275612 - DNA, 75 bp, synthetic construct
  source 1..75: mol_type = other DNA
ctttgcaaaatacagctgggagaatagtggttggatttcaaaaatacccagcaatataacaatatgcccagcagt

SEQ ID NO: 275613 - DNA, 75 bp, synthetic construct
  source 1..75: mol_type = other DNA
aatcaacccccgaacgggtaaagctattacaggtaatactgtacgtcttgaactcgcccttctgtcatctctgtt

SEQ ID NO: 275614 - DNA, 75 bp, synthetic construct
  source 1..75: mol_type = other DNA
gatgacattaccactgttgatattgccaattatcgggatcaacggttggcacaaattaacccacgaacggggcgt

SEQ ID NO: 275615 - DNA, 75 bp, synthetic construct
  source 1..75: mol_type = other DNA
cacaaaacaagttggttatattatttaatgagtttgaaaaggttcgctcgataattaatggtaaagatacagatc

SEQ ID NO: 275616 - DNA, 75 bp, synthetic construct
  source 1..75: mol_type = other DNA
ttattcatggtttgtttcggaagatgtcgatattcctgcggtaaatattactgatttttggaaagacgaaaatac

SEQ ID NO: 275617 - DNA, 75 bp, synthetic construct
  source 1..75: mol_type = other DNA
cacttataattatgattatagtgtgttttcttgggtatagtgcatatagttcatataatatctatagtctgaaac

SEQ ID NO: 275618 - DNA, 75 bp, synthetic construct
  source 1..75: mol_type = other DNA
taaggatattaatgtaccagtctttcacagtaatgagttaaattgtatttcccaacaattcagaacaattcgttg

SEQ ID NO: 275619 - DNA, 75 bp, synthetic construct
  source 1..75: mol_type = other DNA
actcctgtattcaggtgttatctcaaaaaacaagaaattttacagaacaactgtcgtcacacttacatcataata

SEQ ID NO: 275620 - DNA, 75 bp, synthetic construct
  source 1..75: mol_type = other DNA
tcaatgacattgtttctccggatgatttgcttgacgttcagctcagagaccgaacgcaaaacaaggatgagttaa

SEQ ID NO: 275621 - DNA, 75 bp, synthetic construct
  source 1..75: mol_type = other DNA
cataagcaaaaaaggaagaggagtagccccttggtttttacttacctgtgattcagaaaaaaataattccctgct

SEQ ID NO: 275622 - DNA, 75 bp, synthetic construct
  source 1..75: mol_type = other DNA
tgcaaaacctgacgtggattaaccctattcgccactttacggacattaccaagcagatttatttgaaggatgcga

SEQ ID NO: 275623 - DNA, 75 bp, synthetic construct
  source 1..75: mol_type = other DNA
ttttgcccgcgccagcgcctttacccatgtgctgctgctgaaaagcccacaggagatccgcccgaccatcgacac

SEQ ID NO: 275624 - DNA, 75 bp, synthetic construct
  source 1..75: mol_type = other DNA
tacaggagagcatgaataatccggcactttctgaaacagaaagtgaagctgcgctacaggcgatggtgtgtctgc

SEQ ID NO: 275625 - DNA, 75 bp, synthetic construct
  source 1..75: mol_type = other DNA
ccttatgataaaatatcatcaacagcttcacttgctttagaaagagatgagatacaaaaaaattatggaagtgaa

SEQ ID NO: 275626 - DNA, 75 bp, synthetic construct
  source 1..75: mol_type = other DNA
tctgttattaatagtaataatacagaaccagtaattgattctgtatgggatatttatgaaaggcaaatttttcaa

SEQ ID NO: 275627 - DNA, 75 bp, synthetic construct
  source 1..75: mol_type = other DNA
tggaatgaagcgtcaaataaaacaacttgatcttatgttacgtatatatctaatttctatttttaataacagtaa

SEQ ID NO: 275628 - DNA, 75 bp, synthetic construct
  source 1..75: mol_type = other DNA
acactccgggagtgctgaactctgtaataagttttttatcagcacgtaaatgccaaaaacaaccacctaatggcg

SEQ ID NO: 275629 - DNA, 75 bp, synthetic construct
  source 1..75: mol_type = other DNA
acccaaaaaacaagttggtaatattatttgatgagtttgaaaaggttcgttcagtgattaacagtaataatatag

SEQ ID NO: 275630 - DNA, 75 bp, synthetic construct
  source 1..75: mol_type = other DNA
ccacacatagctgggataaaagaggttggatttctaggttgcctggcaatataacaaaatgtccagcagaacagg

SEQ ID NO: 275631 - DNA, 75 bp, synthetic construct
  source 1..75: mol_type = other DNA
aagttggcagcatcaccttatctgcctttggcactgatgatcagcatgatgatgtttttcagctgggcggcattg

SEQ ID NO: 275632 - DNA, 75 bp, synthetic construct
  source 1..75: mol_type = other DNA
ctgcaacgctgtttctgatacttttccagtttgctgcgtttgttggattactggcgagcagagaaaatctggtcg

SEQ ID NO: 275633 - DNA, 75 bp, synthetic construct
  source 1..75: mol_type = other DNA
cagttgctggctaaatatcagattgaagcgtggcaacttatttttgaagtcaccgaaagtaatgctctgaccaat

SEQ ID NO: 275634 - DNA, 75 bp, synthetic construct
  source 1..75: mol_type = other DNA
aaacaatttcgcttcttttgggatggtatgccgctgcaaccacaaattggcgtcagttattgttatgtacgctct

SEQ ID NO: 275635 - DNA, 75 bp, synthetic construct
  source 1..75: mol_type = other DNA
ccgcagattggcgtcagttactgctatgtgcgctcgccagtgaatcatatctacctgctgctgggagagctaaat

SEQ ID NO: 275636 - DNA, 75 bp, synthetic construct
  source 1..75: mol_type = other DNA
ggcgtaacaacgttgcacatggggatacccgcttaatttcccagcgaattttctggcagattgtttttccggcaa

SEQ ID NO: 275637 - DNA, 75 bp, synthetic construct
  source 1..75: mol_type = other DNA
cccgcagcactgggcgcggtaaaagctgatccatctgttcccgttgtggcaatatccggtgattacgattttcaa

SEQ ID NO: 275638 - DNA, 75 bp, synthetic construct
  source 1..75: mol_type = other DNA
aataaacgcgactacgccattgatcccacggccaaacctacttttggtgacgggattattttcacgtcttatcct

SEQ ID NO: 275639 - DNA, 75 bp, synthetic construct
  source 1..75: mol_type = other DNA
ataagttttattcaacctatgttttttctgataccggctttaagagtgaaaaagaccagctggcattttttcaga

SEQ ID NO: 275640 - DNA, 75 bp, synthetic construct
  source 1..75: mol_type = other DNA
ggcgtatgtgttgattaacgcggttatcatgctggtgatgacgctggttgaacgtaaagttcgcctgcctggcaa

SEQ ID NO: 275641 - DNA, 75 bp, synthetic construct
  source 1..75: mol_type = other DNA
gtttgcgaacaggtacgcgccgcgattcagtcgttgccgcgtgggcaaaagaatgccgcgctggcaatggggctg

SEQ ID NO: 275642 - DNA, 75 bp, synthetic construct
  source 1..75: mol_type = other DNA
ggagaaatcaattacccgtggttgttaaattatatagaccagattggttatcagggatggattggttgcgaatat

SEQ ID NO: 275643 - DNA, 75 bp, synthetic construct
  source 1..75: mol_type = other DNA
gctttctatagtgaccaatgctccagaaaatatgcaacgtcgtggagcaatgtatttacaacgtgaattaaaaga

SEQ ID NO: 275644 - DNA, 75 bp, synthetic construct
  source 1..75: mol_type = other DNA
atggaaagagtccccctaaagcagactgacagacatcacaaatccccgggtggggatttgtgtataagagacagt

SEQ ID NO: 275645 - DNA, 75 bp, synthetic construct
  source 1..75: mol_type = other DNA
gtggctgcagcgcaacgttacattccaggtcagccggaactcgcactgaacgatctcacgcgctcaatcaatatt

SEQ ID NO: 275646 - DNA, 75 bp, synthetic construct
  source 1..75: mol_type = other DNA
tttgcgcgccgcgctggaactggaaccgaataatagcaacacccaggcagcgctcggttacgccttgtgggatag

SEQ ID NO: 275647 - DNA, 75 bp, synthetic construct
  source 1..75: mol_type = other DNA
ctgattgcaaattaccagatagggcgatggattatcttttgcgaaacggactggtaagtgcggagggtgttttac

SEQ ID NO: 275648 - DNA, 75 bp, synthetic construct
  source 1..75: mol_type = other DNA
tgcgggcgataaaccagggcaaaatacaaaatcgcaatggctacaggataaaaatatccgaattttttatggcga

SEQ ID NO: 275649 - DNA, 75 bp, synthetic construct
  source 1..75: mol_type = other DNA
cttagagataatgcaattgtatctaccccggcctacccatgtctggatgatgcgaaagagcgaacaattggcagt

SEQ ID NO: 275650 - DNA, 75 bp, synthetic construct
  source 1..75: mol_type = other DNA
acgattatcgacggtattacagctactggtgggcgaggtggagctaagggggcagcatttaatgttctgccaacc

SEQ ID NO: 275651 - DNA, 75 bp, synthetic construct
  source 1..75: mol_type = other DNA
cacgaccgtacaacccggatatgcgtcagcagggcagggcgggaattcaggtagccgtgtggtagcaaaattcac

SEQ ID NO: 275652 - DNA, 75 bp, synthetic construct
  source 1..75: mol_type = other DNA
ttgctgttatgcatgccgttaaatgaaaaaagcacaatttttagcaccaattataccttgtcattattgctgccc

SEQ ID NO: 275653 - DNA, 75 bp, synthetic construct
  source 1..75: mol_type = other DNA
ccgaataatagcaacacccaggcagcgcttggttacgccttgtgggatagcggtgatatcgcacagtcgcgggaa

SEQ ID NO: 275654 - DNA, 75 bp, synthetic construct
  source 1..75: mol_type = other DNA
tggcacgggagcggcgtgtgcatctggatcggatatttcatctccagaagagagtagaagaactggaacgtcgtc

SEQ ID NO: 275655 - DNA, 75 bp, synthetic construct
  source 1..75: mol_type = other DNA
atgaccggcgagctttattttaaaatggcacgggagcggcgtgtgcatctggatcggatatttcatctccagaag

SEQ ID NO: 275656 - DNA, 75 bp, synthetic construct
  source 1..75: mol_type = other DNA
caaaaaataaactctggtcgccgtttggctatccggttcaccatgccaatgaagcgtcagcgcaggtcggttcca

SEQ ID NO: 275657 - DNA, 75 bp, synthetic construct
  source 1..75: mol_type = other DNA
tcagaagatgttgagctagccgaactaggattttacgaacctcattttaattttgaagattcagagcaatttaaa

SEQ ID NO: 275658 - DNA, 75 bp, synthetic construct
  source 1..75: mol_type = other DNA
agaagcttattgagaaaacagagcaagaatgctccattataaaagaagagtcccaaaaagtaaaagaaaatgcca

SEQ ID NO: 275659 - DNA, 75 bp, synthetic construct
  source 1..75: mol_type = other DNA
gaaggcattaagtgggctttcgtcagcaaagaagctcgcgatgtggccaacgataacgagatatgggagggctga

SEQ ID NO: 275660 - DNA, 75 bp, synthetic construct
  source 1..75: mol_type = other DNA
caaagacaaaagagaatgattgttatttacttttcaaaaaaaagtgtcatattgtccatataaagtcaagaggta

SEQ ID NO: 275661 - DNA, 75 bp, synthetic construct
  source 1..75: mol_type = other DNA
cgggccccagcgcgggtgcgcatcagtaagttaccaacagatgcacggtttcagcgcagaacaactgcgtaatgc

SEQ ID NO: 275662 - DNA, 75 bp, synthetic construct
  source 1..75: mol_type = other DNA
atccggcagtgtttacccgcggcgactcaaaatttctttctcataagcccgcacgttctccagccattcgctacc

SEQ ID NO: 275663 - DNA, 75 bp, synthetic construct
  source 1..75: mol_type = other DNA
cgggtaagccgacgcagaacgctttcattgagcgttttaacagggcataccgtacagaaatactcgatttttatc

SEQ ID NO: 275664 - DNA, 75 bp, synthetic construct
  source 1..75: mol_type = other DNA
cgatattgaccggatccgcgagatcaaacgctggatcgacaacggcgtgcaggtcagcaaagttaaaatgctgct

SEQ ID NO: 275665 - DNA, 75 bp, synthetic construct
  source 1..75: mol_type = other DNA
gttccacctctgatgaaaccattgaagaagcggagaaagatctgccgcgcaacctctgcccgctgattaaaagca

SEQ ID NO: 275666 - DNA, 75 bp, synthetic construct
  source 1..75: mol_type = other DNA
ctggtggtcggtgaaactacctgtgacggcaaaaagaaaatgtacgagtacatggcggagtttaaacccgtgcat

SEQ ID NO: 275667 - DNA, 75 bp, synthetic construct
  source 1..75: mol_type = other DNA
ccaacaacaactggctggtgagcaggtagcgctctctgatgaagtcaaccagtcggaacaaacaaccaacttcca

SEQ ID NO: 275668 - DNA, 75 bp, synthetic construct
  source 1..75: mol_type = other DNA
cggctggctgctgacctcagtgctgctgctgggcaccatcgctctggtatcgccacagcagttgcctgttgtgat

SEQ ID NO: 275669 - DNA, 75 bp, synthetic construct
  source 1..75: mol_type = other DNA
ctgaacctggatggaagctggacggcggtggtctgggggcatctgctgtgggtaatgccgtggatgctgtttatc

SEQ ID NO: 275670 - DNA, 75 bp, synthetic construct
  source 1..75: mol_type = other DNA
cattgattcacggttaattttgattgcgcaaacactgagctggtcgcgggccaaaatcttcttttacgtgaaatg

SEQ ID NO: 275671 - DNA, 75 bp, synthetic construct
  source 1..75: mol_type = other DNA
accgttcgctcttccccaaagcccgtcctggtcagtacctgaaacatgacgacaggctgatggctgaagggcgtt

SEQ ID NO: 275672 - DNA, 75 bp, synthetic construct
  source 1..75: mol_type = other DNA
cgataaatgaagcagcttctcttgaacaagggcagaatgccacggcttactttaacgccgacagcgtgattatcg

SEQ ID NO: 275673 - DNA, 75 bp, synthetic construct
  source 1..75: mol_type = other DNA
accgctcactcttcccgaaggcccgtccggggcagtacctgaagcatgacgagcgcctcatggctgaggggcgct

SEQ ID NO: 275674 - DNA, 75 bp, synthetic construct
  source 1..75: mol_type = other DNA
caatgccgctcaacggatgaaagcaatcgcgcttgagactatcgctcaagagaaacgccctggcggatcactcaa

SEQ ID NO: 275675 - DNA, 75 bp, synthetic construct
  source 1..75: mol_type = other DNA
cttaatcacgtatatgaccatgcttcgtagcgaaacttcaaaggtcgttgacgagattaggaaaataccagaagc

SEQ ID NO: 275676 - DNA, 75 bp, synthetic construct
  source 1..75: mol_type = other DNA
tatgccgcaagagatcccgatggcagccggtgcggttgtggtttcgctatgttccacctctgatgaaaccattga

SEQ ID NO: 275677 - DNA, 75 bp, synthetic construct
  source 1..75: mol_type = other DNA
agtccaagctcgatgccacggcagacaaactacaggatgtagctgccggcttcgaacttgtgtctgatgtttcgc

SEQ ID NO: 275678 - DNA, 75 bp, synthetic construct
  source 1..75: mol_type = other DNA
ctgactcaggcagagttcgagagagataacgctgccaaaactggtaagggcgtaatgtcaaaccaggggactgtt

SEQ ID NO: 275679 - DNA, 75 bp, synthetic construct
  source 1..75: mol_type = other DNA
ttcactttcagatgacgaaaagaacaagctattggcaccgttacgtgaaacggtaaacaaaagctatctggagcc

SEQ ID NO: 275680 - DNA, 75 bp, synthetic construct
  source 1..75: mol_type = other DNA
tgcggagagtgaggcatggcttgcgcagtgcgggctgacggtggagcagatggaaagccagatggaggcggaata

SEQ ID NO: 275681 - DNA, 75 bp, synthetic construct
  source 1..75: mol_type = other DNA
aaacctaccgacagcttcattcccttcgcagggatttaccggggcgtattatcagttgaataatgacaactttgc

SEQ ID NO: 275682 - DNA, 75 bp, synthetic construct
  source 1..75: mol_type = other DNA
cgtcgccgtggagagcggcgaggaagcgatcaaccaccgcacgctcagcatggccgattacaccggcccaagcga

SEQ ID NO: 275683 - DNA, 75 bp, synthetic construct
  source 1..75: mol_type = other DNA
tggcccgaccaacaacggcaagtcgatgatcatcgagaaattccggcgcacgcatccggccagctccgacgcgga

SEQ ID NO: 275684 - DNA, 75 bp, synthetic construct
  source 1..75: mol_type = other DNA
aacaaccgtcgccgtggtgggtacatttatgggtctgctatcgcaacccctttaatattttgcttaccattctcg

SEQ ID NO: 275685 - DNA, 75 bp, synthetic construct
  source 1..75: mol_type = other DNA
tagtttccctggcaacaggtgatcaaagcgtatttgaaaagcttgggtttgcttatgcgacatgttataaaaacc

SEQ ID NO: 275686 - DNA, 75 bp, synthetic construct
  source 1..75: mol_type = other DNA
tacgaaatccgtgtgaagagttggtgggtgaacgccggcgaggctttcatgatatacagccttgctgaaaatttt

SEQ ID NO: 275687 - DNA, 75 bp, synthetic construct
  source 1..75: mol_type = other DNA
agctttattttgacaaaattaaagccattgacccgctctctcgtcagttcctggtcgttaaaaacccacagagga

SEQ ID NO: 275688 - DNA, 75 bp, synthetic construct
  source 1..75: mol_type = other DNA
ctgaaaaaactgaccacggtttttttcgataaagaccgggcaggtgaagtcggtatacgggcaatggggggatct

SEQ ID NO: 275689 - DNA, 75 bp, synthetic construct
  source 1..75: mol_type = other DNA
taacctgaactatcacatgactaccgagcatcaaaattacttcggtaaaaaccccacgctggggcataccgaaat

SEQ ID NO: 275690 - DNA, 75 bp, synthetic construct
  source 1..75: mol_type = other DNA
tgtcacacctgctgccagctgcacaggggctggctcggctgccggcggacgagcgcatccagcgccttcgcgccg

SEQ ID NO: 275691 - DNA, 75 bp, synthetic construct
  source 1..75: mol_type = other DNA
gcgatcaaccatcgcacactcagcatggcctgtcgacaacctctcgcgcaaccaagacatcgcggtcggactgca

SEQ ID NO: 275692 - DNA, 75 bp, synthetic construct
  source 1..75: mol_type = other DNA
ccggcaacagcgtcaaccgccgggaattcctcaacctgctgcgcttcctcggcaacgaactgcgcatcccgttgg

SEQ ID NO: 275693 - DNA, 75 bp, synthetic construct
  source 1..75: mol_type = other DNA
aggtaccgcaatgggcgttgccggttaccagattgtggaaatcttcctgcgccacatgcgccggaagctggacga

SEQ ID NO: 275694 - DNA, 75 bp, synthetic construct
  source 1..75: mol_type = other DNA
acctcaacaggcaggtatatctgaacttgttttacgtgcaggtaatggtaatccgaaggggattactggtgcttt

SEQ ID NO: 275695 - DNA, 75 bp, synthetic construct
  source 1..75: mol_type = other DNA
atgactttaaggaataaggatgcgggtattcaaaacaaaacttacattatgaataacatacaaataagaaactat

SEQ ID NO: 275696 - DNA, 75 bp, synthetic construct
  source 1..75: mol_type = other DNA
agctcggccggagcacactcgcacgttgatggtcgcaggtttaatacaagcacttttaaagacacctaccagtat

SEQ ID NO: 275697 - DNA, 75 bp, synthetic construct
  source 1..75: mol_type = other DNA
gcgctttgtctccggcggcattcaaagtaataaaaccataaatattacagggcgtgttaacccctcggattacgg

SEQ ID NO: 275698 - DNA, 75 bp, synthetic construct
  source 1..75: mol_type = other DNA
gagctggctgcggcgttgggcaacgacccgaattttgcgaccaccatgactaacgcgcttgcgggtaagcaaccg

SEQ ID NO: 275699 - DNA, 75 bp, synthetic construct
  source 1..75: mol_type = other DNA
caagctcaggtcaaaatacctggggtgtacaaggctcagtaggtatatctacggggtggttagcgaataccagta

SEQ ID NO: 275700 - DNA, 75 bp, synthetic construct
  source 1..75: mol_type = other DNA
tgcggccagtgtgaatacaagtgctgcaggagcgcacactcatagtgtcagcggcacagccgcatctgcaggtgc

SEQ ID NO: 275701 - DNA, 75 bp, synthetic construct
  source 1..75: mol_type = other DNA
tgattactctcgggatccttggcgcgcttgccgcagccgggaaagtcctcgccagtgcggaacccgtgacactac

SEQ ID NO: 275702 - DNA, 75 bp, synthetic construct
  source 1..75: mol_type = other DNA
tctaaatgctcttgattcacaaattatcaatcagattattgatgcaatcatgaaactatatgcgacagaagatcc

SEQ ID NO: 275703 - DNA, 75 bp, synthetic construct
  source 1..75: mol_type = other DNA
gcctcagcaaaggccgctgaggcatcaaaaagtgctgccgctgcagagtcctcaaaaagcgcggcgaccaccagt

SEQ ID NO: 275704 - DNA, 75 bp, synthetic construct
  source 1..75: mol_type = other DNA
gcagcaacgcgcgctgagacagcggcaaaacgggcagaggatattgcatccgccgtggcgcttgaggatgcgagc

SEQ ID NO: 275705 - DNA, 75 bp, synthetic construct
  source 1..75: mol_type = other DNA
gcgcggcagctaccagtgccagtgccgcgaaaacgtcagaaacgaatgcggcagcgtcacaacaatcagcagcca

SEQ ID NO: 275706 - DNA, 75 bp, synthetic construct
  source 1..75: mol_type = other DNA
ttgatcctcttaggtggcaacgatgtttccgacgtgaaacgcggtattgaagtcgccctgaaagaactcgatcgg

SEQ ID NO: 275707 - DNA, 75 bp, synthetic construct
  source 1..75: mol_type = other DNA
ctggatattgaaccgcaggaaattgacagcaaccgccccattgctgtgccagtcgttggcgatattgcatctagt

SEQ ID NO: 275708 - DNA, 75 bp, synthetic construct
  source 1..75: mol_type = other DNA
gtaagcgccgtcagtgttgaaccaactacgaaagaagtaaccgtaggcgacaacttcacggtaagcgaatcctga

SEQ ID NO: 275709 - DNA, 75 bp, synthetic construct
  source 1..75: mol_type = other DNA
gcacattatggctgccgatgaagctgttaaagcgaccaatactgaagtggtgagcattgagctaccccgtgatac

SEQ ID NO: 275710 - DNA, 75 bp, synthetic construct
  source 1..75: mol_type = other DNA
tagcaaaaccatatccacctttcattgtctaaaggaatcgggtgtgcaatttgctttagatgattttggtacggg

SEQ ID NO: 275711 - DNA, 75 bp, synthetic construct
  source 1..75: mol_type = other DNA
gaatgcctgggtgcagggaggggaatttggctgggtgtttgataacccggacgatacgtttgatgtggacaacct

SEQ ID NO: 275712 - DNA, 75 bp, synthetic construct
  source 1..75: mol_type = other DNA
ttatatgaagaaaataatatagtttattcagaacagcttacgctgttccagaaactgctatccgggcgctggcag

SEQ ID NO: 275713 - DNA, 75 bp, synthetic construct
  source 1..75: mol_type = other DNA
tgcttgggcatacgaaatatctgccgatattcgtttgggtaaagttagtgacgttttaatggaattactgcgtta

SEQ ID NO: 275714 - DNA, 75 bp, synthetic construct
  source 1..75: mol_type = other DNA
gtgaaaggcagtttcagcaaagtgctggcagaaccgcgactgctgaaactcaacttcggcattatgtgtctgcac

SEQ ID NO: 275715 - DNA, 75 bp, synthetic construct
  source 1..75: mol_type = other DNA
ggctggcggtgtttgccgccggtagcgttatcgctgcgctctctgactccatctggggaattattctgggccggg

SEQ ID NO: 275716 - DNA, 75 bp, synthetic construct
  source 1..75: mol_type = other DNA
tcacatctctttactccggcaagaataagaaaacttataaagagactggaatcttatggtttgaatttctccgtt

SEQ ID NO: 275717 - DNA, 75 bp, synthetic construct
  source 1..75: mol_type = other DNA
gtatgccctcattcttcctggctggtatgccatcaggcgtgtaacacagtttgatgaacgcttttttgaccttct

SEQ ID NO: 275718 - DNA, 75 bp, synthetic construct
  source 1..75: mol_type = other DNA
caattgcagggcagcgtagaactggctcaccagcggattacgccgctcggcactctgcgctctacctggctaagt

SEQ ID NO: 275719 - DNA, 75 bp, synthetic construct
  source 1..75: mol_type = other DNA
tgctgggcggatttgatcccattgctcagggatgcgggggcggcgtttgtgctgtcagcgcattacatgctgctc

SEQ ID NO: 275720 - DNA, 75 bp, synthetic construct
  source 1..75: mol_type = other DNA
gcgccgcaaccgtggcagcagttcggtgtaaccactgatgagacgctacgcccgtcgcaggcagggcaaaccatt

SEQ ID NO: 275721 - DNA, 75 bp, synthetic construct
  source 1..75: mol_type = other DNA
ctccccagctcaaggcaccagctacagcaatgaagtcattctgattatctcgggtgactccggcgcagtccgcca

SEQ ID NO: 275722 - DNA, 75 bp, synthetic construct
  source 1..75: mol_type = other DNA
ctgccagatgggcagccggtgacagatattcacgacggactggaaacattgggtcgcctggccccctcccatccc

SEQ ID NO: 275723 - DNA, 75 bp, synthetic construct
  source 1..75: mol_type = other DNA
gcagcggccttgccggattactctgcggcctgcaactacaaaaacacggtctgcgttgtgcgattgtcactcgcg

SEQ ID NO: 275724 - DNA, 75 bp, synthetic construct
  source 1..75: mol_type = other DNA
ctaatggtcgctatttctacgttgctgaactttattcaggaagctcgttccaccaaagcggcagatgccctgaaa

SEQ ID NO: 275725 - DNA, 75 bp, synthetic construct
  source 1..75: mol_type = other DNA
tcgataaagaccgggcaggtgaagtcggtatacgggcaatggggggatcttattaccgggtgaaggagggagagc

SEQ ID NO: 275726 - DNA, 75 bp, synthetic construct
  source 1..75: mol_type = other DNA
tttgttcgctaaacagtgagccgcttgacgactaccagaaccgcctgatttctgatgccgttgagcgccttatgc

SEQ ID NO: 275727 - DNA, 75 bp, synthetic construct
  source 1..75: mol_type = other DNA
tgagtggtatcgaagtgactttttcgctccgcaaccgtggcaacaattcggcgtgaccactgacgaggcgctacg

SEQ ID NO: 275728 - DNA, 75 bp, synthetic construct
  source 1..75: mol_type = other DNA
ccgctacgtccacgctttgccgtgcttgccagtggcagcttctttagcggggggctggtggcagaacgcgacggt

SEQ ID NO: 275729 - DNA, 75 bp, synthetic construct
  source 1..75: mol_type = other DNA
tatactcaccgcgtgagggtaagaaaagaagttaaggttggttttaatagcaagattcctttcgttaatcgcgta

SEQ ID NO: 275730 - DNA, 75 bp, synthetic construct
  source 1..75: mol_type = other DNA
atttggggcgtgatcgttaatgcctggtttattccagaaattgccagccagttcttcaccatggggctggtgatt

SEQ ID NO: 275731 - DNA, 75 bp, synthetic construct
  source 1..75: mol_type = other DNA
tggacttccgtaactggctgaaggtgggtgcgaccctgcttggactgctatttattatgtccagcgtcgtggtga

SEQ ID NO: 275732 - DNA, 75 bp, synthetic construct
  source 1..75: mol_type = other DNA
atctggtcggtgttaaccgtcaggttaccgtgctggcgttccagtttggtgatggcttcagtcacatcatttacc

SEQ ID NO: 275733 - DNA, 75 bp, synthetic construct
  source 1..75: mol_type = other DNA
tcgtatgctctggtttcccataccgcaaagggtacttcaggaaagtatcaatcgcagtcagacaccatcacgggg

SEQ ID NO: 275734 - DNA, 75 bp, synthetic construct
  source 1..75: mol_type = other DNA
gtgaaccggagtatcaccgcatacaactgttttcgacgggagatgaacgtccgggcctgatgaatttcccgtttg

SEQ ID NO: 275735 - DNA, 75 bp, synthetic construct
  source 1..75: mol_type = other DNA
actctgattggcctcatctttaccatggtgtacgcctcacgggtgaaaaagaatcctttgttgtcacgcgtgcat

SEQ ID NO: 275736 - DNA, 75 bp, synthetic construct
  source 1..75: mol_type = other DNA
gtttctccggccctaagacatcaatcatctgttctccaatgactagtctaaaaaccagtattaagactatcactt

SEQ ID NO: 275737 - DNA, 75 bp, synthetic construct
  source 1..75: mol_type = other DNA
tattccttccggcgaagcgaaacagactctggcggctaatccgggagcaggaaccgcttctttcacattacgtgg

SEQ ID NO: 275738 - DNA, 75 bp, synthetic construct
  source 1..75: mol_type = other DNA
agaaaatgaagatatcgaaggcgcggttgcagtcaattactcagaatatgatggtacaggtgatgcttattacac

SEQ ID NO: 275739 - DNA, 75 bp, synthetic construct
  source 1..75: mol_type = other DNA
gactcggtgaaaaaagtggtgtggctggcaatccagtctgcgtcccggaaatggacgatgccgttgaaggactgg

SEQ ID NO: 275740 - DNA, 75 bp, synthetic construct
  source 1..75: mol_type = other DNA
agtcactaaacagtgtgatccgccatgcgatcaaaaagcgtaaagtgttcccgacagacgactcggtgaaaaaag

SEQ ID NO: 275741 - DNA, 75 bp, synthetic construct
  source 1..75: mol_type = other DNA
aatggacgatgccacttcaggactggcggatagccatgagtcgctttattatcgaattcggtgaccgccttgacg

SEQ ID NO: 275742 - DNA, 75 bp, synthetic construct
  source 1..75: mol_type = other DNA
ttcaaatttctggccggaccagaaaccgtgctggcactactggatgaacgggaaagaaaccagcaatacataaaa

SEQ ID NO: 275743 - DNA, 75 bp, synthetic construct
  source 1..75: mol_type = other DNA
aagtgaacgaaatgttgcaatctggtctggtcgaatttcatgttcatacgtatactcatacacgttgggataaaa

SEQ ID NO: 275744 - DNA, 75 bp, synthetic construct
  source 1..75: mol_type = other DNA
aagtgaacgaaatgttgcaatctggcctggtcgaatttcatgttcatacacatactcatacacgttgggataaaa

SEQ ID NO: 275745 - DNA, 75 bp, synthetic construct
  source 1..75: mol_type = other DNA
gatagtttcagttgctgactactggtcacatatgaatgccacctgtccggcgaagatcaataaaaaagaggccga

SEQ ID NO: 275746 - DNA, 75 bp, synthetic construct
  source 1..75: mol_type = other DNA
ttatcgacgagtcggtaattgatggtcaaagcaaaccgttgctgatttatggcaagccggaagcgcaacaggcat

SEQ ID NO: 275747 - DNA, 75 bp, synthetic construct
  source 1..75: mol_type = other DNA
atgtgttgcgtcatatcaatcatccgttcgcattaacactgcttatacgtgtagccgggcatactaaacgctgtc

SEQ ID NO: 275748 - DNA, 75 bp, synthetic construct
  source 1..75: mol_type = other DNA
tgccgcaagtgactactgcgccgatgtgttgcgtcatatcaatcatccgttcgcattgacactgcttatacgtgt

SEQ ID NO: 275749 - DNA, 75 bp, synthetic construct
  source 1..75: mol_type = other DNA
cgatagaaaacgaacaggaaaggctttttgatgaagattacctaatggattcgaaagaatgcattgacgtaattc

SEQ ID NO: 275750 - DNA, 75 bp, synthetic construct
  source 1..75: mol_type = other DNA
gtgagcaacattaactatcaggtactgcgtgaggcggcagagaaagcaactaaaggaagctacatcgtagggcat

SEQ ID NO: 275751 - DNA, 75 bp, synthetic construct
  source 1..75: mol_type = other DNA
aagagcgtcatgataacatttgatgacggttatcttgataactggctccaggcttggccgatactgaaagaatat

SEQ ID NO: 275752 - DNA, 75 bp, synthetic construct
  source 1..75: mol_type = other DNA
caaacaaggccaaaagtaatcgggtaaaacatggcatccgctttgaagatgcggtgttagtgtttgatgattcac

SEQ ID NO: 275753 - DNA, 75 bp, synthetic construct
  source 1..75: mol_type = other DNA
gtgagcgaaattgactatcaggcactgcgtgctaaggcagaaaaagcaacgtgtggcgagtggtcgctcgaatat

SEQ ID NO: 275754 - DNA, 75 bp, synthetic construct
  source 1..75: mol_type = other DNA
ggatagtacagctcagcagtgcgaccaacagcacttccgagtcacaggcggcaacgccaaaagccgttaaggccg

SEQ ID NO: 275755 - DNA, 75 bp, synthetic construct
  source 1..75: mol_type = other DNA
ggaaccaaatccacgaataacaccggggcgcatacccatagtattagcgggactgcaaatagtgccggtgcgcac

SEQ ID NO: 275756 - DNA, 75 bp, synthetic construct
  source 1..75: mol_type = other DNA
acgagcgcagcctcgagcgccagtagtgcagcctcctcggcaacagcggcaggaaattccgcgaaggcggcaaaa

SEQ ID NO: 275757 - DNA, 75 bp, synthetic construct
  source 1..75: mol_type = other DNA
gtagttaaacaacagcgcgtggaatgtcggggagagtggtttactaatttttatatgcgatataaacagcaacat

SEQ ID NO: 275758 - DNA, 75 bp, synthetic construct
  source 1..75: mol_type = other DNA
acaagctgcaacgccgaaagcagtaaaggccgcgtatgaccttgctaacgggaaatatactgcgcaggatgccag

SEQ ID NO: 275759 - DNA, 75 bp, synthetic construct
  source 1..75: mol_type = other DNA
tcaaatctaagcgcggggattatgagcacaacaagcggtagtggccagactcgtaatgcagggaagacatcatca

SEQ ID NO: 275760 - DNA, 75 bp, synthetic construct
  source 1..75: mol_type = other DNA
atgacagcccgccggttcaggcgggcttttttgtgggggaatatggcagtaaagatttcaggtgtactgaaagac

SEQ ID NO: 275761 - DNA, 75 bp, synthetic construct
  source 1..75: mol_type = other DNA
ctccgcaggcgcagactcaaaaacagcggctgcatcatctgccagcgccgcgtcaacaagtgccgggcaggcctc

SEQ ID NO: 275762 - DNA, 75 bp, synthetic construct
  source 1..75: mol_type = other DNA
caccgcaacaaattgccgcctgggcgcagattgatgaatctcgctggagggagaagctcgtgcaatcacaagtgc

SEQ ID NO: 275763 - DNA, 75 bp, synthetic construct
  source 1..75: mol_type = other DNA
ctggacgattaagggcaaacctaccagtggtcgggccgtattgtctcaggaacaggacggcattaaatcgcatac

SEQ ID NO: 275764 - DNA, 75 bp, synthetic construct
  source 1..75: mol_type = other DNA
atgaagttgaattttaagggattttttaaggctgccagtttgtgttctttggcatttgcgttgaccggatgtatc

SEQ ID NO: 275765 - DNA, 75 bp, synthetic construct
  source 1..75: mol_type = other DNA
cacaccatcaccgttaatgctacggggaacgcagaaaacaccgtaaaaaacatcgcatttaactatattgtgagg

SEQ ID NO: 275766 - DNA, 75 bp, synthetic construct
  source 1..75: mol_type = other DNA
ccagtggtcgggccgtattgtctcaggaacaggacggcattaaatcgcatacccacagcgccagcgcatccagta

SEQ ID NO: 275767 - DNA, 75 bp, synthetic construct
  source 1..75: mol_type = other DNA
cggcaacgcgcgccgagacagcagctaaacgggcagaggatattgcatccgccgtggcgcttgaggatgcgagca

SEQ ID NO: 275768 - DNA, 75 bp, synthetic construct
  source 1..75: mol_type = other DNA
tatttacgttgcaatcggaaattatgcgactggtgtaaatattcaatgggattataccagtaatgccagcgtaac

SEQ ID NO: 275769 - DNA, 75 bp, synthetic construct
  source 1..75: mol_type = other DNA
ggcgtctgcttcaaaagatgaggcgaccagacaagcgtccgcagcgaagggcagcgccacgacagcatccacgaa

SEQ ID NO: 275770 - DNA, 75 bp, synthetic construct
  source 1..75: mol_type = other DNA
taatggtattcgttggccaggaggcggcggttctgcgttagcattttatgatggcggtgggttcacttatgtcca

SEQ ID NO: 275771 - DNA, 75 bp, synthetic construct
  source 1..75: mol_type = other DNA
acagcacatctgaaatgctggcggcaacgccaaagtcggtaaaggcagcctatgaccttgctaacgggaaatata

SEQ ID NO: 275772 - DNA, 75 bp, synthetic construct
  source 1..75: mol_type = other DNA
gaatgccaatacaagtgcagcgctgaaatacccagagaattttgcgggtacactggttgtgcttaaaaatgccgg

SEQ ID NO: 275773 - DNA, 75 bp, synthetic construct
  source 1..75: mol_type = other DNA
ggatcattcacacaatattcctgttggcaacactggcgctggtaatggtgtttcggctggttataactcagggct

SEQ ID NO: 275774 - DNA, 75 bp, synthetic construct
  source 1..75: mol_type = other DNA
cagtctaccccctgcttgcagtcgcttatccgtctggtgtgatccctgatatgcgtggctggacgattaagggca

SEQ ID NO: 275775 - DNA, 75 bp, synthetic construct
  source 1..75: mol_type = other DNA
agtgattctgaaacgcttgccgcgactccgaaagcggtgaaagccgctaatgacaatgcaaacgggcgtgtgccc

SEQ ID NO: 275776 - DNA, 75 bp, synthetic construct
  source 1..75: mol_type = other DNA
actggctgcaacgccgaaagcggtcaagacagcctatgaccttgctaacgggaaatataccgctcaggacgccac

SEQ ID NO: 275777 - DNA, 75 bp, synthetic construct
  source 1..75: mol_type = other DNA
cactgttaacgctactggtaacacggaaaacaccgttaaaaacatcgcatttaattatattgtgaggcttgcata

SEQ ID NO: 275778 - DNA, 75 bp, synthetic construct
  source 1..75: mol_type = other DNA
tattcgtcgtcggtgcgtgacaagggggtgcgctgcaagcaaatgccgctgccgcgcgataaatgggatttgata

SEQ ID NO: 275779 - DNA, 75 bp, synthetic construct
  source 1..75: mol_type = other DNA
atcgcggtgtacgcggaaagataatgccgttacctgcggataagtgggatctattgccgctccaggccagccttc

SEQ ID NO: 275780 - DNA, 75 bp, synthetic construct
  source 1..75: mol_type = other DNA
accgtggccgggctgaacgctttttcagccttgcccggctctccgactggttgacgcgacaggtcacgcgcggcc

SEQ ID NO: 275781 - DNA, 75 bp, synthetic construct
  source 1..75: mol_type = other DNA
ttgcccaggccccctgtcttcgtccatttattaagctggagttgatggaaaccactcttctggaacatccggaaa

SEQ ID NO: 275782 - DNA, 75 bp, synthetic construct
  source 1..75: mol_type = other DNA
catttacgacaattattgcattgtcagggaaaaaggtgtgaatgttccagtactgaaaaattttgttcagatatg

SEQ ID NO: 275783 - DNA, 75 bp, synthetic construct
  source 1..75: mol_type = other DNA
gtaacagcattcccctgtgccaccattttatccactcaggctgaaaagctcatatccatgatgcgaagaacagcc

SEQ ID NO: 275784 - DNA, 75 bp, synthetic construct
  source 1..75: mol_type = other DNA
aacccgtagcgggatgttcttcctgaggacagttttatccggcaagtcacgggacatgctgcgtgcatacagagc

SEQ ID NO: 275785 - DNA, 75 bp, synthetic construct
  source 1..75: mol_type = other DNA
gcgaacaggcaaaactgattatcaccagttcccgcctgacattgcgaaaacataatcgtgtcgttgatgcggtac

SEQ ID NO: 275786 - DNA, 75 bp, synthetic construct
  source 1..75: mol_type = other DNA
tatgacgatatatcccggccccattcgatttgccttacaacagtatattgaatggaatttaattcaaaaatacgg

SEQ ID NO: 275787 - DNA, 75 bp, synthetic construct
  source 1..75: mol_type = other DNA
tggttaactatcaaagaagacattctctggcaagaaaaataattgactcaattcctgagttaagtcacctaagtc

SEQ ID NO: 275788 - DNA, 75 bp, synthetic construct
  source 1..75: mol_type = other DNA
gagctaagaattatatgaatatattcatagatgatcgaagaaaagttagtcctttctttattagagaacctgact

SEQ ID NO: 275789 - DNA, 75 bp, synthetic construct
  source 1..75: mol_type = other DNA
agctatatcaagattaaaagatggattttctttactttcagaatataaacaaaagaaaataatcaagagcataga

SEQ ID NO: 275790 - DNA, 75 bp, synthetic construct
  source 1..75: mol_type = other DNA
accttgtcgaaattaacgcgacgccgcacgaagtcgctgtattttttgaaaagctcaaaggcaaaaaatacgatc

SEQ ID NO: 275791 - DNA, 75 bp, synthetic construct
  source 1..75: mol_type = other DNA
ttcaattcctattagtaccggaaccttcaatcaatttacccgccgataccttcggtactattttcgattacttcc

SEQ ID NO: 275792 - DNA, 75 bp, synthetic construct
  source 1..75: mol_type = other DNA
tctgataatacttcatcgtttctcgacaaagcgcgtggcctttttacgcgtaaaaaaacggattcacaggcgcat

SEQ ID NO: 275793 - DNA, 75 bp, synthetic construct
  source 1..75: mol_type = other DNA
cggttgctgccactgttcacaacaccggcacagcagaaacagcctcaccttctgaacctgcagaaattcagccag

SEQ ID NO: 275794 - DNA, 75 bp, synthetic construct
  source 1..75: mol_type = other DNA
atgccaatccgtgatcgaatagagcggaatacgcaattggcccggctcttgaactcagagaatctgcagtcagtt

SEQ ID NO: 275795 - DNA, 75 bp, synthetic construct
  source 1..75: mol_type = other DNA
ctccgcgcacgccagaatgtcctgtatgagctcggatatttcgccgggaagcttggacgcgggaaagtacttgta

SEQ ID NO: 275796 - DNA, 75 bp, synthetic construct
  source 1..75: mol_type = other DNA
tgttgcccgttttatctctcgtgtagggcttgaggagatcatactttctgaacgccctgacggctcaaggacggt

SEQ ID NO: 275797 - DNA, 75 bp, synthetic construct
  source 1..75: mol_type = other DNA
catcgctgaccaggactctccggaggcccccacggacaacacacagacgtctgacgttgtacctgacacctccgg

SEQ ID NO: 275798 - DNA, 75 bp, synthetic construct
  source 1..75: mol_type = other DNA
cagcttaattatatgcatgtgttactataataacaaactcttaaaaagagtttcgggagttgatttatttgcatt

SEQ ID NO: 275799 - DNA, 75 bp, synthetic construct
  source 1..75: mol_type = other DNA
aacttgttcagggtgggagctatacctgggatatcggggtttttcgtctcgatttcagggtgatgctgccaactt

SEQ ID NO: 275800 - DNA, 75 bp, synthetic construct
  source 1..75: mol_type = other DNA
agacgtcctccccggataaaccactggagaacagtgcgtctgccactgacgccccggaagcccccaatacagacg

SEQ ID NO: 275801 - DNA, 75 bp, synthetic construct
  source 1..75: mol_type = other DNA
gttctggaaaacgccgggctggttattcagggattgccacagatggacggagccatacacagagtagccacccgg

SEQ ID NO: 275802 - DNA, 75 bp, synthetic construct
  source 1..75: mol_type = other DNA
ggagcagatgcgggcagagcgggagaatcctgacaccatcatgacgcacatgcccacaccggaactgaacagaac

SEQ ID NO: 275803 - DNA, 75 bp, synthetic construct
  source 1..75: mol_type = other DNA
gaacacggaacaactgaacacgccgtggtatataacgggatgtatgggtttatgacgatatatcccggccccatt

SEQ ID NO: 275804 - DNA, 75 bp, synthetic construct
  source 1..75: mol_type = other DNA
ggaaccccaccacggggtaatgctttttactggcctgctcccttatcgggaagcggggcgcatcatatcaaatga

SEQ ID NO: 275805 - DNA, 75 bp, synthetic construct
  source 1..75: mol_type = other DNA
gttgaatctggagctctgcacgacggcagtcagtagccctcagagtaatggaatgagagaacggttcgtgaaaac

SEQ ID NO: 275806 - DNA, 75 bp, synthetic construct
  source 1..75: mol_type = other DNA
atgcccctggcaaaaatacttacaaaacaagtttctttattaactgttttttcagcgttagcttatgtgatggca

SEQ ID NO: 275807 - DNA, 75 bp, synthetic construct
  source 1..75: mol_type = other DNA
ccgaatgttggtgtcgcatatgacaatccactccgtgccgccatgattgtctttctcatgatgcaggacgccaat

SEQ ID NO: 275808 - DNA, 75 bp, synthetic construct
  source 1..75: mol_type = other DNA
cattgtaaacggagacgcagttgaagtagaggttgagcgcggatcctttaacccatgcgcaaacccagcagacgc

SEQ ID NO: 275809 - DNA, 75 bp, synthetic construct
  source 1..75: mol_type = other DNA
gttatgacatgttcttcacccttgaatcaggtttggcaaatgcgtcgcaattggattccattccgcgggtattaa

SEQ ID NO: 275810 - DNA, 75 bp, synthetic construct
  source 1..75: mol_type = other DNA
gataaagtgctggtcaccctgggcggtcgttacgactgggcagatcaagaatctcttaaccgcgtagcgggaacg

SEQ ID NO: 275811 - DNA, 75 bp, synthetic construct
  source 1..75: mol_type = other DNA
agttgtagtagccacagcggttagcgccatgtctgtttatgcacaggcagcggttgaaccgaaagaagacactat

SEQ ID NO: 275812 - DNA, 75 bp, synthetic construct
  source 1..75: mol_type = other DNA
tagctgcagcagaagcagaatatttcatgcgcaaaattgatgaaagtccatcagcaacaaaacgtcggggtatca

SEQ ID NO: 275813 - DNA, 75 bp, synthetic construct
  source 1..75: mol_type = other DNA
tattcttttcagaaaggtgttgcatcgtattatggctatccagacctttttattaaaatagacttaaatacgcta

SEQ ID NO: 275814 - DNA, 75 bp, synthetic construct
  source 1..75: mol_type = other DNA
cgtaatgtaaagacaggcaatgaaagaactgaggtatggaatgcccgtatcacttatcgctatgttccaaccgaa

SEQ ID NO: 275815 - DNA, 75 bp, synthetic construct
  source 1..75: mol_type = other DNA
gtgcctaaagaagatgaagttttgattaaagtagaatatgtcggtatttgtggttcagatgtacatggttttgaa

SEQ ID NO: 275816 - DNA, 75 bp, synthetic construct
  source 1..75: mol_type = other DNA
tgtcaaaagttcggaattcagcatcagtctaatccactacgcgccgccatgattgtctttctcatgatgcaggac

SEQ ID NO: 275817 - DNA, 75 bp, synthetic construct
  source 1..75: mol_type = other DNA
tcattctggtcttcgtcttccatcttcagccgggtaaaccaccggttgatgtcatgctggtcatcattgcggtgg

SEQ ID NO: 275818 - DNA, 75 bp, synthetic construct
  source 1..75: mol_type = other DNA
gcaattcagtttgaccgttccggcaccacccacatcggtcgcttcgtgatcaaccatagcttcattctgccaggg

SEQ ID NO: 275819 - DNA, 75 bp, synthetic construct
  source 1..75: mol_type = other DNA
gccgtggtatcgctggtcgcgatgctgggtaacgtcacctttgatgggcgtcatcttgaattcctcgacctgctt

SEQ ID NO: 275820 - DNA, 75 bp, synthetic construct
  source 1..75: mol_type = other DNA
agaaggccttaagctccttctggatgaaatcattaacgaaatgaatactcatagcatgcaatcagaaacctctat

SEQ ID NO: 275821 - DNA, 75 bp, synthetic construct
  source 1..75: mol_type = other DNA
cgcgccgtaatatataacgggaagcatggcgttatgactatataccctggccccattcggtttgccttacagcag

SEQ ID NO: 275822 - DNA, 75 bp, synthetic construct
  source 1..75: mol_type = other DNA
aagacaagaacggcactgttgatatccctaacgataatggaactacagctcgcgcagttatttataaagggaaat

SEQ ID NO: 275823 - DNA, 75 bp, synthetic construct
  source 1..75: mol_type = other DNA
atggaaatacgtgagggccataataaattttacatcaatgatgcgcagggaaatcaaatagctgaaattgtcttt

SEQ ID NO: 275824 - DNA, 75 bp, synthetic construct
  source 1..75: mol_type = other DNA
aaccacccattgaaagaactggaagtaagagactttgcattaatactggatgaatggctggataaagacatggtc

SEQ ID NO: 275825 - DNA, 75 bp, synthetic construct
  source 1..75: mol_type = other DNA
atgcgcaaaattgatgaaagtccatcagcaacaaaacgtcggggtatcagattaaaggcatgggttgatcgatat

SEQ ID NO: 275826 - DNA, 75 bp, synthetic construct
  source 1..75: mol_type = other DNA
caaccacagctttattttgccagggttgattggtgtgagcgtatcgtgcgtcttcggctggatcttcgctgcgat

SEQ ID NO: 275827 - DNA, 75 bp, synthetic construct
  source 1..75: mol_type = other DNA
ggttgcgctggcgatcggcgttgatccggcatacatcgtggcttcagcaccggcttgctacggttattacatcct

SEQ ID NO: 275828 - DNA, 75 bp, synthetic construct
  source 1..75: mol_type = other DNA
gcaactggctggcaatgtggatcttcctcggggcaatcgcggtggtcgcacttcttggtgctgattctgacctgc

SEQ ID NO: 275829 - DNA, 75 bp, synthetic construct
  source 1..75: mol_type = other DNA
acgccgacaacgtacatcagtgatttactggttgtggtcatgaaaaaatccacggcagggatcagtatcagctga

SEQ ID NO: 275830 - DNA, 75 bp, synthetic construct
  source 1..75: mol_type = other DNA
cctggagtatcagtctgtggccattcgctataacaatacagccatccatgatggcagttataaccacgggagcag

SEQ ID NO: 275831 - DNA, 75 bp, synthetic construct
  source 1..75: mol_type = other DNA
catggcgatgcagaagcctgggcggtctatcgcgtcatccttcagcagcccattactaacgatcaggcggcgctg

SEQ ID NO: 275832 - DNA, 75 bp, synthetic construct
  source 1..75: mol_type = other DNA
gtgaaggggccgtggcacgcagtggcaggcgtggcagcacagacacagatatcagttcaggcggtgattgaccag

SEQ ID NO: 275833 - DNA, 75 bp, synthetic construct
  source 1..75: mol_type = other DNA
cgcggggatcagcatccgctgaacatcgcgccccgggattgccggaaggagacaaaaaccgtacagtatgcgcgg

SEQ ID NO: 275834 - DNA, 75 bp, synthetic construct
  source 1..75: mol_type = other DNA
catatcaccctgagttttaccgtgagctcacggcgtcagaataacagttggggcagttcacgaatcagtaacctt

SEQ ID NO: 275835 - DNA, 75 bp, synthetic construct
  source 1..75: mol_type = other DNA
cctggattatcaggctgttcctgtccggtataacgcagaggcgcattttgacggtaattataactacgggagtca

SEQ ID NO: 275836 - DNA, 75 bp, synthetic construct
  source 1..75: mol_type = other DNA
tttaccgggtaatactgcagcggcccatcaccaatgatcaggcgaaattattacgccgggtgttgtccttttttg

SEQ ID NO: 275837 - DNA, 75 bp, synthetic construct
  source 1..75: mol_type = other DNA
tcacgggtgttgtgaaaaatgtcactgtcagccagtcctgcggtacgtggtacatcagtattcagacagaaagtg

SEQ ID NO: 275838 - DNA, 75 bp, synthetic construct
  source 1..75: mol_type = other DNA
gccggaactgaccttcttctacgacaactcattggttgaagggatgcgtatgtcaaacctggtgaccagcgtggt

SEQ ID NO: 275839 - DNA, 75 bp, synthetic construct
  source 1..75: mol_type = other DNA
tctggtttcatccgcagcctgctgggcaaagcgatgcgcctgcgtatcgtgccggaactgaccttcttctacgac

SEQ ID NO: 275840 - DNA, 75 bp, synthetic construct
  source 1..75: mol_type = other DNA
cagaacgctgggaagactggccggacggctggataacatcgacctgagcgtactgatggtcggtctcgtcgatat

SEQ ID NO: 275841 - DNA, 75 bp, synthetic construct
  source 1..75: mol_type = other DNA
tggtgtcgcggaaggttgtggcggatgaggtaaaagctgggggaagtatcacttcgccagttatccggagtgccg

SEQ ID NO: 275842 - DNA, 75 bp, synthetic construct
  source 1..75: mol_type = other DNA
ttttactcctaatccaccatcaattctctacataaaaggggataaaagtatactcaaagaattgccgggtgtcgc

SEQ ID NO: 275843 - DNA, 75 bp, synthetic construct
  source 1..75: mol_type = other DNA
tgcagcgaaaaccggtacaggaatctgaaggatgtcctcaaagaagtgcctggcgtacaactgacgaacgaaggg

SEQ ID NO: 275844 - DNA, 75 bp, synthetic construct
  source 1..75: mol_type = other DNA
aacataatctcaataatttgtgtaatttttatagggatagcattttatttctatagaagatttaaaggattgact

SEQ ID NO: 275845 - DNA, 75 bp, synthetic construct
  source 1..75: mol_type = other DNA
cgttatcgccgcactttccaactccatctggggaattattctgggccgtgcgttacaaggctccggtgcgattgc

SEQ ID NO: 275846 - DNA, 75 bp, synthetic construct
  source 1..75: mol_type = other DNA
cgttatttctataatgaatgagtctcgtaagaaattgttaggacttaaatacccgcaaaaacaaaatactttaga

SEQ ID NO: 275847 - DNA, 75 bp, synthetic construct
  source 1..75: mol_type = other DNA
atgatcaattcgccccgagtgtgtattcaggttcaaagtgtttacattgaagcgcaatcttcacctgataatgaa

SEQ ID NO: 275848 - DNA, 75 bp, synthetic construct
  source 1..75: mol_type = other DNA
acccgggttggtcgggattttactggatacgctttgtcaatgcagcgggagtgaaggggccgtggcacgcagtgg

SEQ ID NO: 275849 - DNA, 75 bp, synthetic construct
  source 1..75: mol_type = other DNA
ggaagccggtaagccaggttgcaatttcggcatcgcagttgtttgtctttgacccgaacaacccggataacacag

SEQ ID NO: 275850 - DNA, 75 bp, synthetic construct
  source 1..75: mol_type = other DNA
gaaaggatttatctgcggttgtggaaaatatggagattggcacagggcagcgtggagatggtcgtcatgcttttg

SEQ ID NO: 275851 - DNA, 75 bp, synthetic construct
  source 1..75: mol_type = other DNA
gaattaaaaggtgagtatataaaaaaatataaagctaacattcttattatgggtaatgattgggaaggaaagttt

SEQ ID NO: 275852 - DNA, 75 bp, synthetic construct
  source 1..75: mol_type = other DNA
aagggcaactgacaattcgttactctaatcagaatgtaggactggtgatccgcaatgataaaattgaggtttatg

SEQ ID NO: 275853 - DNA, 75 bp, synthetic construct
  source 1..75: mol_type = other DNA
gaggcagtaaagctttcctgtccatgtggtcaaagaaagccggagctgatggggtgacagccggaatcggcattg

SEQ ID NO: 275854 - DNA, 75 bp, synthetic construct
  source 1..75: mol_type = other DNA
ccgctaaagcgattgagtgggatgaggcgttcaagaaaatggacgatccgtctggtcgtgcggttggcgttcacc

SEQ ID NO: 275855 - DNA, 75 bp, synthetic construct
  source 1..75: mol_type = other DNA
gtttctaaaattaaatttaacacaatcaatgattttggatcatcttcggaaatgatgactaaaaatgttgattga

SEQ ID NO: 275856 - DNA, 75 bp, synthetic construct
  source 1..75: mol_type = other DNA
aatccggtatggtgcctgcaaaaggttcattgaacattaatttacccgccggagtaaatgaggtgtcacaaataa

SEQ ID NO: 275857 - DNA, 75 bp, synthetic construct
  source 1..75: mol_type = other DNA
tgcccgcgaagaaaatatgtgtggtcgggataagcggcctgatggattttcaggcgcatcttgcggcggcttcat

SEQ ID NO: 275858 - DNA, 75 bp, synthetic construct
  source 1..75: mol_type = other DNA
cactctgcgctcaacctggctaagttcgccagaagtccctgtctggccgctgcccgcgaagaaaatatgtgtagt

SEQ ID NO: 275859 - DNA, 75 bp, synthetic construct
  source 1..75: mol_type = other DNA
tgtcacattgtactaaggatggaaaattcgtttgtaatgatggctcaatcagccgctctaaaaaggtgtgtagtg

SEQ ID NO: 275860 - DNA, 75 bp, synthetic construct
  source 1..75: mol_type = other DNA
atgaaaaaattggcacttatcttggttatgggagcgcttgtttccttttatgccgatgccgggcgcaaaccctgc

SEQ ID NO: 275861 - DNA, 75 bp, synthetic construct
  source 1..75: mol_type = other DNA
atgggattcttcagtatgggatgcatcctcgtcggcgtattactggtgccagtaactgtaaaatgttttggtaaa

SEQ ID NO: 275862 - DNA, 75 bp, synthetic construct
  source 1..75: mol_type = other DNA
tttatgatgctgtgctacagaggcgtcaaagagcattatgtggacacaacgccaaccggacataaagccagtatt

SEQ ID NO: 275863 - DNA, 75 bp, synthetic construct
  source 1..75: mol_type = other DNA
tcgaatttaatgctctgcatcggtactctgtatctcctcaaattttataccgatgaattagggatgcctgcttac

SEQ ID NO: 275864 - DNA, 75 bp, synthetic construct
  source 1..75: mol_type = other DNA
tatctttctcaaagtccggtctccattattacctgccagatccaccgggagaatttacggttattactgacccgg

SEQ ID NO: 275865 - DNA, 75 bp, synthetic construct
  source 1..75: mol_type = other DNA
aagctgaattatggcatcgctggcaacagggcggtgagcctgatttggatcgtgattcaggtttaccattaatga

SEQ ID NO: 275866 - DNA, 75 bp, synthetic construct
  source 1..75: mol_type = other DNA
atcgcgcaaagcgatgcgacattacagggtttgcgtcagctcattttatctggccttgtgcactggcaattattg

SEQ ID NO: 275867 - DNA, 75 bp, synthetic construct
  source 1..75: mol_type = other DNA
aaccgcagaaattgaactgccggaactggatgtgctgcgcaacaacgccaccgagtttcgcgcggtgaatatcgc

SEQ ID NO: 275868 - DNA, 75 bp, synthetic construct
  source 1..75: mol_type = other DNA
gcccatccgtaactattgaaaacggcaatgccatcactacgtcaattgacatcgcagagttctttgagaagcagc

SEQ ID NO: 275869 - DNA, 75 bp, synthetic construct
  source 1..75: mol_type = other DNA
acagcgaatgaagcagcccgccctgaaacgccatcgcttttcagccgtctgcgccgttttctgaccggtgggaaa

SEQ ID NO: 275870 - DNA, 75 bp, synthetic construct
  source 1..75: mol_type = other DNA
tcagctgacaaccgtcagctggttatcaatgccctgacggataacggtctgcagtttgccggttacggtgaagct

SEQ ID NO: 275871 - DNA, 75 bp, synthetic construct
  source 1..75: mol_type = other DNA
gaacgcgtactgcgtggcgtacagctcaatcctgaagcgatggtcgcggagcgtatttactgggcagaagatgaa

SEQ ID NO: 275872 - DNA, 75 bp, synthetic construct
  source 1..75: mol_type = other DNA
tacggcaacggtcaaatacacctgacaacgcgtcagaagctggcaatgccaggtattcgttacgaagacatggac

SEQ ID NO: 275873 - DNA, 75 bp, synthetic construct
  source 1..75: mol_type = other DNA
aaagagcgtgtattacgcgacgtacagctaaaccctgaagccatggtcgccgaacgtatttactgggcagaagat

SEQ ID NO: 275874 - DNA, 75 bp, synthetic construct
  source 1..75: mol_type = other DNA
ttcgatcgcatggaaaaacaactatgggtacagaaacaactggccctgtcttctcctgcgatgaacatcaactac

SEQ ID NO: 275875 - DNA, 75 bp, synthetic construct
  source 1..75: mol_type = other DNA
ggcttaagggtgtgggtgtgctgcgtgagtccgggcatgagcacttcaccgggtcgctggttgtgccggtgatgg

SEQ ID NO: 275876 - DNA, 75 bp, synthetic construct
  source 1..75: mol_type = other DNA
atgaaaaaactggcacttattttgtttatgggaacgcttgtttccgccgatgccgggcgcaaaccctgttctggt

SEQ ID NO: 275877 - DNA, 75 bp, synthetic construct
  source 1..75: mol_type = other DNA
aactcccggcccagagggctgcgctggaaaaactccgccaggagaaagggatggcgcatgatgccatcgtcaccc

SEQ ID NO: 275878 - DNA, 75 bp, synthetic construct
  source 1..75: mol_type = other DNA
tgggttttgagcagacctggaaagagtggtctgacagccaaaaggcggaggacaggcaggaaaaaactctgcaac

SEQ ID NO: 275879 - DNA, 75 bp, synthetic construct
  source 1..75: mol_type = other DNA
aacgccctcaattttgaggacgttacctacaccgacgccaaaggcgaacaacgcccaatgtaccaaatcaccaaa

SEQ ID NO: 275880 - DNA, 75 bp, synthetic construct
  source 1..75: mol_type = other DNA
agatattcaggttctggtttctgaactgtcgatggttgaagccacccctgaactgctggcgctggttggcgaaga

SEQ ID NO: 275881 - DNA, 75 bp, synthetic construct
  source 1..75: mol_type = other DNA
acacaggcatggctggaagcgcgcctgaaaggcgaagaactgccaaaaccagaaggtctgctgacacaaaacgaa

SEQ ID NO: 275882 - DNA, 75 bp, synthetic construct
  source 1..75: mol_type = other DNA
tggtatcgcggcctgattcagggcaaacagatggtgatgattggctattccgactcagcaaaagatgcgggcgtg

SEQ ID NO: 275883 - DNA, 75 bp, synthetic construct
  source 1..75: mol_type = other DNA
gttcagtttcgattcttccatcggcttgcgttccggggcgatgagtaccgctaacaacaatgttggcggcgctgc

SEQ ID NO: 275884 - DNA, 75 bp, synthetic construct
  source 1..75: mol_type = other DNA
gaaatggcgcggctcgcgatcgctggctgcaacaagcagaacaacgcgggctgggaaacaatgcgctgtactggt

SEQ ID NO: 275885 - DNA, 75 bp, synthetic construct
  source 1..75: mol_type = other DNA
tgttgttggcgcgacgctaccggtgctgttaaaagaaggtcagtacgacgcagcgcaaaaactgctcgccaccct

SEQ ID NO: 275886 - DNA, 75 bp, synthetic construct
  source 1..75: mol_type = other DNA
gatgaagagtcggcgcgctcgctggccagccgttggcagaaaattgatgagattccgtttgattttgagcgtcgc

SEQ ID NO: 275887 - DNA, 75 bp, synthetic construct
  source 1..75: mol_type = other DNA
acggctccggctctgcgggcgttaaaagccagtggaattaccgtgaagctccttactggcgacagtgagttagtg

SEQ ID NO: 275888 - DNA, 75 bp, synthetic construct
  source 1..75: mol_type = other DNA
caggcgcgcgatctgttcatcgctcaggcgtcattaaccggtgagtctctgcctgttgaaaaagcaacaactacc

SEQ ID NO: 275889 - DNA, 75 bp, synthetic construct
  source 1..75: mol_type = other DNA
gctaccagtcacttcaggcgtgtggcatgggtattatcgccaatggcgatctgctcgacaccctgcgccgcgtga

SEQ ID NO: 275890 - DNA, 75 bp, synthetic construct
  source 1..75: mol_type = other DNA
tggccgttcacctgctgttgaaagaagcaggtattggatttgcgatgccagtcgcaccgctgtttgaaactctcg

SEQ ID NO: 275891 - DNA, 75 bp, synthetic construct
  source 1..75: mol_type = other DNA
gagcgaagacaccatcaaaaaagcggtggaatcactgtcgctggaactggtactcactgcgcacccaaccgaaat

SEQ ID NO: 275892 - DNA, 75 bp, synthetic construct
  source 1..75: mol_type = other DNA
aagcccctgcgcgaccaaatctttttcctcgccgttgaacagcagttgccgctgaacgggcaaaatggcgcctcc

SEQ ID NO: 275893 - DNA, 75 bp, synthetic construct
  source 1..75: mol_type = other DNA
cgttataccgttagcgtagcgacccataacaaggctgaagctctgcgtctggcacgattgctgtatcagcaagaa

SEQ ID NO: 275894 - DNA, 75 bp, synthetic construct
  source 1..75: mol_type = other DNA
ggatattcaggcgtggacggcagattatcgcgtcagctggcatcagaaggtggctaacggacagactattgagcc

SEQ ID NO: 275895 - DNA, 75 bp, synthetic construct
  source 1..75: mol_type = other DNA
ccttcgacttccgcgaaatggtcacgaccctcgacaacaagataatcaccacatcactcaaggtggcggattact

SEQ ID NO: 275896 - DNA, 75 bp, synthetic construct
  source 1..75: mol_type = other DNA
gataccatgctgcgcgccagcgcctcattctttaatggcggcaaatacagcgatgaatggcacccgaacggttca

SEQ ID NO: 275897 - DNA, 75 bp, synthetic construct
  source 1..75: mol_type = other DNA
agggcgcgcagcttggcggtgtcggggtccgctggaatatctggaccggcgagacgcactacgacgcctggccgc

SEQ ID NO: 275898 - DNA, 75 bp, synthetic construct
  source 1..75: mol_type = other DNA
gcatggcttcaggccgaacaacgacaaccgaacgcctggcaacatcgtgcggtagcctatcaagcgtatcaggtt

SEQ ID NO: 275899 - DNA, 75 bp, synthetic construct
  source 1..75: mol_type = other DNA
cataatgtacccgctgcaataagcgatctgcgtgcagcgcttgacctggatcctaataacagcaataccaaagca

SEQ ID NO: 275900 - DNA, 75 bp, synthetic construct
  source 1..75: mol_type = other DNA
ccgcacaaaagctgcttgcaaccctccctgccgatgaaatgctcgaagagcgttataccgtcagcgtggcgaccc

SEQ ID NO: 275901 - DNA, 75 bp, synthetic construct
  source 1..75: mol_type = other DNA
atgaaggagaataaccttaatcgcgtcatcggatggtctgggttgctgctaacgtctttattgagtaccagcgca

SEQ ID NO: 275902 - DNA, 75 bp, synthetic construct
  source 1..75: mol_type = other DNA
ttgaaatagtaacaccagatttagaaaaaaacggttattgcattctaggcggtttaattgaccatgtcgtaccct

SEQ ID NO: 275903 - DNA, 75 bp, synthetic construct
  source 1..75: mol_type = other DNA
aattatacccgccaggtgattgatgacattgataatcaggcgctgattaccccattaaccccggagcaaaatcaa

SEQ ID NO: 275904 - DNA, 75 bp, synthetic construct
  source 1..75: mol_type = other DNA
aatgctggaacaggcgcataagggattaccggacgatccggcgctgatccgacagttagcctacgtgaatcagcg

SEQ ID NO: 275905 - DNA, 75 bp, synthetic construct
  source 1..75: mol_type = other DNA
ttcccgtggctggttgcgattctggcagggtatatgacgttaacccagttggtgaaagggttctatagccgtcgt

SEQ ID NO: 275906 - DNA, 75 bp, synthetic construct
  source 1..75: mol_type = other DNA
gccgagttcaaatgcgtataaatcgtcgcggacaacaatgttactttctacgccggagggtcgtcaggcactaca

SEQ ID NO: 275907 - DNA, 75 bp, synthetic construct
  source 1..75: mol_type = other DNA
ggttacaccggacatgttcgtgatccaaaagtctggaagcacaacagccaatggtacatggtgcttggcgcgcaa

SEQ ID NO: 275908 - DNA, 75 bp, synthetic construct
  source 1..75: mol_type = other DNA
gcgcaggatcggcaaaagcgcggcaaggtgctgctgttcagctctgcggatctccatcagtggacgagtatgggt

SEQ ID NO: 275909 - DNA, 75 bp, synthetic construct
  source 1..75: mol_type = other DNA
cgccatgcttgacgatccagatacgctgtttatcgacatgcgcaaccactatgaatacgaagtggggcattttga

SEQ ID NO: 275910 - DNA, 75 bp, synthetic construct
  source 1..75: mol_type = other DNA
gaacagtctgctgaaagtaaaccgctactggctggcgatccagcagggtgatgccgcgctgaaagccaataatcc

SEQ ID NO: 275911 - DNA, 75 bp, synthetic construct
  source 1..75: mol_type = other DNA
ctctaaaatctggtacggacagattaaagacatgcccgtcagcgatgccagcgtgcaggcgctgaaaaaatatct

SEQ ID NO: 275912 - DNA, 75 bp, synthetic construct
  source 1..75: mol_type = other DNA
ggcaggaataatatatatggcattcaatgtcatccggagaaaagtcattcatcaggttatcaactcttaaaaaat

SEQ ID NO: 275913 - DNA, 75 bp, synthetic construct
  source 1..75: mol_type = other DNA
atgcctactgggagcacgctttacaccgggggaaaccatgacgaccgaccaacaccggagatcctccgcaccgaa

SEQ ID NO: 275914 - DNA, 75 bp, synthetic construct
  source 1..75: mol_type = other DNA
ctcgacactcaggaagtagagttactgtttggcctgatgcgtcagttgcgcgatcgcggcgtcagcctgatcttt

SEQ ID NO: 275915 - DNA, 75 bp, synthetic construct
  source 1..75: mol_type = other DNA
agagtatgaccgtaacggctgctactccggcagcgcggtggataacaacggtacgcttaccctgtgctataccgg

SEQ ID NO: 275916 - DNA, 75 bp, synthetic construct
  source 1..75: mol_type = other DNA
caaactcggcccggtattaccgctgccggagggctataccggccacgtgcgtgacccgaaagtctggcagcacga

SEQ ID NO: 275917 - DNA, 75 bp, synthetic construct
  source 1..75: mol_type = other DNA
acccgctcgcctgcgatcataagttcaagtgctgggggcactggagctctgccgacctgctgcactggcaacatg

SEQ ID NO: 275918 - DNA, 75 bp, synthetic construct
  source 1..75: mol_type = other DNA
ctaatgacgcgctgaaagccaaaatgctggccgagagcgaaccacgtaccaccatttcgttctataaatatttcc

SEQ ID NO: 275919 - DNA, 75 bp, synthetic construct
  source 1..75: mol_type = other DNA
aaacccgctatcgccagaccgacatcccgtgcaccgtcaaggcgctggacgatgatcgcattgaagtgattttcg

SEQ ID NO: 275920 - DNA, 75 bp, synthetic construct
  source 1..75: mol_type = other DNA
ttcctctgtttctgcctggctgttgcaacaacagggatatcaggtcgaaggcctgtttatgaagaactgggaaga

SEQ ID NO: 275921 - DNA, 75 bp, synthetic construct
  source 1..75: mol_type = other DNA
atctcggtctggtcaccgcgaagaaaaaagattctaccgggatctgctttatcggtgaacgtaaattccgcgagt

SEQ ID NO: 275922 - DNA, 75 bp, synthetic construct
  source 1..75: mol_type = other DNA
ttgccgttttcaccgctggccagttatctgcaactgcaggcgctgccgttaagctatttcccgtggctggttgcg

SEQ ID NO: 275923 - DNA, 75 bp, synthetic construct
  source 1..75: mol_type = other DNA
gttactgatacgctgaatcgtcaggggctgcgcgtggttgcggtggcgacgaaatacctgccagcgcgtgaagga

SEQ ID NO: 275924 - DNA, 75 bp, synthetic construct
  source 1..75: mol_type = other DNA
gttcccggtcggcgaactggaaaaaccgcaggtgcgtaagattgctgaagatcttggtctggtcaccgcgaagaa

SEQ ID NO: 275925 - DNA, 75 bp, synthetic construct
  source 1..75: mol_type = other DNA
ttatgattatgcggatgctggcggaaatggcggttgccacgcccgataccggttcgttttccacctatgccgata

SEQ ID NO: 275926 - DNA, 75 bp, synthetic construct
  source 1..75: mol_type = other DNA
atctggttattttccctggtcattaccctcgccttaaccggcagtaatttattaagcgttaaaaactacggtgaa

SEQ ID NO: 275927 - DNA, 75 bp, synthetic construct
  source 1..75: mol_type = other DNA
tttgagttctggctggcgctgtgcaaagtcatcgctatcctggcctttattttccttggtgcagtcgcaattagc

SEQ ID NO: 275928 - DNA, 75 bp, synthetic construct
  source 1..75: mol_type = other DNA
acggaccaacaaccgatattattggcgaagcgcctgccatgcaggatgtgttccgtattattggccgtctctcac

SEQ ID NO: 275929 - DNA, 75 bp, synthetic construct
  source 1..75: mol_type = other DNA
gccctgctggtttatttagtcatcgccgtttcacagttgcggatgcgcaaaattctgcgagcagaaggaagcgaa

SEQ ID NO: 275930 - DNA, 75 bp, synthetic construct
  source 1..75: mol_type = other DNA
cggcgcggcgtttttaacggtggtagtgaactattacgcgcctgcgaaagtgtttaaattcctgatcgacagctc

SEQ ID NO: 275931 - DNA, 75 bp, synthetic construct
  source 1..75: mol_type = other DNA
tgaatgacctgccgaaggtagagcgtattctggcgctggcggaaactaacgcccaactggaaaagctggacgctg

SEQ ID NO: 275932 - DNA, 75 bp, synthetic construct
  source 1..75: mol_type = other DNA
gttaacggacaaactcaagctcaacctgaaagtgtaccgtgctaccgaaagcgccgcctggcaggaagcacgcta

SEQ ID NO: 275933 - DNA, 75 bp, synthetic construct
  source 1..75: mol_type = other DNA
tatcacccattatgggacgaaggatatttatcggtgggcgatacccatacaacccgtaaatgggaacctggcatg

SEQ ID NO: 275934 - DNA, 75 bp, synthetic construct
  source 1..75: mol_type = other DNA
caacttatcagatcacctcttatccgacccaaaactactcttgtggttccggggtgttctcggtttatgcatatc

SEQ ID NO: 275935 - DNA, 75 bp, synthetic construct
  source 1..75: mol_type = other DNA
cagcagacctggaaagtcgctgtcaggaaaaacaccaaaaacagcgatcaactggatgccgttctgctgtccagt

SEQ ID NO: 275936 - DNA, 75 bp, synthetic construct
  source 1..75: mol_type = other DNA
gatccgaatgctgatatctcggcagaagaacgagagtggctggatgcgccggcagctggtcaggaggaaatctga

SEQ ID NO: 275937 - DNA, 75 bp, synthetic construct
  source 1..75: mol_type = other DNA
caacaacgcctggggcttttagagcaacgagacacggcaatgttgcaccgtttgctgcatgatattgaaaaaaat

SEQ ID NO: 275938 - DNA, 75 bp, synthetic construct
  source 1..75: mol_type = other DNA
cgatggtggcagattatccttcgctcaatctggggcaggcggtgatggtttattgctatcaattagcaacattaa

SEQ ID NO: 275939 - DNA, 75 bp, synthetic construct
  source 1..75: mol_type = other DNA
aacgagacacggcaatgttgcaccgtttgctgcatgatattgaaaaaatatcaccaaataaaaaacgccttagta

SEQ ID NO: 275940 - DNA, 75 bp, synthetic construct
  source 1..75: mol_type = other DNA
tgaacgaactgtcgaaggtagatcgcattctggcgctggcggaaactaacgccgagcttgaaaaactggatgctg

SEQ ID NO: 275941 - DNA, 75 bp, synthetic construct
  source 1..75: mol_type = other DNA
tattgctatcaattagcaacattaatacaacaaccggcgaaagtgacacaacggcagaccaacatcaactgcaag

SEQ ID NO: 275942 - DNA, 75 bp, synthetic construct
  source 1..75: mol_type = other DNA
gtatttttcagcttttcattctgcctgcaacgggcaatatgtctctgtgtggattaaaaaaagagtgtctgatag

SEQ ID NO: 275943 - DNA, 75 bp, synthetic construct
  source 1..75: mol_type = other DNA
ggctatctgatgccaggaaaaacggtaacagcaaacacatcctgtacgccagccgcactgggtatttcggacctt

SEQ ID NO: 275944 - DNA, 75 bp, synthetic construct
  source 1..75: mol_type = other DNA
ggcgatgtagttcgcgttatcaaacttgtgaccaaagaccggcgtagtgtttatgagcgcctgcgccgcgaatat

SEQ ID NO: 275945 - DNA, 75 bp, synthetic construct
  source 1..75: mol_type = other DNA
aaaccgcccgcaaagacgaactgaaaaaaatcagtaatgcttttgtggctgttcagcacatgagtgctcattcga

SEQ ID NO: 275946 - DNA, 75 bp, synthetic construct
  source 1..75: mol_type = other DNA
atatccgcgaagcgctgcatgacagcctcaagcgcctacagactgattacctcgatctttatcaggtgcactggc

SEQ ID NO: 275947 - DNA, 75 bp, synthetic construct
  source 1..75: mol_type = other DNA
ttttgataagtataaaaaagatctgggatacaatgttattcgtgctttaagggaaagtcttcttaagacaggtga

SEQ ID NO: 275948 - DNA, 75 bp, synthetic construct
  source 1..75: mol_type = other DNA
gttgccggtcccaaggtgatcgagcgtctgaaaatgctctacactattacccaccttcgcgggagattgcatatc

SEQ ID NO: 275949 - DNA, 75 bp, synthetic construct
  source 1..75: mol_type = other DNA
gaaagtgacgaggttcagggtggtggaggcactcgtcgctacctgccgccggattacgattacaattccgagccg

SEQ ID NO: 275950 - DNA, 75 bp, synthetic construct
  source 1..75: mol_type = other DNA
ttgcataaacaggcaattgcaaaacatgctgtacttgagcaggagaataaatatgtcgaggcagcaaatgaatta

SEQ ID NO: 275951 - DNA, 75 bp, synthetic construct
  source 1..75: mol_type = other DNA
atcatcaagatcataaaaaatgacatgccagaatcaaaacatactaaaagtatatgcttacttagcggagatctt

SEQ ID NO: 275952 - DNA, 75 bp, synthetic construct
  source 1..75: mol_type = other DNA
ttctcgaacagtggcaatatcccgcaggcaccttcggtattgaatttcgctacggctaatcatgcatcccacagg

SEQ ID NO: 275953 - DNA, 75 bp, synthetic construct
  source 1..75: mol_type = other DNA
gaaggggtcgaactgctggcctattcgtgcctgggtttcggcacgctgaccgggaaatatctcaatggtgcaaaa

SEQ ID NO: 275954 - DNA, 75 bp, synthetic construct
  source 1..75: mol_type = other DNA
ccggctggtgcgcgtaatacgctctttagtcggttcacccgttatagtggtgaacaaacgcaaaaggccgtcgca

SEQ ID NO: 275955 - DNA, 75 bp, synthetic construct
  source 1..75: mol_type = other DNA
cgaaacatggcagccgcgaaaagttaattatcgcctccaaagtgagcggaccgtcgcgcaataatgacaagggca

SEQ ID NO: 275956 - DNA, 75 bp, synthetic construct
  source 1..75: mol_type = other DNA
ggatgagcgaaggcagtcaacgaagaggcagcgtgaaggataaagtgtataagcgtcccgtttcgatcttagtgg

SEQ ID NO: 275957 - DNA, 75 bp, synthetic construct
  source 1..75: mol_type = other DNA
atgtttcagttaggtattgatgtcagcaagaaaacgctggatttgtgcctgctgcgcgaaggcgtaaaaggcaga

SEQ ID NO: 275958 - DNA, 75 bp, synthetic construct
  source 1..75: mol_type = other DNA
ttttggtacaacatcccatttttatgatgatcaatatcatttagatgattatcatcacagtcacgataatcattg

SEQ ID NO: 275959 - DNA, 75 bp, synthetic construct
  source 1..75: mol_type = other DNA
tggcagcaggagccttacgaacaactggctgtgattgccaacgttgcgacttccgttgcgcacgaaggccgcgct

SEQ ID NO: 275960 - DNA, 75 bp, synthetic construct
  source 1..75: mol_type = other DNA
agctgggttttgaggcgctgtatcccaaccgttaccgcgtgattaaagaagtggtgaaagccgcgcgcggcaacc

SEQ ID NO: 275961 - DNA, 75 bp, synthetic construct
  source 1..75: mol_type = other DNA
cggcaaggttaaacctctttcggaacttgtttcccctgaaattgacaaggcaactctcagcggtggtttattggt

SEQ ID NO: 275962 - DNA, 75 bp, synthetic construct
  source 1..75: mol_type = other DNA
cacgcccaccacagggaccgattggctggctattgtcactggccggacggattattgggctggttatcggtacgc

SEQ ID NO: 275963 - DNA, 75 bp, synthetic construct
  source 1..75: mol_type = other DNA
cgcgaagaggtgctgtcgtggagcgacgagaagttttgccgtgaactccagtcggcctttggctggcgacttggg

SEQ ID NO: 275964 - DNA, 75 bp, synthetic construct
  source 1..75: mol_type = other DNA
gtgagaaaactatatcctgacgattttgttcgatttgtttatgttaatctgcctggagagtgtcgttcaaaagac

SEQ ID NO: 275965 - DNA, 75 bp, synthetic construct
  source 1..75: mol_type = other DNA
acgttcaggacaacggttatcgtgataaaggcactcagggcgcgcagcttggcggtgtcggggtccgctggaata

SEQ ID NO: 275966 - DNA, 75 bp, synthetic construct
  source 1..75: mol_type = other DNA
cgggctgatggcgatggaattattcactccggcacgcgatgtgctggcgcagcgcaccctcggttgggtagcgcg

SEQ ID NO: 275967 - DNA, 75 bp, synthetic construct
  source 1..75: mol_type = other DNA
ccccatcgccgggcaaggatttaacctcggtatgcgtgatgtgatgagccttgcagaaaccctgactcaggcgca

SEQ ID NO: 275968 - DNA, 75 bp, synthetic construct
  source 1..75: mol_type = other DNA
cgctggcgatgttgccgatgtctgacggacgctgttcgctggtctggtgtcatccactggaacggcgcgaagagg

SEQ ID NO: 275969 - DNA, 75 bp, synthetic construct
  source 1..75: mol_type = other DNA
cggccatgcctgcgtgggcgcacgcgtcgaccgccagccttacccgctgtcgcagccgcttaccagcggtcaaac

SEQ ID NO: 275970 - DNA, 75 bp, synthetic construct
  source 1..75: mol_type = other DNA
atagtgggggtcgtgatgccatcaacaggctgataaaagcctacaatttcagctcacgccaacaactctgcgaac

SEQ ID NO: 275971 - DNA, 75 bp, synthetic construct
  source 1..75: mol_type = other DNA
ctgcatacttataccattaaagagtgggaaggattgcaggataccatctttgcttctcctccctgtcgtggagct

SEQ ID NO: 275972 - DNA, 75 bp, synthetic construct
  source 1..75: mol_type = other DNA
cgtattcctcgaagtagtggatgaaagctatcgtcacaatgtcccagccggctctgaaagccattttaaagttgt

SEQ ID NO: 275973 - DNA, 75 bp, synthetic construct
  source 1..75: mol_type = other DNA
cgcgccgcaagctgccatgcgcgaagtaaaggaagaggtcaccattgatgttgtcgctgaacaactgaccttaat

SEQ ID NO: 275974 - DNA, 75 bp, synthetic construct
  source 1..75: mol_type = other DNA
gttatcccatcagtaaggcaggcaaccattgagaacggaacgctcgaagagatgggggatgttttccttgatcag

SEQ ID NO: 275975 - DNA, 75 bp, synthetic construct
  source 1..75: mol_type = other DNA
ttccctgcagaatgggtaattcagtgcgctcttgagacaggcgtttctttactctggcttaccacagggcaaggc

SEQ ID NO: 275976 - DNA, 75 bp, synthetic construct
  source 1..75: mol_type = other DNA
cgattaaaggcgctgatggcgtgttgatcacttttgcgaaatgctgccgccctattcccggcgacccgatcatcg

SEQ ID NO: 275977 - DNA, 75 bp, synthetic construct
  source 1..75: mol_type = other DNA
aatgaaatcccgcaggaaaatattcagcgcgaactggatcgcatgaaactggcgacacttgacgatttgctggca

SEQ ID NO: 275978 - DNA, 75 bp, synthetic construct
  source 1..75: mol_type = other DNA
atgaaactcgactatgaaacgctgatggcggcgctgctgcatgacgtgattgaagatactcccgccacctaccag

SEQ ID NO: 275979 - DNA, 75 bp, synthetic construct
  source 1..75: mol_type = other DNA
ttcgggtcacaaaatctataaaagtaatcttgtcaccagttatcgaaataaatataaccctgatatttttgaact

SEQ ID NO: 275980 - DNA, 75 bp, synthetic construct
  source 1..75: mol_type = other DNA
ggctgaactttgtcgttagctcgaaagcgcgcgccaaaattcgtcagttgctgaaaaacctcaagcgtgatgatt

SEQ ID NO: 275981 - DNA, 75 bp, synthetic construct
  source 1..75: mol_type = other DNA
ggcggcgctgctgcatgacgtgattgaagatactcccgccacctaccaggatcaggatatggaacagctttttgg

SEQ ID NO: 275982 - DNA, 75 bp, synthetic construct
  source 1..75: mol_type = other DNA
aaggaatgatcaccttgaatctcaaacggattttacccatcctcgtcttactccccttatttgctgttgcggctg

SEQ ID NO: 275983 - DNA, 75 bp, synthetic construct
  source 1..75: mol_type = other DNA
agcgtgggaaacgttacatgcgctgctgacggatattaatagtcagggtcaggtgcaaatggcgatgaacggcag

SEQ ID NO: 275984 - DNA, 75 bp, synthetic construct
  source 1..75: mol_type = other DNA
tcggggtggggtatagcaacggtgccgatgtggaatccccgtggaatgcggtagctggtgtgaactggtcgttct

SEQ ID NO: 275985 - DNA, 75 bp, synthetic construct
  source 1..75: mol_type = other DNA
cagcaggtgaaatcatcgctggaacagaaaattaaacagatgcaaatcagcctcaccggtgagccggttctccgg

SEQ ID NO: 275986 - DNA, 75 bp, synthetic construct
  source 1..75: mol_type = other DNA
gtgtagggattaataaacaagggaactgtagattcaattggtcaacgcaacagttatgtgaaaacatggggttgc

SEQ ID NO: 275987 - DNA, 75 bp, synthetic construct
  source 1..75: mol_type = other DNA
gtgttgggattaataaacatgggaactgtagattcaatctgtcaatgcaacacccctttcaattatctctttcgg

SEQ ID NO: 275988 - DNA, 75 bp, synthetic construct
  source 1..75: mol_type = other DNA
gaggaactggcgtttagccgccaaccttgcgcgctttctggttacgacgagttgcatatttcccccgttaaataa

SEQ ID NO: 275989 - DNA, 75 bp, synthetic construct
  source 1..75: mol_type = other DNA
tgcggaaatatgtcttttgaagtattcaaattccttgacccaaataaagtgtcaattacacttacggcatctgat

SEQ ID NO: 275990 - DNA, 75 bp, synthetic construct
  source 1..75: mol_type = other DNA
ctggcacaggtggtattagacttggttttgagcaagccatgaaagaaattggattgtcaacaaaatgcgtaaaaa

SEQ ID NO: 275991 - DNA, 75 bp, synthetic construct
  source 1..75: mol_type = other DNA
ttcagcagttcgttaagcgggcatctcggggtggggtatagccatggtgccagtgtggaatccccgtggaacgcg

SEQ ID NO: 275992 - DNA, 75 bp, synthetic construct
  source 1..75: mol_type = other DNA
atatcaggcaggtattaaagcctcattcagcagttcgttaagcgggcatctcggggtggggtatagtgtagtggt

SEQ ID NO: 275993 - DNA, 75 bp, synthetic construct
  source 1..75: mol_type = other DNA
atgcagcgtcgatattatccgcaatacgtccgagtttcggagtactccaatgatgacattgccctacccatattc

SEQ ID NO: 275994 - DNA, 75 bp, synthetic construct
  source 1..75: mol_type = other DNA
gccgacggaaacgacgctgacgactggcgcacggcctttcgtgcagccggtggtgtcctgagcgacgagctgaaa

SEQ ID NO: 275995 - DNA, 75 bp, synthetic construct
  source 1..75: mol_type = other DNA
actttgtgcttggtggatttgccacaactctggcctggctgctggcaaccctggtcagtattgtgctgattttta

SEQ ID NO: 275996 - DNA, 75 bp, synthetic construct
  source 1..75: mol_type = other DNA
cactctgggctggctgttggcgactctggtcagtattgtgctgatttttaccttaccgctgacacgatcctgctg

SEQ ID NO: 275997 - DNA, 75 bp, synthetic construct
  source 1..75: mol_type = other DNA
gcgcgggaatggcgggaaattccccgcacggagcctgacccggccccccccccccggataacagttaccgcaatt

SEQ ID NO: 275998 - DNA, 75 bp, synthetic construct
  source 1..75: mol_type = other DNA
tattttatcgtacctgtagctccagactttttttgctggcaagcaattcgctctctctcaaaaaatatacctcgc

SEQ ID NO: 275999 - DNA, 75 bp, synthetic construct
  source 1..75: mol_type = other DNA
ttcagtccatatatactagcgtcgcgatttgctacctatacgccgtttttcaatctcaactattttgctttagca

SEQ ID NO: 276000 - DNA, 75 bp, synthetic construct
  source 1..75: mol_type = other DNA
gttcttcgttctgaccatcctggttgttaaacgtatatcatcccttccgcttcgcctgcttattgccgtaccatt

SEQ ID NO: 276001 - DNA, 75 bp, synthetic construct
  source 1..75: mol_type = other DNA
gctaacttatgatgacagagcgctacaattttttcgtacttttgtccttgcaaccgaacaatcaacctatttcga

SEQ ID NO: 276002 - DNA, 75 bp, synthetic construct
  source 1..75: mol_type = other DNA
aacaatcaacctatttcgagatccctgccgaagactcctggctttttatcgctgacggatctgataaagaacttg

SEQ ID NO: 276003 - DNA, 75 bp, synthetic construct
  source 1..75: mol_type = other DNA
ccatcagctatagcggttgggcagcgtaaagacggggaaatctacacagcggatctcaaaagtaaggcgcttgca

SEQ ID NO: 276004 - DNA, 75 bp, synthetic construct
  source 1..75: mol_type = other DNA
taaattcagtatccttgtgcgtatcctcgctgacgggcgcaccacagacatcccgctggggcgttttctgcggga

SEQ ID NO: 276005 - DNA, 75 bp, synthetic construct
  source 1..75: mol_type = other DNA
acttgaagcgatgtccattcttcgtccgaacgaaaatcttgcagcagctctcaacgatgattcggagttcagcaa

SEQ ID NO: 276006 - DNA, 75 bp, synthetic construct
  source 1..75: mol_type = other DNA
ccttggtagaaaaggtacttcagcaaatgataccgctgcaattttgttgctgccttcagaaatcgttaacgaaag

SEQ ID NO: 276007 - DNA, 75 bp, synthetic construct
  source 1..75: mol_type = other DNA
aagatcttcaactgtctttcttaaaatcaggaattccagatcaagatttagttcaggatgctgcatttttttcat

SEQ ID NO: 276008 - DNA, 75 bp, synthetic construct
  source 1..75: mol_type = other DNA
tgaagttgtagatggacaacaacgtcttacaacgttaagcattattgtctccgagctaaaaaaatcatcccgatt

SEQ ID NO: 276009 - DNA, 75 bp, synthetic construct
  source 1..75: mol_type = other DNA
ggatattttattgggagtatgatttgtatcaataaagggcaaaatcagtatgaagttgtagatggacaacaacgt

SEQ ID NO: 276010 - DNA, 75 bp, synthetic construct
  source 1..75: mol_type = other DNA
cagcttcgatcacgaatttaacgacacctttacggtgcgtcagaacctgcgctttgctgaaaacaaaacctcgca

SEQ ID NO: 276011 - DNA, 75 bp, synthetic construct
  source 1..75: mol_type = other DNA
atgaatcaccgatggcagttgcttccagccgattgaacgtagaaaccaacatgcctgaagcgctggatcgctgcg

SEQ ID NO: 276012 - DNA, 75 bp, synthetic construct
  source 1..75: mol_type = other DNA
cgtgcgctgcgcaaagtggtcacgtcggatacacgtattattgccggtgccaaagcccgtgacattcacacttcc

SEQ ID NO: 276013 - DNA, 75 bp, synthetic construct
  source 1..75: mol_type = other DNA
aagaaaattttcggcaactgcaccactattgccacgaataataaatttgtggtgctgaaagcggtgaaattgggg

SEQ ID NO: 276014 - DNA, 75 bp, synthetic construct
  source 1..75: mol_type = other DNA
gtcagacaacccgtccattacccgtgacgtttccggtgaaggcgtacagcaggcactgttgaaactgatcgaagg

SEQ ID NO: 276015 - DNA, 75 bp, synthetic construct
  source 1..75: mol_type = other DNA
gccggttatgtgggtgaagacgttgaaaacatcattcagaagctgttgcagaaatgcgactacgatgtccagaaa

SEQ ID NO: 276016 - DNA, 75 bp, synthetic construct
  source 1..75: mol_type = other DNA
cgaaaaaagtgctggcggtcgcggtatacaaccactacaaacgtctgcgcaacggcgataccagcaatggcgtcg

SEQ ID NO: 276017 - DNA, 75 bp, synthetic construct
  source 1..75: mol_type = other DNA
gatgcggttatcgatccgtatatgcttgagcgcgctgaaatcatgcgtggtcctgtttccgtgctttacgggaaa

SEQ ID NO: 276018 - DNA, 75 bp, synthetic construct
  source 1..75: mol_type = other DNA
tggcgttgcatgttaacaacctgttcgatcgcgaatacgtcgctagctgctttaacacctatggctgcttctggg

SEQ ID NO: 276019 - DNA, 75 bp, synthetic construct
  source 1..75: mol_type = other DNA
tacttcagctatagcgaatcgtttgaaccttcttcgcaagttgggaaggatggtaatatttttgcaccgtctaaa

SEQ ID NO: 276020 - DNA, 75 bp, synthetic construct
  source 1..75: mol_type = other DNA
ccgcaggcgaaagtggtgtttgtcgatgaatcgccgatggcggttgcttccagccggttaaacgttgaaaccaac

SEQ ID NO: 276021 - DNA, 75 bp, synthetic construct
  source 1..75: mol_type = other DNA
gaaccggcttattcagacttatcagcagcgctggcctttgcatgaatggctgactgaagggattgaagaagaccg

SEQ ID NO: 276022 - DNA, 75 bp, synthetic construct
  source 1..75: mol_type = other DNA
ctttgccgggaagcggggattatcagacgggcggcttttcagggaaatgcagaggtttctggacgtcactgacca

SEQ ID NO: 276023 - DNA, 75 bp, synthetic construct
  source 1..75: mol_type = other DNA
gctgtgctctgcaccccgccgtttcaccaacaacatgcgctgaccgataacgtcgcctgggagatgttccaccac

SEQ ID NO: 276024 - DNA, 75 bp, synthetic construct
  source 1..75: mol_type = other DNA
aaggattataaaaataagcgttggttgattagtttaggtacaaatatcctacgaacacttggattggaaaaaagg

SEQ ID NO: 276025 - DNA, 75 bp, synthetic construct
  source 1..75: mol_type = other DNA
ctcttgagaggatttcaaaaccagaaatggatgagcactttcttaaacaagagtttgagtatgtagcgcacaaac

SEQ ID NO: 276026 - DNA, 75 bp, synthetic construct
  source 1..75: mol_type = other DNA
gtaatcattgtattatggatacatctgatcctcatattacttttgatgatagcggagtatgcaattactgcgcca

SEQ ID NO: 276027 - DNA, 75 bp, synthetic construct
  source 1..75: mol_type = other DNA
gctggcattgctggagcaacaactgcgtgcgctgcgcaaagtggtcacgccagatacgcgcattattgccggtgc

SEQ ID NO: 276028 - DNA, 75 bp, synthetic construct
  source 1..75: mol_type = other DNA
gtacagcattggcgactcatacatcagcgaactggcgacgcgcgagaatttacgcctcaacgggattgatgaatc

SEQ ID NO: 276029 - DNA, 75 bp, synthetic construct
  source 1..75: mol_type = other DNA
ccatctggattactttcacaaactgaagaagatttttggcaattgcaccactatcgcgacgaataataaatttgt

SEQ ID NO: 276030 - DNA, 75 bp, synthetic construct
  source 1..75: mol_type = other DNA
ccatctggattacttccacaaactgaagaaaattttcggcaactgcaccactattgccacgaataataaatttgt

SEQ ID NO: 276031 - DNA, 75 bp, synthetic construct
  source 1..75: mol_type = other DNA
atttgctgcaacagttggacgacacagaaatccgcggcccggtgttaatcctgaatgatgcttttggtgcgttaa

SEQ ID NO: 276032 - DNA, 75 bp, synthetic construct
  source 1..75: mol_type = other DNA
ctacagcattggtgactcatacatcagcgagttggcgacgcgtgagaatttacgtctcaacggcattgatgagtc

SEQ ID NO: 276033 - DNA, 75 bp, synthetic construct
  source 1..75: mol_type = other DNA
gccggaagatgacaaacatcctgctttcccggatgtttacccgccgcgcgacgcatatacaaagaaaacttgcat

SEQ ID NO: 276034 - DNA, 75 bp, synthetic construct
  source 1..75: mol_type = other DNA
ctaacgccgcgtggctttgcccgtgctgtattcctggctaacgaccgggccatcaatcgtactacgctcaaccgc

SEQ ID NO: 276035 - DNA, 75 bp, synthetic construct
  source 1..75: mol_type = other DNA
gctggttataaatgttattgcttcaactatgacggcgctaatcacggggattatgacggggtaaaaataattcat

SEQ ID NO: 276036 - DNA, 75 bp, synthetic construct
  source 1..75: mol_type = other DNA
gtggcaacccacggaagaaaagaaacaggacacagccctgcagacaaacaaaaccgattaccggcagcgtaacga

SEQ ID NO: 276037 - DNA, 75 bp, synthetic construct
  source 1..75: mol_type = other DNA
tcactctgattaaacccattacgcgcggcgagcaggtgattaccgatgtcacgctgttaaaaccgacggccggaa

SEQ ID NO: 276038 - DNA, 75 bp, synthetic construct
  source 1..75: mol_type = other DNA
aacccgtgcgcttacggtggctacctgcctgaagacgacaaacaccctgctttccctgaatacatagctgcccgc

SEQ ID NO: 276039 - DNA, 75 bp, synthetic construct
  source 1..75: mol_type = other DNA
agggcgtatgattcaattcaatactgcctcaccttataaaaatgcttcagggaggttaaataaactgcggaaacg

SEQ ID NO: 276040 - DNA, 75 bp, synthetic construct
  source 1..75: mol_type = other DNA
tcgttacgactatccgaacttctaccaacacattgtcaagaacgttaacaagggcgtttatgacaaggatttgct

SEQ ID NO: 276041 - DNA, 75 bp, synthetic construct
  source 1..75: mol_type = other DNA
tttttagcagcgttctcatggggggcagctatcgtaatgagcaaaaaaggagttgaagaactagatgccggaggg

SEQ ID NO: 276042 - DNA, 75 bp, synthetic construct
  source 1..75: mol_type = other DNA
taaatggacctccagcctgacgctgaactactttctctggcgcgaccgcaaaggggcaatcagtaactttgtcag

SEQ ID NO: 276043 - DNA, 75 bp, synthetic construct
  source 1..75: mol_type = other DNA
atttccagacagcggtgaaatcctgctctcagggcggtgtgcgcggcggtgcggcaacgctgttctacccgatgt

SEQ ID NO: 276044 - DNA, 75 bp, synthetic construct
  source 1..75: mol_type = other DNA
aatctggtttcctatctgattggctggggagagctggtgttgcactggcataatcaagaggcaaaaggaaaaact

SEQ ID NO: 276045 - DNA, 75 bp, synthetic construct
  source 1..75: mol_type = other DNA
atctggagcgccagcggtaacacgaagctgatagagaaaggcaccacggcatcattactttaccgtgccatagcg

SEQ ID NO: 276046 - DNA, 75 bp, synthetic construct
  source 1..75: mol_type = other DNA
tctgcccggaagacaggaaaaccgatggcatcatcgccgccgcctcggtgcgggaaaatatcatcctcgctctcc

SEQ ID NO: 276047 - DNA, 75 bp, synthetic construct
  source 1..75: mol_type = other DNA
gggtgatcatcatgctcgatcgcaaacaggtggcggagatccggctggcagagctttccgttccggctatcatga

SEQ ID NO: 276048 - DNA, 75 bp, synthetic construct
  source 1..75: mol_type = other DNA
ttagcgacaaacccgttgctgcgtttaaaaattacggcaagaaaggaacgatcgcgccgtttgatctcgaagtgc

SEQ ID NO: 276049 - DNA, 75 bp, synthetic construct
  source 1..75: mol_type = other DNA
ctttcacgttggctactgacccgaccgcaatttctgatccttgatgagccaacccgcggcattgatgttggtgcc

SEQ ID NO: 276050 - DNA, 75 bp, synthetic construct
  source 1..75: mol_type = other DNA
gctgactcgtccgcaatttctgatcctcgacgagccaacgcgcggcattgacgttggcgcccatgctgagatcat

SEQ ID NO: 276051 - DNA, 75 bp, synthetic construct
  source 1..75: mol_type = other DNA
atcgcgccgtttgatctcgaagtgcgcccgggcgagatcgtcggactggcaggcttgctgggatcggggcgtacc

SEQ ID NO: 276052 - DNA, 75 bp, synthetic construct
  source 1..75: mol_type = other DNA
gcgaacccaaacgtttcggccttctacgccgtaaagagatggaaaagcgcgccaccgaactgatggcatcttacg

SEQ ID NO: 276053 - DNA, 75 bp, synthetic construct
  source 1..75: mol_type = other DNA
gtgctgaatcgccatcgttacaccagtgattcgttgccgccaacatccagcgaaacgttgctggataagctgatt

SEQ ID NO: 276054 - DNA, 75 bp, synthetic construct
  source 1..75: mol_type = other DNA
cattgcgacgaagctacgcacccgccagccaccttatctcgatatcccgttggttgataccagcgcggctggcga

SEQ ID NO: 276055 - DNA, 75 bp, synthetic construct
  source 1..75: mol_type = other DNA
gaatttctctccggcggcaatcagcaaaaagtgctgctctctcgctggctgctgactcgtccgcaatttctgatc

SEQ ID NO: 276056 - DNA, 75 bp, synthetic construct
  source 1..75: mol_type = other DNA
cgatcgcggcgtcagcctgatcttcgtcactcattttctcgatcaggtttatcaggtttatcaggttagcgatcg

SEQ ID NO: 276057 - DNA, 75 bp, synthetic construct
  source 1..75: mol_type = other DNA
cggctggctgcgaccaatttcccgcaaagagcagcaagagattgccgaacgctttatccgccagcttggcattcg

SEQ ID NO: 276058 - DNA, 75 bp, synthetic construct
  source 1..75: mol_type = other DNA
gtttactggcttcaacatggtggattgccaaccgataacttcagcaaagcgaccatcttttgcgtcgccaacaaa

SEQ ID NO: 276059 - DNA, 75 bp, synthetic construct
  source 1..75: mol_type = other DNA
aaacatctcagtcggtccgagtgatgattctggttcggggcgctcaatgcatgtatggcgcagcactgtaagtaa

SEQ ID NO: 276060 - DNA, 75 bp, synthetic construct
  source 1..75: mol_type = other DNA
gctgaactggttgtaccgccagaagtgggcggcttctggatgcgtgagctgggtctgtatgacgatgccggaaca

SEQ ID NO: 276061 - DNA, 75 bp, synthetic construct
  source 1..75: mol_type = other DNA
tcactggcccaaaggtgaacgattaatcgccgaagaattaggcgttgcgccggagcaaatctggccttcccgcta

SEQ ID NO: 276062 - DNA, 75 bp, synthetic construct
  source 1..75: mol_type = other DNA
attcccgacggtatggactggggcgtcattgatggcaacctgataaacatctcagtcggtccgagtgatgattcc

SEQ ID NO: 276063 - DNA, 75 bp, synthetic construct
  source 1..75: mol_type = other DNA
ccgtgggtgacggtaatggcaaattaccggtgccggatgccggtcagacgaaactggtgcatgaggtctggcgtc

SEQ ID NO: 276064 - DNA, 75 bp, synthetic construct
  source 1..75: mol_type = other DNA
cgttggatggaactggagtagcggagcctataacgcaactactggtggggcatcaacgttaattcttcattttaa

SEQ ID NO: 276065 - DNA, 75 bp, synthetic construct
  source 1..75: mol_type = other DNA
tcgcgtttgcaaaggggagtgacctcgaccagattggcgctaattttgactgcctgcggctgttgataacgccag

SEQ ID NO: 276066 - DNA, 75 bp, synthetic construct
  source 1..75: mol_type = other DNA
cgatagtgaaaactattgatatgagtctgctgccgccgccagcattcgttaaaaccccgttattttcagatgtta

SEQ ID NO: 276067 - DNA, 75 bp, synthetic construct
  source 1..75: mol_type = other DNA
gtggtgacccgcgaatggcgcaagtgctgacctggatttccggttcgacctacaacgcgaccgatgcgcaggtct

SEQ ID NO: 276068 - DNA, 75 bp, synthetic construct
  source 1..75: mol_type = other DNA
ttttctgctggagtgcatatttatattacgtgggaaaaaatcatcaactacgtatggagttgttttattaagtga

SEQ ID NO: 276069 - DNA, 75 bp, synthetic construct
  source 1..75: mol_type = other DNA
cgatcccactggtggcgatgatcccgctactggcagcgagcagtgcctcgacgacgatgggcgcatttgttctct

SEQ ID NO: 276070 - DNA, 75 bp, synthetic construct
  source 1..75: mol_type = other DNA
cgtgtgattctgatatcaccgacagaggatgcgatcgccggcgtcggacaggctccacactgcacagaaatcaaa

SEQ ID NO: 276071 - DNA, 75 bp, synthetic construct
  source 1..75: mol_type = other DNA
gctactggcagcgagtagtgcctcgacgacgatgggcgcatttgttctctcggcgttaaaagtggcgggcgcgct

SEQ ID NO: 276072 - DNA, 75 bp, synthetic construct
  source 1..75: mol_type = other DNA
attgcggcgaagtcaaaaattacagatacaacggtctcaattccagtaactgccagttactatgtttatgataaa

SEQ ID NO: 276073 - DNA, 75 bp, synthetic construct
  source 1..75: mol_type = other DNA
aaatttacattttgaatggaccaataaaaacaacatcacgttgtcaaataatcagaccagtttcaccagtggtta

SEQ ID NO: 276074 - DNA, 75 bp, synthetic construct
  source 1..75: mol_type = other DNA
cacttttaaatatcactaacagcagtaaaggatacacaaatttaaaagaaattgcggcaaagtcaaaacttacag

SEQ ID NO: 276075 - DNA, 75 bp, synthetic construct
  source 1..75: mol_type = other DNA
gaccatctttagcgtcgccaacaaaaacgaaccaggaatagtttggttgccattttccattgctgatgcagcaaa

SEQ ID NO: 276076 - DNA, 75 bp, synthetic construct
  source 1..75: mol_type = other DNA
tttaaccgcagaacaatggttcagggcgcaggtttggtcatgcctgactggttgaaagagcagaacagaagaaag

SEQ ID NO: 276077 - DNA, 75 bp, synthetic construct
  source 1..75: mol_type = other DNA
atgaatattcgtataatgttatttatagtaatgatgatggttatgcctgtgagttatgctgcatgttatggcgtg

SEQ ID NO: 276078 - DNA, 75 bp, synthetic construct
  source 1..75: mol_type = other DNA
tcacgcagcggtaaggttcgctggaattgcccttgctgcggaaagattagctggcagctaaatccatacgatttc

SEQ ID NO: 276079 - DNA, 75 bp, synthetic construct
  source 1..75: mol_type = other DNA
cttttgctttagctgacaaggctaagcgccgcacgttcagcatcaatgagtttaaccgacgcaccatggttcagg

SEQ ID NO: 276080 - DNA, 75 bp, synthetic construct
  source 1..75: mol_type = other DNA
agcccaaaaagcctggaattgtggtcgagatatcgatcagcctgtttgcgctgatagcgtggatgcaatggctgt

SEQ ID NO: 276081 - DNA, 75 bp, synthetic construct
  source 1..75: mol_type = other DNA
atactatcacccctatgagcccgtcggatattattgttggactttataacgataccattaaattaaatttacatt

SEQ ID NO: 276082 - DNA, 75 bp, synthetic construct
  source 1..75: mol_type = other DNA
aaatagctacagaaatgcattggcacaaaatgcaggtgtctattcctttaatctgacattgtcatacaacccgat

SEQ ID NO: 276083 - DNA, 75 bp, synthetic construct
  source 1..75: mol_type = other DNA
ggcggcggttcagtgatgattaatggtgttgcgacattatccagtgcttcatcatcgacacgcgggagtgccgca

SEQ ID NO: 276084 - DNA, 75 bp, synthetic construct
  source 1..75: mol_type = other DNA
acaatcattacagatctacgagaaatagtgacaaacaataaagaaaaattcaacttgatattaaaatatctaata

SEQ ID NO: 276085 - DNA, 75 bp, synthetic construct
  source 1..75: mol_type = other DNA
atggatttcattcatttaaccgctgttgtcgctctattgctgataaaggaaggaccaaagaaaatcttaaatctt

SEQ ID NO: 276086 - DNA, 75 bp, synthetic construct
  source 1..75: mol_type = other DNA
cagatccctttggggaaaaaggtgagattcaatgggaagctccatcaaatagggcatcggggaaatttaaacaca

SEQ ID NO: 276087 - DNA, 75 bp, synthetic construct
  source 1..75: mol_type = other DNA
ttttttgatatgaatactgaaagttactacgcaaaatatacattaaattttttagctgcttttattattatgatt

SEQ ID NO: 276088 - DNA, 75 bp, synthetic construct
  source 1..75: mol_type = other DNA
ttaacaacagctggggggaagagcccccggtagaggaagatgccgatggtaataaactgtatcttcccaatggta

SEQ ID NO: 276089 - DNA, 75 bp, synthetic construct
  source 1..75: mol_type = other DNA
cgacactcaccacaggcaatattccggacagtaataatgttctggaattcatggcccaaaataatgtccgggtga

SEQ ID NO: 276090 - DNA, 75 bp, synthetic construct
  source 1..75: mol_type = other DNA
ctctgtgcttctttgtcgaattgctcttttagctctggagaaattcgcattctgaattgtggggattgcccgtcc

SEQ ID NO: 276091 - DNA, 75 bp, synthetic construct
  source 1..75: mol_type = other DNA
tagcaatgcgccgtaatacctcacaccacggcgctgatagtttttatcctttgggttctatgccgcgccgcttta

SEQ ID NO: 276092 - DNA, 75 bp, synthetic construct
  source 1..75: mol_type = other DNA
aaccagcccgctgattgcggaccaggtcatccggcagcggaaagatcgtgcatttctgaacactattattaatga

SEQ ID NO: 276093 - DNA, 75 bp, synthetic construct
  source 1..75: mol_type = other DNA
tcaatggatgaacgagctgcctgagcgcgttagccataaaacacagcatctggatgagaaaaaagagctcggtca

SEQ ID NO: 276094 - DNA, 75 bp, synthetic construct
  source 1..75: mol_type = other DNA
gatccggtcagcctggtgtgcgggcttattctgctgttcgccgaaacgtacgcgtggattgtgctggtgctcggc

SEQ ID NO: 276095 - DNA, 75 bp, synthetic construct
  source 1..75: mol_type = other DNA
tgtgttgtcctgcatagcaatgcgccgtagttactcacaccacggcgctggtgatggttactcctgctctttggc

SEQ ID NO: 276096 - DNA, 75 bp, synthetic construct
  source 1..75: mol_type = other DNA
ataaaggccaaagagttggtgagaaatttctctctgaacttgataaaagaacgcaacaaattggctttattattt

SEQ ID NO: 276097 - DNA, 75 bp, synthetic construct
  source 1..75: mol_type = other DNA
cgctgactggctgacagcgattgagatgtacaaaccaaatgtgcgcatcgtggaagttaatgtgccacgcgccgc

SEQ ID NO: 276098 - DNA, 75 bp, synthetic construct
  source 1..75: mol_type = other DNA
ggtagtggcagagtacgttgaaaacgaagagatccgcgaggcggtgctctctttggggatcgattatatgcaggg

SEQ ID NO: 276099 - DNA, 75 bp, synthetic construct
  source 1..75: mol_type = other DNA
caccggctacgccagctatgcgcggcttaaaaatgtgaatgccgatctgcttaaaattgacggcagttttatccg

SEQ ID NO: 276100 - DNA, 75 bp, synthetic construct
  source 1..75: mol_type = other DNA
tgtacaaaccaacagtgcgcatcgtggaagttaatgtgccacgcaccgctggcattcgcatcaaaggaggtgagt

SEQ ID NO: 276101 - DNA, 75 bp, synthetic construct
  source 1..75: mol_type = other DNA
caaaacgtcaaaaccgcggctcccgaaactcaacagatgatgggggctgaaaacattaaacacaggaggaaacat

SEQ ID NO: 276102 - DNA, 75 bp, synthetic construct
  source 1..75: mol_type = other DNA
aacgtcaaaaccgcggctcccgaaactcaacagatgatgggggctgaaaaccagagagaggagaaagcaggatga

SEQ ID NO: 276103 - DNA, 75 bp, synthetic construct
  source 1..75: mol_type = other DNA
ttttatccttacaggaaagatcaggtagttagtgaaccttttgaaggggaaattctaaagtatacagatattgat

SEQ ID NO: 276104 - DNA, 75 bp, synthetic construct
  source 1..75: mol_type = other DNA
aagaaacttatcagcaaataaaagaaaaaacaaagatgaaaccagaagattatatcaaaaaattgattgctgata

SEQ ID NO: 276105 - DNA, 75 bp, synthetic construct
  source 1..75: mol_type = other DNA
gaaggaatcggactcacatggaaattcaaaaataattcttataattataatcattacattattgctactattacc

SEQ ID NO: 276106 - DNA, 75 bp, synthetic construct
  source 1..75: mol_type = other DNA
atctcgaactgttcgagcatgttcagtcggcgaaaatttccccgacagtaaaacctttcccgactgcgcacccaa

SEQ ID NO: 276107 - DNA, 75 bp, synthetic construct
  source 1..75: mol_type = other DNA
ttgcaagactaccacctaacggtggatgggactgggttaagctctataacggctatttgaagaaccctagctcat

SEQ ID NO: 276108 - DNA, 75 bp, synthetic construct
  source 1..75: mol_type = other DNA
tgctgcgtcagaagttgtgggggcgtttgatgaacttaaaagtttggattggagtttagaaatcgcatctttaag

SEQ ID NO: 276109 - DNA, 75 bp, synthetic construct
  source 1..75: mol_type = other DNA
tcactgaagtacacctgggacagcgtcagccgcgatgccatccccaccacgaacgtggaataccagtacggtgac

SEQ ID NO: 276110 - DNA, 75 bp, synthetic construct
  source 1..75: mol_type = other DNA
tccgtacaccaacaaaccgtttgtgggtttttataccaccaagcgaaccggcggtatgctggtggattctcaggc

SEQ ID NO: 276111 - DNA, 75 bp, synthetic construct
  source 1..75: mol_type = other DNA
cgtctgctgaaagacagcgagggtaactatctgtggcgtccggggctggaactggggcagccgtcctctctggcg

SEQ ID NO: 276112 - DNA, 75 bp, synthetic construct
  source 1..75: mol_type = other DNA
gcgagcggtcagtctgggtcgtaaaaacttcctgttcttcggctctgaccatggtggtgagcggggagcgctact

SEQ ID NO: 276113 - DNA, 75 bp, synthetic construct
  source 1..75: mol_type = other DNA
agatgccggatattgctgccgatgcaaaagccattgcgtttggtaacttcaaacgtggctataccatcgttgatc

SEQ ID NO: 276114 - DNA, 75 bp, synthetic construct
  source 1..75: mol_type = other DNA
gacccgagcacagttaattgtgctaataatgtgtttggtggcatgattggtggtatttctaaaggcccgggtgga

SEQ ID NO: 276115 - DNA, 75 bp, synthetic construct
  source 1..75: mol_type = other DNA
atgaaattagagatgcttttcataaaataataattgagaatggagagggaggggaattttttatcaaagaattcc

SEQ ID NO: 276116 - DNA, 75 bp, synthetic construct
  source 1..75: mol_type = other DNA
gggacgtgcaaactgaatgacgtggatccagaaagctaccttcgccatgtgcttggcgtcatagcagactggccg

SEQ ID NO: 276117 - DNA, 75 bp, synthetic construct
  source 1..75: mol_type = other DNA
cggggatacacaaaacacatgctgcgcctgcgccgtaacggggagataaacggacaacatgtccctgaaattatt

SEQ ID NO: 276118 - DNA, 75 bp, synthetic construct
  source 1..75: mol_type = other DNA
attcacagcatcgataccgacattaagctcaaccgggcgttgtgggtgatggcagaaacgctgctggagagcctg

SEQ ID NO: 276119 - DNA, 75 bp, synthetic construct
  source 1..75: mol_type = other DNA
ttcttgtcgatgccggtcgtcgcattcagcgtgattaatattgtcctgacactaggctctttcttatggcttaat

SEQ ID NO: 276120 - DNA, 75 bp, synthetic construct
  source 1..75: mol_type = other DNA
ttcttgtcgatgccggtcgtcgcgttcagcgtgattaatattgtcctgacgctaggctctttcttatggcttaat

SEQ ID NO: 276121 - DNA, 75 bp, synthetic construct
  source 1..75: mol_type = other DNA
gccctggagcagatcggtcagttgtacgccatagaggcggatataaggggaatgccggcagagcagcggcttgct

SEQ ID NO: 276122 - DNA, 75 bp, synthetic construct
  source 1..75: mol_type = other DNA
atggctgatgttaaagatgtggaacaggtcgcgcaggagttgcagcggaagtttgacgattttaaggaaaaaaac

SEQ ID NO: 276123 - DNA, 75 bp, synthetic construct
  source 1..75: mol_type = other DNA
aggaaaagggaaaacttgctggtgaagtggaaaccctcaacggaaaactggctgagctggaaaatctcaaaaacg

SEQ ID NO: 276124 - DNA, 75 bp, synthetic construct
  source 1..75: mol_type = other DNA
cgaatttgccgaacaggaagaaattgcctttaccaccggcgatggcaccaagaagccaaaagggttcctggcgta

SEQ ID NO: 276125 - DNA, 75 bp, synthetic construct
  source 1..75: mol_type = other DNA
tattaatttgttttctcattcagggatgcataagtacagaagtatctgaaggagctttatataaatataaaaata

SEQ ID NO: 276126 - DNA, 75 bp, synthetic construct
  source 1..75: mol_type = other DNA
ccctgggcgcgcgcgtcaccagtgagctgacggccttcaggaacgttaaccgggtattcctggtcgggggagggg

SEQ ID NO: 276127 - DNA, 75 bp, synthetic construct
  source 1..75: mol_type = other DNA
atcagctgcggatgtcggggaaaaggcgcaaagcgtctctacgtccgctcactaccaaacagtgatacgttcatc

SEQ ID NO: 276128 - DNA, 75 bp, synthetic construct
  source 1..75: mol_type = other DNA
atattaacgagagcctttcagtaagcgagcctgagaaaagccgttataggtggcgacctctctcgggcggctttt

SEQ ID NO: 276129 - DNA, 75 bp, synthetic construct
  source 1..75: mol_type = other DNA
aaaaaccaaaaggttttctggcttatgagtccaccgatgaagatgacaagacccgtgcgtttggcaaacttcagc

SEQ ID NO: 276130 - DNA, 75 bp, synthetic construct
  source 1..75: mol_type = other DNA
agcaggaaaagggaaaacttgccggagaagtggaaaacctcaatgaaaaactgactgaactggaaaacctgaaaa

SEQ ID NO: 276131 - DNA, 75 bp, synthetic construct
  source 1..75: mol_type = other DNA
gatcaccctcggtggctcggattataaaaaactggtgaatctgggcggcactaagtccggatgggtgggggaaac

SEQ ID NO: 276132 - DNA, 75 bp, synthetic construct
  source 1..75: mol_type = other DNA
tcaaaactgggtctgattgaaccctttatgggggaaatctacggcaacccgcaggccacccagaaaatgctcgat

SEQ ID NO: 276133 - DNA, 75 bp, synthetic construct
  source 1..75: mol_type = other DNA
ggatcaacagtgagctggcgctggaatttgccgaacaggaagaaattgcctttaccagtggcgacggcagcaaaa

SEQ ID NO: 276134 - DNA, 75 bp, synthetic construct
  source 1..75: mol_type = other DNA
gtacggcttccggatgggtgggggaaacggatacgcgatcccagactgccacctccagactggagctgattgaac

SEQ ID NO: 276135 - DNA, 75 bp, synthetic construct
  source 1..75: mol_type = other DNA
cggtcatcaaacacggcgcggatatgggcattgcttttgatggcgattttgaccgctgtttcctgtttgacgaaa

SEQ ID NO: 276136 - DNA, 75 bp, synthetic construct
  source 1..75: mol_type = other DNA
actccgggaacggcgcagcgggtccggtagttgacgccatcgaagcccgctttaaagccctcggcgcacccgtgg

SEQ ID NO: 276137 - DNA, 75 bp, synthetic construct
  source 1..75: mol_type = other DNA
aatgtggaatcgcgcggtgatgtgccactgatggaagcgcgaacgcgaactctgctgacgttgctgaacgagtaa

SEQ ID NO: 276138 - DNA, 75 bp, synthetic construct
  source 1..75: mol_type = other DNA
aatggaaatcaccggggaagcgattaacactgaacaggaaaatccgcccagcacaaagcgaaatattaaggttaa

SEQ ID NO: 276139 - DNA, 75 bp, synthetic construct
  source 1..75: mol_type = other DNA
cgttgatcacctgttcggttatatcaacgtcaaaaacctcacgccgctcaagctggtgatcaactccgggaacgg

SEQ ID NO: 276140 - DNA, 75 bp, synthetic construct
  source 1..75: mol_type = other DNA
ggcggcacgccggtgatgtccaaaaccggtcacgcgtttattaaagagcgtatgcgcgaagaagacgccatctac

SEQ ID NO: 276141 - DNA, 75 bp, synthetic construct
  source 1..75: mol_type = other DNA
ccgcctcaccagcgaaaccttaaaactggcgctggcgaaaggtttacaggatgcgggcgtcgatgtgctggatat

SEQ ID NO: 276142 - DNA, 75 bp, synthetic construct
  source 1..75: mol_type = other DNA
cgaaaggtttacaggatgcgggcgtcgacgtgctggatattggcatgtccggcaccgaagagatctatttcgcca

SEQ ID NO: 276143 - DNA, 75 bp, synthetic construct
  source 1..75: mol_type = other DNA
accgaaccggtggtgcggttgaatgtcgaatcgaaagcggctcctaaattaatggaagaaaaaacggaactgctt

SEQ ID NO: 276144 - DNA, 75 bp, synthetic construct
  source 1..75: mol_type = other DNA
acgtatgcgcaaggaagacgccatctacggtggcgaaatgagcgcccaccattacttccgtgatttcgcttactg

SEQ ID NO: 276145 - DNA, 75 bp, synthetic construct
  source 1..75: mol_type = other DNA
gaatgtcgcgacgacacccgcaatgcggtcatcaaacacggcgcggatatgggcattgcctttgatggcgatttt

SEQ ID NO: 276146 - DNA, 75 bp, synthetic construct
  source 1..75: mol_type = other DNA
cggtggtggatgctatcgaagcccgtctgaaagcactcgacgcccccgtggaattaatcaaggtgcacaacacgc

SEQ ID NO: 276147 - DNA, 75 bp, synthetic construct
  source 1..75: mol_type = other DNA
gtaaacagttttcagaaaaaccagaagaagctggcgagacttcagcgacagttaagccgcaaggtcaaattcagc

SEQ ID NO: 276148 - DNA, 75 bp, synthetic construct
  source 1..75: mol_type = other DNA
cgctgtgactaaaaacctgacgcctgtccctatgcaaattgccaatcagcagggcttcattgaaagtgtcacaac

SEQ ID NO: 276149 - DNA, 75 bp, synthetic construct
  source 1..75: mol_type = other DNA
gtcgtcaggttgtgctgaacgttgaaatcctgagtatcaagaaatcaagccaggaacaggcgggaatcgactgga

SEQ ID NO: 276150 - DNA, 75 bp, synthetic construct
  source 1..75: mol_type = other DNA
atcatgccatgcaggccggaaacagccattatccaaaacctcggtttacaggaaacggtaaacaaggctggtaac

SEQ ID NO: 276151 - DNA, 75 bp, synthetic construct
  source 1..75: mol_type = other DNA
ggcttacttttgaaaatgactcaatccttgcctggattcgaaatactgactgggcaaagattggatttaaaaatg

SEQ ID NO: 276152 - DNA, 75 bp, synthetic construct
  source 1..75: mol_type = other DNA
tgttggtgttgctgttaggcgcgctgatgggaacgctcgccggggtgttacgtggcgtgtttaacgtgccaagtt

SEQ ID NO: 276153 - DNA, 75 bp, synthetic construct
  source 1..75: mol_type = other DNA
cgcggcgtgtttaacgtaccaagtttcgttgccacactggggctgtggagcgccctgcgcggaatggggctgttt

SEQ ID NO: 276154 - DNA, 75 bp, synthetic construct
  source 1..75: mol_type = other DNA
tataccgaagcggatcagtatggtacgacggttatcgcaggggaagatgcgcagaaagatgtcggtgaagcgaaa

SEQ ID NO: 276155 - DNA, 75 bp, synthetic construct
  source 1..75: mol_type = other DNA
ttatcaccaatgcagttatttgtactggcatagcaattcgcgttgtcactttcaagcgtaacggatctcaacacc

SEQ ID NO: 276156 - DNA, 75 bp, synthetic construct
  source 1..75: mol_type = other DNA
ttatcaccaatgcagttatttgtactggcatagcaattcgcgttgtcactttccggcgtaacggttcacaacacc

SEQ ID NO: 276157 - DNA, 75 bp, synthetic construct
  source 1..75: mol_type = other DNA
ccactacgcccctttacgcttaatctcagaactggtcggataagcatggggcatggtctggatgttacaggagat

SEQ ID NO: 276158 - DNA, 75 bp, synthetic construct
  source 1..75: mol_type = other DNA
gctgtcatgcttgccgccgttctgaaaacccgcggtaacgtcgtgcagattttcaaaataacgaggtctcaacat

SEQ ID NO: 276159 - DNA, 75 bp, synthetic construct
  source 1..75: mol_type = other DNA
gtgtgtggacgctgctcccgcgagtttgtctactccaatctgcgtgaacttaccgttcaccatatcgatcacgac

SEQ ID NO: 276160 - DNA, 75 bp, synthetic construct
  source 1..75: mol_type = other DNA
gcgctttaacctgcgctcctccaacaccgaaccggtggtgcggttgaatgtggaatcgcgcggtgatgtgccgct

SEQ ID NO: 276161 - DNA, 75 bp, synthetic construct
  source 1..75: mol_type = other DNA
agagtcgtggcctgcattttacgctggattacccggaactgctcacgcattccggtccatcgatcctttctcccg

SEQ ID NO: 276162 - DNA, 75 bp, synthetic construct
  source 1..75: mol_type = other DNA
gcctggagcgcgccctgcggcggatcaatatgttgcagcaggagatagatgaatattatgctcacttccgtgtgt

SEQ ID NO: 276163 - DNA, 75 bp, synthetic construct
  source 1..75: mol_type = other DNA
caatatgttgcagcaggaaatagacgaatattatgcccactttcgggtgtcgaataatttactggaactgcgtaa

SEQ ID NO: 276164 - DNA, 75 bp, synthetic construct
  source 1..75: mol_type = other DNA
atgatcgaatttgtttatccgcacacgcagctcgttgcgggtgtggatgaagtcggacgtgggccgttggttggc

SEQ ID NO: 276165 - DNA, 75 bp, synthetic construct
  source 1..75: mol_type = other DNA
tacacgcgaccatgctggcgatgcagcgtgccgtcgctgggctgcatattgcgccggaatatgtgttgattgatg

SEQ ID NO: 276166 - DNA, 75 bp, synthetic construct
  source 1..75: mol_type = other DNA
gtgggattacgttggcattgtgcgcacaacgaagcgcctggaacgcgccctgcggcggataaccatgctccaaca

SEQ ID NO: 276167 - DNA, 75 bp, synthetic construct
  source 1..75: mol_type = other DNA
gccaccaacgacatgcggctgttcagcctgctgcacctgctgggtcaggcgtcgctgcgcatggagcaagcgctg

SEQ ID NO: 276168 - DNA, 75 bp, synthetic construct
  source 1..75: mol_type = other DNA
gcaagccaccgactccaacgccagatcgtacacccacgaagaagtgatgcaggcgatgcaggaacgcatcgaccg

SEQ ID NO: 276169 - DNA, 75 bp, synthetic construct
  source 1..75: mol_type = other DNA
tggccagcgcctgggcaaggattgccgaggaagcggaattccccgctgactacgaggggactgccacaccacaag

SEQ ID NO: 276170 - DNA, 75 bp, synthetic construct
  source 1..75: mol_type = other DNA
ggggtgttgtttgatacccacattcaaccgaatggcgaagaaagctaccatctgacccgtgaaggtggacatagt

SEQ ID NO: 276171 - DNA, 75 bp, synthetic construct
  source 1..75: mol_type = other DNA
ggctgggtattaatctcactaaagaccccgtaccgatagtgcctgctgcacactacacctgtggcggcgtgatgg

SEQ ID NO: 276172 - DNA, 75 bp, synthetic construct
  source 1..75: mol_type = other DNA
acacctgataaaaaccaatcaatattacttacggcacttaatgcattaaagtcaaaggtatccaatattttattg

SEQ ID NO: 276173 - DNA, 75 bp, synthetic construct
  source 1..75: mol_type = other DNA
gtgagtcattaccatgagcagttcctgaaacaaaatccgttagccgtcctgggcgtgttacgcgatttgcacaaa

SEQ ID NO: 276174 - DNA, 75 bp, synthetic construct
  source 1..75: mol_type = other DNA
gcgacgagcacgcctggcaaatcgaactcaaccgacgacgcaccctgccagtcaatggcgtgtcggatgcattag

SEQ ID NO: 276175 - DNA, 75 bp, synthetic construct
  source 1..75: mol_type = other DNA
gtgattatgattttgaacaactccagtcactggctgaccgtcggctttatctcgctaaacaggccgggcgtaatc

SEQ ID NO: 276176 - DNA, 75 bp, synthetic construct
  source 1..75: mol_type = other DNA
aaatgtcgggataaaagtaatggattataaaggtgtagcagtcaagttcgatggggttacagctagctcagaata

SEQ ID NO: 276177 - DNA, 75 bp, synthetic construct
  source 1..75: mol_type = other DNA
gcgctggaaattgaccgcaccgacggcattagcctggcgttcgccgactggcgcttcaacctgcgttcctcgaac

SEQ ID NO: 276178 - DNA, 75 bp, synthetic construct
  source 1..75: mol_type = other DNA
cctggcgtaacggctggcacctgaatggacgcccggcacatgttgcagagatccgccccatattcgatggccgcg

SEQ ID NO: 276179 - DNA, 75 bp, synthetic construct
  source 1..75: mol_type = other DNA
gcctatatttcaagccagcgtaaccatctggaaaatgttgccaacgcgcttgataaacaactgcaatataacgtt

SEQ ID NO: 276180 - DNA, 75 bp, synthetic construct
  source 1..75: mol_type = other DNA
ctggtgctggattacggtagccagtatgaagataacattgcagtgcttgaggcgcggcaaatcaccattaccgcc

SEQ ID NO: 276181 - DNA, 75 bp, synthetic construct
  source 1..75: mol_type = other DNA
agcctgccgaattacaagaaggcatgcgcttcgctcagattgaagtcaacatggggcaatggggtgttttcactt

SEQ ID NO: 276182 - DNA, 75 bp, synthetic construct
  source 1..75: mol_type = other DNA
ggaatggcgggcagctgatcagcaaaatactggtaataaccccggataaactggtgctggatttcggcagtcaag

SEQ ID NO: 276183 - DNA, 75 bp, synthetic construct
  source 1..75: mol_type = other DNA
ttataaactgaccgacggcactaacaaaattccgttccaggctcgctatattgctgttgatggacaagccactgc

SEQ ID NO: 276184 - DNA, 75 bp, synthetic construct
  source 1..75: mol_type = other DNA
aaactggcggataacagtacgttacgtttccgcctgtatgatttgtcgttaggcggcatgggcgcattactggaa

SEQ ID NO: 276185 - DNA, 75 bp, synthetic construct
  source 1..75: mol_type = other DNA
ctgataataggacgttacgttttcgtctgtatgatttgtcattaggcggcatgggggcattactggaaacagcaa

SEQ ID NO: 276186 - DNA, 75 bp, synthetic construct
  source 1..75: mol_type = other DNA
atgcgattagcaagtcgttttggtcatgtaaaccagatgctgccgggttacttcaggttcgtctgccagaacggg

SEQ ID NO: 276187 - DNA, 75 bp, synthetic construct
  source 1..75: mol_type = other DNA
cgccacgacgccgggaggattacggtaaggacctgtggagtacttaccagaccatccaggagaacatgctgaaag

SEQ ID NO: 276188 - DNA, 75 bp, synthetic construct
  source 1..75: mol_type = other DNA
atgaatacccagtataattccagttatatattttcgattaccttagtcgctacattaggtggtttattatttggc

SEQ ID NO: 276189 - DNA, 75 bp, synthetic construct
  source 1..75: mol_type = other DNA
accgtcctggaaaatctgcagcaggaaggctttcagccgttctttgcctgccagacccgtgtgcgcgaccagagc

SEQ ID NO: 276190 - DNA, 75 bp, synthetic construct
  source 1..75: mol_type = other DNA
agcatcgacacggacattaagctcaatcgcgcgttatgggtgatggcggaaacgttgctggagagcctgcgctga

SEQ ID NO: 276191 - DNA, 75 bp, synthetic construct
  source 1..75: mol_type = other DNA
accgtcctggaaaatctgcagcgggaaggctttcagccgttcttcgcctgccagacccgcgtgcgcgaccagagc

SEQ ID NO: 276192 - DNA, 75 bp, synthetic construct
  source 1..75: mol_type = other DNA
gtgcgaaaagctggcgatcgaactgaccaactgttatgaacacaacggcttaccagacattaaaaacgtcaccgg

SEQ ID NO: 276193 - DNA, 75 bp, synthetic construct
  source 1..75: mol_type = other DNA
cagtcaaccaacaccatattctggctatctacagctaccagcaggagctggagatcaacgatccttactatctgg

SEQ ID NO: 276194 - DNA, 75 bp, synthetic construct
  source 1..75: mol_type = other DNA
cgtgccattcacagcatcgacaccgatattaagctcaaccgcgcattgtgggtaatggcagaaacgctgctggag

SEQ ID NO: 276195 - DNA, 75 bp, synthetic construct
  source 1..75: mol_type = other DNA
agccagaactatacgtacatccccaccatcaccgtactggaaagcctgcagcgggaaggctttcagccattcttc

SEQ ID NO: 276196 - DNA, 75 bp, synthetic construct
  source 1..75: mol_type = other DNA
ccatacccgtgccattcacagcattgacaccgacattaagctcaaccgcgcattgtgggtgatggcggaaaccct

SEQ ID NO: 276197 - DNA, 75 bp, synthetic construct
  source 1..75: mol_type = other DNA
accgtcttggaaaatctgcagcgggaaggctttcagccgttcttcgcctgccagacccgtgtgcgcgaccagagc

SEQ ID NO: 276198 - DNA, 75 bp, synthetic construct
  source 1..75: mol_type = other DNA
gaactatacctggatccccaccatcacagtgctggaaagcctgcagcgggaaggttttcagccattcttcgcctg

SEQ ID NO: 276199 - DNA, 75 bp, synthetic construct
  source 1..75: mol_type = other DNA
aggcgtattgctaactttgaacaaaaaactctatattactttattgttcttacattaaatagggtttttgggcaa

SEQ ID NO: 276200 - DNA, 75 bp, synthetic construct
  source 1..75: mol_type = other DNA
gcgtaggggaatttaacagcccggaagaagcccgtgcacagattcattatcagtaccgttatttctacccgcaaa

SEQ ID NO: 276201 - DNA, 75 bp, synthetic construct
  source 1..75: mol_type = other DNA
tcaatacgttatataagttggtgtggttgaaagaaaatcatccacaactgctggaacgcgcgcacgcctggctct

SEQ ID NO: 276202 - DNA, 75 bp, synthetic construct
  source 1..75: mol_type = other DNA
aattattctgctcaactctcatgacggtacctccagctaccagatgctgccggggtacttcaggttcgtctgcca

SEQ ID NO: 276203 - DNA, 75 bp, synthetic construct
  source 1..75: mol_type = other DNA
aaggctttcagccattcttctcctgccagacccgcgtacgtgacccgggccgccggggatacacaaaacacatgc

SEQ ID NO: 276204 - DNA, 75 bp, synthetic construct
  source 1..75: mol_type = other DNA
ccaccggcacgccaggcgctggcacaggcggcactgacttaccgttatggtgacgaacatcagcccgtcaccact

SEQ ID NO: 276205 - DNA, 75 bp, synthetic construct
  source 1..75: mol_type = other DNA
ctcattccgtcacaggcactgattgatactggtaacgaacagcgggtgattaccgttgatgccgacgggcgcttt

SEQ ID NO: 276206 - DNA, 75 bp, synthetic construct
  source 1..75: mol_type = other DNA
aaggtggtttccagcgggctgtttctgattgattccgaagccaatatttctggtgcgctggagcggatgcgctct

SEQ ID NO: 276207 - DNA, 75 bp, synthetic construct
  source 1..75: mol_type = other DNA
gcagcatgatcgcgggcggtattatttccgcggcaggttttacctggttttcccaggcggaacagccagcagaaa

SEQ ID NO: 276208 - DNA, 75 bp, synthetic construct
  source 1..75: mol_type = other DNA
gaacatcagcccgtcaccaccgccgacattctgacgccacgacgccgggaggattacggtaaggacctgtggagt

SEQ ID NO: 276209 - DNA, 75 bp, synthetic construct
  source 1..75: mol_type = other DNA
tgtttgaccggatagaggagaagcgtgatgccatgcagtcgctggtcctgacgccaccggcacgccaggcgctgg

SEQ ID NO: 276210 - DNA, 75 bp, synthetic construct
  source 1..75: mol_type = other DNA
aatatgctgaaaggcggaatttccggccgcagtgccagaggaaaacgtatccatacccgggccattcacagcatc

SEQ ID NO: 276211 - DNA, 75 bp, synthetic construct
  source 1..75: mol_type = other DNA
tccggtcgcagtgccagaggaaaacgtatccatacccgggccattcacagcatcgataccgacattaagctcaac

SEQ ID NO: 276212 - DNA, 75 bp, synthetic construct
  source 1..75: mol_type = other DNA
tgccatgcagtcgctgatgctgcctccccctgcgcaacaggcgctggcaaaggcggcgctgacttaccgctttgg

SEQ ID NO: 276213 - DNA, 75 bp, synthetic construct
  source 1..75: mol_type = other DNA
ccgcctccggcacagcaggcactggcaaaagctgcgctcatataccgctttggtgaagaccaccagccggtgacg

SEQ ID NO: 276214 - DNA, 75 bp, synthetic construct
  source 1..75: mol_type = other DNA
tgaagaccaccagccggtgactgaatcgcagatcctctcccctcgccgctggcaggatgagagcaatgacctgtg

SEQ ID NO: 276215 - DNA, 75 bp, synthetic construct
  source 1..75: mol_type = other DNA
gggaggactacagcgatgacctgtggaccgtctaccagcgcgtgcaggagaacctgatgaaaggtggtctgtcag

SEQ ID NO: 276216 - DNA, 75 bp, synthetic construct
  source 1..75: mol_type = other DNA
tattgatggcgatgtgaagctcaatcacgccctgtgggtgatggcagaaaatatgctcgagtttttcgggtgtta

SEQ ID NO: 276217 - DNA, 75 bp, synthetic construct
  source 1..75: mol_type = other DNA
gagaagtgcgtgttccgcaccggggaaatgtggtggacagagtcattgaaggggcttacgaggtggtgggggttt

SEQ ID NO: 276218 - DNA, 75 bp, synthetic construct
  source 1..75: mol_type = other DNA
cagcagccaaaaaatcagaaaccaacgcgaaaaatagcgaggcagcagcaaagagcagcgaaacaaacgctaaag

SEQ ID NO: 276219 - DNA, 75 bp, synthetic construct
  source 1..75: mol_type = other DNA
actctgctggagaacctgcagcgtgaaggattccagccattctttgcctgtcagacccgcgtcagggaccagagc

SEQ ID NO: 276220 - DNA, 75 bp, synthetic construct
  source 1..75: mol_type = other DNA
cgatgccatgcagtcgctgatgctgcctccccctgcgcaacaggcgctggcaaaggcggcgctgacgtaccgctt

SEQ ID NO: 276221 - DNA, 75 bp, synthetic construct
  source 1..75: mol_type = other DNA
gcgttaatctgatacgccgcgaccgcccccttacccatgaagaactgatgcagcatacccccagcgtgttcggtg

SEQ ID NO: 276222 - DNA, 75 bp, synthetic construct
  source 1..75: mol_type = other DNA
ccaccagcacaacacgccctggcaaacgccgctctccagtatcgctttggtgaaggacatcagccagtgcttgca

SEQ ID NO: 276223 - DNA, 75 bp, synthetic construct
  source 1..75: mol_type = other DNA
caatgtggtagagaaagtcattgaaggggcttacgaagtgctggggatatttgaccaagtggaggagaagcgcga

SEQ ID NO: 276224 - DNA, 75 bp, synthetic construct
  source 1..75: mol_type = other DNA
atcctgctcaacagccatgatggctcatcaagctaccagatgctgccggggctatttcgaggcgtctgtaccaac

SEQ ID NO: 276225 - DNA, 75 bp, synthetic construct
  source 1..75: mol_type = other DNA
gcggtgtatatactgcgggtttaaaaaaacatctggccattgatttgttggctcaaaaacttccggctgcatctg

SEQ ID NO: 276226 - DNA, 75 bp, synthetic construct
  source 1..75: mol_type = other DNA
aaggctttcagccattcttcgcctgccagacccgtgtgcgcgacccgggccgccgggggatacacaaaaacatat

SEQ ID NO: 276227 - DNA, 75 bp, synthetic construct
  source 1..75: mol_type = other DNA
ggtgggcgtgtttgaccggatagaggagaagcgtgatgccatgcagtcgctggtcctgccgccaccggcacgcca

SEQ ID NO: 276228 - DNA, 75 bp, synthetic construct
  source 1..75: mol_type = other DNA
acagcattgataccgacattaagctcaaccgcgcattgtgggtgatggcagaaacgatgctggagagcctgcgct

SEQ ID NO: 276229 - DNA, 75 bp, synthetic construct
  source 1..75: mol_type = other DNA
tgccatgcagtcgctgattctgccgccaccggcacgccaggcgctggtacaggcggcactgacttaccgttatgg

SEQ ID NO: 276230 - DNA, 75 bp, synthetic construct
  source 1..75: mol_type = other DNA
atgctgaaaggggggatttccggtcgcagtgccagaggaaaacgtatccacacccgtgccattcacagcatcgac

SEQ ID NO: 276231 - DNA, 75 bp, synthetic construct
  source 1..75: mol_type = other DNA
atagcattggcatcaactgttgagtatggtgagccagttgatggtgttgtcctggaaaaagatatccagctggtt

SEQ ID NO: 276232 - DNA, 75 bp, synthetic construct
  source 1..75: mol_type = other DNA
ttgaccggattgaggaaaagcgtgatgccatgcagtcgctgctcttaccgccaccggcacgccaggcgctggcac

SEQ ID NO: 276233 - DNA, 75 bp, synthetic construct
  source 1..75: mol_type = other DNA
attaccctgcttgataacctgcagcgtgaaggctttcagccattctttgcctgccagactcgagtgcgcgaccag

SEQ ID NO: 276234 - DNA, 75 bp, synthetic construct
  source 1..75: mol_type = other DNA
ctgttgagtcactcaataccgtctttgttgctccacaaaacttaagtgaatccgctgccaactccctgttagggt

SEQ ID NO: 276235 - DNA, 75 bp, synthetic construct
  source 1..75: mol_type = other DNA
cgaaagaagtcatccaagccggatttgatgatgttaaaaaggcctataaaaaaggcgctaagactgtaaacgata

SEQ ID NO: 276236 - DNA, 75 bp, synthetic construct
  source 1..75: mol_type = other DNA
agcaattattaaatgtcttaataaacaaaattatgaaaaaagcaactatcaaaaccctgttgagaagactaatga

SEQ ID NO: 276237 - DNA, 75 bp, synthetic construct
  source 1..75: mol_type = other DNA
caggcgctggcacaggcggcactgacttaccgttatggtgacgaacatcagcccgtcaccaccgccgacattctg

SEQ ID NO: 276238 - DNA, 75 bp, synthetic construct
  source 1..75: mol_type = other DNA
acctcccgcagtgaacggtatgcgtacattcccaccatcaccgtcctggaaaatctgcagcgggaaggctttcag

SEQ ID NO: 276239 - DNA, 75 bp, synthetic construct
  source 1..75: mol_type = other DNA
gccgacattctgacgccacaacgccgggaggattacggtaaggacctgtggagtacttatcagaccatccaggag

SEQ ID NO: 276240 - DNA, 75 bp, synthetic construct
  source 1..75: mol_type = other DNA
catgccgggcaaatcatggaccgcgatgcattgctgaagaacttacgtggcgtcagttatgatggtctggatcgt

SEQ ID NO: 276241 - DNA, 75 bp, synthetic construct
  source 1..75: mol_type = other DNA
atgaacactatcgtatttgtggaagatgatgcggaagtcggtgcactgattgccgcgtacctggcaaaacatgat

SEQ ID NO: 276242 - DNA, 75 bp, synthetic construct
  source 1..75: mol_type = other DNA
acgcgcaaagtggtctggaccgattgttcttctaacctctctcgatagcgatatgaaccacatcctggcactgga

SEQ ID NO: 276243 - DNA, 75 bp, synthetic construct
  source 1..75: mol_type = other DNA
caatcgcaaccaggtgccggaaattattcttctcaacagccatgacggttccagttcttatcagatgctgccagg

SEQ ID NO: 276244 - DNA, 75 bp, synthetic construct
  source 1..75: mol_type = other DNA
gcaccagctcttaccagatgttgcctggcctgttcagggctgtgtgccaaaacggtcttgtctgcggtgagtcgt

SEQ ID NO: 276245 - DNA, 75 bp, synthetic construct
  source 1..75: mol_type = other DNA
aacggtcttgtctgcggcgaatcctttggcgaggtacgggtgccgcacaagggggatgtggtgagccaggtgatt

SEQ ID NO: 276246 - DNA, 75 bp, synthetic construct
  source 1..75: mol_type = other DNA
ccggccgcagtgcaaaaggaaaacgtatccacacccgtgccattcacaacatcgacaccgatattaagctcaacc

SEQ ID NO: 276247 - DNA, 75 bp, synthetic construct
  source 1..75: mol_type = other DNA
gggaaggctttcagccattcttcgcctgccagacacgtgtgcgtgacccgggtcgccgggaatacacaaaacaca

SEQ ID NO: 276248 - DNA, 75 bp, synthetic construct
  source 1..75: mol_type = other DNA
attaccctgctggataatctccagcatgagggatttcgcccgttctttgcctgccagactcgcgttcgcgatgaa

SEQ ID NO: 276249 - DNA, 75 bp, synthetic construct
  source 1..75: mol_type = other DNA
gaccaaaggtcttcaggaaacgtctctgactccctacaaagccctgcatttcggcacgttgaccatcgatcccat

SEQ ID NO: 276250 - DNA, 75 bp, synthetic construct
  source 1..75: mol_type = other DNA
atgctgcaaaccagatacgtcgtgatcgtccgctgacacatgaagaactgatacgccatgtaccgagtatttttg

SEQ ID NO: 276251 - DNA, 75 bp, synthetic construct
  source 1..75: mol_type = other DNA
aacggctgcgtctgtgggcagtctctgggggaagtgcgtgttccgcaccggggaaatgtcgtggagacagtcatt

SEQ ID NO: 276252 - DNA, 75 bp, synthetic construct
  source 1..75: mol_type = other DNA
aacggctgcgtctgtggccagtctctgggggaagtgcgtgttccgcaccggggaaatgtcgtggatacagttatt

SEQ ID NO: 276253 - DNA, 75 bp, synthetic construct
  source 1..75: mol_type = other DNA
ctgcggtcagtctctgggggaagtgcgtgttccacaccggggaaatgtggtggagaaagttatcgaaggggctta

SEQ ID NO: 276254 - DNA, 75 bp, synthetic construct
  source 1..75: mol_type = other DNA
cacaccggggaaatgtggtggacagagtcattgaaggggcttacgaagtggtgggcgtttttgaccggattgagg

SEQ ID NO: 276255 - DNA, 75 bp, synthetic construct
  source 1..75: mol_type = other DNA
ctgccagaacgggtgcgtctgtggccagtctctgggggaagtccgtgttccacaccggggaaatgtggtggacag

SEQ ID NO: 276256 - DNA, 75 bp, synthetic construct
  source 1..75: mol_type = other DNA
ttccgttctgtttgttgtaacgggctggtctgcggcgagtcgtttggtgaagtacgggtaccgcataaaggcaat

SEQ ID NO: 276257 - DNA, 75 bp, synthetic construct
  source 1..75: mol_type = other DNA
gggaaatgtggtggacagagtcattgaaggggcttacgaggtggtgggcgtgtttgaccggatagaggagaagca

SEQ ID NO: 276258 - DNA, 75 bp, synthetic construct
  source 1..75: mol_type = other DNA
taagaaaaaaactgctcgataacgctgctgaaccgtatcgtattaaaactgtgcgtaacaaaggctatctttttg

SEQ ID NO: 276259 - DNA, 75 bp, synthetic construct
  source 1..75: mol_type = other DNA
aacggctgcgtctgtggtcagtctctgggggaagtgcgtgttccgcaccggggaaatgtcgtggacacagttatt

SEQ ID NO: 276260 - DNA, 75 bp, synthetic construct
  source 1..75: mol_type = other DNA
aacggctgcgtctgtggacagtctctgggggaagtgcgtgttccgcaccggggaaatgtcgtggaaacagtgatt

SEQ ID NO: 276261 - DNA, 75 bp, synthetic construct
  source 1..75: mol_type = other DNA
aatatgctgaaaggcgggatttccggtcgcagcgctaaaggaaaacgtatccacacccgggccattcacagcatc

SEQ ID NO: 276262 - DNA, 75 bp, synthetic construct
  source 1..75: mol_type = other DNA
accgtgctggaaagcctgcagcgggaaggttttcagccattcttcgcctgccagacctgtgtgcgcgacccgggc

SEQ ID NO: 276263 - DNA, 75 bp, synthetic construct
  source 1..75: mol_type = other DNA
accgacattctgacgccacgacgccgggaggattacggtaaggacctgtggagtacttatcagaccatccaggag

SEQ ID NO: 276264 - DNA, 75 bp, synthetic construct
  source 1..75: mol_type = other DNA
gatctgctggcgcgagtgaaattaagcaacgacaaactgaaagatttacgcgaacgtaaagcgggtctggaagcc

SEQ ID NO: 276265 - DNA, 75 bp, synthetic construct
  source 1..75: mol_type = other DNA
ctgttggcgcatcttccagcgtttcgacagcggcagaatccttaaaacgcctgcaaacgcgtcaggccgaacgtc

SEQ ID NO: 276266 - DNA, 75 bp, synthetic construct
  source 1..75: mol_type = other DNA
acatctcgataagccgatccctgtacgtcgcgcgctggcgctggcacatcacctggcgaatcgcaccatctggat

SEQ ID NO: 276267 - DNA, 75 bp, synthetic construct
  source 1..75: mol_type = other DNA
tgggagaattgcgtgttccacaccggggaaatgtggtggagaaagttattgaaggggcttacgaggtggtgggcg

SEQ ID NO: 276268 - DNA, 75 bp, synthetic construct
  source 1..75: mol_type = other DNA
tcaccaccgccggcattctgacaccacgacgccgggaggattacggtaaggacctgtggagtgcttatcagacca

SEQ ID NO: 276269 - DNA, 75 bp, synthetic construct
  source 1..75: mol_type = other DNA
tatgctgaaaggcgggatttccggtcgcagtgcaaaaggaaaacgtatccatacccgggccattcacagcattga

SEQ ID NO: 276270 - DNA, 75 bp, synthetic construct
  source 1..75: mol_type = other DNA
gatagaggagaagcgtgatgccatgcagtcgctggtcctgccgccaccggcacgccaggcgctggcacaggcggc

SEQ ID NO: 276271 - DNA, 75 bp, synthetic construct
  source 1..75: mol_type = other DNA
gcgtgttccgcaccggggaaatgtggtggacagagtcattgaaggggcttacgaagtggtgggcgtgtttgaccg

SEQ ID NO: 276272 - DNA, 75 bp, synthetic construct
  source 1..75: mol_type = other DNA
atgctgcgtctgcggcgggccggagagataaacggagaacatgtccctgaaattattctgctcaactctcatgac

SEQ ID NO: 276273 - DNA, 75 bp, synthetic construct
  source 1..75: mol_type = other DNA
atacgaaccagatacgccgtgaccgtccgctgacacacgaagaactgatgcactatgttcccagtattttcggtg

SEQ ID NO: 276274 - DNA, 75 bp, synthetic construct
  source 1..75: mol_type = other DNA
acccgtgccattcacaacatcgacaccgatattaagctcaaccgcgcattgtgggtaatggcagaaacgctgctg

SEQ ID NO: 276275 - DNA, 75 bp, synthetic construct
  source 1..75: mol_type = other DNA
gttttgcggtgagcgaagagaacaaacgcgttctgcatgaagtgtgcccgtggtggcgcggtcagaccgtacagg

SEQ ID NO: 276276 - DNA, 75 bp, synthetic construct
  source 1..75: mol_type = other DNA
acgaatctgacaagcagaaactgatgatcctgctgcgtaccttcttcgaggtgcataaaggctggcatattcagt

SEQ ID NO: 276277 - DNA, 75 bp, synthetic construct
  source 1..75: mol_type = other DNA
gatcctgctgcgcaccttctttgaagtgcataaaggctggcatattcagtacaacatcgtttcccgcgaaacatt

SEQ ID NO: 276278 - DNA, 75 bp, synthetic construct
  source 1..75: mol_type = other DNA
tctcggcggcgtgttgctcaaccagaaactgaatccagcaacgctggagaacgaatctgacaagcagaaactgat

SEQ ID NO: 276279 - DNA, 75 bp, synthetic construct
  source 1..75: mol_type = other DNA
ggaaatgtggtggacagagtcattgaaggggcttacgaggtggtgggtgtgtttgaccggatagaggagaagcgt

SEQ ID NO: 276280 - DNA, 75 bp, synthetic construct
  source 1..75: mol_type = other DNA
gcgggcgtaatgctaaaggcggacgaacgcatactcgcgccgtgcgtggcattgacggagatgtgaagcttaacc

SEQ ID NO: 276281 - DNA, 75 bp, synthetic construct
  source 1..75: mol_type = other DNA
tccgtgttccgcataaaggtgatattgtcggacaagttatcgagggagcgtatgaagtgctcggtatctttgata

SEQ ID NO: 276282 - DNA, 75 bp, synthetic construct
  source 1..75: mol_type = other DNA
tcgcgggctattccgccttcttcaccgcgctctctccagacgcacaggacgatatcatcgcccgtactgaacata

SEQ ID NO: 276283 - DNA, 75 bp, synthetic construct
  source 1..75: mol_type = other DNA
ctcctggatcgaaaaagagattgatgatctggcagatcgtccgggtgctggttttgcggtgagcgaagagaacaa

SEQ ID NO: 276284 - DNA, 75 bp, synthetic construct
  source 1..75: mol_type = other DNA
cgaaaccgccgtcggtggcaaatggggctatcgctgtaccggcatgagctttatcaacttcgcccgcgtgatgct

SEQ ID NO: 276285 - DNA, 75 bp, synthetic construct
  source 1..75: mol_type = other DNA
ttgatatcgtgctggtggcagtcagtgaacacattgaacgtttcgctgccctggcgcgtgaaatggcagccactg

SEQ ID NO: 276286 - DNA, 75 bp, synthetic construct
  source 1..75: mol_type = other DNA
tgaacatattgaacgtttcgctgccctggcgcgtgaaatggccgcgaccgaaacccgcgaaagccgtcgcgatga

SEQ ID NO: 276287 - DNA, 75 bp, synthetic construct
  source 1..75: mol_type = other DNA
cgggtacgtcgtctatctccgctaacgtaccgtttggcgcgcagacgatggcaacgccggacggacgtaaagcgc

SEQ ID NO: 276288 - DNA, 75 bp, synthetic construct
  source 1..75: mol_type = other DNA
tcagaaccatgccgaccgtctgggcattgaaggcagcattcgccgcattgtctacgaacacgatctcacactaaa

SEQ ID NO: 276289 - DNA, 75 bp, synthetic construct
  source 1..75: mol_type = other DNA
gtccactattctctcaggaatttcaggatctgccagacggtgctgagacgacgcttacgggcattgaaggcagca

SEQ ID NO: 276290 - DNA, 75 bp, synthetic construct
  source 1..75: mol_type = other DNA
tccggtctatatcaatccacaaggggtggcaaaattactgcgtaatgaaacattggccagcttgccaaaaaacct

SEQ ID NO: 276291 - DNA, 75 bp, synthetic construct
  source 1..75: mol_type = other DNA
ttacgatgattggtatcatcgcggtgcttctgtttctggtcgtggaatataggaatgattggcattatacgcaat

SEQ ID NO: 276292 - DNA, 75 bp, synthetic construct
  source 1..75: mol_type = other DNA
ctgcaaatcgatctcaatgagccggacctctttctcgacagcgactctctaagccagcttcccaaagatctcctt

SEQ ID NO: 276293 - DNA, 75 bp, synthetic construct
  source 1..75: mol_type = other DNA
attgaaggcagcattcgtcgcattgtctatgaacacgatctcacgctgaaagataagctcttttcgtcactctta

SEQ ID NO: 276294 - DNA, 75 bp, synthetic construct
  source 1..75: mol_type = other DNA
tgtgtctgttttccggcgggttagcgatgtatggctacttgcgctggttacgcaatgaaaaagcgatgcgtctga

SEQ ID NO: 276295 - DNA, 75 bp, synthetic construct
  source 1..75: mol_type = other DNA
aggcatccagagagctactgaaatcagcacgagccaaaggactgaatgcaaaaggcaagttgctaccatttgatc

SEQ ID NO: 276296 - DNA, 75 bp, synthetic construct
  source 1..75: mol_type = other DNA
atggcaaaagtaatctttgaatttaaccgcatggaagatgttgagtttcagaaaaaaggaggtttctttgtagga

SEQ ID NO: 276297 - DNA, 75 bp, synthetic construct
  source 1..75: mol_type = other DNA
tgaatccgccagcgtagatgccagtttcgattttacgccggtatggaacagtatgcctgccggggccagcttctg

SEQ ID NO: 276298 - DNA, 75 bp, synthetic construct
  source 1..75: mol_type = other DNA
agtagcatcaagctaaataatgaaaccattcctgtttatcagttgcgctataacggcaataacgccctgatgttc

SEQ ID NO: 276299 - DNA, 75 bp, synthetic construct
  source 1..75: mol_type = other DNA
atgatgcaacatcaggtcaatgtatcggctcgcttcaatccagaaaccttagaacgtgttttacgcgtggtgcgt

SEQ ID NO: 276300 - DNA, 75 bp, synthetic construct
  source 1..75: mol_type = other DNA
acggctctacaccgcatgccagttcgctgacgggtctcgatctgaacagcacgatgcatggcgggccagattctg

SEQ ID NO: 276301 - DNA, 75 bp, synthetic construct
  source 1..75: mol_type = other DNA
atgaaaatttcccgccttggagaagcgcccgattaccgcttctcgctggctaatgagcgtacttttctggcgtgg

SEQ ID NO: 276302 - DNA, 75 bp, synthetic construct
  source 1..75: mol_type = other DNA
atatggtggatctcattacttacacgaatcagatgcctaaagaaggagaaactctggaagcacctgccttcaaaa

SEQ ID NO: 276303 - DNA, 75 bp, synthetic construct
  source 1..75: mol_type = other DNA
aaagctcatgcggatgcaattgaattagtaagaaaaggtatagatcctcgtcatattagaaaaaatgaaaaacaa

SEQ ID NO: 276304 - DNA, 75 bp, synthetic construct
  source 1..75: mol_type = other DNA
cctcggggcaatcgctgtagtcgcccttcttggtgctgattcggacctgcgtccatccttcggcggcaaaccgct

SEQ ID NO: 276305 - DNA, 75 bp, synthetic construct
  source 1..75: mol_type = other DNA
ggaaacagtttactacgcgattgagtttggtaagaaaaatggtattgaagtgttattaaatccggctccggcatt

SEQ ID NO: 276306 - DNA, 75 bp, synthetic construct
  source 1..75: mol_type = other DNA
aagtaggtgatgatatttttgcggataatactattcgtaatcttgaatcttggggaattaataccacttatgttg

SEQ ID NO: 276307 - DNA, 75 bp, synthetic construct
  source 1..75: mol_type = other DNA
gcgcttattaatccgaacatccgggttaacgggctcattcagctggatcaggcttcggtgtatcgtaccgcgttg

SEQ ID NO: 276308 - DNA, 75 bp, synthetic construct
  source 1..75: mol_type = other DNA
gaaatgcctgctaccgtattcccccgtggccgggtgctgttcggcatgacacggcaccttatggataacgtggcc

SEQ ID NO: 276309 - DNA, 75 bp, synthetic construct
  source 1..75: mol_type = other DNA
aggcgcgaccgaaggccttacccctgaaatgcctgctaccgtattcccccgtggccgggtgctgttcggcatgac

SEQ ID NO: 276310 - DNA, 75 bp, synthetic construct
  source 1..75: mol_type = other DNA
actttacatccgtatatgctttctttaataaaaacacaacgtgaattcactgaaggtgcatatgtttttggttct

SEQ ID NO: 276311 - DNA, 75 bp, synthetic construct
  source 1..75: mol_type = other DNA
cagcctgccagcatcgcaacggatggcgtttatattgtgcgcgggattatgtacactggcgacacaaggggccag

SEQ ID NO: 276312 - DNA, 75 bp, synthetic construct
  source 1..75: mol_type = other DNA
atcgcgccggaggtgtcggcaagcgacgtcgggactgtgcgggaagttgacgcggcggacgtgggccagagtgat

SEQ ID NO: 276313 - DNA, 75 bp, synthetic construct
  source 1..75: mol_type = other DNA
gcatgggccaggcggaagaagttgccgggcttgccagttatttaatgtctgatattgcgggttacgtcacccgcc

SEQ ID NO: 276314 - DNA, 75 bp, synthetic construct
  source 1..75: mol_type = other DNA
aaggaaagtgttgtgtgttgcccgcgaacagattcgttctcaacgtaaagccaatcagattaaaagtgaaagaac

SEQ ID NO: 276315 - DNA, 75 bp, synthetic construct
  source 1..75: mol_type = other DNA
gcctactatcgagaactcgctgaagatgctgagttaaacgctgttgctgatgagcgcatgaaaaaaccggaaatt

SEQ ID NO: 276316 - DNA, 75 bp, synthetic construct
  source 1..75: mol_type = other DNA
atcaggaactggttaagctggtcgccgaacgcagcaaccagaaactgcacgatattgatctggatagctacttat

SEQ ID NO: 276317 - DNA, 75 bp, synthetic construct
  source 1..75: mol_type = other DNA
agggtctttacttttcgactttttttataaaaaggtcagattccatatagggtgcttgtttataagaaaacaact

SEQ ID NO: 276318 - DNA, 75 bp, synthetic construct
  source 1..75: mol_type = other DNA
agacgagcaaaaatattagcatcaaaaaattatattatctggaggatggtaagactggtaaatagaaaaagaata

SEQ ID NO: 276319 - DNA, 75 bp, synthetic construct
  source 1..75: mol_type = other DNA
tgcgaaatcccggcagcaagcgcaaccgcagcccgttgccagtaaaaatgaagaagaggactacagcaatgggat

SEQ ID NO: 276320 - DNA, 75 bp, synthetic construct
  source 1..75: mol_type = other DNA
ttgcctgtacggtgattggtttaattctcggtgatttaaaaaccggaataatactcggtggtacgctggaattga

SEQ ID NO: 276321 - DNA, 75 bp, synthetic construct
  source 1..75: mol_type = other DNA
gaactgtatgaaaggatgcttgatgctctggatgaccaggaactggtgaaactggttactgaacgcagcaatcag

SEQ ID NO: 276322 - DNA, 75 bp, synthetic construct
  source 1..75: mol_type = other DNA
gaaaagattctcgatgccctagacgatcaggaactggttaatctggtcgccgaacgcagcaaccagaagctgcac

SEQ ID NO: 276323 - DNA, 75 bp, synthetic construct
  source 1..75: mol_type = other DNA
gaaaagatgctcgatgccctggacgatcaggaactggttaagctggtcgccgaacgcagcaaccagaaactgcac

SEQ ID NO: 276324 - DNA, 75 bp, synthetic construct
  source 1..75: mol_type = other DNA
ccagtgcaagtgtcagtgaactgaaaaaaaatccgatggctacagtcagtgccggagatggtttccctgtcgcta

SEQ ID NO: 276325 - DNA, 75 bp, synthetic construct
  source 1..75: mol_type = other DNA
atgctcggcggcacgctggaattgatagcccttggctggatgaacgtcggtgcggcgcaatctcctgattcagcg

SEQ ID NO: 276326 - DNA, 75 bp, synthetic construct
  source 1..75: mol_type = other DNA
tcgacgacgattcgtcgtggccagatttctccgtggtggtgcatggcgatctctacgtgggccatgtgctcatcg

SEQ ID NO: 276327 - DNA, 75 bp, synthetic construct
  source 1..75: mol_type = other DNA
cgcggtagcctgcgcctggttgagtgcctgctatcagcaaaaccgccatctgcagctcactctggatgaaattga

SEQ ID NO: 276328 - DNA, 75 bp, synthetic construct
  source 1..75: mol_type = other DNA
tggtgatattttcgtacaaaaggctcctgcggcaacaattgaaacacttactaaagcaattcaacaggttacaca

SEQ ID NO: 276329 - DNA, 75 bp, synthetic construct
  source 1..75: mol_type = other DNA
ctttttgttaatcagatattaactggtaaaccgattacaatcaccgatccaaatatgactcgtttcatgatgaca

SEQ ID NO: 276330 - DNA, 75 bp, synthetic construct
  source 1..75: mol_type = other DNA
aaaaaggccgccagatagcctgtgcattactggaagatttaatggaagccggtccactcaaagccgcgccgtcgc

SEQ ID NO: 276331 - DNA, 75 bp, synthetic construct
  source 1..75: mol_type = other DNA
cgtggcctgtgcatggctgaccctgtgcgaacgccagcgccgctacccgaacctcaccctcgacgcgctggaaag

SEQ ID NO: 276332 - DNA, 75 bp, synthetic construct
  source 1..75: mol_type = other DNA
atgaaatgctgtgaatctcatctggtacttcgtgccgctctgtatcgccgtgccgtagcctgtgcctggctgact

SEQ ID NO: 276333 - DNA, 75 bp, synthetic construct
  source 1..75: mol_type = other DNA
ccattattcatcaggcaagcagttaatggtcaaccaataaccataactgatccaaatatgacgcgttttatgatg

SEQ ID NO: 276334 - DNA, 75 bp, synthetic construct
  source 1..75: mol_type = other DNA
ctgtttattaatcaaatacttgaaggacgcccaatcactatcaccgatccgtgtatgactcgattcatgatgact

SEQ ID NO: 276335 - DNA, 75 bp, synthetic construct
  source 1..75: mol_type = other DNA
tgatgaaatggttgctcttcttagaaaattagattacatcaataaaattgaggctggtgaaaaggcagatcccga

SEQ ID NO: 276336 - DNA, 75 bp, synthetic construct
  source 1..75: mol_type = other DNA
cattgaaggtatgaagacacttctgcgcaaacttgatttcatccgtgaaattgaaaatggtcatctgtttattcc

SEQ ID NO: 276337 - DNA, 75 bp, synthetic construct
  source 1..75: mol_type = other DNA
taacaggtggtactggctcattcggtaatgctgttcttcaacggtttttaaatacagaaataaatgagataagaa

SEQ ID NO: 276338 - DNA, 75 bp, synthetic construct
  source 1..75: mol_type = other DNA
actctcataatacacaacggttgaacgttgaaggcatgaaaacgcttttgctcaaattggattttattcgtgcac

SEQ ID NO: 276339 - DNA, 75 bp, synthetic construct
  source 1..75: mol_type = other DNA
tttgagctcgaaaaagccgatccggattttatggcggagcgcgaggatgttgtcagcgacgaaggacgatttgaa

SEQ ID NO: 276340 - DNA, 75 bp, synthetic construct
  source 1..75: mol_type = other DNA
cgtccgcccggcctggggctcgttcgcgcagctcgagaaagccgatccggactttatggcggagcgcgaggatgt

SEQ ID NO: 276341 - DNA, 75 bp, synthetic construct
  source 1..75: mol_type = other DNA
tttgtttagcgtacaggggggagagattcgttctcgtggctttgaaattgaggcgaaagcagctctcaacgctaa

SEQ ID NO: 276342 - DNA, 75 bp, synthetic construct
  source 1..75: mol_type = other DNA
aataacgatggcgtatccgcgctggccgcagttgttgcctatggcatcatggttaaaaccatggccgtggttgcg

SEQ ID NO: 276343 - DNA, 75 bp, synthetic construct
  source 1..75: mol_type = other DNA
aaggagacagcatcatcctgcgtcccgtccagccgaactggggctcattcgcgcagctcgaaaaagccgatccgg

SEQ ID NO: 276344 - DNA, 75 bp, synthetic construct
  source 1..75: mol_type = other DNA
aatgatatcaatgccagctttggatctgcaccatccatcgatctttataacaaataccatcctgaatactttgca

SEQ ID NO: 276345 - DNA, 75 bp, synthetic construct
  source 1..75: mol_type = other DNA
tgcgaaatctactaaaatttatactaaaaatcatatagattggattgttgtccctcatggagaaattaaaaccgg

SEQ ID NO: 276346 - DNA, 75 bp, synthetic construct
  source 1..75: mol_type = other DNA
actcgaagtatcgcgaatccgttactcaattcgcgaacctaaagacggcatctgcgggtgcgtatggttagaaca

SEQ ID NO: 276347 - DNA, 75 bp, synthetic construct
  source 1..75: mol_type = other DNA
aatacagacatcttcctgattatctgatttttgataaagatcgaggtgtttataaattcacacttattaccggaa

SEQ ID NO: 276348 - DNA, 75 bp, synthetic construct
  source 1..75: mol_type = other DNA
acgagttctttggatgaaattaacgatcagcagttcacctggagaggtggcattaattatctgttcgataacggt

SEQ ID NO: 276349 - DNA, 75 bp, synthetic construct
  source 1..75: mol_type = other DNA
aaagagattcccttattgaaaaaataatggcgcttagaaaaagaacttgcagaagaaaaaataaaatccaatacc

SEQ ID NO: 276350 - DNA, 75 bp, synthetic construct
  source 1..75: mol_type = other DNA
tgttggtgttaacgtaaataacctgttcgaccgcgaatatgtctccagttgctatcgtgattatgcatgttactg

SEQ ID NO: 276351 - DNA, 75 bp, synthetic construct
  source 1..75: mol_type = other DNA
ttgcctatggcatcatggtaaaaaccatggccgtggttgcgccgctggtactgcatttacctgctgaagaaattg

SEQ ID NO: 276352 - DNA, 75 bp, synthetic construct
  source 1..75: mol_type = other DNA
acctgattcatagtcggcaccagaaacaaccaaaaccaatgagtaaagacaacctgagcgattactttgccaaag

SEQ ID NO: 276353 - DNA, 75 bp, synthetic construct
  source 1..75: mol_type = other DNA
gaaattggcgtacgaatggcggttggcgcgagacgcagcgacattatgcaacagtttattattgaggccgtattg

SEQ ID NO: 276354 - DNA, 75 bp, synthetic construct
  source 1..75: mol_type = other DNA
acccacgatatgaaggtcgcccggcacgcaaagcgaatcattgagctgtgtgatggcgaaatcatcgctgatagt

SEQ ID NO: 276355 - DNA, 75 bp, synthetic construct
  source 1..75: mol_type = other DNA
ggtatcgatacaaaaacattactgggacataaagtccaggcaaccaccgatcgctataacgatactcgtggtcag

SEQ ID NO: 276356 - DNA, 75 bp, synthetic construct
  source 1..75: mol_type = other DNA
aaaaatggagacattgcagctacaacccacaaagaaaaagtgcgaatggctgcatacctggtttcccgcctggga

SEQ ID NO: 276357 - DNA, 75 bp, synthetic construct
  source 1..75: mol_type = other DNA
cgcgggatctggctggaataattccaccagccggaaaaacaccgccaacatttcatgaacaacgctccctgtcag

SEQ ID NO: 276358 - DNA, 75 bp, synthetic construct
  source 1..75: mol_type = other DNA
actgttaaagattcaaccgtgacctctggttcatggactgatgaaggtactactggttggttcggtaatacaggt

SEQ ID NO: 276359 - DNA, 75 bp, synthetic construct
  source 1..75: mol_type = other DNA
agccgttattgcacatcctgctgctgataacgcaatgcaaaccactgcaacattcgataattctacactgatggg

SEQ ID NO: 276360 - DNA, 75 bp, synthetic construct
  source 1..75: mol_type = other DNA
tagctgtagttgcacatccgaatgctgataatgctatgcagaccaccgctgactttagtaactctactttgatgg

SEQ ID NO: 276361 - DNA, 75 bp, synthetic construct
  source 1..75: mol_type = other DNA
gggatgatgacaaagaacaattgaaggcatggctgctttatgctagggctcttaaatcgcttgatttcagtcagg

SEQ ID NO: 276362 - DNA, 75 bp, synthetic construct
  source 1..75: mol_type = other DNA
atgatcctgagagaccttaataatgaatttaaaaacactcatgagtacaataagttcgtacgggaaatgaaaaat

SEQ ID NO: 276363 - DNA, 75 bp, synthetic construct
  source 1..75: mol_type = other DNA
tgataatgctatgcagaccaccgctgactttagtaactctactttgatgggcgtggatttgcccctatatttcca

SEQ ID NO: 276364 - DNA, 75 bp, synthetic construct
  source 1..75: mol_type = other DNA
gttgcgcgtcaacgcaatacccgtgcgagtgtccgaccccgccggaaccgccagccgcattgatggagccacctg

SEQ ID NO: 276365 - DNA, 75 bp, synthetic construct
  source 1..75: mol_type = other DNA
aatcagcaaaaagtggtgatcggtcgttgggtctatgccaccagccagattttgttgctcgacgagccaacgcgc

SEQ ID NO: 276366 - DNA, 75 bp, synthetic construct
  source 1..75: mol_type = other DNA
atgaaaaattcaaaagcaatattgcaggtgccgggcacaatgaaaattatttcagcagaaatacctgtgcctaaa

SEQ ID NO: 276367 - DNA, 75 bp, synthetic construct
  source 1..75: mol_type = other DNA
tatttatcgcgatggtatacaaggcaaagaagccattgtcgtcaaacatgctctggcccgcccgcaggatagtac

SEQ ID NO: 276368 - DNA, 75 bp, synthetic construct
  source 1..75: mol_type = other DNA
aaatcagcagattaagcacggattttatcgtgatttaccgcgactctggatgcagcctgatggggacgctgcact

SEQ ID NO: 276369 - DNA, 75 bp, synthetic construct
  source 1..75: mol_type = other DNA
gcctgctgggggcagggcgcagtgaattgctgaaggcgattgttgggctggagacgtatgaacagggcgaaattg

SEQ ID NO: 276370 - DNA, 75 bp, synthetic construct
  source 1..75: mol_type = other DNA
ggcacgttctcgcaggagtttcactcgccggtcaatgtggatgagctgatgtccgccattctgtctgtgcactga

SEQ ID NO: 276371 - DNA, 75 bp, synthetic construct
  source 1..75: mol_type = other DNA
atgtgcctgtcagaactgcaggccgggctgaacgagggtcagccgctgtttccgacacatgctttatgtattcgc

SEQ ID NO: 276372 - DNA, 75 bp, synthetic construct
  source 1..75: mol_type = other DNA
tttatcaagcattagcgagtcagaaggtgaattagcgaaattatatggtatcgccacatcgtcagatggtatggc

SEQ ID NO: 276373 - DNA, 75 bp, synthetic construct
  source 1..75: mol_type = other DNA
atgggcagcaaaacttggggggctttgccctgcctgacggcgaatttgctggtgcaggctatctgtgtgctgctt

SEQ ID NO: 276374 - DNA, 75 bp, synthetic construct
  source 1..75: mol_type = other DNA
gttcaagctgctccacaactggagcaagatgttcgttatcagcgattaaatgaatattctcgaaggcgcagcgtg

SEQ ID NO: 276375 - DNA, 75 bp, synthetic construct
  source 1..75: mol_type = other DNA
tggcagctaaacgtacaggccaggcttttcaggcctatgtagcgccgatgctgccaattccaaaaaacagccgct

SEQ ID NO: 276376 - DNA, 75 bp, synthetic construct
  source 1..75: mol_type = other DNA
cgtatacctcacgttatatcggctcactggtcgcggatttccaccgtaacctgctgaaaggcggtatttatctct

SEQ ID NO: 276377 - DNA, 75 bp, synthetic construct
  source 1..75: mol_type = other DNA
aatatctgggaaaaacaggttatgaattaccggcggaactggatgccgacaaagcattattagcccgcattgaat

SEQ ID NO: 276378 - DNA, 75 bp, synthetic construct
  source 1..75: mol_type = other DNA
ccaagtttgccaaagaggccccctcgaaagcctttggcatggtgatggcctcgctcggcttggcacctgtgtacg

SEQ ID NO: 276379 - DNA, 75 bp, synthetic construct
  source 1..75: mol_type = other DNA
gtcagaatgctggcggaaagctgcccgcggtttattggcatcaaagatactgtggactgtgcgtctcacacccgg

SEQ ID NO: 276380 - DNA, 75 bp, synthetic construct
  source 1..75: mol_type = other DNA
atggtgtcgcaaaacctgacgctgcaagcggcagaaacgtggctcgacaacatcgcgcatctgctgcgtttactg

SEQ ID NO: 276381 - DNA, 75 bp, synthetic construct
  source 1..75: mol_type = other DNA
atggaaaaggtgaagacgttaattatcgccgccattgtttgtattgttgttgggcttgttgccgcgcttagtcat

SEQ ID NO: 276382 - DNA, 75 bp, synthetic construct
  source 1..75: mol_type = other DNA
ttggggttggaggtgaacaggccggtgctgtgttgatgacggctgaatatgctgaacccaaacgccgtggttttt

SEQ ID NO: 276383 - DNA, 75 bp, synthetic construct
  source 1..75: mol_type = other DNA
tgctgttggctttctggctcgaccactggggggaattgtatttgggcatataggtgataaagtcggaaggaaaaa

SEQ ID NO: 276384 - DNA, 75 bp, synthetic construct
  source 1..75: mol_type = other DNA
agtcatgaacctgtttgcgccacatatccagaagccaaagctgtgtattatccattggataatcaggatgcctgt

SEQ ID NO: 276385 - DNA, 75 bp, synthetic construct
  source 1..75: mol_type = other DNA
gccgaacctgctgccgccgaagacgtgccacctttgagtgacgaggacatgctccatgttgcagaagaggagggt

SEQ ID NO: 276386 - DNA, 75 bp, synthetic construct
  source 1..75: mol_type = other DNA
agaacgatgtgccgttttgatgcactggataaagccagttttgagatggaggatgagtatagaggtgcagataaa

SEQ ID NO: 276387 - DNA, 75 bp, synthetic construct
  source 1..75: mol_type = other DNA
atgtttatacgccatcaaggtgtcgtaatacagataatatctctccatataaatgagaaggcgtttatgaaaact

SEQ ID NO: 276388 - DNA, 75 bp, synthetic construct
  source 1..75: mol_type = other DNA
aatccgtggtttttgatgccagccataacgtgtttgactacaaagtattacgaaagaactttaatgagcctctgg

SEQ ID NO: 276389 - DNA, 75 bp, synthetic construct
  source 1..75: mol_type = other DNA
ctatcagatgaagcgctaaaagcccgtgtagcatgttctaagaacgttagtgttaagaatggtgaaagcaccttc

SEQ ID NO: 276390 - DNA, 75 bp, synthetic construct
  source 1..75: mol_type = other DNA
cgacactctggaaagctggcgtgaccagaagcagattatttctgtcatctgtcgagatggtattaaaattgatga

SEQ ID NO: 276391 - DNA, 75 bp, synthetic construct
  source 1..75: mol_type = other DNA
tggctcagtgctgggactgatggcgtttttctattttttcgcccgtctgacgttgttttgcgcggcgtggattgc

SEQ ID NO: 276392 - DNA, 75 bp, synthetic construct
  source 1..75: mol_type = other DNA
tagcgttaaaaatggtgtaagcaccttctcagatgccgctaatgagcaagcttcaaaggtgcttaagtcgggtaa

SEQ ID NO: 276393 - DNA, 75 bp, synthetic construct
  source 1..75: mol_type = other DNA
acaagtgaacttaccgacgaacagttaaaagcccgtgtaaattgctctaggaacgttagcattaggaatggtgaa

SEQ ID NO: 276394 - DNA, 75 bp, synthetic construct
  source 1..75: mol_type = other DNA
tgctgttattacccaatttaaggcatctaaagaacataccatttcaaatggtcttcgtattcagatgaccttcca

SEQ ID NO: 276395 - DNA, 75 bp, synthetic construct
  source 1..75: mol_type = other DNA
tagtcaggcagcgtgtaaggctgcctgcaacgcctttaccgatgctgtactggaaatcgcgcgtaatccaatcca

SEQ ID NO: 276396 - DNA, 75 bp, synthetic construct
  source 1..75: mol_type = other DNA
ctcgctgtatgcgggcgctgcacacggaccgtcaccgactgccggtgaagtgctgattatgctcggtgggccaaa

SEQ ID NO: 276397 - DNA, 75 bp, synthetic construct
  source 1..75: mol_type = other DNA
tcatggaatgagaattatgtcagtaagtcaaaactgctcaccctgcagtcgacgggcggtgtggttgagaaaacg

SEQ ID NO: 276398 - DNA, 75 bp, synthetic construct
  source 1..75: mol_type = other DNA
tggtttcgttctggcctcccatccgatgctgctgcaggatatcttcgacaaaattctgcaaaatattagcgatcc

SEQ ID NO: 276399 - DNA, 75 bp, synthetic construct
  source 1..75: mol_type = other DNA
ccagtttggtgcggctatcacctatttctcatttttgtcgatgatccccattttgatggtgtcgtttgccgcagg

SEQ ID NO: 276400 - DNA, 75 bp, synthetic construct
  source 1..75: mol_type = other DNA
ttgctcgtctgacgctgttttgtgcggcgtggattgccaccgccgagtacaaagatgacccgcgaatgccgggga

SEQ ID NO: 276401 - DNA, 75 bp, synthetic construct
  source 1..75: mol_type = other DNA
tattcagacttaacagaagctgaaaaaaccaacgtcaccaatgctaacagtaacgctggtcgggtagcttcaaag

SEQ ID NO: 276402 - DNA, 75 bp, synthetic construct
  source 1..75: mol_type = other DNA
atggggatggggcatatgactcgtgcaaacagtgaagattgcttgtttgcggtaaaaggcaaattgccgacccgc

SEQ ID NO: 276403 - DNA, 75 bp, synthetic construct
  source 1..75: mol_type = other DNA
acagtggcaaagacggcatctatttccacttaagagataatgtagatgccttcttaaccttatcagctactgaga

SEQ ID NO: 276404 - DNA, 75 bp, synthetic construct
  source 1..75: mol_type = other DNA
ggaaattaacttcaaagctattgtaggtcagactgatatttcagcagccactggcaaaacggctaccacaaatga

SEQ ID NO: 276405 - DNA, 75 bp, synthetic construct
  source 1..75: mol_type = other DNA
gctatatagaatcatatgggttaccactcatcgaagctgctagtttaggaaaaaaaatcattagtagtgatcttc

SEQ ID NO: 276406 - DNA, 75 bp, synthetic construct
  source 1..75: mol_type = other DNA
ttattacaaccttctgatgacaactataaagaagtcctagaggataaaataaaaaaaatacctaacactgaaaca

SEQ ID NO: 276407 - DNA, 75 bp, synthetic construct
  source 1..75: mol_type = other DNA
cgaaacggtgcgctttaccttgtatcggttattgcaggagttgctcaataacatctgtaaacacgccgaagccag

SEQ ID NO: 276408 - DNA, 75 bp, synthetic construct
  source 1..75: mol_type = other DNA
actggaaacactacaacgagccttggaagccctatgctgacctgtaaagagctttttagctattcggcaagcgag

SEQ ID NO: 276409 - DNA, 75 bp, synthetic construct
  source 1..75: mol_type = other DNA
gaaggaagcttattattaactcgtcagggtcaattagtagagaacttcattgacactcttgaaagctggcgtgac

SEQ ID NO: 276410 - DNA, 75 bp, synthetic construct
  source 1..75: mol_type = other DNA
gggcaaactgatatctcggctgcgactggaaagaccgctaccacgaatgatggtggtgctaccagcaaaaagaat

SEQ ID NO: 276411 - DNA, 75 bp, synthetic construct
  source 1..75: mol_type = other DNA
tgatactctggaaagctggagagaccagaaacagattatttcggtcatctgtaaagatggtatcaaaattgacga

SEQ ID NO: 276412 - DNA, 75 bp, synthetic construct
  source 1..75: mol_type = other DNA
cagctactacaaatgacggtgggacaacatctaagaagaatactggtaatactacaactagccttggtagtccta

SEQ ID NO: 276413 - DNA, 75 bp, synthetic construct
  source 1..75: mol_type = other DNA
tggtggtgctacttctaagaaaaatactggtaacaccacgacaagtttagggaatgggaaattgctgtgtcagga

SEQ ID NO: 276414 - DNA, 75 bp, synthetic construct
  source 1..75: mol_type = other DNA
gatgataacttttactgcaacgggatgtgataaggcggaagtcactgtcacgccaaatcgacatcctataacgga

SEQ ID NO: 276415 - DNA, 75 bp, synthetic construct
  source 1..75: mol_type = other DNA
aaagaggcttgcgctgcggcgaacgtactgctgaaagtgattattgaaaccggcgaactgaaagacgaagcgctg

SEQ ID NO: 276416 - DNA, 75 bp, synthetic construct
  source 1..75: mol_type = other DNA
gggcgtagaaaaaaccgttggtttcaaaccggcgggcggcgtgcgtactgcggaagatgcgcagaaatatctcgc

SEQ ID NO: 276417 - DNA, 75 bp, synthetic construct
  source 1..75: mol_type = other DNA
ttaacatggcaaaattcataaaaagccagagcctgacgctgctcgaaaaactggactcactcgatgctgatgcac

SEQ ID NO: 276418 - DNA, 75 bp, synthetic construct
  source 1..75: mol_type = other DNA
gggcgtttttatctccggcagtggtgtccgttctgtctggttacgccataaccttgagaatttcaaaaaacgtct

SEQ ID NO: 276419 - DNA, 75 bp, synthetic construct
  source 1..75: mol_type = other DNA
atgatgtccatccttgctgatggtgtgctggtggctggagtgattgcgctgctctggcctctgattaaatccagt

SEQ ID NO: 276420 - DNA, 75 bp, synthetic construct
  source 1..75: mol_type = other DNA
atgtcggtgctgacagatggtgtgctggtggcgatggcgctggtcgtgctccggcctttactgcgtaaatctgaa

SEQ ID NO: 276421 - DNA, 75 bp, synthetic construct
  source 1..75: mol_type = other DNA
cgttcatctcaccagaggtttatataatcttggaccgtttccggaaggaatgcctttcagagtcaatatcgttta

SEQ ID NO: 276422 - DNA, 75 bp, synthetic construct
  source 1..75: mol_type = other DNA
caggcgatatcttgtccggcggacttacttttgaaaacgactcaatccttgcctggattcggaatactgactggg

SEQ ID NO: 276423 - DNA, 75 bp, synthetic construct
  source 1..75: mol_type = other DNA
atgtactatcaacggtgtctcgtttgatggttctaaaaatattgagctaacggcggaagatttaaatctacagga

SEQ ID NO: 276424 - DNA, 75 bp, synthetic construct
  source 1..75: mol_type = other DNA
tcaacatggcgcgattcatcaaaagccagagcctgacgttgctcgaaaaactggatgcactggatgcagacgaac

SEQ ID NO: 276425 - DNA, 75 bp, synthetic construct
  source 1..75: mol_type = other DNA
gaagctcaacaaactggacgcggatgaacaggcagatatctgtgaatcgcttcacggccacgccgatggcgtttt

SEQ ID NO: 276426 - DNA, 75 bp, synthetic construct
  source 1..75: mol_type = other DNA
atcgctgaaaatcagagcaaactcatctcggatattcgcaatgagatgattgccattcgcggtgatatgcatggc

SEQ ID NO: 276427 - DNA, 75 bp, synthetic construct
  source 1..75: mol_type = other DNA
ctcgcccaaacgcgcaaacggggttattcatttgacgatgaggaacatgcgctgggacttcgttgtctcgcggcg

SEQ ID NO: 276428 - DNA, 75 bp, synthetic construct
  source 1..75: mol_type = other DNA
ggcgtttatacaggtacatatcagtcgcgcgatcccaggatgcttctcgttggcaatttaacattgttaagctgg

SEQ ID NO: 276429 - DNA, 75 bp, synthetic construct
  source 1..75: mol_type = other DNA
ggttgttgacgctgatggtattgagcctgacggctcaggctgagtcgtttcatatggaaacccctatgggttatc

SEQ ID NO: 276430 - DNA, 75 bp, synthetic construct
  source 1..75: mol_type = other DNA
ggacttgcctatgtcaagttgccccggtctttccagtgtccctgcaactgacaagggctgggaatgtatcgcggc

SEQ ID NO: 276431 - DNA, 75 bp, synthetic construct
  source 1..75: mol_type = other DNA
ggagtatatacaggggagtatgcgaccagtgatccatggatgctcacccttggtaatttgactcttgtaagctgg

SEQ ID NO: 276432 - DNA, 75 bp, synthetic construct
  source 1..75: mol_type = other DNA
gcgcaatcgctgactccttacgatatctcctgggatcagaattatgttgttaaaaacaaagtaatacggttgcag

SEQ ID NO: 276433 - DNA, 75 bp, synthetic construct
  source 1..75: mol_type = other DNA
atctgcaatcagcagatgctgtagggggcatcattgagacaaccctatcgacctatttaatggaaagtcagaagc

SEQ ID NO: 276434 - DNA, 75 bp, synthetic construct
  source 1..75: mol_type = other DNA
ttatcgaccaggtgcagtgtacgcatctgatgcgtatgtccgctcctatcggcggtaagttaccgatgcatgcct

SEQ ID NO: 276435 - DNA, 75 bp, synthetic construct
  source 1..75: mol_type = other DNA
atgcctatacccacgcaacgctggtttctcctgtgcatttaaaagaagatctcgcgcaaacgcgcaaacgaggtt

SEQ ID NO: 276436 - DNA, 75 bp, synthetic construct
  source 1..75: mol_type = other DNA
ccaactgagcgaagaacaggtgacgaagctgctgcaccgcaaagggttacatgcctatacccacgcaacgctggt

SEQ ID NO: 276437 - DNA, 75 bp, synthetic construct
  source 1..75: mol_type = other DNA
ctctggtcatgcttatttctgctacagaagttctggctgccgggcatgaggttgacacttactacggcattggcg

SEQ ID NO: 276438 - DNA, 75 bp, synthetic construct
  source 1..75: mol_type = other DNA
ggcaccgatagtagatgattcttattgtcccggtatgacctctggttgggtttgtcatagacttcctgtaaatgt

SEQ ID NO: 276439 - DNA, 75 bp, synthetic construct
  source 1..75: mol_type = other DNA
gtatgttattgttcgggcttaattcttctgtacaagcagacgttacatttaataatgttcagacttatggcgcat

SEQ ID NO: 276440 - DNA, 75 bp, synthetic construct
  source 1..75: mol_type = other DNA
ttattaatgtaccagaaaacttaccactgaataatgctgcggtactaatcaagcaaaaatggctggcaccaacca

SEQ ID NO: 276441 - DNA, 75 bp, synthetic construct
  source 1..75: mol_type = other DNA
taaattaagagaggatttttgcaataatctaaaaaacaaaattgaaacgtgtctaactgaactatctaaactaca

SEQ ID NO: 276442 - DNA, 75 bp, synthetic construct
  source 1..75: mol_type = other DNA
aatcgtctactttttcgaacagacacaatataatgtagtcatatttgaggatcttgaccgtcataatgacggagc

SEQ ID NO: 276443 - DNA, 75 bp, synthetic construct
  source 1..75: mol_type = other DNA
cggcggtgaccggcattttgttggcggcgcgcctcggttccggtaacgcaggtgccgcaaacggtctggagtttg

SEQ ID NO: 276444 - DNA, 75 bp, synthetic construct
  source 1..75: mol_type = other DNA
cggtacggcactttccggcggtcgcggttccctgttcggtacattgcttggtgtgctggtgattacgctaatcgg

SEQ ID NO: 276445 - DNA, 75 bp, synthetic construct
  source 1..75: mol_type = other DNA
aagtcgcggatattgctaaggttaatcatgatattgaagtactagggagaattacaggcagcctgaaaaaagtat

SEQ ID NO: 276446 - DNA, 75 bp, synthetic construct
  source 1..75: mol_type = other DNA
ttgcggacagggggctggcggcttgttgctggcggggcataccgatacggtgccatttgatgacggtcgctggac

SEQ ID NO: 276447 - DNA, 75 bp, synthetic construct
  source 1..75: mol_type = other DNA
gtttaaagatttgggcttcaatgtggaagtgcagcctgttccaggaactcgcaacaaatttaatatgctggcaag

SEQ ID NO: 276448 - DNA, 75 bp, synthetic construct
  source 1..75: mol_type = other DNA
aatatctggagacacggtttatcaagcccacccgcgaactgatcacccaggtcattcaccatttctgctggcatt

SEQ ID NO: 276449 - DNA, 75 bp, synthetic construct
  source 1..75: mol_type = other DNA
gtagctcgcgccgcatccggcgctgttgccaaactccagtgccgcaataatgtcggatgcgatgcttgcgcatct

SEQ ID NO: 276450 - DNA, 75 bp, synthetic construct
  source 1..75: mol_type = other DNA
gcgcgttattttgccgaaactaccgccctgcgcccggattgcgccatcattggcgaaccgacgtcgctgcaaccg

SEQ ID NO: 276451 - DNA, 75 bp, synthetic construct
  source 1..75: mol_type = other DNA
cgaatcatcaactggttgaagtggttgagaaattgctcggagcaaagaccgaagtggtgaattactgtaccgaag

SEQ ID NO: 276452 - DNA, 75 bp, synthetic construct
  source 1..75: mol_type = other DNA
atgaccaacgcactgccagtgccgattgacgaaaacgaggtgctggactggctgggcggacaatttctcggtgtg

SEQ ID NO: 276453 - DNA, 75 bp, synthetic construct
  source 1..75: mol_type = other DNA
ttcgatatttggattcattacccttccatttaagttaattgttgttgtttataaatataggagagctaaaatcaa

SEQ ID NO: 276454 - DNA, 75 bp, synthetic construct
  source 1..75: mol_type = other DNA
ttgtaacgctcaatgcacctatcgttcgcggcaagacggcaatcagcgaaatcacgatcacgccagtcttaaagc

SEQ ID NO: 276455 - DNA, 75 bp, synthetic construct
  source 1..75: mol_type = other DNA
aaggccataaccagcgctatgtgcacaatattctgccggaagacaaaccggctgacagcctgctggtggtggagg

SEQ ID NO: 276456 - DNA, 75 bp, synthetic construct
  source 1..75: mol_type = other DNA
tgaggctagagttgcaaagctagagtctgatgttgaatacatcaagcgcgatctcgctgaggtaaagtcagatat

SEQ ID NO: 276457 - DNA, 75 bp, synthetic construct
  source 1..75: mol_type = other DNA
tgctgattattatgaagagcgctaccgtagtcgcgtactcgatggacttaaacgaagagcaaaatcactgggtta

SEQ ID NO: 276458 - DNA, 75 bp, synthetic construct
  source 1..75: mol_type = other DNA
aacgcattcgtgtataaaaagagcgcgactgaaactggtgtattagaggtaataggttctggaattcaaaatttc

SEQ ID NO: 276459 - DNA, 75 bp, synthetic construct
  source 1..75: mol_type = other DNA
tttacggcgtggaaggtgcggtggactacctgattcctgatactgactggagtaccggagtgaacttcaacgtgc

SEQ ID NO: 276460 - DNA, 75 bp, synthetic construct
  source 1..75: mol_type = other DNA
gtcagccagtgaagcccgtggtggcgaaagaacctgctcgcaccgccaaaaattttggctatgaagagatgttga

SEQ ID NO: 276461 - DNA, 75 bp, synthetic construct
  source 1..75: mol_type = other DNA
atgagtaaaaaatcggccaaaaagcgtcagccggtgaagcccgtggtggcgaaggaaccggctcgcaccgccaat

SEQ ID NO: 276462 - DNA, 75 bp, synthetic construct
  source 1..75: mol_type = other DNA
atctgggcggaacaccgggcagagttctgtgctaatgctcacctgaaaggatggacaccgcctcatgaacgcgaa

SEQ ID NO: 276463 - DNA, 75 bp, synthetic construct
  source 1..75: mol_type = other DNA
acttaagtcattggtttacagtgcaggagtttactattactcaagctgctttattgctgtcaggtattgatcctc

SEQ ID NO: 276464 - DNA, 75 bp, synthetic construct
  source 1..75: mol_type = other DNA
tcgttcaaataatatatccatggacgaaacaattattacccgttattcattacaggaatgggtaaaaaatgagaa

SEQ ID NO: 276465 - DNA, 75 bp, synthetic construct
  source 1..75: mol_type = other DNA
ctcgacgaagtggaaaaggcgcatcgcgacgtgatgaacctgttctatcaggtatttgatcggggctttatgcgc

SEQ ID NO: 276466 - DNA, 75 bp, synthetic construct
  source 1..75: mol_type = other DNA
cctccccggatattcaactcctgtccaacggccattatcatctgatgttgaccgcgggcggcggtggttacagtc

SEQ ID NO: 276467 - DNA, 75 bp, synthetic construct
  source 1..75: mol_type = other DNA
ggtcaaacccgttcgctatgaaccccgtattttctatagcgtggataccccctccccggatattcaactcctgtc

SEQ ID NO: 276468 - DNA, 75 bp, synthetic construct
  source 1..75: mol_type = other DNA
atttttatgcaggccactgccaatacctgcccggaaaatctggttctcagccatgatctcctcgaagggtgctat

SEQ ID NO: 276469 - DNA, 75 bp, synthetic construct
  source 1..75: mol_type = other DNA
atgaaaatgatccccagagcgtggtttaaccgctcccgtattctgattaatgctgccgaaaacataacgttttcg

SEQ ID NO: 276470 - DNA, 75 bp, synthetic construct
  source 1..75: mol_type = other DNA
ggggagtgctggtcgccgacggctttacctgttcgcggacacggtgattacctgacccgccatggttttggctac

SEQ ID NO: 276471 - DNA, 75 bp, synthetic construct
  source 1..75: mol_type = other DNA
tgggtcagccacagccaggacagcaatcaggccagatccactgttgcacgtttttatcaggcgatgtggctgaat

SEQ ID NO: 276472 - DNA, 75 bp, synthetic construct
  source 1..75: mol_type = other DNA
ggtgaagtctgggcgttaccgggaatgctgcgccttgcgctgattgaaaatcttcgtcgtatcagtatggaagtg

SEQ ID NO: 276473 - DNA, 75 bp, synthetic construct
  source 1..75: mol_type = other DNA
gggctcagacaggcgcttgagcagaaagccgctgaactcatgtcagcggtaaccgcaatccgtaatattcacgag

SEQ ID NO: 276474 - DNA, 75 bp, synthetic construct
  source 1..75: mol_type = other DNA
tctacaaaattccagtttgaatgttccttatgagcagattatttacttgcaccagccaattcctttcagtaaagt

SEQ ID NO: 276475 - DNA, 75 bp, synthetic construct
  source 1..75: mol_type = other DNA
gcctgacaaaagccactacgatctcctgccgtctgaaatccgcctgaccagttttcttgccattgcgactaatca

SEQ ID NO: 276476 - DNA, 75 bp, synthetic construct
  source 1..75: mol_type = other DNA
aaggttttttcgcctaatcaggaacaaaaacagctgttacgccagacaagccgtgaaatctgggctttttttgaa

SEQ ID NO: 276477 - DNA, 75 bp, synthetic construct
  source 1..75: mol_type = other DNA
acgcagcttagggggactcagcgtcaaaactcaggtggtgatctctccggaggatgatgttgaattgcgacggct

SEQ ID NO: 276478 - DNA, 75 bp, synthetic construct
  source 1..75: mol_type = other DNA
actgcgcaggctttcaggtaacacgggcgccggtctggatccctgcggggcggtacaatcgacggtaacattaat

SEQ ID NO: 276479 - DNA, 75 bp, synthetic construct
  source 1..75: mol_type = other DNA
gcgtgaaagtcgattcttatgaactgggctggcgctttaccggtgacaacctgcggactcaaatcgcagcatatt

SEQ ID NO: 276480 - DNA, 75 bp, synthetic construct
  source 1..75: mol_type = other DNA
acagcaagcccatcaaaagcgacagcctacattggctgggcaccggacccgtggagtctgcgcgtgcagagcacc

SEQ ID NO: 276481 - DNA, 75 bp, synthetic construct
  source 1..75: mol_type = other DNA
tggtctgaactactctgtgctgttctgaccggtattcctttacaacaaaggtacgctgatatcaacatggccgct

SEQ ID NO: 276482 - DNA, 75 bp, synthetic construct
  source 1..75: mol_type = other DNA
gctcgacgaagtggaaaaggcgcaccgcgacgtaatgaacctgttctatcaggtatttgaccggggctttatgcg

SEQ ID NO: 276483 - DNA, 75 bp, synthetic construct
  source 1..75: mol_type = other DNA
ttggtgacggtatcgcagaacattacacaaaaatatggactgtttcctatatggctggtatgtgttgctatcgct

SEQ ID NO: 276484 - DNA, 75 bp, synthetic construct
  source 1..75: mol_type = other DNA
aaccgtcgggaaaagtcgggctgtaatgctctcatcattcctgattgtctatgctgtcaggtttcatggcgtgtt

SEQ ID NO: 276485 - DNA, 75 bp, synthetic construct
  source 1..75: mol_type = other DNA
ttgatgagattgcgttagtcagtggtggcaacgcaaacagtaattatgaaggtggcggaagtcgtagtcgtaaca

SEQ ID NO: 276486 - DNA, 75 bp, synthetic construct
  source 1..75: mol_type = other DNA
cgatgacatggttgtcgctccttacgccacgctgctggcgctgatggtttccccgcagaaagcttgtgagaacct

SEQ ID NO: 276487 - DNA, 75 bp, synthetic construct
  source 1..75: mol_type = other DNA
aatgatcctgccggcatctatccccggatgcacttcaatacccgggatcattaccggcacgtagttgaggttctg

SEQ ID NO: 276488 - DNA, 75 bp, synthetic construct
  source 1..75: mol_type = other DNA
tattcgcgatattgccattgaaaacgcgtcgatggtggtactgaattttaccctgcaattccttgagccttctga

SEQ ID NO: 276489 - DNA, 75 bp, synthetic construct
  source 1..75: mol_type = other DNA
gaacgtttcgttcaacctggtacgcaggtttacgatttagggtgttctttgggcgcggcgacgctctcggtgcgt

SEQ ID NO: 276490 - DNA, 75 bp, synthetic construct
  source 1..75: mol_type = other DNA
tggtcggtcaggtttacgaccgcgatgagtcgttgcggtactacccgttcccgacggtaaatgcgaataaacagg

SEQ ID NO: 276491 - DNA, 75 bp, synthetic construct
  source 1..75: mol_type = other DNA
gaaatcgatctgaatctgccagcttggcgtgtggtccgtgtactcgacaggatcgcggcaaatcgcggctatccg

SEQ ID NO: 276492 - DNA, 75 bp, synthetic construct
  source 1..75: mol_type = other DNA
gcgctgaaccagagctggtctgtcgattttatgcatgatgcgctggcctgtggacgtcgttttcgcacgttcaat

SEQ ID NO: 276493 - DNA, 75 bp, synthetic construct
  source 1..75: mol_type = other DNA
gaaatcgatctgaatctgccagctcagcgagtggtccgtgtactcgacaggatcgcggcaaaccgtggctatccg

SEQ ID NO: 276494 - DNA, 75 bp, synthetic construct
  source 1..75: mol_type = other DNA
ggatactgcatgccctgcgagcaggcccaacagcagcgtgagcacgacgaatatatcaagaaaaacaaaaagatc

SEQ ID NO: 276495 - DNA, 75 bp, synthetic construct
  source 1..75: mol_type = other DNA
gtacacaaagcattatgattgggccggacggtgagctgtacggtgcatccgacccgcgctcggtggatgatttaa

SEQ ID NO: 276496 - DNA, 75 bp, synthetic construct
  source 1..75: mol_type = other DNA
tcgacctgaatatcccggctcagcgtgtcgtccgggtactggacagggtagcggcaaaccgcggatacccgctga

SEQ ID NO: 276497 - DNA, 75 bp, synthetic construct
  source 1..75: mol_type = other DNA
ataaccagcaaaaaattcgcagtaagtttaatattgaagagtcatattgtgccattaagactaatggcgtcctcg

SEQ ID NO: 276498 - DNA, 75 bp, synthetic construct
  source 1..75: mol_type = other DNA
atcctgttatccgaaaagagattctggctgagcaggcagaacccggatttattgatccagactattttaatgaaa

SEQ ID NO: 276499 - DNA, 75 bp, synthetic construct
  source 1..75: mol_type = other DNA
ggattcacccaatcagaaatggctgagtgggagccagaaatgcgtgaaaagtattttgccggagcatttgatgtt

SEQ ID NO: 276500 - DNA, 75 bp, synthetic construct
  source 1..75: mol_type = other DNA
tgggctgaagagcatggagtgatgctggaatttatcaaaccgggaaaaccaacgcagaatgcctttatcgaacgg

SEQ ID NO: 276501 - DNA, 75 bp, synthetic construct
  source 1..75: mol_type = other DNA
ctgctgcgcaggcagggtaacacttggaaccataaacgcgttcaccggatttactgcctgctgaaactgaatttt

SEQ ID NO: 276502 - DNA, 75 bp, synthetic construct
  source 1..75: mol_type = other DNA
ttacagagcgctggctgacagaatataacagcgagcggcctcatgaatccctgaataacctgacgccggaagagt

SEQ ID NO: 276503 - DNA, 75 bp, synthetic construct
  source 1..75: mol_type = other DNA
ttgcgtctggtgaatatgaacacgctcaggagatttgtctttgtctggcggcgtttacccaggcaaatctggatg

SEQ ID NO: 276504 - DNA, 75 bp, synthetic construct
  source 1..75: mol_type = other DNA
cagggagaaccggacggctgagctgctgaccagtcagctgcctcaggtggagatttacaccaaaacactggtgtc

SEQ ID NO: 276505 - DNA, 75 bp, synthetic construct
  source 1..75: mol_type = other DNA
ccagcctcaacctaaggcagaaagccgtcgcgatgtattagcgtcggcggctaaaatcgtcaccaacggtttgta

SEQ ID NO: 276506 - DNA, 75 bp, synthetic construct
  source 1..75: mol_type = other DNA
gcggaaaaacaaactctggtgcgcaacaacggttctgaagtgcagtcgttggatccgcacaaaattgaaggtgta

SEQ ID NO: 276507 - DNA, 75 bp, synthetic construct
  source 1..75: mol_type = other DNA
atagcctgaaatccaacatccagttggtattcaacaacgccattctggcgagtgaaattgccaaagaatatcagc

SEQ ID NO: 276508 - DNA, 75 bp, synthetic construct
  source 1..75: mol_type = other DNA
tacgaccggcgcagccagcattcgggccggcttaccgacgtcgtggactgtgggtgataagaccggcagcggcgg

SEQ ID NO: 276509 - DNA, 75 bp, synthetic construct
  source 1..75: mol_type = other DNA
gatctggtgagtgtcgccgggcatatctacaaacacggaatgaatgccggtcttccgggagggaatggtaccaaa

SEQ ID NO: 276510 - DNA, 75 bp, synthetic construct
  source 1..75: mol_type = other DNA
cattagaagtcaccttaagtgaacccgttccgtacttctataaattacttgttcacccatcaacttcaccggtgc

SEQ ID NO: 276511 - DNA, 75 bp, synthetic construct
  source 1..75: mol_type = other DNA
gcatttacccaggcgaatctgaatgcctatttcagagaatggatctcttacgatgatttggacaatgattcttat

SEQ ID NO: 276512 - DNA, 75 bp, synthetic construct
  source 1..75: mol_type = other DNA
gtgaatgcgtttgcagggttaagcgatccggttgccatgctgaaattagttcaccaaccgcgaaaattcgatgcg

SEQ ID NO: 276513 - DNA, 75 bp, synthetic construct
  source 1..75: mol_type = other DNA
cgatccgtatttgtgcacctactattacgaaattaacaatcagaaaccgccattcaacgacgtgcgtgtgcgtac

SEQ ID NO: 276514 - DNA, 75 bp, synthetic construct
  source 1..75: mol_type = other DNA
ggaaacgttgaaagctactgacgaagcgcaacgtacggcgctgtacacgaaagcagaacagcaactggataaaga

SEQ ID NO: 276515 - DNA, 75 bp, synthetic construct
  source 1..75: mol_type = other DNA
ggcgtaaaagctgtcgatgaccacacattagaagtcaccttaagtgaaccggttccgtacttctataagttgctt

SEQ ID NO: 276516 - DNA, 75 bp, synthetic construct
  source 1..75: mol_type = other DNA
cacttcagttgatgttgccggaaatagaagaaatgctgtcactgggagtttccagggaggaaatttataaggcag

SEQ ID NO: 276517 - DNA, 75 bp, synthetic construct
  source 1..75: mol_type = other DNA
acaatgttaaagagtttcgatatagaacaacactctgaaatacgacaaattagaacagagcaggataaaaaagat

SEQ ID NO: 276518 - DNA, 75 bp, synthetic construct
  source 1..75: mol_type = other DNA
ttgcttttttattcctagcacacaatgagtgtgcagcaaaaacagaggaactaacgcttgaacaaagaatggcat

SEQ ID NO: 276519 - DNA, 75 bp, synthetic construct
  source 1..75: mol_type = other DNA
tttcctcatcagtaaacaactcgataactggtattttgagttaaacacgttacttgaagacggaacatctttata

SEQ ID NO: 276520 - DNA, 75 bp, synthetic construct
  source 1..75: mol_type = other DNA
gtggaggacctgaaacttcggtgcgccggaaacatcgttcttaatcctgccgtactgcctgacggattaagccag

SEQ ID NO: 276521 - DNA, 75 bp, synthetic construct
  source 1..75: mol_type = other DNA
ttggtgtccgcccggttattgacggtcgtcgcatgggtgttcgtgagtcgcttgaagaacaaacaatgaatatgg

SEQ ID NO: 276522 - DNA, 75 bp, synthetic construct
  source 1..75: mol_type = other DNA
atgcttaatccacgccaggtaattggctggaagtcgaaaatggtggacggaaaagtggtgctgactgcgctgcgt

SEQ ID NO: 276523 - DNA, 75 bp, synthetic construct
  source 1..75: mol_type = other DNA
cgtactgaagcgctggcgggaacagtagcaaatcatcctgatgataagcaggcgcagcagttaggagagtggctg

SEQ ID NO: 276524 - DNA, 75 bp, synthetic construct
  source 1..75: mol_type = other DNA
tagcaaatcattctgatgataagcaggcgcaacagttgggtgagtggctgatggcggatgataaaaaccagcgcg

SEQ ID NO: 276525 - DNA, 75 bp, synthetic construct
  source 1..75: mol_type = other DNA
ttggggctgaatgcttttgacccgtcgcagggcaatttacttttaccccgcctggaatggcgacgctgtggcggt

SEQ ID NO: 276526 - DNA, 75 bp, synthetic construct
  source 1..75: mol_type = other DNA
actcttaataccgcctatttggatgccagtaatgagaaagatttcactgccagtattaatgctctgtggaaacgt

SEQ ID NO: 276527 - DNA, 75 bp, synthetic construct
  source 1..75: mol_type = other DNA
tcaaaagaacgcacccgattgcttaccctgctggatcaattaaaggggcatgggctggtgacgtcgccggatgca

SEQ ID NO: 276528 - DNA, 75 bp, synthetic construct
  source 1..75: mol_type = other DNA
cattgatgagatccgtggcctgctgtatgtcaaagtcaggcttgatgaaacgcctgcgcaggatgaatgggccca

SEQ ID NO: 276529 - DNA, 75 bp, synthetic construct
  source 1..75: mol_type = other DNA
taccgttttttctgataagacatatgtttgtctggatttctttattaataaaaatcacatcattacaaaacgaag

SEQ ID NO: 276530 - DNA, 75 bp, synthetic construct
  source 1..75: mol_type = other DNA
tcgactataacgatatgctggaggcgtgggatattaacgacgcattgatgggcggtacgcttgaaatgcgcaggc

SEQ ID NO: 276531 - DNA, 75 bp, synthetic construct
  source 1..75: mol_type = other DNA
atggaagtcatcgacaaggaaaccgacagcatccaagtaaagtctaacagtgctgttttatcatatatctatgga

SEQ ID NO: 276532 - DNA, 75 bp, synthetic construct
  source 1..75: mol_type = other DNA
tatgactataaccaaagccgggaaatcaattacacattaccaaacactgatttcggtgaggcagagatctgtatt

SEQ ID NO: 276533 - DNA, 75 bp, synthetic construct
  source 1..75: mol_type = other DNA
caattcagatgatgttgccggaagtagaagaaatgctgtcgctgggagtctccagagaggaggttttcaaggcgg

SEQ ID NO: 276534 - DNA, 75 bp, synthetic construct
  source 1..75: mol_type = other DNA
aggcgttgaaatttatcgatcaggattcccgtccagaggaagtgatcgacgaattaaaaaaccagggcgtaacgc

SEQ ID NO: 276535 - DNA, 75 bp, synthetic construct
  source 1..75: mol_type = other DNA
aatttttcagtctcgcatttcagtatggtgtggcacatgcgctggtggactatccacggacggatatgaaagaga

SEQ ID NO: 276536 - DNA, 75 bp, synthetic construct
  source 1..75: mol_type = other DNA
aagagatttgaaactagatattaacttctataagcgagcttcgttaactaaaataaatagattcctgggaaggca

SEQ ID NO: 276537 - DNA, 75 bp, synthetic construct
  source 1..75: mol_type = other DNA
taacgcatgatacttttgtaagacatccaaaactactcattcatgataatatttttgatgttgacagagatactt

SEQ ID NO: 276538 - DNA, 75 bp, synthetic construct
  source 1..75: mol_type = other DNA
attttacgtcaattgatgatgtaaatcatttcttgactcttttaatgttccatgacaacaagtcaaatttacacc

SEQ ID NO: 276539 - DNA, 75 bp, synthetic construct
  source 1..75: mol_type = other DNA
tcgagacggtgagttttttgatgttgtccgcaatggtgaggagttcttcgaaacgcagagccgcaatgtaactag

SEQ ID NO: 276540 - DNA, 75 bp, synthetic construct
  source 1..75: mol_type = other DNA
ggagacaagaagcccctgcgcacttggtcccgtcgttcaacgatctttcctaacatgatcggtttgaccatcgct

SEQ ID NO: 276541 - DNA, 75 bp, synthetic construct
  source 1..75: mol_type = other DNA
tcatagtaatgagcgagaaaaggttttcttttatgatttggctcttttacttacagaagaaacgtttcgacgtca

SEQ ID NO: 276542 - DNA, 75 bp, synthetic construct
  source 1..75: mol_type = other DNA
tgagcaatcggatcatctgcgcgctcgtcaggctacggcggacatactgcgtgaagcgaatgtaccggttaccga

SEQ ID NO: 276543 - DNA, 75 bp, synthetic construct
  source 1..75: mol_type = other DNA
atctgcaaacaggcgatgcggtggatagctggaaagtgattatcgtcgaaccggaaaaacaacttaccctgttat

SEQ ID NO: 276544 - DNA, 75 bp, synthetic construct
  source 1..75: mol_type = other DNA
cactatctggtggcgttgttagatcatccggccagcgaacaccgcatcttcgaagccgccggaccagaggtgctc

SEQ ID NO: 276545 - DNA, 75 bp, synthetic construct
  source 1..75: mol_type = other DNA
tgcgaatgaattaggcgcagcgcacgttcacctggtgtacggtcacggcggcgatctgcttaaacaggcgctgaa

SEQ ID NO: 276546 - DNA, 75 bp, synthetic construct
  source 1..75: mol_type = other DNA
tgatcgctttcgatgacgcggtacgtagcacgttgaaagaggaagaaaaactggtcaactccagcgactggggat

SEQ ID NO: 276547 - DNA, 75 bp, synthetic construct
  source 1..75: mol_type = other DNA
gtgccgcaacgcattttagttctcggtgccagtggctacattggtcagcatctggtgcacgcgcttagccaacaa

SEQ ID NO: 276548 - DNA, 75 bp, synthetic construct
  source 1..75: mol_type = other DNA
aagaggaagaaaagctggtcaactccagcgactggggctacgacgctcaggcctttgcccgctggcgaccggagt

SEQ ID NO: 276549 - DNA, 75 bp, synthetic construct
  source 1..75: mol_type = other DNA
tgcttaacattgataactttcaaggaaatgccgttgttaattatagcgatagggatgttccatatacaagaatta

SEQ ID NO: 276550 - DNA, 75 bp, synthetic construct
  source 1..75: mol_type = other DNA
aagtgtattttggtggtcgtttggctgagtataaatattatgatatgcatcaagtcattcgtgcggcattaaatt

SEQ ID NO: 276551 - DNA, 75 bp, synthetic construct
  source 1..75: mol_type = other DNA
accttccggccctgttgcaggatatcgatacggtctattttctggtgcacagcatgggcgaaggcggcgatttta

SEQ ID NO: 276552 - DNA, 75 bp, synthetic construct
  source 1..75: mol_type = other DNA
cgtcaggctacggcggacattctgcgtgaagcgaatgtacccgtgaccgaactgcgggccggaattatcgttggc

SEQ ID NO: 276553 - DNA, 75 bp, synthetic construct
  source 1..75: mol_type = other DNA
ttcgcgcattctggcatccgcacggcatgccaggcctgttttactggttattgatgatccctgcacatctgttta

SEQ ID NO: 276554 - DNA, 75 bp, synthetic construct
  source 1..75: mol_type = other DNA
gttttgatctgcgcggtacgcttactcacgggcgcgatgttgaaattgatactaacgttatcatcgagggtaatg

SEQ ID NO: 276555 - DNA, 75 bp, synthetic construct
  source 1..75: mol_type = other DNA
cgatgaacgttttgccccggctggcgttctggcccccaaatccaaagctgactttgcgtttgtactgcatgcgct

SEQ ID NO: 276556 - DNA, 75 bp, synthetic construct
  source 1..75: mol_type = other DNA
taacaccgttaaagataaaaatgcccgcctggctgcggttctgaaaggggttgaagggttaaaacttggtgactt

SEQ ID NO: 276557 - DNA, 75 bp, synthetic construct
  source 1..75: mol_type = other DNA
caaaacccctgaagacctcagtcagtttgatcggctgctgaaaaagctcagcgttgaagccgctctcaatgcaga

SEQ ID NO: 276558 - DNA, 75 bp, synthetic construct
  source 1..75: mol_type = other DNA
ccgccgtactcggttaagtggattggcagtgacgacccgaccctgattaacgatgagcgttttgccccggctggc

SEQ ID NO: 276559 - DNA, 75 bp, synthetic construct
  source 1..75: mol_type = other DNA
gtatcttcgtcgctattgaaagctctgcctacggctacccgtccgaggccgacatcaaaggcctgttcgccgatt

SEQ ID NO: 276560 - DNA, 75 bp, synthetic construct
  source 1..75: mol_type = other DNA
catcagtgagaatttttccagctacatggaagcaggggacgagagcatacattatgcagcacttgatgacagcat

SEQ ID NO: 276561 - DNA, 75 bp, synthetic construct
  source 1..75: mol_type = other DNA
gtccataaatatggtgcacatatctttcatacaaatgataagttcatttgggactatgttcaacagttcgctgaa

SEQ ID NO: 276562 - DNA, 75 bp, synthetic construct
  source 1..75: mol_type = other DNA
actgtgacgcgtaatgttggcgaaaatgctctggcaatcagccgtgtgccgcagtcgcaaaaagaaggctggcgt

SEQ ID NO: 276563 - DNA, 75 bp, synthetic construct
  source 1..75: mol_type = other DNA
gttcacctggtttacggtcacggtggcgatctgcttaaacagtcgttgaaagatgacaacctgaactgggtgctt

SEQ ID NO: 276564 - DNA, 75 bp, synthetic construct
  source 1..75: mol_type = other DNA
gtccacgttacttcatgctcaataagcctcagggctatgtttgctccacggacgacccggatcacccaacggtgc

SEQ ID NO: 276565 - DNA, 75 bp, synthetic construct
  source 1..75: mol_type = other DNA
gatgacccggatcacccaacggtgctctattttctggatgaacctgtggcgtggaaactgcacgcggcggggcgg

SEQ ID NO: 276566 - DNA, 75 bp, synthetic construct
  source 1..75: mol_type = other DNA
gtcgcaccgcattacttctccgcgtcatcattgtgagaaaacctacctggtgacgctggagtccccggtggcagc

SEQ ID NO: 276567 - DNA, 75 bp, synthetic construct
  source 1..75: mol_type = other DNA
tgtgaatggaaagaaggagatgaaccttattaccctataaatgacgaaaagaatatgctactctttaataaatat

SEQ ID NO: 276568 - DNA, 75 bp, synthetic construct
  source 1..75: mol_type = other DNA
tgaaagaacattactggttccgggagcaggcagaggtaacatcgtgcggatcaataccatcacgcatcagaaaga

SEQ ID NO: 276569 - DNA, 75 bp, synthetic construct
  source 1..75: mol_type = other DNA
agacaacattgcaacttataaaatcccgctcactattgctatgaagaaagcacgtgaagcacaacaacaattaga

SEQ ID NO: 276570 - DNA, 75 bp, synthetic construct
  source 1..75: mol_type = other DNA
tgcgccagcgttatggcaatcgctacgatctgacccgcgatactggcggtttctactgccgtgaggttgtgaaac

SEQ ID NO: 276571 - DNA, 75 bp, synthetic construct
  source 1..75: mol_type = other DNA
ccttcgcgctgattggctatgcgtttgtttccgcattgctgccggtgtggctgatcctcgcaccgcgcgactatc

SEQ ID NO: 276572 - DNA, 75 bp, synthetic construct
  source 1..75: mol_type = other DNA
gattcgaaggaattactcgcaggacatcatcatcccaatgacgctcgtgcacccggactatctgactgagatact

SEQ ID NO: 276573 - DNA, 75 bp, synthetic construct
  source 1..75: mol_type = other DNA
aattggacagagaaagttcacttgatccgcaggcaattattcgtcatccccaatatggcgatgtggcttgtatcc

SEQ ID NO: 276574 - DNA, 75 bp, synthetic construct
  source 1..75: mol_type = other DNA
gctgcctgcgtttttctgccgtaccagctcgtttgacgtcagcattcgtctcgacagcgccagtgaaattgcccg

SEQ ID NO: 276575 - DNA, 75 bp, synthetic construct
  source 1..75: mol_type = other DNA
acagcctgaaatccaacatccagcttgtgttcaacaacgccattctggcgagcgaaattgccaaagaatatcagc

SEQ ID NO: 276576 - DNA, 75 bp, synthetic construct
  source 1..75: mol_type = other DNA
tgcaatggcagtgaaatggcaaaccggtttgaacggcggcctggtagtggcgaatccgatcccggaacagtttgc

SEQ ID NO: 276577 - DNA, 75 bp, synthetic construct
  source 1..75: mol_type = other DNA
ttttactttaagcagcaactcgctcagcaatatcctgaagctgtaccgttgctctatcatttacaaacacttctg

SEQ ID NO: 276578 - DNA, 75 bp, synthetic construct
  source 1..75: mol_type = other DNA
agtgaagccaatatcgatcgtttctgtgaattaacacagtcctggcttccgatgcaaaaaacagaaaaagatccg

SEQ ID NO: 276579 - DNA, 75 bp, synthetic construct
  source 1..75: mol_type = other DNA
aagtagaagaaactattcgtaaacagggcgctgtacctgccactatcgccattattggcggcgtgatgaaagtgg

SEQ ID NO: 276580 - DNA, 75 bp, synthetic construct
  source 1..75: mol_type = other DNA
gtggtgctgaacccggaactgaaaatgcctgcgatgacccagtacattgacggtactggcccgctgtggaaaggt

SEQ ID NO: 276581 - DNA, 75 bp, synthetic construct
  source 1..75: mol_type = other DNA
gcgggcgaaattctgcacggtaaagcgtcgagcattgaacatgacggtcaggcgatgtttgccgggttaacaaac

SEQ ID NO: 276582 - DNA, 75 bp, synthetic construct
  source 1..75: mol_type = other DNA
ccagttccatccggaatcgattctcaccacccagggcgcacaactgctggagcaaacgctggcgtgggcgcaaca

SEQ ID NO: 276583 - DNA, 75 bp, synthetic construct
  source 1..75: mol_type = other DNA
caaaaaatcattgatgtcatcagtaaagcgcaatttattcagataacgggcctgggcggatcggcgctggtgggg

SEQ ID NO: 276584 - DNA, 75 bp, synthetic construct
  source 1..75: mol_type = other DNA
cataaatatggtgcacatatatttcatactaatgataagtatatttgggagtatgtaaataaacttgttgagttt

SEQ ID NO: 276585 - DNA, 75 bp, synthetic construct
  source 1..75: mol_type = other DNA
tggcgcatttgtcggcacgcaaagcgcaaataaatacggaaaagacacccaggacgtaaagtataagtccgagaa

SEQ ID NO: 276586 - DNA, 75 bp, synthetic construct
  source 1..75: mol_type = other DNA
cgatatccagaccgccgcgttttgccttgtgtgcctgttatggccgacagcggcagtgacggtgaaacgactgca

SEQ ID NO: 276587 - DNA, 75 bp, synthetic construct
  source 1..75: mol_type = other DNA
cacgcagcttgacgttcagcagcacgctgtggaagtgcttctcgccagtgcccccgcgcaaaaacgcatcgtgaa

SEQ ID NO: 276588 - DNA, 75 bp, synthetic construct
  source 1..75: mol_type = other DNA
cctgggcggtggcgctcgcgccttcggtcagctatgtcacagccgccggctttggcgttctggcagtggtccgtt

SEQ ID NO: 276589 - DNA, 75 bp, synthetic construct
  source 1..75: mol_type = other DNA
cggtattctgttcgaagccctgttcatcctgaccgcgctggatgcgggtactcgttctggccgctttatgctgca

SEQ ID NO: 276590 - DNA, 75 bp, synthetic construct
  source 1..75: mol_type = other DNA
cggcagtaaaaaagagattgtcttgtgcgccgaggcagcgcgaaagcagggggcaacggtgattgccattacctc

SEQ ID NO: 276591 - DNA, 75 bp, synthetic construct
  source 1..75: mol_type = other DNA
gcgcgcaaggatttactgaattgcgtatggcgttaattggcgaatacagtgccagccgggagaaaacgaatgcca

SEQ ID NO: 276592 - DNA, 75 bp, synthetic construct
  source 1..75: mol_type = other DNA
gggactgtttccgggtgatgcgctgagctacgagcgcgttctggcgttcgcgcagagcttcattggtcgcgtatt

SEQ ID NO: 276593 - DNA, 75 bp, synthetic construct
  source 1..75: mol_type = other DNA
taacagttgggtacaggtgaaaacacaccgcaccattggcgatgcagtcgcccacctgaaaggtcagggtatgca

SEQ ID NO: 276594 - DNA, 75 bp, synthetic construct
  source 1..75: mol_type = other DNA
ctgcgattattcgtaccgcagatgccgttggcgtacatgaagttcatgctgtctggcctggcagccggatgcgca

SEQ ID NO: 276595 - DNA, 75 bp, synthetic construct
  source 1..75: mol_type = other DNA
gcctgatctgaccgtctgcatggagcaggtccacaaacctcataacgtttctgcgattattcgtaccgcagatgc

SEQ ID NO: 276596 - DNA, 75 bp, synthetic construct
  source 1..75: mol_type = other DNA
gcaattgaccaggccgtaaaagaagcggaagtgcagggcattaccggtaaagaaagcacaccgttcctgctggca

SEQ ID NO: 276597 - DNA, 75 bp, synthetic construct
  source 1..75: mol_type = other DNA
atgtctgaaataaccatttcttctgaattactgcaaatttcaccggaagtacaggatgccattaacagtaaaaaa

SEQ ID NO: 276598 - DNA, 75 bp, synthetic construct
  source 1..75: mol_type = other DNA
tggctgggattaaagtttttgcaaccggaggtattggtggtgtgcatcgcggagcggaacataccttcgatattt

SEQ ID NO: 276599 - DNA, 75 bp, synthetic construct
  source 1..75: mol_type = other DNA
tgctgcaacagaagtacgaacagcttaaagcgaagttgcaggctgaaggtttgttcgatctgcaatacaaaaaat

SEQ ID NO: 276600 - DNA, 75 bp, synthetic construct
  source 1..75: mol_type = other DNA
gcaagagttactgcgccaggtgcaatcggcccgtcaacggctggagatggcgatggattattatctcgccaaccg

SEQ ID NO: 276601 - DNA, 75 bp, synthetic construct
  source 1..75: mol_type = other DNA
ccagcgccgctgatggcgcggtgttaaaacaggttaagcaggtgaaagtgggtgagacactgaccactcgcctgg

SEQ ID NO: 276602 - DNA, 75 bp, synthetic construct
  source 1..75: mol_type = other DNA
cgagcgcgcacatttgtgtttttctgcgattaattgcctggaagtgctgccagtggggtgtaataaaggcgcggc

SEQ ID NO: 276603 - DNA, 75 bp, synthetic construct
  source 1..75: mol_type = other DNA
tttttaccgttagccgcctgaatcaaacggttcgtctgctgcttgagcatgagatgggacaggtgtggatcagcg

SEQ ID NO: 276604 - DNA, 75 bp, synthetic construct
  source 1..75: mol_type = other DNA
cggcagaaatggtcagtaggaaccagcaggagttattgcggcagattcagtcagttcagcagcgcctcggtatgg

SEQ ID NO: 276605 - DNA, 75 bp, synthetic construct
  source 1..75: mol_type = other DNA
gccacgttcccggaaaaactgagccggttctccatctggaacatattcagcctgtccgcaatttattaatcacac

SEQ ID NO: 276606 - DNA, 75 bp, synthetic construct
  source 1..75: mol_type = other DNA
ctggatcaaatggttatcaatggaagacgttttttcgaaatggcagaacactaccagcaacaggtatcggcaatt

SEQ ID NO: 276607 - DNA, 75 bp, synthetic construct
  source 1..75: mol_type = other DNA
aggattacccagcgatgacctggctaatcttttcgcatcctatctctacagggtacgtcagtggtcgcagggaaa

SEQ ID NO: 276608 - DNA, 75 bp, synthetic construct
  source 1..75: mol_type = other DNA
ttccccaaccaggacggtacgttcaccgcgatgacgtataccaaaagcaaaacgtttaaaaccgaaaatggtgcc

SEQ ID NO: 276609 - DNA, 75 bp, synthetic construct
  source 1..75: mol_type = other DNA
agcttattaaagcaattagtgaacgactgaaagaacaacccaacaaaccaaaacgaatcaaatcatccacctcta

SEQ ID NO: 276610 - DNA, 75 bp, synthetic construct
  source 1..75: mol_type = other DNA
caaacgtattctacattcaaaaccgggggggacatggagggattggcctgctgaattaatcgcttcatgtcatgc

SEQ ID NO: 276611 - DNA, 75 bp, synthetic construct
  source 1..75: mol_type = other DNA
aaaaataaaagaccatcgatggtctttattgtatagctttgctaagcaaattcaattatgtgctccagatatagt

SEQ ID NO: 276612 - DNA, 75 bp, synthetic construct
  source 1..75: mol_type = other DNA
gcaacagcgaatctctggtatgtggcgtgttccccaaccaagacggtacgttcaccgcgatgacgtataccaaaa

SEQ ID NO: 276613 - DNA, 75 bp, synthetic construct
  source 1..75: mol_type = other DNA
aaatatagatggtggtagcactctgtatacacagcagttatgggtctcagggaatgataacgacaaaaccagtaa

SEQ ID NO: 276614 - DNA, 75 bp, synthetic construct
  source 1..75: mol_type = other DNA
gtggcacggccctgtacgccacagaaaacattgccggtcgcatcaatgcccgcctggaggatgagggctttaccg

SEQ ID NO: 276615 - DNA, 75 bp, synthetic construct
  source 1..75: mol_type = other DNA
acgtatacaaaaagcaaaacgtttaaaaccgaatctggcgcgcgtcgttggttggtaagacattcaggtgaataa

SEQ ID NO: 276616 - DNA, 75 bp, synthetic construct
  source 1..75: mol_type = other DNA
accgtggtctggggtgatagccagcattgctcgctccatcttcctgaacatatggaagacaccgcaaatcgcctg

SEQ ID NO: 276617 - DNA, 75 bp, synthetic construct
  source 1..75: mol_type = other DNA
ttgaccgaactgttagccatgactaatcttgcttacatcaagacaccgcacggtgttctcagcaaacagttccgc

SEQ ID NO: 276618 - DNA, 75 bp, synthetic construct
  source 1..75: mol_type = other DNA
cgttccggcatgagcgccacctggtgtgcgctgttgctgatggtgctggcaaatctttggtatatgccctgggag

SEQ ID NO: 276619 - DNA, 75 bp, synthetic construct
  source 1..75: mol_type = other DNA
acgcgccgagacgggtaaaaatgccattgctcacaccgttgatcgcaatggcttatggcacgcactgacgccgca

SEQ ID NO: 276620 - DNA, 75 bp, synthetic construct
  source 1..75: mol_type = other DNA
ctatcgtgatgattgagcagtgggaaagcatcgcgcatcttgaagcgcatctgcaaaccccgcacatgaaggcgt

SEQ ID NO: 276621 - DNA, 75 bp, synthetic construct
  source 1..75: mol_type = other DNA
cctataaagaggatgtgagccgcagtgttatcaatatcagtaagcgtaaactgaccgccgtatgtagccatcaga

SEQ ID NO: 276622 - DNA, 75 bp, synthetic construct
  source 1..75: mol_type = other DNA
agcgtaggtaaagcggtttatgtatccgctgtacaaatcgacaccgcgaaaaaaacacaggctcaggtctataag

SEQ ID NO: 276623 - DNA, 75 bp, synthetic construct
  source 1..75: mol_type = other DNA
tctggcaaggctgtttatctgacctcgtaccctgtggacacgtcaaagcagaaatcagcacagtgttacaagacg

SEQ ID NO: 276624 - DNA, 75 bp, synthetic construct
  source 1..75: mol_type = other DNA
ctcggcgctggaatattgcggattccatccgcagttggtcgaaggccgcgcggataacattaaagtcacgcgccc

SEQ ID NO: 276625 - DNA, 75 bp, synthetic construct
  source 1..75: mol_type = other DNA
cacccagatgaactctaaagccgatgaagatgtccgtaaagagcttaatgccattgctgacgtatcagccggccg

SEQ ID NO: 276626 - DNA, 75 bp, synthetic construct
  source 1..75: mol_type = other DNA
cacccagatgaactcaaaagccgatgaggaggtccgtaaagagcttaatgccattgctgacgtatcagccggccg

SEQ ID NO: 276627 - DNA, 75 bp, synthetic construct
  source 1..75: mol_type = other DNA
cacccagatgaactcaaaagccgatgacgacgtccgtaaagagcttaatgccattgctgacgtatcagccggccg

SEQ ID NO: 276628 - DNA, 75 bp, synthetic construct
  source 1..75: mol_type = other DNA
cacccagatgaactcgaaagccgatgaagaggtccgtaaagagcttaatgccattgctgacgtatcagccggccg

SEQ ID NO: 276629 - DNA, 75 bp, synthetic construct
  source 1..75: mol_type = other DNA
cacccagatgaactccaaagccgatgaagacgtccgtaaagagcttaatgccattgctgacgtatcagccggccg

SEQ ID NO: 276630 - DNA, 75 bp, synthetic construct
  source 1..75: mol_type = other DNA
cacccagatgaactctaaagccgatgatgaggtccgtaaagagcttaatgccattgctgacgtatcagccggccg

SEQ ID NO: 276631 - DNA, 75 bp, synthetic construct
  source 1..75: mol_type = other DNA
aaaaagcgcaggagaaagagcagcgtttgtctctgaatgcatcccttccaaatcctgttgaaaaaacgactcaga

SEQ ID NO: 276632 - DNA, 75 bp, synthetic construct
  source 1..75: mol_type = other DNA
gaacagcattatttaccgttgttaccttattgctttgttgcttcacaggtttaccgcactaataatgcttttctc

SEQ ID NO: 276633 - DNA, 75 bp, synthetic construct
  source 1..75: mol_type = other DNA
tgggggaggtgtattcgaaccgctggactcagaagaacggggccgcaccttcgaagctctggattgcccagattg

SEQ ID NO: 276634 - DNA, 75 bp, synthetic construct
  source 1..75: mol_type = other DNA
ggcggagggaaggttttcacgcaggttcagtgggagcagaaatttgcccgtcacgtgcagcacgtcagggcacag

SEQ ID NO: 276635 - DNA, 75 bp, synthetic construct
  source 1..75: mol_type = other DNA
atgcagtaccgcgttgcctatggtgacggcggttttagcgaactgcaaagcgctattcgcattcatggtaacgcg

SEQ ID NO: 276636 - DNA, 75 bp, synthetic construct
  source 1..75: mol_type = other DNA
taagtgcgttgttattaatgaagttctcttttgatgtcgttcgcttgcgtttgcagtaccgcgttgcctatggtg

SEQ ID NO: 276637 - DNA, 75 bp, synthetic construct
  source 1..75: mol_type = other DNA
tggcgcagaaacctggatggtgcatatttgcggcatcgttttacttgctggtcgtctgatgcattattacggttt

SEQ ID NO: 276638 - DNA, 75 bp, synthetic construct
  source 1..75: mol_type = other DNA
gacacctgatggagattgggttaattgttgataccggtgagagaaaaggcagaacaaagcaaattgtggtgtacc

SEQ ID NO: 276639 - DNA, 75 bp, synthetic construct
  source 1..75: mol_type = other DNA
gatatataatgtgtttctttttgggatctcgcttagcatatgccgaaaatattgacggcagcagtaccattagca

SEQ ID NO: 276640 - DNA, 75 bp, synthetic construct
  source 1..75: mol_type = other DNA
ctctctgtctctggggggaggtgaggctgctaaagtcacaatgaccggaaacagggcaacgattagcagcggcaa

SEQ ID NO: 276641 - DNA, 75 bp, synthetic construct
  source 1..75: mol_type = other DNA
caaaaaacgtagagagtatttcgtactacgttttaaaaagtactatagattttgaatggcgcagtcaggttaaat

SEQ ID NO: 276642 - DNA, 75 bp, synthetic construct
  source 1..75: mol_type = other DNA
gccggagcatttatcgtatctactattttagtggcttttgcttcaaaaaatgtagaaggtatttcgtactacgtt

SEQ ID NO: 276643 - DNA, 75 bp, synthetic construct
  source 1..75: mol_type = other DNA
agctgaactggacgagtatcgcgaagagctggttaaccactttgcccgcagcgcggaattactggataccatggc

SEQ ID NO: 276644 - DNA, 75 bp, synthetic construct
  source 1..75: mol_type = other DNA
atgaccacttttaccagagagcagttaatagctcacgcagaggagactattgaagcacagagactgtgcataccg

SEQ ID NO: 276645 - DNA, 75 bp, synthetic construct
  source 1..75: mol_type = other DNA
gatagtgtcagagagattttggaaaaaaccgagacaagtaggcaatcaaatccggtagaatctaaagcgggttag

SEQ ID NO: 276646 - DNA, 75 bp, synthetic construct
  source 1..75: mol_type = other DNA
atgactgttaaggaactgctactgataactatggtattacctttttttattactgcctgttcggataagtattct

SEQ ID NO: 276647 - DNA, 75 bp, synthetic construct
  source 1..75: mol_type = other DNA
tatgtgagttggctgttttcaattttgggaaaactatcagcgaaacttttgataatttacctgaggatcattttt

SEQ ID NO: 276648 - DNA, 75 bp, synthetic construct
  source 1..75: mol_type = other DNA
agtcaggtggctacttttattgaaagtatttcatccgtaaagaaatatgatactgcaactcttcgtcgcaaagaa

SEQ ID NO: 276649 - DNA, 75 bp, synthetic construct
  source 1..75: mol_type = other DNA
caagaaaacgctttttacgtggttggattcgctttttaaaaggcgttgagagaaaaaataaaagaagaattaaat

SEQ ID NO: 276650 - DNA, 75 bp, synthetic construct
  source 1..75: mol_type = other DNA
gttaaaggtaagccctggtacgataactgctatttctataatttcgatgaaattccctttcgtggcaaagaggga

SEQ ID NO: 276651 - DNA, 75 bp, synthetic construct
  source 1..75: mol_type = other DNA
gaggctatacaacgctgcacagcgaatcatgggcaaaatgcaaaatcaggggattgcagcagcccgagatatggg

SEQ ID NO: 276652 - DNA, 75 bp, synthetic construct
  source 1..75: mol_type = other DNA
aggccgatgaacttattaatgctgcgccaaaactatccgtgaacatggaaaaggctatagaaaaatcagcaggtg

SEQ ID NO: 276653 - DNA, 75 bp, synthetic construct
  source 1..75: mol_type = other DNA
aaaaatcattacatgcatcactctcacctctttctgaaaagatatcgatgggtaaagaaagtatcagtataaaat

SEQ ID NO: 276654 - DNA, 75 bp, synthetic construct
  source 1..75: mol_type = other DNA
tttcaaccggttataccgctaatttaggcgtcatcagcgcacttgccgaccataacgccgtggtgatgctgccaa

SEQ ID NO: 276655 - DNA, 75 bp, synthetic construct
  source 1..75: mol_type = other DNA
tcgccatcggcagtgatgataaagacgccttatcactccacttacctggcggtaaaattcgccgggttagccaaa

SEQ ID NO: 276656 - DNA, 75 bp, synthetic construct
  source 1..75: mol_type = other DNA
gctgatagtatcggaaaggagaatgcttctgcctttgcccatgacagaaaaaatgtcactgctgaaaaatttacc

SEQ ID NO: 276657 - DNA, 75 bp, synthetic construct
  source 1..75: mol_type = other DNA
tgagctgctgacggttctgccctcccgcctggatgttgaagtgaatggctttaacggtggtgttctgaaagatgt

SEQ ID NO: 276658 - DNA, 75 bp, synthetic construct
  source 1..75: mol_type = other DNA
aattaaaagaaatccagatggtacggggtggggatgtgcaaatccaatgacggcgtttattaatagggcgcttat

SEQ ID NO: 276659 - DNA, 75 bp, synthetic construct
  source 1..75: mol_type = other DNA
cttattctgtcgttgagatgatttataaatctgttgaagaattgacctcggggttccgtaaaacgattcatggct

SEQ ID NO: 276660 - DNA, 75 bp, synthetic construct
  source 1..75: mol_type = other DNA
gtgcaatcactcaccacggcgctggaaagtctgttgcgccagttatcgcaatcttttccggtagcacccggcatt

SEQ ID NO: 276661 - DNA, 75 bp, synthetic construct
  source 1..75: mol_type = other DNA
gtcacgaaccgttcacccgtgaatggtatgccggttccgcgggctatctttcgttacaacaaagcgaattctgcg

SEQ ID NO: 276662 - DNA, 75 bp, synthetic construct
  source 1..75: mol_type = other DNA
atggtgatgaagaagctgccgtcctgggcgcgattacccgttttacgtcgttggaccaggcacaacgttttcttc

SEQ ID NO: 276663 - DNA, 75 bp, synthetic construct
  source 1..75: mol_type = other DNA
accactatggcggcgtgaaaggcattatctctgaagccgatgtgaaatccggtaaagtgcaggttatcgcccctg

SEQ ID NO: 276664 - DNA, 75 bp, synthetic construct
  source 1..75: mol_type = other DNA
aattaaacatttcgaatttgataattatagaaaagctgaccgcgtagaagaaggattgttgcgacaaagtaatct

SEQ ID NO: 276665 - DNA, 75 bp, synthetic construct
  source 1..75: mol_type = other DNA
ttgcaattgtcacaggtattgtttcttcttacataggggatgatgagttgaacaaacttaatgagttgttaggga

SEQ ID NO: 276666 - DNA, 75 bp, synthetic construct
  source 1..75: mol_type = other DNA
gcgctggtattgggaaatggtaaataaaacaggtcaaacgcatccaatgtatctgacttccgatattattcatgc

SEQ ID NO: 276667 - DNA, 75 bp, synthetic construct
  source 1..75: mol_type = other DNA
cggatccattggctggcgccaagcacttattctgtcgttgagatgatttataaatctgttcaagaattgacctct

SEQ ID NO: 276668 - DNA, 75 bp, synthetic construct
  source 1..75: mol_type = other DNA
atatggtgaaaaatattcaaaaatggcacaggaacttgctgataagtctaaaggtaagaaaatcagcaatgtgaa

SEQ ID NO: 276669 - DNA, 75 bp, synthetic construct
  source 1..75: mol_type = other DNA
gggcatctatcctaccagctgaaatgtccaaatattatcaaatgtatttccctcagcctggtgattccacaaaaa

SEQ ID NO: 276670 - DNA, 75 bp, synthetic construct
  source 1..75: mol_type = other DNA
gcgatgacgtataccagaagcaaaacgtttaaaactgaagctggcgcgcgtcgctggctggaaagaaactcaggt

SEQ ID NO: 276671 - DNA, 75 bp, synthetic construct
  source 1..75: mol_type = other DNA
gccatgacgtataccaaaagcaaaacgtttaaaaccgaaactggcgcgcgtcgctggttagcaagaaactctgac

SEQ ID NO: 276672 - DNA, 75 bp, synthetic construct
  source 1..75: mol_type = other DNA
ccagtattgcattaggtaacacaagtgaagccagcgaacaaaatgcgattgcgctggggcaaggcagcattgcaa

SEQ ID NO: 276673 - DNA, 75 bp, synthetic construct
  source 1..75: mol_type = other DNA
aacgtttcggtaatgcagtaacgcacctcgaagccgtaagcccactgtcaacgctggcgcgtggatacagcgtta

SEQ ID NO: 276674 - DNA, 75 bp, synthetic construct
  source 1..75: mol_type = other DNA
ccgctgaagtagtgagccgtaatcagcaagagttactgcgccaggtgcaatcgacccgtcaacggctggagatgg

SEQ ID NO: 276675 - DNA, 75 bp, synthetic construct
  source 1..75: mol_type = other DNA
gatagggctacaggcactagcagatggagaggggagtactgcattcggctataaaagccactcatcgggcgatcg

SEQ ID NO: 276676 - DNA, 75 bp, synthetic construct
  source 1..75: mol_type = other DNA
tcatacaaaaaagtttatattcttggtcatggtagtgcaggtgataaccacatcacttatggaagtgagtatctt

SEQ ID NO: 276677 - DNA, 75 bp, synthetic construct
  source 1..75: mol_type = other DNA
gattccaaagtggtgtatcgaccgtatcccttctgatgcccaaatcataggtgaaacggaattacattatcttgt

SEQ ID NO: 276678 - DNA, 75 bp, synthetic construct
  source 1..75: mol_type = other DNA
gattccttcatggtgcttagataaattaccatgtgacgcacagattttaggtgatgatgggatgtattcttacgt

SEQ ID NO: 276679 - DNA, 75 bp, synthetic construct
  source 1..75: mol_type = other DNA
atgacatataccaaaagcaaaacgtttaaaaccgaagctggcgcgcgtcgctggttagcaagaaactccgactga

SEQ ID NO: 276680 - DNA, 75 bp, synthetic construct
  source 1..75: mol_type = other DNA
gcaatgacgtataccaaaagcaaatcgtttaaaaccgaatctggcgcgcgtcgctggctggaaagaaattcaggt

SEQ ID NO: 276681 - DNA, 75 bp, synthetic construct
  source 1..75: mol_type = other DNA
catgagagatatccggcttcttccgtgttattctgcagatgcacaaaaaataacgtcaacctctccatttcgcag

SEQ ID NO: 276682 - DNA, 75 bp, synthetic construct
  source 1..75: mol_type = other DNA
caccgattacagcaacagcatccgcaactccggctggcacgccagcaaaccatgcttgaacgcctgcaaaaaagg

SEQ ID NO: 276683 - DNA, 75 bp, synthetic construct
  source 1..75: mol_type = other DNA
ctgactgctttgcaaggtctttcaggtattgcaggggtgtttcagcaggaaaagcaggctcagcggcagaaagaa

SEQ ID NO: 276684 - DNA, 75 bp, synthetic construct
  source 1..75: mol_type = other DNA
atgctgactactatgtctctcggtgcacttgggccagaaaaggcgtttgctgttcaggacaagatggctggtcgt

SEQ ID NO: 276685 - DNA, 75 bp, synthetic construct
  source 1..75: mol_type = other DNA
acgtccggacaggatttcacctccagcacccaggaccgcgttggcacagtaaaggttcccttactggagccggcg

SEQ ID NO: 276686 - DNA, 75 bp, synthetic construct
  source 1..75: mol_type = other DNA
ggcgctaacagcacgaggccagaacatcacgatgcgcggtcaggacttatctgcttctactacgcgacgcggtca

SEQ ID NO: 276687 - DNA, 75 bp, synthetic construct
  source 1..75: mol_type = other DNA
tgcaatgcgaaaactggcatcacagtatcctgagcagtttgacgccgtaagaaacggcatgaaatttgtcgatga

SEQ ID NO: 276688 - DNA, 75 bp, synthetic construct
  source 1..75: mol_type = other DNA
cagaaactattgctgaaatgcaggttaatgacccgcagggcttccagcatttcgcaggtaatctggcgctgtttt

SEQ ID NO: 276689 - DNA, 75 bp, synthetic construct
  source 1..75: mol_type = other DNA
ggcacgttcaccgcaatgacgtataccaaaagcaaaacgtttaaaaccgaaaatggtgcccgtcgctggctggaa

SEQ ID NO: 276690 - DNA, 75 bp, synthetic construct
  source 1..75: mol_type = other DNA
atgaatactatcgatcttggcaacaacgaatctctggtgtacggcgtgttccccaaccaggacggcacattcacc

SEQ ID NO: 276691 - DNA, 75 bp, synthetic construct
  source 1..75: mol_type = other DNA
gaatatcgattagcagaaaccctgcgcgtacagcttagcgccacgcgtgaacgtttcggtaatgcagtaacgcac

SEQ ID NO: 276692 - DNA, 75 bp, synthetic construct
  source 1..75: mol_type = other DNA
atgacggcagggttcaactttaactatgcagcaggtttttgttccgctaccccggcgttaaggggatatgaggtc

SEQ ID NO: 276693 - DNA, 75 bp, synthetic construct
  source 1..75: mol_type = other DNA
acatggaagaattcacggatttttcataggcaacgtttttcacatagtctggctcgatccggagcacaaactgta

SEQ ID NO: 276694 - DNA, 75 bp, synthetic construct
  source 1..75: mol_type = other DNA
acgtataccaaaagcaaaacgtttaaaaccgaacctggagcgcgtcgctggctggaaagaaattcaggtgggtga

SEQ ID NO: 276695 - DNA, 75 bp, synthetic construct
  source 1..75: mol_type = other DNA
aaatcgttatctgccacgctgactacccgcataacgaatatgcgttcgataagcccatcccgaaagatatggtca

SEQ ID NO: 276696 - DNA, 75 bp, synthetic construct
  source 1..75: mol_type = other DNA
ctggctggtaaatggtggtggatggttcttttatctcgactacgaaaaagaagtgttggctaaggcgctggttca

SEQ ID NO: 276697 - DNA, 75 bp, synthetic construct
  source 1..75: mol_type = other DNA
tggctaatgaatggcggacaatggttcttcatgctggacactgatcaggaaatattagcctggcgctggtggagc

SEQ ID NO: 276698 - DNA, 75 bp, synthetic construct
  source 1..75: mol_type = other DNA
aagtccagatggcaacgtgaataactggctaatgaatggcggacaatggttcttcatgctggacactgatcagga

SEQ ID NO: 276699 - DNA, 75 bp, synthetic construct
  source 1..75: mol_type = other DNA
atgaaaaagttattaccctgtaccgcactggtgatgtgtgcgggaatggcctgcgcacaggctgaggaaaaaaaa

SEQ ID NO: 276700 - DNA, 75 bp, synthetic construct
  source 1..75: mol_type = other DNA
ctggctggaaaacggcggcgtgtggttcttcagtcttgattatgaaaaagaggtgctggctaaggctctggttca

SEQ ID NO: 276701 - DNA, 75 bp, synthetic construct
  source 1..75: mol_type = other DNA
atagccggtgctgatctgtttatcttcggccacacccctgcgcgccagcccctgaagtataccaaccagatgtac

SEQ ID NO: 276702 - DNA, 75 bp, synthetic construct
  source 1..75: mol_type = other DNA
ctggctggtaaacggtggcggttggttcttcaatctcgactatgacaaagaggtgctggctaaggctctggttca

SEQ ID NO: 276703 - DNA, 75 bp, synthetic construct
  source 1..75: mol_type = other DNA
aaaataaatccatccgtctgcaagccgaagctgaaacctggcaggaggcggtgaaaatcggcgttgacctgctgg

SEQ ID NO: 276704 - DNA, 75 bp, synthetic construct
  source 1..75: mol_type = other DNA
gaacctgtggcatttgtgcttccgggaacggcgtttcgtgtctctgtcggtgtggcagctgaaatgacagagcgt

SEQ ID NO: 276705 - DNA, 75 bp, synthetic construct
  source 1..75: mol_type = other DNA
caaactgccccgcttcgataaggatcacctgatcaggctctgcactgtgttcatcagcgtagccgagatatttga

SEQ ID NO: 276706 - DNA, 75 bp, synthetic construct
  source 1..75: mol_type = other DNA
gacacatctgtcagcccggaaaatgcgctgaccggacatgaaaatgaggttgtatcagcgcagccggataccgtg

SEQ ID NO: 276707 - DNA, 75 bp, synthetic construct
  source 1..75: mol_type = other DNA
gtactggcctggggttacttcctgcatcagggcgtggtcgatccgctgggcggcattaataccctgtggccgctg

SEQ ID NO: 276708 - DNA, 75 bp, synthetic construct
  source 1..75: mol_type = other DNA
acatgcagtatgcctacacccgtgtgttgtccgtgttccgtaaagcagaaattaacgaagagcaactggctgcgg

SEQ ID NO: 276709 - DNA, 75 bp, synthetic construct
  source 1..75: mol_type = other DNA
gggcgatcgtccgtaaagcaggctatgtaccggaatccgtaccgctggaacaccacatgttcggcatgatgctgg

SEQ ID NO: 276710 - DNA, 75 bp, synthetic construct
  source 1..75: mol_type = other DNA
agtcagctatccattttgcgtgacgacccgcgcttgcgtttaacgctgcgcccggggatgaacgtcgcctatctg

SEQ ID NO: 276711 - DNA, 75 bp, synthetic construct
  source 1..75: mol_type = other DNA
aaacggttgccttgcgagtgaactattatctcgagcgcggcttcaatatggacgacagccgcaataacggtgagt

SEQ ID NO: 276712 - DNA, 75 bp, synthetic construct
  source 1..75: mol_type = other DNA
ccatcacccgggcagtttgttgcctggtgccgggaagaaacatccgttaacgccgggctgccaaacgtcagcgag

SEQ ID NO: 276713 - DNA, 75 bp, synthetic construct
  source 1..75: mol_type = other DNA
ctacagcgccagagtgctgacgccttactggcaatgctcccacagcgtaaatacacccacgtactggacgcgggt

SEQ ID NO: 276714 - DNA, 75 bp, synthetic construct
  source 1..75: mol_type = other DNA
gccgttagcgactgcgacgttcgatcttgcatggagcaatctcgcggtgcagtggtgcggtaatttatccacggc

SEQ ID NO: 276715 - DNA, 75 bp, synthetic construct
  source 1..75: mol_type = other DNA
aacgcgcactactggttggttaccaacctgtaccagaacatgcgggccaatgcgttgactgacgcggaattacgg

SEQ ID NO: 276716 - DNA, 75 bp, synthetic construct
  source 1..75: mol_type = other DNA
ctggacattgcacggcagaacgttgagctgaacaaactggatctgagcaaggcagagttcgtgcgtgatgacgtc

SEQ ID NO: 276717 - DNA, 75 bp, synthetic construct
  source 1..75: mol_type = other DNA
cagtgtcgatacttcacaggaagcactggatatcgcacggaaaaacgttgagctaaacaaactcgatttgagcaa

SEQ ID NO: 276718 - DNA, 75 bp, synthetic construct
  source 1..75: mol_type = other DNA
gtctatcgacattgctttttttacccgccgtttgcaacaagcacaaaaatggcgtgactggctggcgcaaaaaga

SEQ ID NO: 276719 - DNA, 75 bp, synthetic construct
  source 1..75: mol_type = other DNA
atggtaacggttaataaacaagccattgcagcggcatttggtcgggcagccgcacactatgagcaacatgcagat

SEQ ID NO: 276720 - DNA, 75 bp, synthetic construct
  source 1..75: mol_type = other DNA
tgtggacctggctggatgagccgccactggcgcgagcgcagcgagcaggtgatggcgttagatctctcgccgcca

SEQ ID NO: 276721 - DNA, 75 bp, synthetic construct
  source 1..75: mol_type = other DNA
ttgcaactggcctggccgcaacaacaggggcgataccctctgacttatcatctttttttgggagtgattactcgt

SEQ ID NO: 276722 - DNA, 75 bp, synthetic construct
  source 1..75: mol_type = other DNA
cacttaaccgggctcaggctctggcgaagatcgcagaaattaaagctaagttcggactgaaaggagccagtgtat

SEQ ID NO: 276723 - DNA, 75 bp, synthetic construct
  source 1..75: mol_type = other DNA
tttgcctcgcgcctcgtgggcttatgataacgaagctaaaattacagagtacaacccggcaaaatcgcgcgagca

SEQ ID NO: 276724 - DNA, 75 bp, synthetic construct
  source 1..75: mol_type = other DNA
ttgtacgtactgcgtatactggttggcattaccgaagccggctttctgcctggcattctgctctatttaaccttc

SEQ ID NO: 276725 - DNA, 75 bp, synthetic construct
  source 1..75: mol_type = other DNA
ctgacgaaagaagacaaaaaatgcctgcaagagatgatggataacgatcgtctgacgctggttcagcctgaggga

SEQ ID NO: 276726 - DNA, 75 bp, synthetic construct
  source 1..75: mol_type = other DNA
tctgcttaatggcagcgaacatgtaacggttaaatttttgcagacgctggcgcagcgactgccgcagcatgagga

SEQ ID NO: 276727 - DNA, 75 bp, synthetic construct
  source 1..75: mol_type = other DNA
aacgggaatgccatctgcacaaatctgtcagatcaccggactttccgaagctgaactgaagaacatcactcactg

SEQ ID NO: 276728 - DNA, 75 bp, synthetic construct
  source 1..75: mol_type = other DNA
gttacaagatgggaaaagcaattgccaatacattgtgtaaagctcacttcctgtacaggattaggtaatgcattg

SEQ ID NO: 276729 - DNA, 75 bp, synthetic construct
  source 1..75: mol_type = other DNA
atgatgcaccttaaatatttttcaagtcgcgtgttatgcaatgaaaaaataaaacagaaagatattggtgatatc

SEQ ID NO: 276730 - DNA, 75 bp, synthetic construct
  source 1..75: mol_type = other DNA
catgtttgccactggccccaccagcttatacgtactgcgtatactggttggcattaccgaagccggctttctgcc

SEQ ID NO: 276731 - DNA, 75 bp, synthetic construct
  source 1..75: mol_type = other DNA
cacatttcaatgacaaacgggaaaaggtttttagaactgaccttttccagtttcaacctttcactttctgcgtcc

SEQ ID NO: 276732 - DNA, 75 bp, synthetic construct
  source 1..75: mol_type = other DNA
tgtgcagtcacggatgagcatacccgtcagatagttgacttttgcgataaccttggacagcagcttaaggatccg

SEQ ID NO: 276733 - DNA, 75 bp, synthetic construct
  source 1..75: mol_type = other DNA
ggcatttctggggcaaatctggagcggcattatcactaccgccaccggcgtctgggaaggcattaaaaccaccgt

SEQ ID NO: 276734 - DNA, 75 bp, synthetic construct
  source 1..75: mol_type = other DNA
gttcatgacgttgttcgtgaactgatggaagaaaagcgcgccagccgtcaggtgacagttccggcggtgatgctg

SEQ ID NO: 276735 - DNA, 75 bp, synthetic construct
  source 1..75: mol_type = other DNA
ggacggaacctgtcacgatgagctgaaaccgtcatgcagcggctggacgatgcttttgtatatggcgcatgtgac

SEQ ID NO: 276736 - DNA, 75 bp, synthetic construct
  source 1..75: mol_type = other DNA
cagcgtcaatttggtgaaaactacgttcaggaaggggtagataaaattcgccactttcaggaactgggcgtaaca

SEQ ID NO: 276737 - DNA, 75 bp, synthetic construct
  source 1..75: mol_type = other DNA
ggctatctcttctccgctgctggaagacatcgacctgtctggcgcgcgcggcgtgctggttaacatcacggcggg

SEQ ID NO: 276738 - DNA, 75 bp, synthetic construct
  source 1..75: mol_type = other DNA
catttgcttccgacaacgcgactgtggttatcggtacttctcttgacccggatatgaatgacgagctgcgcgtaa

SEQ ID NO: 276739 - DNA, 75 bp, synthetic construct
  source 1..75: mol_type = other DNA
gatgaaccctttgaaccgcgcccgctgctggaaagtaccctgcaattaatgagcggacgggtgaaaggtcgcccg

SEQ ID NO: 276740 - DNA, 75 bp, synthetic construct
  source 1..75: mol_type = other DNA
gaacaacaggagcaggagatctcccgttcgttacgtcagcaaggggaactggtggggcagcgtttgcaactgcgc

SEQ ID NO: 276741 - DNA, 75 bp, synthetic construct
  source 1..75: mol_type = other DNA
acgatgtaccgagcgcgttaatgggcgatccgcgacgtattcgccaggttattaccaacttgttgagcaacgccg

SEQ ID NO: 276742 - DNA, 75 bp, synthetic construct
  source 1..75: mol_type = other DNA
agaataaatctatccgtctgcaggctgaagctgagacatggcaggacgcagtgaaaatcggcgttgacctgctgg

SEQ ID NO: 276743 - DNA, 75 bp, synthetic construct
  source 1..75: mol_type = other DNA
gttgaacagtttggtccttatttcgttatcgcaccaggcctggcaatgccgcacggtcgcccggaagagggcgtt

SEQ ID NO: 276744 - DNA, 75 bp, synthetic construct
  source 1..75: mol_type = other DNA
gatggaagaaaagcgcgccagccgtcaggtgacagttccggcggtgatgctggaaaaagtgatggcgctggcagg

SEQ ID NO: 276745 - DNA, 75 bp, synthetic construct
  source 1..75: mol_type = other DNA
gaagaaaagcgcgccagccgtcaggtgacagttccggcggtgatgctggaaaaagtgatggcgctggcaggcagt

SEQ ID NO: 276746 - DNA, 75 bp, synthetic construct
  source 1..75: mol_type = other DNA
tatggctgtagaatttcataaacttgttaatggtgatgcggctaacgttatcaaacaaatacggttactttacgg

SEQ ID NO: 276747 - DNA, 75 bp, synthetic construct
  source 1..75: mol_type = other DNA
cgatgattttatgcctacagtgaattgtcttgaaatattaatatcaaatagccctgatggtattgtccaacctgt

SEQ ID NO: 276748 - DNA, 75 bp, synthetic construct
  source 1..75: mol_type = other DNA
gggcaggagacctgagcagcgccaagctctggtacggtctgaatgatttccgggtatctgagctaaaggggcgat

SEQ ID NO: 276749 - DNA, 75 bp, synthetic construct
  source 1..75: mol_type = other DNA
aactgcaaaacatatgcaccgaatttcagcaggaatgattttgactgcactggcagctaaaaatcataaggccgt

SEQ ID NO: 276750 - DNA, 75 bp, synthetic construct
  source 1..75: mol_type = other DNA
tccattatctgaatgaaatctgtcattccagagaaaccgctgtcaatgacgcattttgtcggacgttaacacgag

SEQ ID NO: 276751 - DNA, 75 bp, synthetic construct
  source 1..75: mol_type = other DNA
tctggaaccgcaagattgttctcggctcaacgccaaccgtgaaaggcgtgagccgtattgaaaaagcctggctgg

SEQ ID NO: 276752 - DNA, 75 bp, synthetic construct
  source 1..75: mol_type = other DNA
taagccagtgggccaacaccttcgctgtactgtcccgtgagaccagtgcccagacggggaaattccgctcctatc

SEQ ID NO: 276753 - DNA, 75 bp, synthetic construct
  source 1..75: mol_type = other DNA
tatttttgtcgggccgttgatcgtaccggaatacccggcgatgttgcagtcgatggggcgttatctggcgttagg

SEQ ID NO: 276754 - DNA, 75 bp, synthetic construct
  source 1..75: mol_type = other DNA
gtgaacttggaactgatgacagggcatccgccggagatacagtttgaagaggcgctgatcctggcgcgaggatgt

SEQ ID NO: 276755 - DNA, 75 bp, synthetic construct
  source 1..75: mol_type = other DNA
cagccggaagaaaaaatcagtttaagtatgccgggcgcaaaagcaccggagacaccccgtaagaaaataccgctg

SEQ ID NO: 276756 - DNA, 75 bp, synthetic construct
  source 1..75: mol_type = other DNA
caccggctccatattgagccggatccggcaggcgcgcctgccgcaggctgtatccattttccgtcgtttctggat

SEQ ID NO: 276757 - DNA, 75 bp, synthetic construct
  source 1..75: mol_type = other DNA
gatcgcacgcctggcgcaaggtcaggcgaataatgcgacaacttccgctggagcgacccaggccgggatttacga

SEQ ID NO: 276758 - DNA, 75 bp, synthetic construct
  source 1..75: mol_type = other DNA
ggcgtccccgcgggagcgtgagcggacttcggagagttccccgaagggggagtcggagaagtctgcgaataatga

SEQ ID NO: 276759 - DNA, 75 bp, synthetic construct
  source 1..75: mol_type = other DNA
tgccgcgcatcagctaaaaagcagttgctcgagtctgggaatgcgtagcgccagccagctatgcgcacaactgga

SEQ ID NO: 276760 - DNA, 75 bp, synthetic construct
  source 1..75: mol_type = other DNA
gccgctataccgtggacgggctggcggtcgggattgagggcaacacgcaaacggcgctggccagcgtagggcaac

SEQ ID NO: 276761 - DNA, 75 bp, synthetic construct
  source 1..75: mol_type = other DNA
gtcacatagcccaggactggagtctgacagacgatgagctggaaaccgtcatgcagcggctggacgatgcttttg

SEQ ID NO: 276762 - DNA, 75 bp, synthetic construct
  source 1..75: mol_type = other DNA
gaaaatgaggtggtatcagcgcagccggataccgtgattcaggatacggctgctctggtcacggttgtggcactg

SEQ ID NO: 276763 - DNA, 75 bp, synthetic construct
  source 1..75: mol_type = other DNA
gtcagcccggaaaatgcgctgaccggacatgaaaatgaggttgtatcagcgcagccggataccgtgactgatacg

SEQ ID NO: 276764 - DNA, 75 bp, synthetic construct
  source 1..75: mol_type = other DNA
ccgagcgcgttaatgggcgatccgcgacgtattcgtcaggttataaccaacctgttgagcaacgccctgcgtttt

SEQ ID NO: 276765 - DNA, 75 bp, synthetic construct
  source 1..75: mol_type = other DNA
atatcgactcccctttcccggaaaccgctggcgtgcgggaactggataccatcgggcggctgatggatgcgtttc

SEQ ID NO: 276766 - DNA, 75 bp, synthetic construct
  source 1..75: mol_type = other DNA
atcgggcggctgatggatgcttttcgcagtagtgttcatgcgcttaatcgccaccgcgaacaactggcagcgcag

SEQ ID NO: 276767 - DNA, 75 bp, synthetic construct
  source 1..75: mol_type = other DNA
aagccagtgaacgagggcaatacagcttgctactcctgggcgttgtttccctttgctctttgattctgatcctct

SEQ ID NO: 276768 - DNA, 75 bp, synthetic construct
  source 1..75: mol_type = other DNA
cgccagcaacaacggcaactcagtcagcagatagtcgctgccgccgatgagatcgcacgcctggcgcaaggtcag

SEQ ID NO: 276769 - DNA, 75 bp, synthetic construct
  source 1..75: mol_type = other DNA
cagtaccagcctggcccaggcgatgggcggcgaactgatcgccacaagcacgccgggggttggaagctgtttttg

SEQ ID NO: 276770 - DNA, 75 bp, synthetic construct
  source 1..75: mol_type = other DNA
atatcgactccccttttccggaaaccgctggcgtgcgggagctggacaccatcgggcggctgatggatgcgtttc

SEQ ID NO: 276771 - DNA, 75 bp, synthetic construct
  source 1..75: mol_type = other DNA
atgatagcctcatcaataataaggctttatgctagatgcattctgctttgcgactcaacctttttcaccttaagt

SEQ ID NO: 276772 - DNA, 75 bp, synthetic construct
  source 1..75: mol_type = other DNA
gcagcagccattatctgcccccttccacacgaagaaattacacgcagtgttgccgctctggaagcatggttgcat

SEQ ID NO: 276773 - DNA, 75 bp, synthetic construct
  source 1..75: mol_type = other DNA
cgatccgcggcgtattcgccaggttattactaatttgttgagtaattccctacgtttcactgacgaggggcagat

SEQ ID NO: 276774 - DNA, 75 bp, synthetic construct
  source 1..75: mol_type = other DNA
gggatggtacaacctgcgttttgtcagcgaggtggaaaaagccaatactcaggcattgattcctaccatgaatat

SEQ ID NO: 276775 - DNA, 75 bp, synthetic construct
  source 1..75: mol_type = other DNA
cggcattacgcttgcccgacaactggcacagcaatatccgtcgctggttttgattggctttagcgcccatgtcat

SEQ ID NO: 276776 - DNA, 75 bp, synthetic construct
  source 1..75: mol_type = other DNA
atttcgcgggattatccctaaaccggtgccgcgtgaagtgctcggtcagttactggcgcactatctccaactgca

SEQ ID NO: 276777 - DNA, 75 bp, synthetic construct
  source 1..75: mol_type = other DNA
cagcgtcattcggcaggcgataaagaagcgcaaggtgttcccaacggacgactcggtgcgaaaagtgatttatct

SEQ ID NO: 276778 - DNA, 75 bp, synthetic construct
  source 1..75: mol_type = other DNA
aatgctgaagtcccaggaagtggatttaatggttaccactcatcgtcctgatacctttaaggcgttgaacctgcg

SEQ ID NO: 276779 - DNA, 75 bp, synthetic construct
  source 1..75: mol_type = other DNA
ttaacctcgatcttgatctgctgagaacatttgttgctgttgccgatctgaacacgtttgcagccgcagccgctg

SEQ ID NO: 276780 - DNA, 75 bp, synthetic construct
  source 1..75: mol_type = other DNA
ccgcgaaatcgtcgccaccttcaaagagatgtacgacgcggatgtgtcgcccacgctgatatccagagtcacaga

SEQ ID NO: 276781 - DNA, 75 bp, synthetic construct
  source 1..75: mol_type = other DNA
aaatggacgatgccgttgaaggactggcgaatggcaatgagccgctttattatcgagttcggtgaccgcctggac

SEQ ID NO: 276782 - DNA, 75 bp, synthetic construct
  source 1..75: mol_type = other DNA
ccacgctgatatccaaagtgaccgatgcggttaaagaacaggtctctgaatggcaaaatcgaccgttggatgcac

SEQ ID NO: 276783 - DNA, 75 bp, synthetic construct
  source 1..75: mol_type = other DNA
ttaaaatctgattatatcattgctaacccaccgtttaacgtttccgactggtccggtgagcagcttcgtggtgat

SEQ ID NO: 276784 - DNA, 75 bp, synthetic construct
  source 1..75: mol_type = other DNA
cagcaaggaagatgttgcccatctggcaaaatctgtcgcgtttgaggccgttgtcgcgaatgactataacctgtc

SEQ ID NO: 276785 - DNA, 75 bp, synthetic construct
  source 1..75: mol_type = other DNA
gcagcgatgacccgacgctgattaacgatgaacgttttgccccggctggcgttctggcccccaaatccaaagctg

SEQ ID NO: 276786 - DNA, 75 bp, synthetic construct
  source 1..75: mol_type = other DNA
ctgtgtgtcgtactcagtccgctgtaagtcagcaaatgcagcgtctggaacaactcgttgggaaagaactgttcg

SEQ ID NO: 276787 - DNA, 75 bp, synthetic construct
  source 1..75: mol_type = other DNA
atggctagaaaacctaaagaaatcaaaacagacccgttagaagtcatcctttggaaagcggcggacaagctgcgt

SEQ ID NO: 276788 - DNA, 75 bp, synthetic construct
  source 1..75: mol_type = other DNA
tcggtcatttaattaatcgtcgtaccaaagtactttctgacgacgatataaaaaccatcgctgatacctatcata

SEQ ID NO: 276789 - DNA, 75 bp, synthetic construct
  source 1..75: mol_type = other DNA
agtttaacgagctgatgggggatgagtttattcctctcatcaacaaagggggcggtgccggcatgcaggtgacgg

SEQ ID NO: 276790 - DNA, 75 bp, synthetic construct
  source 1..75: mol_type = other DNA
agccgggttatcaacagagcggtgttcctggctctgggtattaaccttgatggtcagaaagagctgccaggtatg

SEQ ID NO: 276791 - DNA, 75 bp, synthetic construct
  source 1..75: mol_type = other DNA
gtttaccccattgttatcttgactgtatcgtcctgaaagtcggcagacagtcgcggtcatcaacaaatcgtgtct

SEQ ID NO: 276792 - DNA, 75 bp, synthetic construct
  source 1..75: mol_type = other DNA
gaataaagtggtgtggctggcaatccagtctgcgtccccgaaatggacgatgccgttgaaggactggcgaatggc

SEQ ID NO: 276793 - DNA, 75 bp, synthetic construct
  source 1..75: mol_type = other DNA
ccgggtttcctggagagtattttatctgtgaactcaggctgccagatcattatttccgatggaagcataataagc

SEQ ID NO: 276794 - DNA, 75 bp, synthetic construct
  source 1..75: mol_type = other DNA
gaccgttatcacaggcgacggtccactggaactgcgtactccgtgcgatcgtgacggtaccttcgaaccacaact

SEQ ID NO: 276795 - DNA, 75 bp, synthetic construct
  source 1..75: mol_type = other DNA
cgccaacgcttatttccaaggtgactgatgctgttaaggagcaagtcgctgaatggcaaaaccgtccgctggatg

SEQ ID NO: 276796 - DNA, 75 bp, synthetic construct
  source 1..75: mol_type = other DNA
tggaagcgttcgccagcgcctgggacagtcgctacccgcagataagccggagctggcaggcaaactggaccaacc

SEQ ID NO: 276797 - DNA, 75 bp, synthetic construct
  source 1..75: mol_type = other DNA
ttctggctcaatgtgctgactgaactaaaaaaccgcggcctgaacgatattctcatagcctgtgtcgacgggctg

SEQ ID NO: 276798 - DNA, 75 bp, synthetic construct
  source 1..75: mol_type = other DNA
cgacgaatgccatcgaatcgctgaacagcgtcattcggcaggcgataaagaagcgcaaggtgttcccaacggacg

SEQ ID NO: 276799 - DNA, 75 bp, synthetic construct
  source 1..75: mol_type = other DNA
cactcgcgacctgaaagcgatttatcaggctcccacggaagaggcaggccagcaggcactggaagcgttcgctgc

SEQ ID NO: 276800 - DNA, 75 bp, synthetic construct
  source 1..75: mol_type = other DNA
aaatggacgatgccacttcaggactggcggatagtaatgagtcgctttattatcgaattcggtgaccgccctgac

SEQ ID NO: 276801 - DNA, 75 bp, synthetic construct
  source 1..75: mol_type = other DNA
accaacgccatcgagtcgctgaacagcgtaatccggcatgccatcaaaaaacgcaaggtgttcccgacggatgac

SEQ ID NO: 276802 - DNA, 75 bp, synthetic construct
  source 1..75: mol_type = other DNA
gtgctgtctaagcataaaacggataccaaagttcagtttattgacgccagcgaactgttcaaaaaagagactaac

SEQ ID NO: 276803 - DNA, 75 bp, synthetic construct
  source 1..75: mol_type = other DNA
tgactctcggccatcgcgtgaaaatcggcaccggttgcgtgattaaaaacagcgtgattggcgatgattgcgaaa

SEQ ID NO: 276804 - DNA, 75 bp, synthetic construct
  source 1..75: mol_type = other DNA
ggcgtgaaatcgtcgccgttcatccgcaacgtttaagcgaagtagaaggcgtgaataaccgcctgcaactctccc

SEQ ID NO: 276805 - DNA, 75 bp, synthetic construct
  source 1..75: mol_type = other DNA
ctggcgctgagttactggagggcgcacacgtcggtaacttcgttgagatgaaaaaagcgcgtttgggtaaaggct

SEQ ID NO: 276806 - DNA, 75 bp, synthetic construct
  source 1..75: mol_type = other DNA
cgcgaaattatcgatatcgctgagctgaatgctgagctgaaaaccacggtcagcaaaatcgaccagttgcgtaaa

SEQ ID NO: 276807 - DNA, 75 bp, synthetic construct
  source 1..75: mol_type = other DNA
tcgaacagattatgcaggtatttgccagcaaggaagatgtgatcttacccagcaatagtggacacgcggctaagt

SEQ ID NO: 276808 - DNA, 75 bp, synthetic construct
  source 1..75: mol_type = other DNA
catcatcgaagaaggtttttttggtcaggaaatcaaccatacgacctataacctggcgcgtatgaacatgttttt

SEQ ID NO: 276809 - DNA, 75 bp, synthetic construct
  source 1..75: mol_type = other DNA
tatcagcgaaaatttctccgggtatatggaagccggtgatgacagcatctgttatgcaaaactggatgacaacgt

SEQ ID NO: 276810 - DNA, 75 bp, synthetic construct
  source 1..75: mol_type = other DNA
atgacaagtattcaacaaagagcagaactgcaccgccagatatggcaaattgctaacgatgtcagaggttcggtc

SEQ ID NO: 276811 - DNA, 75 bp, synthetic construct
  source 1..75: mol_type = other DNA
cgaattgttcaaaaaagagactaacaacaacattctgaccgatgctcatatcgaacagattatgcaagtatttgc

SEQ ID NO: 276812 - DNA, 75 bp, synthetic construct
  source 1..75: mol_type = other DNA
ttgtcgctaatgactataacctgtcggtaagcagctatgtggaagcgaaagataaccgcgaaattatcgatatcg

SEQ ID NO: 276813 - DNA, 75 bp, synthetic construct
  source 1..75: mol_type = other DNA
cagcaaggaagatgttgctcatctggcaaaatctgtcacgtttgaggccgttgtcgctaatgactataacctgtc

SEQ ID NO: 276814 - DNA, 75 bp, synthetic construct
  source 1..75: mol_type = other DNA
tctaccccagtcagcttttctgcaacgtagctgcgaaagcaaataccaatgacagactgaatgcagatttaaaca

SEQ ID NO: 276815 - DNA, 75 bp, synthetic construct
  source 1..75: mol_type = other DNA
cgtcaacaaaatctatgaccctgccgcaggttctggctcactgctgcttcaggcgaagaagcactttgataacca

SEQ ID NO: 276816 - DNA, 75 bp, synthetic construct
  source 1..75: mol_type = other DNA
tctacccgagccagctgttctgcaacgtagctgcgaaagcaaataccaatgacagactgaatgcagatttaaaca

SEQ ID NO: 276817 - DNA, 75 bp, synthetic construct
  source 1..75: mol_type = other DNA
gtgatattggttgtctggagattcagggggccagtctacgtaattactgatgacattaaagacgatgccatcaaa

SEQ ID NO: 276818 - DNA, 75 bp, synthetic construct
  source 1..75: mol_type = other DNA
gcgaaatctgttccgtttgagactgttgccgcgaatgactataacctgtcagtcagcagctacatcgaagccatg

SEQ ID NO: 276819 - DNA, 75 bp, synthetic construct
  source 1..75: mol_type = other DNA
ttctgggcgcacttttctaccgttttatcagcgaaaatttttccagccatatggaaaatggtgatgacagcatct

SEQ ID NO: 276820 - DNA, 75 bp, synthetic construct
  source 1..75: mol_type = other DNA
aacaactatgttgaaacggtgatttcactggcaccgaatctgttcttcggcaccaccattgccgtaaacattctg

SEQ ID NO: 276821 - DNA, 75 bp, synthetic construct
  source 1..75: mol_type = other DNA
atgcggaactgaaaaccacggtcagcaaaatcaaccagttgcgtaaagatattgatgcgattgtggctgaaattg

SEQ ID NO: 276822 - DNA, 75 bp, synthetic construct
  source 1..75: mol_type = other DNA
gataaccgcgaaattatcgatattgctgagctgaatgcggaactgaaaaccacggtcagcaaaatcaaccagttg

SEQ ID NO: 276823 - DNA, 75 bp, synthetic construct
  source 1..75: mol_type = other DNA
gctgcgattgtctgcttcccgggcattttttaccgtggcggcgcggagcagaaaatccgtcagtatctggttgac

SEQ ID NO: 276824 - DNA, 75 bp, synthetic construct
  source 1..75: mol_type = other DNA
gcgaaatctgtcgcgtttgagaccgttgtcgctaatgactataagctgtcggtgagcagctatgtggaagcgaaa

SEQ ID NO: 276825 - DNA, 75 bp, synthetic construct
  source 1..75: mol_type = other DNA
cattaccgatgacatcaaagacgatgccatcaggactaaaggctatttcatctacccgagccagctgttctgcaa

SEQ ID NO: 276826 - DNA, 75 bp, synthetic construct
  source 1..75: mol_type = other DNA
aataactatgtcgaaaccgtaatttcactggcaccgaacctgttctttggcaccaccattgcagtaaacattctg

SEQ ID NO: 276827 - DNA, 75 bp, synthetic construct
  source 1..75: mol_type = other DNA
atgcacgggcagacccacgttaacaaaatctacgacccggcagcgggttccggctcactgttgttgcaggcgaaa

SEQ ID NO: 276828 - DNA, 75 bp, synthetic construct
  source 1..75: mol_type = other DNA
ctgcccattattggcatttgcctcggacatcaggcgattgtcgaagcttacgggggctatgtcggtcaggcgggc

SEQ ID NO: 276829 - DNA, 75 bp, synthetic construct
  source 1..75: mol_type = other DNA
ctcgtcagatctgctggcggcgtttggcattaacctggatatgaatgccgataaatcgcgccaggcgctcgacga

SEQ ID NO: 276830 - DNA, 75 bp, synthetic construct
  source 1..75: mol_type = other DNA
gaaactggagcccaccaatacactgcaaccaattctggaaaaactgtatcaggcgcagacgcttagccagcagga

SEQ ID NO: 276831 - DNA, 75 bp, synthetic construct
  source 1..75: mol_type = other DNA
aacgaaaaaacctcaattgcttgcaaagctggaacgtctggagagacagggacagtttttattaccgggattcga

SEQ ID NO: 276832 - DNA, 75 bp, synthetic construct
  source 1..75: mol_type = other DNA
gtgaagaagcctcagttgctggcaaggctggacaggctggagcaacagggacagattgcgttacccggatttgat

SEQ ID NO: 276833 - DNA, 75 bp, synthetic construct
  source 1..75: mol_type = other DNA
atggctgatttgagaaaagcagcgtgtggtcgggaatgccaggtaagaatcccaggcgtatgtaatggcaatcct

SEQ ID NO: 276834 - DNA, 75 bp, synthetic construct
  source 1..75: mol_type = other DNA
cagcgattacaccaaagaagaattgcgcctgatgcatgcagaaggtgtttttcgcacacaagagatctggagaaa

SEQ ID NO: 276835 - DNA, 75 bp, synthetic construct
  source 1..75: mol_type = other DNA
tcgcctggccgggttatgtggcaccggaatcaaaccgcctgatctgattgccaccattgcatgctctgcctgtca

SEQ ID NO: 276836 - DNA, 75 bp, synthetic construct
  source 1..75: mol_type = other DNA
cggcaaagttaaaggtgcaatgctggatgtttttaatcgcgaacccttaccgccggaaagtccgctctggcaaca

SEQ ID NO: 276837 - DNA, 75 bp, synthetic construct
  source 1..75: mol_type = other DNA
ccgaaatatcacaccggatttcgccatgcaatgccggttcgccagcaactaaaaacccgcaccctgttcaatgtg

SEQ ID NO: 276838 - DNA, 75 bp, synthetic construct
  source 1..75: mol_type = other DNA
catgaagatctgcaagccaatgcgcaaaccgttcttgaggtactgcgcagtggttccgcttacgacagagttacc

SEQ ID NO: 276839 - DNA, 75 bp, synthetic construct
  source 1..75: mol_type = other DNA
tcaatgtgctggggccattgattaacccggcgcatccgccgctggcgttaattggtgtttatagtccggaactgg

SEQ ID NO: 276840 - DNA, 75 bp, synthetic construct
  source 1..75: mol_type = other DNA
tgaaaatcgcattaccgggtcggtgctcggcgctgttgctggcggcgtgattgggcatcagtttggtggtggtcg

SEQ ID NO: 276841 - DNA, 75 bp, synthetic construct
  source 1..75: mol_type = other DNA
tggtgttccggtatccgagcagtgagcagtatccgtggcctaagccggtctattatcacatctgtctggagctgc

SEQ ID NO: 276842 - DNA, 75 bp, synthetic construct
  source 1..75: mol_type = other DNA
gcaacccgcccatcggcggcgcggaaaaccaactcagtcagtttcaaaccgatctcatcaccgataacatgtttt

SEQ ID NO: 276843 - DNA, 75 bp, synthetic construct
  source 1..75: mol_type = other DNA
ttatagagcagttccgtcaggcagccgatcatccggtgatcgctacctacccggaagggctatatctgaaagggt

SEQ ID NO: 276844 - DNA, 75 bp, synthetic construct
  source 1..75: mol_type = other DNA
gccctgctgccgattgaagaacacggcatgaagctgctggtggacatacagcacgggcacaaaacgggctactac

SEQ ID NO: 276845 - DNA, 75 bp, synthetic construct
  source 1..75: mol_type = other DNA
ggagctgacccagggccccgtcaccggcgagttgccacctgccctgctgccgattgaagaacacggaatgaaact

SEQ ID NO: 276846 - DNA, 75 bp, synthetic construct
  source 1..75: mol_type = other DNA
gccaggtggttggcaatttcaacagcctgatcatgatgcgggtacgggagaccgccaccgccgaattgttgacga

SEQ ID NO: 276847 - DNA, 75 bp, synthetic construct
  source 1..75: mol_type = other DNA
ccaccagttaaccgacggcgtgaccgtctttgacgccgcagctattcgccaatggaacgagcaaaaaaccggggg

SEQ ID NO: 276848 - DNA, 75 bp, synthetic construct
  source 1..75: mol_type = other DNA
aagccgccagtgtcacccactgacggccaacgccgggagccgtgattatggcattcaggctctgctaaaaatgcc

SEQ ID NO: 276849 - DNA, 75 bp, synthetic construct
  source 1..75: mol_type = other DNA
tgcgcttactgatacggaattacggcgcaaggctgccgatgaactgacttgtatcaccgcgcgaattaaccgtgg

SEQ ID NO: 276850 - DNA, 75 bp, synthetic construct
  source 1..75: mol_type = other DNA
tctgccctgcggctaaaacagggagtgcgcatcctgcgctttcgccgccgcgtgcgtcatcttccactctggaca

SEQ ID NO: 276851 - DNA, 75 bp, synthetic construct
  source 1..75: mol_type = other DNA
tgttcgataccgcctggtggattgatgcgctgggtaaagctattcctcaggccagagtcagagcatggaaaaccg

SEQ ID NO: 276852 - DNA, 75 bp, synthetic construct
  source 1..75: mol_type = other DNA
aactctatgatcccatccttgacgggctgcggtcagcggtacgttatgaccgtacttactttgacaaaatcgtgg

SEQ ID NO: 276853 - DNA, 75 bp, synthetic construct
  source 1..75: mol_type = other DNA
atcgttgcttcctgtagctctgtataaattaagagaatcgcagttttttagaaataaattgccgcatccagtggg

SEQ ID NO: 276854 - DNA, 75 bp, synthetic construct
  source 1..75: mol_type = other DNA
gcttatagctgcattaattatgctatttggtttttcccgatttatttcgcagagcggaataacttatttgattat

SEQ ID NO: 276855 - DNA, 75 bp, synthetic construct
  source 1..75: mol_type = other DNA
tcgctggaagcagagcctgttctgtatcagtcctgcacacgccccacctggaatagcggagttccgtggacggaa

SEQ ID NO: 276856 - DNA, 75 bp, synthetic construct
  source 1..75: mol_type = other DNA
catagatacggcggaaagttgcgatgatgaccgtattgaggccgttaaggctgtgttgcgtagactggcaggcaa

SEQ ID NO: 276857 - DNA, 75 bp, synthetic construct
  source 1..75: mol_type = other DNA
agaatattgccgggcggattattcgtctgtttaagcgttatcacatctccccgcaggcggtcattcttgagatca

SEQ ID NO: 276858 - DNA, 75 bp, synthetic construct
  source 1..75: mol_type = other DNA
tgcatcatccatatggtgcgcaacagtctgaaattcgtgtcgtggaaggattacaaagccgtcaccagcgggctg

SEQ ID NO: 276859 - DNA, 75 bp, synthetic construct
  source 1..75: mol_type = other DNA
tcttgccacgttcttcgcttatccaacggacatccgcaaagtgctctatacgacgaatgccatcgagtcgctaaa

SEQ ID NO: 276860 - DNA, 75 bp, synthetic construct
  source 1..75: mol_type = other DNA
actgaaaaaccgcggtctgaacgatatcctcatcgcctgtgtggatggcctgaaaggcttcccgggggccatcaa

SEQ ID NO: 276861 - DNA, 75 bp, synthetic construct
  source 1..75: mol_type = other DNA
aaacgctatacggatcaaacctattacactggcgataacggttacgtggcaggttgggttgtgggttacagcttt

SEQ ID NO: 276862 - DNA, 75 bp, synthetic construct
  source 1..75: mol_type = other DNA
gctaactttagttggggagaaatgtacgggttcttcgactgggaaaacttttataatgatcgtcatgataaaccg

SEQ ID NO: 276863 - DNA, 75 bp, synthetic construct
  source 1..75: mol_type = other DNA
gctgggcatcaataccgacggtcagaaagagctgctgggtatgtggctggcagaaaatgaaggtgcaaagttctg

SEQ ID NO: 276864 - DNA, 75 bp, synthetic construct
  source 1..75: mol_type = other DNA
gtgtcatcttgaggcagcattaaacattaagccggggcatacgcttggcattattgatgcactgttggttcataa

SEQ ID NO: 276865 - DNA, 75 bp, synthetic construct
  source 1..75: mol_type = other DNA
tattatcactagcatggatgcctacattcataggcatcatcggtattttatttaaattaatgccaaatattactt

SEQ ID NO: 276866 - DNA, 75 bp, synthetic construct
  source 1..75: mol_type = other DNA
gcttcccgctgcgttgctggagtcgaacccgtaaatcgtggcctggcgtgcaaagctttgccggacgggaagaac

SEQ ID NO: 276867 - DNA, 75 bp, synthetic construct
  source 1..75: mol_type = other DNA
gttgctcagagtctgcaaacctggcgctttccgctgcgttgctggagtcgaacccgtaaatcgtggcctggcgtg

SEQ ID NO: 276868 - DNA, 75 bp, synthetic construct
  source 1..75: mol_type = other DNA
taattgtgtgttaaaacatcatgtcttgattgacggaacgtggtggaccgattctgctcgacgagcacgttgtaa

SEQ ID NO: 276869 - DNA, 75 bp, synthetic construct
  source 1..75: mol_type = other DNA
agcattcaatgatcgtcgccgcgcaagggttaacccccgaccaccatcttttgctccaaatctatgatcacgcca

SEQ ID NO: 276870 - DNA, 75 bp, synthetic construct
  source 1..75: mol_type = other DNA
aagtctacggtcacgcgcaggtgaaagctggcatagaagaagatgccattctgatcttacccagcaatagtggac

SEQ ID NO: 276871 - DNA, 75 bp, synthetic construct
  source 1..75: mol_type = other DNA
atcgctataactactgcgcagatgcagttaaaggcgtagaggatgcctgccgtgctgttagctatagccaagccg

SEQ ID NO: 276872 - DNA, 75 bp, synthetic construct
  source 1..75: mol_type = other DNA
ctgattggcggaaatgccgttgtgcgtggcggcccggttctgctcgacgagcacgttataatacaaggtgagagc

SEQ ID NO: 276873 - DNA, 75 bp, synthetic construct
  source 1..75: mol_type = other DNA
gacaccattcatgtccgtggtccaaaagtcattaacagtgaggaacgtattacgcgaacgccgctggctgggtta

SEQ ID NO: 276874 - DNA, 75 bp, synthetic construct
  source 1..75: mol_type = other DNA
atggcgttgggatttatctcactacctggtttaatgaattcatcaccaccgggccgcatggtgtggtgttggcaa

SEQ ID NO: 276875 - DNA, 75 bp, synthetic construct
  source 1..75: mol_type = other DNA
atggcggaagtcaaacgcaaatggggcgaccgctttgttgccgtcacgcaaaaaaacaccggtaaaggtggcgca

SEQ ID NO: 276876 - DNA, 75 bp, synthetic construct
  source 1..75: mol_type = other DNA
gcttctttaccggacgcgagcccgtccgggacaaacccacccgctatgccgtggtggatgatactggcgcatctg

SEQ ID NO: 276877 - DNA, 75 bp, synthetic construct
  source 1..75: mol_type = other DNA
cagattacaactggtcgctgaagctgctggaacgctttaaagaagcgcatccggaaatcccgaccaagtctggtc

SEQ ID NO: 276878 - DNA, 75 bp, synthetic construct
  source 1..75: mol_type = other DNA
gaaactggcgcagaccattgccgatatggcgctgcgttatgtggttatcacctccgttgaccgtgatgacctgcg

SEQ ID NO: 276879 - DNA, 75 bp, synthetic construct
  source 1..75: mol_type = other DNA
aatctactgcgcaacccttatttttgccgtgtgatttgcgttaacgacggctctacggataacacagaagcagta

SEQ ID NO: 276880 - DNA, 75 bp, synthetic construct
  source 1..75: mol_type = other DNA
cgctggcatcaaagatgtttatacgtgcgaaattgtcggctacgccatgggagagcgcatgacaaaagagctgac

SEQ ID NO: 276881 - DNA, 75 bp, synthetic construct
  source 1..75: mol_type = other DNA
gaccaggacagagcggcgctggcgcatatcaacagcctgccgcgcgcgcagtggaacagcaatattcaggagctg

SEQ ID NO: 276882 - DNA, 75 bp, synthetic construct
  source 1..75: mol_type = other DNA
ggcgggcaaaaagactccccgggtaataccgggaaaaaatggggcggtgtgcgtgccgatggcgtggggctaagt

SEQ ID NO: 276883 - DNA, 75 bp, synthetic construct
  source 1..75: mol_type = other DNA
gagcaataccggcaagggcggggcgctgatgaacggggtcagacgcgccaccgcccgccaggtgtttctgaccga

SEQ ID NO: 276884 - DNA, 75 bp, synthetic construct
  source 1..75: mol_type = other DNA
tcagcgtcgtcactctcgtctggggaatatctccccggcagccttcagggaaaaatatcatcagatgactgctta

SEQ ID NO: 276885 - DNA, 75 bp, synthetic construct
  source 1..75: mol_type = other DNA
aatacattgagattttctacaatcgtcagcgtcgtcactctcgtctggggaatatctccccggcagccttcaggg

SEQ ID NO: 276886 - DNA, 75 bp, synthetic construct
  source 1..75: mol_type = other DNA
atggcactgcgctatgtggttatcacttccgttgaccgcgatgacctgcgcgatggcggtgctcagcattttgca

SEQ ID NO: 276887 - DNA, 75 bp, synthetic construct
  source 1..75: mol_type = other DNA
gacggataatggttcatgctaccgggctaatgaaacacgacagttggccaggatgttgggccttgaaccgaagag

SEQ ID NO: 276888 - DNA, 75 bp, synthetic construct
  source 1..75: mol_type = other DNA
gacggataatggttcatgctaccgggcaaatgaaacacgacagttggccaggatgttgggccttgaaccgaagat

SEQ ID NO: 276889 - DNA, 75 bp, synthetic construct
  source 1..75: mol_type = other DNA
ttatcggagagctacccacatatggttatcgtcgggtatgggcgctgcttcgcagacaaacagaacttgatggta

SEQ ID NO: 276890 - DNA, 75 bp, synthetic construct
  source 1..75: mol_type = other DNA
gacggataatggttcatgctaccgggcgaatgaaacacgacagttggccgggatgttgggccttgaaccgaagat

SEQ ID NO: 276891 - DNA, 75 bp, synthetic construct
  source 1..75: mol_type = other DNA
gacggataatggttcatgctaccgggccaatgaaacacgacagttggcccggatgttgggccttgaaccgaagat

SEQ ID NO: 276892 - DNA, 75 bp, synthetic construct
  source 1..75: mol_type = other DNA
gacggataatggttcatgctaccgggctaatgaaacacgacagttggccgggatgttgggccttgaaccgaagaa

SEQ ID NO: 276893 - DNA, 75 bp, synthetic construct
  source 1..75: mol_type = other DNA
tcgtcacactgatgatacggatgtgtttctccgtatacaccatgttatcggagagctgcccacgtatggttatcg

SEQ ID NO: 276894 - DNA, 75 bp, synthetic construct
  source 1..75: mol_type = other DNA
atctaccgtcaggttcgtccgggcgccgactataactggtcgctaaagctactggaacgctttaaagaagcgcat

SEQ ID NO: 276895 - DNA, 75 bp, synthetic construct
  source 1..75: mol_type = other DNA
atttaccgtcaggtacgtccgggcgcggattacaactggtcgctgaaactattagaacgctttaaagaagctcat

SEQ ID NO: 276896 - DNA, 75 bp, synthetic construct
  source 1..75: mol_type = other DNA
tggtgcctttagcaccgctttccgttgtgtatgtattattagcttatgccatctggattatttatggacttattg

SEQ ID NO: 276897 - DNA, 75 bp, synthetic construct
  source 1..75: mol_type = other DNA
tatggacttattgccttttttactggacgcgaacctcagcgcgacaaacccacccgctattccgcactggtggaa

SEQ ID NO: 276898 - DNA, 75 bp, synthetic construct
  source 1..75: mol_type = other DNA
tcgagttctgctgtgataacggagagagactgcgagtcacgttcgcgctggactgctgtgaccgtgaggcactgc

SEQ ID NO: 276899 - DNA, 75 bp, synthetic construct
  source 1..75: mol_type = other DNA
ctggggctcgagcggcaccggtggttactccgacctgaaagcgcacaccaccatgttgcaggtggatgcaccgta

SEQ ID NO: 276900 - DNA, 75 bp, synthetic construct
  source 1..75: mol_type = other DNA
tatatcaaaataaccgggcgcaaaaaagatattattgttcgcggcggagaaaatattagcagtcgtgaagtagaa

SEQ ID NO: 276901 - DNA, 75 bp, synthetic construct
  source 1..75: mol_type = other DNA
aagaggcttcgcgcggcccgaatgtgtttatgggctatcttgatgaaccagaattaactgcccgtacgctggata

SEQ ID NO: 276902 - DNA, 75 bp, synthetic construct
  source 1..75: mol_type = other DNA
cggttcacggcgatgaattagcggcagtgctgtttacctccggaactgaaggtatgccaaagggcgtgatgctga

SEQ ID NO: 276903 - DNA, 75 bp, synthetic construct
  source 1..75: mol_type = other DNA
gtctggtctgaaaacatcaatgtcgcgtaaaggtaactgttacgacaacgctccgatggaaagcttctgggaacg

SEQ ID NO: 276904 - DNA, 75 bp, synthetic construct
  source 1..75: mol_type = other DNA
actaccgcgcactgcctcaggtaaaatacaaaagtttttgttacggaaagatattgttcaacggctggaacaatc

SEQ ID NO: 276905 - DNA, 75 bp, synthetic construct
  source 1..75: mol_type = other DNA
cgccgcatcattcattatcgctggaagaggtggtggcttttttagccgtaaacgggtcgcaaaatataaatatcc

SEQ ID NO: 276906 - DNA, 75 bp, synthetic construct
  source 1..75: mol_type = other DNA
acctgccgtgctaatccaccactccgatcgaggttcacagtactgcgcatacgattaccgggtcatacaggagca

SEQ ID NO: 276907 - DNA, 75 bp, synthetic construct
  source 1..75: mol_type = other DNA
ccagctggagcacaaaacagccgaacgtgctgatcaactgcgacgggatatggctggggcaggaggaataacaac

SEQ ID NO: 276908 - DNA, 75 bp, synthetic construct
  source 1..75: mol_type = other DNA
gagcaaatgagccaggagtcacaggacgaagcacctccgctgatgccggaaacggatatggaaccagcagcagca

SEQ ID NO: 276909 - DNA, 75 bp, synthetic construct
  source 1..75: mol_type = other DNA
gtatccgtgccgctgttaccttcctggcgagaagcggaactggtgtgggtgctcaataagtgccaggccaaaatg

SEQ ID NO: 276910 - DNA, 75 bp, synthetic construct
  source 1..75: mol_type = other DNA
atggcttacgaacggggcggagatgtcctggaagatgccagggaaatacttaacagggaagcgatagggccgcgg

SEQ ID NO: 276911 - DNA, 75 bp, synthetic construct
  source 1..75: mol_type = other DNA
acgattaccgggtcatacaggagcagtgtaagcgtaaactgaccgccgtatgtagccatcagacgagaattggta

SEQ ID NO: 276912 - DNA, 75 bp, synthetic construct
  source 1..75: mol_type = other DNA
ggatccggaacatgcgaaatgtgatggtccatccgcgctgccgctggctaaactggaaccgttcctcaagcagat

SEQ ID NO: 276913 - DNA, 75 bp, synthetic construct
  source 1..75: mol_type = other DNA
aatctggcgcagcagaagccgaacgacccggagcaggtttacgcttacgggctgtatctctctggtcatgaccag

SEQ ID NO: 276914 - DNA, 75 bp, synthetic construct
  source 1..75: mol_type = other DNA
caggcgcgtaatgtcgataacaccgacagctatgcagtgctggggctgggcgatgtggcgatggcgcgaaaagat

SEQ ID NO: 276915 - DNA, 75 bp, synthetic construct
  source 1..75: mol_type = other DNA
ggtgggcaaaaagactccccgagcaataccgggaaaaaatggggtggcgtacgtgccgacggtgtggggctaagt

SEQ ID NO: 276916 - DNA, 75 bp, synthetic construct
  source 1..75: mol_type = other DNA
attcaggagctggttaatcgactgcaaagcgatcaggtgctggaaaccgctaatcgcctgcgagaaagcggcaaa

SEQ ID NO: 276917 - DNA, 75 bp, synthetic construct
  source 1..75: mol_type = other DNA
gtttgaagcgcaggcgggcgatccaaagcaggcgctggaaacctacaaagacgccatggtcgcatccggtgtgac

SEQ ID NO: 276918 - DNA, 75 bp, synthetic construct
  source 1..75: mol_type = other DNA
acaggcaagattgcaggcgacgactggtcatgcagaagaagctgtggcgagttacaacaaactgttcaacggtgc

SEQ ID NO: 276919 - DNA, 75 bp, synthetic construct
  source 1..75: mol_type = other DNA
atggaaagcttctggggaacgctgaaaaatgagagcctgagctactatcgttttaataaccgggatgaagccatc

SEQ ID NO: 276920 - DNA, 75 bp, synthetic construct
  source 1..75: mol_type = other DNA
gatgaagccatctcagtaatacgggaatacggtaatgactccaacttactgatagtgttttatgttcagataatg

SEQ ID NO: 276921 - DNA, 75 bp, synthetic construct
  source 1..75: mol_type = other DNA
ttggtcgtgaccgactggcacgtcttcgtaaggagctaaggctacgctgtaagcagaaacgcaagttcagagcga

SEQ ID NO: 276922 - DNA, 75 bp, synthetic construct
  source 1..75: mol_type = other DNA
acaaagacgccatggtcgcatccggtgtgactacgacgcgtccgcaggataacgacacattcacccgactgaccc

SEQ ID NO: 276923 - DNA, 75 bp, synthetic construct
  source 1..75: mol_type = other DNA
cgccagcaggatcttaacgtcacccttgagcacgattactggggttcgagcggcaccggtggttactccgatctg

SEQ ID NO: 276924 - DNA, 75 bp, synthetic construct
  source 1..75: mol_type = other DNA
cgacaacgctccgatggaaagcttctggggaacgctgaaaaatgagagcctgagccactatcgttttaataaccg

SEQ ID NO: 276925 - DNA, 75 bp, synthetic construct
  source 1..75: mol_type = other DNA
atgtgggtaacagcaaaagaatgtgttggtcttcctgatttaccaatgatggaacataacattcgccatcgactc

SEQ ID NO: 276926 - DNA, 75 bp, synthetic construct
  source 1..75: mol_type = other DNA
ccgaacggtaaacattacagcccggcggagttcagaaaaaaacgcctggcggaagaggacacggaaattgaatgg

SEQ ID NO: 276927 - DNA, 75 bp, synthetic construct
  source 1..75: mol_type = other DNA
tcaacgtgctggagcacaagccgcaggagccatggctggaaaacatctaccgcccggtgggtaatacggtgaccg

SEQ ID NO: 276928 - DNA, 75 bp, synthetic construct
  source 1..75: mol_type = other DNA
ctcaaaatgccgctcaggatcgccttttttatacgttaaaaacaggtgaaactgttgccaatatttctaaatcac

SEQ ID NO: 276929 - DNA, 75 bp, synthetic construct
  source 1..75: mol_type = other DNA
attctggtttacaattcgcacgccagcctgaacaactggcacctgctgcgccagcagagacaaccgatggcgcac

SEQ ID NO: 276930 - DNA, 75 bp, synthetic construct
  source 1..75: mol_type = other DNA
ttctggtcgttctggtttacaatccatccgtcagcctgaacaactggcacctgctgcgccagcagagaaaacaga

SEQ ID NO: 276931 - DNA, 75 bp, synthetic construct
  source 1..75: mol_type = other DNA
gcattcaaatatgactggtatctgcacgatccctgcactgaagaacaggccgaatggctgattcataactaccgc

SEQ ID NO: 276932 - DNA, 75 bp, synthetic construct
  source 1..75: mol_type = other DNA
ggatgttgggccttgaaccgaagatcacggcggtgcggagtccggagagtaacggaatagcagagagcttcgtga

SEQ ID NO: 276933 - DNA, 75 bp, synthetic construct
  source 1..75: mol_type = other DNA
ggatgttgggtcttgaaccgaagagcacggcggtgcggagtccggagagtaacgggatagcagagagcttcgtga

SEQ ID NO: 276934 - DNA, 75 bp, synthetic construct
  source 1..75: mol_type = other DNA
taaaaccaggggtaaaagggaaagttttagagtgtgaaataggagctttgcctttaactgttcagcaggcagtac

SEQ ID NO: 276935 - DNA, 75 bp, synthetic construct
  source 1..75: mol_type = other DNA
gataatctccgtcaggcttccttactccgaacgcccaccgcgttcatcccgcacataccagcaacggatctggag

SEQ ID NO: 276936 - DNA, 75 bp, synthetic construct
  source 1..75: mol_type = other DNA
attctgaagccgtcccggccattaagcgggggcggcattcgcacgtatttaaaaccgactggtaccagcatcccc

SEQ ID NO: 276937 - DNA, 75 bp, synthetic construct
  source 1..75: mol_type = other DNA
atgacaaggcattaaattatgcggcacaacaggcggcgagtctcggtagccagcttcagtcgcgatctctgaacg

SEQ ID NO: 276938 - DNA, 75 bp, synthetic construct
  source 1..75: mol_type = other DNA
gctgaagaaaggaacgacaacaattgaagtagtgtctggcgataaccaaaccgcggcatatacaattaatacacc

SEQ ID NO: 276939 - DNA, 75 bp, synthetic construct
  source 1..75: mol_type = other DNA
acagctcactattaccgttctgtcgaatggtcaggttgtcgaccaggttggggtaacggactttacggctgataa

SEQ ID NO: 276940 - DNA, 75 bp, synthetic construct
  source 1..75: mol_type = other DNA
atgcaaatggcggtaatggaggatatacatggagttccgataatccaaatattgcttcgatagattctaatacag

SEQ ID NO: 276941 - DNA, 75 bp, synthetic construct
  source 1..75: mol_type = other DNA
tcgtggtgaattaccaaatatctggctacgatatggccaagttaagttgaatgcaaatggcggtaatggtggata

SEQ ID NO: 276942 - DNA, 75 bp, synthetic construct
  source 1..75: mol_type = other DNA
gtgtgataaccttaaatgagaaagggagtgccacaattactgtagtatctggagataatcagagtgcgacatata

SEQ ID NO: 276943 - DNA, 75 bp, synthetic construct
  source 1..75: mol_type = other DNA
agcaccgtcaaagagtatattggcagacacatattctaaatggggtgcagcgaataaatattcttactattctgg

SEQ ID NO: 276944 - DNA, 75 bp, synthetic construct
  source 1..75: mol_type = other DNA
gtttcaggaactgcaactcttggggcaaatagtgccaaaacggatgctaacggtaaggcaaccgtaacgttgaag

SEQ ID NO: 276945 - DNA, 75 bp, synthetic construct
  source 1..75: mol_type = other DNA
ggggagcggccaatagttatgaaggctataaaggtaaaaacacaataacagcatggactcagcaaacagaggatg

SEQ ID NO: 276946 - DNA, 75 bp, synthetic construct
  source 1..75: mol_type = other DNA
tggtgacgatggggatcgattaccgtcatggtacgggtaatgaaaatgatctcctttactcaatgcagttccgtt

SEQ ID NO: 276947 - DNA, 75 bp, synthetic construct
  source 1..75: mol_type = other DNA
tggggaatactggcgagactatttcaaaagtagcgtgaacggctatttccgcatgagcggttggcatgagtcata

SEQ ID NO: 276948 - DNA, 75 bp, synthetic construct
  source 1..75: mol_type = other DNA
acttctggtgataagcaaacagtaagctacactgttaaaactccaaaatatatgataaaggtaggccaaaaagct

SEQ ID NO: 276949 - DNA, 75 bp, synthetic construct
  source 1..75: mol_type = other DNA
tagtggtgagttacctgatgtctggctacaatatggtcagattaaattaaatgttaatggtggcaatgataaata

SEQ ID NO: 276950 - DNA, 75 bp, synthetic construct
  source 1..75: mol_type = other DNA
ggatgttgggacttgaaccgaagagcacggcggtgcggagtccggagagtaacggtatagcagagagcttcgtga

SEQ ID NO: 276951 - DNA, 75 bp, synthetic construct
  source 1..75: mol_type = other DNA
ggatccggcgctactgcctgatttgtcaggattaaaagaagccttaatgccggagttacgcaaacacttcccggc

SEQ ID NO: 276952 - DNA, 75 bp, synthetic construct
  source 1..75: mol_type = other DNA
agtgaatgcggcggtggtagcggcgattgtctccgactggaccggcattcccgctgggcgcatggtaaaagatga

SEQ ID NO: 276953 - DNA, 75 bp, synthetic construct
  source 1..75: mol_type = other DNA
tttcagcggaaaagtctgcgaaacgctggcagaggttaaagagttttttggacaccgctggctcgctaaaaagtt

SEQ ID NO: 276954 - DNA, 75 bp, synthetic construct
  source 1..75: mol_type = other DNA
cagtatcgccaggcgaatggcagacctatgtcagaagcctacgaggattttgtcgcggaatggcagcgtcgccat

SEQ ID NO: 276955 - DNA, 75 bp, synthetic construct
  source 1..75: mol_type = other DNA
gaaagctttgctggaagaggccgcgcgctcggcgcagccggtgatactttttgttgatgaagttcacaccctggt

SEQ ID NO: 276956 - DNA, 75 bp, synthetic construct
  source 1..75: mol_type = other DNA
gcaggactaaaagaggcgttaatgccggagttacgtaaacacttcccggcggctttcctggggcgtgtgacggtt

SEQ ID NO: 276957 - DNA, 75 bp, synthetic construct
  source 1..75: mol_type = other DNA
tcgtggcggttgaaggcgatcgtcttagcggttccggcattgctattggtattcagtcgaaaggcaccacggtta

SEQ ID NO: 276958 - DNA, 75 bp, synthetic construct
  source 1..75: mol_type = other DNA
cgcgctatttcatatcaaagagaccaaacatgtggtgcaggacgccgagcccgtcaccctgcacgtcgacttagt

SEQ ID NO: 276959 - DNA, 75 bp, synthetic construct
  source 1..75: mol_type = other DNA
ctcggggatcggcatcggtatccagtcgaaggggaccacggtcatccatcagcgcgatctgctgccgctcagcaa

SEQ ID NO: 276960 - DNA, 75 bp, synthetic construct
  source 1..75: mol_type = other DNA
tggaatatgagcacggtaataaggtgctggtgaattacgatattcatgatgcaacaaaagtaattatccgccgca

SEQ ID NO: 276961 - DNA, 75 bp, synthetic construct
  source 1..75: mol_type = other DNA
tgtttcccagtcagcgcgcgcagcagatgacgagacaaaccttctggcaccgcattaaacattatgctgtgctgg

SEQ ID NO: 276962 - DNA, 75 bp, synthetic construct
  source 1..75: mol_type = other DNA
caaagcgatgatttgcaggcattactggcagagcggctggagggcgggtataaggccaccagttcagcgcgtttg

SEQ ID NO: 276963 - DNA, 75 bp, synthetic construct
  source 1..75: mol_type = other DNA
tgatgccctcttacgatgtggttcgttatgccatgaagaaattgccggaagtggtgaaacaaaaaggacgcgtta

SEQ ID NO: 276964 - DNA, 75 bp, synthetic construct
  source 1..75: mol_type = other DNA
atgataagggacaggaaagctgaagagctggagtcaaaagggctatgccggagagctgccacacgatgggcagaa

SEQ ID NO: 276965 - DNA, 75 bp, synthetic construct
  source 1..75: mol_type = other DNA
gagagctgccacacgatgggcagaagtcatgacgctggcagatggcaataaagaacgtgaacatgcagcaaacag

SEQ ID NO: 276966 - DNA, 75 bp, synthetic construct
  source 1..75: mol_type = other DNA
caacaaccgcccgcattctgagctgccgatgaaaccgaacggacggcattacagcccgacagagttcagaaaaaa

SEQ ID NO: 276967 - DNA, 75 bp, synthetic construct
  source 1..75: mol_type = other DNA
aacaacagcaaacacctggtcaggtggaaaaccgcaccttatatccccgccctgaaggatggggttttacggcgc

SEQ ID NO: 276968 - DNA, 75 bp, synthetic construct
  source 1..75: mol_type = other DNA
gtggatagcgcacgcgcccttattgcccggggatggggagtaagcttagccagccgttgtctccgggtgtcgcgt

SEQ ID NO: 276969 - DNA, 75 bp, synthetic construct
  source 1..75: mol_type = other DNA
agctggagtcaaaagggctataccggagagctgccgcacgatggatggaagtcatgctgttatgcaccgaggacg

SEQ ID NO: 276970 - DNA, 75 bp, synthetic construct
  source 1..75: mol_type = other DNA
atccgcagggacgcggcatcattgaacgtctgaaccggacgctgccgatgcgtatagccagacggtatcgcacct

SEQ ID NO: 276971 - DNA, 75 bp, synthetic construct
  source 1..75: mol_type = other DNA
ccaggacggcgcgtaaccctgatgctgttcaggcagttgaagcatatcggggttctccgcaactaatggaggaac

SEQ ID NO: 276972 - DNA, 75 bp, synthetic construct
  source 1..75: mol_type = other DNA
atgcagtcgtacgttaccgtaaatgacctgctcggtgttcctggaatgccagccaccgcgaaaggcatccgacag

SEQ ID NO: 276973 - DNA, 75 bp, synthetic construct
  source 1..75: mol_type = other DNA
gtgcgatacagcacggcattcgcaaccacggaaaaccgttcctgtattactcggataacggttccggtgaaacgg

SEQ ID NO: 276974 - DNA, 75 bp, synthetic construct
  source 1..75: mol_type = other DNA
gacattcatgacgccgagcgaattacggtacgtcgcaaggacggcagctttatctgtgaggcgatatggaacggc

SEQ ID NO: 276975 - DNA, 75 bp, synthetic construct
  source 1..75: mol_type = other DNA
gcgtgaggaagcgcatgatgacaaatacgaccccgaacgtgatgaatatctgaatcattcgctggatattctgga

SEQ ID NO: 276976 - DNA, 75 bp, synthetic construct
  source 1..75: mol_type = other DNA
atgcgaaatataattagatctattaatgctctacttgcagcattgaacattaccattttggcgatcatcgtggca

SEQ ID NO: 276977 - DNA, 75 bp, synthetic construct
  source 1..75: mol_type = other DNA
agttatgccatgtggctgagcacaaccacagcgaggagttttaccgtctgatggggcaggttatgccgggctggg

SEQ ID NO: 276978 - DNA, 75 bp, synthetic construct
  source 1..75: mol_type = other DNA
tgaatgctgtacgttttgtttatggtgatgaaaccatcgtggttcagtgtgtaccacggcaggttgttaaaggca

SEQ ID NO: 276979 - DNA, 75 bp, synthetic construct
  source 1..75: mol_type = other DNA
gaagacattgctgatgaactgcgcggggccgactatctggtatggcgcaatgggaggggagcagtccggttgctc

SEQ ID NO: 276980 - DNA, 75 bp, synthetic construct
  source 1..75: mol_type = other DNA
gacccaattactcgaagccatgtctattctgcgcccgaacatgggcttagccactgagctcgatagcaattcagg

SEQ ID NO: 276981 - DNA, 75 bp, synthetic construct
  source 1..75: mol_type = other DNA
gacgtcatttatttttgtgtattcagattatcgttattatcttcgctaccatcattatggtatatggtggtgggc

SEQ ID NO: 276982 - DNA, 75 bp, synthetic construct
  source 1..75: mol_type = other DNA
atccttttggtgagatgaaagtaattagcgtgcaacctgcgccgttagatatacctaactcagctacggttgaaa

SEQ ID NO: 276983 - DNA, 75 bp, synthetic construct
  source 1..75: mol_type = other DNA
atacattttcacgatattcggctcgtacctggggtggttgcattaacttcagatggtgctcataccattgacagt

SEQ ID NO: 276984 - DNA, 75 bp, synthetic construct
  source 1..75: mol_type = other DNA
atcacgccagcgctattaatctgccaggcgctgggtttaccggcacaagacacgcaacacattattagtatgtcg

SEQ ID NO: 276985 - DNA, 75 bp, synthetic construct
  source 1..75: mol_type = other DNA
tatcagttgaaagtgacagaagacgctactgtgccgcaacgagtgaaaatgttgcgtgggcgtctggaagtgact

SEQ ID NO: 276986 - DNA, 75 bp, synthetic construct
  source 1..75: mol_type = other DNA
tggctgatattcaccagtggcaaaatctggatgatttttacaaccagtaccgccaacgcgtaattgttttgcttt

SEQ ID NO: 276987 - DNA, 75 bp, synthetic construct
  source 1..75: mol_type = other DNA
ccgaataagtcatcttcattagagcctttaaatacagttgagcttgaaaaaaataataaaggcacttctggtgtt

SEQ ID NO: 276988 - DNA, 75 bp, synthetic construct
  source 1..75: mol_type = other DNA
catcaagccaggataaacgctatcacattgttgaaggcgcaaaccatatggatctttatgatggcaaagtctatg

SEQ ID NO: 276989 - DNA, 75 bp, synthetic construct
  source 1..75: mol_type = other DNA
ctacaagaactggatgagttagattctttattaattatagatctcgggggcaccacattagatatttctcaggta

SEQ ID NO: 276990 - DNA, 75 bp, synthetic construct
  source 1..75: mol_type = other DNA
tctccagggatgcctgtggcctgcctcctataaatcagataacgacgttggttcagcgataaccctcctgtttgc

SEQ ID NO: 276991 - DNA, 75 bp, synthetic construct
  source 1..75: mol_type = other DNA
gtcggcgttgagttaattacccatttctccagtgaagatggcacggttcgtatcccgacgagtcgggttatagcg

SEQ ID NO: 276992 - DNA, 75 bp, synthetic construct
  source 1..75: mol_type = other DNA
gtggcagatgacctcgcctctctggtactggacgcgcgaatggagcaagaaggctatgcccgtagttccatcaac

SEQ ID NO: 276993 - DNA, 75 bp, synthetic construct
  source 1..75: mol_type = other DNA
agtattcatttgatccaatcagcccggatgctgtagtcacaaccaatatcgcatggcaatacagcgacgttaatg

SEQ ID NO: 276994 - DNA, 75 bp, synthetic construct
  source 1..75: mol_type = other DNA
agtagctatcttgctgacgatataattattcacagaaaagataataactatctgaagcaacgaattaatgatgag

SEQ ID NO: 276995 - DNA, 75 bp, synthetic construct
  source 1..75: mol_type = other DNA
gtgaaaaagttaatagaggacagctacggaaaagagtctgattattacaatgacttcaatactgtaaacagcagg

SEQ ID NO: 276996 - DNA, 75 bp, synthetic construct
  source 1..75: mol_type = other DNA
gttgccgccgcatgggcaaaagagcgtggttacaaaatcacccttcaggggctggaagccgcttaccggctgggg

SEQ ID NO: 276997 - DNA, 75 bp, synthetic construct
  source 1..75: mol_type = other DNA
cattgttgaaggcgcaaaccatatggatctttatgacggcaaagcctatgtggctgaagcaatttcagtattagc

SEQ ID NO: 276998 - DNA, 75 bp, synthetic construct
  source 1..75: mol_type = other DNA
aattattttcagagcagttggaattactaaaatcatgccaacacttttttattcaacataaactctttgcctggc

SEQ ID NO: 276999 - DNA, 75 bp, synthetic construct
  source 1..75: mol_type = other DNA
gcgaacaacgtcaatattgcccggtatgtggctctatgccggtgtccagcatggtgcaaattggcaccactcagg

SEQ ID NO: 277000 - DNA, 75 bp, synthetic construct
  source 1..75: mol_type = other DNA
tattttgcagatcgtctaatccagagtcgggatgacaatgaattcctgactcgttatatcccgaatgcagaacag

SEQ ID NO: 277001 - DNA, 75 bp, synthetic construct
  source 1..75: mol_type = other DNA
aaatggaacttgctgattattgccgacgcacgggattgtttgttgaacaggttaaagaatggcgggctatctcaa

SEQ ID NO: 277002 - DNA, 75 bp, synthetic construct
  source 1..75: mol_type = other DNA
ttatcctgattgtccttgcggcaattctgtatctttcatacagcgccgccacagtatatttatcagaagtacaca

SEQ ID NO: 277003 - DNA, 75 bp, synthetic construct
  source 1..75: mol_type = other DNA
gagggaacgacctgtaccacgatgattcatatcggctggactctaccgttcgcctgggtagtaaataaaatcatt

SEQ ID NO: 277004 - DNA, 75 bp, synthetic construct
  source 1..75: mol_type = other DNA
gcaaggacaaggtacagattttgtattaaccggcccgtgggaaattttaacctattggttgagcaccgtattaca

SEQ ID NO: 277005 - DNA, 75 bp, synthetic construct
  source 1..75: mol_type = other DNA
tcgcacaccgtatgtgattgccgggctggaatacgcacgccaactcggttgccgcacagtgggcatttcctgtaa

SEQ ID NO: 277006 - DNA, 75 bp, synthetic construct
  source 1..75: mol_type = other DNA
tgaaaggcggcgtgctggcaaacggtctgaactcgtttgtttcggcggtgtttaacaccttcccgaactcctgct

SEQ ID NO: 277007 - DNA, 75 bp, synthetic construct
  source 1..75: mol_type = other DNA
gtacgccggatctttgtatagaggcgatgcgtaaaaagaacctgaaaacgatgttatttgtaagcgactcgtcag

SEQ ID NO: 277008 - DNA, 75 bp, synthetic construct
  source 1..75: mol_type = other DNA
aaataaaaacgcattttgttccttgccgatcgcaacattctggtcgaccaaaccaaaaataatgatttccagcca

SEQ ID NO: 277009 - DNA, 75 bp, synthetic construct
  source 1..75: mol_type = other DNA
ggttctcaataaaatcaaagaagataaatcagttgatcaggcagggcttcgtgataaatggactgaggtgttggc

SEQ ID NO: 277010 - DNA, 75 bp, synthetic construct
  source 1..75: mol_type = other DNA
cttttgttcgtaccttatcgagtgaactttacaggcatggttatgcatgttctgcaactctgctccgtagagtgc

SEQ ID NO: 277011 - DNA, 75 bp, synthetic construct
  source 1..75: mol_type = other DNA
atcctcattttctgccgtcgcagacgccagcaggcactgccatttgctccgtttctctgcgcgtccctgtatgtg

SEQ ID NO: 277012 - DNA, 75 bp, synthetic construct
  source 1..75: mol_type = other DNA
tgatttggggtgtttatagcgccgaaaaccagctgctggcgtgctttcgcgtagcggaagataacagttacagca

SEQ ID NO: 277013 - DNA, 75 bp, synthetic construct
  source 1..75: mol_type = other DNA
agctacagcaccgctgacgatgatcttttcaccctgccggaaggcgatatctctatcggcactcctcacgttctg

SEQ ID NO: 277014 - DNA, 75 bp, synthetic construct
  source 1..75: mol_type = other DNA
gctaatgagccgctgcattacgactgggaagcactgcgtgagtcaatcaaaacgcacggcctgcgtaactccacg

SEQ ID NO: 277015 - DNA, 75 bp, synthetic construct
  source 1..75: mol_type = other DNA
gaacaagcggaagcggcgttaattgcctgcgagcgcaactgtaaaacggccattgtgatggtgctgaaaaatctc

SEQ ID NO: 277016 - DNA, 75 bp, synthetic construct
  source 1..75: mol_type = other DNA
ccaccgggctgatgattaaatctggcaaagtgttcggcaacctgatggtcgatgtggtcgccaccaacgaaaaac

SEQ ID NO: 277017 - DNA, 75 bp, synthetic construct
  source 1..75: mol_type = other DNA
aaggaactatgaattatgggattgttacgctgaacagccgttatgctccgaacgctgaagagaaaaaacgctatc

SEQ ID NO: 277018 - DNA, 75 bp, synthetic construct
  source 1..75: mol_type = other DNA
tggttatcgctttttttagttggcggataatgtttctgctgggcggtattggcatactgttagcctggtttctct

SEQ ID NO: 277019 - DNA, 75 bp, synthetic construct
  source 1..75: mol_type = other DNA
aaacgctgggctgatgaggcgatcctcgaaaaagaggggcgagtatcagttgctgacttttgggcacatatgaat

SEQ ID NO: 277020 - DNA, 75 bp, synthetic construct
  source 1..75: mol_type = other DNA
gatgtggtcgccaccaacgaaaaactgcatgtgcgccaggtcaatatcgtaaaaacgccaccggatgtaatgccg

SEQ ID NO: 277021 - DNA, 75 bp, synthetic construct
  source 1..75: mol_type = other DNA
acgaaaccattatcaaggcagctgctgacctgatctcccgtgaagcaccggattatcagtatctcgccgcacgcc

SEQ ID NO: 277022 - DNA, 75 bp, synthetic construct
  source 1..75: mol_type = other DNA
ctgctgaaagcgtctaatgagctggcgaaagagcaaggcgcgtgcccgtggtttaacgaaaccacttacgcgaaa

SEQ ID NO: 277023 - DNA, 75 bp, synthetic construct
  source 1..75: mol_type = other DNA
aacgcacggcctgcgtaactccacgctttctgccctgatgccgtccgagacttcttcgcagatctctaacgccac

SEQ ID NO: 277024 - DNA, 75 bp, synthetic construct
  source 1..75: mol_type = other DNA
actacggcgtacaaatcaacaaactgatgtacacccgcctgctgaaaggcgaggaaatcaccctgttcagcccat

SEQ ID NO: 277025 - DNA, 75 bp, synthetic construct
  source 1..75: mol_type = other DNA
ttctcagggcggcgtgcgcggtggcgcagcaacgctgttttacccgctctggcatctggaagttgaaagcctgtt

SEQ ID NO: 277026 - DNA, 75 bp, synthetic construct
  source 1..75: mol_type = other DNA
tggcgatcttccacctgcgtaagaaagcctacggccagtttgaaccgccagcgctgtatgaccacgtagtaaaaa

SEQ ID NO: 277027 - DNA, 75 bp, synthetic construct
  source 1..75: mol_type = other DNA
ggcatattgagtcactgggttctatgctcaaatgggctaagagtgaacgttacctttttgataaccctgctgaga

SEQ ID NO: 277028 - DNA, 75 bp, synthetic construct
  source 1..75: mol_type = other DNA
atcattaaagacggtgaatgcgatccgtcaggttccaattcatccgcgacttatcgaactagggctgctggagta

SEQ ID NO: 277029 - DNA, 75 bp, synthetic construct
  source 1..75: mol_type = other DNA
ttcatgcatctacccgcacaacccaccttgcaaatgccagagctattgctgcgcgtttgctggagaagtggtatg

SEQ ID NO: 277030 - DNA, 75 bp, synthetic construct
  source 1..75: mol_type = other DNA
tagctttcaggctggtaaggcctcacaaatcatcgataaatgtaatctggtgtgcagcaaaactaacaccattgc

SEQ ID NO: 277031 - DNA, 75 bp, synthetic construct
  source 1..75: mol_type = other DNA
tgataaagaatctgcgccgcagctttgccatcactgcgaagatgcgccctgtgcggtggtctgcccggttaacgc

SEQ ID NO: 277032 - DNA, 75 bp, synthetic construct
  source 1..75: mol_type = other DNA
agtcactgggttcgatgttcaaatgggccaagaaggtgcgttacctgcttgataatccagccgagaatgtgctcg

SEQ ID NO: 277033 - DNA, 75 bp, synthetic construct
  source 1..75: mol_type = other DNA
tttacatgccgctgcatgccctcaatggattgaagaaagggctatcaacggaaataactgcattcagggctaaca

SEQ ID NO: 277034 - DNA, 75 bp, synthetic construct
  source 1..75: mol_type = other DNA
gaactggcggaacgtgcgcgactgattaagccgtcaacgagccatcacgatgatgatctgcattttaccggatgt

SEQ ID NO: 277035 - DNA, 75 bp, synthetic construct
  source 1..75: mol_type = other DNA
atgattaacctgtcacttaccgaccttaaccgcattcagtttcgtgagaaattcaccgggcagctactggtcaat

SEQ ID NO: 277036 - DNA, 75 bp, synthetic construct
  source 1..75: mol_type = other DNA
aatgagctttgccagctttatctgacggatattcgcgaagataaaaacggggttgcctatattgattttaacctt

SEQ ID NO: 277037 - DNA, 75 bp, synthetic construct
  source 1..75: mol_type = other DNA
gacgtcctagcgggatctatgttctgcggataaccgttccggttcggtatcgtgccctgatagggcagcgtgaaa

SEQ ID NO: 277038 - DNA, 75 bp, synthetic construct
  source 1..75: mol_type = other DNA
tctgagcctgaattacctctggttccggctgttgtgccaccaccaccgccccctcctttgatcatctctaacccg

SEQ ID NO: 277039 - DNA, 75 bp, synthetic construct
  source 1..75: mol_type = other DNA
atggtatcacaggaaattctattaaatggttcttttgataagtggagtgacagggtacattcagcttatgaaaat

SEQ ID NO: 277040 - DNA, 75 bp, synthetic construct
  source 1..75: mol_type = other DNA
acccggaagtcattgcccgcaccctgcgtaaactgaaaaaccagccagaccttgacgctgctacgatcaaaaaag

SEQ ID NO: 277041 - DNA, 75 bp, synthetic construct
  source 1..75: mol_type = other DNA
tggctacgtacgtgaaaacaaagattttgtgccttacttccgctccgctacgccggaacaagaactgggcaaact

SEQ ID NO: 277042 - DNA, 75 bp, synthetic construct
  source 1..75: mol_type = other DNA
ctggagatggttttcgccaaagcggatctgtggctggcggaatactacgatcagcggctggtcgcaaaagagctt

SEQ ID NO: 277043 - DNA, 75 bp, synthetic construct
  source 1..75: mol_type = other DNA
gtaacgaagcactgcgcctggcaaaggttaaacgtgatcgcctcattgaaaacgccaaaaggtcaggccggttaa

SEQ ID NO: 277044 - DNA, 75 bp, synthetic construct
  source 1..75: mol_type = other DNA
aagtgttattgccgggtaatgttcctgacaagctggagcaccaagcaaccgaacgtgttgatcagttgcgacgga

SEQ ID NO: 277045 - DNA, 75 bp, synthetic construct
  source 1..75: mol_type = other DNA
ctctgccacgccagagcaggaactcggcaaactgccgttgggatcacgtccggcgaaacgtcgcccgaccggcgg

SEQ ID NO: 277046 - DNA, 75 bp, synthetic construct
  source 1..75: mol_type = other DNA
gcagatgaaattgccatgactgcccgctatcaatttactgatatcctgttgggacctcgcgttttgcgtactgag

SEQ ID NO: 277047 - DNA, 75 bp, synthetic construct
  source 1..75: mol_type = other DNA
gaatctccgctgcatattcacctcggtcaggtgatgtcgcgtggtgaaaaaatggaatttacgatccagaaatcg

SEQ ID NO: 277048 - DNA, 75 bp, synthetic construct
  source 1..75: mol_type = other DNA
atttgacggtagcaaccaggtctttgacgcagagattaccagcgccagcaaaaaaagcgtggaagttaacgtgct

SEQ ID NO: 277049 - DNA, 75 bp, synthetic construct
  source 1..75: mol_type = other DNA
ggttcggggaaaatggtctgcgcgtctctcctttgtcggcaactggtcgccagtgctgtctgctgctataggcgc

SEQ ID NO: 277050 - DNA, 75 bp, synthetic construct
  source 1..75: mol_type = other DNA
caccatcttccgaagatgaggatatggatcctcacgctcgtaaggcatggtatcagtccgagcgcgagcgtctta

SEQ ID NO: 277051 - DNA, 75 bp, synthetic construct
  source 1..75: mol_type = other DNA
cctttcaggtctgcaccggcagactgttgccgccagaatggcggatgttcctcttgcaccaggcagtaatgaaaa

SEQ ID NO: 277052 - DNA, 75 bp, synthetic construct
  source 1..75: mol_type = other DNA
aaaaaactagaaattggtaacatcgagtcagtatgggaatcatggttatgtcttacacaactagaagcaattcgc

SEQ ID NO: 277053 - DNA, 75 bp, synthetic construct
  source 1..75: mol_type = other DNA
cacggcgctgcatggcaaacatttgctgtgggcggtgacgaccggcggcggggaaagccattttgaaattggtgc

SEQ ID NO: 277054 - DNA, 75 bp, synthetic construct
  source 1..75: mol_type = other DNA
gaggcgctgtctcgcgccgatctgatcgtctggcagcacccgatgcagtggtacagcattcctccgctccttaaa

SEQ ID NO: 277055 - DNA, 75 bp, synthetic construct
  source 1..75: mol_type = other DNA
aacctttgaaggggcgctcaaaaccggacgcctggcgctggaaagtttgggtctgggggcgtatgaagcgcggga

SEQ ID NO: 277056 - DNA, 75 bp, synthetic construct
  source 1..75: mol_type = other DNA
gattattgcccgcgcccgcgatgtcgatcactacattcgtttgcgtcaggcaggcgttgaaaagccggagcgtga

SEQ ID NO: 277057 - DNA, 75 bp, synthetic construct
  source 1..75: mol_type = other DNA
gtgatcctcaaccgtcttgagcaatccggcactgaagaggcgcgcgaagctgatgagatcgacgaagaacagccg

SEQ ID NO: 277058 - DNA, 75 bp, synthetic construct
  source 1..75: mol_type = other DNA
ggctgcgctggcaggtagcggaattgatcggcatgacgctggcgctctcctctacggcgattgccatgcaggcga

SEQ ID NO: 277059 - DNA, 75 bp, synthetic construct
  source 1..75: mol_type = other DNA
tccggctccctgctggcaaagtctggttatcaccggtggtggactgcttcgatggaaaagttgtgagctggtctc

SEQ ID NO: 277060 - DNA, 75 bp, synthetic construct
  source 1..75: mol_type = other DNA
cctgcatgcgatgctcaggcatgagggggatcggctatcagaaaaggttgtacgcagacttatggtggaggaaca

SEQ ID NO: 277061 - DNA, 75 bp, synthetic construct
  source 1..75: mol_type = other DNA
atgtggctctatgccggtgtccagcatggtgcaaattggcaccactcagggtctgcgttacctgcactgcaacct

SEQ ID NO: 277062 - DNA, 75 bp, synthetic construct
  source 1..75: mol_type = other DNA
atatagaaactttgcgcaaattcggcatgaaagtgttttacggcgatgccacgcggatggatttgctggaatctg

SEQ ID NO: 277063 - DNA, 75 bp, synthetic construct
  source 1..75: mol_type = other DNA
gatgccgaatctatcctgcactttgccgaaattggcgtggtgctgatgttatttattatcggtctggagcttgat

SEQ ID NO: 277064 - DNA, 75 bp, synthetic construct
  source 1..75: mol_type = other DNA
tgaatgaacgcaatctgatggtgacgcaaatgggtcgcagtgcctttgcggtgctgctgttccaggatatcgcgg

SEQ ID NO: 277065 - DNA, 75 bp, synthetic construct
  source 1..75: mol_type = other DNA
taatcagtaatagcgatgattttacggacgtattaccccacggcacggcgcagataaacgctggtgagccgctgt

SEQ ID NO: 277066 - DNA, 75 bp, synthetic construct
  source 1..75: mol_type = other DNA
gtgggggtactcagtttgatttactggcttcggcgaatgataaagccgtttgcagtagtgtctatgccggtgtat

SEQ ID NO: 277067 - DNA, 75 bp, synthetic construct
  source 1..75: mol_type = other DNA
ccatcgagctacctgaaaggtcagcgctggaacgacgaaaagccagaaaccattcaaccacaatccaaaccatca

SEQ ID NO: 277068 - DNA, 75 bp, synthetic construct
  source 1..75: mol_type = other DNA
ttttcaaaagcattctgcttcttattatcctagcattaacaacctatttcttttggattaatgaccgaaaaataa

SEQ ID NO: 277069 - DNA, 75 bp, synthetic construct
  source 1..75: mol_type = other DNA
ccggaacgtgcattgttgcctgagtgggaggacgatgcagacaatactctggggctgcatgtttatcgtccgatc

SEQ ID NO: 277070 - DNA, 75 bp, synthetic construct
  source 1..75: mol_type = other DNA
tctcgttgaggaatgtggtatgtcgacagatgaggctgaggaacgtatttaccgggcactggaaatccttaaacc

SEQ ID NO: 277071 - DNA, 75 bp, synthetic construct
  source 1..75: mol_type = other DNA
agtgggagcgatttgtcgctgcctgctcacgccgtggaaattcaacgttctttccgtcaacgcacgacccgcgca

SEQ ID NO: 277072 - DNA, 75 bp, synthetic construct
  source 1..75: mol_type = other DNA
tgtgagcggttttgtgcagcatattccggagccggtacttggcggcgctacgctggtgatgtttggtactatcgc

SEQ ID NO: 277073 - DNA, 75 bp, synthetic construct
  source 1..75: mol_type = other DNA
ctggcgggcgtggtcttagctttaatcattctgcttaaccgtcaacgtaacccttacttacgcgtggcctcgctg

SEQ ID NO: 277074 - DNA, 75 bp, synthetic construct
  source 1..75: mol_type = other DNA
cccctacttacgcgtagcctcgctggtgattgcgatggcggcaggatatgcactggcgtggtttatggacatgtt

SEQ ID NO: 277075 - DNA, 75 bp, synthetic construct
  source 1..75: mol_type = other DNA
attacggataaaaaattggctcgtaaaatttacgcgacacatcgtcgctatgattatgttagtctcgagaactta

SEQ ID NO: 277076 - DNA, 75 bp, synthetic construct
  source 1..75: mol_type = other DNA
cagaacggttcttgaaaatcaactttcgatcagtgaaggtgcttcccgattatctcttcctgaaggcactttagg

SEQ ID NO: 277077 - DNA, 75 bp, synthetic construct
  source 1..75: mol_type = other DNA
tcacagatgtctatgcaggatctgcaaacacatctcgactattgtgccgaacaattacgaaaacaaatccggtaa

SEQ ID NO: 277078 - DNA, 75 bp, synthetic construct
  source 1..75: mol_type = other DNA
ttcctgcagagaccagtaaccccctgaaccgggtactgatcaaagcgtatcatccattgctgttgcgggttctcc

SEQ ID NO: 277079 - DNA, 75 bp, synthetic construct
  source 1..75: mol_type = other DNA
agattgtagaaaaccaggtcacctatccgcttaccaccaccatgctgtccgtgcctggcgcaaaaaccgtgcgtg

SEQ ID NO: 277080 - DNA, 75 bp, synthetic construct
  source 1..75: mol_type = other DNA
gacgccagtgagaacccggaaccggaaacggaaacggaatcaaatccgtgggtcgaacagtggggcacgctgttg

SEQ ID NO: 277081 - DNA, 75 bp, synthetic construct
  source 1..75: mol_type = other DNA
tacagatggaagagaaggttggtaacgattatccggatgcaaagcggcggcttgcagccacttacgcactgatgg

SEQ ID NO: 277082 - DNA, 75 bp, synthetic construct
  source 1..75: mol_type = other DNA
cgcgccatattaagcgtttacagaatatagcaaaagtcattagcggcttaggcgatgtaagagttgtaatagacg

SEQ ID NO: 277083 - DNA, 75 bp, synthetic construct
  source 1..75: mol_type = other DNA
cattttcacggttatctggccactgagtcaggtgggcggtgaatttctgccgaagattaacgagggcgatctgct

SEQ ID NO: 277084 - DNA, 75 bp, synthetic construct
  source 1..75: mol_type = other DNA
tgcgggaaatatcgccgaactggacgcaattgcagcatgcgtgattggcggcaccagtctggcaggcggcgtcgg

SEQ ID NO: 277085 - DNA, 75 bp, synthetic construct
  source 1..75: mol_type = other DNA
acgttgaacgaacaaaacttgctgtgtttgctatcaacggtttgatggtagccatcgccgggttaattcttagtt

SEQ ID NO: 277086 - DNA, 75 bp, synthetic construct
  source 1..75: mol_type = other DNA
catttatgccatcggcggcaatctggaagcagccgtctctccgggattaacgttgaacgcaccaaacttgccgtg

SEQ ID NO: 277087 - DNA, 75 bp, synthetic construct
  source 1..75: mol_type = other DNA
gcgggtaggggaaatgctgctgattgatgccagcgagaccccggaaccagaaacggaatcaaacccgtgggttga

SEQ ID NO: 277088 - DNA, 75 bp, synthetic construct
  source 1..75: mol_type = other DNA
tcatacttcaagttgcatgtgctgcgtctgcgttcgctcaccccagtcacttacttatgtaagctcctggggatt

SEQ ID NO: 277089 - DNA, 75 bp, synthetic construct
  source 1..75: mol_type = other DNA
gagtatgatggatgtaccgaccttctggcagtatatcgttaaaggtgcgattctgttgctggcagtatggatgga

SEQ ID NO: 277090 - DNA, 75 bp, synthetic construct
  source 1..75: mol_type = other DNA
cctggtcaatgatatcgctcgcagtgaacacggcctgattatgctgatgggcaaaggtggcgtagggaaaaccac

SEQ ID NO: 277091 - DNA, 75 bp, synthetic construct
  source 1..75: mol_type = other DNA
ctgattatcacgctgtcgtttattccaatcttcaccctggaagggcaagaagggcgtctgtttggcccgctggcg

SEQ ID NO: 277092 - DNA, 75 bp, synthetic construct
  source 1..75: mol_type = other DNA
cccgctttgatcatatcatttttgatacagcacctactggccatactatccgccttctccagttgcctggtgcat

SEQ ID NO: 277093 - DNA, 75 bp, synthetic construct
  source 1..75: mol_type = other DNA
cccgctttgatcacatcatttttgataccgcgccaacgggccataccatacgacttctgcagctccccggtgcct

SEQ ID NO: 277094 - DNA, 75 bp, synthetic construct
  source 1..75: mol_type = other DNA
atcggcggcgcgacggtaggggaaacggttgaaggcgtggcccggtacccgattaatatccgctatccgcaggat

SEQ ID NO: 277095 - DNA, 75 bp, synthetic construct
  source 1..75: mol_type = other DNA
gggcgacctgctgtatatgccatcaacattgcctggcgtctctccggcagaagctgcagcactcctgcagacgac

SEQ ID NO: 277096 - DNA, 75 bp, synthetic construct
  source 1..75: mol_type = other DNA
tccggtaaaactgtcccagtatgggatcagcctgcccgaagtgaaacaggctcttgaatcgtctaaccaggaggc

SEQ ID NO: 277097 - DNA, 75 bp, synthetic construct
  source 1..75: mol_type = other DNA
accacaccggtactggaagcggcaaacctgcagtccgatcttgagcgtgcggggattcatccgtggggctggatt

SEQ ID NO: 277098 - DNA, 75 bp, synthetic construct
  source 1..75: mol_type = other DNA
acgctatcgtcagcatgttcttgagacgaaaggcagggatctggatgaggcagggaaacggctgctcgaagagga

SEQ ID NO: 277099 - DNA, 75 bp, synthetic construct
  source 1..75: mol_type = other DNA
atctgagctaccgacagataccctattactacagccagtcaatatggttggtgtttcagcattgaagggactgct

SEQ ID NO: 277100 - DNA, 75 bp, synthetic construct
  source 1..75: mol_type = other DNA
accacaccggtactggaagcggcaaacctgcaggctgaccttgaaagagcggggattcatccgtggggctggatt

SEQ ID NO: 277101 - DNA, 75 bp, synthetic construct
  source 1..75: mol_type = other DNA
atggtcgggctggaaaagcagcatgagcagtatgctcatgcagtagaggcgttatccgatcctgaacgtacccgc

SEQ ID NO: 277102 - DNA, 75 bp, synthetic construct
  source 1..75: mol_type = other DNA
atcaataacagcctttccattgcggatacgagttctccgttgctttgccagcgcgcccagcaggaacagcctcag

SEQ ID NO: 277103 - DNA, 75 bp, synthetic construct
  source 1..75: mol_type = other DNA
tgttggctggcaatggcgcggaagaatgcgccgtcaggctttgggtttgcagtctccggcctctaccgcagtagt

SEQ ID NO: 277104 - DNA, 75 bp, synthetic construct
  source 1..75: mol_type = other DNA
tgaaaatcctgctgcccgtcgttgtgctgctcacactctggctgctgctgcgcccggccagcaaaaacatcgctg

SEQ ID NO: 277105 - DNA, 75 bp, synthetic construct
  source 1..75: mol_type = other DNA
acggaggtggtggtgagtgtcaacggcaccctgcagatgctgggctctccgcgccagcagggcagcggtgccgca

SEQ ID NO: 277106 - DNA, 75 bp, synthetic construct
  source 1..75: mol_type = other DNA
tgtcactggcgaccagtgatacctggaaggataaacagagcggtgaaatgaaggaagtgaccgaatggcaccgca

SEQ ID NO: 277107 - DNA, 75 bp, synthetic construct
  source 1..75: mol_type = other DNA
cggctcggtggcgatgaccgcactgctaggacgcattccgcttaatggcagcgttaccgatccttacccgttcaa

SEQ ID NO: 277108 - DNA, 75 bp, synthetic construct
  source 1..75: mol_type = other DNA
actggatgaaacagcactacggccagatgttcgacgccgtgtatgtgccaccgggccacaaggtggcggtgcatc

SEQ ID NO: 277109 - DNA, 75 bp, synthetic construct
  source 1..75: mol_type = other DNA
ctgccgataccgtcgccacgctggtcggccagatgaagcagtaccgccgggagcttcagacaatccagaacgata

SEQ ID NO: 277110 - DNA, 75 bp, synthetic construct
  source 1..75: mol_type = other DNA
tcgacgaacgtctgcgcgaagccgatatcatcatcagttccaccgccagcccgttgccgattatcggtaaaggca

SEQ ID NO: 277111 - DNA, 75 bp, synthetic construct
  source 1..75: mol_type = other DNA
caggatctggcatggaaactgactaaccgcttgatccatgcgccaacaaaatcacttcaacaggccgcccgtgac

SEQ ID NO: 277112 - DNA, 75 bp, synthetic construct
  source 1..75: mol_type = other DNA
ccacacagcctgtcaatcagcaaatttatcgtattcttcgccgtgacattgtgcattgtctgattgcaccaggta

SEQ ID NO: 277113 - DNA, 75 bp, synthetic construct
  source 1..75: mol_type = other DNA
atcgcgtcagcagggcgcttccggtaatggtgcttcagcactggcacaagggggccagggacatccgccgaagac

SEQ ID NO: 277114 - DNA, 75 bp, synthetic construct
  source 1..75: mol_type = other DNA
atcttgagattttctctgccctgcaaaaacgtgatggcgatgcggtagaacgtgcaatgacgcaacatttgcagg

SEQ ID NO: 277115 - DNA, 75 bp, synthetic construct
  source 1..75: mol_type = other DNA
gaccggccaggaacgctacacgactgaagtggtggtgcataccggcggtaccatgcagatgctgggctcccggca

SEQ ID NO: 277116 - DNA, 75 bp, synthetic construct
  source 1..75: mol_type = other DNA
tcctgcgtgcgcgggagcttaacgtcaatcacctttgtcttccgcgacggaacggtacgcacgctgcccaccgag

SEQ ID NO: 277117 - DNA, 75 bp, synthetic construct
  source 1..75: mol_type = other DNA
catcgagtgccatcatggatagaagttaaaaataataagtatgtgataaaagaaggtgaggctgagaagttcaac

SEQ ID NO: 277118 - DNA, 75 bp, synthetic construct
  source 1..75: mol_type = other DNA
gacggcacttacttctgcgccacgaatgtggtgcgggtgaaccttatccgacaggtacaggagtcacgcagatga

SEQ ID NO: 277119 - DNA, 75 bp, synthetic construct
  source 1..75: mol_type = other DNA
gaagtggggaaacgtcaattagacgaaatcggtaatgactccaacttattgatagtgttttatgttcagataatg

SEQ ID NO: 277120 - DNA, 75 bp, synthetic construct
  source 1..75: mol_type = other DNA
cgcggcttggcgctggttcaccttctgcgggtaatatcgctgagctggacgcgattgcagcctgcgtgattggcg

SEQ ID NO: 277121 - DNA, 75 bp, synthetic construct
  source 1..75: mol_type = other DNA
cactgacggcacttatttctgcgccactaatgtggcgcgggtaaaccttatccgacaggtacaggagccacgcag

SEQ ID NO: 277122 - DNA, 75 bp, synthetic construct
  source 1..75: mol_type = other DNA
ttcgtttcacatccagagggcgtgaatacgaagttgacgaacggctgattaaaacgctcgaccgtcaccgttcgc

SEQ ID NO: 277123 - DNA, 75 bp, synthetic construct
  source 1..75: mol_type = other DNA
tcagcgcctgcgtgagcgcgagcagaataccgacagccgcatcaacgaggccattaaccgccagcagaccagcgc

SEQ ID NO: 277124 - DNA, 75 bp, synthetic construct
  source 1..75: mol_type = other DNA
ccaccgtggaagatggatccatcactaccgcgctaacgggcgacagtgggcagtacgtactgggccaggcgctgg

SEQ ID NO: 277125 - DNA, 75 bp, synthetic construct
  source 1..75: mol_type = other DNA
tcctcacggcctgccctgcatccccggcgaacgcaaatctaacgcagccgaatatatcggctcgcagttcctgct

SEQ ID NO: 277126 - DNA, 75 bp, synthetic construct
  source 1..75: mol_type = other DNA
accagcgcaagcatttacagttccggaagtgggtaatgactctaacttattgatagtgttttatgttcagataat

SEQ ID NO: 277127 - DNA, 75 bp, synthetic construct
  source 1..75: mol_type = other DNA
gcatcaccgggtggggggcgctggaaggacataaagttttctatcacgaaacatatattaatcctgaagttgctc

SEQ ID NO: 277128 - DNA, 75 bp, synthetic construct
  source 1..75: mol_type = other DNA
gcgacaaactcagtttacagaccgctcagaatgctgatgctggttttagttcactggaaaaatcactcctgcgtt

SEQ ID NO: 277129 - DNA, 75 bp, synthetic construct
  source 1..75: mol_type = other DNA
tggaggaaagaacggagaccgtcacccgtcgccgtcggcagagtggcgtatggggaaccgtttgtcgatggtttg

SEQ ID NO: 277130 - DNA, 75 bp, synthetic construct
  source 1..75: mol_type = other DNA
atgcacgaaaagaacatcgccctgctttgtgatgaagccgatcggcttttgcaactgaatatcaatctgctccgg

SEQ ID NO: 277131 - DNA, 75 bp, synthetic construct
  source 1..75: mol_type = other DNA
ggagttgcaggcatccattgagcagaatattaaccagcccgtccgccaggagatcgatgattttttctgtacatt

SEQ ID NO: 277132 - DNA, 75 bp, synthetic construct
  source 1..75: mol_type = other DNA
agcctgcaccgtgaggctgaagcacagttccggcctgagctggagaaaatcgtcagcgggattgaaacaggtttt

SEQ ID NO: 277133 - DNA, 75 bp, synthetic construct
  source 1..75: mol_type = other DNA
gagcgccttcaggcattaaatgaaagggttcccgagctgattactgacagtaaggcgttaagggaagagctggag

SEQ ID NO: 277134 - DNA, 75 bp, synthetic construct
  source 1..75: mol_type = other DNA
atgacgcaaatcgaatcgaccgtgaccagcctgcaccgtgaggctgaagcacagttccggcctgaactggaaaaa

SEQ ID NO: 277135 - DNA, 75 bp, synthetic construct
  source 1..75: mol_type = other DNA
gctgaccgggcgtcttcaggcgttaaatgaaagggttcctgagctcattactgacagtaaggctctgagggaaga

SEQ ID NO: 277136 - DNA, 75 bp, synthetic construct
  source 1..75: mol_type = other DNA
cccgggctgggaagattacaggaaacgagactttgacccggaaaaccccgagataacactaaataatcgtaggga

SEQ ID NO: 277137 - DNA, 75 bp, synthetic construct
  source 1..75: mol_type = other DNA
gctcggtgaacgcagaatgacgctggtcgatctgcccggcattggtgaaacaccgcagcatgatcaggaataccg

SEQ ID NO: 277138 - DNA, 75 bp, synthetic construct
  source 1..75: mol_type = other DNA
ctggggtacgctttgtcgatgggcaaacacccgtgactggggctggaaagagtacagtgtggatgtgagccgcag

SEQ ID NO: 277139 - DNA, 75 bp, synthetic construct
  source 1..75: mol_type = other DNA
ccttacctgatcccgcttgcgcgggccatcggcggtttgctctctgttgcactggtcgtgggtttcccccccagg

SEQ ID NO: 277140 - DNA, 75 bp, synthetic construct
  source 1..75: mol_type = other DNA
agcaattgaatatatagaggaaattgagtcaactgtgaccagcctgcaccgtgaggctgaagcacagttccggcc

SEQ ID NO: 277141 - DNA, 75 bp, synthetic construct
  source 1..75: mol_type = other DNA
ggcgatgagtgcgcgtgcgcaggaatcactgccgcaaccgaccattagttttgccgggcagctgcacgccgcgct

SEQ ID NO: 277142 - DNA, 75 bp, synthetic construct
  source 1..75: mol_type = other DNA
gatcctcacgccaggcatacctggctaaccgtgcgcttcatgagttacggaaaaacggaacccttcctgttgatg

SEQ ID NO: 277143 - DNA, 75 bp, synthetic construct
  source 1..75: mol_type = other DNA
ctgcggtgctggcggtgatggactacacccagatgaactcgaaagccgatgaggaggttcgtaaagagcttaatg

SEQ ID NO: 277144 - DNA, 75 bp, synthetic construct
  source 1..75: mol_type = other DNA
gagggcgaaggctggtttgttggctctattcatgacactgaagatggtcctgtttgtgtatggctgagaaataag

SEQ ID NO: 277145 - DNA, 75 bp, synthetic construct
  source 1..75: mol_type = other DNA
cacccagatgaactcaaaagccgatgatgatgtccgtaaagagcttaatgccattgctgacgtatcagccggccg

SEQ ID NO: 277146 - DNA, 75 bp, synthetic construct
  source 1..75: mol_type = other DNA
cacccagatgaactcaaaagccgatgaagaagtccgtaaagagcttaatgccattgctgacgtatcagccggccg

SEQ ID NO: 277147 - DNA, 75 bp, synthetic construct
  source 1..75: mol_type = other DNA
gaaggatagcttcattggaaagatttgtggatggattggcaccaaagaatggggatgggaaaactataacgtgga

SEQ ID NO: 277148 - DNA, 75 bp, synthetic construct
  source 1..75: mol_type = other DNA
ttgccgggcagctgcacgccgcgctcgatcgcataagcgatacacaaacagctgcccgcacgcaggcagaaaaat

SEQ ID NO: 277149 - DNA, 75 bp, synthetic construct
  source 1..75: mol_type = other DNA
atgtcagcgatacaggggattgaaggtgttatcagccagttacagaccacggcgatgagtgcgcgtgcgctggaa

SEQ ID NO: 277150 - DNA, 75 bp, synthetic construct
  source 1..75: mol_type = other DNA
atgtcagcgatacaggggattgaaggggttatcagccagttacagaccacggcgatgagtgcgcgtgcgcaggaa

SEQ ID NO: 277151 - DNA, 75 bp, synthetic construct
  source 1..75: mol_type = other DNA
atttcgtctgatgatcctgatgcgctatttaagttgcttcgtaagctgcaaggctgcatgaagtcacacgtcaaa

SEQ ID NO: 277152 - DNA, 75 bp, synthetic construct
  source 1..75: mol_type = other DNA
tgacctgttggatgtgatcccgttaggccagccgattttagttgaccattatagcgcgaaaggccatcgccgccg

SEQ ID NO: 277153 - DNA, 75 bp, synthetic construct
  source 1..75: mol_type = other DNA
catactgcgcgtcatctgtcgccggcctggaatgccgggattcagttcagtcccgtagagacggtggttattgac

SEQ ID NO: 277154 - DNA, 75 bp, synthetic construct
  source 1..75: mol_type = other DNA
ctcgtgtcagttcgagaggacaagctaaagatggctatggcatgtcgagacagcaaacaatgctgcgagattacg

SEQ ID NO: 277155 - DNA, 75 bp, synthetic construct
  source 1..75: mol_type = other DNA
atgctttctccctttattgaagcctgtggcgatggaaaataccggcttatttcagcaagagcaggaaaccagagc

SEQ ID NO: 277156 - DNA, 75 bp, synthetic construct
  source 1..75: mol_type = other DNA
attaaaacgtttaagaaattaacgtcctttacgcctaagagctatcgtaagaaattgactgaatttaatcagtaa

SEQ ID NO: 277157 - DNA, 75 bp, synthetic construct
  source 1..75: mol_type = other DNA
gaaccggatgctgataaaagcgtatcatccattactattgcgggtcctccactggccaaaaacaaccctgctggt

SEQ ID NO: 277158 - DNA, 75 bp, synthetic construct
  source 1..75: mol_type = other DNA
ctggcgtgggataccattgagaacctgaaagcgaccgttgatcgcgtgcgctatatgagtttcgaccatgtttct

SEQ ID NO: 277159 - DNA, 75 bp, synthetic construct
  source 1..75: mol_type = other DNA
ttgccacattgcaaagagtgtgcaaacgtacacttcagtcagcagattacagcacgattgtggataaaatgcgcg

SEQ ID NO: 277160 - DNA, 75 bp, synthetic construct
  source 1..75: mol_type = other DNA
cgtgggtgagcgacacaacatttgatgttgtgttgttcattcacaataatatcgctcattattttttgcgacggg

SEQ ID NO: 277161 - DNA, 75 bp, synthetic construct
  source 1..75: mol_type = other DNA
ggaagggcaggaagggcgcctgtttggcccactggcgttcacgaaaacctattccatggcgggtgcggccgcgct

SEQ ID NO: 277162 - DNA, 75 bp, synthetic construct
  source 1..75: mol_type = other DNA
tgatgattgaaaatgcgcataaacggcttgaggagtgggatcatcagcatccgggagtccagattgacaacgaaa

SEQ ID NO: 277163 - DNA, 75 bp, synthetic construct
  source 1..75: mol_type = other DNA
gaagccgagtacatggtccgtgccagcggatatcttcagagcattgatgatttcaataatatcgtactgaaaacc

SEQ ID NO: 277164 - DNA, 75 bp, synthetic construct
  source 1..75: mol_type = other DNA
agggactgaacgccaatattatgtcgctgggagggattgcgattgccgtcggagcgatggtggatgccgccattg

SEQ ID NO: 277165 - DNA, 75 bp, synthetic construct
  source 1..75: mol_type = other DNA
tggtgggatgatcacggctccgctgctgtccctgttcattattcctgccgcctacaaactaatctggctgcgcag

SEQ ID NO: 277166 - DNA, 75 bp, synthetic construct
  source 1..75: mol_type = other DNA
gttgccgatattaaggtcgtttccggaccaaccatgctgaaaaccgaaaatgcccggccagccagctggatttat

SEQ ID NO: 277167 - DNA, 75 bp, synthetic construct
  source 1..75: mol_type = other DNA
gctaaacgatgtgatgaccgatatgcaaaaagcctcagtttctatgcaaatggggattcaggtgcgtaataagct

SEQ ID NO: 277168 - DNA, 75 bp, synthetic construct
  source 1..75: mol_type = other DNA
tctgcccggcattggtgaaacaccgcagcatgatcaggaataccgagcgctttatcgtcagttactgccggaact

SEQ ID NO: 277169 - DNA, 75 bp, synthetic construct
  source 1..75: mol_type = other DNA
atgtcattcagccattcttccctctcctcccaagtgaaatcacatctgacgtttcttcctgaagaaattcgccag

SEQ ID NO: 277170 - DNA, 75 bp, synthetic construct
  source 1..75: mol_type = other DNA
atgtcattcagccattcttccctctcctctcaagttaaatcagatctgacgtttcttcctgaagaaattcgccag

SEQ ID NO: 277171 - DNA, 75 bp, synthetic construct
  source 1..75: mol_type = other DNA
atgtcattcagccattcttccctctccgcgcacgtaaaatcacatctgacgtttcttcctgaagaaatacgccag

SEQ ID NO: 277172 - DNA, 75 bp, synthetic construct
  source 1..75: mol_type = other DNA
tcccctgaacggctgcactcgtcaggctcatcaccttacccttcagttcggtgaacgcagaatgacgctggtcga

SEQ ID NO: 277173 - DNA, 75 bp, synthetic construct
  source 1..75: mol_type = other DNA
cgtcaccaggaactctcactggcaactgttacagcccgggtggcaaccctgttcccttcatcatttccggtactc

SEQ ID NO: 277174 - DNA, 75 bp, synthetic construct
  source 1..75: mol_type = other DNA
tgctgccgacattgccatgcatcagtttttactgaatgaaggtgcagatccctcgcgttttctgtttgttctcag

SEQ ID NO: 277175 - DNA, 75 bp, synthetic construct
  source 1..75: mol_type = other DNA
tcaaatgttggttatgaaaaatttagcgatttaaaagaatcgtgcactgatgatttgctcgactctaagaatact

SEQ ID NO: 277176 - DNA, 75 bp, synthetic construct
  source 1..75: mol_type = other DNA
cattatgggtaaatccggaacaggcaaaagcagtctgtgtaatgccatttttcagtcccgtatctgcgccacaca

SEQ ID NO: 277177 - DNA, 75 bp, synthetic construct
  source 1..75: mol_type = other DNA
atgtcattcagccattcttccctctcctctcaagtaaaatcatatctgacgtttcttcctgaagaaattcgccag

SEQ ID NO: 277178 - DNA, 75 bp, synthetic construct
  source 1..75: mol_type = other DNA
atgtcattcagccattcttccctctcctcacaagtcaaatcaaatctgacgtttcttcctgaagaaattcgccag

SEQ ID NO: 277179 - DNA, 75 bp, synthetic construct
  source 1..75: mol_type = other DNA
ggggagaaaaccgctctgaacaggcccggaaacacgcacaacagacttttggtgatgccatcgggaaaagttttg

SEQ ID NO: 277180 - DNA, 75 bp, synthetic construct
  source 1..75: mol_type = other DNA
agtggagtggctgacggataatggttcatgctaccgggctaatgaaacacgacagtttgcccggatgctgggact

SEQ ID NO: 277181 - DNA, 75 bp, synthetic construct
  source 1..75: mol_type = other DNA
agtggagtggctgacggataatggttcatgctaccgggctaatgaaacacgacagtttgcccggatgatgggcct

SEQ ID NO: 277182 - DNA, 75 bp, synthetic construct
  source 1..75: mol_type = other DNA
gaaagtaatcagcgatggtgctctgacgggttcgagttccgctgtgataacggagaaaaactgcgagtcacgttc

SEQ ID NO: 277183 - DNA, 75 bp, synthetic construct
  source 1..75: mol_type = other DNA
agtggagtggctgacggataatggttcatgctaccgggctaatgaaacacggcagttcgcccggatgttgggact

SEQ ID NO: 277184 - DNA, 75 bp, synthetic construct
  source 1..75: mol_type = other DNA
agtggagtggctgacggataatggttcatgctaccgggctaatgaaacacggcagtttgcccggatggtggggct

SEQ ID NO: 277185 - DNA, 75 bp, synthetic construct
  source 1..75: mol_type = other DNA
agtggagtggctgacggataatggttcatgctaccgggctaatgaaacacgccagtttgcccggatgatgggact

SEQ ID NO: 277186 - DNA, 75 bp, synthetic construct
  source 1..75: mol_type = other DNA
aggcccagtctaacaaaggtcgtctgttcaagataaccctcgaaaaagcgctattttccagcccgatggcgtgtg

SEQ ID NO: 277187 - DNA, 75 bp, synthetic construct
  source 1..75: mol_type = other DNA
gtgggctgactaccttaatgccaacagaaaagaacacattacaccgtttgaattcgcccagagaataaagaaaat

SEQ ID NO: 277188 - DNA, 75 bp, synthetic construct
  source 1..75: mol_type = other DNA
ccattacgggaattgttggtgaatccgccgcaggaaaactcacgtaatgaagatcaaaactggcgcgataacctg

SEQ ID NO: 277189 - DNA, 75 bp, synthetic construct
  source 1..75: mol_type = other DNA
aaggccttacatttcaaaaactctgcttaccaggcgcatttcgcccaggggatcaccataataaaatgctgaggc

SEQ ID NO: 277190 - DNA, 75 bp, synthetic construct
  source 1..75: mol_type = other DNA
ggaacgccgcttcggcaacgatcttccgtcgtctccagtggagtggctgacggataatggttcatgctaccgggc

SEQ ID NO: 277191 - DNA, 75 bp, synthetic construct
  source 1..75: mol_type = other DNA
aatagccagagccagatcaacgaactggagtcattgctgttggcgctgaataacattgatgccagccagtttagc

SEQ ID NO: 277192 - DNA, 75 bp, synthetic construct
  source 1..75: mol_type = other DNA
ggcttcaacagtgaaacagtacaggacgtcatgctgggagcggtggaacgccgctttggcagcgagcttccggcg

SEQ ID NO: 277193 - DNA, 75 bp, synthetic construct
  source 1..75: mol_type = other DNA
tcacttcaacaggccgcccgtgacggggataacgaacgcctgaatattctgcgcgacagcctcgggctggagtag

SEQ ID NO: 277194 - DNA, 75 bp, synthetic construct
  source 1..75: mol_type = other DNA
gtgatattgatgagcgtctgcgtgaagccgatatcatcattagttccactgccagcccattaccgattattggta

SEQ ID NO: 277195 - DNA, 75 bp, synthetic construct
  source 1..75: mol_type = other DNA
ttgaagagcaggataacctgcaagaggcgttaatccgctggctttgcgattatcacaatcttaatgaagaagatc

SEQ ID NO: 277196 - DNA, 75 bp, synthetic construct
  source 1..75: mol_type = other DNA
ctaaagcgttagcggcccttgaacagggcggtgatgcgcaaaccattatgcaggatctggcatggaaactgacta

SEQ ID NO: 277197 - DNA, 75 bp, synthetic construct
  source 1..75: mol_type = other DNA
gagcaggttcgtgatgagttaactgctaaagcgttagcggcccttgaacagggcggtgatgcgcaaaccattatg

SEQ ID NO: 277198 - DNA, 75 bp, synthetic construct
  source 1..75: mol_type = other DNA
atgttgagccggaagttggcaaactggcgaatgcttacctttatagtgttgacgatctacaaagcattatttcgc

SEQ ID NO: 277199 - DNA, 75 bp, synthetic construct
  source 1..75: mol_type = other DNA
ataatggttcatgctaccgggctaatgaaacacgccagttcgcccggatgttgggacttgaaccgaagaacacgg

SEQ ID NO: 277200 - DNA, 75 bp, synthetic construct
  source 1..75: mol_type = other DNA
gctgggttatcgctcgccacgggaatatctgcggcagcgggcttgtaatgggttaagtgataacagatgtctgga

SEQ ID NO: 277201 - DNA, 75 bp, synthetic construct
  source 1..75: mol_type = other DNA
cccggatgttgggacttgaaccgaagaacacggcggtgcggagtccggagagtaacggcatagcagagagcttcg

SEQ ID NO: 277202 - DNA, 75 bp, synthetic construct
  source 1..75: mol_type = other DNA
gttcgagcattataacgaatggcatccgcatagtgcactgggttatcgctcgccacgggaatatctacggcagcg

SEQ ID NO: 277203 - DNA, 75 bp, synthetic construct
  source 1..75: mol_type = other DNA
gccgtatcgggggcgttgttagttattctggcggatagcattggtcgtttggcttttttgcctttgcaactgcct

SEQ ID NO: 277204 - DNA, 75 bp, synthetic construct
  source 1..75: mol_type = other DNA
tgcccgtagcctgccggtgccgaccaacctgaaccttatccacctgaagccgctgcgcggcacaggcctggtggt

SEQ ID NO: 277205 - DNA, 75 bp, synthetic construct
  source 1..75: mol_type = other DNA
agatggtcaggtgttctgcatgtatgttcagggtctcatgtcgtcacgcaacaaggtcgacctttgccctgcccc

SEQ ID NO: 277206 - DNA, 75 bp, synthetic construct
  source 1..75: mol_type = other DNA
tcactggataatctacgtcaggctcccttactccgaacgcccaccgcgtccgtcccgcacattccagcaacggat

SEQ ID NO: 277207 - DNA, 75 bp, synthetic construct
  source 1..75: mol_type = other DNA
acgcacccgcacttaacccgcttcggcgggttttgttttttcctagcattctggtttacaattcgcacgccagcc

SEQ ID NO: 277208 - DNA, 75 bp, synthetic construct
  source 1..75: mol_type = other DNA
ggaatacatcgtcataactgacgaactgcgcaatacgctctccggacaatcccatgcaacatggggacattacat

SEQ ID NO: 277209 - DNA, 75 bp, synthetic construct
  source 1..75: mol_type = other DNA
cccatgcgacatgggggcattacattgatgaaatcattcgcaaggaaaaacggcggatacgggatcaggttctga

SEQ ID NO: 277210 - DNA, 75 bp, synthetic construct
  source 1..75: mol_type = other DNA
gcatcccagcagaggtctggccccgcgactactctaacgtggagtttagtttgcagttcctacgggcaaggaata

SEQ ID NO: 277211 - DNA, 75 bp, synthetic construct
  source 1..75: mol_type = other DNA
attctgatgccgcccctgccagcagatacgggcggcgttctcacacattcaaatatgactggtatcagcatgacc

SEQ ID NO: 277212 - DNA, 75 bp, synthetic construct
  source 1..75: mol_type = other DNA
tgctaaagtaacattaacatcggcgactcaagggaaatccctcgttagtgcccgtgttagcgatgtcgccgttga

SEQ ID NO: 277213 - DNA, 75 bp, synthetic construct
  source 1..75: mol_type = other DNA
tcgcaacgacatatgatatcgtcactgataatacggtaataaatgttgattcaacagtggctaacgcttatgcag

SEQ ID NO: 277214 - DNA, 75 bp, synthetic construct
  source 1..75: mol_type = other DNA
gatcatctcagtcagactgccttactctgaacgcccaccgcgtccgtcccgcacattccagcaacggatctggag

SEQ ID NO: 277215 - DNA, 75 bp, synthetic construct
  source 1..75: mol_type = other DNA
ctctcagcctcgattatcgtcactggataatctacgtcagactcccttattccgaacgcccaccgcgtccgtccc

SEQ ID NO: 277216 - DNA, 75 bp, synthetic construct
  source 1..75: mol_type = other DNA
gggtatgagtttaggaaagccctcaccctcgattatcgtcactggataatctacgtcaggcttccttactccgaa

SEQ ID NO: 277217 - DNA, 75 bp, synthetic construct
  source 1..75: mol_type = other DNA
acggtcgtgaaatagaaggggtgtcaagaggcgttgatgcttgtcaggtcactcttaagttagaagacggcagaa

SEQ ID NO: 277218 - DNA, 75 bp, synthetic construct
  source 1..75: mol_type = other DNA
actcattaattagttttcaatacgccttttctaatggtctgattaagccttcaccatgcatagttcacccaaata

SEQ ID NO: 277219 - DNA, 75 bp, synthetic construct
  source 1..75: mol_type = other DNA
aaaggagctgctaaaggtttcggcaaacttgctaaagccggattaggtaagctgcgcggtggagtgaaagcaggt

SEQ ID NO: 277220 - DNA, 75 bp, synthetic construct
  source 1..75: mol_type = other DNA
attggttttgatatgccatcacgtgtacagagatggatccatccagaagctgcgcttgaatatgatactgtcgat

SEQ ID NO: 277221 - DNA, 75 bp, synthetic construct
  source 1..75: mol_type = other DNA
ggggtggcggtggacgcgcaggcgctggcggtggtgttagcggcaaggcatatggttcaggtggcggtggtgcat

SEQ ID NO: 277222 - DNA, 75 bp, synthetic construct
  source 1..75: mol_type = other DNA
gtggagcaggtggaacaattatttcaacaatgcccctgacagagaatagttatcctgtcgttatcggtgcaggcg

SEQ ID NO: 277223 - DNA, 75 bp, synthetic construct
  source 1..75: mol_type = other DNA
ttctttgaaggagaaaatgttaaaggtgttgctatatatgtccctgcagagtttgttgaaggtaaaccatgcttt

SEQ ID NO: 277224 - DNA, 75 bp, synthetic construct
  source 1..75: mol_type = other DNA
ggtcagccattaacgcaatgggtggcgtttgtgatgcttgtccgggataacccgggtaaagccttagcgttggaa

SEQ ID NO: 277225 - DNA, 75 bp, synthetic construct
  source 1..75: mol_type = other DNA
gtacaggacgtcatgctgggagcagtggaacgccgctttggcagcgagcttccggcgtcttcagttgagtggctg

SEQ ID NO: 277226 - DNA, 75 bp, synthetic construct
  source 1..75: mol_type = other DNA
gcataccggctgaagtctggccgcgagactacgaacatgctgagcgcaccttgctcttctggcggagtgcaaaat

SEQ ID NO: 277227 - DNA, 75 bp, synthetic construct
  source 1..75: mol_type = other DNA
atggacatattttttttgctggatgataatttgaaactctatatagccacgattattaaggatgagtgttcaagt

SEQ ID NO: 277228 - DNA, 75 bp, synthetic construct
  source 1..75: mol_type = other DNA
tttttttcggcctgatgataaaattgagtttatatgccgatagtatcggtatagacatttttttgctaggttata

SEQ ID NO: 277229 - DNA, 75 bp, synthetic construct
  source 1..75: mol_type = other DNA
tcatcgaaagctggccggtaaaacttcgtaataaggcatctggttttttgatttcaggtttttccgtagggggcg

SEQ ID NO: 277230 - DNA, 75 bp, synthetic construct
  source 1..75: mol_type = other DNA
acgatgccggacaggcgctacattatgagattttcgacgacgccaattttatggtgctggtggaaccggagatta

SEQ ID NO: 277231 - DNA, 75 bp, synthetic construct
  source 1..75: mol_type = other DNA
tgcaaagcgccttgctgggtcaggatgatgtgctggcgcaattaaccggggcgtatcagcgttttcatctgccga

SEQ ID NO: 277232 - DNA, 75 bp, synthetic construct
  source 1..75: mol_type = other DNA
acgcaatcattttgcgatgtggtggatgcgattatcgccggaggtggaatggtcggtggtctgggcgatcgtttt

SEQ ID NO: 277233 - DNA, 75 bp, synthetic construct
  source 1..75: mol_type = other DNA
tgatcactgaccacaacgtgcgtgaaacactggcggtttgtgaacgcgcttatatcgtcagtcaggggcatttga

SEQ ID NO: 277234 - DNA, 75 bp, synthetic construct
  source 1..75: mol_type = other DNA
gcgtatgtattcttcaacaaccagcgtgcgtttacactcaatgatttagacatggttgtgaacaaatccgggttc

SEQ ID NO: 277235 - DNA, 75 bp, synthetic construct
  source 1..75: mol_type = other DNA
gcaaaccgagaaatttctccacggcaccaaagtcgcttacggaattctggtacaaagcgccttgctgggtcagga

SEQ ID NO: 277236 - DNA, 75 bp, synthetic construct
  source 1..75: mol_type = other DNA
cgacgttaaataccggcgaacatcaggtgcaaatcagtaatggtgttccgttaggcactttaggtaacgcttatt

SEQ ID NO: 277237 - DNA, 75 bp, synthetic construct
  source 1..75: mol_type = other DNA
tcacagttaaacccggagatatgtattcctttacagttgggtccggaggggctggaggggctggaggtacacagg

SEQ ID NO: 277238 - DNA, 75 bp, synthetic construct
  source 1..75: mol_type = other DNA
attgctatcggtaaattcccggagtcgtataaaccgctattacccggcggctgcggtaagcaagtttgcattcgt

SEQ ID NO: 277239 - DNA, 75 bp, synthetic construct
  source 1..75: mol_type = other DNA
cacgattttttcactgatgaacaactttctcgcgcggtgtggatctacggcgaacgcgccattgctgcggcgcaa

SEQ ID NO: 277240 - DNA, 75 bp, synthetic construct
  source 1..75: mol_type = other DNA
tggtggctactgcgagagggcatatattcaatgatgccaataagcgtaccgcgctaaacagtgcgctgctatttc

SEQ ID NO: 277241 - DNA, 75 bp, synthetic construct
  source 1..75: mol_type = other DNA
aaatcatctgcgctgacctgtcgctgaacaatgtgacggactcagaagccttcccgggtcttatccggcagactc

SEQ ID NO: 277242 - DNA, 75 bp, synthetic construct
  source 1..75: mol_type = other DNA
aacgtcttccgttcacggtactgctggacgatgtggctgggggcgctgataacgtcgttgttgttcgtcgccgcg

SEQ ID NO: 277243 - DNA, 75 bp, synthetic construct
  source 1..75: mol_type = other DNA
ctgctgaccctggcagaactgttcctggtggggttgattacatcagctgcccggatcagaagcggcggcctgctg

SEQ ID NO: 277244 - DNA, 75 bp, synthetic construct
  source 1..75: mol_type = other DNA
atgaggaaacgctgttccgggggatcatgctgaacgtcttccgttcacggtaccgctggacgatgtggctggggg

SEQ ID NO: 277245 - DNA, 75 bp, synthetic construct
  source 1..75: mol_type = other DNA
tattgagtgtgccgtcgcccgccgggcggcgagcatgattaccgatagccagtgctatcagcttgagcaaaatct

SEQ ID NO: 277246 - DNA, 75 bp, synthetic construct
  source 1..75: mol_type = other DNA
acaattgtaaattaccggacggtgaaacgattgatgaatgggcattgtggcggcgggatcatccggctggtgaaa

SEQ ID NO: 277247 - DNA, 75 bp, synthetic construct
  source 1..75: mol_type = other DNA
gaacacaatggcgtggaattacagacggcaactacagtgaaagcaaagtcgatatggctgaacaactcaaccgaa

SEQ ID NO: 277248 - DNA, 75 bp, synthetic construct
  source 1..75: mol_type = other DNA
cgtacggcatgtacagcgtcagcgccgaaaccattggcgtcgagtgccgcacagtgccgacgctggaaaactggc

SEQ ID NO: 277249 - DNA, 75 bp, synthetic construct
  source 1..75: mol_type = other DNA
ctggtgtacctcctgtgtgttttcctggtataccgccgctgggttgctccgctaccggtcgttggccagctgagc

SEQ ID NO: 277250 - DNA, 75 bp, synthetic construct
  source 1..75: mol_type = other DNA
gctctgcctgctgagccatttatgacgaaactttttgccgataagtccatacctgacgtgatcctgacgttgctg

SEQ ID NO: 277251 - DNA, 75 bp, synthetic construct
  source 1..75: mol_type = other DNA
cgcggtaaagccattgtggttgccgatgaagcctatatcgagttttgcccgcaggcatcgctggctggctggctg

SEQ ID NO: 277252 - DNA, 75 bp, synthetic construct
  source 1..75: mol_type = other DNA
acgctcaaccgctacccggaatgtcagccgaaagcggtgattgaaaattatgcacagtatgcaggcgtgaaaccg

SEQ ID NO: 277253 - DNA, 75 bp, synthetic construct
  source 1..75: mol_type = other DNA
gacattgcggcccaggcgttaagcccgcagggaattatcgccatgcgcgaacgggtggcgcaaattattgcagaa

SEQ ID NO: 277254 - DNA, 75 bp, synthetic construct
  source 1..75: mol_type = other DNA
acatccgtggggcgatattaccggggtgccggatggcactacggcgcagaaaggggttgtgaagcttaatagtgc

SEQ ID NO: 277255 - DNA, 75 bp, synthetic construct
  source 1..75: mol_type = other DNA
cttattgcccggggatggggagtaagcttagtcagccgttgtctccgggtgtcgcgtgcgcagttgcacgtcatt

SEQ ID NO: 277256 - DNA, 75 bp, synthetic construct
  source 1..75: mol_type = other DNA
ctaaagagttcaaagccgaagctgtcagaacgaccacgaacccgaaccacaatctgccagttgcgccaaatctgc

SEQ ID NO: 277257 - DNA, 75 bp, synthetic construct
  source 1..75: mol_type = other DNA
tgacagataacggttcagcgtacagagcgcatgaaacacggcagttcgccagagagttgaatctgaagccctgca

SEQ ID NO: 277258 - DNA, 75 bp, synthetic construct
  source 1..75: mol_type = other DNA
cccgggtatggggagtaagcttagtcagccgttgtctccgggtgtcgcgtgcgcagttgcacgtcattctcagac

SEQ ID NO: 277259 - DNA, 75 bp, synthetic construct
  source 1..75: mol_type = other DNA
gcggagtccggagagtaacggaatagcagagagcttcgtgaaaacgataaagcgtgactacatcagtatcatgcc

SEQ ID NO: 277260 - DNA, 75 bp, synthetic construct
  source 1..75: mol_type = other DNA
gtgctggaaaccgctaatcgcctgcgagaaagcggcaaagaagctgaagcggaagcgatgctgcgtcagcaacca

SEQ ID NO: 277261 - DNA, 75 bp, synthetic construct
  source 1..75: mol_type = other DNA
cgaacgacccggagcaggtttacgcttacgggctgtacctctccggtcacgaccaggacagagcggcgctggcgc

SEQ ID NO: 277262 - DNA, 75 bp, synthetic construct
  source 1..75: mol_type = other DNA
agccgatatcatcatcagttccaccgccagcccgttaccgattatcgggaaaggcatggtggagcgcgcattaaa

SEQ ID NO: 277263 - DNA, 75 bp, synthetic construct
  source 1..75: mol_type = other DNA
aagcgacccatcgtgaagatctggtgcaacagtcgttatatcggctggaacttattgatccgaataacccggacg

SEQ ID NO: 277264 - DNA, 75 bp, synthetic construct
  source 1..75: mol_type = other DNA
gcgccagcaaccgccttcctcgcgtattgacctcacgctggctgactgggcgcagcagcgacgtgattacaccgc

SEQ ID NO: 277265 - DNA, 75 bp, synthetic construct
  source 1..75: mol_type = other DNA
gaagataactggcgtgtgcgctggatgacgggctattactataaggtcatcaaccagaacaatcgccgcgtcaca

SEQ ID NO: 277266 - DNA, 75 bp, synthetic construct
  source 1..75: mol_type = other DNA
aatctgccagttgcgccaaatctgctgaaccagacgttcgctcctacagcaccaaatcaggtctgggtgccggac

SEQ ID NO: 277267 - DNA, 75 bp, synthetic construct
  source 1..75: mol_type = other DNA
tccagtgggcgcgctatattatctactgaactggatggagttaaatcacataaccatacgggcagtatttcgagt

SEQ ID NO: 277268 - DNA, 75 bp, synthetic construct
  source 1..75: mol_type = other DNA
taactgctgcaggcaaagccaaaattgcctcagcactggccgagcaaaaacagatccgtctgcaaactatggtag

SEQ ID NO: 277269 - DNA, 75 bp, synthetic construct
  source 1..75: mol_type = other DNA
ttacgccatgaagtatggcgcggtgatttaaatacattaacagttgcacccaataaccctaactggttaattgcg

SEQ ID NO: 277270 - DNA, 75 bp, synthetic construct
  source 1..75: mol_type = other DNA
ttgatgttgcaccaaaaagtcagatacctgtaatggttggtgtaggcggtagcggaggtgcgaaaggcagcggct

SEQ ID NO: 277271 - DNA, 75 bp, synthetic construct
  source 1..75: mol_type = other DNA
caggttctgattcaacgcatggctatggcggggggactaagtataactcgcagaaaaatgccgtaggttatggtt

SEQ ID NO: 277272 - DNA, 75 bp, synthetic construct
  source 1..75: mol_type = other DNA
gtaccggatcatctttggcaattaatgttccatcacacgttcatagtgttacaattggttcccattcgcacactg

SEQ ID NO: 277273 - DNA, 75 bp, synthetic construct
  source 1..75: mol_type = other DNA
ccggaggatggcgaataagccttgtcagccgttgcctccgggtgtcgcgtgcgcagttacacgtcattctcagac

SEQ ID NO: 277274 - DNA, 75 bp, synthetic construct
  source 1..75: mol_type = other DNA
gcagtgcggagtccggagagtaacggaatagcagagagcttcgtgaaaacgataaagcgtgactacataagggaa

SEQ ID NO: 277275 - DNA, 75 bp, synthetic construct
  source 1..75: mol_type = other DNA
agtccggagagtaacggcatagcagagagcttcgtgaaaacgataaagcgtggctacataagtatcatgcccaaa

SEQ ID NO: 277276 - DNA, 75 bp, synthetic construct
  source 1..75: mol_type = other DNA
acacagttgagtaacgccactgacagtgatgacgaaaccaaagcggctacgccaaaagcggtgaaagcggcaatg

SEQ ID NO: 277277 - DNA, 75 bp, synthetic construct
  source 1..75: mol_type = other DNA
ggaagatattcgcgctatgaaacagaatggtattatctggccaatagctttagcgtataaaaatctatccaaact

SEQ ID NO: 277278 - DNA, 75 bp, synthetic construct
  source 1..75: mol_type = other DNA
ggcagcctgagttcacagataaaacactctccaggaaacccggggcggttcacgcccttattgcccggggatggg

SEQ ID NO: 277279 - DNA, 75 bp, synthetic construct
  source 1..75: mol_type = other DNA
gaccggacatcaggtgccggaaatcattctacttaacagccatgacggctcatcaagctaccagatgttgccggg

SEQ ID NO: 277280 - DNA, 75 bp, synthetic construct
  source 1..75: mol_type = other DNA
tcaaaatctagtaaaggcgtactacgtgggttgcattatcaattagcaccgtatgcacaggctaaattagttcga

SEQ ID NO: 277281 - DNA, 75 bp, synthetic construct
  source 1..75: mol_type = other DNA
atctgcgtgctgagttgaaatccctttccgatacgctggaagaggtgcttagctcatctggcgagaagtcgaaag

SEQ ID NO: 277282 - DNA, 75 bp, synthetic construct
  source 1..75: mol_type = other DNA
gccaacctttggcaaatgggtgggagcggtcctcagcgcagagaataaacgtcagttgtggatcccggaagggtt

SEQ ID NO: 277283 - DNA, 75 bp, synthetic construct
  source 1..75: mol_type = other DNA
cgtgaagagcgggatgaatattatgagatactgattaatatgactgattttccgttggttagattaattgttctt

SEQ ID NO: 277284 - DNA, 75 bp, synthetic construct
  source 1..75: mol_type = other DNA
gtgaggtctttaatgtgtatcacggtgtaaatacaatttcaattgaagtgtttaatgaaattcgcggcatcatta

SEQ ID NO: 277285 - DNA, 75 bp, synthetic construct
  source 1..75: mol_type = other DNA
caagttgggattgcatggccagtaatagacgctgagattaaactttcagcaaaagatgctgttggtaagttactg

SEQ ID NO: 277286 - DNA, 75 bp, synthetic construct
  source 1..75: mol_type = other DNA
tagcgatgattatttatcagcttgccgaacgcctgaaaagaaaatcactagaccacaattgagtgatttatctaa

SEQ ID NO: 277287 - DNA, 75 bp, synthetic construct
  source 1..75: mol_type = other DNA
aaattgaaaaactacctcatgacagcattagcactttggttgaattggcatctggttgcccagtatccagtaacg

SEQ ID NO: 277288 - DNA, 75 bp, synthetic construct
  source 1..75: mol_type = other DNA
cgagtggtgaaatgacagagcgcttcgactccgagttctatactccggattttttggctaatgacaaaaagctta

SEQ ID NO: 277289 - DNA, 75 bp, synthetic construct
  source 1..75: mol_type = other DNA
cgacgaactactacgcgccacagtcagagcggagcatcatctggaacgatccggagatagggattgactggccgg

SEQ ID NO: 277290 - DNA, 75 bp, synthetic construct
  source 1..75: mol_type = other DNA
cgctgagcgactgcgtgctgtcgctgtcggagaaagatctgcaggcacatactctggccacggcagaagtatata

SEQ ID NO: 277291 - DNA, 75 bp, synthetic construct
  source 1..75: mol_type = other DNA
gagacggctgagtttttgtataaaacgactaattattatcatcctgaaagtgataggggaattatttgggatgat

SEQ ID NO: 277292 - DNA, 75 bp, synthetic construct
  source 1..75: mol_type = other DNA
atagaattaagcatcaaatggccaattggcgacgaaactgagttgatcgtttcagaaaaagatatgttaggcaat

SEQ ID NO: 277293 - DNA, 75 bp, synthetic construct
  source 1..75: mol_type = other DNA
tgaacgatgtattcaatggaaggatggcatgttaaatatctcttggccaattggaaatgcccctatactttccga

SEQ ID NO: 277294 - DNA, 75 bp, synthetic construct
  source 1..75: mol_type = other DNA
tgcggtacacgacatccggcagatcaggtgatcccgcagcaagatccgcgcggcaatacgctgtactggattggc

SEQ ID NO: 277295 - DNA, 75 bp, synthetic construct
  source 1..75: mol_type = other DNA
cttgatacgctgcttgatgaaaatggctggtatgaggaacaaaaatcatgggcagcgttatgccgtttctgcggt

SEQ ID NO: 277296 - DNA, 75 bp, synthetic construct
  source 1..75: mol_type = other DNA
aagaatcccttcgccccggtatgactcttgagggggacgtcaaccttgatacacgtcatttatgggaatggatga

SEQ ID NO: 277297 - DNA, 75 bp, synthetic construct
  source 1..75: mol_type = other DNA
ctggacgcactggaactggttgatacatccagtgctccagatattgaatggcctacgcctccggcagttcaggcc

SEQ ID NO: 277298 - DNA, 75 bp, synthetic construct
  source 1..75: mol_type = other DNA
atgaacagtaaacaatggcccggtaaagcggctattggtcgtctgaaaggtgaggaactggcgcaatataatttg

SEQ ID NO: 277299 - DNA, 75 bp, synthetic construct
  source 1..75: mol_type = other DNA
cggttgcatcggtggcgtttcgcaccagtgaagttatcgccatctaccctattacccccagttccacgatggcag

SEQ ID NO: 277300 - DNA, 75 bp, synthetic construct
  source 1..75: mol_type = other DNA
gcgcaacgtggcggtactggacagaaccaaagaacccggtgcccaggcagaaccgctctatctggatgtgatgac

SEQ ID NO: 277301 - DNA, 75 bp, synthetic construct
  source 1..75: mol_type = other DNA
caacgaactactatgctcctggtcatcagcaagcaatcatttacaatgatcctattttaaacatcgattggcctt

SEQ ID NO: 277302 - DNA, 75 bp, synthetic construct
  source 1..75: mol_type = other DNA
agttgaatttgtccaggataaccattcgaagtccacgaaaggtgttttacgcggactgcattatcagttagaacc

SEQ ID NO: 277303 - DNA, 75 bp, synthetic construct
  source 1..75: mol_type = other DNA
aagacgtgttgatattcgagcctgaagtatatgaagatgaacgtggcttttttatggaaagttttaaccaaagaa

SEQ ID NO: 277304 - DNA, 75 bp, synthetic construct
  source 1..75: mol_type = other DNA
ctagtgtgcttatttttgagccaaaagtatttggagatgagcgtggttttttctttgagagttttaatcacaagt

SEQ ID NO: 277305 - DNA, 75 bp, synthetic construct
  source 1..75: mol_type = other DNA
tagtgagtgaaattgaaaagctacctcatgacagtatcggcactttagttgcattggcatcaggctacccagtat

SEQ ID NO: 277306 - DNA, 75 bp, synthetic construct
  source 1..75: mol_type = other DNA
gataacctcggcggtgactttaaggagtttcagtccgcttatgaggcggtggggactgacctgtttgaccagcag

SEQ ID NO: 277307 - DNA, 75 bp, synthetic construct
  source 1..75: mol_type = other DNA
aagcgggtggagatgctgcggctattcaggcggcaacgccggtcacgctgaatatggcactggcgaatcagcggt

SEQ ID NO: 277308 - DNA, 75 bp, synthetic construct
  source 1..75: mol_type = other DNA
ctcggcgtggcaaaagactccgccgaaatggccgcactccgcaagcaggcgcgccagctcggtgacaatactgcc

SEQ ID NO: 277309 - DNA, 75 bp, synthetic construct
  source 1..75: mol_type = other DNA
tccagcaatgcacaggcaagcgcggcagtaactaagatcgtagctgataacccagcttatgatgctttccagctt

SEQ ID NO: 277310 - DNA, 75 bp, synthetic construct
  source 1..75: mol_type = other DNA
ttaaccgtccgtttgaaacagagattgccgggaaaaagatattttttcagaaaaatgacgtcctgttgacagata

SEQ ID NO: 277311 - DNA, 75 bp, synthetic construct
  source 1..75: mol_type = other DNA
ggaaaacgccactttacttattgggacaaaatcggcattcgggcttgctgatgataaggcttcccatattgctga

SEQ ID NO: 277312 - DNA, 75 bp, synthetic construct
  source 1..75: mol_type = other DNA
aacaagaatctgaaaaatttagggaggctcttcttaagactctcagcagcatgtacggagaagataaaaaaccca

SEQ ID NO: 277313 - DNA, 75 bp, synthetic construct
  source 1..75: mol_type = other DNA
tttttctgccaccggatgtgagtatttctggcgttctcaaaaacctgaggttactgaaaacaggaatgtcagtag

SEQ ID NO: 277314 - DNA, 75 bp, synthetic construct
  source 1..75: mol_type = other DNA
tctatcaccaacggcggtacttttggctcgatgatgtcgacgccaattattaacccgccgcagtcggccattctt

SEQ ID NO: 277315 - DNA, 75 bp, synthetic construct
  source 1..75: mol_type = other DNA
ccgctgcatgtggatttaactgcgcatagcgcgcaagatgtggtttcagactggttaaacagcgtgggagttggc

SEQ ID NO: 277316 - DNA, 75 bp, synthetic construct
  source 1..75: mol_type = other DNA
acgttccggatttaccattggatcaaatcaaaggtattcgcgtgacgcgctgcggtacacgacatccggcagatc

SEQ ID NO: 277317 - DNA, 75 bp, synthetic construct
  source 1..75: mol_type = other DNA
agcaagaagctgacaaattcaaagaggcgctgcttgagacgctgaggaacatgcaagaaaacaaaaaacccacct

SEQ ID NO: 277318 - DNA, 75 bp, synthetic construct
  source 1..75: mol_type = other DNA
cccgtcagtgtgcactgaaacggcttatttaccgttcattcagaaagttgttgctaaagcgattatcttctctga

SEQ ID NO: 277319 - DNA, 75 bp, synthetic construct
  source 1..75: mol_type = other DNA
tgttaaatctgtttaatacggcgcgtcgcttcaatatggaagtacagccgcaactggtgttactccagaaaacct

SEQ ID NO: 277320 - DNA, 75 bp, synthetic construct
  source 1..75: mol_type = other DNA
aaacaaagaagataaacgctatctggcggaaaactttatcgccttctttaaccgtgactatcgcaaagtggcgga

SEQ ID NO: 277321 - DNA, 75 bp, synthetic construct
  source 1..75: mol_type = other DNA
cgcatattgctgaccaactggcgctcttgcaggataaagtcgcgccttttgacggcgaactggcgaaagcacaaa

SEQ ID NO: 277322 - DNA, 75 bp, synthetic construct
  source 1..75: mol_type = other DNA
ttaatgctatcaagcaagttcctggagatcagtggtccgaggaacgcgatgttgattcaatccttaggactctga

SEQ ID NO: 277323 - DNA, 75 bp, synthetic construct
  source 1..75: mol_type = other DNA
ccaccagataccaacgttgaagagttcgaatttgctattcgtacggtctgtgaacctatctttgagaaaccgctg

SEQ ID NO: 277324 - DNA, 75 bp, synthetic construct
  source 1..75: mol_type = other DNA
aagctacggacttgatgaactgatccctaaaatgcgtatcaccctgccgttacgactatggcgatactcattatt

SEQ ID NO: 277325 - DNA, 75 bp, synthetic construct
  source 1..75: mol_type = other DNA
gagtgaattgaccaagcgaatacagtcagtttttccggcaactcgcgttaacgtcaagaaaggttctatgactgg

SEQ ID NO: 277326 - DNA, 75 bp, synthetic construct
  source 1..75: mol_type = other DNA
ttgggccattctacggcggttataatgtcatcgcgctcgaccgggagtaccgccacgcgctggtttgcggcccgg

SEQ ID NO: 277327 - DNA, 75 bp, synthetic construct
  source 1..75: mol_type = other DNA
gtgaaacaggagatgctggcagtcgcgacccgggaagggtttgatgtcagtaagtttatttgggtacagcagccc

SEQ ID NO: 277328 - DNA, 75 bp, synthetic construct
  source 1..75: mol_type = other DNA
tgggtgccgcgtttgctgccggatggtcgccgtctgcgcccaaccgaagtggtgcgcgagtacgaaaagaccttg

SEQ ID NO: 277329 - DNA, 75 bp, synthetic construct
  source 1..75: mol_type = other DNA
taaaactagatgggacaagcccggacaagttgcctatggcgcgacttgttaagtacatgtctgctttgacagact

SEQ ID NO: 277330 - DNA, 75 bp, synthetic construct
  source 1..75: mol_type = other DNA
tcatgattgagcgggtagaaatgattgcgcgcctgacggctgaaggtgcttgtcaggaaagagaccgtgaaattg

SEQ ID NO: 277331 - DNA, 75 bp, synthetic construct
  source 1..75: mol_type = other DNA
gcggcacaggtgctgacatggtgtgaaacgcgcaccgggtggcgtacagcagagaccatgctgccgatggcactg

SEQ ID NO: 277332 - DNA, 75 bp, synthetic construct
  source 1..75: mol_type = other DNA
gttcgcatattatctggccggctttccctggtatgaggggaatatcctgtttgcctttgcagttgcggcacaggt

SEQ ID NO: 277333 - DNA, 75 bp, synthetic construct
  source 1..75: mol_type = other DNA
agtctcggtaatgcaaaacggtcatgaaatttatcagaccaccgtggctccaggccctttcgagataaacgacct

SEQ ID NO: 277334 - DNA, 75 bp, synthetic construct
  source 1..75: mol_type = other DNA
atgtggagtgaaacgcgcacctggtggcgttccgcagggtgcatgttgctgctggcagtatggttgcctttctcc

SEQ ID NO: 277335 - DNA, 75 bp, synthetic construct
  source 1..75: mol_type = other DNA
ccattctcctgatggccctgtgggggcctttgtccggcaccagttacggcattgccgggctgctgatgctggcag

SEQ ID NO: 277336 - DNA, 75 bp, synthetic construct
  source 1..75: mol_type = other DNA
ttgcccagttcgcgtattatctggcaggctttccgtggtatgaggggaatatcctgtttgcctttgcagtggcgg

SEQ ID NO: 277337 - DNA, 75 bp, synthetic construct
  source 1..75: mol_type = other DNA
agagcggaacgtctggcgctgttggcctgcctgctggctgttattccggcccttaaccttgccaccagtgatgca

SEQ ID NO: 277338 - DNA, 75 bp, synthetic construct
  source 1..75: mol_type = other DNA
tacacttctggttctctggttctctggttcccgttatcttccaccagttacggtgctgtcgggatcatattactg

SEQ ID NO: 277339 - DNA, 75 bp, synthetic construct
  source 1..75: mol_type = other DNA
cacgtaaccaaacagggcttaacggccctgttttatcactgactcgtttgctcgaagagttgtatcaccactttt

SEQ ID NO: 277340 - DNA, 75 bp, synthetic construct
  source 1..75: mol_type = other DNA
agagcggaacgtctggcgctgttggcctgcctgctggcggttattccggcccttaaccttgcctccagtgatgca

SEQ ID NO: 277341 - DNA, 75 bp, synthetic construct
  source 1..75: mol_type = other DNA
agagcggaacgtctggcgctgttggcctgcctgctggccgttattccggcgcttaaccttgcctccagtgatgca

SEQ ID NO: 277342 - DNA, 75 bp, synthetic construct
  source 1..75: mol_type = other DNA
agagcggaacgtctggcgctgttggcctgcctgctggccgttattccggctcttaaccttgccaccagtgatgca

SEQ ID NO: 277343 - DNA, 75 bp, synthetic construct
  source 1..75: mol_type = other DNA
gggctgaatctgtcccgccatgcgcatatccggcaaccggccattaaccggctgtggggctgggcggtgattgcc

SEQ ID NO: 277344 - DNA, 75 bp, synthetic construct
  source 1..75: mol_type = other DNA
atggcgctgtcagtctgtctggtgccggctatcatggcgcagaacctgataaccagcgaggttgccgcgctgtcg

SEQ ID NO: 277345 - DNA, 75 bp, synthetic construct
  source 1..75: mol_type = other DNA
cctgacgggcagaaccctgccgcgcttctggcccggggattttttcccggtgttctacatcctgcatctgactgt

SEQ ID NO: 277346 - DNA, 75 bp, synthetic construct
  source 1..75: mol_type = other DNA
tctgtctggtgccggctattctggcgcagaacctgataaccagcgaggttgccgcgctggcaggactgctggtca

SEQ ID NO: 277347 - DNA, 75 bp, synthetic construct
  source 1..75: mol_type = other DNA
tgccctggtgtgggggctgaatctgtcccgtcatgcgcatatccggcaaccggccattaaccggctgtggggatg

SEQ ID NO: 277348 - DNA, 75 bp, synthetic construct
  source 1..75: mol_type = other DNA
acttaaccttgcctccagtgatgcggcggctgtagctggtcttgtgatgacggtgctgaccgttggtctggtgtc

SEQ ID NO: 277349 - DNA, 75 bp, synthetic construct
  source 1..75: mol_type = other DNA
ctttccgctgtttgccctggtgtgggggctgaatctgtcccgtcatgcgcatatccggcaggtggccattaaccg

SEQ ID NO: 277350 - DNA, 75 bp, synthetic construct
  source 1..75: mol_type = other DNA
tggggctggcagtcagtgtggcacaggctgacagcaacagtgattaccgggcgggttctgattttgcccgtcaga

SEQ ID NO: 277351 - DNA, 75 bp, synthetic construct
  source 1..75: mol_type = other DNA
cgcattctgcatctggaccagacgtggatgtttctggccgggcgtggagcctttccgctttttgccctggtatgg

SEQ ID NO: 277352 - DNA, 75 bp, synthetic construct
  source 1..75: mol_type = other DNA
acgtggtgtgaaacgcgcagcctgtggcgttccgcagggaccatattgcttctggcagtatggttgcctttgtcc

SEQ ID NO: 277353 - DNA, 75 bp, synthetic construct
  source 1..75: mol_type = other DNA
tgtaccgggcggaagacagaacggaacgtctggcgctggttgcatgcctgctggccgtgattccggcgcttaacc

SEQ ID NO: 277354 - DNA, 75 bp, synthetic construct
  source 1..75: mol_type = other DNA
cacgtaacgattcactggctgcccggaccggtacctggctgcagtcgttgctggtctggtcacccggacagcggg

SEQ ID NO: 277355 - DNA, 75 bp, synthetic construct
  source 1..75: mol_type = other DNA
tcgtgtgcaggaaaatcattaccccgtttctggcccggggattttttcccggtattctacgcctgtcatctggct

SEQ ID NO: 277356 - DNA, 75 bp, synthetic construct
  source 1..75: mol_type = other DNA
acggtattgccgggctgctgatgctggcagtcagtcaccggctgtaccgggcggaagacagaacggaacgtctgg

SEQ ID NO: 277357 - DNA, 75 bp, synthetic construct
  source 1..75: mol_type = other DNA
caactatccggtaattccggatggttggataagctgtagtgagcgaatgcctgagaacattcccggaagttgtaa

SEQ ID NO: 277358 - DNA, 75 bp, synthetic construct
  source 1..75: mol_type = other DNA
atctggataacatcggcaccactccgctggcggaaaaagtgaaaaccaaagcctgcgatctggtattaaagcaag

SEQ ID NO: 277359 - DNA, 75 bp, synthetic construct
  source 1..75: mol_type = other DNA
ttagcagcgggaaccaggccttaagcgcagataacatgaacaacgccgcaggcattctgcaatactgcgcgaagc

SEQ ID NO: 277360 - DNA, 75 bp, synthetic construct
  source 1..75: mol_type = other DNA
gttgccaagattcgtgccgatttcgatgattttgacggtgacaggcgaggtatcggtgattgtctggatgaggct

SEQ ID NO: 277361 - DNA, 75 bp, synthetic construct
  source 1..75: mol_type = other DNA
gtgacggtacagctttcgaaagcgttgggcattgagctgctgcgctttgatatgtccgagtatatggaacgccat

SEQ ID NO: 277362 - DNA, 75 bp, synthetic construct
  source 1..75: mol_type = other DNA
ctatagcgcctaatgacgttcgagagcagacagccattccgcaagttccggtaactccggatggttggataagct

SEQ ID NO: 277363 - DNA, 75 bp, synthetic construct
  source 1..75: mol_type = other DNA
gaacatattcctccggcacctaactggcctgcgccaacgccgccagtacaaaatgaacaatcaagacctctgcct

SEQ ID NO: 277364 - DNA, 75 bp, synthetic construct
  source 1..75: mol_type = other DNA
gccagcagtaccagatggactggttagagcggtgcgtttctatgaacaggtaaagcgtgagaatccgccagtcga

SEQ ID NO: 277365 - DNA, 75 bp, synthetic construct
  source 1..75: mol_type = other DNA
tacaacgctgaccccttcggatttactctccgtatcccctgtgacctggaaagagaatgaagggcactaccgcgt

SEQ ID NO: 277366 - DNA, 75 bp, synthetic construct
  source 1..75: mol_type = other DNA
tgcgccaacgccgccggtacaaaatgaacaatcaagacctctgcctgatgtggctcagcgtctgatgcagcatct

SEQ ID NO: 277367 - DNA, 75 bp, synthetic construct
  source 1..75: mol_type = other DNA
atagccgcattggagtacgacgacgatgagccaattggcggtgtaacccactggatgcctctaccagaaccgccg

SEQ ID NO: 277368 - DNA, 75 bp, synthetic construct
  source 1..75: mol_type = other DNA
tttgcgtagactggctggcaactatccggtaactccggatggttggataagctgtagtgagcgaatgccggatac

SEQ ID NO: 277369 - DNA, 75 bp, synthetic construct
  source 1..75: mol_type = other DNA
aggctgccgaatccaatcgcggtaatgagtggactggcaatcctgatattgataacgccatcatcatgctcgacc

SEQ ID NO: 277370 - DNA, 75 bp, synthetic construct
  source 1..75: mol_type = other DNA
acgtagaagtagggaaaacgcaggatagcggtgatgactcgatgtttggtgacttcacctggcagcacgggctga

SEQ ID NO: 277371 - DNA, 75 bp, synthetic construct
  source 1..75: mol_type = other DNA
tgccagtcagttggcagcagaaccgatagcgactaatgacgttcgagagcaaacagccgttccgccagttcctgt

SEQ ID NO: 277372 - DNA, 75 bp, synthetic construct
  source 1..75: mol_type = other DNA
aactggcacggattgctctggcatcgctggaagcaaaaccaataggtgcattccacattgcagaacagcaagttg

SEQ ID NO: 277373 - DNA, 75 bp, synthetic construct
  source 1..75: mol_type = other DNA
tggaggccgtagataagattaccaatactaccgcatttgttgccgtgaccagtcttgcggaaggcacaaagacat

SEQ ID NO: 277374 - DNA, 75 bp, synthetic construct
  source 1..75: mol_type = other DNA
gcagagttatcagattcagaaggccgtttttgagagccagaataaagccattgaggaaaaaaaggctgctgcaac

SEQ ID NO: 277375 - DNA, 75 bp, synthetic construct
  source 1..75: mol_type = other DNA
atgcctggattagtatcatatctatcatcgacttcattcgcgaatgagatggcggagatgcgtcagcaggtaatg

SEQ ID NO: 277376 - DNA, 75 bp, synthetic construct
  source 1..75: mol_type = other DNA
atatccgggaaacacaaaaatcactgcgcgagctgaacggtcaggcatcccgtattgagggatttcgcaagacca

SEQ ID NO: 277377 - DNA, 75 bp, synthetic construct
  source 1..75: mol_type = other DNA
gcgccagctcggcgacaataccgccgcctcggcggatgatgcggccggtgcgcagattatcattgcgaaagcggg

SEQ ID NO: 277378 - DNA, 75 bp, synthetic construct
  source 1..75: mol_type = other DNA
tgatgcccggttatgagtttgcgcagaaaaactcagaattgcaggccgtgctcggtgtggcaaaagattccgccg

SEQ ID NO: 277379 - DNA, 75 bp, synthetic construct
  source 1..75: mol_type = other DNA
gcctcggcagatgatgcagcagcagctcaaatcatcgtggctaaatcgggagcggataaaaatggcatcctggca

SEQ ID NO: 277380 - DNA, 75 bp, synthetic construct
  source 1..75: mol_type = other DNA
tattccggcgaccagctcttatgcaggttatcaggcttatcagccggttacggcaccggctggccgctcttatgt

SEQ ID NO: 277381 - DNA, 75 bp, synthetic construct
  source 1..75: mol_type = other DNA
gccgctgtgggaattaatacccgcaatcttgcacatgatgagcagggactgaaaaaccgtatcagtgaaaccact

SEQ ID NO: 277382 - DNA, 75 bp, synthetic construct
  source 1..75: mol_type = other DNA
gaacgcgcgcgttgctgcactggctgaagctcgcctgagcgatgcttaccgcatcaccgacaaacaagagcgtta

SEQ ID NO: 277383 - DNA, 75 bp, synthetic construct
  source 1..75: mol_type = other DNA
ccggatatcgtcgcgatgattggtgcttccgcagcactgtctctgtctggtattccgttcaatggtccgattggt

SEQ ID NO: 277384 - DNA, 75 bp, synthetic construct
  source 1..75: mol_type = other DNA
caggacgcccatgagctggctcacgcaaatgacattaaacgacgctttgatggcagggatgtcacgaactggcag

SEQ ID NO: 277385 - DNA, 75 bp, synthetic construct
  source 1..75: mol_type = other DNA
atccgcgccctgaccgaagaaactggcaccactatcgaaatcgaagatgatggtactgtgaagattgcagcgacc

SEQ ID NO: 277386 - DNA, 75 bp, synthetic construct
  source 1..75: mol_type = other DNA
attggtcacggccgtctggcgaagcgcggcgtgctggcagtaatgccggatatggacaaattcccgtacaccgta

SEQ ID NO: 277387 - DNA, 75 bp, synthetic construct
  source 1..75: mol_type = other DNA
cggcggtaaagaaggtctggtacacatctctcaaatcgctgacaagcgtgttgagaaagtgactgattacctgca

SEQ ID NO: 277388 - DNA, 75 bp, synthetic construct
  source 1..75: mol_type = other DNA
ctgctgcgtcgagtgcgtgacttcgccgaagtgaagcacgatggcaccatctcggcagatatcgctgctcaggcg

SEQ ID NO: 277389 - DNA, 75 bp, synthetic construct
  source 1..75: mol_type = other DNA
gctttttgcagcgtacaccgcgcgggcgtatggcgacagtgcgggcgtggaaccacttcggcatcacgccgccag

SEQ ID NO: 277390 - DNA, 75 bp, synthetic construct
  source 1..75: mol_type = other DNA
gctgaacgggattatttcatcctcagagaacggttgatgacaatgcagaagcaggtgggaggggcgcaggaatat

SEQ ID NO: 277391 - DNA, 75 bp, synthetic construct
  source 1..75: mol_type = other DNA
aaggtttcgattatatggaccgcaagttattgctggcggtaattgataaattcttcggtgggccggtaggcctgg

SEQ ID NO: 277392 - DNA, 75 bp, synthetic construct
  source 1..75: mol_type = other DNA
cgcggggatgccctcgatcatctgttgatatttggtccgccagggttggggaaaaccacgcttgccaacattgtc

SEQ ID NO: 277393 - DNA, 75 bp, synthetic construct
  source 1..75: mol_type = other DNA
tggtacgccacgtattgccaaccgtctgctgcgtcgtgttcgcgattttgccgaagtgaagcacgatggcaccat

SEQ ID NO: 277394 - DNA, 75 bp, synthetic construct
  source 1..75: mol_type = other DNA
aagagcagcgcgataaagccacatccacaatcgctgatatgcagaagcgtcaacgtgacgtagcagaactcgatg

SEQ ID NO: 277395 - DNA, 75 bp, synthetic construct
  source 1..75: mol_type = other DNA
aagcgtcaacgtgatgtagcggaactcgacgccagatacacaaaggagcttgctgatgctaacgagactatcgaa

SEQ ID NO: 277396 - DNA, 75 bp, synthetic construct
  source 1..75: mol_type = other DNA
caaataccacaaaacggattactatagagcaatttggagaatctccaacaggtctggtatatggtgcattaattt

SEQ ID NO: 277397 - DNA, 75 bp, synthetic construct
  source 1..75: mol_type = other DNA
tttaattcaacgaaccaacttatccttacgtgaaacacaaactttttcacgcaatcttaacatttttcaactgtt

SEQ ID NO: 277398 - DNA, 75 bp, synthetic construct
  source 1..75: mol_type = other DNA
gattatttcaccctcagagagcgaatcgcaaccagcgacagaatgattcggggattgcaggaatatatccgcacc

SEQ ID NO: 277399 - DNA, 75 bp, synthetic construct
  source 1..75: mol_type = other DNA
cagcctgtcatgggcggtcaatcattaccgtgataacgcaatcgcctacaaagtccagcgcgacaaaaatgccag

SEQ ID NO: 277400 - DNA, 75 bp, synthetic construct
  source 1..75: mol_type = other DNA
atgctttccgcgtttaccgttattctgctggtggtctgtggtgcgctgtgtctggcaacaaaccattaccgcgat

SEQ ID NO: 277401 - DNA, 75 bp, synthetic construct
  source 1..75: mol_type = other DNA
cctccggcgtggataatgcaaccggcccccaactggcagacaccgttacacgggattatttcaccctcagagagc

SEQ ID NO: 277402 - DNA, 75 bp, synthetic construct
  source 1..75: mol_type = other DNA
attaggcaaggatagtacatggattctacaagctggtgaacgtgtagtatcccgtggtcagaataagcagttgca

SEQ ID NO: 277403 - DNA, 75 bp, synthetic construct
  source 1..75: mol_type = other DNA
gaacaggcaggagatgcctatgcgctgatggcgagcggcaaatgcgggaaagttgtgattaacttcccggattaa

SEQ ID NO: 277404 - DNA, 75 bp, synthetic construct
  source 1..75: mol_type = other DNA
gctggcgaaaggtcgcggtgcaaaacggatcatcggcgttgatatgctgccggaacgtctggcgatggcaaaaca

SEQ ID NO: 277405 - DNA, 75 bp, synthetic construct
  source 1..75: mol_type = other DNA
cgtggataatgcaaccggcccccgactggcagacaccgctgaacgggattatttcatcctcagagaacggttgat

SEQ ID NO: 277406 - DNA, 75 bp, synthetic construct
  source 1..75: mol_type = other DNA
atgaaccgtgttctgtgtgtggtgattattgtcatgctggtagcctgtggtgcgcttagtctggggctgaatcat

SEQ ID NO: 277407 - DNA, 75 bp, synthetic construct
  source 1..75: mol_type = other DNA
ttattaccgtctccgacgtggaatcgacaagataaccgcgcaggttaactacatgcaggactacatcaggacgca

SEQ ID NO: 277408 - DNA, 75 bp, synthetic construct
  source 1..75: mol_type = other DNA
ttattaccgtctccgaagtggaatcgacaagataaccgcgcaggttaactacctgcaggactacatcaggacgca

SEQ ID NO: 277409 - DNA, 75 bp, synthetic construct
  source 1..75: mol_type = other DNA
atgagcagagttactgcgattatctcccctctggttttctgcatcattgtctgcctgtcattggctgttaatcat

SEQ ID NO: 277410 - DNA, 75 bp, synthetic construct
  source 1..75: mol_type = other DNA
ggccggtcggcatgatggcgatgatgctggcgaaaggtcgcggtgcaaaacggatcatcggcgttgatatgctgc

SEQ ID NO: 277411 - DNA, 75 bp, synthetic construct
  source 1..75: mol_type = other DNA
ttattaccgtctcagaagtggaatcgataggataaccgcgcaggttaactacctgcaggaatacatcaggactca

SEQ ID NO: 277412 - DNA, 75 bp, synthetic construct
  source 1..75: mol_type = other DNA
ttattaccgtctccgacgtggaatcgacaagataaccgcgcaggttaactacctgcaggaatacatcaggacgca

SEQ ID NO: 277413 - DNA, 75 bp, synthetic construct
  source 1..75: mol_type = other DNA
tcgctgctttcttcgttactgtcattggttcttttatcttttcagcgaatcattaccacaataaagccattgaat

SEQ ID NO: 277414 - DNA, 75 bp, synthetic construct
  source 1..75: mol_type = other DNA
atcactccccttctacacgttgctggtgcccgtcatgatggctgcccgctttgatcctctggtcgctgccgccac

SEQ ID NO: 277415 - DNA, 75 bp, synthetic construct
  source 1..75: mol_type = other DNA
caccctcagagagcggctgatgacgatgcacaagcaactggaaggggcacaggactatatccgcactcagtgcct

SEQ ID NO: 277416 - DNA, 75 bp, synthetic construct
  source 1..75: mol_type = other DNA
taccgcgataacgccatcacctacaaagcgcagcgcgataaaaaagccagagagctggaacaggcgaatgccacc

SEQ ID NO: 277417 - DNA, 75 bp, synthetic construct
  source 1..75: mol_type = other DNA
atgcaggtgcgccagcgcgatgttgctgcgctcgatgcaaaatactcgagggaattatccgatgcgagagctgaa

SEQ ID NO: 277418 - DNA, 75 bp, synthetic construct
  source 1..75: mol_type = other DNA
cgggattatttcatcctcagagaacggttgatgaccatgcagaagcagctggaagggacacaggactatatccgc

SEQ ID NO: 277419 - DNA, 75 bp, synthetic construct
  source 1..75: mol_type = other DNA
ggacccaccagcgtggataatgcaaccagccccagactggcagacaccgctgaacgggattatttcaccctcaga

SEQ ID NO: 277420 - DNA, 75 bp, synthetic construct
  source 1..75: mol_type = other DNA
aacgccatcacttacaaagcgcagcgcgataaaaaagtcagtgagctgaagctggcgaacgtcaccattactgat

SEQ ID NO: 277421 - DNA, 75 bp, synthetic construct
  source 1..75: mol_type = other DNA
agcgcctgcaagtcgccgccacctgtgcaaagtcaacgaccggagccagcagcatgggcgatggagaaagcccaa

SEQ ID NO: 277422 - DNA, 75 bp, synthetic construct
  source 1..75: mol_type = other DNA
ctgacgttgccgctggtcaccgtagcctgcggatcaacgccacctgtccaggtcccgtgcgtgaagccaccggca

SEQ ID NO: 277423 - DNA, 75 bp, synthetic construct
  source 1..75: mol_type = other DNA
caacatgatgtagcagaactcgacgccagatacacaaaggagcttgctgatgctaacgcgactatcgaaagtctt

SEQ ID NO: 277424 - DNA, 75 bp, synthetic construct
  source 1..75: mol_type = other DNA
aaagcccccatcacctccggcgtggataatgcaaccggtccccgactggcagaagccgctgaacgggattatttc

SEQ ID NO: 277425 - DNA, 75 bp, synthetic construct
  source 1..75: mol_type = other DNA
agttgccaaagatgccggtgtcagcctagaagaaaccgccgcgatgctgggtgcgctacacgatgcaaaaatcat

SEQ ID NO: 277426 - DNA, 75 bp, synthetic construct
  source 1..75: mol_type = other DNA
ttttgctgaaagcggtcgaccaggcgacccgaccgcttaaatccatccagaccgcgagtaaaaccctgtcgggcg

SEQ ID NO: 277427 - DNA, 75 bp, synthetic construct
  source 1..75: mol_type = other DNA
tatcaacaaagaatccagctcgcttgaccagaccgcggcgaaagccagtgcggcgacgcagagcggttacagccc

SEQ ID NO: 277428 - DNA, 75 bp, synthetic construct
  source 1..75: mol_type = other DNA
cacaaagtatgtgttaaaactcgacggctggatccagaaaaacaaatcactggcgtcaaccatcggcctcattgc

SEQ ID NO: 277429 - DNA, 75 bp, synthetic construct
  source 1..75: mol_type = other DNA
aaatggccgcgctccgcaagcaggcgcgccagctcggcgataataccgccgcctcggcggatgatgcagccggtg

SEQ ID NO: 277430 - DNA, 75 bp, synthetic construct
  source 1..75: mol_type = other DNA
ataatggttcctggtatccagtggttgcctttcgccctacgccagattacacgctaattttcaattcgaatatcg

SEQ ID NO: 277431 - DNA, 75 bp, synthetic construct
  source 1..75: mol_type = other DNA
ccgccacgcagggtaattcctacatcccggcaaccagcacatatggaggctatcaggcttaccagccagttaccg

SEQ ID NO: 277432 - DNA, 75 bp, synthetic construct
  source 1..75: mol_type = other DNA
tgccttgatggctccgctcaatgtttttaacaagctgcgcagcggtgtcgactggcttctcgaaaagctcggcat

SEQ ID NO: 277433 - DNA, 75 bp, synthetic construct
  source 1..75: mol_type = other DNA
gcgccctgcatgacgccaaaatcaccggctcgatggccggcaccgggagccgtgcggttttaagccgcctgcagg

SEQ ID NO: 277434 - DNA, 75 bp, synthetic construct
  source 1..75: mol_type = other DNA
tgaaacccggttatgattttgctcagaaaaactctgagcttcaggctgttctcggcgtcgaaaaagattcagctg

SEQ ID NO: 277435 - DNA, 75 bp, synthetic construct
  source 1..75: mol_type = other DNA
ccggaaacgcggcggcggctggcgcagccggtgttggtattgcgacggcgggaaccctcgccggggttaagctgc

SEQ ID NO: 277436 - DNA, 75 bp, synthetic construct
  source 1..75: mol_type = other DNA
ctcggtgtcgacaaacagtcacctgaaatgcaggcgctgcgcaaacaggcgcgccagctcggggacaatacggcg

SEQ ID NO: 277437 - DNA, 75 bp, synthetic construct
  source 1..75: mol_type = other DNA
gacgggtggtactgcgccggggacacagcttgaccgccagttacaggatgcgctcgaaaaatacgagcgggataa

SEQ ID NO: 277438 - DNA, 75 bp, synthetic construct
  source 1..75: mol_type = other DNA
acaattcgcggtcgatatgctgttacgcggctgcggccttatgcgtccgctatctgatttaaaacgaatgatgcc

SEQ ID NO: 277439 - DNA, 75 bp, synthetic construct
  source 1..75: mol_type = other DNA
ggcggtacatcgagccgccgccaatgactggcgcactcgctgacctgaaacagtgggtaatggataccggagagc

SEQ ID NO: 277440 - DNA, 75 bp, synthetic construct
  source 1..75: mol_type = other DNA
gaatgacaccgttggcgctaaagccaaacctttcagcatcaccgttgactgcagcaaagcaaatccgaatccagg

SEQ ID NO: 277441 - DNA, 75 bp, synthetic construct
  source 1..75: mol_type = other DNA
agataaataacccgtgggttaatttttttaaatgggggtttatcggcattatgggcgttatttttatcgccgtcg

SEQ ID NO: 277442 - DNA, 75 bp, synthetic construct
  source 1..75: mol_type = other DNA
ggagagcctcgtttggagaaaaggcagccagaagaatagagcaaacatacgggatgccggaggggtatctggatg

SEQ ID NO: 277443 - DNA, 75 bp, synthetic construct
  source 1..75: mol_type = other DNA
gggatgcctgggggatatcttgatattgaaccagaagacataacagagtctccatcatcaagatctatagcatta

SEQ ID NO: 277444 - DNA, 75 bp, synthetic construct
  source 1..75: mol_type = other DNA
atcaacaaagagtcagacacacttgaccagaccgccgccagaactcaagccgccacgtatggcagcggtggttat

SEQ ID NO: 277445 - DNA, 75 bp, synthetic construct
  source 1..75: mol_type = other DNA
aaatggccgcgctccgcaaacaggcgcgccagctcggcgacaacaccgccgcctcggcggatgatgcagccggtg

SEQ ID NO: 277446 - DNA, 75 bp, synthetic construct
  source 1..75: mol_type = other DNA
cagcttgaccgccagttacaggatgcgctcgaaaaatacgagcgggataaacgtgcgcgcgcccgtgccagcatg

SEQ ID NO: 277447 - DNA, 75 bp, synthetic construct
  source 1..75: mol_type = other DNA
gcgccagctcggtgacaacaccgccgcctcagcggatgatgcggccggtgcgcagattatcattgcgaaagcggg

SEQ ID NO: 277448 - DNA, 75 bp, synthetic construct
  source 1..75: mol_type = other DNA
acgagaaaaaagatagcctgatactatttgtacatggattaaatggtggtttggaaacatggaactttaataaag

SEQ ID NO: 277449 - DNA, 75 bp, synthetic construct
  source 1..75: mol_type = other DNA
gcctcggcggatgatgcggccggtgcacagataatcatcgcgaaagcgggtggagatgctgcggctattcaggcg

SEQ ID NO: 277450 - DNA, 75 bp, synthetic construct
  source 1..75: mol_type = other DNA
taactcaattgcagttaatgaagggcatagctcaatttgcaagcccgaaaacagctcgtctacagtgtttgttgc

SEQ ID NO: 277451 - DNA, 75 bp, synthetic construct
  source 1..75: mol_type = other DNA
atgtctaaaaaattaggttttgcgctgtccggtattatgttggcaatggctgctggtactacatttgctgctaac

SEQ ID NO: 277452 - DNA, 75 bp, synthetic construct
  source 1..75: mol_type = other DNA
aatctgacgttaaaaccttcaattacacggctcacctgtgggatgtccgttggctaaggcgtcgtgcaagattta

SEQ ID NO: 277453 - DNA, 75 bp, synthetic construct
  source 1..75: mol_type = other DNA
ttactattgactgcagcaaagctaacccggctccgggtactactgcaaaaatgaccttcggttctgttttttttg

SEQ ID NO: 277454 - DNA, 75 bp, synthetic construct
  source 1..75: mol_type = other DNA
cggcattagtcatgttcaccagttcagccttcgcgcttgatggcggtcaattagatttctcaggtttggtcagtg

SEQ ID NO: 277455 - DNA, 75 bp, synthetic construct
  source 1..75: mol_type = other DNA
cggtgtcggattatcttgatttaccaggaaaatacttgcacggaactaaatacgccggacaactgataccaggcg

SEQ ID NO: 277456 - DNA, 75 bp, synthetic construct
  source 1..75: mol_type = other DNA
gttgagaacgaagatggttctcacgttcctgttgcacagccaatcgtcatcaatgccgctgggtatccagtatat

SEQ ID NO: 277457 - DNA, 75 bp, synthetic construct
  source 1..75: mol_type = other DNA
actgaggttgtgattaagtcagatcctgtaaccgcagatgtcacaatcatgatggcctcggaagatggcactcat

SEQ ID NO: 277458 - DNA, 75 bp, synthetic construct
  source 1..75: mol_type = other DNA
ggaacttccaggcatcttacgttaagcaagcagcggcgattcctatcgttgccgggtttgtgaaaaccaacgcgg

SEQ ID NO: 277459 - DNA, 75 bp, synthetic construct
  source 1..75: mol_type = other DNA
aagttacaggtgctggcgtagtcaatgcagccaatgtcggcgcgaaagctgaaccgttctctattacagtggatt

SEQ ID NO: 277460 - DNA, 75 bp, synthetic construct
  source 1..75: mol_type = other DNA
cccgctggcacccattttcgacggtctcggcgaaaaacttcgcggcgtctggcagtggtttaaagacctgatagc

SEQ ID NO: 277461 - DNA, 75 bp, synthetic construct
  source 1..75: mol_type = other DNA
aagcgttcggctgaagggttacaggcaaaatataacagcctcacccaatcggtgaagcggcaacagaccgagctc

SEQ ID NO: 277462 - DNA, 75 bp, synthetic construct
  source 1..75: mol_type = other DNA
tgatgttattcaaccattgaaattgaatatattcgaattacaaaaaatggcagatgcaggtgaagatgtatatgc

SEQ ID NO: 277463 - DNA, 75 bp, synthetic construct
  source 1..75: mol_type = other DNA
gtgcacagctcgccgtgactggtcatgcacttgaaaaggcacggcaggaggccgaagcccttgcaacacagttta

SEQ ID NO: 277464 - DNA, 75 bp, synthetic construct
  source 1..75: mol_type = other DNA
tgtggcaaaaaatgccggtgtcagcattgaagaaaccgccgcaatggtcggggcgctgcatgatgcaaaaatcac

SEQ ID NO: 277465 - DNA, 75 bp, synthetic construct
  source 1..75: mol_type = other DNA
tggggatgttgatgccattcaggcggcaacgccggtcacgctgaatatggcgctggcgaaccgccgcacgatgga

SEQ ID NO: 277466 - DNA, 75 bp, synthetic construct
  source 1..75: mol_type = other DNA
caggcaggagtaccagcggctggagaaagaactcgccttccagcgtgcttatgatgccgcctggcagcgcctgta

SEQ ID NO: 277467 - DNA, 75 bp, synthetic construct
  source 1..75: mol_type = other DNA
tatcaacgacgaccgcccgctggacatctggctggtcaacagccgtaacgacgatgccagcctgcaacgctgggc

SEQ ID NO: 277468 - DNA, 75 bp, synthetic construct
  source 1..75: mol_type = other DNA
cagaccatcacccacacacaggcgcagcagtggggattaactgacagcgaatggcagcactaccagcaactgcgt

SEQ ID NO: 277469 - DNA, 75 bp, synthetic construct
  source 1..75: mol_type = other DNA
atctggcaaacgatgagcgggggcttaaaacacgtatcagcgagacgacggcgcagctcaaccggcagcgtgaag

SEQ ID NO: 277470 - DNA, 75 bp, synthetic construct
  source 1..75: mol_type = other DNA
gcttaaccacgacgcgggccgctggctcctgttggggcagagcaaaatcccggtggcgctggaacgtaaggggga

SEQ ID NO: 277471 - DNA, 75 bp, synthetic construct
  source 1..75: mol_type = other DNA
cgctgttcgttaaagatgactgcccgccctgcgacagcctgctacgtaccctgctggcacaacagcgtcccctgg

SEQ ID NO: 277472 - DNA, 75 bp, synthetic construct
  source 1..75: mol_type = other DNA
gcatattaagtgcggcgattgccacacgcaccgagcggcgtagtgggctggcagcgttgtttagttcgcagggat

SEQ ID NO: 277473 - DNA, 75 bp, synthetic construct
  source 1..75: mol_type = other DNA
atattaagtgcggcaatcgccactcgtactgagcggcgcagtggtctggcggcgttgtttagttcacgggaataa

SEQ ID NO: 277474 - DNA, 75 bp, synthetic construct
  source 1..75: mol_type = other DNA
acccgctgcatcttgatgtgctggtggtagatgaagcgtcaatgatcgatctgcctatgatgtcgagactgatcg

SEQ ID NO: 277475 - DNA, 75 bp, synthetic construct
  source 1..75: mol_type = other DNA
cggctttcgtggtttttccagcgtagtgactgccgcaaatcctgtatcgggctgttatgttgctataggagggtg

SEQ ID NO: 277476 - DNA, 75 bp, synthetic construct
  source 1..75: mol_type = other DNA
tggaatgatatcggtactgtaacaactgaaacacaatcgccagcaaatgtggcggttgttcatcaaacaaaatca

SEQ ID NO: 277477 - DNA, 75 bp, synthetic construct
  source 1..75: mol_type = other DNA
attactgctaagattccatttctgtccggtggtagaaagcgattcctgatgatacatgccatcaaggcgacaatg

SEQ ID NO: 277478 - DNA, 75 bp, synthetic construct
  source 1..75: mol_type = other DNA
ctgaccgtagagatccctgacggtcatttcacggcgattatcgggccaaacggctgcggtaaatccacgttgctg

SEQ ID NO: 277479 - DNA, 75 bp, synthetic construct
  source 1..75: mol_type = other DNA
accctgaaaacttcagtcaggggcatttattgtggaatgatgagttattcaacgaagcacagccgttatgggaag

SEQ ID NO: 277480 - DNA, 75 bp, synthetic construct
  source 1..75: mol_type = other DNA
gtgaaagtctgatggcgttgatacgtttaaatgatgaaatagtgatgacgccagagatgaatttcagcaagcggg

SEQ ID NO: 277481 - DNA, 75 bp, synthetic construct
  source 1..75: mol_type = other DNA
cggaagatgccagtactttgcaccgattgctgggtgcgcagccgggtagccagcgtttacgtcatcatgccggta

SEQ ID NO: 277482 - DNA, 75 bp, synthetic construct
  source 1..75: mol_type = other DNA
gcgtttggtttgcgatgccggacggcaatattaagtctgtgcaaccgagtcgcctgccagagcacgaaactacgt

SEQ ID NO: 277483 - DNA, 75 bp, synthetic construct
  source 1..75: mol_type = other DNA
gaacccacgacctggctggatatcagtcatcagattgatctactggaactgttaagcgaactgaaccgcgagaaa

SEQ ID NO: 277484 - DNA, 75 bp, synthetic construct
  source 1..75: mol_type = other DNA
gccttcagccactccgccaacaggctggctgaaatgcaatggtgcggctttttctgctgaagaatacccggaact

SEQ ID NO: 277485 - DNA, 75 bp, synthetic construct
  source 1..75: mol_type = other DNA
aattcatcgtcatccgcactcacgctggtacgaaggccggccggtaatgattgcccgcaatgacagcgcgcttgg

SEQ ID NO: 277486 - DNA, 75 bp, synthetic construct
  source 1..75: mol_type = other DNA
ctggcttccgttgaggctggggctgtgctgggcgatatctgcgcttatgccaacgcagggtttaccgcagagcgt

SEQ ID NO: 277487 - DNA, 75 bp, synthetic construct
  source 1..75: mol_type = other DNA
acccactgcatcttgatgtgctggtggtagatgaagcatcaatgatcgatctgcctatgatgtcgagactgatcg

SEQ ID NO: 277488 - DNA, 75 bp, synthetic construct
  source 1..75: mol_type = other DNA
aattgcgctggagccactgcacccgatgacagctgccgatcgctcttgcctgtgcacgttacgccaggcgctgga

SEQ ID NO: 277489 - DNA, 75 bp, synthetic construct
  source 1..75: mol_type = other DNA
caatttattgtcagtctggtgattgagaatcgctatgagcacaatctggcttcatcgcttttctggattatttgg

SEQ ID NO: 277490 - DNA, 75 bp, synthetic construct
  source 1..75: mol_type = other DNA
tacacgagtcatgttgatgcctaaaaaacaacgcgcccgttgggtaagtcccgatcgcgggattctgagaggtta

SEQ ID NO: 277491 - DNA, 75 bp, synthetic construct
  source 1..75: mol_type = other DNA
gagaccgcgaaatctgagcgggtgaacgaccggaaaatcacggcagacgggaaggagggaccgggtgaccgcagc

SEQ ID NO: 277492 - DNA, 75 bp, synthetic construct
  source 1..75: mol_type = other DNA
tgattaaatcccgcatggcagatggttcggaactgccaatgggagccgatgtgctggatgagaatagaagtctca

SEQ ID NO: 277493 - DNA, 75 bp, synthetic construct
  source 1..75: mol_type = other DNA
aatgatttttattttctggctgagcgtaaaattttcaactatgccagtgtttttatcatgcttatcgagtatgtc

SEQ ID NO: 277494 - DNA, 75 bp, synthetic construct
  source 1..75: mol_type = other DNA
ccgcgcgcttaaccgaatcacttggcaaagctttgcgccagttaccgctgacggatgaacaaaagaaacgtattc

SEQ ID NO: 277495 - DNA, 75 bp, synthetic construct
  source 1..75: mol_type = other DNA
ctgggaaaacagataaatgcccgcattgacgaagagtttttgaaagagctgatgcgtcttggtcgcctgcagaag

SEQ ID NO: 277496 - DNA, 75 bp, synthetic construct
  source 1..75: mol_type = other DNA
agctgataaaagcgggcgcgacgggcgacactgctacgttccgtcgcgtttcagaagccattattgatgaggaac

SEQ ID NO: 277497 - DNA, 75 bp, synthetic construct
  source 1..75: mol_type = other DNA
ggcaaaggcttatccgacaaataaattgcctgatttacgtggtgagtttattcgcggctgggatgacgggcgcgg

SEQ ID NO: 277498 - DNA, 75 bp, synthetic construct
  source 1..75: mol_type = other DNA
gtgatcctcatcgtggtaacttcattataaaaaatggtgaagttcgaattattgatctctccgggaaacgtgctt

SEQ ID NO: 277499 - DNA, 75 bp, synthetic construct
  source 1..75: mol_type = other DNA
aatgactttctttcttatgatattaatatcatcaaagtttttcgttctatagatgatacaaaagtcatgcttatt

SEQ ID NO: 277500 - DNA, 75 bp, synthetic construct
  source 1..75: mol_type = other DNA
gatggcatagagttgtgtgatatgcccgatattgatgatgcgctaaaaaataaaattcagcaatcaattaatgcc

SEQ ID NO: 277501 - DNA, 75 bp, synthetic construct
  source 1..75: mol_type = other DNA
aaaggatttcccgccttcgcccgcgcggatggatgctctgctgaaagccggcacattgcgcctgtcgctgacctt

SEQ ID NO: 277502 - DNA, 75 bp, synthetic construct
  source 1..75: mol_type = other DNA
gcacattgcgcctgtcgctgacctttaatcctgctcatgcgcagcaaaaaattgccagcggcgatttacccgcca

SEQ ID NO: 277503 - DNA, 75 bp, synthetic construct
  source 1..75: mol_type = other DNA
cccattacgctataaacctgaagattgttcgtctggcggatgccgcagacgcggtgaagcgcattcagaccgaag

SEQ ID NO: 277504 - DNA, 75 bp, synthetic construct
  source 1..75: mol_type = other DNA
gccgtatcctctgcattccgggctcccacaatggctgaaatgtacagggatgatgtgcatttttaccgcagggga

SEQ ID NO: 277505 - DNA, 75 bp, synthetic construct
  source 1..75: mol_type = other DNA
cgctgaatattaccgtcagcagcagaagccagaaggctctgccacactatatccggaaggaaacattgactttac

SEQ ID NO: 277506 - DNA, 75 bp, synthetic construct
  source 1..75: mol_type = other DNA
ataaaggcgataagtgttgcaatctggatgcttttagttgcatatctgatgtgttgcttcatgaaagctaagaaa

SEQ ID NO: 277507 - DNA, 75 bp, synthetic construct
  source 1..75: mol_type = other DNA
gccagtggtgaccacagcacaggctcggggctcacctggttcggtaaaactggaaaaacagatgcgctcctttct

SEQ ID NO: 277508 - DNA, 75 bp, synthetic construct
  source 1..75: mol_type = other DNA
cggatatttcggaacggatgccagaaactatattgccacacgcgtggatatgaaacggatgcgttcttattctta

SEQ ID NO: 277509 - DNA, 75 bp, synthetic construct
  source 1..75: mol_type = other DNA
tacccgcgaggtcggtgtcggttttcagatggattcccttttcaccgcaaatgaccattttcaggtaaaaggagg

SEQ ID NO: 277510 - DNA, 75 bp, synthetic construct
  source 1..75: mol_type = other DNA
gcggtgaagcgcattcagaccgaagctgctgccggacgcaaaacaggcggttcggtggatctgctctgggtgaac

SEQ ID NO: 277511 - DNA, 75 bp, synthetic construct
  source 1..75: mol_type = other DNA
tattatattatgctcattgagtatattgaaggtgtcgggttaaatgagtatttggaaatttctgaagatctgaag

SEQ ID NO: 277512 - DNA, 75 bp, synthetic construct
  source 1..75: mol_type = other DNA
gctatacataccttgtattcaaaaagaaaattaaaaaagcaatcagggatgtaaaaatcaagctgggattgaaga

SEQ ID NO: 277513 - DNA, 75 bp, synthetic construct
  source 1..75: mol_type = other DNA
ctgttagcggggccttcatggcgggttaatcagtacatgagtttatatgcgatggcagggatgggcgttgctaaa

SEQ ID NO: 277514 - DNA, 75 bp, synthetic construct
  source 1..75: mol_type = other DNA
ggatgttgccggtcttctcgcataccttggtttgggagaagcggcaaaacggaatgtgggcacaggagataatca

SEQ ID NO: 277515 - DNA, 75 bp, synthetic construct
  source 1..75: mol_type = other DNA
tcagcatccctttccccaaaaaagcggactgcgccatgcttactcattctggtgatggcggtgcgcctttaggcg

SEQ ID NO: 277516 - DNA, 75 bp, synthetic construct
  source 1..75: mol_type = other DNA
cttggtttgggagaaggctctgcattacctgttggggtgcctgttccgtggccctcagccactccgccaacaggc

SEQ ID NO: 277517 - DNA, 75 bp, synthetic construct
  source 1..75: mol_type = other DNA
cgcccttgtggcaatatcttgacgcgctacatccctatttatggcgcaaaggaaaggatttcccgccttcgcccg

SEQ ID NO: 277518 - DNA, 75 bp, synthetic construct
  source 1..75: mol_type = other DNA
cctatccgcgcccaccggactttaccggcacggcgtttcttgaacagttgctgattatgttgacaccagatcccg

SEQ ID NO: 277519 - DNA, 75 bp, synthetic construct
  source 1..75: mol_type = other DNA
aggcacggcgtttctggaacagttgctgattatgctgacgccagaccccgccgcattaaaagcagcgccggacga

SEQ ID NO: 277520 - DNA, 75 bp, synthetic construct
  source 1..75: mol_type = other DNA
gggaagatttttctgtgccgaccgaaggcgcggaatcgccgtggggtggcgcacaactgacgtttatcgcccgcc

SEQ ID NO: 277521 - DNA, 75 bp, synthetic construct
  source 1..75: mol_type = other DNA
aaaggatttccccccttcgcccgcgcgaatggatgccctgctgaaatccggcacattgcgcctgtcgctgacctt

SEQ ID NO: 277522 - DNA, 75 bp, synthetic construct
  source 1..75: mol_type = other DNA
cgtgaaactttacaatcaagaatgccgcaggatctgccgccggtactggcggaaccgcatgctggctgggtaaat

SEQ ID NO: 277523 - DNA, 75 bp, synthetic construct
  source 1..75: mol_type = other DNA
gtttctgaatggggttcgtgaaaaacgttacgaagcgtcatgcaggcaattgatggccgagtgtattgctgccgt

SEQ ID NO: 277524 - DNA, 75 bp, synthetic construct
  source 1..75: mol_type = other DNA
ttgtcaattaaaaatattaagcgcattattacggcctggaaaccatctacatttgaaatgtacaaaaatactttt

SEQ ID NO: 277525 - DNA, 75 bp, synthetic construct
  source 1..75: mol_type = other DNA
ttatgaagaatcatgcatggaagattgatttttttcactatgaaaaaaatggtgatattaaaggcgcatacttcc

SEQ ID NO: 277526 - DNA, 75 bp, synthetic construct
  source 1..75: mol_type = other DNA
cagcagcttgcctatctggctctgaaacgctgggcgcgcctttattgccctgaagtgattcttggagtgtacacc

SEQ ID NO: 277527 - DNA, 75 bp, synthetic construct
  source 1..75: mol_type = other DNA
tcctgggcgtgtatactccggacgaactggaagagccacaggaaaaaatcatcaatcctgtgccggtacagaatt

SEQ ID NO: 277528 - DNA, 75 bp, synthetic construct
  source 1..75: mol_type = other DNA
ttttgcttacaggtgtagatgatgcttcaataaaaaacattaaagatactaatactgacacttcagcacagattg

SEQ ID NO: 277529 - DNA, 75 bp, synthetic construct
  source 1..75: mol_type = other DNA
aggactgcgttatcaggccttgatgaccagtctcaacggcgtaagatttagttttaattgctctttgaaagggtt

SEQ ID NO: 277530 - DNA, 75 bp, synthetic construct
  source 1..75: mol_type = other DNA
tgtgttttgactttgtcactgttggttttgcttatatttatggcagcaaaaggactgcgttatcaggccttgatg

SEQ ID NO: 277531 - DNA, 75 bp, synthetic construct
  source 1..75: mol_type = other DNA
gatccggttgagatccccatagccggattaaaccagacgcaaatccattcgcgtgccggactcacctttcagggc

SEQ ID NO: 277532 - DNA, 75 bp, synthetic construct
  source 1..75: mol_type = other DNA
gaggtggtgatgtgcagttgggctgtctcggccttggggttgttcgtccggcgcaaaccgccgtacttggaggaa

SEQ ID NO: 277533 - DNA, 75 bp, synthetic construct
  source 1..75: mol_type = other DNA
tcggtcttggtgttgttcgttcggcgcaaacggcagttcttggggggacattctggcagcaagtagtgaatttac

SEQ ID NO: 277534 - DNA, 75 bp, synthetic construct
  source 1..75: mol_type = other DNA
accagtctcaacggcgtaagatttagttttaattgctctttgaaagggttctggtgggtggtgatgctgccaact

SEQ ID NO: 277535 - DNA, 75 bp, synthetic construct
  source 1..75: mol_type = other DNA
aaaaaatcattaatccggttcaggaacataaaaacacatccgcctgccgtgcggaacgtgaaacaacaattattg

SEQ ID NO: 277536 - DNA, 75 bp, synthetic construct
  source 1..75: mol_type = other DNA
tccctgacagccctccgcgacaccctgctccccaaactcatctccggtgagctatccctggatgatcttccggat

SEQ ID NO: 277537 - DNA, 75 bp, synthetic construct
  source 1..75: mol_type = other DNA
aattaatttcattatttgatataaattgttcagtgtttattagcaaaattaaaaataatttagagctaagtcgtg

SEQ ID NO: 277538 - DNA, 75 bp, synthetic construct
  source 1..75: mol_type = other DNA
atggcttatgatatctatccggatgatgaaacagatacccatcacccagtttctccttctctctatttgcaggat

SEQ ID NO: 277539 - DNA, 75 bp, synthetic construct
  source 1..75: mol_type = other DNA
ttagatgaaacgctttatctacttaatgcaggttacctatccgaaagtcaatatcaacgaaaaataaaagccatt

SEQ ID NO: 277540 - DNA, 75 bp, synthetic construct
  source 1..75: mol_type = other DNA
acagggcgatgagtttggttactctgagcatcacgaatcggtatatgaccgggagcgctaccttgaaaaattgct

SEQ ID NO: 277541 - DNA, 75 bp, synthetic construct
  source 1..75: mol_type = other DNA
atgtggaagcagagcgggtcatcaggtcttcccagaaatttatcaacgatcatctctggggctggactgcggcag

SEQ ID NO: 277542 - DNA, 75 bp, synthetic construct
  source 1..75: mol_type = other DNA
ggggtatggctgcttcagtggcaggactttgtgttcggtcccatgctgattgtcctgcctgctgccatgttctgg

SEQ ID NO: 277543 - DNA, 75 bp, synthetic construct
  source 1..75: mol_type = other DNA
cgcatctggcacgatggcgatgacctgtaccacatcattttcgatcaacaaaccaaaagccgcatccgcgtggat

SEQ ID NO: 277544 - DNA, 75 bp, synthetic construct
  source 1..75: mol_type = other DNA
atgaaaacgggatcggtgttcgtgtccaggcaacactacgcggcgaaagtaaaccgcgcgtactggaattacttc

SEQ ID NO: 277545 - DNA, 75 bp, synthetic construct
  source 1..75: mol_type = other DNA
acgcctgggctggtttaaccaggatgaagttgatatggtcgcccgggaactgggtgtatccgtaaaagacgtcag

SEQ ID NO: 277546 - DNA, 75 bp, synthetic construct
  source 1..75: mol_type = other DNA
tcccgggagttgcttgtggttattgcatcgaaccaacagatgcctacctgtttgcacaggtaaataatgggaatg

SEQ ID NO: 277547 - DNA, 75 bp, synthetic construct
  source 1..75: mol_type = other DNA
gtgaaaaccgttcttctgcgctacggtgtggccgggttccttctggtgtactggggcctcagctttgcgaaccgc

SEQ ID NO: 277548 - DNA, 75 bp, synthetic construct
  source 1..75: mol_type = other DNA
ttgaaaacggctgcctagccgtggagcaaggcttaaccacctttgaagagttaatccgcgtattagggatgccgc

SEQ ID NO: 277549 - DNA, 75 bp, synthetic construct
  source 1..75: mol_type = other DNA
attcaatatcgccagtgtggaatgggggacatgccgtatgaatcctgttgaactggtccgaaaacccaaaatcag

SEQ ID NO: 277550 - DNA, 75 bp, synthetic construct
  source 1..75: mol_type = other DNA
tttgttctggatgaatgtaaaagcgattccgtcaatggataaatcaaaattgaacgagaatacgttacagctcgc

SEQ ID NO: 277551 - DNA, 75 bp, synthetic construct
  source 1..75: mol_type = other DNA
acccttattaacccgactccgtattacctgacggtaacagaactcaatgccggaacccggattcttgataatgct

SEQ ID NO: 277552 - DNA, 75 bp, synthetic construct
  source 1..75: mol_type = other DNA
ctcactttatgttgctttccacctggcgctggaaacagccatgcgacaaggggagattctgtcactacgctggga

SEQ ID NO: 277553 - DNA, 75 bp, synthetic construct
  source 1..75: mol_type = other DNA
cgacaaatacctgaaaaccgtctccgtacacaaaaaaggacaccttcaggagttttatcgagcgaatgtcatccg

SEQ ID NO: 277554 - DNA, 75 bp, synthetic construct
  source 1..75: mol_type = other DNA
caggggaagataagggggaaaaagatcctgtctgtacgtttgctaaggaactcgctcccggcatcaccagccaga

SEQ ID NO: 277555 - DNA, 75 bp, synthetic construct
  source 1..75: mol_type = other DNA
attgaactggaaatattctcaccgtactggtggcagaaagatattaacagcacgctggatattagcgtcgatcgc

SEQ ID NO: 277556 - DNA, 75 bp, synthetic construct
  source 1..75: mol_type = other DNA
ttcatgtttccgactggttagtaccaaccaccgatctggtcaatgatcggggaatgccgggagatggcgtcatca

SEQ ID NO: 277557 - DNA, 75 bp, synthetic construct
  source 1..75: mol_type = other DNA
ggcgtcatcaatattccgtcaattcgtcggctggttgaaaacgccggatttaatggcgctattgaactggaaata

SEQ ID NO: 277558 - DNA, 75 bp, synthetic construct
  source 1..75: mol_type = other DNA
gaaggggaaaaaagagaataccctgcgtattcttgatgccacgaataaccaattaccgcaggatcgggaaagttt

SEQ ID NO: 277559 - DNA, 75 bp, synthetic construct
  source 1..75: mol_type = other DNA
ggtgctggtaactggccctacaggcagtggcaaaacggtcacctggtgttgtccacgctacacaccaattccacc

SEQ ID NO: 277560 - DNA, 75 bp, synthetic construct
  source 1..75: mol_type = other DNA
acttccggaatgacagtgcattcacaccatgggtatctgcagggattggctatgtcaacgccacgatgtttgacc

SEQ ID NO: 277561 - DNA, 75 bp, synthetic construct
  source 1..75: mol_type = other DNA
taaaatggatatctacaccaacaataagttgtcaggcagttggaatgtcacgtttaaagaagccgctgatggtcg

SEQ ID NO: 277562 - DNA, 75 bp, synthetic construct
  source 1..75: mol_type = other DNA
tctggatgctaaaaccgtggcgattatttctttcgcgttgtgcggtttcgctaactttggttctatcggggtggt

SEQ ID NO: 277563 - DNA, 75 bp, synthetic construct
  source 1..75: mol_type = other DNA
tttgcaaactttggttctatcggtgttgtcgttggagcgttttcggctatttcgccaaaacgcgcgccggaaatc

SEQ ID NO: 277564 - DNA, 75 bp, synthetic construct
  source 1..75: mol_type = other DNA
tcagtggcttttctggttatgttctgtgtgctcggatggggaatgaaaacaatgctcgacaggaactacaacgcc

SEQ ID NO: 277565 - DNA, 75 bp, synthetic construct
  source 1..75: mol_type = other DNA
tattccagacaatgtatggccgtcgccgctgccccactggcaagcacccggttgtgtacattgctaccacggttt

SEQ ID NO: 277566 - DNA, 75 bp, synthetic construct
  source 1..75: mol_type = other DNA
gagaagcatcagcccaaagcagagttgctgactcgaacgttacaatctgcgctggaacaacgcgcgtctgatatt

SEQ ID NO: 277567 - DNA, 75 bp, synthetic construct
  source 1..75: mol_type = other DNA
ccacaccgtgcgccggaaatcgcccaacttggtttacgcgcgctggcggcggcgacactttctaacctgatgagt

SEQ ID NO: 277568 - DNA, 75 bp, synthetic construct
  source 1..75: mol_type = other DNA
acaaacgaccagcttatgacaaaagcgccccctgttctcacatccccttgcggagcaaacaattttgttcaaaat

SEQ ID NO: 277569 - DNA, 75 bp, synthetic construct
  source 1..75: mol_type = other DNA
tcaccctattgctgaacgctatatggatgacattaccactgttgatattgccaattatcgggatcaacggttggc

SEQ ID NO: 277570 - DNA, 75 bp, synthetic construct
  source 1..75: mol_type = other DNA
aaatgactctcaaccgggcgctggacaaatacctgaagacagtatccatccacaaaaaaggtcatctacaggagt

SEQ ID NO: 277571 - DNA, 75 bp, synthetic construct
  source 1..75: mol_type = other DNA
acgctcctgttatcggtggagcatctgcaacataccgcaatggagcaacagaaagctgttgctgattctctggct

SEQ ID NO: 277572 - DNA, 75 bp, synthetic construct
  source 1..75: mol_type = other DNA
cgcggcgttgtttctgttgccgccggtggggttcgccattgttacgttggttgtcagtatgttggcggcatggga

SEQ ID NO: 277573 - DNA, 75 bp, synthetic construct
  source 1..75: mol_type = other DNA
tactcatttgctctattgtcgcagcgttagcctcagtgctcggcgatctgaccgagagtatgtttaagcgtgaag

SEQ ID NO: 277574 - DNA, 75 bp, synthetic construct
  source 1..75: mol_type = other DNA
acagaccaaaataaagcttttttatcgcccggcagcaattaaaaccagaccaaatgaagtgtggcaggaccagtt

SEQ ID NO: 277575 - DNA, 75 bp, synthetic construct
  source 1..75: mol_type = other DNA
gcaaatgtgttgcagatagctctgcagacaaaaataaaactgttttatcggccagaatccattaaagcaaagccc

SEQ ID NO: 277576 - DNA, 75 bp, synthetic construct
  source 1..75: mol_type = other DNA
gccgactggaaacgtcatggtccgaaagtaaatcatctcatatgacgaaagtactcgatgtaccgatgactgcta

SEQ ID NO: 277577 - DNA, 75 bp, synthetic construct
  source 1..75: mol_type = other DNA
gtaaacctttgccgcccgtggttattgctgatgacggtaaagcgccacaagcggtgccgtattcagccttactga

SEQ ID NO: 277578 - DNA, 75 bp, synthetic construct
  source 1..75: mol_type = other DNA
gattactttcgtctatatgtacgtttgctatgcctcggcagtgtatgtccctgagatctggccgacagaggccaa

SEQ ID NO: 277579 - DNA, 75 bp, synthetic construct
  source 1..75: mol_type = other DNA
tgcgcttagtctggggctgaatcattaccgtgaaacgccattacctacaaagcccagcgcgacaaaaatgtcaga

SEQ ID NO: 277580 - DNA, 75 bp, synthetic construct
  source 1..75: mol_type = other DNA
catccgtacggctttgtcgaccgtatctcgaaactgatcccgcccgatccggggatgacgctggcgaaagcgttt

SEQ ID NO: 277581 - DNA, 75 bp, synthetic construct
  source 1..75: mol_type = other DNA
ctacgcccgtcgcaggcagggcaaaccattgagaacctgtttgccatcggttcggtgctgggcggatttgatccc

SEQ ID NO: 277582 - DNA, 75 bp, synthetic construct
  source 1..75: mol_type = other DNA
atcattgccctgctggtggcctgtggtgcgcttagtctggggctgaatcattaccgtgataacgccataacctac

SEQ ID NO: 277583 - DNA, 75 bp, synthetic construct
  source 1..75: mol_type = other DNA
agaaagaacttgcaatgtgttataatgatatttatgatgccttaaatcatacggctccaaatcagtttgtcgatg

SEQ ID NO: 277584 - DNA, 75 bp, synthetic construct
  source 1..75: mol_type = other DNA
ctgcgtgcaataaaatcaaaattattgagtgaaaaccgaataattggacaaaatagaaaagtacattttctttcg

SEQ ID NO: 277585 - DNA, 75 bp, synthetic construct
  source 1..75: mol_type = other DNA
catcacggtcgcaagcataaagaagatatggaagcgcgccacgaacagttaaccaaaggtggcaccatcctctga

SEQ ID NO: 277586 - DNA, 75 bp, synthetic construct
  source 1..75: mol_type = other DNA
gaacaaattgccccagaagcgggacaaaacagcccggatacgcaacaaaacgggccagaagagcaacagccagcc

SEQ ID NO: 277587 - DNA, 75 bp, synthetic construct
  source 1..75: mol_type = other DNA
ccaggcacaaatgaagaatgaatacattcagaaaaatgctgttgatacaactcaggaacacgattcggttgttca

SEQ ID NO: 277588 - DNA, 75 bp, synthetic construct
  source 1..75: mol_type = other DNA
atgacgataacgattcttcgcttgatatctcgtacatgagtaacggaaataatattgactatggcggcgataagg

SEQ ID NO: 277589 - DNA, 75 bp, synthetic construct
  source 1..75: mol_type = other DNA
cttctgacaataatgatgattcagagcaagcagatttcgactggaaaaggcaactcgtgcttgcagccgtctatg

SEQ ID NO: 277590 - DNA, 75 bp, synthetic construct
  source 1..75: mol_type = other DNA
ccagggccagtagcgcaaccggagctggaaaaaaaactgccgcgtctgtggtcagactggcggggggaactgccc

SEQ ID NO: 277591 - DNA, 75 bp, synthetic construct
  source 1..75: mol_type = other DNA
catcatcgattaccggaaagccttacattgtgaagatccctggtaagagcgatgaaaacgcgcaaccttttttac

SEQ ID NO: 277592 - DNA, 75 bp, synthetic construct
  source 1..75: mol_type = other DNA
ttacgctgctaatgacactccccgcttacgcgaagttaactgcccatgaagaagcccgcatcaacgccatgctgg

SEQ ID NO: 277593 - DNA, 75 bp, synthetic construct
  source 1..75: mol_type = other DNA
cgcgcgtggatgccgcgattgaggagagcgtcattgcccatatgaacgagttgttaatcgccctgagtgatgacg

SEQ ID NO: 277594 - DNA, 75 bp, synthetic construct
  source 1..75: mol_type = other DNA
tttctcaacttcatcaaatcttttacgacgatgaaggattaatcgatgcggaaaagagcgtgacaattttataca

SEQ ID NO: 277595 - DNA, 75 bp, synthetic construct
  source 1..75: mol_type = other DNA
tcacactgctgatggcactccccgcttacgcgaagttaactgcccacgaagaagtccgaattaacgccatgctgg

SEQ ID NO: 277596 - DNA, 75 bp, synthetic construct
  source 1..75: mol_type = other DNA
catacctgcgatgaagcggtttctcatctgcgcctgaagctaggcaatacccgtaatcgcattgatactgctgag

SEQ ID NO: 277597 - DNA, 75 bp, synthetic construct
  source 1..75: mol_type = other DNA
cggcagatcgtgactttattggtcgtgaagctctggaagcgcagcgtgaacatggcacagaaaaactggttggtc

SEQ ID NO: 277598 - DNA, 75 bp, synthetic construct
  source 1..75: mol_type = other DNA
cctgagcacgtggacaactcacgtggtgaagtcacaaaaaccataagcatatcctgcccgtataagagtggctct

SEQ ID NO: 277599 - DNA, 75 bp, synthetic construct
  source 1..75: mol_type = other DNA
gaaaagctgggcctgaacagtgaagagcaaaaagaagacaccaactatctggatggcattcagggtttgctgaaa

SEQ ID NO: 277600 - DNA, 75 bp, synthetic construct
  source 1..75: mol_type = other DNA
atgaatatttccgatattcgcgcaggactgcgcacgcttgtagaaagtgaaaaagctacttatgcacaaattgcc

SEQ ID NO: 277601 - DNA, 75 bp, synthetic construct
  source 1..75: mol_type = other DNA
atcgtcagttatccaacatgacctgggataatgacaaagggaatcagtggaacaatattcgtagctatttgcaac

SEQ ID NO: 277602 - DNA, 75 bp, synthetic construct
  source 1..75: mol_type = other DNA
atcaaaaagcgcggcagctaccagcgccagtgccgcgaaaacgtcagaaacgaatgccgcagcatcacaaaaatc

SEQ ID NO: 277603 - DNA, 75 bp, synthetic construct
  source 1..75: mol_type = other DNA
ggatgtcaacacctcttacattaggtaatggttcaggaaatggttacagagtgacagcaggtctggacacagcac

SEQ ID NO: 277604 - DNA, 75 bp, synthetic construct
  source 1..75: mol_type = other DNA
aatccaggagtgggaaaaactgaagcggcccgcgaatttcgtcgcaccaataacaatgtctggatgatcaccatt

SEQ ID NO: 277605 - DNA, 75 bp, synthetic construct
  source 1..75: mol_type = other DNA
aaggtgaacgtgttaatgaagattatctgcgtcaggctttccgtgaattagacctggacgttgatatttcaaccc

SEQ ID NO: 277606 - DNA, 75 bp, synthetic construct
  source 1..75: mol_type = other DNA
aatgcctgactgaactggcttatgaactgggaatgaatgatgcaccgcgtcgtaaagggccactctcccgcgctt

SEQ ID NO: 277607 - DNA, 75 bp, synthetic construct
  source 1..75: mol_type = other DNA
ttatctgcgtgaggcttacaaagagttagaccaggacgttgatgtttcgatgctgctgggtgtgcaaggggatgc

SEQ ID NO: 277608 - DNA, 75 bp, synthetic construct
  source 1..75: mol_type = other DNA
taataatgtctggatgatcaccattgcgccatcccgtgccagtacgctggaatgtctgactgaacttgccgaaga

SEQ ID NO: 277609 - DNA, 75 bp, synthetic construct
  source 1..75: mol_type = other DNA
actgggaatgaatgacgcaccgcgccgtaaggggccactctcccgcgctttgagacgccgtcttgaaggtacgca

SEQ ID NO: 277610 - DNA, 75 bp, synthetic construct
  source 1..75: mol_type = other DNA
ccaacacaagagttccggtgcatttggtggcacgaacacgagcattttccctaatggttataccgcgatttcaaa

SEQ ID NO: 277611 - DNA, 75 bp, synthetic construct
  source 1..75: mol_type = other DNA
tctcttctaccgacttaatgttatcccgataactctgccaccgctgcgtgaacgtcaggaagatattgaactatt

SEQ ID NO: 277612 - DNA, 75 bp, synthetic construct
  source 1..75: mol_type = other DNA
tgacggtcaggatgctggtatcacaagaataaaatatgatattcagatccttacagatgaggaaaaagagaatgc

SEQ ID NO: 277613 - DNA, 75 bp, synthetic construct
  source 1..75: mol_type = other DNA
ttatatagcattatgtcagtttgcaggggaaatatctacatttcaaaattctgtattttcagatacccgaattgt

SEQ ID NO: 277614 - DNA, 75 bp, synthetic construct
  source 1..75: mol_type = other DNA
catggtacagaaaaactggttggtctggtgatgaccgaaaaaggcgtgctgcgtaatgaactgccggtacgtttt

SEQ ID NO: 277615 - DNA, 75 bp, synthetic construct
  source 1..75: mol_type = other DNA
gcgcgctggtggaagcgggcgttaagccatgtggcctgggcgcgcgtgacacgctgcgtctggaagcgggtatga

SEQ ID NO: 277616 - DNA, 75 bp, synthetic construct
  source 1..75: mol_type = other DNA
cataacagcaagaagcaagttgctgatgaactgggcatcggcattgctacgctctatcgcaagattaagaaatat

SEQ ID NO: 277617 - DNA, 75 bp, synthetic construct
  source 1..75: mol_type = other DNA
aaagcaacatgcgtaatgtttatcatgatagtcaggatgtaggtatcacaagaataaaatatgatattcagataa

SEQ ID NO: 277618 - DNA, 75 bp, synthetic construct
  source 1..75: mol_type = other DNA
tagaggcacagatactggatctgttaatttgtggcttgctcttaagcgatttaattccggttataaaaatgtatc

SEQ ID NO: 277619 - DNA, 75 bp, synthetic construct
  source 1..75: mol_type = other DNA
gtgacagcaggtctggacacagcgcgttcaacgttcacctttacttcagtgccctttcgtaatggcagcgggata

SEQ ID NO: 277620 - DNA, 75 bp, synthetic construct
  source 1..75: mol_type = other DNA
attggtattcagggctttatttacaacctcagcactttcagtccattgatttgcatcatagtttcatgcttgcca

SEQ ID NO: 277621 - DNA, 75 bp, synthetic construct
  source 1..75: mol_type = other DNA
aatttgtggcttgctcttaagcgatttaattctagtcataaaaatgtatccagcgtaaatgataaacgaggatct

SEQ ID NO: 277622 - DNA, 75 bp, synthetic construct
  source 1..75: mol_type = other DNA
tattgtgtattgatgatgagtattcatttccagctatgaggttatcagctaatcatatacttagaggtaaagttg

SEQ ID NO: 277623 - DNA, 75 bp, synthetic construct
  source 1..75: mol_type = other DNA
agttgaaatttaccggcggctcggactacaggtattccacggcatggcggcgtattttggtctaccggaagcact

SEQ ID NO: 277624 - DNA, 75 bp, synthetic construct
  source 1..75: mol_type = other DNA
tcacctgccacgcgatttccgtatgggttcccgacgcaccggtattatcgttgtttcggtgatgctgccaactta

SEQ ID NO: 277625 - DNA, 75 bp, synthetic construct
  source 1..75: mol_type = other DNA
aggaagcaacattacttaccgaacaataaatgattatggcgcacttactccaaaaatgacgggcgtaatggtata

SEQ ID NO: 277626 - DNA, 75 bp, synthetic construct
  source 1..75: mol_type = other DNA
tcgtcactgataagtgcaatgttacaattggccatgactgcatgatagcaagagatgttattttgcgtgcatcag

SEQ ID NO: 277627 - DNA, 75 bp, synthetic construct
  source 1..75: mol_type = other DNA
agttgaagtttaccggcggatcggtgcaggtattccatggcatggcggcgtattttggtctgccggaagcgttga

SEQ ID NO: 277628 - DNA, 75 bp, synthetic construct
  source 1..75: mol_type = other DNA
gatccagttcctgatcgtcatcccgctgatgattatcccgatgctcggttccaataccgtgcaggatctgatgaa

SEQ ID NO: 277629 - DNA, 75 bp, synthetic construct
  source 1..75: mol_type = other DNA
gtggtttccctgtccggtatggtcgctgccacctgcagtgcgtgcgatggtttctctcatccatctgcaactggg

SEQ ID NO: 277630 - DNA, 75 bp, synthetic construct
  source 1..75: mol_type = other DNA
ctataacgcatggcgactgccctcaagcaaagttaaacatcgctatcaacaacagggttataagtggcttgatac

SEQ ID NO: 277631 - DNA, 75 bp, synthetic construct
  source 1..75: mol_type = other DNA
ggctggcaatggtcattgcgcgaaacggcaaagcgattctctatgacacgggactggcctggcctggcccgaagg

SEQ ID NO: 277632 - DNA, 75 bp, synthetic construct
  source 1..75: mol_type = other DNA
caggaactgagtcgtgatgaggtaggacaacgtcttcagacaatacccggtattggtccgataaccgccagcgta

SEQ ID NO: 277633 - DNA, 75 bp, synthetic construct
  source 1..75: mol_type = other DNA
aaattgcacctaagtattttaatgccgtagtcgctggcagcaaaaaggcagagcttcgcaaagatgatcgcggct

SEQ ID NO: 277634 - DNA, 75 bp, synthetic construct
  source 1..75: mol_type = other DNA
aagggaatgtggtttttaatgacttttccctgaaacaaagcatccctcttaatgaacagcgagatgaacttaagg

SEQ ID NO: 277635 - DNA, 75 bp, synthetic construct
  source 1..75: mol_type = other DNA
tgataatttgtttcaccatactcatgaaattatcgcctttgttctccacacatggggaattttgttcagcgttgc

SEQ ID NO: 277636 - DNA, 75 bp, synthetic construct
  source 1..75: mol_type = other DNA
cacgcatgtgaaaaaaggcgacccctgtcaggatgctatgccatacattccttttcactgtcttataagcctgta

SEQ ID NO: 277637 - DNA, 75 bp, synthetic construct
  source 1..75: mol_type = other DNA
aatgcagatttattagataatttcaatcatatattaatcactgactcagcaggaatgggtaagtccaccctaatg

SEQ ID NO: 277638 - DNA, 75 bp, synthetic construct
  source 1..75: mol_type = other DNA
ttgatacatggaaactgttttgcgctaactttatgctgaatgtatacgcaagcaaccgcatccacatccttgatg

SEQ ID NO: 277639 - DNA, 75 bp, synthetic construct
  source 1..75: mol_type = other DNA
aagctgtggagcacaaacagctacgcccactggacgtgcagtttgccctgaccgtggcgggagatgaacatcctg

SEQ ID NO: 277640 - DNA, 75 bp, synthetic construct
  source 1..75: mol_type = other DNA
gtcaactcagtgacatggcaaaaagcagtggcacttatctggatccggcactcgtcaaacgtatcgaagttgtcc

SEQ ID NO: 277641 - DNA, 75 bp, synthetic construct
  source 1..75: mol_type = other DNA
gcgtgacagaaaaacagcacagaatgacatgcagttctggtaccagtacgcccctgcagataacagtctcatcaa

SEQ ID NO: 277642 - DNA, 75 bp, synthetic construct
  source 1..75: mol_type = other DNA
gtggaaacaccaggagctaaaggagtaagaactagcaccggatacaaaacttcatggttgggaacggctttaatt

SEQ ID NO: 277643 - DNA, 75 bp, synthetic construct
  source 1..75: mol_type = other DNA
ccagcagggccatttgaactgaatgatttttatctttccggctattcgggggacatgctggtgactgtccgtgag

SEQ ID NO: 277644 - DNA, 75 bp, synthetic construct
  source 1..75: mol_type = other DNA
atggagggggaacaggaggtcgctatttatgtcaatgatgagttttattcccgtaatactctgttttttaaaaat

SEQ ID NO: 277645 - DNA, 75 bp, synthetic construct
  source 1..75: mol_type = other DNA
aaagtgggaagtatccaacaagattttgaacgtagtttcacgttggcggctctgtctgggcaagcaccaagttaa

SEQ ID NO: 277646 - DNA, 75 bp, synthetic construct
  source 1..75: mol_type = other DNA
atgtcggatcaggaaataggtcatattttagaagaccttggaaacgatcttgcctattttcgcggcgcgtttagc

SEQ ID NO: 277647 - DNA, 75 bp, synthetic construct
  source 1..75: mol_type = other DNA
cgcccagcactacaaagcattgcaatacatcaaagcacaaacggcagcttacgagcgcggggctattagtcaggc

SEQ ID NO: 277648 - DNA, 75 bp, synthetic construct
  source 1..75: mol_type = other DNA
aatgcttaagttaagtgggcgacaatggcgtggctgggatgtctggttatgctgccttgcggcaatattgctaat

SEQ ID NO: 277649 - DNA, 75 bp, synthetic construct
  source 1..75: mol_type = other DNA
aagccggtgaaaaaggtggagcagccaaaacgcgatgtcaaacccgtagagtcgcgtccggcatcaccgtttgaa

SEQ ID NO: 277650 - DNA, 75 bp, synthetic construct
  source 1..75: mol_type = other DNA
agccgcagtatccggcacgagcacaggcattgcgcattgaagggcaggttaaagttaaatttgatgtcacgccag

SEQ ID NO: 277651 - DNA, 75 bp, synthetic construct
  source 1..75: mol_type = other DNA
ctttaagcgcattcagatcctgcgcgatatgggcgtgggcttatcggtagatgattttggcacgggcttttccgg

SEQ ID NO: 277652 - DNA, 75 bp, synthetic construct
  source 1..75: mol_type = other DNA
gtgttgcggggtgatggggcacagttgttgcaaaaagcccagcgcgtcacagaacaggcggaagaaagggtacgc

SEQ ID NO: 277653 - DNA, 75 bp, synthetic construct
  source 1..75: mol_type = other DNA
tggaaaatctatactgcatttacttgttagcgatatggttcttcatattataaaaaaacaagagttaacacatca

SEQ ID NO: 277654 - DNA, 75 bp, synthetic construct
  source 1..75: mol_type = other DNA
gagcctggtagtttctatgctctttataatcgtcgttttaacgagtatattaacacgatgttaatggaaaaagat

SEQ ID NO: 277655 - DNA, 75 bp, synthetic construct
  source 1..75: mol_type = other DNA
gaagggcaggcacactcagcgatcgctgacgcacggatgacggcaggggtggtaaacgctattgctgcatatcat

SEQ ID NO: 277656 - DNA, 75 bp, synthetic construct
  source 1..75: mol_type = other DNA
gtgattatcccgacaggaatgatggtcacgccgctgctgctgatctggtttggtggaagctggatcacccggatg

SEQ ID NO: 277657 - DNA, 75 bp, synthetic construct
  source 1..75: mol_type = other DNA
gtgtcgggccggtatggggcgttcatcgctgattatggtggcgcagggctggtccctgcgccgtacccggccggt

SEQ ID NO: 277658 - DNA, 75 bp, synthetic construct
  source 1..75: mol_type = other DNA
gtgcctgccggggtgacctgggtaccgttacaggcagaaaccgctgttcagcagcgtcttactgccgccctgacg

SEQ ID NO: 277659 - DNA, 75 bp, synthetic construct
  source 1..75: mol_type = other DNA
gcttggtaaagtttgccgcaggcgtcatgacccaggttggccccgcagcattgctgccccggctggaaacgctac

SEQ ID NO: 277660 - DNA, 75 bp, synthetic construct
  source 1..75: mol_type = other DNA
atggcacggcgactgaaaatactgtatgtgcgccaaatggtttacaaggaagggatactaaaggtatgctgttat

SEQ ID NO: 277661 - DNA, 75 bp, synthetic construct
  source 1..75: mol_type = other DNA
cattttctggaattgccagagagggaggccgagataagcgcagcgcggagcaaaaccgctggaaaaaccacttgc

SEQ ID NO: 277662 - DNA, 75 bp, synthetic construct
  source 1..75: mol_type = other DNA
cagcgatcgcgtatttcgtctcgctcaggcgcaatcacgaatgaataacggtttggttgatgctagtgattttga

SEQ ID NO: 277663 - DNA, 75 bp, synthetic construct
  source 1..75: mol_type = other DNA
tcaagcattttatccgtactcctgatgatgcatggttactcaccactgcgatccccgggaaaacagcattccagg

SEQ ID NO: 277664 - DNA, 75 bp, synthetic construct
  source 1..75: mol_type = other DNA
gaatctggaagaacttgatgaagccctgaaagcaggtgccgatatcatcatgctggataacttcgaaacagaaca

SEQ ID NO: 277665 - DNA, 75 bp, synthetic construct
  source 1..75: mol_type = other DNA
gccgctgcggtcgcggcactgattttttggtatcagtggtttccctgtcctgagtggcaactgccgccggtattg

SEQ ID NO: 277666 - DNA, 75 bp, synthetic construct
  source 1..75: mol_type = other DNA
gaattgtagcctgcgtgcacagtatctggcgtcactacaaacaacgctgcaaccctatatgtggaatgcggttat

SEQ ID NO: 277667 - DNA, 75 bp, synthetic construct
  source 1..75: mol_type = other DNA
acattaacccttgcgtttctgactatcttcgcctgcgtactggcatttatccctgttaaaaccgtacgttatatc

SEQ ID NO: 277668 - DNA, 75 bp, synthetic construct
  source 1..75: mol_type = other DNA
cgaatatggatttccttattgcctgccgttttgtgatgggagttgggctgggagctttactggttacgctgtttg

SEQ ID NO: 277669 - DNA, 75 bp, synthetic construct
  source 1..75: mol_type = other DNA
acgtcacaccattaaccctggcgaaaccactggcaatcaaccatatgtatggctgaaaattgtttctccggttga

SEQ ID NO: 277670 - DNA, 75 bp, synthetic construct
  source 1..75: mol_type = other DNA
agatgcttatttcccgtgtatacagacgttgctatcccagccagtggttgagagttagcaatcgccgtgtggtgt

SEQ ID NO: 277671 - DNA, 75 bp, synthetic construct
  source 1..75: mol_type = other DNA
atgcgccagtagaagtcgaagtagagaatctggaagaacttgatgaagccctgaaagcaggagccgatatcatca

SEQ ID NO: 277672 - DNA, 75 bp, synthetic construct
  source 1..75: mol_type = other DNA
cgtggctccggtctggcgaatgcggtagggcgaatcagtggtattgccgcaccttatgccgttgcagtgctgctc

SEQ ID NO: 277673 - DNA, 75 bp, synthetic construct
  source 1..75: mol_type = other DNA
gaagaaggcgtcatacgccagacgggtaaacctttgccgcctgtggttattgctgatgacggtaaagcgggtgat

SEQ ID NO: 277674 - DNA, 75 bp, synthetic construct
  source 1..75: mol_type = other DNA
ttatttgcctgacggctgcctctggccttacctctgcttacgcggcacaactggctgacgatgaagcgggactac

SEQ ID NO: 277675 - DNA, 75 bp, synthetic construct
  source 1..75: mol_type = other DNA
attccaatattattggcgttgaaggcggggcgtattatgtttataaattaggtgctcgtgctgatatgagcaccc

SEQ ID NO: 277676 - DNA, 75 bp, synthetic construct
  source 1..75: mol_type = other DNA
tgaagtgattgaactgtgtaagcaaattgattcaaaacttgaaacgttaaccaagagtgttgttaaccgatttgg

SEQ ID NO: 277677 - DNA, 75 bp, synthetic construct
  source 1..75: mol_type = other DNA
aaacgaccagaaagcggaacataacagcccaaatgcgttacaaaacgagccagaaacgaaacagcctgaaccaga

SEQ ID NO: 277678 - DNA, 75 bp, synthetic construct
  source 1..75: mol_type = other DNA
atgcaggaaaaccgctgggatgaggcgtctgcttcctttgtcccggtcgagactgaatccgatccgatgaacgtc

SEQ ID NO: 277679 - DNA, 75 bp, synthetic construct
  source 1..75: mol_type = other DNA
tcattattagctccttctaatgccattctatttcaggaaggagtgtccgttaaactcaggctacctcagcgtatc

SEQ ID NO: 277680 - DNA, 75 bp, synthetic construct
  source 1..75: mol_type = other DNA
ttgaagggcaggagattttgaaagtcgcacccgaagcgttaactttgttggcgcgtcaggcgtttcatgatgcgt

SEQ ID NO: 277681 - DNA, 75 bp, synthetic construct
  source 1..75: mol_type = other DNA
tccgatttactacgcgggtccggccaaaacgccggaaggttatgcctccggttctcttggcccaacgaccgccgg

SEQ ID NO: 277682 - DNA, 75 bp, synthetic construct
  source 1..75: mol_type = other DNA
gtctgggtgcgcagtttggtggtaaatacttcgctcacgacatacgcgtgattcgcctgccacgtcacggcgcat

SEQ ID NO: 277683 - DNA, 75 bp, synthetic construct
  source 1..75: mol_type = other DNA
atactggcaccaacctgccagcgcagatcgatctttatgctgttgatggcgacgagtataaattcctctgtatcg

SEQ ID NO: 277684 - DNA, 75 bp, synthetic construct
  source 1..75: mol_type = other DNA
atacttcgctcacgacatccgcgtgattcgcctgccacgtcacggcgcatcctgcccggtcggtatgggcgtctc

SEQ ID NO: 277685 - DNA, 75 bp, synthetic construct
  source 1..75: mol_type = other DNA
ggcgcagggaagtattaagagcctggaatgtgttgaatatccggaactgggaatggaagctatctggaaaattga

SEQ ID NO: 277686 - DNA, 75 bp, synthetic construct
  source 1..75: mol_type = other DNA
aaacagcctgatgcccttcgctacgaccgccagactatttttggccttgtccgtgacgtccgatcgacattcaca

SEQ ID NO: 277687 - DNA, 75 bp, synthetic construct
  source 1..75: mol_type = other DNA
tcgtctctcatggcttgcgatctattgctagtactgcccttaatgagcagggttttctacctgacgttattgaag

SEQ ID NO: 277688 - DNA, 75 bp, synthetic construct
  source 1..75: mol_type = other DNA
ataagaatgaggttcgtcgtgcttataaccgcagcgattacctggaacagcgtcgcccgatgatgcaatggtggg

SEQ ID NO: 277689 - DNA, 75 bp, synthetic construct
  source 1..75: mol_type = other DNA
gcagacaatgcgaacagccagcattagcctttccacacgctgcctgttcatgtggcaacttcttactattacccg

SEQ ID NO: 277690 - DNA, 75 bp, synthetic construct
  source 1..75: mol_type = other DNA
aaacgaattggttttggcggaaaactagtcgctcatggcctccgttctattgcgagtacagcaatgaatgaagcc

SEQ ID NO: 277691 - DNA, 75 bp, synthetic construct
  source 1..75: mol_type = other DNA
tgaagttcgaaaagcttacaaccgttcaacttatttacttcaaagagttgagttgatggattggtggggagataa

SEQ ID NO: 277692 - DNA, 75 bp, synthetic construct
  source 1..75: mol_type = other DNA
catcgtgaacatgtttttcccagcagaaataaccctaaaaaagcgatgaatagtcaaacagccaatgccgctttg

SEQ ID NO: 277693 - DNA, 75 bp, synthetic construct
  source 1..75: mol_type = other DNA
ggcagcctgagttcacagataaaacactctccaggaaacccggggcggttcacactgttgatgttctccagtcat

SEQ ID NO: 277694 - DNA, 75 bp, synthetic construct
  source 1..75: mol_type = other DNA
cggtcagaccggcggcggcaactgccctgattgtggcgcggtgatgggcgacgcaacataccaggaaacattcga

SEQ ID NO: 277695 - DNA, 75 bp, synthetic construct
  source 1..75: mol_type = other DNA
cggggcaactgaaatcacgaaagaagaatattttgcccgcaaaaacggcacatacacaggttcacaacaaaatac

SEQ ID NO: 277696 - DNA, 75 bp, synthetic construct
  source 1..75: mol_type = other DNA
cgatgatgcaatggtgggctgattttgtgatggcagctgattgtggaagtatgattgagggcagtatgaaaggaa

SEQ ID NO: 277697 - DNA, 75 bp, synthetic construct
  source 1..75: mol_type = other DNA
aaacgcgcaggttttggtggtgtgcttgtttcgcatggtctgagatcaattgccagtacggctcttaatgaacaa

SEQ ID NO: 277698 - DNA, 75 bp, synthetic construct
  source 1..75: mol_type = other DNA
ggtcatcacgttatcacatccaccagccgggtgtggcaccatctgatgatcgatcttgaaacgatgggaacaaat

SEQ ID NO: 277699 - DNA, 75 bp, synthetic construct
  source 1..75: mol_type = other DNA
aaatactatgacgagctgccaacggaagggaatgagcacggtcaggcgttccgcgatgtagagctggaaaacgaa

SEQ ID NO: 277700 - DNA, 75 bp, synthetic construct
  source 1..75: mol_type = other DNA
tgttagcgggcccattaagttctgtctcggcgcgtctgcgtctggcgggctggcataaatatcttaaacacaatc

SEQ ID NO: 277701 - DNA, 75 bp, synthetic construct
  source 1..75: mol_type = other DNA
ttaaggtgaacggtcatcacgaaatcacatccaccagcaggacgtgtgaccatctaatgatcgaccttgaaacca

SEQ ID NO: 277702 - DNA, 75 bp, synthetic construct
  source 1..75: mol_type = other DNA
caaactgttcgctatcggatgggttaaacacaaatgtaagccgggtaccaaatggcccgaaattcaggctgaatt

SEQ ID NO: 277703 - DNA, 75 bp, synthetic construct
  source 1..75: mol_type = other DNA
atgtgatgggagatgtgaatgaaaccttaactcagatcaagtcatcacttaaagaaatcattacagaatatgaac

SEQ ID NO: 277704 - DNA, 75 bp, synthetic construct
  source 1..75: mol_type = other DNA
gcaattcctggagcaatatcctgctgctcaggactgcgcttataaatttcttgtctgcgaagataaacccggcat

SEQ ID NO: 277705 - DNA, 75 bp, synthetic construct
  source 1..75: mol_type = other DNA
atctgccattatgaccgatgaaatcccgttagatgatgcactgttacaattgcgggaatttatcgacgaaaactc

SEQ ID NO: 277706 - DNA, 75 bp, synthetic construct
  source 1..75: mol_type = other DNA
aaccatgggaaaaaatcccgatgccccgatcatctcaataggtgcaatatttttcgatccgcaaaccggagatat

SEQ ID NO: 277707 - DNA, 75 bp, synthetic construct
  source 1..75: mol_type = other DNA
cattgatcgtgacgtcattaaatggtggctgaagcaatcacgtgaagcgcagtctgccattatgaccgatgaaat

SEQ ID NO: 277708 - DNA, 75 bp, synthetic construct
  source 1..75: mol_type = other DNA
aatacctgactacaaagggcgtgtttgaagatgaaggaacaaatcagagcgcaactgatactctctcgtcgccag

SEQ ID NO: 277709 - DNA, 75 bp, synthetic construct
  source 1..75: mol_type = other DNA
atctcaataggtgcaatatttttcgatccgcaaaccggagatatgggaccggaatttagtaagactatcgatctg

SEQ ID NO: 277710 - DNA, 75 bp, synthetic construct
  source 1..75: mol_type = other DNA
gatgctgaatatatgcaggaaaaccgctgggatgaggcgtctgcttcctttgtcccggtcgagactgaatccgat

SEQ ID NO: 277711 - DNA, 75 bp, synthetic construct
  source 1..75: mol_type = other DNA
ggtgaacgcaaggaaaccggaaaatacacgtctgttgttgatctcgcccgcgccagagccaatcaacagtacact

SEQ ID NO: 277712 - DNA, 75 bp, synthetic construct
  source 1..75: mol_type = other DNA
gattctgtgaaccagaaccagcatgaatcggaacggaactaccaaaaagcggaacaaaacagtccaaatgcgtta

SEQ ID NO: 277713 - DNA, 75 bp, synthetic construct
  source 1..75: mol_type = other DNA
tctcggtggcgtttgcttttgccattgcatctttgttgagtgggcgtctggacagcacttatgcgcgttttactc

SEQ ID NO: 277714 - DNA, 75 bp, synthetic construct
  source 1..75: mol_type = other DNA
aatacccagcttccggtgtggtatcgcgtggcggctacctggggcgcgcatgaaggctcgctcctgctgtgggtg

SEQ ID NO: 277715 - DNA, 75 bp, synthetic construct
  source 1..75: mol_type = other DNA
gggatccggtagaaaacgcctcgtttatgccgtggctggtggggactgcgctgatgcactcactggcggtcactg

SEQ ID NO: 277716 - DNA, 75 bp, synthetic construct
  source 1..75: mol_type = other DNA
aaaattatctggttgagaaaatgcgcacgctgggtacagcggcatgtcctccgtaccacattgcgtttgtcattg

SEQ ID NO: 277717 - DNA, 75 bp, synthetic construct
  source 1..75: mol_type = other DNA
ggcgatgaagcggcgctggcccgcggcgtgtacaacacctatattgaagataacctgcgttactcacaaaacgcg

SEQ ID NO: 277718 - DNA, 75 bp, synthetic construct
  source 1..75: mol_type = other DNA
atcttcctgacgctcggcattgtgctcggttccgcatgggcctattacgaactcggctggggcggctggtggttc

SEQ ID NO: 277719 - DNA, 75 bp, synthetic construct
  source 1..75: mol_type = other DNA
cgatagtgaaactggcgaggcgtcagatcccttaattaaggcgaacggtcatcataatctcacatccaccagcag

SEQ ID NO: 277720 - DNA, 75 bp, synthetic construct
  source 1..75: mol_type = other DNA
aatcctgatgccccggttatctcaataggtgcaatatttttcgatccgcaaaccggagatatgggaccggaattt

SEQ ID NO: 277721 - DNA, 75 bp, synthetic construct
  source 1..75: mol_type = other DNA
accagcaagaaacggaacagaacgaccagaaagcggaacaaaacagcccaaatgcgttacaaaacgagccggaaa

SEQ ID NO: 277722 - DNA, 75 bp, synthetic construct
  source 1..75: mol_type = other DNA
gatcgaccttgaaaccatgggaaaaaatcctgatgccccgatcatctcgataggtgcaatatttttcgatccgca

SEQ ID NO: 277723 - DNA, 75 bp, synthetic construct
  source 1..75: mol_type = other DNA
atatcagccagcctgacgccgataagttacttgctgtatcgcgtggtgaatttgttgaggggattagcgacccta

SEQ ID NO: 277724 - DNA, 75 bp, synthetic construct
  source 1..75: mol_type = other DNA
aatggaaccggatacaactgaacatggccagaacgcgcagtcgctggatgctcagtcgcaggtgagttcagctaa

SEQ ID NO: 277725 - DNA, 75 bp, synthetic construct
  source 1..75: mol_type = other DNA
gaaaacccagcagaaaaaatccctcctgtaactgccgccattcatcgcgaatacaagcagacatggaaaaccctg

SEQ ID NO: 277726 - DNA, 75 bp, synthetic construct
  source 1..75: mol_type = other DNA
gagaatttgttgcagggattagcgacccgaatgatccgaaatgggttaaggggatccagacccgcgattctgtaa

SEQ ID NO: 277727 - DNA, 75 bp, synthetic construct
  source 1..75: mol_type = other DNA
catactcaggttcacaacaaaatactggtgcatctgacacgaccgcacaaccagggccggtaaaagttaccgctg

SEQ ID NO: 277728 - DNA, 75 bp, synthetic construct
  source 1..75: mol_type = other DNA
cagtcttgccctggtgaaatacacgtaaaaggtttcccggcagacgacatgaaagcgaaacatgaatacgaaaaa

SEQ ID NO: 277729 - DNA, 75 bp, synthetic construct
  source 1..75: mol_type = other DNA
tgggaaaaacttaagttccataaagaagcaggaaaactcatagtaaaaaatccaacacctttctatatttcattt

SEQ ID NO: 277730 - DNA, 75 bp, synthetic construct
  source 1..75: mol_type = other DNA
aggtgtacctcacaatgcactcgatgatgcacgccaccaggcaaaacaagtttcagtaatctggcaaaaactgat

SEQ ID NO: 277731 - DNA, 75 bp, synthetic construct
  source 1..75: mol_type = other DNA
catccaccagcagagtatggaatcacctgtcggtcgaccttgaaacgatgggaacaaatcccgatgcaccaatca

SEQ ID NO: 277732 - DNA, 75 bp, synthetic construct
  source 1..75: mol_type = other DNA
agaccggcggcggcaactgccctgattgtggcgcggtgatgggcgacgcaacataccaggaaacattcgatgaag

SEQ ID NO: 277733 - DNA, 75 bp, synthetic construct
  source 1..75: mol_type = other DNA
tttatcgacgaaaactccggtgagttttttgttcaggtctggggaaatggagccaacttcgacaacacgattttg

SEQ ID NO: 277734 - DNA, 75 bp, synthetic construct
  source 1..75: mol_type = other DNA
ggaaatggaaggcgctgaacatccgaacaatgagaatgctggtaacgatcagcatcacaccagcgatagtgaaac

SEQ ID NO: 277735 - DNA, 75 bp, synthetic construct
  source 1..75: mol_type = other DNA
ctgaagttcaggaagatgatccggaggaaatggaaggcgctgaacatccgaacaatgagaatgctggtaacgatc

SEQ ID NO: 277736 - DNA, 75 bp, synthetic construct
  source 1..75: mol_type = other DNA
gaaatcccgttagatgatgcactgctgcaattacgggaatttatcgacgaaaactccggtgaattttttgttcag

SEQ ID NO: 277737 - DNA, 75 bp, synthetic construct
  source 1..75: mol_type = other DNA
catgggcctatttgacacatatgctgcggcgcgtgatgaaggttgtgaattacttcgctgttggtctaacgctcg

SEQ ID NO: 277738 - DNA, 75 bp, synthetic construct
  source 1..75: mol_type = other DNA
gcggttccgtgtcagggaacgcagtcgccataaatccgcactggtcatgcagaagtacagccgccagcaggcacg

SEQ ID NO: 277739 - DNA, 75 bp, synthetic construct
  source 1..75: mol_type = other DNA
ttgcaggagccgaaaatgctacctgcccgtttgccgaacattttgcttaacggcaccaccggtattgccgtcggt

SEQ ID NO: 277740 - DNA, 75 bp, synthetic construct
  source 1..75: mol_type = other DNA
atgagcgatatggcagagcgccttgcgctacatgaatttacggaaaacgcctacttaaattactccatgtacgta

SEQ ID NO: 277741 - DNA, 75 bp, synthetic construct
  source 1..75: mol_type = other DNA
gggataagaagtggttcaattgtggatgcactgcaattcgccaccactcttacagatgcaaaagaacaaatccat

SEQ ID NO: 277742 - DNA, 75 bp, synthetic construct
  source 1..75: mol_type = other DNA
ttatctttgtttgtcgataattacggcgctatatgtgccgttctttttgcagtggtcacaggtgtaatatcatgg

SEQ ID NO: 277743 - DNA, 75 bp, synthetic construct
  source 1..75: mol_type = other DNA
tggcagtggcaggatatgccattctggcaggtcatcgcagagctggtatggcagcagaggaggccggtcatgctg

SEQ ID NO: 277744 - DNA, 75 bp, synthetic construct
  source 1..75: mol_type = other DNA
gggtatcaagctgcggttagctgacaacacgttctatacgcccgattttgctgtgatgctcgccaccggcgagat

SEQ ID NO: 277745 - DNA, 75 bp, synthetic construct
  source 1..75: mol_type = other DNA
gggaaatcgcctggtatcgattcgagggtatcaagctgcggttagctgacaacacgttctatacgcccgatttcg

SEQ ID NO: 277746 - DNA, 75 bp, synthetic construct
  source 1..75: mol_type = other DNA
tccgcaagcaaaacgcgaatacgaaaaagctgcgaaagacttctgcatagataacctgggcgcattcgataaata

SEQ ID NO: 277747 - DNA, 75 bp, synthetic construct
  source 1..75: mol_type = other DNA
gcgactaccgtacaggcatggggaaaagtgctcgacgcccgctcgcggtacatgctctgctccccgccgccgggc

SEQ ID NO: 277748 - DNA, 75 bp, synthetic construct
  source 1..75: mol_type = other DNA
tattaatccgaactttttctcctccagcgaattattccgtcaacatcttagccagaccatgcgcgaattaaatgc

SEQ ID NO: 277749 - DNA, 75 bp, synthetic construct
  source 1..75: mol_type = other DNA
attcaatggcgccaggatccttgaactggatggtcggcaaccagccgatgaaattctgcaagcgtcactacgcgc

SEQ ID NO: 277750 - DNA, 75 bp, synthetic construct
  source 1..75: mol_type = other DNA
tgaaccagtggcgcaacaggaagtggaaaaagtctgcaccgcctgcggtcagaccggcggcggcaactgccctga

SEQ ID NO: 277751 - DNA, 75 bp, synthetic construct
  source 1..75: mol_type = other DNA
ggcctggtgatgcggatgccggaaacattgacggcagcatccttcgctgggctaaaaatgaagttatcgccagag

SEQ ID NO: 277752 - DNA, 75 bp, synthetic construct
  source 1..75: mol_type = other DNA
ggtgaacgcaaggaaaccggaaaatacacgtctgctgttgatctcgcccgcgccagagtcaaccgacagcacact

SEQ ID NO: 277753 - DNA, 75 bp, synthetic construct
  source 1..75: mol_type = other DNA
gcccttcgctacgaccgccagactatttttggccttgtccgtgagcgtccgatcgacattcacaaagatcccgta

SEQ ID NO: 277754 - DNA, 75 bp, synthetic construct
  source 1..75: mol_type = other DNA
atgcccacgctacggccagaagaattacctaagcttatgcgttccctggtcatgtcgaatctgtctgttccgact

SEQ ID NO: 277755 - DNA, 75 bp, synthetic construct
  source 1..75: mol_type = other DNA
agaattacccaagctgatgcgttctctggtcatgtcaaatctatctgtttcgacccgctgtcttattgagtggca

SEQ ID NO: 277756 - DNA, 75 bp, synthetic construct
  source 1..75: mol_type = other DNA
cgccagagtcaaccggcagaacactgaaaactcaacaggaaaaaaccaccctgtcactgccgccattcgtcgcga

SEQ ID NO: 277757 - DNA, 75 bp, synthetic construct
  source 1..75: mol_type = other DNA
ggttttaatcccgatgtaatagaggctgctttagctcatagcgataaaaatgaggttcgaaaagcgtataaccgt

SEQ ID NO: 277758 - DNA, 75 bp, synthetic construct
  source 1..75: mol_type = other DNA
ttgagccaatcaaagctcgtggggcgcttgagactgtacgtcgacttgtgcagcgcatcaacgagataatgattt

SEQ ID NO: 277759 - DNA, 75 bp, synthetic construct
  source 1..75: mol_type = other DNA
gtggcaagaacgacacgccccctgaccaacacagaagtgctgcgcgcaaaagcgttagaaaaggatcttacattg

SEQ ID NO: 277760 - DNA, 75 bp, synthetic construct
  source 1..75: mol_type = other DNA
tgtccgacgacaagcaggccgctgttctcgttaagttcggcgcacatgaaaacgtcaccgtggatatggtcatca

SEQ ID NO: 277761 - DNA, 75 bp, synthetic construct
  source 1..75: mol_type = other DNA
ttagtcatgtcaaatctgtctgttccgactcgctgtctcattgaatggcaactcctgacgctcgtgcgcccttct

SEQ ID NO: 277762 - DNA, 75 bp, synthetic construct
  source 1..75: mol_type = other DNA
tctacatatttagaacataggatagaactgatgaactggtggggagtgttcgctctccaaaatggttataaacaa

SEQ ID NO: 277763 - DNA, 75 bp, synthetic construct
  source 1..75: mol_type = other DNA
aatcgtgaatacgtttttccaagtcgtaacgatccaaatcaaccaatgaatagccagactgctaacgctgcctta

SEQ ID NO: 277764 - DNA, 75 bp, synthetic construct
  source 1..75: mol_type = other DNA
tgagtttgaggaagtaaaggatattgatcctgtatccaaaagaaagactcttggatgttgggggcctagcccaga

SEQ ID NO: 277765 - DNA, 75 bp, synthetic construct
  source 1..75: mol_type = other DNA
gcttcgcaactatgactacaagtgataatactgcggcaaatatcatcctaagtgctgtaggtggccccaaaggcg

SEQ ID NO: 277766 - DNA, 75 bp, synthetic construct
  source 1..75: mol_type = other DNA
atgcgcagaacacaggcctgattgatgcagttcccagtgtaaatatcggaaaagcgttcgagaaaccgcaaaaga

SEQ ID NO: 277767 - DNA, 75 bp, synthetic construct
  source 1..75: mol_type = other DNA
ctgtcttatatcactggcgctgacaatatccttccatgaaaatatacttctgataaatgactccggtttagtggc

SEQ ID NO: 277768 - DNA, 75 bp, synthetic construct
  source 1..75: mol_type = other DNA
tcatggtgcgcttgtcaccgtgaccagtgttgaggaaatctgggtggtgtttatgcgggacggttatccgcatta

SEQ ID NO: 277769 - DNA, 75 bp, synthetic construct
  source 1..75: mol_type = other DNA
atgtcagaagatgttccattaccgaaagtcaatcagcgatacaaagacgatcatggtgcgcttgtcaccgtgacc

SEQ ID NO: 277770 - DNA, 75 bp, synthetic construct
  source 1..75: mol_type = other DNA
aaaacatgcccagtattcgtccggatcagctgcctcagttaatgcagacgatgcgaacggccagcattagccttt

SEQ ID NO: 277771 - DNA, 75 bp, synthetic construct
  source 1..75: mol_type = other DNA
aagtgttaatgtgctggtgggggaattttgtggaagcagccgcaaccggaacaaccatcgccagcgggcacaggg

SEQ ID NO: 277772 - DNA, 75 bp, synthetic construct
  source 1..75: mol_type = other DNA
agatcgaccttgagaccagactctggacgattccagccgaaaggatgaaagcaaagcgtgaacacatcgtaccgc

SEQ ID NO: 277773 - DNA, 75 bp, synthetic construct
  source 1..75: mol_type = other DNA
atgaaccgggaccatacggttccactatccgatgaggccctctctgttttggaaatgatgaagtcacttagtggt

SEQ ID NO: 277774 - DNA, 75 bp, synthetic construct
  source 1..75: mol_type = other DNA
cctttctgatgcgcgtaaactcagagctgaatctcgagttttattggcgaaagacattgatcctcaggaacatca

SEQ ID NO: 277775 - DNA, 75 bp, synthetic construct
  source 1..75: mol_type = other DNA
ttgaaagagatatatttcccgcaattggcaacgtaagcgttacagatattaaagcccatacgctggttcaagccg

SEQ ID NO: 277776 - DNA, 75 bp, synthetic construct
  source 1..75: mol_type = other DNA
aagccacatcacacacttacgctgtcaaaaacacctactacaagctgagcgttaacgatcgcccgctgtgggaaa

SEQ ID NO: 277777 - DNA, 75 bp, synthetic construct
  source 1..75: mol_type = other DNA
aaacagcctgatgcccttcgctacgaccgccaaactatttttggccttgtccgtgagcgtccgatcgacattcac

SEQ ID NO: 277778 - DNA, 75 bp, synthetic construct
  source 1..75: mol_type = other DNA
gagcaccataatgcacttgatgacgctcgttaccaggcaaaatacgtttcagctatctggcaaaaactgatcccg

SEQ ID NO: 277779 - DNA, 75 bp, synthetic construct
  source 1..75: mol_type = other DNA
cgctacgaccgtcagactatttttggccttgtccgtgagcgtccgatcgacattcacaaagatcccgtagcactg

SEQ ID NO: 277780 - DNA, 75 bp, synthetic construct
  source 1..75: mol_type = other DNA
ccgaaggcgatcaacatgccaatgacaataatgaaataggcgagacagcaaatcccttaattaaggtgaacagtc

SEQ ID NO: 277781 - DNA, 75 bp, synthetic construct
  source 1..75: mol_type = other DNA
aattttttgttcaggtttggggaaatggagccaacttcgacaacacgattttgcgccgttcatacgaacggcagg

SEQ ID NO: 277782 - DNA, 75 bp, synthetic construct
  source 1..75: mol_type = other DNA
agacccgcgattctgtgaaccagaaccagcatgaatcggaacggaactaccaaaaagcggaacaaaacagcccaa

SEQ ID NO: 277783 - DNA, 75 bp, synthetic construct
  source 1..75: mol_type = other DNA
acccgtgccatctcaaataaagcagctcaactggggccgctggaaattcgggatttatacaaactggttcgggat

SEQ ID NO: 277784 - DNA, 75 bp, synthetic construct
  source 1..75: mol_type = other DNA
acatgtctgttgttgatcttgcccgcgccagagtcaaccggcagaacactgaaaactcagtagcgaaaatccccc

SEQ ID NO: 277785 - DNA, 75 bp, synthetic construct
  source 1..75: mol_type = other DNA
catggttaagttcgacacatgtgaaaacatcaccgttgatatggttattagcgcgcaggaactgttgcaggaaga

SEQ ID NO: 277786 - DNA, 75 bp, synthetic construct
  source 1..75: mol_type = other DNA
acacgtctgttgttgatctcgcccgcgccagagccaatcaacagcacactgaaaattcaacaggaaaaatcaacc

SEQ ID NO: 277787 - DNA, 75 bp, synthetic construct
  source 1..75: mol_type = other DNA
ggtcaacattagcggatcgtttcgtcgtaatacatgcgtgctggcacaggatagcaagcaaatcaatgtgcagtt

SEQ ID NO: 277788 - DNA, 75 bp, synthetic construct
  source 1..75: mol_type = other DNA
aggcgctggctgccagggctactgaaatcacaaaagaagaatattttgcccgaaaaaatggcacatacacaggct

SEQ ID NO: 277789 - DNA, 75 bp, synthetic construct
  source 1..75: mol_type = other DNA
gctgatgctctcctcctatcagcagaacaaactgatccagtggagacggcggaatccaattctcaaaaaaatgaa

SEQ ID NO: 277790 - DNA, 75 bp, synthetic construct
  source 1..75: mol_type = other DNA
ttaagttattctggcgaccagccgcggtaaagataatccctgagcaagctattaaaaatgttaaatggtcgcggc

SEQ ID NO: 277791 - DNA, 75 bp, synthetic construct
  source 1..75: mol_type = other DNA
atatgggggaagccaaacagggcgaagccacatcacacacttacgccattaaaaacacctactacaagctgagtg

SEQ ID NO: 277792 - DNA, 75 bp, synthetic construct
  source 1..75: mol_type = other DNA
aacaaaattatgcaggcagccaatatcagccagcctgacgccgataagttgcttgctgcctctcgcggagaattt

SEQ ID NO: 277793 - DNA, 75 bp, synthetic construct
  source 1..75: mol_type = other DNA
catccaccagcaggttgtggcaccatctgatgattgaccttgaaaccatgggaaaaaatcctgatgccccgatta

SEQ ID NO: 277794 - DNA, 75 bp, synthetic construct
  source 1..75: mol_type = other DNA
tgatgcatctgacacgaccgcacaaccagacctggtaaaagttaccgctgacgaagtaaacaaaattatgcaggc

SEQ ID NO: 277795 - DNA, 75 bp, synthetic construct
  source 1..75: mol_type = other DNA
aggttgaagttcaggaagacgattcggagaaaatggaaggcgctgaacatccacacaaggagaatgctggcagcg

SEQ ID NO: 277796 - DNA, 75 bp, synthetic construct
  source 1..75: mol_type = other DNA
ggtaaaaatgaaagatgcccttttgcgttttcgggaattcgtcaatgaacactctgatgaaaaattcgttcaggt

SEQ ID NO: 277797 - DNA, 75 bp, synthetic construct
  source 1..75: mol_type = other DNA
ccggtattttatatcgttatcagcctgactgacgcaatgaatacaggggctgttcctgatggtggcaccatcgaa

SEQ ID NO: 277798 - DNA, 75 bp, synthetic construct
  source 1..75: mol_type = other DNA
ttttgttcaggtctggggaaatggagccaacttcgacaacacgattttgcgccgttcatacgaacggcaggggat

SEQ ID NO: 277799 - DNA, 75 bp, synthetic construct
  source 1..75: mol_type = other DNA
gatgatcgacctggaaaccatgggaaaaaatcctgatgctgcagttatctcaataggtgcaatatttttcgatcc

SEQ ID NO: 277800 - DNA, 75 bp, synthetic construct
  source 1..75: mol_type = other DNA
aaatacggtcgcgcaaacaaactttctggtctggaaaaagcactagccttgggagctacggaaatcacaaaagag

SEQ ID NO: 277801 - DNA, 75 bp, synthetic construct
  source 1..75: mol_type = other DNA
gggattgaaacccgcgattctgtaaaccagaaccagcaagaatcggaacagaacgaccagaaagcggaacaaaac

SEQ ID NO: 277802 - DNA, 75 bp, synthetic construct
  source 1..75: mol_type = other DNA
aaattaacgccatgtatcctgagcgtcagactgagtacatcaacgatgccagacgtgatttaaaaccaacagcca

SEQ ID NO: 277803 - DNA, 75 bp, synthetic construct
  source 1..75: mol_type = other DNA
gaaactgttaactttaatcagttatctgaagacaagcgggctgctgtccttgtcaggttcggtacacatgaaaac

SEQ ID NO: 277804 - DNA, 75 bp, synthetic construct
  source 1..75: mol_type = other DNA
ccattccggacgaacaggcaacagcagaaggcgccaaacctgtggccactgccattgaagcaggcgacgaacgcc

SEQ ID NO: 277805 - DNA, 75 bp, synthetic construct
  source 1..75: mol_type = other DNA
gtctgctggggctactgaaatcacgaaagaagaatatttcgcccgcaaaaacggtacatactcaggttcacaaca

SEQ ID NO: 277806 - DNA, 75 bp, synthetic construct
  source 1..75: mol_type = other DNA
gaatttagcaagaccatcgatctggatactgctggcggagtcattgatcgtgacgtcattaaatggtggcttaag

SEQ ID NO: 277807 - DNA, 75 bp, synthetic construct
  source 1..75: mol_type = other DNA
catccaccaacagagcggggattcatctgatgatcgaccttgaaaccatgggaaaaaatcctgatgccccgatta

SEQ ID NO: 277808 - DNA, 75 bp, synthetic construct
  source 1..75: mol_type = other DNA
tcctgacggtggaaccatcgaatggtggctgaagcagtccagtgaagccagagctgccattttaacagaccaggt

SEQ ID NO: 277809 - DNA, 75 bp, synthetic construct
  source 1..75: mol_type = other DNA
cagtttcacgttggcacataccgacgcctggcgtcagcagggctatgaagacacgatgctggcgatggagcatat

SEQ ID NO: 277810 - DNA, 75 bp, synthetic construct
  source 1..75: mol_type = other DNA
acctggcgtcagcagggctatgaagacacgatgctggcgatggagcatatccggaaaccactggaggcgcgtcag

SEQ ID NO: 277811 - DNA, 75 bp, synthetic construct
  source 1..75: mol_type = other DNA
gcacaaccagagccggtaaaagttaccgctgacgaagtaaacaaaattatgcaggcagccaatatcagccagcct

SEQ ID NO: 277812 - DNA, 75 bp, synthetic construct
  source 1..75: mol_type = other DNA
caggtatggggcaatggtgcaactttcgacaacactattttacgaacctcgtacgaacgcctgaacatcccctac

SEQ ID NO: 277813 - DNA, 75 bp, synthetic construct
  source 1..75: mol_type = other DNA
cgacatgatgacctttgacggacacctcgcagaggcaattatccggactaaagaaattaacgccatgtatccgga

SEQ ID NO: 277814 - DNA, 75 bp, synthetic construct
  source 1..75: mol_type = other DNA
gacgtcaccttttcaggaacccccgacggagtgcagagcgaaatgctgtccattgaaagtggtatggatgcagcc

SEQ ID NO: 277815 - DNA, 75 bp, synthetic construct
  source 1..75: mol_type = other DNA
ttcgatgaagagaatcaggttgaagttcaggaaaatgatccggaggaaatggaaggcgctgaacatccacacaag

SEQ ID NO: 277816 - DNA, 75 bp, synthetic construct
  source 1..75: mol_type = other DNA
tctgcttacaaaagagtggatgaaggggaatcgtgtttcacgtatcacccgcacggcttccggtgcaaatgccgg

SEQ ID NO: 277817 - DNA, 75 bp, synthetic construct
  source 1..75: mol_type = other DNA
tagtaagactatcgatctggaaactgctggcggagtcattgatcgggacaccattaaatggtggcttaagcaatc

SEQ ID NO: 277818 - DNA, 75 bp, synthetic construct
  source 1..75: mol_type = other DNA
aagaaacattcgatggagagagcctggttgaagttcaggaaaatgctccggaggaaatggaaggcactgaagatc

SEQ ID NO: 277819 - DNA, 75 bp, synthetic construct
  source 1..75: mol_type = other DNA
tgacgaagtaaacaaaattatgcaggcagccaatatcagccagcctgacgccgataaattgcttgctgcatcaca

SEQ ID NO: 277820 - DNA, 75 bp, synthetic construct
  source 1..75: mol_type = other DNA
ctcagtcgcaggtgagttccgctaaccaagtaaaagtcaccgctgacgaagtaaacaaaattatgcaggcagcca

SEQ ID NO: 277821 - DNA, 75 bp, synthetic construct
  source 1..75: mol_type = other DNA
agaagccttactggcgtcagccgcgctgcccctgctgttccgtccccgcgagattcagggaacaatgtacggtga

SEQ ID NO: 277822 - DNA, 75 bp, synthetic construct
  source 1..75: mol_type = other DNA
ctgtagagcgtgagggaccgttctacttccttttcaccgataaggacggcgaaaaatacggtcgcgcaaacaaac

SEQ ID NO: 277823 - DNA, 75 bp, synthetic construct
  source 1..75: mol_type = other DNA
tgctgatcacttcgttgctaataaagcccaaaacttcgaagctgttgcacaatatcagttcgatttcggtctgcg

SEQ ID NO: 277824 - DNA, 75 bp, synthetic construct
  source 1..75: mol_type = other DNA
cgaaaaaattatccattgccatctcccgtggtgctgttgcgattgacgatgctggctacgatgaagatgacttca

SEQ ID NO: 277825 - DNA, 75 bp, synthetic construct
  source 1..75: mol_type = other DNA
agaaaatggaaggcgctgaacatccacacaaggagaatgctggcagcgatccgcatcgcgattgcagtgatgaaa

SEQ ID NO: 277826 - DNA, 75 bp, synthetic construct
  source 1..75: mol_type = other DNA
aacgattatgatgaagacgactttaaaaaacccgtccgtgtccatttacccgttgtgaatgacctgccccctgaa

SEQ ID NO: 277827 - DNA, 75 bp, synthetic construct
  source 1..75: mol_type = other DNA
agatgaaggaacaaatcagagcgcaactgatactctctcgtcgccagtaccagaaactgaaccgccccggaaatc

SEQ ID NO: 277828 - DNA, 75 bp, synthetic construct
  source 1..75: mol_type = other DNA
acgcgcaggaattactgcaagaagacgtggctacctttgacgggcatatcgttgaagcactgatgaaaacgcctg

SEQ ID NO: 277829 - DNA, 75 bp, synthetic construct
  source 1..75: mol_type = other DNA
ccattcctgacgaacaggcaataaaaaacgagggcgctgttgctgtggccacagccattgaagccggtgatgaac

SEQ ID NO: 277830 - DNA, 75 bp, synthetic construct
  source 1..75: mol_type = other DNA
tattccattcgaaggtgagcgccataatgcacttgatgacgcccgttaccaggcaaaatacgtttcagttatctg

SEQ ID NO: 277831 - DNA, 75 bp, synthetic construct
  source 1..75: mol_type = other DNA
tgtcccggtcgagactgaatccgatccgatgaacgtcacttttgacaacctggcccctgaagtacagaacgctgt

SEQ ID NO: 277832 - DNA, 75 bp, synthetic construct
  source 1..75: mol_type = other DNA
actgatactctctcgtcgccagtaccagaaactgaaccgccccggaaatcctggagactaaactccctgagaaag

SEQ ID NO: 277833 - DNA, 75 bp, synthetic construct
  source 1..75: mol_type = other DNA
tttgacaagctggcccctgaagtacagaacgctgtcatggttaagttcgacacatgtgaaaacatcaccgttgat

SEQ ID NO: 277834 - DNA, 75 bp, synthetic construct
  source 1..75: mol_type = other DNA
cacaaggagaacactgtcagcgatcagtatcacgccagcgataataaaactggcgaaacagcaaatcccttaatt

SEQ ID NO: 277835 - DNA, 75 bp, synthetic construct
  source 1..75: mol_type = other DNA
ggcagcctgagttcacagataaaacactctccaggaaacccggggcggttcaaactgatgcagtggaaacggcaa

SEQ ID NO: 277836 - DNA, 75 bp, synthetic construct
  source 1..75: mol_type = other DNA
agataccgcagaagattcagaacaaccagagccggtaaaagttaccgctgacgaagtaaacaaaattatgcaggc

SEQ ID NO: 277837 - DNA, 75 bp, synthetic construct
  source 1..75: mol_type = other DNA
gttactacaacgatcgcgatgtacgcacaatcgttgagctggggaaagccatagacttcgatgccagaacggcta

SEQ ID NO: 277838 - DNA, 75 bp, synthetic construct
  source 1..75: mol_type = other DNA
tacgctctctggcctggtgatgtggatgccggaaacattgacggcagcatccatcgctgggcaaaaaatgaagtt

SEQ ID NO: 277839 - DNA, 75 bp, synthetic construct
  source 1..75: mol_type = other DNA
ccattccggacgaacaggcaataaaggaagaaggtgcagtcgctgtagccactgccattgaagccggtgatgaat

SEQ ID NO: 277840 - DNA, 75 bp, synthetic construct
  source 1..75: mol_type = other DNA
cccggcataccccgccctgccctcgattcctgggatgctgaatatatgcaggaaaaccgctgggatgaggagtct

SEQ ID NO: 277841 - DNA, 75 bp, synthetic construct
  source 1..75: mol_type = other DNA
attatgccatgacggtccattattaccggttgcgggattacgccctgcagcatccggaatgcagcgccattatgc

SEQ ID NO: 277842 - DNA, 75 bp, synthetic construct
  source 1..75: mol_type = other DNA
cccggacgtgcaggagcactgcttacgacacttcttcgccatatatcgataatcaacggcttcgacaatccgatg

SEQ ID NO: 277843 - DNA, 75 bp, synthetic construct
  source 1..75: mol_type = other DNA
gaaggcgctgaacatccgcacaatgagaatgctggcagcgctcaggaccacgccagcgatagtgaaactggcgag

SEQ ID NO: 277844 - DNA, 75 bp, synthetic construct
  source 1..75: mol_type = other DNA
cctgcggccagactggcggggataactgccctgactgtggtgcggtgatgggcgacgcaacataccaagaaatat

SEQ ID NO: 277845 - DNA, 75 bp, synthetic construct
  source 1..75: mol_type = other DNA
gcaggatttgacgaagaggattttaaaaaacctgttcgcgtccatttacccgttgtgaatgaccttcctccggaa

SEQ ID NO: 277846 - DNA, 75 bp, synthetic construct
  source 1..75: mol_type = other DNA
ctgtcactgttgccattcgccgcgaatacaaacagacatggaaaacactcgacaatgaactgcctgcgccctctg

SEQ ID NO: 277847 - DNA, 75 bp, synthetic construct
  source 1..75: mol_type = other DNA
cggtcattgctgccattcatcgcgaatacaagcagacatggaaaacactggatgacgaactggcctatgggcgct

SEQ ID NO: 277848 - DNA, 75 bp, synthetic construct
  source 1..75: mol_type = other DNA
gatccggaggaaatggaaggcactgcgcatcagcacaaggagaacactggcggcaatcagcatcatgccagcgat

SEQ ID NO: 277849 - DNA, 75 bp, synthetic construct
  source 1..75: mol_type = other DNA
gccccgcggacagcagaaagaggctctgcttgcgtcagccgcgctgcccctgttgttccgtccccgtgaggttca

SEQ ID NO: 277850 - DNA, 75 bp, synthetic construct
  source 1..75: mol_type = other DNA
cataacgctctgaacgatgcacgttaccaggcgaaatacgtttcagccatctggcaaaaactgctcccgagtcag

SEQ ID NO: 277851 - DNA, 75 bp, synthetic construct
  source 1..75: mol_type = other DNA
tatatgcaggaaaaccgctgggatgaggaatccgcttcctttattccggtcgaaccagaatccgatccgatgaac

SEQ ID NO: 277852 - DNA, 75 bp, synthetic construct
  source 1..75: mol_type = other DNA
atgggtttcagctttacggtaatgtatctgagcgcagcggtagcgtttattgtttgcggtgtgatggtgtggctg

SEQ ID NO: 277853 - DNA, 75 bp, synthetic construct
  source 1..75: mol_type = other DNA
ctattcctgacgaacaggccatagaagaagatagcgctgttgcggtggccactgccattgaagccggtgataagc

SEQ ID NO: 277854 - DNA, 75 bp, synthetic construct
  source 1..75: mol_type = other DNA
aacgaccagaaagcggaacaaagcagcccaaatgcgcaacaaaacgagccagaaacgaaacaatccgaaccagta

SEQ ID NO: 277855 - DNA, 75 bp, synthetic construct
  source 1..75: mol_type = other DNA
aattaacgctatgtatccggaacgcaaactgttcgctatcggatgggttaaacacaaatgtaagccgggtaccaa

SEQ ID NO: 277856 - DNA, 75 bp, synthetic construct
  source 1..75: mol_type = other DNA
gatcgacattcacaaagatcccgtggcactgaacaaatacatcactgaatacctggcgacaaagggcgtgtttga

SEQ ID NO: 277857 - DNA, 75 bp, synthetic construct
  source 1..75: mol_type = other DNA
tggcggcaatcagcatcacaatagcgataatgaaactggcgagacggcagatcactcaattaaggtgaacggtca

SEQ ID NO: 277858 - DNA, 75 bp, synthetic construct
  source 1..75: mol_type = other DNA
cattgacggtaccatccatcgctgggcgacaaatgaggttatcgacaaggatcgcgaagactggaaacgtatctc

SEQ ID NO: 277859 - DNA, 75 bp, synthetic construct
  source 1..75: mol_type = other DNA
cgtggcgacattcgacgggcatatcgttgaagcactgatgaaaacaccagaaattaacgctatgtatccggaacg

SEQ ID NO: 277860 - DNA, 75 bp, synthetic construct
  source 1..75: mol_type = other DNA
cccgtggcgttactacaacgatcgcgatgtacgcacaatcgttgagctggggaaagccatagacttcgatgccag

SEQ ID NO: 277861 - DNA, 75 bp, synthetic construct
  source 1..75: mol_type = other DNA
ctgttacaattgcgagaatttatcgacgaaaactccggtgaattttttgttcaggtttggggaaatggagccaac

SEQ ID NO: 277862 - DNA, 75 bp, synthetic construct
  source 1..75: mol_type = other DNA
agagccgataaaagttaccgctgacgaagtaaacaaaattatgcaggcagccaatatcagccagcctgacgccga

SEQ ID NO: 277863 - DNA, 75 bp, synthetic construct
  source 1..75: mol_type = other DNA
gatccgatgaacgtcacttttgacaagctggcccctgaagtacagaacgctgtcatggttaagttcgacacatgt

SEQ ID NO: 277864 - DNA, 75 bp, synthetic construct
  source 1..75: mol_type = other DNA
gaaaacgctgctgaaaaaaacggagctgtcactgttgccgttcgccgcgaatacaaacagacatggaaaactctc

SEQ ID NO: 277865 - DNA, 75 bp, synthetic construct
  source 1..75: mol_type = other DNA
cgctctgaacgatgcacgttaccaggcgaaatacgtttcagccatctggcaaaaactgctcccgagtcaggctga

SEQ ID NO: 277866 - DNA, 75 bp, synthetic construct
  source 1..75: mol_type = other DNA
gtccgccgctggcttatgccctggcgatggggttcagctttacggtgatgtatctcagcgcagcagtggcgttta

SEQ ID NO: 277867 - DNA, 75 bp, synthetic construct
  source 1..75: mol_type = other DNA
aatgggtttcagttttacagtgatgtacctcagcgctgcggtggcgtttattgtttgcggcttaatggtgtggtt

SEQ ID NO: 277868 - DNA, 75 bp, synthetic construct
  source 1..75: mol_type = other DNA
gagcgccataatgcacttgatgacgcccgttatcaggcaaaatacgtttcagctatctggcaaaaactgatcccg

SEQ ID NO: 277869 - DNA, 75 bp, synthetic construct
  source 1..75: mol_type = other DNA
tattatcaacgaactgcatcttcccgagaaactggcaggtgtgatgatggggaccgccgccgggctggaaatccc

SEQ ID NO: 277870 - DNA, 75 bp, synthetic construct
  source 1..75: mol_type = other DNA
tattatcaacgaattgcatcttcccgagaaactggcgggcgtgatgatgggaaccgccgcaggcctggaaatccc

SEQ ID NO: 277871 - DNA, 75 bp, synthetic construct
  source 1..75: mol_type = other DNA
tgcccggtcaggcaggttcagcaaccacgctctataccaatacatcacgcgtgggctggatcatcgccggttccg

SEQ ID NO: 277872 - DNA, 75 bp, synthetic construct
  source 1..75: mol_type = other DNA
gtcgaaccatctgtagagcgtgaggggccgttctacttcctctttaccgacaaggatggcgaaaaatacggtcgc

SEQ ID NO: 277873 - DNA, 75 bp, synthetic construct
  source 1..75: mol_type = other DNA
tgccagaactgctatcccattcgaaggtgagcgccacaatgcgctggatgacgctcgttaccaggcaaaatacgt

SEQ ID NO: 277874 - DNA, 75 bp, synthetic construct
  source 1..75: mol_type = other DNA
tctattctgtacatcaaccctacttgagggagtcaatttacctgcaagatccgtatttattcttacgcataaaaa

SEQ ID NO: 277875 - DNA, 75 bp, synthetic construct
  source 1..75: mol_type = other DNA
gcacaatcgttgagctggggaaagccatagacttcgatgccagaacggctattccattcgaaggtgagcgccata

SEQ ID NO: 277876 - DNA, 75 bp, synthetic construct
  source 1..75: mol_type = other DNA
ttatgaccgatgaaatcccgttagatgatgcactgttacaattgcgagaatttatcgacgaaaactccggtgaat

SEQ ID NO: 277877 - DNA, 75 bp, synthetic construct
  source 1..75: mol_type = other DNA
gctgggatgaggaatccgcttcctttattccggtcgaaccagaatccgatccgatgaacgtcaattttgacaagc

SEQ ID NO: 277878 - DNA, 75 bp, synthetic construct
  source 1..75: mol_type = other DNA
cctgtacgggtgcgtgaactggcggaaaaagcgcaactgccgacgaccatgactttgatggcgttgggtatgttg

SEQ ID NO: 277879 - DNA, 75 bp, synthetic construct
  source 1..75: mol_type = other DNA
atgcgattatcaccaccgacgtgggtcagcatcagatgtggaccgcgcaagcctatccgctcaatcgcccacgcc

SEQ ID NO: 277880 - DNA, 75 bp, synthetic construct
  source 1..75: mol_type = other DNA
tcaccaaacacaactatctggtcagacatatcgaagaactcccgcaggtcatgagcgatgccttccgcattgcgc

SEQ ID NO: 277881 - DNA, 75 bp, synthetic construct
  source 1..75: mol_type = other DNA
gggcgcagccagggatatggcgcgatgtcgctttctgacatggcggaatgcgtgctgcaacgggcaccgaataaa

SEQ ID NO: 277882 - DNA, 75 bp, synthetic construct
  source 1..75: mol_type = other DNA
gtttattgagactgtgcgggccgagcactaccccactggcagcgctcagtacaagccatcttcgtggctgctggg

SEQ ID NO: 277883 - DNA, 75 bp, synthetic construct
  source 1..75: mol_type = other DNA
gcaaccgcatgtggcgatacaggcggatgtcgatgacgtgctggcgcaactgatcccgcaggtggaagcccagcc

SEQ ID NO: 277884 - DNA, 75 bp, synthetic construct
  source 1..75: mol_type = other DNA
tgtgcattgccccggcgatgctgcctaaaattttcgatttcccgctgcgtttgaccattggcacagatatcgata

SEQ ID NO: 277885 - DNA, 75 bp, synthetic construct
  source 1..75: mol_type = other DNA
tgtgtattgctccagcaatgttgccgaaaatctttgatttccccctgcgcctgaccattggtacagatattgata

SEQ ID NO: 277886 - DNA, 75 bp, synthetic construct
  source 1..75: mol_type = other DNA
catttaactggggaggcaatggctgaatcacgtaatgtgctgattgaagcggcgcgcattgctcgtggtgagatc

SEQ ID NO: 277887 - DNA, 75 bp, synthetic construct
  source 1..75: mol_type = other DNA
tcgaagcaactgttggtgactatgttgccagccatcagcgagaagtttcggggcggattatccatcttcatgcct

SEQ ID NO: 277888 - DNA, 75 bp, synthetic construct
  source 1..75: mol_type = other DNA
ccatcatcgaacgtgatggcaaaattttactcgcgcaacgccctgcccagagcgatcaggcgggattatgggagt

SEQ ID NO: 277889 - DNA, 75 bp, synthetic construct
  source 1..75: mol_type = other DNA
cgtcctctggctcaggccgatgctgccgaactggatgcgttgattgtgccgggtggttttggcgcggcgaagaat

SEQ ID NO: 277890 - DNA, 75 bp, synthetic construct
  source 1..75: mol_type = other DNA
gctggatgaactctggcctcacagcaaatcatatatcttcgccaaagcggctcatgcgccgtttatttctcatcc

SEQ ID NO: 277891 - DNA, 75 bp, synthetic construct
  source 1..75: mol_type = other DNA
caactgccctgattgtggcgcggtgatgggtgacgcaacataccaggaaacattcgatgaagagaatcaggttga

SEQ ID NO: 277892 - DNA, 75 bp, synthetic construct
  source 1..75: mol_type = other DNA
gccccgccctgccatcgactcctgggataccgaatatatgctggaaaaccgctgggatgaggaaggcgcttcctt

SEQ ID NO: 277893 - DNA, 75 bp, synthetic construct
  source 1..75: mol_type = other DNA
gatgacgcccgttaccaggcaaaatacgtttcagcaatctggcaaaaactgatcccgaatccggttgatttttaa

SEQ ID NO: 277894 - DNA, 75 bp, synthetic construct
  source 1..75: mol_type = other DNA
cactgttacaattgcgggaatttatcgacgaaaactccggcgaattttttgttcaggtctggggaaatggagcca

SEQ ID NO: 277895 - DNA, 75 bp, synthetic construct
  source 1..75: mol_type = other DNA
ccagaaagcggaacaaaacagcccggatgcgcaacaaaacgggccagaagtgcaacagtcagagccaacagcaca

SEQ ID NO: 277896 - DNA, 75 bp, synthetic construct
  source 1..75: mol_type = other DNA
cgccagagtcaaccggcaaggcactgaaaactctgcaggaaaaactgactccgtaactgctgtcattcatcgcga

SEQ ID NO: 277897 - DNA, 75 bp, synthetic construct
  source 1..75: mol_type = other DNA
actctggctatatctgagaaccagagcgaagaaaaagaaagtccagcaggttgttaagcagataaaagaaagctg

SEQ ID NO: 277898 - DNA, 75 bp, synthetic construct
  source 1..75: mol_type = other DNA
gggcgcagtcagggatttggtgcgatgtcgcttgctgacatggctgatgtcgtgctgcaacaggcaccggataaa

SEQ ID NO: 277899 - DNA, 75 bp, synthetic construct
  source 1..75: mol_type = other DNA
gcggctcatgcgccgtttatttcgcatccggtcgagtttcgtcacgtgctggtggcgttgaagcagagggtgtag

SEQ ID NO: 277900 - DNA, 75 bp, synthetic construct
  source 1..75: mol_type = other DNA
gacgccgataagttgcttgctgcatcacgtggtgaatttgttgaagggattagcgacccgaatgatccgaaatgg

SEQ ID NO: 277901 - DNA, 75 bp, synthetic construct
  source 1..75: mol_type = other DNA
agcgtatccgtgaaacccgtgccaaatacccgaatctgcaaatcattggcggcaacgtggcaacagctgcaggtg

SEQ ID NO: 277902 - DNA, 75 bp, synthetic construct
  source 1..75: mol_type = other DNA
gcaggtgcgggtaacgaagagcgtgttgacgcgctggttgccgcaggcgttgacgttctgctgatcgactcctcc

SEQ ID NO: 277903 - DNA, 75 bp, synthetic construct
  source 1..75: mol_type = other DNA
ttgttagctatttcacgcagcggtgcgcaggcggtctgctttgcaccggataagcagcaggttgatgttatcaac

SEQ ID NO: 277904 - DNA, 75 bp, synthetic construct
  source 1..75: mol_type = other DNA
gaaactgaatgcagaaaacacctttgaagtgattgctcgcgagtggcatcagtctaaagcagatcgctggtccct

SEQ ID NO: 277905 - DNA, 75 bp, synthetic construct
  source 1..75: mol_type = other DNA
caaaaacaccacccatttttatctgccgaagagttgccttattttattcaagatcttgaagcatacaccggaagc

SEQ ID NO: 277906 - DNA, 75 bp, synthetic construct
  source 1..75: mol_type = other DNA
tttgggaaatttctgctgagagaatgaaaatgcgtaggccgcaccttgtacctttatcgactcaggccttagacc

SEQ ID NO: 277907 - DNA, 75 bp, synthetic construct
  source 1..75: mol_type = other DNA
ctgaagctgctaaagctgcaggtgctgaactggtaggtatggaagatctggccgaccagatcaagaaaggcgaaa

SEQ ID NO: 277908 - DNA, 75 bp, synthetic construct
  source 1..75: mol_type = other DNA
ctcgcgcgctggcagaagcaggttgcagcgcggttaaagtcggtatcggtcctggctctatttgtacgactcgta

SEQ ID NO: 277909 - DNA, 75 bp, synthetic construct
  source 1..75: mol_type = other DNA
ccatgctcagtatctcgatggccgccgtgaaatgatgcaatggtacgctgactacatagattcactatctgagca

SEQ ID NO: 277910 - DNA, 75 bp, synthetic construct
  source 1..75: mol_type = other DNA
gaaatgcaacttgcccacgttgataagaacagcattcgcggtgtatacaatcatgcacaatatcttaatggtcga

SEQ ID NO: 277911 - DNA, 75 bp, synthetic construct
  source 1..75: mol_type = other DNA
ttattggtaaacgaccaatatctgaaattaaaccgctagagttgcttgaagtacttaagcgtatagaaaaacgtg

SEQ ID NO: 277912 - DNA, 75 bp, synthetic construct
  source 1..75: mol_type = other DNA
gccgcgctgaatacaacccggcacctgatttagctatagcgttagccgctccaaagcaaaaacatcatccttttc

SEQ ID NO: 277913 - DNA, 75 bp, synthetic construct
  source 1..75: mol_type = other DNA
tatttaagcaacttgaaccaatctcaaaacattatcctctggtctttatcggtaggaatgatccccgcaagccaa

SEQ ID NO: 277914 - DNA, 75 bp, synthetic construct
  source 1..75: mol_type = other DNA
aaaccgtaaaaccaaaagacaagccctataagcttgctgatggcagcggtatgtatctactgattaacactaatg

SEQ ID NO: 277915 - DNA, 75 bp, synthetic construct
  source 1..75: mol_type = other DNA
cttgccagtgctttagctacaccgaaaaaagtacattttccctttcttactgcggtaatgactccaacttattga

SEQ ID NO: 277916 - DNA, 75 bp, synthetic construct
  source 1..75: mol_type = other DNA
gcggcctgatgccaaacccgaaagtgggtactgtaacaccgaacgttgctgaagcggttaaaaacgctaaagctg

SEQ ID NO: 277917 - DNA, 75 bp, synthetic construct
  source 1..75: mol_type = other DNA
cgtggtaactgatccgcagaccgtactgccaaccacgacgctgcgtgaagtgaaagaactgaccgagcgtaacgg

SEQ ID NO: 277918 - DNA, 75 bp, synthetic construct
  source 1..75: mol_type = other DNA
tttctctggcgatatcgcgaaagctatcgctgctggtgcaagcgcggtgatggtaggctccatgctggcaggtac

SEQ ID NO: 277919 - DNA, 75 bp, synthetic construct
  source 1..75: mol_type = other DNA
aaatgcaacttatcgcccgcgagttaggccattcggaaacggcttttctgctgcgcagtgacgacagcgatgtac

SEQ ID NO: 277920 - DNA, 75 bp, synthetic construct
  source 1..75: mol_type = other DNA
cgatttttttgggttcaaaacagataacctgctgtcatctcttgagtataaatttgttaataattatttggtttg

SEQ ID NO: 277921 - DNA, 75 bp, synthetic construct
  source 1..75: mol_type = other DNA
gcggcattgacccacgcgaaatcctcgacgtccaggcacgtattgtgatgagcgatgccgaacgtaccgacgatg

SEQ ID NO: 277922 - DNA, 75 bp, synthetic construct
  source 1..75: mol_type = other DNA
cgtggtaactgacccgcagactgttttgccaaccacgacgctgcgcgaagtgaaagaactgactgaacgtaacgg

SEQ ID NO: 277923 - DNA, 75 bp, synthetic construct
  source 1..75: mol_type = other DNA
gaacaggcgggagatgcttatgcactgatggcaagcggcaaatgcgggaaagttgtgattaatttcccggattaa

SEQ ID NO: 277924 - DNA, 75 bp, synthetic construct
  source 1..75: mol_type = other DNA
tgctggcggaagaaaaagatctgatcctcctgccggatgcactgagttacgaagatggtgcgtttatcagttgcg

SEQ ID NO: 277925 - DNA, 75 bp, synthetic construct
  source 1..75: mol_type = other DNA
aactgaaagaaaacctggaagctctgttggttgcgctgaaaaaagcaaaacctactcaggcgaaaggcgtgtaca

SEQ ID NO: 277926 - DNA, 75 bp, synthetic construct
  source 1..75: mol_type = other DNA
ttactgaagacgatattctgccgggtttgccgatccaggtcgcgacgaccgggcattctaaagtgatgatcccat

SEQ ID NO: 277927 - DNA, 75 bp, synthetic construct
  source 1..75: mol_type = other DNA
aaccattccccactggtatcgcatgatcaaccgcctgatgtggatctggcgtggtgttgacccacgtgaaatcct

SEQ ID NO: 277928 - DNA, 75 bp, synthetic construct
  source 1..75: mol_type = other DNA
tggcggaagaaaaagatctgatcctcctgccagacgcgctgagttacgaagatggcgcgtttatcagttgcggtg

SEQ ID NO: 277929 - DNA, 75 bp, synthetic construct
  source 1..75: mol_type = other DNA
ctgtctgtcatgggctgttaatcattaccgtggtaacgccattacctataaagaacagcgcgataaagccacgta

SEQ ID NO: 277930 - DNA, 75 bp, synthetic construct
  source 1..75: mol_type = other DNA
ctgcctgtcatgggctgttaatcattaccgtgataatgcaatcgcctacaaagagcagcgcgataaagccacatc

SEQ ID NO: 277931 - DNA, 75 bp, synthetic construct
  source 1..75: mol_type = other DNA
ccctgtgcagcgccggaaatgggtatatctaaagtttttatgccgtgggattgtacatggtgtaaaaggaatcag

SEQ ID NO: 277932 - DNA, 75 bp, synthetic construct
  source 1..75: mol_type = other DNA
ggttgatgacaatgcagaagcagctggaaggggcgcaggaatatatccgcgctcagtgcattaagccgacttttt

SEQ ID NO: 277933 - DNA, 75 bp, synthetic construct
  source 1..75: mol_type = other DNA
cggcattatttcaccctcagagaccggctgataacgatgcagaagcaactggaaggggcgcaggaatatatccgc

SEQ ID NO: 277934 - DNA, 75 bp, synthetic construct
  source 1..75: mol_type = other DNA
aaggatacagagataaacttggaaataacaacttaacgaatgtaatcacaataatgtctaaatatagacaagata

SEQ ID NO: 277935 - DNA, 75 bp, synthetic construct
  source 1..75: mol_type = other DNA
ataaagtgtaaaataaaaaatattaaagctcaggattcaaagttaaacggtgttatttttgaaggctgctattta

SEQ ID NO: 277936 - DNA, 75 bp, synthetic construct
  source 1..75: mol_type = other DNA
catgcattattgataagcagctagatatttatttgaatggcgataattgttgtaaaataggagatggttgcgtta

SEQ ID NO: 277937 - DNA, 75 bp, synthetic construct
  source 1..75: mol_type = other DNA
gttgaacgggattatttcactctcagagagcggttgatgctgatgcagaagcagctggaaggggcacaggactat

SEQ ID NO: 277938 - DNA, 75 bp, synthetic construct
  source 1..75: mol_type = other DNA
caatgcagaagcagctggaaggggcgcaggactatatccgcactcagtgtactaagcaggctttttattatccgg

SEQ ID NO: 277939 - DNA, 75 bp, synthetic construct
  source 1..75: mol_type = other DNA
gctaacgcgactatcgaaagtctccgtgctgatgtttcttctgggcgtaagcgcctgcaagtcgccgccacctgt

SEQ ID NO: 277940 - DNA, 75 bp, synthetic construct
  source 1..75: mol_type = other DNA
atgaagttgagctataagctggttatcgctgttttcttcgtttctgtcgttggttcttttatctgttcagtgaat

SEQ ID NO: 277941 - DNA, 75 bp, synthetic construct
  source 1..75: mol_type = other DNA
aatcatcaatctcagttatacattcaacaaaagactggcaggaagctatcaatttctcgatggcatcactgttag

SEQ ID NO: 277942 - DNA, 75 bp, synthetic construct
  source 1..75: mol_type = other DNA
atggagaaagcccaagacttacagcagatgctgaactcaattattaccgtctccgaagtggaatcgacaagataa

SEQ ID NO: 277943 - DNA, 75 bp, synthetic construct
  source 1..75: mol_type = other DNA
caacgtgatgtagcagaactcgacgccagatatacaaaggagcttgctgatgctaacgcgactatcgaaagtctc

SEQ ID NO: 277944 - DNA, 75 bp, synthetic construct
  source 1..75: mol_type = other DNA
atgaaacttcgctataagctggttatttctgctttcctcctgactttattcggttctctcgtctggtcagctaat

SEQ ID NO: 277945 - DNA, 75 bp, synthetic construct
  source 1..75: mol_type = other DNA
atgcggcttagtgattattttccagagtcatcaatctcagttatacattcagcaaaagattggcaggaagctatc

SEQ ID NO: 277946 - DNA, 75 bp, synthetic construct
  source 1..75: mol_type = other DNA
cctgcaagtctccgccacctgttcaaagtcagcgtccggaaccagcggcatgggcgatggagaaagcccaagact

SEQ ID NO: 277947 - DNA, 75 bp, synthetic construct
  source 1..75: mol_type = other DNA
tcgcaccaggcgtggcaatgcctcatgctcgaccggaatgtggggcgcttaaaaccgggatgtctttaacgttac

SEQ ID NO: 277948 - DNA, 75 bp, synthetic construct
  source 1..75: mol_type = other DNA
tcaggcgttaagtgaattactgtgcgaagaagaaatactcgaacaactcttaacagcatcatcagaaaaacaatt

SEQ ID NO: 277949 - DNA, 75 bp, synthetic construct
  source 1..75: mol_type = other DNA
aatcatcaatctcagtgatacatgcagctaaagactggcaggaggctattgatttttcgatggcatcattattaa

SEQ ID NO: 277950 - DNA, 75 bp, synthetic construct
  source 1..75: mol_type = other DNA
tattgtggaaaataaattttttacatctaatcagattatatccggggcaccggcaaacatcatatcttctggagt

SEQ ID NO: 277951 - DNA, 75 bp, synthetic construct
  source 1..75: mol_type = other DNA
ccgaaagcgagcaagcgttgcaatgctggtggcaacaaaatggtggcgatcggcaattaattcacagcgaacatg

SEQ ID NO: 277952 - DNA, 75 bp, synthetic construct
  source 1..75: mol_type = other DNA
aaccagaccgcttgttgatagagccaaccgggctgggccatccgaaacagatcctcgatctgttaaccgcaccag

SEQ ID NO: 277953 - DNA, 75 bp, synthetic construct
  source 1..75: mol_type = other DNA
gttttctcggcagcgggaaaaccacgtcgattcttcatctgttagcccataaagatcccaacgaaaaatgggcgg

SEQ ID NO: 277954 - DNA, 75 bp, synthetic construct
  source 1..75: mol_type = other DNA
atgaaaaacaccgaactggaacaactgattaacgagaaactgaacagcgcggcgataagtgattacgcgccgaat

SEQ ID NO: 277955 - DNA, 75 bp, synthetic construct
  source 1..75: mol_type = other DNA
cattcagcccgcgagcagggattgcatttttatgctgcaggtcaccatgccactgaacgtggtggtattcgcgca

SEQ ID NO: 277956 - DNA, 75 bp, synthetic construct
  source 1..75: mol_type = other DNA
cgcgtcgagctgatttccagcagcgaaactgactggaatgccttacagagcgcgctgttgaagcttcgtttagtg

SEQ ID NO: 277957 - DNA, 75 bp, synthetic construct
  source 1..75: mol_type = other DNA
tgccggaaacattgacggcagcatccatcgctgggcaaaaaatgaagttatcgacaacgaccgcgaagactggaa

SEQ ID NO: 277958 - DNA, 75 bp, synthetic construct
  source 1..75: mol_type = other DNA
ggcaacattcgacggacatatcgttgaagcgttgatgaaaatgccagaagttaacgccatgtatccggagcttaa

SEQ ID NO: 277959 - DNA, 75 bp, synthetic construct
  source 1..75: mol_type = other DNA
acaaccagagccggtaaaagttaccgctgacgaagtaaacaaaattatgcaggcagccaatatcagccagcctga

SEQ ID NO: 277960 - DNA, 75 bp, synthetic construct
  source 1..75: mol_type = other DNA
gccagactatttttggccttgtccgtgaacgtccgatcgacattcacaaagatcctgtggcactgaacaaataca

SEQ ID NO: 277961 - DNA, 75 bp, synthetic construct
  source 1..75: mol_type = other DNA
aaggcgctgaacatccgaacaatgagaatgctggtaacgatcagcatcacaccagcgatagtgaaactagcgagg

SEQ ID NO: 277962 - DNA, 75 bp, synthetic construct
  source 1..75: mol_type = other DNA
gctgccattcgtcgcgaatacaggcatacatggaaaacactggatgaagagctggcttacgctctctggcctggt

SEQ ID NO: 277963 - DNA, 75 bp, synthetic construct
  source 1..75: mol_type = other DNA
cggtcattgtgcatcatggctacttctggaaaggcgaatccccggtaattcgcggcatgaagcgtaaccgtttaa

SEQ ID NO: 277964 - DNA, 75 bp, synthetic construct
  source 1..75: mol_type = other DNA
atggtaaacgacagtaaagccgaggatctggaagcaaaagggctgtaccgacgcgccgcagcgcgatggatggaa

SEQ ID NO: 277965 - DNA, 75 bp, synthetic construct
  source 1..75: mol_type = other DNA
gcaccgcacatctcggttggaagaaccgtgtggttgaccataaagataactacatacaagttcagtggttcccaa

SEQ ID NO: 277966 - DNA, 75 bp, synthetic construct
  source 1..75: mol_type = other DNA
cgtgccagcatcgactgtcaccacccttatgcgtttatttcttttcatcacagtgccttcggcaacccttacacc

SEQ ID NO: 277967 - DNA, 75 bp, synthetic construct
  source 1..75: mol_type = other DNA
atgaaaaaactatgtatgatttatgggaattgccagcatacacatctacaaaattttcttgaacaaactgatttt

SEQ ID NO: 277968 - DNA, 75 bp, synthetic construct
  source 1..75: mol_type = other DNA
ggacaataacggctttttgcggcggacgccggcggggggggtttcgccacaatgtgcaaccgctggcaacgtcaa

SEQ ID NO: 277969 - DNA, 75 bp, synthetic construct
  source 1..75: mol_type = other DNA
gaaaacaacgatgatggtgggcaaacacccgatgccggaaaaccgctgctatttttatcaggatctgatgttacc

SEQ ID NO: 277970 - DNA, 75 bp, synthetic construct
  source 1..75: mol_type = other DNA
ccagctttctcagccagtttaaggtaaaacatcgcccggacggattactgacgctgcctgacggtaacgttattg

SEQ ID NO: 277971 - DNA, 75 bp, synthetic construct
  source 1..75: mol_type = other DNA
ggggcaacatatcacgcttgaagaaaagcaccgcaacgtttttcgcatccatacgctggatgaactgaaaaacct

SEQ ID NO: 277972 - DNA, 75 bp, synthetic construct
  source 1..75: mol_type = other DNA
atttcaccagcagaatcatgtcggtgctggcggatggggtgctggtctgcggcattgtggtattgctgtggccgg

SEQ ID NO: 277973 - DNA, 75 bp, synthetic construct
  source 1..75: mol_type = other DNA
ctttgcaatatccgctggctcctgctgatattccacttttacaggcgtttatggctttacgcgccgccagaccag

SEQ ID NO: 277974 - DNA, 75 bp, synthetic construct
  source 1..75: mol_type = other DNA
acttattctggagaagaaaggcacttcgggatggattaacggcgaccgggccacctttctcagccagtatcaggt

SEQ ID NO: 277975 - DNA, 75 bp, synthetic construct
  source 1..75: mol_type = other DNA
aaaatcaccggctggacactggagcaccatcttgataatcaggccgccaggcttattctggagaagaaaggtgct

SEQ ID NO: 277976 - DNA, 75 bp, synthetic construct
  source 1..75: mol_type = other DNA
tgacaacggcttccaggtcgtgcatatgggctacggtgttgatgaaaaagtgcaggtgccgcaaaaactgtatga

SEQ ID NO: 277977 - DNA, 75 bp, synthetic construct
  source 1..75: mol_type = other DNA
aggcacgcgcccgttaccgccgctgcggatgccctttcgcgatgtgattgaccgtgttgagcaggtattagtatc

SEQ ID NO: 277978 - DNA, 75 bp, synthetic construct
  source 1..75: mol_type = other DNA
ttgatagctttggcgtaggcacaatgaaagatgtcacgctggtgcgtccacaggatgccggggcgaatacctgtg

SEQ ID NO: 277979 - DNA, 75 bp, synthetic construct
  source 1..75: mol_type = other DNA
gtcacattctttgtgagttaccgcatttacaactgccaatgctggagaagttagggcttattaatgctctgggct

SEQ ID NO: 277980 - DNA, 75 bp, synthetic construct
  source 1..75: mol_type = other DNA
ggtcacgcagaagacgtcgcacgttatgccgaacgtttgcaggtcgttgaccgtaatcttgcccggcttgttgag

SEQ ID NO: 277981 - DNA, 75 bp, synthetic construct
  source 1..75: mol_type = other DNA
atgggctacggtgttgatgaaaaagtgcaggtgccgcaaaaactgtatgaagcgggcgtgccaaccgtgctggtg

SEQ ID NO: 277982 - DNA, 75 bp, synthetic construct
  source 1..75: mol_type = other DNA
tgctcaagaaaatggcagtgaacaatatgttgaatatttggttgccagaatacgcaccatgctctcagatacaag

SEQ ID NO: 277983 - DNA, 75 bp, synthetic construct
  source 1..75: mol_type = other DNA
agccattcagccgtcttgatgtagctctgcgcgagaattttcgccagtgggtatttagcgaagttcgcgccctgg

SEQ ID NO: 277984 - DNA, 75 bp, synthetic construct
  source 1..75: mol_type = other DNA
cgaattattacctgtaaagagggaatgtattacctggcgaaaatcggtcattacctcctgcatgacactatgact

SEQ ID NO: 277985 - DNA, 75 bp, synthetic construct
  source 1..75: mol_type = other DNA
agaatggggtaaattataccctaatggtttttatattaagcatgacgattccaaagctattacagagaagaaaga

SEQ ID NO: 277986 - DNA, 75 bp, synthetic construct
  source 1..75: mol_type = other DNA
caaagtatttttccaggactataccagagcgtatttcaattgaagaaattgatgaaataaaatttatccagaatc

SEQ ID NO: 277987 - DNA, 75 bp, synthetic construct
  source 1..75: mol_type = other DNA
atgaaaaaaaaagaaaagtttgattttctgaatgcaataaaagcagggcactctggcgtaataactggtaatcct

SEQ ID NO: 277988 - DNA, 75 bp, synthetic construct
  source 1..75: mol_type = other DNA
agcaaagaagggcgctttattggcatcaatgcgccgcgttctggcgcttatgacaacggtttccaggtcgtgcat

SEQ ID NO: 277989 - DNA, 75 bp, synthetic construct
  source 1..75: mol_type = other DNA
gcacgttcgcccatcgtttcagtaactgggtattcaggaatgtgataccgggtatcagaaaaacgggggcttatg

SEQ ID NO: 277990 - DNA, 75 bp, synthetic construct
  source 1..75: mol_type = other DNA
cagttaagtgccagtcagaaggggagggcgctacaggcatgtaagcgcaaaaacgtgaactggaggaagaagaaa

SEQ ID NO: 277991 - DNA, 75 bp, synthetic construct
  source 1..75: mol_type = other DNA
gcaagggtgacgcacgtcatgtaaaaaaattctgtgattttcgtgatctggtcgttctgcgctttgatagtgtga

SEQ ID NO: 277992 - DNA, 75 bp, synthetic construct
  source 1..75: mol_type = other DNA
gtactggtgattcaggaggtgacgccacgcctggtactgcgttccggtaatgccgttgtgggtctggaaaatagc

SEQ ID NO: 277993 - DNA, 75 bp, synthetic construct
  source 1..75: mol_type = other DNA
cggtgacgtactgggtaaataccatccgcacggcgatagcgcctgttatgaagcgatggtcctgatggcgcaacc

SEQ ID NO: 277994 - DNA, 75 bp, synthetic construct
  source 1..75: mol_type = other DNA
ggtatcagaaaaacgggggcttatggtatcccgtggggtgcattacaggatttttcccgccgtaaagagcaatat

SEQ ID NO: 277995 - DNA, 75 bp, synthetic construct
  source 1..75: mol_type = other DNA
caatatccaggagaccgacctcgccggacacgcggaagacgttgctcgttatgccgagcgtctacagattgttga

SEQ ID NO: 277996 - DNA, 75 bp, synthetic construct
  source 1..75: mol_type = other DNA
catccgacggcgtttatttgcaccaatatccaggaaaccgacctcgctggtcatgcagaagacgtcgcacgttat

SEQ ID NO: 277997 - DNA, 75 bp, synthetic construct
  source 1..75: mol_type = other DNA
atggcggatcacggtaacgatccgaccattggtcacagccaccatacccgtgaagtggtgccagtgctggtttat

SEQ ID NO: 277998 - DNA, 75 bp, synthetic construct
  source 1..75: mol_type = other DNA
acccgcgaagtggtgccagtgctggtttatcagcaagggctggtccacacgcaactcggtgtgcgcaccacgctt

SEQ ID NO: 277999 - DNA, 75 bp, synthetic construct
  source 1..75: mol_type = other DNA
tgacaacggcttccaggtcgtgcatatgggctacggcgtcgatgaaaaagtgcaggtgccacaaaaactgtatga

SEQ ID NO: 278000 - DNA, 75 bp, synthetic construct
  source 1..75: mol_type = other DNA
aatttttccgtgcgccgccgccacaaaacggcagctcttttttatcttcttttcgcttccagagagacaccttat

SEQ ID NO: 278001 - DNA, 75 bp, synthetic construct
  source 1..75: mol_type = other DNA
gaaagtcctcaagcgcctgcatatcctggaaggtttgctggtggcgtttctcaatatcgacgaagtgattgagat

SEQ ID NO: 278002 - DNA, 75 bp, synthetic construct
  source 1..75: mol_type = other DNA
ctttcacctttcctcggcccaggcgcagttatcgcacaggttatcggcgtattgattggcgtgcagattggtctc

SEQ ID NO: 278003 - DNA, 75 bp, synthetic construct
  source 1..75: mol_type = other DNA
atgacgcgtattcagatcgaaaaaggcactggtggctggggtggcccgcttgaactggaagccacgccaggtaaa

SEQ ID NO: 278004 - DNA, 75 bp, synthetic construct
  source 1..75: mol_type = other DNA
gtattcccactatcaatatccactcaacgggcaagtccggtccactggcgcagtacatcgtggaagatatttatg

SEQ ID NO: 278005 - DNA, 75 bp, synthetic construct
  source 1..75: mol_type = other DNA
aggaagaagtggggcgagtgggtaacgtgcttaagtttggcgattttagctcaggggccgttattcaattattta

SEQ ID NO: 278006 - DNA, 75 bp, synthetic construct
  source 1..75: mol_type = other DNA
actgcattgttggctggtatttgcaccagtttatttctggttgctcctgtggaatatcattttctatgtcgcgcc

SEQ ID NO: 278007 - DNA, 75 bp, synthetic construct
  source 1..75: mol_type = other DNA
cgtgccgtttttggtatggccgacggttattgccttagttatgcttatattcacgttaactttcctggcggaaat

SEQ ID NO: 278008 - DNA, 75 bp, synthetic construct
  source 1..75: mol_type = other DNA
ttcgactgacagtacagcacaagtggcagaggatgctggagcaacagttcactctgttcctctgaaaggcaaggg

SEQ ID NO: 278009 - DNA, 75 bp, synthetic construct
  source 1..75: mol_type = other DNA
aactaatcagctcatatctacccggcaatacaaccgaatttttcatgggtgggtagaaaagcttggtctcgaaga

SEQ ID NO: 278010 - DNA, 75 bp, synthetic construct
  source 1..75: mol_type = other DNA
gatccaacttctgttgggccataagaaactggaaagcacagtccgttatttgggcattgaagtcgatatagaagg

SEQ ID NO: 278011 - DNA, 75 bp, synthetic construct
  source 1..75: mol_type = other DNA
tcatcaaaacactctcaatggacatgaatgtaggctatataagggcaacgcgcatccacttacccaatgcggttg

SEQ ID NO: 278012 - DNA, 75 bp, synthetic construct
  source 1..75: mol_type = other DNA
tgaaagtcgtcgtcaggcaaagggaacgcgcttctggtggcagtacagcgataaatggatgaccgaatccaggca

SEQ ID NO: 278013 - DNA, 75 bp, synthetic construct
  source 1..75: mol_type = other DNA
ccggcgacggttgattttcattcttccctgaagtttgtggccagcctccctgccctcatagattccatcgaaatg

SEQ ID NO: 278014 - DNA, 75 bp, synthetic construct
  source 1..75: mol_type = other DNA
aggagtatttcacttctggaattccaacttgggttattgactgaatatgcactttttttctgtgccatgtgttgc

SEQ ID NO: 278015 - DNA, 75 bp, synthetic construct
  source 1..75: mol_type = other DNA
ccgtcggcgcgtggtcagggcgagccgctcaccggcaaattaacgttgccgcctggggcgaccgttgaccatatg

SEQ ID NO: 278016 - DNA, 75 bp, synthetic construct
  source 1..75: mol_type = other DNA
gccgagatccgtaaaatctacgagaacggacgtggttcagtgcgtatgcgcgcggtgtggaagaaagaagatggc

SEQ ID NO: 278017 - DNA, 75 bp, synthetic construct
  source 1..75: mol_type = other DNA
ggagcagaaggctgcggcaggcgtggagatgacctcaaaaattcttgggaacgtcgctaaaacggtaactcaaat

SEQ ID NO: 278018 - DNA, 75 bp, synthetic construct
  source 1..75: mol_type = other DNA
aatcgccttaatcgaccagccgaaaaccacgctcgatcagttactggatattgtgcaggggccggattacccgac

SEQ ID NO: 278019 - DNA, 75 bp, synthetic construct
  source 1..75: mol_type = other DNA
cggacgatccgaaatcgttcgcggcaatgcgttacaccgaatcccgtctgtcgaaatattccgagctgttattga

SEQ ID NO: 278020 - DNA, 75 bp, synthetic construct
  source 1..75: mol_type = other DNA
aagaagcgaaagcgatgagcgagcacgacatgctgccgtctgaacctgtcaccattgtgctgtcgcagatgggtt

SEQ ID NO: 278021 - DNA, 75 bp, synthetic construct
  source 1..75: mol_type = other DNA
ccaccagcacattgattctgccattccgggacgttacactgttcaggcaccttataaagcgggtgtcgggattgg

SEQ ID NO: 278022 - DNA, 75 bp, synthetic construct
  source 1..75: mol_type = other DNA
gtggttgttgttggtatcacactgagttttctaatggagatgctgttctcaaattcgttcatgcacaggcgtatt

SEQ ID NO: 278023 - DNA, 75 bp, synthetic construct
  source 1..75: mol_type = other DNA
agtctctgaggtggacccaaagcaaatttttgaagaggatctaaccaaactctttgcggtaaatcctgttttcta

SEQ ID NO: 278024 - DNA, 75 bp, synthetic construct
  source 1..75: mol_type = other DNA
cttaagtggaggcgaaggaaatgacgagctggagggcgatatgggcgacgatgtctacctcttcaaaaaaggcga

SEQ ID NO: 278025 - DNA, 75 bp, synthetic construct
  source 1..75: mol_type = other DNA
ggtgccgggattggcgtcctggaattgcatacggcgacaattggcgcgttagcgtcttttttgttgctacaactc

SEQ ID NO: 278026 - DNA, 75 bp, synthetic construct
  source 1..75: mol_type = other DNA
aaacgtgtgttttatcactgatttcattgacattagcaacaaatacctgttgtctcactcttatgagcgaaaaca

SEQ ID NO: 278027 - DNA, 75 bp, synthetic construct
  source 1..75: mol_type = other DNA
gatcgctactggtggcgggaaatctaacgttgcctgcaaagcagctgcacgtatcggtcgaatgacattattttt

SEQ ID NO: 278028 - DNA, 75 bp, synthetic construct
  source 1..75: mol_type = other DNA
ttcaggctctaatttctatgacatcgccagattatgtgcgaacgcagactatcgcctggcgcttacggcaacgcc

SEQ ID NO: 278029 - DNA, 75 bp, synthetic construct
  source 1..75: mol_type = other DNA
attccgtggtttctgtttattccaatggcatcgtcgccatgccgctgtatccagtagcagagcgcctcgctatgg

SEQ ID NO: 278030 - DNA, 75 bp, synthetic construct
  source 1..75: mol_type = other DNA
gaaaaagttgaaatcatccgtagaaatgatggttcgatccgctttaacaataagatgccttatcacgttacgctg

SEQ ID NO: 278031 - DNA, 75 bp, synthetic construct
  source 1..75: mol_type = other DNA
attgacattagcaacaaatatctgttgtctcactcttatgagcgaaaacacatcatcgacaccacacctggcttt

SEQ ID NO: 278032 - DNA, 75 bp, synthetic construct
  source 1..75: mol_type = other DNA
tccgatacggacagtataacgaaacgggtattgaaccgccccgggaatcctggagactaaacttcctgagaaaga

SEQ ID NO: 278033 - DNA, 75 bp, synthetic construct
  source 1..75: mol_type = other DNA
gccccacgatggcaacgtgttgcgtgttaaaggccatcaggggcgcgcattagggcgtgacggcgtaattgaagt

SEQ ID NO: 278034 - DNA, 75 bp, synthetic construct
  source 1..75: mol_type = other DNA
catggttagtacatcacaacgtattgccccacgatggcaacgtgttgcgtgttaaaggccatcaggggcgcgcat

SEQ ID NO: 278035 - DNA, 75 bp, synthetic construct
  source 1..75: mol_type = other DNA
gctgctttcgctttttgccgacgggttgagcgctatcttttatggtggtttgccgaggggttctgaactctcggc

SEQ ID NO: 278036 - DNA, 75 bp, synthetic construct
  source 1..75: mol_type = other DNA
gtgaagcgctaatgtacaagagtcacggtctgaactgtatgacattggttcgtctgaagcgtcatggtcagatct

SEQ ID NO: 278037 - DNA, 75 bp, synthetic construct
  source 1..75: mol_type = other DNA
tccgatacggacagtataacgaaacggtagactggccccctgaatctccagacaaccaatatcacttaaataagt

SEQ ID NO: 278038 - DNA, 75 bp, synthetic construct
  source 1..75: mol_type = other DNA
cgatctccaggatgttcctgctgatagttctgttctggatatggcgcagtggtcagaaaattacaacaaactgcg

SEQ ID NO: 278039 - DNA, 75 bp, synthetic construct
  source 1..75: mol_type = other DNA
gaaagcggcgcagtcgccgctggttgaaactgtttttgttgctccgggtaatgcaggcactgcgctggaacccgc

SEQ ID NO: 278040 - DNA, 75 bp, synthetic construct
  source 1..75: mol_type = other DNA
ataatgtttttgttggtgcagcgtcaggagatagtgagactactggaacccaattagtatatcttggacatcaag

SEQ ID NO: 278041 - DNA, 75 bp, synthetic construct
  source 1..75: mol_type = other DNA
tttgagaatgagaatggaaaatatattaaggtttctcaaccaataaaaataagtcaagctggacaacctgtattg

SEQ ID NO: 278042 - DNA, 75 bp, synthetic construct
  source 1..75: mol_type = other DNA
atggctctaaccgatatacaaatcaaacgcgcaaaaccacaagacaaaccatatacattgaatgatgggcaaggt

SEQ ID NO: 278043 - DNA, 75 bp, synthetic construct
  source 1..75: mol_type = other DNA
tttcgaaagaaagtgtgtcacaagtaattgagttacttggttataaaggacgagctactggccatggttttagac

SEQ ID NO: 278044 - DNA, 75 bp, synthetic construct
  source 1..75: mol_type = other DNA
atgttgtcaatctgtttggcagaaggtgagggcgttcttggtcgttgtacgagttgcgtacaattgatgcgtatt

SEQ ID NO: 278045 - DNA, 75 bp, synthetic construct
  source 1..75: mol_type = other DNA
cttgcagaaaaccgcctcgatcagaaaaagatggatgagttcgcccagcgcgccgccatgaggaaacctgaatga

SEQ ID NO: 278046 - DNA, 75 bp, synthetic construct
  source 1..75: mol_type = other DNA
agatcaggagcaagttcataaaatggtacctgataatttgcgaggattactccgtgagttgccttcactgccatc

SEQ ID NO: 278047 - DNA, 75 bp, synthetic construct
  source 1..75: mol_type = other DNA
gattgacatgctacccaccgcacagcgtcagattggcattctttttcaggatgcactgttatttgaccagttcag

SEQ ID NO: 278048 - DNA, 75 bp, synthetic construct
  source 1..75: mol_type = other DNA
ccgccagggtgctggataacctgaaaaaactcgccgcagcgggcaaaaaaatcattatccgcgtgccgctgattc

SEQ ID NO: 278049 - DNA, 75 bp, synthetic construct
  source 1..75: mol_type = other DNA
ctatgacgccccggaaaaaccgcttgatgcgccagaactgctcgactttgcccagcagtatgcctgccagaaagg

SEQ ID NO: 278050 - DNA, 75 bp, synthetic construct
  source 1..75: mol_type = other DNA
gatctgtttcttgccgatttaaaacacgttgccgacgcgccgtttaaacagtggaccgacggtaacgccgccaga

SEQ ID NO: 278051 - DNA, 75 bp, synthetic construct
  source 1..75: mol_type = other DNA
aaccaaccggagaaagtcaccatttctggcacggcggtgattttgtttcatgccgaatgggcaattgaactctga

SEQ ID NO: 278052 - DNA, 75 bp, synthetic construct
  source 1..75: mol_type = other DNA
aaatgttttggattctacaaaacaactccccattactgtatcatatggaggaaagactctatcaaccgcagatgt

SEQ ID NO: 278053 - DNA, 75 bp, synthetic construct
  source 1..75: mol_type = other DNA
attcctgtttctgtgaatttcgcaggaaaaccactgagcacaacaggcattaccatcgactccaatgatctgaac

SEQ ID NO: 278054 - DNA, 75 bp, synthetic construct
  source 1..75: mol_type = other DNA
atgaaactaaagaaaacaattggcgcaatggctctggcgacattatttgcaactatgggagcatctgcggtcgag

SEQ ID NO: 278055 - DNA, 75 bp, synthetic construct
  source 1..75: mol_type = other DNA
ggatttacgagcgtcaatatatttatcacgcgaaacaatgccagcagcccattatgtaataggtttgtctccaaa

SEQ ID NO: 278056 - DNA, 75 bp, synthetic construct
  source 1..75: mol_type = other DNA
gatctgctgaaagctgatggtagcaaagcaaccgccgccgctgatatcgcttacgtcgctgtagaaccgtctttt

SEQ ID NO: 278057 - DNA, 75 bp, synthetic construct
  source 1..75: mol_type = other DNA
tctatcgcattaacctattcttcggcttcaaataattttgaagtttactctcttaatactgctattcatacaaat

SEQ ID NO: 278058 - DNA, 75 bp, synthetic construct
  source 1..75: mol_type = other DNA
tttatgacaacgctagtctttgataacgatgaggcggtcataagcgccaaacctggctttgatgaggcgtgggaa

SEQ ID NO: 278059 - DNA, 75 bp, synthetic construct
  source 1..75: mol_type = other DNA
tacaacgttgaactgaatgtcattgatgaaaaatcgccacaacagcccgcatacctggtgagttaccgctatcca

SEQ ID NO: 278060 - DNA, 75 bp, synthetic construct
  source 1..75: mol_type = other DNA
tttatgacaacgctggtctttgataacgatgaggcggtcataagcgcgaaacccggttttgatgaggcgtgggaa

SEQ ID NO: 278061 - DNA, 75 bp, synthetic construct
  source 1..75: mol_type = other DNA
tcgtttccattgtaatgactcaatcgacaggacacagccgcgcctgttccttaataaaatgtaataacaacaaga

SEQ ID NO: 278062 - DNA, 75 bp, synthetic construct
  source 1..75: mol_type = other DNA
atgcacgggcatgattatgagcatcatcaccatcatcacgatcacgaacatcaccacgaccaaggacatcatcac

SEQ ID NO: 278063 - DNA, 75 bp, synthetic construct
  source 1..75: mol_type = other DNA
atgataaatcggcacaacaacccgctttccaggtgagctatcgctatccgggcgaagaacgggacaaagcgagcc

SEQ ID NO: 278064 - DNA, 75 bp, synthetic construct
  source 1..75: mol_type = other DNA
cacagcggcatcaaatagactatcttgataagctcatccaagttcctattcgggtgccaaaagctggggttcgtg

SEQ ID NO: 278065 - DNA, 75 bp, synthetic construct
  source 1..75: mol_type = other DNA
gtatgcaggcttccggctggctgtacggcctgctgccagctctgaaaaagatccacactaataaacgcgacctgg

SEQ ID NO: 278066 - DNA, 75 bp, synthetic construct
  source 1..75: mol_type = other DNA
atggcatctaatcaaaccaccctgccgaacgtcagcgaaaatgaagagacactactgacaggcgtcaatgaaaac

SEQ ID NO: 278067 - DNA, 75 bp, synthetic construct
  source 1..75: mol_type = other DNA
attgccgtcggtgcgccgctcggcgggattggcgatgcgatgttctggctaacgctactgccgatttgtggcggg

SEQ ID NO: 278068 - DNA, 75 bp, synthetic construct
  source 1..75: mol_type = other DNA
ggaaaacaccgcgtgactatcgaaaagcaccacgatggtaatcgtatttcgctggaacaaggtccgccgggcttt

SEQ ID NO: 278069 - DNA, 75 bp, synthetic construct
  source 1..75: mol_type = other DNA
tggtattgtggaagatccggtgaccggcaatgccaatggcccgatgggtgcatggttagtacatcacaacgtatt

SEQ ID NO: 278070 - DNA, 75 bp, synthetic construct
  source 1..75: mol_type = other DNA
caggatgtcccgttaatacgtttctggtccgaggctggctgccccacctgtgcggaatttgtctacagcggtttt

SEQ ID NO: 278071 - DNA, 75 bp, synthetic construct
  source 1..75: mol_type = other DNA
cgcgtaagcgctttaccggcgcagaatttatcgttcatttcctggaacagcagggcattaagattgtgacgggca

SEQ ID NO: 278072 - DNA, 75 bp, synthetic construct
  source 1..75: mol_type = other DNA
attaaaagagggagagatggtacccctgcaaaaattgacgattacccacagcgccgccgggttgaccctgaataa

SEQ ID NO: 278073 - DNA, 75 bp, synthetic construct
  source 1..75: mol_type = other DNA
cagataatctgattatttctggtggtatgccagcaattccaacaagtattaaacttgccagcggtaaagtaaaac

SEQ ID NO: 278074 - DNA, 75 bp, synthetic construct
  source 1..75: mol_type = other DNA
cgcgcgccatgaaaggccatatgggctttttcaatactcacccgtttctggtgacgtttgtgatcggcattatcc

SEQ ID NO: 278075 - DNA, 75 bp, synthetic construct
  source 1..75: mol_type = other DNA
cggaccgcaaagtgttgtgcttctccggcgacggcagcctgatgatgaatattcaggagatggcgaccgccagtg

SEQ ID NO: 278076 - DNA, 75 bp, synthetic construct
  source 1..75: mol_type = other DNA
tattgatgtgacatacgaatattcaggttatggtcagtggcatgccagtggctttggtgcaggcatcggttttaa

SEQ ID NO: 278077 - DNA, 75 bp, synthetic construct
  source 1..75: mol_type = other DNA
atgcgtgccgtcagtgtgcttaacctaggtactattgatgaaccaggtcacgcagataacaccgccactctcaaa

SEQ ID NO: 278078 - DNA, 75 bp, synthetic construct
  source 1..75: mol_type = other DNA
agcggtgcaggaagaaatggctaacgaatttcgtgatctgcttgttgagaaatttaaagacagcaaagtagaaac

SEQ ID NO: 278079 - DNA, 75 bp, synthetic construct
  source 1..75: mol_type = other DNA
gtttttacgtctctcgattcgcgaagggatggcgaaaggtgccggatttggcgcggcgtctcatggtgccggaac

SEQ ID NO: 278080 - DNA, 75 bp, synthetic construct
  source 1..75: mol_type = other DNA
cagcaccgttttctgctctgttgtctgttaatggcgagcgtaactcccagaagtcactggcagaatggattgaag

SEQ ID NO: 278081 - DNA, 75 bp, synthetic construct
  source 1..75: mol_type = other DNA
gatgaaggcacccgctgctttatcgatgctgataatatgcgtgccgtcagtgtgcttaacctgggtactattgat

SEQ ID NO: 278082 - DNA, 75 bp, synthetic construct
  source 1..75: mol_type = other DNA
tttaaaactagcaatgcggcatattcacaactatgtgaaaaattatctttatttaaaagcgcgcccagtcggtta

SEQ ID NO: 278083 - DNA, 75 bp, synthetic construct
  source 1..75: mol_type = other DNA
gtctttattcttacttgtgctccatttttatttctatggtgtgtttattctctttttaatcggattaaatttaaa

SEQ ID NO: 278084 - DNA, 75 bp, synthetic construct
  source 1..75: mol_type = other DNA
gctcatggtgacaccattcaggcaacaaaagcggctgcggcagtccgtaaaatcacgattgaagcaaaccagacc

SEQ ID NO: 278085 - DNA, 75 bp, synthetic construct
  source 1..75: mol_type = other DNA
gcagggatttcaggttgtgccgcaaaaaggcggtatccagatggtgatcaaactagcaggtaatgacgtgacatt

SEQ ID NO: 278086 - DNA, 75 bp, synthetic construct
  source 1..75: mol_type = other DNA
ctattttcttaacaaacgcctttatcgccgctttcgtaaactgccgttgatgcctctggtgctgacgcctgcgct

SEQ ID NO: 278087 - DNA, 75 bp, synthetic construct
  source 1..75: mol_type = other DNA
gggcggattctttctcccccatcgcatacgtgcaaccgggctcctttggtgcagcggccggtgccgtcaatgcca

SEQ ID NO: 278088 - DNA, 75 bp, synthetic construct
  source 1..75: mol_type = other DNA
atacttcgttataatattactttgggtaagttttttttcagaagacccttgctttgtttcttggcattaatcata

SEQ ID NO: 278089 - DNA, 75 bp, synthetic construct
  source 1..75: mol_type = other DNA
tgtgattaacctgggtactattgatgaaccaggtcacgcagataacaccgccactctcaaactgaaaaagacagc

SEQ ID NO: 278090 - DNA, 75 bp, synthetic construct
  source 1..75: mol_type = other DNA
atgtttcacagcgtggtcgcgagagatgccagtaagccagaaataacggataaccattcttatggactgtgccag

SEQ ID NO: 278091 - DNA, 75 bp, synthetic construct
  source 1..75: mol_type = other DNA
ttgtgtcaatttggtcagtggattgagcacctggggccactcgataatgatgaattaccttacgttcggttaatg

SEQ ID NO: 278092 - DNA, 75 bp, synthetic construct
  source 1..75: mol_type = other DNA
aagagcggaccgggcaatgtatgagggtaagcaaaccggaagaaatcgctgcatgtttattgacgaacaaaacgt

SEQ ID NO: 278093 - DNA, 75 bp, synthetic construct
  source 1..75: mol_type = other DNA
atattgaccgatttaaattggttaatgatacctacgggcatttaatcggcgatgtagtattacgcaccctggcaa

SEQ ID NO: 278094 - DNA, 75 bp, synthetic construct
  source 1..75: mol_type = other DNA
gtcgggttcttgatgaatcctttgatcatcagttacgcaacgctgagcctctgaatctttatttaatgttgttgg

SEQ ID NO: 278095 - DNA, 75 bp, synthetic construct
  source 1..75: mol_type = other DNA
aagagcctctggatgtggtcattggaagagcggaccgggcaatgtatgagggtaagcaaaccggaagaaatcgct

SEQ ID NO: 278096 - DNA, 75 bp, synthetic construct
  source 1..75: mol_type = other DNA
tgtcactttccgtggtggatcgtcagaaatgcttaacggcgtagcgttcgttttccgcctgcatctggtattggg

SEQ ID NO: 278097 - DNA, 75 bp, synthetic construct
  source 1..75: mol_type = other DNA
tagcggtaaaacagcagatggcgatggttctcggcggtatttgcggtgtattaacgttgattggcggtgcggggt

SEQ ID NO: 278098 - DNA, 75 bp, synthetic construct
  source 1..75: mol_type = other DNA
aacggcgagcgtaactcccagaagtcactggcagaatggatcgaagactgggccgactaccttgtgggctttgat

SEQ ID NO: 278099 - DNA, 75 bp, synthetic construct
  source 1..75: mol_type = other DNA
tggatgtacgcatggtttctgccagtggcggtaaaacagcagatggcgatgatcctcggtggtatttgcggtgtg

SEQ ID NO: 278100 - DNA, 75 bp, synthetic construct
  source 1..75: mol_type = other DNA
atgctcgataaacgcgggatggtgatatggtcgaatctgttccatatcggcattttggggatcttcttcgggcac

SEQ ID NO: 278101 - DNA, 75 bp, synthetic construct
  source 1..75: mol_type = other DNA
gcaggactgctgtggcgcaggctgacaaatcagcgcgtgcgtgccacttccactacgccggatatcatcatcatg

SEQ ID NO: 278102 - DNA, 75 bp, synthetic construct
  source 1..75: mol_type = other DNA
gactggatgtcacaagcggaatacaaaattatcctgatgcgcgttttgccctgattactccggcacaccaaagcc

SEQ ID NO: 278103 - DNA, 75 bp, synthetic construct
  source 1..75: mol_type = other DNA
aacatgagcagtcccgccgccatcctgacgccacgctgacagaaaaaggttttactcagttaagcagtgcaacaa

SEQ ID NO: 278104 - DNA, 75 bp, synthetic construct
  source 1..75: mol_type = other DNA
attgcctatggcaactatggattctttatccgaaacgatggttcaaacacatacttcatgttgaccaattcggga

SEQ ID NO: 278105 - DNA, 75 bp, synthetic construct
  source 1..75: mol_type = other DNA
ccggcggtttaactgctgctggcgagattatttccaaatcggcgaatggtcttcgtattgcctatggcaactatg

SEQ ID NO: 278106 - DNA, 75 bp, synthetic construct
  source 1..75: mol_type = other DNA
gtgagagatgtcagacttggcacacgtgttgttcagaccatgcaaaaaggcgtgatgtatgaaaaatcaggccat

SEQ ID NO: 278107 - DNA, 75 bp, synthetic construct
  source 1..75: mol_type = other DNA
tctggtataaatccacatcctccaacgcaacactggagaaaaatttccctgaagacggtgcagtcggtgttcttg

SEQ ID NO: 278108 - DNA, 75 bp, synthetic construct
  source 1..75: mol_type = other DNA
cgcaacactggagaaaaacttcccggaagataatgctgtcggtgtgcttgaggtttttgctggcggcaattttgc

SEQ ID NO: 278109 - DNA, 75 bp, synthetic construct
  source 1..75: mol_type = other DNA
ctggaacttattcaaaaacatattcgcgaccgcgatttaatcggcatggtcgacaggatcaccacgcttttgatt

SEQ ID NO: 278110 - DNA, 75 bp, synthetic construct
  source 1..75: mol_type = other DNA
gcaatgacagcgccacaatgaccgcgacagttcgggatgcaaaaggcaacctgctcaatgacgtcaaggtcacct

SEQ ID NO: 278111 - DNA, 75 bp, synthetic construct
  source 1..75: mol_type = other DNA
aaacgcgtgaagattacctcgcgtttctcgcggaagatattgaacgcgatattccctacgatcccgaacctattg

SEQ ID NO: 278112 - DNA, 75 bp, synthetic construct
  source 1..75: mol_type = other DNA
tctgggtatcggtggcgcagtggcaaaactcaccagcctggactggcagacctacgattttgtgccgggcagtct

SEQ ID NO: 278113 - DNA, 75 bp, synthetic construct
  source 1..75: mol_type = other DNA
tggcgaaacagtagtggctcaatcgcttcatttgaccgcaactatccggaagaaggaagttatggtcagggactc

SEQ ID NO: 278114 - DNA, 75 bp, synthetic construct
  source 1..75: mol_type = other DNA
acagaaagccgctgaaatttctgccagggctgctgatctgtctgatagtgttaaccagctgcgtgccgaagcaac

SEQ ID NO: 278115 - DNA, 75 bp, synthetic construct
  source 1..75: mol_type = other DNA
actttttgacattggaacattagggtcattcgtatctcagaccatgtgcaatcctcctgatcctgacgaatttgc

SEQ ID NO: 278116 - DNA, 75 bp, synthetic construct
  source 1..75: mol_type = other DNA
atcccggtcctgggcaaccccgtgttgcaggctatctttagctggatgagtaagattggctcgtttgcttttagt

SEQ ID NO: 278117 - DNA, 75 bp, synthetic construct
  source 1..75: mol_type = other DNA
aactattgaagatttaaagagacgacatcctgatattattctcattacagaatctgaagcattagcattgcaatc

SEQ ID NO: 278118 - DNA, 75 bp, synthetic construct
  source 1..75: mol_type = other DNA
tcggtgcggtcatgtacatgatgaccaaaaacatcaagttcctggtcggctttgccatactctctgtatttattg

SEQ ID NO: 278119 - DNA, 75 bp, synthetic construct
  source 1..75: mol_type = other DNA
ggagacgggatgtggatggaagatcccggctttccactcattcgcccgattgttactcgccacggtgtggaaatt

SEQ ID NO: 278120 - DNA, 75 bp, synthetic construct
  source 1..75: mol_type = other DNA
aaagggggcatccagatggttatcagcatggtgggcgacgatattgtccacgcgcgtaaagccaatgctgctggc

SEQ ID NO: 278121 - DNA, 75 bp, synthetic construct
  source 1..75: mol_type = other DNA
gacgccgcagttctgaaagccaataattcacaggtgttttttcccatcctgtggtttccttggcgttttctaggt

SEQ ID NO: 278122 - DNA, 75 bp, synthetic construct
  source 1..75: mol_type = other DNA
atggacgccgttttaagtgttcagggtgcttctgcgcccgtcaaaaagaagtcgtttttttccaaattcactcgt

SEQ ID NO: 278123 - DNA, 75 bp, synthetic construct
  source 1..75: mol_type = other DNA
ctgtacccgcgacccctgcaaagaaaaaattcagcaaagtcgcgttactcaaagcgctgaagtttgccctgcctg

SEQ ID NO: 278124 - DNA, 75 bp, synthetic construct
  source 1..75: mol_type = other DNA
gatgttgttccctgagttagctatggctgctggtaaaggcacggacctgatggctaaaggtcaggaaacggttaa

SEQ ID NO: 278125 - DNA, 75 bp, synthetic construct
  source 1..75: mol_type = other DNA
atgtacatgatgaccaaaaacgtcaagttcctggtcggctttgccatactctctgtatttattgcagtaggtatg

SEQ ID NO: 278126 - DNA, 75 bp, synthetic construct
  source 1..75: mol_type = other DNA
caggacctgatggcaagcggtaacaccacggttaaggcgaccttcggtaaggactccagtgttgttaaatgggtt

SEQ ID NO: 278127 - DNA, 75 bp, synthetic construct
  source 1..75: mol_type = other DNA
ctgaatgtcgcggatctcacgcagataaaagccggggatattttacccatctcgctgggagaaacgttcccggtg

SEQ ID NO: 278128 - DNA, 75 bp, synthetic construct
  source 1..75: mol_type = other DNA
tccttcaggatcaggagagagcggtgatccgcttccgcgaacctatcgaagggattcattttgttgactatatgg

SEQ ID NO: 278129 - DNA, 75 bp, synthetic construct
  source 1..75: mol_type = other DNA
tactggccgatatcgaagcggaagatctggcgcgtgaagcgtcgtttgctcagggattacgcgcgatgattggcg

SEQ ID NO: 278130 - DNA, 75 bp, synthetic construct
  source 1..75: mol_type = other DNA
tcaccctcatgatgaaacccgcgtcattgataccggtcatggcagcgttgaactctcaattttcgaagaaggtca

SEQ ID NO: 278131 - DNA, 75 bp, synthetic construct
  source 1..75: mol_type = other DNA
tatttaccaagcgattccaaatgttcagcgattaccatgtatgttaaacgttgggttaggtcatgatttctcgat

SEQ ID NO: 278132 - DNA, 75 bp, synthetic construct
  source 1..75: mol_type = other DNA
tctcctgatttgattattcatgcggcaggtttagtcggtggaattcaagcgaatataaaacgccctgttgatttt

SEQ ID NO: 278133 - DNA, 75 bp, synthetic construct
  source 1..75: mol_type = other DNA
attaccttgctgagtgagtttggttggaaatatcagtttgaattgagagatggtataaaagaaacctataagtat

SEQ ID NO: 278134 - DNA, 75 bp, synthetic construct
  source 1..75: mol_type = other DNA
cggcaggaaggacatcaaattggctggcaggaaggtaaaattgaaggttggcaggaggggaaattggaggggttg

SEQ ID NO: 278135 - DNA, 75 bp, synthetic construct
  source 1..75: mol_type = other DNA
agctttattgaaaaaagtttacgcgcttactactcggatgttttgtggtccgtggaaaccagcgacggtgacggc

SEQ ID NO: 278136 - DNA, 75 bp, synthetic construct
  source 1..75: mol_type = other DNA
aagccgctgcgccttacgtctgccgtgctagatcactgccaccgaaccgggcgcgtgcgtgctgtggtgcatcgc

SEQ ID NO: 278137 - DNA, 75 bp, synthetic construct
  source 1..75: mol_type = other DNA
gctaatgaagatatcggcgctgaaatggctaccttccgcgatcaggttcttgcagatgtagaaatgccagatctg

SEQ ID NO: 278138 - DNA, 75 bp, synthetic construct
  source 1..75: mol_type = other DNA
atggccagaagttgcgtaacggacccacgttggcgcgagctggtggcgctatatcgttatgactggattgcggcc

SEQ ID NO: 278139 - DNA, 75 bp, synthetic construct
  source 1..75: mol_type = other DNA
atggaatctctatttatttatttttttgttacgatggtgttaattgtttttacgtatttttttaagcataataat

SEQ ID NO: 278140 - DNA, 75 bp, synthetic construct
  source 1..75: mol_type = other DNA
ttactaaagacgtaatgaaaattttgcgctatggggcaatgagcgcattcattaatttctggaaagatgaaagca

SEQ ID NO: 278141 - DNA, 75 bp, synthetic construct
  source 1..75: mol_type = other DNA
gatggccgtctctgtcggcacgctcgcggctgaacaaaaaacactccacatttataactggtctgattatatcgc

SEQ ID NO: 278142 - DNA, 75 bp, synthetic construct
  source 1..75: mol_type = other DNA
tcgttcaggtgcaacatatcttcacgcctgtcgctatcagtcacacgctggcgcttgccgcgacacttgatgcgc

SEQ ID NO: 278143 - DNA, 75 bp, synthetic construct
  source 1..75: mol_type = other DNA
ttcactggcactggcggcgtcactggacgcgcaggggtacagcgtcagtgacatcatccatatcctgatggcgga

SEQ ID NO: 278144 - DNA, 75 bp, synthetic construct
  source 1..75: mol_type = other DNA
cggctaccgatctgctgttaaagctgcgcccgaacattcgttatttccactcttctcagtatatcaatgacctgg

SEQ ID NO: 278145 - DNA, 75 bp, synthetic construct
  source 1..75: mol_type = other DNA
atgatgtttttgattccaacgaagtgctggaaggtaaattaatggcggggagcacgggatttgatcttgttgttc

SEQ ID NO: 278146 - DNA, 75 bp, synthetic construct
  source 1..75: mol_type = other DNA
atggctgccttaaataaaaaatggctatcgggtctggttgcaggcgctctgatggctgtctctgtcggcacgctc

SEQ ID NO: 278147 - DNA, 75 bp, synthetic construct
  source 1..75: mol_type = other DNA
tatgcctcaggtgcgttaaccccttccggaaattccagcggcaaaactgcccagtcaataaccagtcgttcagtg

SEQ ID NO: 278148 - DNA, 75 bp, synthetic construct
  source 1..75: mol_type = other DNA
tccgcttgatcaatgctattttgagtgaggccatcaaagaaaccgcctccgatatccacattgaaacctatgaaa

SEQ ID NO: 278149 - DNA, 75 bp, synthetic construct
  source 1..75: mol_type = other DNA
tttcgagcatcttattaaatgtgttccttatttgccctgtgactataaagtagtcttggttggtgggggggataa

SEQ ID NO: 278150 - DNA, 75 bp, synthetic construct
  source 1..75: mol_type = other DNA
ccgtgatgcgggagctggatgcgccggataactggacgatgaacggcgagtacggcagcgagtttggcggctttt

SEQ ID NO: 278151 - DNA, 75 bp, synthetic construct
  source 1..75: mol_type = other DNA
agttcgccagtgttgcccctgctcgaatagaaggggcgctacaggatgcagcaaaccagatgagccgcaaagtat

SEQ ID NO: 278152 - DNA, 75 bp, synthetic construct
  source 1..75: mol_type = other DNA
gcggtggttcaggtacagcggcggtttgcaccggaagccgtcagccattcactggcactggcggcgtcactggat

SEQ ID NO: 278153 - DNA, 75 bp, synthetic construct
  source 1..75: mol_type = other DNA
atggttgcgcggacagaccaactactaagaaaagcgatgcgggactatctggaacacctcggcaatatgccgctg

SEQ ID NO: 278154 - DNA, 75 bp, synthetic construct
  source 1..75: mol_type = other DNA
catcaccgagagggattttagcagctaaaaaatcattagcagcttccttcctggcgtccatcatggcattaccgg

SEQ ID NO: 278155 - DNA, 75 bp, synthetic construct
  source 1..75: mol_type = other DNA
atgaatctggttgacgcctttgccaaaaaagtaatatccgggccatatggaaaatggtggatagatgtcgaatac

SEQ ID NO: 278156 - DNA, 75 bp, synthetic construct
  source 1..75: mol_type = other DNA
atgaatctggtagacgcctttgtcaaaaaagtaatatccgggccatatgaagaatatggaaaatggtggatagat

SEQ ID NO: 278157 - DNA, 75 bp, synthetic construct
  source 1..75: mol_type = other DNA
aagcggcgcacaagggcaaatggaagctattcaggcggcaaaccagcttgccagtgcacagacaaatcagttact

SEQ ID NO: 278158 - DNA, 75 bp, synthetic construct
  source 1..75: mol_type = other DNA
agctattcaggcagctaaccagcttgccagtgctcaaacgaaccagctgctgcaaatccgctcgctcctggtagc

SEQ ID NO: 278159 - DNA, 75 bp, synthetic construct
  source 1..75: mol_type = other DNA
cacaggctcaggccgataaagaggcccaacaaatagtagctgatgaaaaagcgttagctggcaagaacacaccaa

SEQ ID NO: 278160 - DNA, 75 bp, synthetic construct
  source 1..75: mol_type = other DNA
tacccgttattctaaagatcttgcagatgaaggcacccgctgctttatcgatgctgataatatgcgtgctgtcag

SEQ ID NO: 278161 - DNA, 75 bp, synthetic construct
  source 1..75: mol_type = other DNA
acgtccgtttaaattacgtctcagcattatcactggcgatcgtcctgtactggttctgcgcattattcagctgga

SEQ ID NO: 278162 - DNA, 75 bp, synthetic construct
  source 1..75: mol_type = other DNA
tacccgttattctaaagatcttgcggatgaaggcacccgctgctttatcgatgccgataatatgcgtgccgtcag

SEQ ID NO: 278163 - DNA, 75 bp, synthetic construct
  source 1..75: mol_type = other DNA
cactggagatgtatgaacttaacgatcaaaagatccagtatttgactgcccctaatatcaatatacataaaatgt

SEQ ID NO: 278164 - DNA, 75 bp, synthetic construct
  source 1..75: mol_type = other DNA
gccggaggcgttacggccgcagaatgcgtatttcggctccctgacccgggcatctgagttgtttccggtaacgga

SEQ ID NO: 278165 - DNA, 75 bp, synthetic construct
  source 1..75: mol_type = other DNA
aatggattgaagactgggccgactaccttgtgggctttgatgctaatggtgacaccattcaggcaacaaaagcgg

SEQ ID NO: 278166 - DNA, 75 bp, synthetic construct
  source 1..75: mol_type = other DNA
cgcgtctgaaattagcgcacttcgtgaagcggaacagaacagctcagaggcacgtaaaaaggccaatgacgccgt

SEQ ID NO: 278167 - DNA, 75 bp, synthetic construct
  source 1..75: mol_type = other DNA
aaacttagcggcaactttctgttatgcaacaaccactgatccacaagacccagcttcctatacaaaagctggttt

SEQ ID NO: 278168 - DNA, 75 bp, synthetic construct
  source 1..75: mol_type = other DNA
gacgcggcgaattattaaccagcgatattcctggtcctaaaagagtgcccggaaaagctgaggtttattctcttt

SEQ ID NO: 278169 - DNA, 75 bp, synthetic construct
  source 1..75: mol_type = other DNA
aaagagccggacggcgaacgctggcatgactggtcagatccttaccgcaagtggcgtacccgtaagggatacacg

SEQ ID NO: 278170 - DNA, 75 bp, synthetic construct
  source 1..75: mol_type = other DNA
aacggtacagaaacccacacctatgttgatgttcccggtctttctaccatgctggaaggtgccagccgtccggga

SEQ ID NO: 278171 - DNA, 75 bp, synthetic construct
  source 1..75: mol_type = other DNA
gagaccatgtacgaaacaggtaaagatatgaacgccaagtaccgcgaaacctctcgcggtggcctggcaatgaag

SEQ ID NO: 278172 - DNA, 75 bp, synthetic construct
  source 1..75: mol_type = other DNA
ggtaaacaatttaccgacgatctgattgcccgtaacctgcttaaagacgtgacccgcgtggtggttgacgtgtac

SEQ ID NO: 278173 - DNA, 75 bp, synthetic construct
  source 1..75: mol_type = other DNA
tcagaaaaatggaagtgttcatttcagggatacgcggacaggaaaaaatgtctgtacggattacggagatcgggt

SEQ ID NO: 278174 - DNA, 75 bp, synthetic construct
  source 1..75: mol_type = other DNA
gaagccattcagtcagctaatcagctggccagcgcacaggcaaatcagttactacaaatccgctcattacttatg

SEQ ID NO: 278175 - DNA, 75 bp, synthetic construct
  source 1..75: mol_type = other DNA
gttttaacagcaatatcagctgtactgcagatgaaataagtgctcttaacaacgcacaacagaacagctctgaag

SEQ ID NO: 278176 - DNA, 75 bp, synthetic construct
  source 1..75: mol_type = other DNA
gcgatctggcccgacgcctgaccacggattatggcgacacctgggcgctgattggatcaaatgagccttatgcgg

SEQ ID NO: 278177 - DNA, 75 bp, synthetic construct
  source 1..75: mol_type = other DNA
gtgcagcgtatgcaggcgctgatcaggctgaaggagagtgtgaaggaagagcggttgtcactgattgaggagggt

SEQ ID NO: 278178 - DNA, 75 bp, synthetic construct
  source 1..75: mol_type = other DNA
agcccgcacaggactggttatctttgcataaacggctggccagtgatggtctgtatatcacgatgcaggaagggg

SEQ ID NO: 278179 - DNA, 75 bp, synthetic construct
  source 1..75: mol_type = other DNA
tagcggcatgatcccatggttgctggtgacggagatgctgtgtctgaagggcaagtctctgggcgagatggttcg

SEQ ID NO: 278180 - DNA, 75 bp, synthetic construct
  source 1..75: mol_type = other DNA
cacgtgattgatgaggtggagaaacgcttcgcggcggccggggtgccggtaacctttatcaaggtgcatcaccag

SEQ ID NO: 278181 - DNA, 75 bp, synthetic construct
  source 1..75: mol_type = other DNA
agcattttagccgtgaggcgctggcggtggatcgtaccgatggcatcagcatgacctttgccgactggcgcttta

SEQ ID NO: 278182 - DNA, 75 bp, synthetic construct
  source 1..75: mol_type = other DNA
tgaacacgcagtcatatgtgcatgacccggtgggctggtgtgatccgtgggggctggcaggtgaaaaatgtccta

SEQ ID NO: 278183 - DNA, 75 bp, synthetic construct
  source 1..75: mol_type = other DNA
aaagctggctggcacagacgccgctgaaccacgcggtgtatatgcaggagcaggaatatgacgcctgcgggcgta

SEQ ID NO: 278184 - DNA, 75 bp, synthetic construct
  source 1..75: mol_type = other DNA
aattccggaaatggagcggcaggaccggttgtcgatgcacttgaagctcgctttaaggcgctgaacgtgcctata

SEQ ID NO: 278185 - DNA, 75 bp, synthetic construct
  source 1..75: mol_type = other DNA
ctgcatccacaaccgccctgtttgaacatttcatggcgaatcattcaccggcagcggtgcggggtggcgtgtcac

SEQ ID NO: 278186 - DNA, 75 bp, synthetic construct
  source 1..75: mol_type = other DNA
catgcgtgatgcactggatgcacgtaaatcccgtctctcaggagggcgaatatctggattttttcaaaggcgaga

SEQ ID NO: 278187 - DNA, 75 bp, synthetic construct
  source 1..75: mol_type = other DNA
atgaaatctttaacctgctttaaagcctatgatattcgcgggaaattaggcgaagaactgaatgaagatattgcc

SEQ ID NO: 278188 - DNA, 75 bp, synthetic construct
  source 1..75: mol_type = other DNA
ttgaacacggcgcggatatgggggtcgccttcgacggtgattttgaccgctgcttcctgttcgatgaaaaaggcc

SEQ ID NO: 278189 - DNA, 75 bp, synthetic construct
  source 1..75: mol_type = other DNA
gcgctgtcggtggacagaacggacggtatcagtatgtcgtttgtcgactggcgtttcaatttacgctcttccaat

SEQ ID NO: 278190 - DNA, 75 bp, synthetic construct
  source 1..75: mol_type = other DNA
caccgttgatgtggtgactgccgcaggcggtacgccaataatgtcgaaaaccggacacgcctttattaaagaacg

SEQ ID NO: 278191 - DNA, 75 bp, synthetic construct
  source 1..75: mol_type = other DNA
gtccagcgtctggcagaagccaacgactttcctcccgttgatgaaaccaaacgcggtcgttatcagcaaagtacc

SEQ ID NO: 278192 - DNA, 75 bp, synthetic construct
  source 1..75: mol_type = other DNA
tgagactcagttggccagtgcctactataacgtgcgcattggtggcgatatggcgttgctcaaggggatgatgcg

SEQ ID NO: 278193 - DNA, 75 bp, synthetic construct
  source 1..75: mol_type = other DNA
cctggtggttttcacctgataaacgctgctgctgaaaggcgctggatgacgccgtcaggtaaggctaatttcatt

SEQ ID NO: 278194 - DNA, 75 bp, synthetic construct
  source 1..75: mol_type = other DNA
ggcaccgaagagatttatttcgccacgttccatctcggcgtggatggcggcatagaagttacagccagccataat

SEQ ID NO: 278195 - DNA, 75 bp, synthetic construct
  source 1..75: mol_type = other DNA
cagcattttagccgtgaggtgctggcggtggatcgcaccgatggcatcagcatgacctttgccgactggcgcttt

SEQ ID NO: 278196 - DNA, 75 bp, synthetic construct
  source 1..75: mol_type = other DNA
tcaaacacggcgcggatatgggcattgcctttgatggcgattttgaccgctgtttcctgtttgacgaaaaagggc

SEQ ID NO: 278197 - DNA, 75 bp, synthetic construct
  source 1..75: mol_type = other DNA
tggtgcggttgaatgttgagtcaaatgcaaatagagaacttatgatagcgaaaactactgaaatattgaagttac

SEQ ID NO: 278198 - DNA, 75 bp, synthetic construct
  source 1..75: mol_type = other DNA
tcaacagcaaactggcgcaacccgttgaggcgattaaccgcgtggaacagcattttagccgtgaggcgctggcgg

SEQ ID NO: 278199 - DNA, 75 bp, synthetic construct
  source 1..75: mol_type = other DNA
taaactgctttaaagcctatgatattcgcgggaaattaggcgaagaactgaatgaagatatcgcctggcgcattg

SEQ ID NO: 278200 - DNA, 75 bp, synthetic construct
  source 1..75: mol_type = other DNA
catcaatcctctacaggaacgtggcctggagcgatttaccgcaccgcaaaacccgtttgaaatgctgacgaactc

SEQ ID NO: 278201 - DNA, 75 bp, synthetic construct
  source 1..75: mol_type = other DNA
gcgatttagtcatttgcattgggcataaccctggtacaaaccaccctcgcatgttgacttcgttgcgcgctttag

SEQ ID NO: 278202 - DNA, 75 bp, synthetic construct
  source 1..75: mol_type = other DNA
tgatcccaatcaggttgaattctatacttcgggccgcacttccaatgaagctgcctttctttatcagctttttgc

SEQ ID NO: 278203 - DNA, 75 bp, synthetic construct
  source 1..75: mol_type = other DNA
cggcaaccggcacggcaagttccggcgatcaaattattgcgttgccggaagcaaaaggacgtgaacaactggcac

SEQ ID NO: 278204 - DNA, 75 bp, synthetic construct
  source 1..75: mol_type = other DNA
cctgtcttcagcaggcaatggcagatagccaggtgcggggcatactgctggacattgacagtccgggcgggcagg

SEQ ID NO: 278205 - DNA, 75 bp, synthetic construct
  source 1..75: mol_type = other DNA
ctgaggcgcaggctgaacagctggctgcctgcccgggaatgaccgtggagagcgcccgggctgtgctggctgcgg

SEQ ID NO: 278206 - DNA, 75 bp, synthetic construct
  source 1..75: mol_type = other DNA
tggcggcctgcccgggaatgactgtggagaacgcccgggctgtactggctgcgggatcaggtaaagcagaaccgg

SEQ ID NO: 278207 - DNA, 75 bp, synthetic construct
  source 1..75: mol_type = other DNA
gttttcttttgcgcgctcgggcgcgagatgggggcagcaagtctttcggtaccacaacagcaggtacagcttgat

SEQ ID NO: 278208 - DNA, 75 bp, synthetic construct
  source 1..75: mol_type = other DNA
gtggcgatgtatacggggctgtctgtggaagctgtcacggggacagaggctgccgtttttgaaggtcagtccgct

SEQ ID NO: 278209 - DNA, 75 bp, synthetic construct
  source 1..75: mol_type = other DNA
cctcaccgcaggcgaatgccgggccctcacttcgtgatcagatcatggccctggatgaggcaaaaggggcagaag

SEQ ID NO: 278210 - DNA, 75 bp, synthetic construct
  source 1..75: mol_type = other DNA
cagctatgccggtcatctggcgcaggccggtgttgatatcacgctgatttactcaggggcgcacaaggtggatgg

SEQ ID NO: 278211 - DNA, 75 bp, synthetic construct
  source 1..75: mol_type = other DNA
gcaggagtggcgctaccgctgggatgacttcgaccggcttcgtgagataaagacaccagacggtgaagtgtggca

SEQ ID NO: 278212 - DNA, 75 bp, synthetic construct
  source 1..75: mol_type = other DNA
caatcagtttgaagccttaccggcagaggttcgccaggacatgcaacagcgcattgatgcggcgcgccggatgtt

SEQ ID NO: 278213 - DNA, 75 bp, synthetic construct
  source 1..75: mol_type = other DNA
ccggcgcgtttgactgcgccgacatgatttatcgcctccgggaacaaaagcctgtctgggcgctgtgtaatgaca

SEQ ID NO: 278214 - DNA, 75 bp, synthetic construct
  source 1..75: mol_type = other DNA
agaggaggcactatgccgcaattaactgcaacggaagccgccgcgcaggagaaccagcgagtgatggggatcctg

SEQ ID NO: 278215 - DNA, 75 bp, synthetic construct
  source 1..75: mol_type = other DNA
cggctggttctggtttagtccaacgctttatgttgactcatggaacccacatcatgcgccgttcttcagcgcggt

SEQ ID NO: 278216 - DNA, 75 bp, synthetic construct
  source 1..75: mol_type = other DNA
ctttacgttgattcctggaatccgcatcatgcacccttcttcagtgcggtaggttcttccatcgctatgacgctg

SEQ ID NO: 278217 - DNA, 75 bp, synthetic construct
  source 1..75: mol_type = other DNA
cggatgccggaccctcactccgtgatcagatcatggcactggatgaggcaaaagggctgaggcgcaggctgaaca

SEQ ID NO: 278218 - DNA, 75 bp, synthetic construct
  source 1..75: mol_type = other DNA
cggcaacgctggcggcgatgccggatatgacggtggaaaaagcccgccctgtcctggcggctgcaccacgggcgg

SEQ ID NO: 278219 - DNA, 75 bp, synthetic construct
  source 1..75: mol_type = other DNA
tatgcgctctactcctccggggaagaagccatgttgtatggctccatcgtgaccttcctcggctggacgctgtat

SEQ ID NO: 278220 - DNA, 75 bp, synthetic construct
  source 1..75: mol_type = other DNA
tgggcttttctcggtctggagtctgcgtgtgcgaatactgatgtagtggaaaacccggaacgtaatgtgccaatc

SEQ ID NO: 278221 - DNA, 75 bp, synthetic construct
  source 1..75: mol_type = other DNA
cggtgtctcgctgctgattgctaacgtcgcgattgctatttcggcggttggttacggcaccgaactgctcggcgc

SEQ ID NO: 278222 - DNA, 75 bp, synthetic construct
  source 1..75: mol_type = other DNA
ggtaaggcagaaccggtctctgcatccacaaccgccctgtttgaacgcatcatggcgaaccattcaccggcagcg

SEQ ID NO: 278223 - DNA, 75 bp, synthetic construct
  source 1..75: mol_type = other DNA
cttgccactattgctgtattgtgggtatgtaccgtggctaactttggcggcgcgcgtattaccgggcaaatcagt

SEQ ID NO: 278224 - DNA, 75 bp, synthetic construct
  source 1..75: mol_type = other DNA
cctgctgcggttcattgctcggctggcagttcaccattgcccaggtgtttaaatcttctgccgatgaagggtact

SEQ ID NO: 278225 - DNA, 75 bp, synthetic construct
  source 1..75: mol_type = other DNA
tatgcgctgtactcatccggggaagaagccatgctgtacggttccatcgtgaccttcctcggttggacactgtat

SEQ ID NO: 278226 - DNA, 75 bp, synthetic construct
  source 1..75: mol_type = other DNA
tttttctgactaactctgcaccaatgttgttgattgacccgtcacgagatggacaaatcgtcgatgctaacctcg

SEQ ID NO: 278227 - DNA, 75 bp, synthetic construct
  source 1..75: mol_type = other DNA
tacaggccgacatccggttagtggtttgctgggcagtcgctggttgtgtaactggtcgcagtttctggagttcga

SEQ ID NO: 278228 - DNA, 75 bp, synthetic construct
  source 1..75: mol_type = other DNA
tggtaccgtcagcatcatgctgacagcaactggtatgaaaacgtgtatgaggacttcagggaggtctgtgacatt

SEQ ID NO: 278229 - DNA, 75 bp, synthetic construct
  source 1..75: mol_type = other DNA
cggtgattgaatatgatccgcgctccagcgcgttaaaagccaccggcatcaagaccgcactggtcgaagccagta

SEQ ID NO: 278230 - DNA, 75 bp, synthetic construct
  source 1..75: mol_type = other DNA
atgataaatagcattaattcttttttttccagccttcctcgcagtatatcaagtgctatacgcagcagtaccttc

SEQ ID NO: 278231 - DNA, 75 bp, synthetic construct
  source 1..75: mol_type = other DNA
atgataaatagcattaattcttttttttccagcattcctcgcagtatatcaagtgttacgcgcaacagtagcttc

SEQ ID NO: 278232 - DNA, 75 bp, synthetic construct
  source 1..75: mol_type = other DNA
aaaatggaaaacgacagcacgctgctgccttcaatgctttgtgcgccaacgcgtgaagcggtaagcgaatggttg

SEQ ID NO: 278233 - DNA, 75 bp, synthetic construct
  source 1..75: mol_type = other DNA
cgtttatcagcgatgagctggcaacactgattagccaacaagggctggaaaacgccctcagtcagccgctggcgc

SEQ ID NO: 278234 - DNA, 75 bp, synthetic construct
  source 1..75: mol_type = other DNA
agcgccctcaaccagccactggcgcggattctggaacaggtgcaactggcgctggataacgcccaggaaaaaccg

SEQ ID NO: 278235 - DNA, 75 bp, synthetic construct
  source 1..75: mol_type = other DNA
aaagggctgacctgccatgcggacaccctcggcagctgtggttacgtttatcttgctgtttatccgacgcccgaa

SEQ ID NO: 278236 - DNA, 75 bp, synthetic construct
  source 1..75: mol_type = other DNA
tgtatctgtctgatgaactctcagagtctgcccgcgagaaagctcgcgcctggtactgcgaagagggtgggctgg

SEQ ID NO: 278237 - DNA, 75 bp, synthetic construct
  source 1..75: mol_type = other DNA
agccagtaacggtatccgtccgccctggtctggtgatgaatctcattttctgacccattgcacccgctgcgacgc

SEQ ID NO: 278238 - DNA, 75 bp, synthetic construct
  source 1..75: mol_type = other DNA
ataacgctgcatggggagtgcgaacattgtggtttgacctcgtcacaaaaatagatatggatgtatataaaaaga

SEQ ID NO: 278239 - DNA, 75 bp, synthetic construct
  source 1..75: mol_type = other DNA
ggttacagatcacaccggcgatcttgtctactccgatgtttacgatgggaatatcgagcttgaagatactcatcg

SEQ ID NO: 278240 - DNA, 75 bp, synthetic construct
  source 1..75: mol_type = other DNA
ggtcaccgctgaaagcgatcctgcgcgatccgtccatcacaaaatttctccatgcgggcagtgaagatctggaag

SEQ ID NO: 278241 - DNA, 75 bp, synthetic construct
  source 1..75: mol_type = other DNA
caacttacaacggaccggacactcctgactataacttcattggtgtatattcagatgagatattaacggaagtta

SEQ ID NO: 278242 - DNA, 75 bp, synthetic construct
  source 1..75: mol_type = other DNA
atgggctgcgcatgtggaggatgggattgcggcattaagaaattatagaagcttgaaggagctaagtttagcaat

SEQ ID NO: 278243 - DNA, 75 bp, synthetic construct
  source 1..75: mol_type = other DNA
aaaaattccattcactattcctttagttaactgcccagtgactgggtgggagcacgataacggcaacgttgaagc

SEQ ID NO: 278244 - DNA, 75 bp, synthetic construct
  source 1..75: mol_type = other DNA
aagcaaaatacactgcatacatccatatgatggaatttattccttatttgataatattatatataatttcaaagg

SEQ ID NO: 278245 - DNA, 75 bp, synthetic construct
  source 1..75: mol_type = other DNA
gatgccgaaacgctagcacgtatccgatcagtgaagcgcgtgagcggtgatatccagcgcaaaggaagggcgctg

SEQ ID NO: 278246 - DNA, 75 bp, synthetic construct
  source 1..75: mol_type = other DNA
ataacgcagcatggggagtgcgaacattgtggtttgaactcgtcacaaaaatcgatatggatatacataaaaaga

SEQ ID NO: 278247 - DNA, 75 bp, synthetic construct
  source 1..75: mol_type = other DNA
acgggtatgcgagttatgatcttagaaggaaaatcgaaatgcagcatgaagagtttcagaaaatgacagagcgcg

SEQ ID NO: 278248 - DNA, 75 bp, synthetic construct
  source 1..75: mol_type = other DNA
agttggcaggacatgcggatatatccacgaccacacgctatgactgtaagggcaggcaggctgtagacagagcct

SEQ ID NO: 278249 - DNA, 75 bp, synthetic construct
  source 1..75: mol_type = other DNA
tcgctaaagtacgtgcggcactgctggatgacggttacgccgtgtcgtcggtgaacatggcgctgtcagcactcc

SEQ ID NO: 278250 - DNA, 75 bp, synthetic construct
  source 1..75: mol_type = other DNA
caattacatggatgccgaaacgctggcacgtatccggtcagttaagcgcgtgagcggcgatgtccagcgcaaggg

SEQ ID NO: 278251 - DNA, 75 bp, synthetic construct
  source 1..75: mol_type = other DNA
agcgccctcaaccagccgctggcgcggattctggaacaggtgcaactggcgctggataacgcccaggaaaaacca

SEQ ID NO: 278252 - DNA, 75 bp, synthetic construct
  source 1..75: mol_type = other DNA
tggcgcattggtcgcgcctatggcgaatttctcaaaccgaaaaccattgtgttaggcggtgatgtccgcctgacc

SEQ ID NO: 278253 - DNA, 75 bp, synthetic construct
  source 1..75: mol_type = other DNA
gagagtaaatatagaaagccgcaaaaacgcacaattaatggaagagaaaacagctgagattgtgaattttatccg

SEQ ID NO: 278254 - DNA, 75 bp, synthetic construct
  source 1..75: mol_type = other DNA
cagcggtgataccggactgcgcgaggtccagcgtctggcagaagcgaacgactttccccccgtcgatgaaaccaa

SEQ ID NO: 278255 - DNA, 75 bp, synthetic construct
  source 1..75: mol_type = other DNA
atgccgggccctcgcttcgtgatcagatcatggccctggatgaggcaaaaggggcagaagcgcaggctgaaaaac

SEQ ID NO: 278256 - DNA, 75 bp, synthetic construct
  source 1..75: mol_type = other DNA
ggaggctgcccgcgacattctgtcctcatcgccggataaagcagaaccggtctctgcatccacaaccgccctgtt

SEQ ID NO: 278257 - DNA, 75 bp, synthetic construct
  source 1..75: mol_type = other DNA
agatctatttcgccacgttccatctcggcgtggatggcggcattgaagttaccgccagccataacccgatggatt

SEQ ID NO: 278258 - DNA, 75 bp, synthetic construct
  source 1..75: mol_type = other DNA
ggcaccgaagagatttatttcgccacgttccatctcggcgtggatggcggcattgaagttacggccagccataac

SEQ ID NO: 278259 - DNA, 75 bp, synthetic construct
  source 1..75: mol_type = other DNA
ggcaccgaagagatttatttcgccacgttccatctcggcgtggatggcggcattgaagttaccgccagccataag

SEQ ID NO: 278260 - DNA, 75 bp, synthetic construct
  source 1..75: mol_type = other DNA
ggcaccgaagagatttatttcgccacgttccatctcggcgtggatggcggcatagaagttactgccagccataaa

SEQ ID NO: 278261 - DNA, 75 bp, synthetic construct
  source 1..75: mol_type = other DNA
cagcggtgataccggactgcgcgacgtccagcgtctggcagaagccaacgactttccccccgtcgatgaaaccaa

SEQ ID NO: 278262 - DNA, 75 bp, synthetic construct
  source 1..75: mol_type = other DNA
cagcggtgataccggactgcgcgatgtccagcgtctggcagaagctaacgactttccccccgtcgatgaaaccaa

SEQ ID NO: 278263 - DNA, 75 bp, synthetic construct
  source 1..75: mol_type = other DNA
cagcggtgataccggactgcgcgaagtccagcgtctggcagaagcaaacgactttccccccgtcgatgaaaccaa

SEQ ID NO: 278264 - DNA, 75 bp, synthetic construct
  source 1..75: mol_type = other DNA
ggtaccgaagagatttactttgccaccttccaccttggggtagatggtggcatcgaggtgaccgcgagccacaat

SEQ ID NO: 278265 - DNA, 75 bp, synthetic construct
  source 1..75: mol_type = other DNA
cctacgatattcgtggcaaacttggtgaagaattaaacgaagatatcgcatggcgtattggccgcgcttatggcg

SEQ ID NO: 278266 - DNA, 75 bp, synthetic construct
  source 1..75: mol_type = other DNA
tgtttcctgtttgacgaaaaagggcagtttattgagggctactacattgtcggcctgctggcagaagcattcctc

SEQ ID NO: 278267 - DNA, 75 bp, synthetic construct
  source 1..75: mol_type = other DNA
agttcgcggttctcgatgagacaaaacgtggccgctaccagcgaattactacccgcgatgcttacattgatcacc

SEQ ID NO: 278268 - DNA, 75 bp, synthetic construct
  source 1..75: mol_type = other DNA
acttccagggattgggcggagatgaagcaaactcccaggcgcaagggattctggaacgtgcggcgaagcgtgccg

SEQ ID NO: 278269 - DNA, 75 bp, synthetic construct
  source 1..75: mol_type = other DNA
acgacgatgaaacgcaggcgctgttgcgtcgggcgattcgttataaccgcgaagaagatatcgatgttacggcga

SEQ ID NO: 278270 - DNA, 75 bp, synthetic construct
  source 1..75: mol_type = other DNA
gtgtttattggttttgattacggtacagcaaactgttcagtggcggtaatgcgcgatggcaaaccacagttgctg

SEQ ID NO: 278271 - DNA, 75 bp, synthetic construct
  source 1..75: mol_type = other DNA
aatggagttcctgttattcataataaatataaaagcatttataatcctcttgttgtattacatttgtttgggatt

SEQ ID NO: 278272 - DNA, 75 bp, synthetic construct
  source 1..75: mol_type = other DNA
tagttataatttacctggctggcgtcattttaatgggcgcttttcagaaagctgttgatagtgacggcattattt

SEQ ID NO: 278273 - DNA, 75 bp, synthetic construct
  source 1..75: mol_type = other DNA
tattataaaaacagcaggagaggggcaggatgaagcgtccacgcccttctggatatataagaaagagtatatgga

SEQ ID NO: 278274 - DNA, 75 bp, synthetic construct
  source 1..75: mol_type = other DNA
gctgaacacacatgatacaggaggcactatgccgcaattaactgcaacggaagctgccgcgcaggagaaccagcg

SEQ ID NO: 278275 - DNA, 75 bp, synthetic construct
  source 1..75: mol_type = other DNA
agccgatcgcattatggcgtgtgaagaggcgaaaggtcgtgaacaactggcggcaacgctggcggcgatgccgga

SEQ ID NO: 278276 - DNA, 75 bp, synthetic construct
  source 1..75: mol_type = other DNA
taatatcgttttgcttttaattggttccggcaataagttcgaggagtccattaaactttgtgagactctaaaatt

SEQ ID NO: 278277 - DNA, 75 bp, synthetic construct
  source 1..75: mol_type = other DNA
gggaagataaacacacgtcccgaagccagaactatacgtacatccccaccatcaccgtactggaaagtctgcagc

SEQ ID NO: 278278 - DNA, 75 bp, synthetic construct
  source 1..75: mol_type = other DNA
ccattctttcaaccaaaaatagactctggtgctatatctcgtttcaccagtgcgttaaaagcaaagcttagacac

SEQ ID NO: 278279 - DNA, 75 bp, synthetic construct
  source 1..75: mol_type = other DNA
ttgcagggcaggttcaggtgccgtgcattgaacgtaatgccattgcctctgtgaaggcgattaacgccgcacgga

SEQ ID NO: 278280 - DNA, 75 bp, synthetic construct
  source 1..75: mol_type = other DNA
ccgcgcaagaatgccaaatccaccgtggccgccatgctggctaactggtttctggtgatggagaagggccagcag

SEQ ID NO: 278281 - DNA, 75 bp, synthetic construct
  source 1..75: mol_type = other DNA
gataaactgtctaacgatccgatgaatgtcattgactgggtaaacatgtttgcgctggcagttaacgaagaaaac

SEQ ID NO: 278282 - DNA, 75 bp, synthetic construct
  source 1..75: mol_type = other DNA
tgcgtgtgccgcgtcgtgcgtccgcgcttcgccggatgttggtttccagtgataaactctctaacgatccgatga

SEQ ID NO: 278283 - DNA, 75 bp, synthetic construct
  source 1..75: mol_type = other DNA
gtgcggaagtcggttgccagggcgaagtaggtgttgcctgttcaatggctgctgcgggccttgccgagctgttgg

SEQ ID NO: 278284 - DNA, 75 bp, synthetic construct
  source 1..75: mol_type = other DNA
gaccactttattgaatcagtcagcccggacatctatacccgctattttatggcggccggggcaattggcgctttg

SEQ ID NO: 278285 - DNA, 75 bp, synthetic construct
  source 1..75: mol_type = other DNA
ggcggcggaaattggcatggaacacaaccttggtttaacctgcgacccggttgcagggcaggttcaggtgccgtg

SEQ ID NO: 278286 - DNA, 75 bp, synthetic construct
  source 1..75: mol_type = other DNA
ggcggccggggcgattggcgcgttgtacaaaatgaacgcctcaatttccggggcagaagtcggttgtcagggtga

SEQ ID NO: 278287 - DNA, 75 bp, synthetic construct
  source 1..75: mol_type = other DNA
catctaccgccagtgggtgaaagcgggctggatacgcaccacacccggtgactgtatcgactatgaccgcatccg

SEQ ID NO: 278288 - DNA, 75 bp, synthetic construct
  source 1..75: mol_type = other DNA
aattgatacagaaaatatggataacccattctttcaacccagggttgactctggtgctatatctcgctttaccag

SEQ ID NO: 278289 - DNA, 75 bp, synthetic construct
  source 1..75: mol_type = other DNA
gagtacttatcagaccatccaggagaatatgctgaaaggcgggatttccggtcgcagtgccagaggaaaacgtat

SEQ ID NO: 278290 - DNA, 75 bp, synthetic construct
  source 1..75: mol_type = other DNA
ccatacccgggccattcacagcattgataccgacattaagctcaaccgcgcattgtgggtgatggcagaaacgct

SEQ ID NO: 278291 - DNA, 75 bp, synthetic construct
  source 1..75: mol_type = other DNA
ccgtcgcaatgggtggagatgatgacaaagcgatttaatatctggtgtcagggggctaccccgtggatgggtaac

SEQ ID NO: 278292 - DNA, 75 bp, synthetic construct
  source 1..75: mol_type = other DNA
tcccgaccgttacgcaggcgggtgaatattcaggcgcataaggtgatacacccgaaaaccaacagcctgttaaag

SEQ ID NO: 278293 - DNA, 75 bp, synthetic construct
  source 1..75: mol_type = other DNA
agcatcgacaccgacattaagcttaatcgcacattgtgggtgatggcagaaacgatgctggagagcctgcgctga

SEQ ID NO: 278294 - DNA, 75 bp, synthetic construct
  source 1..75: mol_type = other DNA
tgcgttaaaagcaaagcttgaacacgataagcatattaaaactcaacgaaaagactggcctgatacccgacattc

SEQ ID NO: 278295 - DNA, 75 bp, synthetic construct
  source 1..75: mol_type = other DNA
ggatggatacgcaccacgcccggcgactgcatcgactatgaccgcatccgtgacgatattctgcgcgacgctgaa

SEQ ID NO: 278296 - DNA, 75 bp, synthetic construct
  source 1..75: mol_type = other DNA
attatgccgaagaagatctggtcgggatggagtgttacgccggatttgacctgtcctcaaccagcgatattacca

SEQ ID NO: 278297 - DNA, 75 bp, synthetic construct
  source 1..75: mol_type = other DNA
ccaccggcacgccaggcgctggcacaggcggccgtttcattcctgtatgcgcttgattgcttcctgccgctttac

SEQ ID NO: 278298 - DNA, 75 bp, synthetic construct
  source 1..75: mol_type = other DNA
tggtgacgaacatcagccggtcaccaccgctgacattctgacccctcgacgccgggaggattacggtgaggacct

SEQ ID NO: 278299 - DNA, 75 bp, synthetic construct
  source 1..75: mol_type = other DNA
tggtgacgaacatcagcctgtcaccaccgctgacattctgaccccccgacgcggggaggattacggtgaggacct

SEQ ID NO: 278300 - DNA, 75 bp, synthetic construct
  source 1..75: mol_type = other DNA
gggcgatcgcatggcgcaggggctgggcgtctcggtactccgcacgcgaacattcaccctgcttgcgatcgcgtt

SEQ ID NO: 278301 - DNA, 75 bp, synthetic construct
  source 1..75: mol_type = other DNA
gtatggtcacgaaccacgcctgatggctgcaaagtttgtatcgccttaccgtatggcaggtaaatcaggaaaaaa

SEQ ID NO: 278302 - DNA, 75 bp, synthetic construct
  source 1..75: mol_type = other DNA
acgttcaatggcgcgacgatcctggaactggatgggcgacagccagcagacgagattttgcaagcttcgctacgt

SEQ ID NO: 278303 - DNA, 75 bp, synthetic construct
  source 1..75: mol_type = other DNA
accaccaactggcagcgttacaggaaaaaatcgccgttacgccgcaactgacattcaatggcgcaaagatccttg

SEQ ID NO: 278304 - DNA, 75 bp, synthetic construct
  source 1..75: mol_type = other DNA
catcgtacccgacagggttttatcgaagagaaaacagcaacatataatcgtctccgggggttgatatctgaattc

SEQ ID NO: 278305 - DNA, 75 bp, synthetic construct
  source 1..75: mol_type = other DNA
gcagaagagctctttacctcttcaggttcagcaatgtgttgatgatttgctggaacacgttgatcgcattgaagc

SEQ ID NO: 278306 - DNA, 75 bp, synthetic construct
  source 1..75: mol_type = other DNA
gcatggccggtaaatcagggaaaaatgatgcagctgatgctcaggctatctgcgaagcggttcgtcgcccacata

SEQ ID NO: 278307 - DNA, 75 bp, synthetic construct
  source 1..75: mol_type = other DNA
ccgcgttaatgcataaagggtttgtttgtcgtcttgatgcgttcagtgatgtctatgtagtgatgttaccggagg

SEQ ID NO: 278308 - DNA, 75 bp, synthetic construct
  source 1..75: mol_type = other DNA
tatggaacgtaaaacttaacagcccgattcaaaaacttgtcttaatggctctggctgaaaaggcagataacaaag

SEQ ID NO: 278309 - DNA, 75 bp, synthetic construct
  source 1..75: mol_type = other DNA
gccgcccggaactggtccgtcgagttgagtgggcgcaagaggttatgttggcagatgcagagctgccgttcgaac

SEQ ID NO: 278310 - DNA, 75 bp, synthetic construct
  source 1..75: mol_type = other DNA
atggatattctgagcacggaccacgtaatattcaatacattatttactgccgggtttttcgtgaatcaacgtaat

SEQ ID NO: 278311 - DNA, 75 bp, synthetic construct
  source 1..75: mol_type = other DNA
tggctgtttattcgtatccagaaccgaccgttggtcgatctcgaacacgcagccttgcaggttggtaaagggatt

SEQ ID NO: 278312 - DNA, 75 bp, synthetic construct
  source 1..75: mol_type = other DNA
ccgacaaactgcaactggaggacggcacgcagttggttgtgcctcccgctttccgtcgggagatctaccgtgagc

SEQ ID NO: 278313 - DNA, 75 bp, synthetic construct
  source 1..75: mol_type = other DNA
gttcagcaatgtgttgatgatttgctggagcacgttgctcgcattgaagataacatcgctgaatatgaccgaatt

SEQ ID NO: 278314 - DNA, 75 bp, synthetic construct
  source 1..75: mol_type = other DNA
aaaagaacggttttagctgccagatagaaaccagcggtactcacgaagtacgttgtacaccgaacacctgggtta

SEQ ID NO: 278315 - DNA, 75 bp, synthetic construct
  source 1..75: mol_type = other DNA
attcgtttacagggatgcccggtcggctgtgcctggtgtgataccaaacacacatgggaaaaacttgaggatcgg

SEQ ID NO: 278316 - DNA, 75 bp, synthetic construct
  source 1..75: mol_type = other DNA
aaggctttcagcctttcttcgcctgccagacccgtgtgcgcgacccgggccgccggggatacacaaaacacatgc

SEQ ID NO: 278317 - DNA, 75 bp, synthetic construct
  source 1..75: mol_type = other DNA
cgccctctcttaacatgttggcactgggcgatcgcatggcgcaggggctgggcgtctcggtactccgcacgcgaa

SEQ ID NO: 278318 - DNA, 75 bp, synthetic construct
  source 1..75: mol_type = other DNA
ccccatgagctggcgaccggtgtcatgacggcgttagttggtgcgcccgtttttgtcattatggcgatgaggatg

SEQ ID NO: 278319 - DNA, 75 bp, synthetic construct
  source 1..75: mol_type = other DNA
gtgccttactgctattactggcagatattattgcccggacgcttttcacgccccatgagctggcgaccggtgtca

SEQ ID NO: 278320 - DNA, 75 bp, synthetic construct
  source 1..75: mol_type = other DNA
gtgttgtatctaatcgtgggggcaggtcaccagcaacaggacgcgatcgacgatgcgacgcatgactccaaccag

SEQ ID NO: 278321 - DNA, 75 bp, synthetic construct
  source 1..75: mol_type = other DNA
gaaacttgatccttttaaccttgagaaacgctataacaaagctaaaagcgagcgacaggaactgcgtaagcaggt

SEQ ID NO: 278322 - DNA, 75 bp, synthetic construct
  source 1..75: mol_type = other DNA
tcactgcattgaccaaaatggtaaagctgttctggttaaacccaaggtgtcgcgtgcagcactttctgaactcat

SEQ ID NO: 278323 - DNA, 75 bp, synthetic construct
  source 1..75: mol_type = other DNA
agccgtttatgggcggacaatggcaaaacgatacacccacgttgcgtattccctactatcgcccgctcgaaccgc

SEQ ID NO: 278324 - DNA, 75 bp, synthetic construct
  source 1..75: mol_type = other DNA
gaaaatcaaagcttggcaggatcacgaaggctggcgattcgtatctacgaacgctgttggtccagggcgctcgtt

SEQ ID NO: 278325 - DNA, 75 bp, synthetic construct
  source 1..75: mol_type = other DNA
cgaccttaaccaacagctcaaaaaaactattaaagatgcaagcgaggcgcgcgtggcatttgctaataaaaaagc

SEQ ID NO: 278326 - DNA, 75 bp, synthetic construct
  source 1..75: mol_type = other DNA
cgggaggattacggtaaggacctgtggagtacttatcagaccattcaggagaatatgctgaaaggcggaatttcc

SEQ ID NO: 278327 - DNA, 75 bp, synthetic construct
  source 1..75: mol_type = other DNA
ggcgctggcacaggcggccctgacttaccgttatggtgacgaacatcagcccgtcaccaccgccgacattctgac

SEQ ID NO: 278328 - DNA, 75 bp, synthetic construct
  source 1..75: mol_type = other DNA
accgtactagaaagcctgcagcgggagggctttcagcccttcttcgcctaccagatccgcgtgcgcgacccgggc

SEQ ID NO: 278329 - DNA, 75 bp, synthetic construct
  source 1..75: mol_type = other DNA
aaatgtggtggagaaagttatcgaaggggcttacgaggtggtgggtgtgtttgaccggatcgaggagaagcgtga

SEQ ID NO: 278330 - DNA, 75 bp, synthetic construct
  source 1..75: mol_type = other DNA
aaatgtggtggagaaagttattgaaggggcttacgaggtggtgggtgtgtttgaccggattgaggagaagcgtga

SEQ ID NO: 278331 - DNA, 75 bp, synthetic construct
  source 1..75: mol_type = other DNA
aaatgtggtggagaaagttatagaaggggcttacgaggtggtgggtgtgtttgaccggatagaggagaagcgtga

SEQ ID NO: 278332 - DNA, 75 bp, synthetic construct
  source 1..75: mol_type = other DNA
atgctgcaaaccagatacgtcgtgaccgtccactgacacacgaagaactgatgcaccatgtgccgagtatttttg

SEQ ID NO: 278333 - DNA, 75 bp, synthetic construct
  source 1..75: mol_type = other DNA
gggaaggttttcagccattcttcgcctgccagacccgcgtgcgcgacccgggccgccggggatacaccagacaca

SEQ ID NO: 278334 - DNA, 75 bp, synthetic construct
  source 1..75: mol_type = other DNA
tcagacccgcgtacgtgacccgggccgtcgggaatataccaaacacatgctgcgtctgcggcggagcggacagat

SEQ ID NO: 278335 - DNA, 75 bp, synthetic construct
  source 1..75: mol_type = other DNA
tatccatacccgggccattcacagcattgataccgacattaagctcaaccgtgcattgtgggtaatggcagaaac

SEQ ID NO: 278336 - DNA, 75 bp, synthetic construct
  source 1..75: mol_type = other DNA
tgagctgcgctcggcaacgctgtttttgtccgaacaggacgtatcgaccactctgcctgtgcccatgcacggcag

SEQ ID NO: 278337 - DNA, 75 bp, synthetic construct
  source 1..75: mol_type = other DNA
gttacatcaagacaaaccttctcagcgaaaaagaagtggtcaagctgtggcaccgctatcaatccatccgttctg

SEQ ID NO: 278338 - DNA, 75 bp, synthetic construct
  source 1..75: mol_type = other DNA
aaatgtggtggagaaagttatggaaggggcttacgaggtggtgggtgtgtttgaccggatagaggaaaagcgtga

SEQ ID NO: 278339 - DNA, 75 bp, synthetic construct
  source 1..75: mol_type = other DNA
aattctttatagaaggatatataccagcacacaaggttggagtgtatggaaaaaaatagtattaacagaaagaat

SEQ ID NO: 278340 - DNA, 75 bp, synthetic construct
  source 1..75: mol_type = other DNA
ggtgcttacgaagtggtgggcgtgtttgacctgattgaggaaaagcgtgatgccatgcagtcgctgctgctgccg

SEQ ID NO: 278341 - DNA, 75 bp, synthetic construct
  source 1..75: mol_type = other DNA
tgtacgtgggtttgatagcaccggtaattctctcgcgtgggcgttgggttcatcagtcggcgtaagtaagatgct

SEQ ID NO: 278342 - DNA, 75 bp, synthetic construct
  source 1..75: mol_type = other DNA
tattacaggcactgaagtaccggaaattattttattaaacagccatgacggctccagtagctaccagatgatccc

SEQ ID NO: 278343 - DNA, 75 bp, synthetic construct
  source 1..75: mol_type = other DNA
agtgacgagcaacatttatttggcagagctgcactgatggccaggtatgaagatgaaaataaaacgccagtgacg

SEQ ID NO: 278344 - DNA, 75 bp, synthetic construct
  source 1..75: mol_type = other DNA
tttccggtcgcagtgccagaggaaaacgtatccatacccgggccattcacagcatcgataccgacattaagctca

SEQ ID NO: 278345 - DNA, 75 bp, synthetic construct
  source 1..75: mol_type = other DNA
attctggtttctatcaacaaccaacgagcgcttacgcaacagaagaattaaattacccaatcggtctggcgggcg

SEQ ID NO: 278346 - DNA, 75 bp, synthetic construct
  source 1..75: mol_type = other DNA
aaatgtggtggagaaagttatggaaggggcttacgaggtggtgggtgtgtttgaccggatggaggagaagcgtga

SEQ ID NO: 278347 - DNA, 75 bp, synthetic construct
  source 1..75: mol_type = other DNA
aaatgtggtggagaaagttatggaaggggcttacgaggtggtgggtgtgtttgaccggatcgaggacaagcgtga

SEQ ID NO: 278348 - DNA, 75 bp, synthetic construct
  source 1..75: mol_type = other DNA
gccgacattctgacgccacgacgccgggaggattacggtaaggacctgtggagtgcttatcagaccatccaggag

SEQ ID NO: 278349 - DNA, 75 bp, synthetic construct
  source 1..75: mol_type = other DNA
atgctgaaaggcgggatttccggtcgcagtgcaaaaggaaaacgtatccacacccgtgccattcacagcatcgac

SEQ ID NO: 278350 - DNA, 75 bp, synthetic construct
  source 1..75: mol_type = other DNA
agcatcgacacggacattaagctcaaccgggcgttgtgggtgatggcagaaacgatgctggagagcctgcgctga

SEQ ID NO: 278351 - DNA, 75 bp, synthetic construct
  source 1..75: mol_type = other DNA
acagcattgacactgacattaagctcaaccgcgcattgtgggtgatggcggaaaccctgctggagagcctgcgct

SEQ ID NO: 278352 - DNA, 75 bp, synthetic construct
  source 1..75: mol_type = other DNA
aatacttgtctcctggtttcaaagtaaaaagcaattagcaactgaagctgttaaatttaagcttgattcattgaa

SEQ ID NO: 278353 - DNA, 75 bp, synthetic construct
  source 1..75: mol_type = other DNA
cctccagctaccagatgctgccgggttacttcagattcgtctgccagaacggctgcgtctgcggtcagtctctgg

SEQ ID NO: 278354 - DNA, 75 bp, synthetic construct
  source 1..75: mol_type = other DNA
tgcataacaggcacatgctggaacaacaaacgtgggataatgtgcccggagttaataccactaattttctgaaca

SEQ ID NO: 278355 - DNA, 75 bp, synthetic construct
  source 1..75: mol_type = other DNA
tgaagcaaaaactggccttgatgcgaatacgaacttaaacgatataaaaggtactacagccggtttttattacca

SEQ ID NO: 278356 - DNA, 75 bp, synthetic construct
  source 1..75: mol_type = other DNA
ccggtcgcagtgccagaggaaaacgtatccatacccgggccattcacagtatcgacaccgatattaagctcaacc

SEQ ID NO: 278357 - DNA, 75 bp, synthetic construct
  source 1..75: mol_type = other DNA
tacttacgtttattcgaattactcaccatcagcgccacgacttcaggtgtcaacatctggattgtggggttgcca

SEQ ID NO: 278358 - DNA, 75 bp, synthetic construct
  source 1..75: mol_type = other DNA
tttacgaactggacgacgaaaacgaggttgatgatccggcgatgtggataaaggcgaaccctaatattgatgttt

SEQ ID NO: 278359 - DNA, 75 bp, synthetic construct
  source 1..75: mol_type = other DNA
ccgccgcgattctggctgactggtttctgattatggagaacgggcagcaggatatttacaccgcagcggtgagcc

SEQ ID NO: 278360 - DNA, 75 bp, synthetic construct
  source 1..75: mol_type = other DNA
tttgaggtggagccgttcccgcaaacataccttcgtttcagtccggcggcgaaatcgttcgaagtttttgttaac

SEQ ID NO: 278361 - DNA, 75 bp, synthetic construct
  source 1..75: mol_type = other DNA
cacatgtaaccctgtataagaataggattaaacaggtcattgatgaagcactgaaagagcatcctaatacaatga

SEQ ID NO: 278362 - DNA, 75 bp, synthetic construct
  source 1..75: mol_type = other DNA
tgacgaacatcggcccgtcaccaccgccgacattctgacgccacgacgccgggaggattacggtaaggacctgtg

SEQ ID NO: 278363 - DNA, 75 bp, synthetic construct
  source 1..75: mol_type = other DNA
tgccatgcagtcgctggtcctgccgccaccgacacgccaggcgctggcacaggcggcactgacttaccgttatgg

SEQ ID NO: 278364 - DNA, 75 bp, synthetic construct
  source 1..75: mol_type = other DNA
cgcaagaaaagatgaggttatccgatttcagcgttcaagcgacacaagaaccatcattttatctactgacgttca

SEQ ID NO: 278365 - DNA, 75 bp, synthetic construct
  source 1..75: mol_type = other DNA
ccacatctaacccggtaaaatctggcggagggcgaattgatgtccttggaagcacgtcagactatagcaaaatgg

SEQ ID NO: 278366 - DNA, 75 bp, synthetic construct
  source 1..75: mol_type = other DNA
ttggtgaggtgcgggtaccgcacaaaggggatgtggtgagtcaggtgattgagggggcctatgaagtattgggga

SEQ ID NO: 278367 - DNA, 75 bp, synthetic construct
  source 1..75: mol_type = other DNA
gattaccggtaaacaggtgccggaaattatactgctcaattctcacgatggctccagttcgtatcagatgttacc

SEQ ID NO: 278368 - DNA, 75 bp, synthetic construct
  source 1..75: mol_type = other DNA
gccatcagatggcgcagcaactgggcggtccgacggaagttcgcgtcgaggttaacaaaagttcgcctgtcgtct

SEQ ID NO: 278369 - DNA, 75 bp, synthetic construct
  source 1..75: mol_type = other DNA
ttatcgactatctacgcaccgggcaggagatgccgatggagttggccgatcttaatgccgtgcttggtgaggtga

SEQ ID NO: 278370 - DNA, 75 bp, synthetic construct
  source 1..75: mol_type = other DNA
aatatgctgaaaggcgggatttccggtcgcagtgccagagggaaacgtatccatacccgtgccattcacagcatc

SEQ ID NO: 278371 - DNA, 75 bp, synthetic construct
  source 1..75: mol_type = other DNA
ccgtccgctgacacacgaagaactgatgcactatgtgccggggattttcggggaagataaacacacgtcccgaag

SEQ ID NO: 278372 - DNA, 75 bp, synthetic construct
  source 1..75: mol_type = other DNA
gtacttcaggttcgtctgccagaacggctgcgtctgtggtcagtctctgggggaagtacgtgttccgcaccgggg

SEQ ID NO: 278373 - DNA, 75 bp, synthetic construct
  source 1..75: mol_type = other DNA
aaggctttcagcccttctttgcctgccagacccgcgtgcgggacccgggacgtcggggatacacaaagcacatgc

SEQ ID NO: 278374 - DNA, 75 bp, synthetic construct
  source 1..75: mol_type = other DNA
ccgacattctgacgccgcgacgccgggaggattacggtaaggacctgtggagcgcatatcagaccatccaggaga

SEQ ID NO: 278375 - DNA, 75 bp, synthetic construct
  source 1..75: mol_type = other DNA
atgctgaaaggcgggatttccggtcgcagtgcaaaaggaaaacgtatccatacccgtgccattcacagcattgac

SEQ ID NO: 278376 - DNA, 75 bp, synthetic construct
  source 1..75: mol_type = other DNA
ccaccggcactccaggcgctggcacaggcggcgctgacttaccgttatggtgatgaacatcagcccgtcaccact

SEQ ID NO: 278377 - DNA, 75 bp, synthetic construct
  source 1..75: mol_type = other DNA
ttgctggaagtctctgaaaacagcaaacgggcagtgattctggtagccgcctggcttggcgatgcccgcctgatc

SEQ ID NO: 278378 - DNA, 75 bp, synthetic construct
  source 1..75: mol_type = other DNA
agcgcaaagtggatttagttttcgcgccttcggtaaaagagatctacccgaacggtactgaaacccacacttacg

SEQ ID NO: 278379 - DNA, 75 bp, synthetic construct
  source 1..75: mol_type = other DNA
tgctgcgtcagcaaattcgccgcctgcgtatggaaggtaagcgcgtggcgctggtgcccaccatgggtaacctgc

SEQ ID NO: 278380 - DNA, 75 bp, synthetic construct
  source 1..75: mol_type = other DNA
agcgcttaaattgttaagcccggatggcgataatgcatggtcggtgatgtacaaattaagtcaggcgttaagcga

SEQ ID NO: 278381 - DNA, 75 bp, synthetic construct
  source 1..75: mol_type = other DNA
gaccgtgcggtgacaacagcctggtggcgcttaaattgcttagcccggatggtgataatgcatggtcggtgatgt

SEQ ID NO: 278382 - DNA, 75 bp, synthetic construct
  source 1..75: mol_type = other DNA
tctgacggcagaacaacgcaaaattgcgcctggtctgtacaaagttttaagttcgattgctgacaaattgcaggc

SEQ ID NO: 278383 - DNA, 75 bp, synthetic construct
  source 1..75: mol_type = other DNA
ggccgacaccgcattcattcgactggaagatgtcggctgggatcgttctcagcggcacagcgacagccatcagaa

SEQ ID NO: 278384 - DNA, 75 bp, synthetic construct
  source 1..75: mol_type = other DNA
gatgcgcccggcacacataaggctggttatgcaatctgccgttctgcagattttaactcatgggaatatgtgtca

SEQ ID NO: 278385 - DNA, 75 bp, synthetic construct
  source 1..75: mol_type = other DNA
tgagaaatgggtgacagatactgaggcacagcatagcgccgcagtagaagcggcagaagcacagcgccagtcgct

SEQ ID NO: 278386 - DNA, 75 bp, synthetic construct
  source 1..75: mol_type = other DNA
gtcaataacgacggtgacagtgccatcagcaacggtggcaccggcacgcaggttaacggtgatgaagccaccgtg

SEQ ID NO: 278387 - DNA, 75 bp, synthetic construct
  source 1..75: mol_type = other DNA
ctggatgtcagcggcggcggtcacgggattgatatcaccggcgacagcgccacggtggacaacaagggcggtatg

SEQ ID NO: 278388 - DNA, 75 bp, synthetic construct
  source 1..75: mol_type = other DNA
gtgagcgcagatggcgcaacgaagtggcaatataatcataaaggtgagcttgttattacgggtgataatgccaca

SEQ ID NO: 278389 - DNA, 75 bp, synthetic construct
  source 1..75: mol_type = other DNA
gtgtctgatattttgtctcgttataagggtgatgatttcagaagtaagaatagaaagtttaaagaacaactggtc

SEQ ID NO: 278390 - DNA, 75 bp, synthetic construct
  source 1..75: mol_type = other DNA
ttgacgcggcaaaagaactggggctcaaagtagtccgtgttccagcctatgatccagaggccgttgctgaacacg

SEQ ID NO: 278391 - DNA, 75 bp, synthetic construct
  source 1..75: mol_type = other DNA
cccgacgggcgtaaacaactggacgatatccgccagcaactgctgactcaactgatccagcgccgcgatccggta

SEQ ID NO: 278392 - DNA, 75 bp, synthetic construct
  source 1..75: mol_type = other DNA
gttagattcagagtcagttaaagatgttatcaaaaaatgctgtgacttggttgaacaactagaaaaagagcttaa

SEQ ID NO: 278393 - DNA, 75 bp, synthetic construct
  source 1..75: mol_type = other DNA
gcgatggcatgacagcaaacgcacaggtcgccccggttgggtagtcatgtgggatggctggttcagacttcagga

SEQ ID NO: 278394 - DNA, 75 bp, synthetic construct
  source 1..75: mol_type = other DNA
cgattgctggaaaggcagggccatactcctccggcagaagcagaaaaagcttattatgcttccatcggaaacgat

SEQ ID NO: 278395 - DNA, 75 bp, synthetic construct
  source 1..75: mol_type = other DNA
tttagttcgcgacaatgtaaagctaaataatgatgtgtataaagaacttaataagtttatgcacgattacgacaa

SEQ ID NO: 278396 - DNA, 75 bp, synthetic construct
  source 1..75: mol_type = other DNA
taaattaccgggtgataaaaagtttaccaacctgaaggagacaatatttaatgatgactttattgtgagacgaga

SEQ ID NO: 278397 - DNA, 75 bp, synthetic construct
  source 1..75: mol_type = other DNA
ataccagatcatgggcaggatagatatttatcaataacacattcttattttgaggataacattgagcctgatgtt

SEQ ID NO: 278398 - DNA, 75 bp, synthetic construct
  source 1..75: mol_type = other DNA
atgatggagttaaagaatatctagaggaggggaaaaaaaatggaagagatttatcgcgtaatgaattagatgaga

SEQ ID NO: 278399 - DNA, 75 bp, synthetic construct
  source 1..75: mol_type = other DNA
gaaagacggccagagtgctcatcgaaacgatgggatatgaagacagtgattactgcgcgagaaaatccaggcagc

SEQ ID NO: 278400 - DNA, 75 bp, synthetic construct
  source 1..75: mol_type = other DNA
taaaagaaagccaggtacgccggaattaagtctggaaaggcccctgtttgatacagaagtttatgttaatggtga

SEQ ID NO: 278401 - DNA, 75 bp, synthetic construct
  source 1..75: mol_type = other DNA
gatggcagaatcatctgcagtgaagggtatgctcatgctctttatcaactgacatgtccggtgcctgtggatagc

SEQ ID NO: 278402 - DNA, 75 bp, synthetic construct
  source 1..75: mol_type = other DNA
ctggattatatcgacgagctgaacgcactggatatcagcacggcacctgaaatcagctggccggaagcaccactg

SEQ ID NO: 278403 - DNA, 75 bp, synthetic construct
  source 1..75: mol_type = other DNA
tattacagaccatgagcgcacaggaatatgaagatatccggtctgcgggaagtgatgcgcgtcgggagctgactc

SEQ ID NO: 278404 - DNA, 75 bp, synthetic construct
  source 1..75: mol_type = other DNA
tattacagaccatgagtgcacaggaatatgaagatatccgtgctgcgggaagcgatatgcgccgtaatctcactc

SEQ ID NO: 278405 - DNA, 75 bp, synthetic construct
  source 1..75: mol_type = other DNA
gagtacggcagcgagtttggcggatttttccccgtccaggtccgtttctcgcctgcccacgaacgttttcacctg

SEQ ID NO: 278406 - DNA, 75 bp, synthetic construct
  source 1..75: mol_type = other DNA
ttcagaccatgaacgcacaggaatatgaagatatccgggctgccggaagtgatgaacgccgtgagctgactcacg

SEQ ID NO: 278407 - DNA, 75 bp, synthetic construct
  source 1..75: mol_type = other DNA
tacagtccatgaacgcacaggaatatgaagatatccgggctgccggaagtgatgaacgccgtgagctgactcacg

SEQ ID NO: 278408 - DNA, 75 bp, synthetic construct
  source 1..75: mol_type = other DNA
atgaaaactgaactgaccctgaatgtattacagaccatgagtgcacaggaatatgaagatatccgggctgccgga

SEQ ID NO: 278409 - DNA, 75 bp, synthetic construct
  source 1..75: mol_type = other DNA
ccgaccatgtgttctatgccaacgccaacaaagaagcgacgccgctggtaagcgcggaagtgcgtgataacccgg

SEQ ID NO: 278410 - DNA, 75 bp, synthetic construct
  source 1..75: mol_type = other DNA
gtatttatccgcctgcggatgttcgtgcgaagctgttcactctgaaagtgcaggacccgaaaatcgaccgtgtgc

SEQ ID NO: 278411 - DNA, 75 bp, synthetic construct
  source 1..75: mol_type = other DNA
gcgtctaaccgtgcgaaagaagcgaagaacggcgtgaatgtttccttctcgattcctaaagaaggagcgatggca

SEQ ID NO: 278412 - DNA, 75 bp, synthetic construct
  source 1..75: mol_type = other DNA
gcggaattttaaaactagcaatgcggcatattcacaactatgtgaaaaattatctttatttaaaagcgcgcccag

SEQ ID NO: 278413 - DNA, 75 bp, synthetic construct
  source 1..75: mol_type = other DNA
gccattcactggcactggcggcgtcactggatgcgcaggggtacagcgttaacgacatcattcatatcctgatgg

SEQ ID NO: 278414 - DNA, 75 bp, synthetic construct
  source 1..75: mol_type = other DNA
gcgacgagcacgcctggcaaatcgaactcaaccgacggcgcaccctgccagtcaatggcgtatcggatgcattag

SEQ ID NO: 278415 - DNA, 75 bp, synthetic construct
  source 1..75: mol_type = other DNA
caaacgctcaccattggttcgacgcagatttgggtgctgccaaatcccagcggtttaagtcgcgtttcactggag

SEQ ID NO: 278416 - DNA, 75 bp, synthetic construct
  source 1..75: mol_type = other DNA
ggcaggcgtggctgaaccagcagacgtggctggggcagggacggcatattgttctgccggaaggaacggatgttg

SEQ ID NO: 278417 - DNA, 75 bp, synthetic construct
  source 1..75: mol_type = other DNA
cgggcaggccgtggccgctggtgatttaccagcgtgccgggcgggaatggctggaagagagcctggatgacacac

SEQ ID NO: 278418 - DNA, 75 bp, synthetic construct
  source 1..75: mol_type = other DNA
caacaggcggttgaaggcgaacaggcatttgtcgttatgcccgttcgcacattgtttgagatgacccttggcgaa

SEQ ID NO: 278419 - DNA, 75 bp, synthetic construct
  source 1..75: mol_type = other DNA
gtaccgaaacgggagataccaaagaaatcacagttccgggtgattaccctgaaaatacaaccactatagccccat

SEQ ID NO: 278420 - DNA, 75 bp, synthetic construct
  source 1..75: mol_type = other DNA
tgagaaatgggtggccgatgctgaggcacaacatagcgccgcagtcgaagcggcagaagcacagcgccagtcact

SEQ ID NO: 278421 - DNA, 75 bp, synthetic construct
  source 1..75: mol_type = other DNA
ttttaactcatgggaatatgtaccagaccatcgcggtgaaatcgtctataacaccgaaacgggagacgccaaaga

SEQ ID NO: 278422 - DNA, 75 bp, synthetic construct
  source 1..75: mol_type = other DNA
cgcagggttatcggctggagtctgtccgcacatgccgatactgcactgataagcgatgccctgcggatggcctat

SEQ ID NO: 278423 - DNA, 75 bp, synthetic construct
  source 1..75: mol_type = other DNA
tcgggggctttttccccgtccaggttcgtttcacgccagcccacgaacgtttccacctggcattatgttcgccgg

SEQ ID NO: 278424 - DNA, 75 bp, synthetic construct
  source 1..75: mol_type = other DNA
tggaaggtgatatatcaggccgggtttaccgaccgtcagttgaagccgcaggaggcacagcatctgctggattat

SEQ ID NO: 278425 - DNA, 75 bp, synthetic construct
  source 1..75: mol_type = other DNA
aagaagacggcaccagcgtcattcctttttttacctcgttagaagcacttcaacaggcggttgaagacgaacagg

SEQ ID NO: 278426 - DNA, 75 bp, synthetic construct
  source 1..75: mol_type = other DNA
atgaattgtggttcttatgtccgaaacaaaaacgaacttgaagacctgctggaaaaagcagcaactgaaccggcg

SEQ ID NO: 278427 - DNA, 75 bp, synthetic construct
  source 1..75: mol_type = other DNA
agtgatgaacgtcgtgaactcacacatgccgtgatgcgggagctggatgcgccggataactggacgatgaacggc

SEQ ID NO: 278428 - DNA, 75 bp, synthetic construct
  source 1..75: mol_type = other DNA
ccgtatcgctgtcggttcacaggcggggcgaaaggtgttcactttgcaaactctgccgaccagtggtgatccgtt

SEQ ID NO: 278429 - DNA, 75 bp, synthetic construct
  source 1..75: mol_type = other DNA
gcccaccgggtgggtcgctatctggaacggcaaggcctgctggaacgggatgtcgaaaacagctatctggcctcg

SEQ ID NO: 278430 - DNA, 75 bp, synthetic construct
  source 1..75: mol_type = other DNA
ggtacatcagccgcccggcggtatccgagaagcggctgtcgttaacacgaggcggcaacgtgcgctaccagctca

SEQ ID NO: 278431 - DNA, 75 bp, synthetic construct
  source 1..75: mol_type = other DNA
acccagctgacgcacaccatcgcccaccgggtgggtcgctatctggaacggcaaggcctgctggaacgggatgtc

SEQ ID NO: 278432 - DNA, 75 bp, synthetic construct
  source 1..75: mol_type = other DNA
ttgccacgcacctggtcaagaaagcgggccatacccaccaagtggccaagacgggcgcggtcaccctgatccagc

SEQ ID NO: 278433 - DNA, 75 bp, synthetic construct
  source 1..75: mol_type = other DNA
gtttctggacgctgcaaaaagttatcgacaacattcatcgcgccgccgatcgacagaaaatcctgctggtttgta

SEQ ID NO: 278434 - DNA, 75 bp, synthetic construct
  source 1..75: mol_type = other DNA
ccggcaaaacggggcaggggcaacaaggtcagggtggctgatgaaccggcaacaccagcacaacggcgagcgtcg

SEQ ID NO: 278435 - DNA, 75 bp, synthetic construct
  source 1..75: mol_type = other DNA
caagaagctcgaacggctgtgccggtacatcagccgcccggcggtatccgagaagcggctgtcgttaacacgagg

SEQ ID NO: 278436 - DNA, 75 bp, synthetic construct
  source 1..75: mol_type = other DNA
tacgcagatcaaaaggaaattattcgctactcagctgagcatgagtcaattcaaagcgaactggccgatagcctt

SEQ ID NO: 278437 - DNA, 75 bp, synthetic construct
  source 1..75: mol_type = other DNA
tgaaagtcatcgcctgcattgaagaccctatagtgatcaagcagatccttgatcacctgaagcacaaagccgaaa

SEQ ID NO: 278438 - DNA, 75 bp, synthetic construct
  source 1..75: mol_type = other DNA
gaggcgctctctcgtgccgatctgatcgtctggcagcacccaatgcagtggtacagcattccgccgttgctcaaa

SEQ ID NO: 278439 - DNA, 75 bp, synthetic construct
  source 1..75: mol_type = other DNA
tcacggcggcacggcgctgcatggcaaacatttgctgtgggcggtgacgaccggcggcggggaaagccattttga

SEQ ID NO: 278440 - DNA, 75 bp, synthetic construct
  source 1..75: mol_type = other DNA
acacaggcatccccccaatatagctgttctcaaggaacactaagcggtaataagtgtgtatgggatacacaagaa

SEQ ID NO: 278441 - DNA, 75 bp, synthetic construct
  source 1..75: mol_type = other DNA
ctttgaagacaaatccaacgacgtgattcaggatgacgtattccgtcgtctgtctgcctgtcataacgtactgtt

SEQ ID NO: 278442 - DNA, 75 bp, synthetic construct
  source 1..75: mol_type = other DNA
ggtgtaatggtgattaacaccagccgcggcgctctgattgactctcaggccgcgattgaagcgctgaaaaaccag

SEQ ID NO: 278443 - DNA, 75 bp, synthetic construct
  source 1..75: mol_type = other DNA
ttcgttaatgatgacggcagccgcccggtgctggaagagctgaaaaagcatggtgtgaaatatattgccctgcgc

SEQ ID NO: 278444 - DNA, 75 bp, synthetic construct
  source 1..75: mol_type = other DNA
tgtcctgaatgccggtatcccggccattatccagaacatccgggccgcgcaacgccgcgttagttgtgatgacct

SEQ ID NO: 278445 - DNA, 75 bp, synthetic construct
  source 1..75: mol_type = other DNA
aaaattcacggcgagattcacggaggatgaggctgaaatcgtaagagaaaaagcggagtcaagtggacagacggt

SEQ ID NO: 278446 - DNA, 75 bp, synthetic construct
  source 1..75: mol_type = other DNA
gcggaggccctgaccagtatctcccagaccacgctgcaaaacttaagtcatctggagaaaggcgaaccttgccct

SEQ ID NO: 278447 - DNA, 75 bp, synthetic construct
  source 1..75: mol_type = other DNA
acgattgccacctaagcgtgcgtgttgatgaaattgtgtcatccgtgccaacttttccgacaaaaaatgcagccg

SEQ ID NO: 278448 - DNA, 75 bp, synthetic construct
  source 1..75: mol_type = other DNA
ctgtagtagtcataacatccctactaagtggaaccggcgtattccttctcggagttagagacgggcgcatttctg

SEQ ID NO: 278449 - DNA, 75 bp, synthetic construct
  source 1..75: mol_type = other DNA
tgaattatctctgtcaaactggcactctgattaataatcagtgcaaagttgttacgaatggtggcccggttaaag

SEQ ID NO: 278450 - DNA, 75 bp, synthetic construct
  source 1..75: mol_type = other DNA
gaatgtcggaccgcgcacgcgcactcagacattccccacctggtcagggctttgccccgacaccccggtaaggag

SEQ ID NO: 278451 - DNA, 75 bp, synthetic construct
  source 1..75: mol_type = other DNA
gcgctcctgttggcggtctggtatcaggccttacaagagtatgaacaattggattaccgatctttaaatgactct

SEQ ID NO: 278452 - DNA, 75 bp, synthetic construct
  source 1..75: mol_type = other DNA
aatatgttcaccgtaaattttacaagaataatttatcgtggttatgttctgaatatgtgaagcatcggcggaaag

SEQ ID NO: 278453 - DNA, 75 bp, synthetic construct
  source 1..75: mol_type = other DNA
ggtacggacatgttccagttctgtaaagtaattaaccagctttgtgatctgctcgcctacaaagagcccgaagaa

SEQ ID NO: 278454 - DNA, 75 bp, synthetic construct
  source 1..75: mol_type = other DNA
ggcggcgctggaaggcggtcgtgatgccaccagcggcaaagtgttcctgccacaagaaaaagcgttgtcagcggg

SEQ ID NO: 278455 - DNA, 75 bp, synthetic construct
  source 1..75: mol_type = other DNA
tattccgccttcttcaccgcgctctctccagacgctcaggacgatatcatcgcccgtactgaacacatgctgtaa

SEQ ID NO: 278456 - DNA, 75 bp, synthetic construct
  source 1..75: mol_type = other DNA
gaggtaaaagaggcagagcagaaattaaaagaagctcaggatgctcttgaaaagagccagataaaagatgctgtt

SEQ ID NO: 278457 - DNA, 75 bp, synthetic construct
  source 1..75: mol_type = other DNA
gaaatggtagctaaatacgctgggtgttctgtcgaggacgtagaacgatgtgttgaaaaatatttttctccttct

SEQ ID NO: 278458 - DNA, 75 bp, synthetic construct
  source 1..75: mol_type = other DNA
atgcgctgtaaaacgctgactgctgcagcagtactattgatgttgaccgcaggctgttccactctggagcgagtg

SEQ ID NO: 278459 - DNA, 75 bp, synthetic construct
  source 1..75: mol_type = other DNA
aacactataccgagatgtatcaacaacatctcgataagccaatccctgtacgtcgcgcgctggcgctggcacatc

SEQ ID NO: 278460 - DNA, 75 bp, synthetic construct
  source 1..75: mol_type = other DNA
ccgggagcaggcagaggacggcgcctgctggcatctgctgacgtcagaaaaagtggcgagtgccgccgatgcgcg

SEQ ID NO: 278461 - DNA, 75 bp, synthetic construct
  source 1..75: mol_type = other DNA
gccattgccgaagccggatttaccgccactgtaagggcatgtgaggctcatccgctgctcctcgcgctggaagac

SEQ ID NO: 278462 - DNA, 75 bp, synthetic construct
  source 1..75: mol_type = other DNA
tggcattacctgcattataaagtcagccacgggcagcgcttcgtggtgcgtgcagcacagaatcgccggctggaa

SEQ ID NO: 278463 - DNA, 75 bp, synthetic construct
  source 1..75: mol_type = other DNA
tggtaccctaaagggattaaaaacaggagactggaagcctttatttgtcactctggagaagagcgcggtagattt

SEQ ID NO: 278464 - DNA, 75 bp, synthetic construct
  source 1..75: mol_type = other DNA
ctcttggtttctgggggattgcaattgtcacaggtattgtttcttcttacataggggatgatgagttgaacaaac

SEQ ID NO: 278465 - DNA, 75 bp, synthetic construct
  source 1..75: mol_type = other DNA
gccaaaagggggcgatccggtgtatcagaacgaggatgcaccaaaaaataacggcaagatgggggagaaatgtga

SEQ ID NO: 278466 - DNA, 75 bp, synthetic construct
  source 1..75: mol_type = other DNA
aaatcatcaagtatcgcgatgaaatgctaaagatcaatccacaaattaccgaaatggtagctaaatacgctgggt

SEQ ID NO: 278467 - DNA, 75 bp, synthetic construct
  source 1..75: mol_type = other DNA
atcagttacgacagctttttcagcagcacacatctcgctggcagcatgagctacctgatctgaccaaaccgcagt

SEQ ID NO: 278468 - DNA, 75 bp, synthetic construct
  source 1..75: mol_type = other DNA
ctgatagaagcagcagtcagcaccaaagcaacgctagcagaaatgttggcaagaatggaaaatcgtggcttagtc

SEQ ID NO: 278469 - DNA, 75 bp, synthetic construct
  source 1..75: mol_type = other DNA
aagcaacgttagcagaaatgttggcaagaatggaaaatcgtggcttagtcagacgtgaacatgaccccgctgata

SEQ ID NO: 278470 - DNA, 75 bp, synthetic construct
  source 1..75: mol_type = other DNA
gatggctaccggtgttgcaatcaatacactgccgctgacgccaaaacggttatatgaagagttccatctggcagg

SEQ ID NO: 278471 - DNA, 75 bp, synthetic construct
  source 1..75: mol_type = other DNA
ccgaaagctccatcaaaaccaccactaacccaccggcgtttggctgtacctttgttgatctgacggtcgatattg

SEQ ID NO: 278472 - DNA, 75 bp, synthetic construct
  source 1..75: mol_type = other DNA
caaatggtggcagaaaccgtgggggttccggtcagcgacgttcgcgttatttcaactcaagataccgacgttacg

SEQ ID NO: 278473 - DNA, 75 bp, synthetic construct
  source 1..75: mol_type = other DNA
aaagtgagacacgtaatcgcaatatagtcaccattatggtagttcacgacttaaatattgcactacgatatggtg

SEQ ID NO: 278474 - DNA, 75 bp, synthetic construct
  source 1..75: mol_type = other DNA
ccagagaatctggctagtgtatatcatattcgtggacggatagagcattgttctcagggggtgttacaatttatt

SEQ ID NO: 278475 - DNA, 75 bp, synthetic construct
  source 1..75: mol_type = other DNA
ataaggccaacggtaaggtatttcttgatggtgtcaacctaatgcaaatgccattttctgcgcgtgccgacagta

SEQ ID NO: 278476 - DNA, 75 bp, synthetic construct
  source 1..75: mol_type = other DNA
atgatagcggcagatagtttgcccggggtttacatggcgttacgaaaaaaagcgttccatcagttacgacagctt

SEQ ID NO: 278477 - DNA, 75 bp, synthetic construct
  source 1..75: mol_type = other DNA
tggatgaggagtttttggggcgattgagtaaagaagagcaagagttgtttatgcagttggtgcgaaagatgatga

SEQ ID NO: 278478 - DNA, 75 bp, synthetic construct
  source 1..75: mol_type = other DNA
taaaaaaaggtaaacttattgccagcggaaatccagaagaggtcattacgccagagaatctggctagtgtatatc

SEQ ID NO: 278479 - DNA, 75 bp, synthetic construct
  source 1..75: mol_type = other DNA
cggcatcggttcgccctttcaacccgattttatcggtacagcattcacgaaaaaacattttaaccggagcagact

SEQ ID NO: 278480 - DNA, 75 bp, synthetic construct
  source 1..75: mol_type = other DNA
ggttagatgcgattgagaatatgacatcaggtggactaatttatgccgtatctggtgtacctggattgattgctg

SEQ ID NO: 278481 - DNA, 75 bp, synthetic construct
  source 1..75: mol_type = other DNA
aggtcatgcgctcgatggcaatttctctggtgctgagcgcgagcttaccagcgcaggtcagctggcatcggatgc

SEQ ID NO: 278482 - DNA, 75 bp, synthetic construct
  source 1..75: mol_type = other DNA
tgctgcatattcgccagcaggcgcagtcacagcttcaggaaaccatcgagcaggcggtaattggtcgcccgatta

SEQ ID NO: 278483 - DNA, 75 bp, synthetic construct
  source 1..75: mol_type = other DNA
tatcgccaccatcaggtaccggcaacgggtgatgaaactcaggcgctgttgcgtcgggcgatgaactacaaccgc

SEQ ID NO: 278484 - DNA, 75 bp, synthetic construct
  source 1..75: mol_type = other DNA
gattttatcggtacagcattcacgaaaaaacattttaaccggagcagactttaaacaaccaagaatgaaaagttt

SEQ ID NO: 278485 - DNA, 75 bp, synthetic construct
  source 1..75: mol_type = other DNA
aaagtgccagcagtggtatttgatgaccgcgatgtggtgtacggcaccacggatgtggccgtggccacttccctg

SEQ ID NO: 278486 - DNA, 75 bp, synthetic construct
  source 1..75: mol_type = other DNA
tatccggccgtggtctttgatgatcgtgaggtggtctacggtaccacggatgtggcagaggccgcacaactgaga

SEQ ID NO: 278487 - DNA, 75 bp, synthetic construct
  source 1..75: mol_type = other DNA
tcctgatactaccggtggcagcatctgccggtacaacaatttataccgattcgcaccagcgccccatgaacccgc

SEQ ID NO: 278488 - DNA, 75 bp, synthetic construct
  source 1..75: mol_type = other DNA
acaatgccgcatccgtgctggccgggctggacagagtgtcccgcatggatgtgctggtgggcatccctgaatcca

SEQ ID NO: 278489 - DNA, 75 bp, synthetic construct
  source 1..75: mol_type = other DNA
cgtctgaccccactatctgaaaagaccatcaagaagcgcagagaaatgaaaccgcctatccctggcgataagccg

SEQ ID NO: 278490 - DNA, 75 bp, synthetic construct
  source 1..75: mol_type = other DNA
acattacctgctcgcagtcgggaaaatcatttattacatagttttactgatgacattaaggctcgtggcggcgta

SEQ ID NO: 278491 - DNA, 75 bp, synthetic construct
  source 1..75: mol_type = other DNA
ggttgcagtatcgggctatggcatcctgatcaatgtggcgcatctggaagataaaaatgagccagtacctacttc

SEQ ID NO: 278492 - DNA, 75 bp, synthetic construct
  source 1..75: mol_type = other DNA
tgcaacagctgcaaaagtcgaatcccgcacactggttggtgtgagttctgatggcaccctgacccgtgcagaagg

SEQ ID NO: 278493 - DNA, 75 bp, synthetic construct
  source 1..75: mol_type = other DNA
agcggtgggtggttacagcgatgagcaggcactggcagtgggtgtgggttaccgcttcaacgagcagaccgcagc

SEQ ID NO: 278494 - DNA, 75 bp, synthetic construct
  source 1..75: mol_type = other DNA
attgacggtattgatgctgatggctctgttcgggttgtgagtgcagatggtgcatctgtatatcatgtatatgac

SEQ ID NO: 278495 - DNA, 75 bp, synthetic construct
  source 1..75: mol_type = other DNA
atcctgatttcagaaatgagataagggaacttacagcattatgcgaaacagtcgataaaacaatagagcaattag

SEQ ID NO: 278496 - DNA, 75 bp, synthetic construct
  source 1..75: mol_type = other DNA
gggttaccgcttcaacgagcagaccgcagcgaaagcaggcgtggcattcagtgatggcgatgcctcctggaacgt

SEQ ID NO: 278497 - DNA, 75 bp, synthetic construct
  source 1..75: mol_type = other DNA
ttaacgatggtctggtggccctgtctggtcgtactgaccgtattgatgcagcagttggtgccattgatggccgtg

SEQ ID NO: 278498 - DNA, 75 bp, synthetic construct
  source 1..75: mol_type = other DNA
tacggccaacgtagaaaacgtcgatctgatcctgacttcatcaccaatgctgctccagcaccttcaggagcacca

SEQ ID NO: 278499 - DNA, 75 bp, synthetic construct
  source 1..75: mol_type = other DNA
ttgtcggtaggtgatgcttattttcaggctaaatgcttcaatcggataagaaattttaagaaaagggggacgact

SEQ ID NO: 278500 - DNA, 75 bp, synthetic construct
  source 1..75: mol_type = other DNA
taaataatattagtaagatctataaaaattataccaataaaaaacatcggtttattgagtggctaacatttggta

SEQ ID NO: 278501 - DNA, 75 bp, synthetic construct
  source 1..75: mol_type = other DNA
tgaatctaatcttgctggtgcgtttatttcattactcgatacggtaatcaccgaattaaataaagcgatcgaaat

SEQ ID NO: 278502 - DNA, 75 bp, synthetic construct
  source 1..75: mol_type = other DNA
accaccgtttccaatggtgtgctgctgttccttgagcgccgctactccgtgggtgtgaagagggctgatctgtga

SEQ ID NO: 278503 - DNA, 75 bp, synthetic construct
  source 1..75: mol_type = other DNA
agcggccgcaaaagtcgtctgactctctatccaggcaatgtcgctgtcattgagccagaggtgaagcagatggtt

SEQ ID NO: 278504 - DNA, 75 bp, synthetic construct
  source 1..75: mol_type = other DNA
gcttttttcggcccgttgccggctgaccctgaggccgctgaggtggccgttcgtgagcacatgcagtctcctgaa

SEQ ID NO: 278505 - DNA, 75 bp, synthetic construct
  source 1..75: mol_type = other DNA
cgccgtttcgatttcctcggtgaattcccgctggagccagtgaatggtaaaagcggtacggcaatgctggtcgat

SEQ ID NO: 278506 - DNA, 75 bp, synthetic construct
  source 1..75: mol_type = other DNA
tgataccctgttgatgctggaagtgtatccggctggcgaagcgccaattccgggagcggacagccgttcgctgtg

SEQ ID NO: 278507 - DNA, 75 bp, synthetic construct
  source 1..75: mol_type = other DNA
tgcctgttgctggagccacgcaaggcgcggtttcgcaaatctgtataaggtcagcagggagccccgtgcagccat

SEQ ID NO: 278508 - DNA, 75 bp, synthetic construct
  source 1..75: mol_type = other DNA
gcctgttgagcatgttgatgctggcagagtaattctgatgcccccctcagtggcaaaagacatggtcaggagagg

SEQ ID NO: 278509 - DNA, 75 bp, synthetic construct
  source 1..75: mol_type = other DNA
gctggggcgcgaggcggatatgtcggggagtgcagcggatatcgcacagcgtgtggcagagtgggaagaggaggt

SEQ ID NO: 278510 - DNA, 75 bp, synthetic construct
  source 1..75: mol_type = other DNA
tcaccctgaatgcgccaggtcgtcataacgcgctgaacgccgcagctgcggttgcggttgctacggaagagggca

SEQ ID NO: 278511 - DNA, 75 bp, synthetic construct
  source 1..75: mol_type = other DNA
acgctgctgggtgagaacgaatctatctatatcccccttggcgtcacccactgcctggaaaacccggggaaaatc

SEQ ID NO: 278512 - DNA, 75 bp, synthetic construct
  source 1..75: mol_type = other DNA
acgagaagctggtggcggccatcggcgtggagaacctggtgattgtcagcaccaaggacgccgtgctggtgatga

SEQ ID NO: 278513 - DNA, 75 bp, synthetic construct
  source 1..75: mol_type = other DNA
aaaatcacactcgaattaatcgagatacgttcaggaagttatcttgctgaagatgacataattcgattttttgat

SEQ ID NO: 278514 - DNA, 75 bp, synthetic construct
  source 1..75: mol_type = other DNA
ggtctttgcccgttcagatgtcggactgcccgtcagttcgatggctgacatggttggcgcggcaggggccgcatt

SEQ ID NO: 278515 - DNA, 75 bp, synthetic construct
  source 1..75: mol_type = other DNA
gcgcgctgctggattatccagtgagtaaagtgatatgtgtaggtagtaactatgccagacatatcaaggaaatgg

SEQ ID NO: 278516 - DNA, 75 bp, synthetic construct
  source 1..75: mol_type = other DNA
tcgaaaaaccgaatctggaaaccgcgcaggcctatgtggcaagtggcgaatattactggaacagcggtatgttcc

SEQ ID NO: 278517 - DNA, 75 bp, synthetic construct
  source 1..75: mol_type = other DNA
aacgtcttcgtgaactggctggcctgctggggcgcgaggcggatatgtcggggagtgctgcggatatcgcacagc

SEQ ID NO: 278518 - DNA, 75 bp, synthetic construct
  source 1..75: mol_type = other DNA
tgatgcactgcaccgcgcctatgtgaacgctcgtctgatgtctgctattccattgaatggcgtgtgcgacagcta

SEQ ID NO: 278519 - DNA, 75 bp, synthetic construct
  source 1..75: mol_type = other DNA
tgacggcgtgtttactgctgatccggcgaaagatccaaccgcaaccatgtacgagcaactgacttacagcgaagt

SEQ ID NO: 278520 - DNA, 75 bp, synthetic construct
  source 1..75: mol_type = other DNA
tgtcggatgcactgatgctgtgtcgacaaattattacgaccgggcatcatattactccgataaatcaacagagac

SEQ ID NO: 278521 - DNA, 75 bp, synthetic construct
  source 1..75: mol_type = other DNA
cagattttcggtgaattacctgctgatccagcgcaggccgagcaaacagcaaaagccattatccagtcgcctgac

SEQ ID NO: 278522 - DNA, 75 bp, synthetic construct
  source 1..75: mol_type = other DNA
ataacggccaggctgagttgattttacgtaatggcttaaccgttccggttagtcgccgctatctgaaaagtttaa

SEQ ID NO: 278523 - DNA, 75 bp, synthetic construct
  source 1..75: mol_type = other DNA
atgaacaagaatatggcaggaattctgggggcagcggcggtattaacgatgctggcgggatgtactgcgtatgat

SEQ ID NO: 278524 - DNA, 75 bp, synthetic construct
  source 1..75: mol_type = other DNA
tttttatcagtatccgttgaatccagttacgaatacagatcctctggggttagaagtttttcctagaccattccc

SEQ ID NO: 278525 - DNA, 75 bp, synthetic construct
  source 1..75: mol_type = other DNA
tttgagcaaacattgacgggcctgacgctcggtatcgatagtcgtttctcccgtgaagaaagcagcacaactcag

SEQ ID NO: 278526 - DNA, 75 bp, synthetic construct
  source 1..75: mol_type = other DNA
ctgcctccatctctgtggcgttgatggtgaaacgggggaatccgttgagcttgcggatgttggtcgggtgattct

SEQ ID NO: 278527 - DNA, 75 bp, synthetic construct
  source 1..75: mol_type = other DNA
atgaatacgccattaaagcctttgaagaacatgcttttgattatctactgaagccgattgatgaagcgcggctgg

SEQ ID NO: 278528 - DNA, 75 bp, synthetic construct
  source 1..75: mol_type = other DNA
agaacatgcttttgattatctgctaaaaccaattgatgaagcgcgactggagaaaacgctggtccgtctgcgtca

SEQ ID NO: 278529 - DNA, 75 bp, synthetic construct
  source 1..75: mol_type = other DNA
ctgtttctcgatattcagatgccacgtatcagcggtctggaaatggtcggtatgctcgaccccgagcatcgccca

SEQ ID NO: 278530 - DNA, 75 bp, synthetic construct
  source 1..75: mol_type = other DNA
aaactctccgcagattgtcgcgctgggcattaactgcatcgcactggaaaacactacggcggcgctgaagcatct

SEQ ID NO: 278531 - DNA, 75 bp, synthetic construct
  source 1..75: mol_type = other DNA
agagcttctgcgatcgctgggttaactatgcgctgacggaactcgttaagcataagcgcaacgatctgccactgc

SEQ ID NO: 278532 - DNA, 75 bp, synthetic construct
  source 1..75: mol_type = other DNA
gtcgcgctgtggggttatcccgccgattccgacgccactttggccagtacgctgccgcctgacgttgcgcgcagt

SEQ ID NO: 278533 - DNA, 75 bp, synthetic construct
  source 1..75: mol_type = other DNA
atccacgtctggttgaacaaattgccagagaagctggccttaacgtggctggcgtgctttatacagatgccttgt

SEQ ID NO: 278534 - DNA, 75 bp, synthetic construct
  source 1..75: mol_type = other DNA
ctgcaccgtttgatccacatgcctggcaatcagtagggaattccagaatatatgtgaaaaatattgcagaagcct

SEQ ID NO: 278535 - DNA, 75 bp, synthetic construct
  source 1..75: mol_type = other DNA
attaccatgagattgattttccatctttattcgcgagagcagtggaaagcgatgacgatgtgggtactacattgc

SEQ ID NO: 278536 - DNA, 75 bp, synthetic construct
  source 1..75: mol_type = other DNA
aaagaggtgctgaatcgattacttatgaacaaagaggcgttgatccgccagcataaatctgctgccacagagagc

SEQ ID NO: 278537 - DNA, 75 bp, synthetic construct
  source 1..75: mol_type = other DNA
gctgctatttggggatatccggcagacaatggcccggcgcttgctagcgcattgcctccttctgttgcacgttgc

SEQ ID NO: 278538 - DNA, 75 bp, synthetic construct
  source 1..75: mol_type = other DNA
gcaggaagcggcgaaagcggtgaaagcggcaattaaacttgccgataaagcaccggaaagcacaccaactgtcta

SEQ ID NO: 278539 - DNA, 75 bp, synthetic construct
  source 1..75: mol_type = other DNA
aagataccaggaacatgtcactgaccctgaatgtctgcgggaactccacgaagccccgatacaggcgctaaatat

SEQ ID NO: 278540 - DNA, 75 bp, synthetic construct
  source 1..75: mol_type = other DNA
tatccgattaatgctgtgttggactgtagtgcgttgcaggctgaactgaaatccttaaaagaaggaagtacatgg

SEQ ID NO: 278541 - DNA, 75 bp, synthetic construct
  source 1..75: mol_type = other DNA
tgagagagattgcgtcaacgttgaccgaggtcacgtatttctctgattgcgagaatagtgatgctttcgctctac

SEQ ID NO: 278542 - DNA, 75 bp, synthetic construct
  source 1..75: mol_type = other DNA
ctcctggccggagcggctggtgctggcaaaaagctgcagttttgattttgtcgaaatgtcggtggatgaaaccga

SEQ ID NO: 278543 - DNA, 75 bp, synthetic construct
  source 1..75: mol_type = other DNA
tctggtgatcgtccgctctgataagaacgtcgtcatcgatctagctgatattttttatccaaactacggacaggg

SEQ ID NO: 278544 - DNA, 75 bp, synthetic construct
  source 1..75: mol_type = other DNA
cctcgctctgtctttgggtgcggaaataactattcagcacggtattatcatcccatggagtcagtataaatctga

SEQ ID NO: 278545 - DNA, 75 bp, synthetic construct
  source 1..75: mol_type = other DNA
gtcggtgcataacgtttcaactgcccgtgacttaaccaaactgctcattgccagcaaacaatatccgttgatcgg

SEQ ID NO: 278546 - DNA, 75 bp, synthetic construct
  source 1..75: mol_type = other DNA
cgccgaattcttcaggaccagaaccccaagtacctgttggctgatgaagtaggactgggcaaaaccatcgaagcg

SEQ ID NO: 278547 - DNA, 75 bp, synthetic construct
  source 1..75: mol_type = other DNA
taagaactctacttaataactcaagaacagaacaaccaaattatgattttaaacagggattatttattctctcag

SEQ ID NO: 278548 - DNA, 75 bp, synthetic construct
  source 1..75: mol_type = other DNA
atgatgagcaactccaggcgcgcattgttggtctgagtccgttggttgatttttttgcacctgatgaaagcgaag

SEQ ID NO: 278549 - DNA, 75 bp, synthetic construct
  source 1..75: mol_type = other DNA
agcgccacacaaaggacttcgctggttgccgcgatgatcgaaacgggtgttgccattccgtcaatgtgcctgtcc

SEQ ID NO: 278550 - DNA, 75 bp, synthetic construct
  source 1..75: mol_type = other DNA
tgagcgtctggcgcgccttgactggagcgccgcacaaagggcttcgctggtcaccgcgatgatcgaaacaggcgt

SEQ ID NO: 278551 - DNA, 75 bp, synthetic construct
  source 1..75: mol_type = other DNA
atgaaaaagcactggcaaaaaatctctcctggccagagcggttggtgctgacaaaaagctgcggttttgattttg

SEQ ID NO: 278552 - DNA, 75 bp, synthetic construct
  source 1..75: mol_type = other DNA
ggcatcatcggtctgatgactcgcttcggtatagatgtcaccctggcccatccggaaggctacgacctgatcccg

SEQ ID NO: 278553 - DNA, 75 bp, synthetic construct
  source 1..75: mol_type = other DNA
aaaaagccaaagaaccggtgctggaaataattcaggcgcggcgctggattgaagcgcgtatgcaggaggccggat

SEQ ID NO: 278554 - DNA, 75 bp, synthetic construct
  source 1..75: mol_type = other DNA
tttatcatcgcggtcgcgacgcgcaagccagcgggcaacagtggggcgaagccgatcttgcacgcatgaaggcgc

SEQ ID NO: 278555 - DNA, 75 bp, synthetic construct
  source 1..75: mol_type = other DNA
ttcgttgagaactacgcgaagtatctgccgacagcgatgctgacgaaagcagtctatgctgataccgaaggtttt

SEQ ID NO: 278556 - DNA, 75 bp, synthetic construct
  source 1..75: mol_type = other DNA
gtcgaagtttgcccggcgaaagaccgtcagaatccagagattaaagccatcaatatgatgtcgcgcctggaacat

SEQ ID NO: 278557 - DNA, 75 bp, synthetic construct
  source 1..75: mol_type = other DNA
aaagcgattcaggaagcggaagcgtatccggggccatcgctgatcatcgcttatagcccgtgtgaagagcatggt

SEQ ID NO: 278558 - DNA, 75 bp, synthetic construct
  source 1..75: mol_type = other DNA
caccgctgggtgcagtaactaaatttggcgagcacggcaaacgtaaagcgcgtaaagatcttggcgtcagtatga

SEQ ID NO: 278559 - DNA, 75 bp, synthetic construct
  source 1..75: mol_type = other DNA
atgtctagtccacgtcagtatggcctcttaccgtgtgcaattggaggagtaaaccatgaaactaccgggaaacgc

SEQ ID NO: 278560 - DNA, 75 bp, synthetic construct
  source 1..75: mol_type = other DNA
ccaggaagcgcaagactttgctctcatttcgcacatcgcgacgctgaagagccgcgtgccatttattcatttctt

SEQ ID NO: 278561 - DNA, 75 bp, synthetic construct
  source 1..75: mol_type = other DNA
atgctattccaacaccggtggtcaggcgtcgaaagcgacaccgctgggtgcagtaactaagttcggcgagcacgg

SEQ ID NO: 278562 - DNA, 75 bp, synthetic construct
  source 1..75: mol_type = other DNA
tggcgcttatcagcgaagacggcaatacggcgtggagcgcggaatatgatgaatggggcaaccagcttaatgagg

SEQ ID NO: 278563 - DNA, 75 bp, synthetic construct
  source 1..75: mol_type = other DNA
caaaataaaagttaatttaattctgattcatgcacaggatcatttgatgaatgcaatattatgccaggatttagc

SEQ ID NO: 278564 - DNA, 75 bp, synthetic construct
  source 1..75: mol_type = other DNA
ggaaattatttcattaagaaaagagctccatgccttattttttctccagtgcgatatctggaggaaattactaca

SEQ ID NO: 278565 - DNA, 75 bp, synthetic construct
  source 1..75: mol_type = other DNA
aacaggctgatgcctgggccggaaacggcttaaagaacgtttggggagacacaccacgcgtggttgaaatgcagt

SEQ ID NO: 278566 - DNA, 75 bp, synthetic construct
  source 1..75: mol_type = other DNA
catgcctgacccggaaccgcttatgcgaagtccggctaaaggacgggaacagggaggtcgcggcaagcctggctt

SEQ ID NO: 278567 - DNA, 75 bp, synthetic construct
  source 1..75: mol_type = other DNA
aggcagaaactgataatttaagaaaggagtcatatcctctgaaaagaaaatgtcccacaggtatagatagagttg

SEQ ID NO: 278568 - DNA, 75 bp, synthetic construct
  source 1..75: mol_type = other DNA
tcctgacccggaatcgctgtgcgaagtccggctgaaggacggatacagggaggttacggcaagtttggcttacga

SEQ ID NO: 278569 - DNA, 75 bp, synthetic construct
  source 1..75: mol_type = other DNA
gcaggcattattttcggtagtgtcggtctgataatcacgctcccctccaccaaaaaaatctcgcaggaaacggaa

SEQ ID NO: 278570 - DNA, 75 bp, synthetic construct
  source 1..75: mol_type = other DNA
atttaaatgcagatctctggtatcagggaatcaataatgcattggctgttctacaagcacagatattaaaacaac

SEQ ID NO: 278571 - DNA, 75 bp, synthetic construct
  source 1..75: mol_type = other DNA
gcgtctgaccaccggctgctcggtcattgtgacgggtaaagtcgtggcgtcgccgggccaggggcaacaatttga

SEQ ID NO: 278572 - DNA, 75 bp, synthetic construct
  source 1..75: mol_type = other DNA
tgtgacttcgctgatgttggggccgatggtcgctgcctgcggcggctatattccgatgatctccggtcgcggcct

SEQ ID NO: 278573 - DNA, 75 bp, synthetic construct
  source 1..75: mol_type = other DNA
ttacaagcacagatattaaaacaaccgacgccgccactgacatattatccgcatcccggacaacagcatgaaaat

SEQ ID NO: 278574 - DNA, 75 bp, synthetic construct
  source 1..75: mol_type = other DNA
gcatccaggacaacagcatgaaaatgctccccccggcagcaccaacacattagggaaggtgcgaataagcaggtc

SEQ ID NO: 278575 - DNA, 75 bp, synthetic construct
  source 1..75: mol_type = other DNA
cacgctggcacaggcgctgcatcgcttctttaacgagcagggattcttctgggtttcaacgccactgattaccgc

SEQ ID NO: 278576 - DNA, 75 bp, synthetic construct
  source 1..75: mol_type = other DNA
caggctgtcatcaataattctctgcccaattacaatgaagacgtcttgcgtctgaccaccggctgctcggtcatt

SEQ ID NO: 278577 - DNA, 75 bp, synthetic construct
  source 1..75: mol_type = other DNA
gtacgtacccgccgagattcaaaagctggcatctccttcctcgccgtttatgacggttcctgctttgatcctgta

SEQ ID NO: 278578 - DNA, 75 bp, synthetic construct
  source 1..75: mol_type = other DNA
gggcaaagtggatttcgacaaagacttctttggtaaagagtctttcctgaccgtatctggtcagttgaacggcga

SEQ ID NO: 278579 - DNA, 75 bp, synthetic construct
  source 1..75: mol_type = other DNA
cgcctacgtaaccggcgtacagaacgtgcgtgacgtgattccgttcccaagaactccacgtaacgccagcttcta

SEQ ID NO: 278580 - DNA, 75 bp, synthetic construct
  source 1..75: mol_type = other DNA
accgtcgcggcaatggacgttctggcaccgggcatcggtgagatcattggtggttcacagcgcgaagagcgtctg

SEQ ID NO: 278581 - DNA, 75 bp, synthetic construct
  source 1..75: mol_type = other DNA
gcgtctcttggtacaaaagactacagctctcattcctggtatgccggtgcagaggtcgggtatcgttaccacttg

SEQ ID NO: 278582 - DNA, 75 bp, synthetic construct
  source 1..75: mol_type = other DNA
attgccatataactaaaagtctgattgctgtatccgaactggcccacagggtcacctgtaagagccatcgcagac

SEQ ID NO: 278583 - DNA, 75 bp, synthetic construct
  source 1..75: mol_type = other DNA
cttgttggaggaaccgtcagcgcgctgagctcctataataacggacagatgatttcggctcagaccgctaatatt

SEQ ID NO: 278584 - DNA, 75 bp, synthetic construct
  source 1..75: mol_type = other DNA
ctgggtcaccgttttgaaagaaacagagagttcatataataaaaagttcaattctgattacaaaagtaataatca

SEQ ID NO: 278585 - DNA, 75 bp, synthetic construct
  source 1..75: mol_type = other DNA
gcatactcaggtaaagatgtttggtcaatattaaaccagtatgataacaatacggttaataatctaaaaaataca

SEQ ID NO: 278586 - DNA, 75 bp, synthetic construct
  source 1..75: mol_type = other DNA
accgaaagggagtgacgagaaaacgttcacagccggaacgcagcagattggtttcagtaatgtcacgccggtaat

SEQ ID NO: 278587 - DNA, 75 bp, synthetic construct
  source 1..75: mol_type = other DNA
ctaatgtggttacagttggtaaagctttctggtagcgcttattgcatacagaaaaatttagcccggtatcgagtt

SEQ ID NO: 278588 - DNA, 75 bp, synthetic construct
  source 1..75: mol_type = other DNA
caaattctgttgacgcatggtcatctggatcacgttggcgccgcggcggaactggcgcaacattatggcgtgccg

SEQ ID NO: 278589 - DNA, 75 bp, synthetic construct
  source 1..75: mol_type = other DNA
actggcacaacactacggcgtgccagtgcttggtccggaaaaagaagatgagttctggctgcaaggcttgcctgc

SEQ ID NO: 278590 - DNA, 75 bp, synthetic construct
  source 1..75: mol_type = other DNA
accggcggtattgaggcttatgacagctccgtgagtgtggcctctcagaatgctgtttttgatcgtgttggcagc

SEQ ID NO: 278591 - DNA, 75 bp, synthetic construct
  source 1..75: mol_type = other DNA
gctctcattcctggtatgccggtgcagaggtcgggtatcgttaccacttgtcggaagagtcctgggtggagccac

SEQ ID NO: 278592 - DNA, 75 bp, synthetic construct
  source 1..75: mol_type = other DNA
tgctgtctccgaactggcccgcagggtcacctgtaagagtcatcgtagactctcccgtcgggtcattctttcatc

SEQ ID NO: 278593 - DNA, 75 bp, synthetic construct
  source 1..75: mol_type = other DNA
agctgtagttacacttaatggtgcaacctttctggataatactcctataagtatagataaaggagcaaaagttat

SEQ ID NO: 278594 - DNA, 75 bp, synthetic construct
  source 1..75: mol_type = other DNA
cgcagctgcgtcaggtattgcgtgaaaagagaatgcgtgagggtgaaggttacaccaccgatgaaacgttgctgg

SEQ ID NO: 278595 - DNA, 75 bp, synthetic construct
  source 1..75: mol_type = other DNA
agtgttggcggttttttaaatcgctcgcaggtcgttaatgcagctttcacacacagcagcagcgatttttctcat

SEQ ID NO: 278596 - DNA, 75 bp, synthetic construct
  source 1..75: mol_type = other DNA
ccagaaggttcgataaccaagaagtccggtacgctgatattccagggccatccggttattcatgccgggacgacg

SEQ ID NO: 278597 - DNA, 75 bp, synthetic construct
  source 1..75: mol_type = other DNA
cagtcaaaacgtacagaggaatttaaaaagatgccggaatccatccgaaacatgattactccgccacgcaacagt

SEQ ID NO: 278598 - DNA, 75 bp, synthetic construct
  source 1..75: mol_type = other DNA
gcgggtagtcagggtgaggcagatatttatatttatgacgagattggtttctggggagttaccgcgaagcagttt

SEQ ID NO: 278599 - DNA, 75 bp, synthetic construct
  source 1..75: mol_type = other DNA
ataaagcgaaacatgcaaacgtactggagagcgcggcaatggacgtggcatcgctggataaagcccgccagttga

SEQ ID NO: 278600 - DNA, 75 bp, synthetic construct
  source 1..75: mol_type = other DNA
ttatcagttcgacctgctggcgaacggagaaacggttctgcaggatgcttccggagagaaacgtttcgaaggtga

SEQ ID NO: 278601 - DNA, 75 bp, synthetic construct
  source 1..75: mol_type = other DNA
cacgttcagattggtgtcgacagaaagcatgagctggacggtgtggatttatttacgggggcattgctgacctat

SEQ ID NO: 278602 - DNA, 75 bp, synthetic construct
  source 1..75: mol_type = other DNA
tgaccctgacggggatgccttctgcgcagaaacaggggtattactcacccgtaatttctacaacagaagggatta

SEQ ID NO: 278603 - DNA, 75 bp, synthetic construct
  source 1..75: mol_type = other DNA
aagatgcagggagatattaacgccacgaatggaagtacagtcattctgggaagtagccgtgtctttactgacagg

SEQ ID NO: 278604 - DNA, 75 bp, synthetic construct
  source 1..75: mol_type = other DNA
cgccgggagacctatattatgacagttctaccaagcaatatttcatcctgaaagcgagttcatattccccgtttt

SEQ ID NO: 278605 - DNA, 75 bp, synthetic construct
  source 1..75: mol_type = other DNA
gttgacttttttagcaagccagcctgtgacattaacgtgacgttaattaccgcaccgaaagggagcgacgagaaa

SEQ ID NO: 278606 - DNA, 75 bp, synthetic construct
  source 1..75: mol_type = other DNA
gggcgcagtgacttcccgcgtggcgatcataatcaactgatttcttcaatcaaagataaattgctgccactgggg

SEQ ID NO: 278607 - DNA, 75 bp, synthetic construct
  source 1..75: mol_type = other DNA
cgcgtttgccaacggcgcggaaggcgttgggctgttccgtaccgaaatgctctatatggatcgcgacagcgcgcc

SEQ ID NO: 278608 - DNA, 75 bp, synthetic construct
  source 1..75: mol_type = other DNA
cagtttttgagtctcaatttaaaaaatctcgcaggcatgattctggagaaaaccgggcgcacatcgcataccctg

SEQ ID NO: 278609 - DNA, 75 bp, synthetic construct
  source 1..75: mol_type = other DNA
atgacccttgatttacctcgccgcttcccctggccgacgttactttcagtctgcattcacggtgctgtcgtggcg

SEQ ID NO: 278610 - DNA, 75 bp, synthetic construct
  source 1..75: mol_type = other DNA
tgagcagttgttgcatattacctggccggagctaaaaccgcgcaacaatctggtacttgaaaaacctaccattct

SEQ ID NO: 278611 - DNA, 75 bp, synthetic construct
  source 1..75: mol_type = other DNA
ttccgccagtcgttgtttgccgcgcaagatgcacaaagtatcctgacgctgctggaaacggaattaaccttctga

SEQ ID NO: 278612 - DNA, 75 bp, synthetic construct
  source 1..75: mol_type = other DNA
tgactggcagtcagaaatgggcgaagtcgaactggtgatcatgctgacgctgggtgctaacgaagggatgaatca

SEQ ID NO: 278613 - DNA, 75 bp, synthetic construct
  source 1..75: mol_type = other DNA
gctactctttcagcatcgatatcactcctcccgttctaccagatccgatgcagtggctcagggctggttttcagt

SEQ ID NO: 278614 - DNA, 75 bp, synthetic construct
  source 1..75: mol_type = other DNA
gtgatcttatggggcaaattgctactaaattaaatgactatcgaaaccctcctcaaggtggcatgagcattgatc

SEQ ID NO: 278615 - DNA, 75 bp, synthetic construct
  source 1..75: mol_type = other DNA
tcgaatctatccttactaaagtcggctttaatatcttgctgcacaggaaaacccctagtgaggtgctcaaacctc

SEQ ID NO: 278616 - DNA, 75 bp, synthetic construct
  source 1..75: mol_type = other DNA
atgtttgagcgtgaggtgaaaaatgcgatgcgcagatggcgttatgagccgggtaagccaggcagtgggattgtg

SEQ ID NO: 278617 - DNA, 75 bp, synthetic construct
  source 1..75: mol_type = other DNA
aactcttgtcgtcttgcattcttgtatcagtcagatttaggagagggcgtcaccagaaagttaagatttgaggac

SEQ ID NO: 278618 - DNA, 75 bp, synthetic construct
  source 1..75: mol_type = other DNA
aagctggaaacgtcaccacaaagaccagccggttccgctatgtaccgaacaacctgattgaatttaataccatca

SEQ ID NO: 278619 - DNA, 75 bp, synthetic construct
  source 1..75: mol_type = other DNA
tatcatggtggaagtgccgtcggtgtgctacatcatcgaccacttctgcgatgaggtcgatttcttcagtatcgg

SEQ ID NO: 278620 - DNA, 75 bp, synthetic construct
  source 1..75: mol_type = other DNA
gtacggcaacgtgctggcaagcggcgtcggcgtgggtacactgaccctgttacagagcgacagcctcgacagtta

SEQ ID NO: 278621 - DNA, 75 bp, synthetic construct
  source 1..75: mol_type = other DNA
gctttatcgacagcgacagcgttcagccgacgcaggcagaactgacggcgcatccgctgccgcgttcattaagcc

SEQ ID NO: 278622 - DNA, 75 bp, synthetic construct
  source 1..75: mol_type = other DNA
tacatcatcgaccacttctgcgatgaggtcgatttcttcagtatcggctccaacgatatgacccagtatctgtat

SEQ ID NO: 278623 - DNA, 75 bp, synthetic construct
  source 1..75: mol_type = other DNA
ggcgcagtgacttcccacgtggcgaccataatcaactgatctcctctatcaaagataaactgctgccgcttggcg

SEQ ID NO: 278624 - DNA, 75 bp, synthetic construct
  source 1..75: mol_type = other DNA
tccttaacctgagcgggaaaggcgaaattctgccaggcaatgacgcagacttactggtcatgacgccagaattac

SEQ ID NO: 278625 - DNA, 75 bp, synthetic construct
  source 1..75: mol_type = other DNA
gtcggtgttggtacgttaacgttgttgcagagcgacagcctcgacagttatcgggcgatccctgccagtgtgcaa

SEQ ID NO: 278626 - DNA, 75 bp, synthetic construct
  source 1..75: mol_type = other DNA
gcgctgattggcaccggcaccttatttaatgacagttgcagcctgagcattagcggtagcgacgaagagcaggcg

SEQ ID NO: 278627 - DNA, 75 bp, synthetic construct
  source 1..75: mol_type = other DNA
gtgctggaagagtacatccaggtgcgctttatcgacagcgacagcgtccagccaacgcaggcagaactgacggcg

SEQ ID NO: 278628 - DNA, 75 bp, synthetic construct
  source 1..75: mol_type = other DNA
gcaggagattgaagcgttactcaccgcgtttacgccggaagaagacgttcgcccgctgctggcgctggagaatat

SEQ ID NO: 278629 - DNA, 75 bp, synthetic construct
  source 1..75: mol_type = other DNA
tggcaacgctcagttgatgatcccaatggtgcacagcctcgatcagatcttatgggtaaagagtgagatccagaa

SEQ ID NO: 278630 - DNA, 75 bp, synthetic construct
  source 1..75: mol_type = other DNA
gggtcagcgatatccgcgatatcagcgaacagttgttgcatatcacctggccggagctgaagccacgcaataatc

SEQ ID NO: 278631 - DNA, 75 bp, synthetic construct
  source 1..75: mol_type = other DNA
tgcgatcgcgcgctatgccgggcaaccggcagtgcttgacgcccagtgcggcgtgctggcgattaacccgaatga

SEQ ID NO: 278632 - DNA, 75 bp, synthetic construct
  source 1..75: mol_type = other DNA
ttgacgatcagtattacctcacagtgaccacacagaccgggcagagttaccgcgtgaatgaactccgtctgcccg

SEQ ID NO: 278633 - DNA, 75 bp, synthetic construct
  source 1..75: mol_type = other DNA
gtcacctcaacaggcaggtatatctgaacttgttttacgtgcaggtaatggtaatccgaaggggattactggtgc

SEQ ID NO: 278634 - DNA, 75 bp, synthetic construct
  source 1..75: mol_type = other DNA
cgtctgacttcggtaatattctgctggatgttgcgaacaaagccattctgcagggctgggaagatgcccctgaaa

SEQ ID NO: 278635 - DNA, 75 bp, synthetic construct
  source 1..75: mol_type = other DNA
aaagtggtgcgctgggataaaaatccggaggctaacccgtttggtctggcgctggattgtctctcggaagcgccg

SEQ ID NO: 278636 - DNA, 75 bp, synthetic construct
  source 1..75: mol_type = other DNA
aaagtgctgcgctacaacatcgaccagcagaaaaatccgtgggggctggcgctggactgcttctcatcgccaccg

SEQ ID NO: 278637 - DNA, 75 bp, synthetic construct
  source 1..75: mol_type = other DNA
aacactgggcaactcttcgggggtaatgactccaacttattgatagtgttttatgttcagataatgcccgatgac

SEQ ID NO: 278638 - DNA, 75 bp, synthetic construct
  source 1..75: mol_type = other DNA
gaaacagctgcgtaaaaacgtactggctaaatgttatggcggtgatatcagccgtaagaaaaagctgctgcagaa

SEQ ID NO: 278639 - DNA, 75 bp, synthetic construct
  source 1..75: mol_type = other DNA
cgtgataattcgcaaaaccgcggtcgcgagctggtggagaagatgaaagatctgatcccacgccagcagtttgat

SEQ ID NO: 278640 - DNA, 75 bp, synthetic construct
  source 1..75: mol_type = other DNA
accgcaggtttacgccggtctgttcccggtaagttccgacgactatgaagccttccgcgatgcgctgggtaaatt

SEQ ID NO: 278641 - DNA, 75 bp, synthetic construct
  source 1..75: mol_type = other DNA
tctgctggatgttgcgaacaaagccattctgcagggctgggaagatgcccctgaaacctatgaacagtggacgcg

SEQ ID NO: 278642 - DNA, 75 bp, synthetic construct
  source 1..75: mol_type = other DNA
ttggtttactcacggtccggtctttatgaggcgctgaaaagtccatcgctgaaacagacacaacatctgacggtc

SEQ ID NO: 278643 - DNA, 75 bp, synthetic construct
  source 1..75: mol_type = other DNA
ttctcctatgaagtttcccgttcgctggctgcctgtgaaggtgcattgctggtggtcgacgccgggcagggcgta

SEQ ID NO: 278644 - DNA, 75 bp, synthetic construct
  source 1..75: mol_type = other DNA
ggggattcaacgacaagcgggtgcagatcctcgaccgtgacaactggattgtgacgctggatctgaccgtcgatg

SEQ ID NO: 278645 - DNA, 75 bp, synthetic construct
  source 1..75: mol_type = other DNA
cgtcagcttatttccgctaataccgacgttgaatcgctggaaacgcacgcacgacaggcgggtatgcgtacgctt

SEQ ID NO: 278646 - DNA, 75 bp, synthetic construct
  source 1..75: mol_type = other DNA
gctggaacaacgcgcgtctgatattcatatcgaaccagcgaacagcgcctaccgtatccgcttgcgtatcgacgg

SEQ ID NO: 278647 - DNA, 75 bp, synthetic construct
  source 1..75: mol_type = other DNA
actcgaacaacgcgcttctgatattcatatcgaaccagcggacaatagctaccgcatccgcttacgcatcgacgg

SEQ ID NO: 278648 - DNA, 75 bp, synthetic construct
  source 1..75: mol_type = other DNA
tggctggcggttctggtagtcgtttatggcctctttcgcgcgaacttcgtccaaagcaattccttaagcttgatg

SEQ ID NO: 278649 - DNA, 75 bp, synthetic construct
  source 1..75: mol_type = other DNA
atcgggaaaacacaatggcgctggcggataacctcgcagccttactggaaccggcgttgctgatcataacgggag

SEQ ID NO: 278650 - DNA, 75 bp, synthetic construct
  source 1..75: mol_type = other DNA
cgcacgatctcgaacagggcattgctttttccaatgccttattaccctggtcagaggtatttccgccgctctatc

SEQ ID NO: 278651 - DNA, 75 bp, synthetic construct
  source 1..75: mol_type = other DNA
gtgaactgggcgtaaccagcaaagacgtacgtgagatggaatcacgtatggcggcacaggacatgacctttgacc

SEQ ID NO: 278652 - DNA, 75 bp, synthetic construct
  source 1..75: mol_type = other DNA
aaagtggtgcgctgggagggggatccggaaagcaatccgtttggtctggcgctggactgctatgacgggacgcct

SEQ ID NO: 278653 - DNA, 75 bp, synthetic construct
  source 1..75: mol_type = other DNA
gcgggttcagtgaggataaagtccgggtgattgaccgggataactggattgtgcgcctggatttggtggcggatg

SEQ ID NO: 278654 - DNA, 75 bp, synthetic construct
  source 1..75: mol_type = other DNA
atcgcaattaaagccgcgcaaaccggtcatctggtattgtccacgctgcacaccaactccacctgtgaaacgctg

SEQ ID NO: 278655 - DNA, 75 bp, synthetic construct
  source 1..75: mol_type = other DNA
tgacattaatatttgtagcgtcgaagatccggttgagatccccatagccggactaaaccagacgcaaatccatcc

SEQ ID NO: 278656 - DNA, 75 bp, synthetic construct
  source 1..75: mol_type = other DNA
caagcagcgtctgggctggtttaaccaggatgaagtcgaaatggtggctcgcgaactgggcgtaaccagcaaaga

SEQ ID NO: 278657 - DNA, 75 bp, synthetic construct
  source 1..75: mol_type = other DNA
ctctggattacaacttcaaacgcttccaggcgtccgacatggtacgtgtagacgtattaatcaacggtgaacgtg

SEQ ID NO: 278658 - DNA, 75 bp, synthetic construct
  source 1..75: mol_type = other DNA
tggacactccatacattgatcagcaggaaggtttcaccactgacggcattgccacaaaaatccgtattgatgccg

SEQ ID NO: 278659 - DNA, 75 bp, synthetic construct
  source 1..75: mol_type = other DNA
ggatggacgggaaagaatgccttaagcacggttttgctgatgaattgttgccatccgtcagagcaatggcgcgaa

SEQ ID NO: 278660 - DNA, 75 bp, synthetic construct
  source 1..75: mol_type = other DNA
aggttttgcgtaacaatcctggcgtttcatgctggtggatggcggatgcaggcgtggaagatcgcggcgtgatgg

SEQ ID NO: 278661 - DNA, 75 bp, synthetic construct
  source 1..75: mol_type = other DNA
tgtgcagcgactggttgccagccgtaacagacgtgacaccgtaacagtcgtcacggggataacggaggtcatgga

SEQ ID NO: 278662 - DNA, 75 bp, synthetic construct
  source 1..75: mol_type = other DNA
agaaaacccgtgttaacgctatcggcgatctctttgccatgttcggtaataagcacatggaactgcagaatcagt

SEQ ID NO: 278663 - DNA, 75 bp, synthetic construct
  source 1..75: mol_type = other DNA
cggggagattttctccatcacccgccaggccattatcaatgatgatctgaatatgctggtggacgtgccgatgaa

SEQ ID NO: 278664 - DNA, 75 bp, synthetic construct
  source 1..75: mol_type = other DNA
ccggtgatacggtcattatgccggaaaatgctttcatgatgatccataagccatggggcttcagtgggggggatg

SEQ ID NO: 278665 - DNA, 75 bp, synthetic construct
  source 1..75: mol_type = other DNA
ggcaattttgtgggggacgggatccgccaggcgatgctggcccgtgccggatttgaaaatgtcgagaaggataac

SEQ ID NO: 278666 - DNA, 75 bp, synthetic construct
  source 1..75: mol_type = other DNA
tgcgcagaaaaccggaaaaaccaccgatgaaattgccgccatgctggcggatgaaacctggatgtccggtgccga

SEQ ID NO: 278667 - DNA, 75 bp, synthetic construct
  source 1..75: mol_type = other DNA
ccgagggggcactagaatctctacgcgtgcgggaagtcacccgccgtcgcggtgtggggcaatatctactggaag

SEQ ID NO: 278668 - DNA, 75 bp, synthetic construct
  source 1..75: mol_type = other DNA
cgtgcgggaagtcacccgacgtcgcggtgtggggcaatatctgctggaagaggttttgcgtaacaatcctggcgt

SEQ ID NO: 278669 - DNA, 75 bp, synthetic construct
  source 1..75: mol_type = other DNA
ggcgctggagacggtggcaaaccagaccatcaaatcggccagtgtgaaaggggcggatgcaaacgctggtgtcat

SEQ ID NO: 278670 - DNA, 75 bp, synthetic construct
  source 1..75: mol_type = other DNA
catttatatgatgccggacgaggcattttctgaatgttaccgccgtgaaatgaggttgggtaaacgagaagtgtc

SEQ ID NO: 278671 - DNA, 75 bp, synthetic construct
  source 1..75: mol_type = other DNA
gatcgcctgacgccagatgccgacgacacggtgttggtgaagtggcgctacagcgcgtttcatcgttctccgctg

SEQ ID NO: 278672 - DNA, 75 bp, synthetic construct
  source 1..75: mol_type = other DNA
cagtcagcctgtggttacaggcgctgaccgaaggcgaaagccgggcgcagcttgcctcgctgaaactgttacagg

SEQ ID NO: 278673 - DNA, 75 bp, synthetic construct
  source 1..75: mol_type = other DNA
aggcgaaagccgggcgcagcttgcctcgctgaaactgttacaggtcggcggcgcacgtctttctgccacccttgc

SEQ ID NO: 278674 - DNA, 75 bp, synthetic construct
  source 1..75: mol_type = other DNA
ctgctgccgcaggcatatctcggcaacgttattacgctgtgcgtagaaaaacgcggcgtgcagaccaatatggtt

SEQ ID NO: 278675 - DNA, 75 bp, synthetic construct
  source 1..75: mol_type = other DNA
tcgacagcccatctaagctgccagcggtaaataacatctatgaactgcgcgaaccgatcgcggaatgccacatgc

SEQ ID NO: 278676 - DNA, 75 bp, synthetic construct
  source 1..75: mol_type = other DNA
tatcgacggcgagcgacagttgagttaccgggagctgaatcaggcggcggataacctcgcgtgtagtttgcgccg

SEQ ID NO: 278677 - DNA, 75 bp, synthetic construct
  source 1..75: mol_type = other DNA
gtgcctgtgcaagcccggaaaactttgatgcagaaattggtcggaagattgcccggcagaatgctgtaaacaaaa

SEQ ID NO: 278678 - DNA, 75 bp, synthetic construct
  source 1..75: mol_type = other DNA
aatgttaccgccgtgaaatgaggttgggtaaacgagatgtgtctgtttctcgtgatggcaggtttttaagcagcc

SEQ ID NO: 278679 - DNA, 75 bp, synthetic construct
  source 1..75: mol_type = other DNA
ttttctgaatgttaccgccgtgaaatgaggttgggtaaacgagaagtgtctgttgttcgtgatggcaggttttta

SEQ ID NO: 278680 - DNA, 75 bp, synthetic construct
  source 1..75: mol_type = other DNA
ggaaaaaggctactggcaggatttgccgctgaccgacattctgacccgtcatgccgcaagcgacagcatcgcggt

SEQ ID NO: 278681 - DNA, 75 bp, synthetic construct
  source 1..75: mol_type = other DNA
acgccgcactggtgagcatggaagatgagctgatgggcgaaaaaagctgcgcttatctggtggtaaaagagccgc

SEQ ID NO: 278682 - DNA, 75 bp, synthetic construct
  source 1..75: mol_type = other DNA
cataggggaaaaacgtcttgcttcgtcggtaacaaaggaagatttactgtttatcaggaaagatttattgaccgg

SEQ ID NO: 278683 - DNA, 75 bp, synthetic construct
  source 1..75: mol_type = other DNA
cgtgcgattggcgttgagctggatactgagcgttttgagcagacggtcagtgaagtacaggagctaatcatccct

SEQ ID NO: 278684 - DNA, 75 bp, synthetic construct
  source 1..75: mol_type = other DNA
tatcaggggccgtatcgcccgaaagatgatggctatgaggcgaagggcagggcactgaaacagcatgtgatggct

SEQ ID NO: 278685 - DNA, 75 bp, synthetic construct
  source 1..75: mol_type = other DNA
cagaacgttttgcgcagaccgttaaggagattagtcacatccttacatgctcaattgatgacgggaaggatgaat

SEQ ID NO: 278686 - DNA, 75 bp, synthetic construct
  source 1..75: mol_type = other DNA
tggtcagcacatacagtgaactgaaccggcaatatgccagcctgctggaagagtataaatctttgcggcgttatt

SEQ ID NO: 278687 - DNA, 75 bp, synthetic construct
  source 1..75: mol_type = other DNA
tcgtcgggcaatagttgagcttgaggctgaacggtttgagcagacggtgagcgagataagagaaattctgacgtg

SEQ ID NO: 278688 - DNA, 75 bp, synthetic construct
  source 1..75: mol_type = other DNA
gaactggaaaagccacaccaccagctggtcagcacatacagcgaactgaaccggcaatatgccagcctgctggag

SEQ ID NO: 278689 - DNA, 75 bp, synthetic construct
  source 1..75: mol_type = other DNA
ttgccgaatgaggctgactaccggaagttgcaggcactgttttcccgtatagcggcagagaagtttcaggaacaa

SEQ ID NO: 278690 - DNA, 75 bp, synthetic construct
  source 1..75: mol_type = other DNA
tttttatggggtctggctcaacaataaaagcagcactttcactgggacgtcgcgcaattggcgtggaactggaag

SEQ ID NO: 278691 - DNA, 75 bp, synthetic construct
  source 1..75: mol_type = other DNA
caggaaagaaaaacatggtgtcgcactggttcagtgccagtcagtggcagctgccgaacgaaagtgattatctga

SEQ ID NO: 278692 - DNA, 75 bp, synthetic construct
  source 1..75: mol_type = other DNA
ttggcgtgacggtgcaggtgccgtataccgatgtgtggacgcataaaccggtgcagttctatcccgggaaacatc

SEQ ID NO: 278693 - DNA, 75 bp, synthetic construct
  source 1..75: mol_type = other DNA
caggaaagaaaaacatggtgtcgcactggttcagtgccagtcagtggcagctaccgaatgaaagcgattatctga

SEQ ID NO: 278694 - DNA, 75 bp, synthetic construct
  source 1..75: mol_type = other DNA
aaacagtgttgatttaatcaacgctgattgcctgcattttattcagtccctgcctgataactccattgatctgat

SEQ ID NO: 278695 - DNA, 75 bp, synthetic construct
  source 1..75: mol_type = other DNA
gcaacaaggaaagcctgcgggcgtattttccggccacagagcgcattctgttcgcggaacattatcaggggccgt

SEQ ID NO: 278696 - DNA, 75 bp, synthetic construct
  source 1..75: mol_type = other DNA
gaaagatgccgggtatgaggcgaagggcagggcactgaaacagcatgtgatggccccgctgattgcttactttcg

SEQ ID NO: 278697 - DNA, 75 bp, synthetic construct
  source 1..75: mol_type = other DNA
cagtcttgcaacacagttacctcctgaaaccataaaagcgtgtcgtgagttgactgaactcagcattgccgggga

SEQ ID NO: 278698 - DNA, 75 bp, synthetic construct
  source 1..75: mol_type = other DNA
aaccatattatctgggcgaagccgtccggacgctggaacggatgcaacaaggaaagcctgagggcgtatttcccc

SEQ ID NO: 278699 - DNA, 75 bp, synthetic construct
  source 1..75: mol_type = other DNA
accaactataaacgaccactttgcctttcatcctattgtcgatcccttatcgcggcggataatcgcttttgaagc

SEQ ID NO: 278700 - DNA, 75 bp, synthetic construct
  source 1..75: mol_type = other DNA
ttttcatggggtcgggttcaacggtaaaagcggcgatggcactggggcgtcgtgcgattggtgttgagctggaga

SEQ ID NO: 278701 - DNA, 75 bp, synthetic construct
  source 1..75: mol_type = other DNA
gaatataaacatctgcggcggtattttggtgtgacggcgcaggtgccgtacacggatgtgtggacacataaaccg

SEQ ID NO: 278702 - DNA, 75 bp, synthetic construct
  source 1..75: mol_type = other DNA
aagggcgacgatgattacctgaaatggctggatcagtgtctggcgcagttctggtgggtattaaaacccgccgga

SEQ ID NO: 278703 - DNA, 75 bp, synthetic construct
  source 1..75: mol_type = other DNA
ggggaactggaaaagccacaccaccagctggtcagcacatacagtgagctgaaccggcagtatatggaactgctg

SEQ ID NO: 278704 - DNA, 75 bp, synthetic construct
  source 1..75: mol_type = other DNA
ccaccggaaagaaaaacatggcttcgcactggtttggtaccagtcagtggcagttaccgaacgagggtgattaca

SEQ ID NO: 278705 - DNA, 75 bp, synthetic construct
  source 1..75: mol_type = other DNA
ggcagggcactgaaacagcatgtgatggccccgctgattgcttactttcgtgatgcgcgcgctaccctggggata

SEQ ID NO: 278706 - DNA, 75 bp, synthetic construct
  source 1..75: mol_type = other DNA
ataaaagcagctatggcgctcgggcgtcgtgcaactggtgttgaactggaggcagaacgttttgcgcagaccgtt

SEQ ID NO: 278707 - DNA, 75 bp, synthetic construct
  source 1..75: mol_type = other DNA
gtggcagaagagaagcatcagcgcggagaactggacaagccccatcaccaactggtcagcacatacagtgaactg

SEQ ID NO: 278708 - DNA, 75 bp, synthetic construct
  source 1..75: mol_type = other DNA
tggtcagcacatacagtgaactgaaccggcagtatacggaactgctgagagaatataaaaatttgcggcggtatt

SEQ ID NO: 278709 - DNA, 75 bp, synthetic construct
  source 1..75: mol_type = other DNA
tggcaccgctgatatcgtatttcagggatgctcgtgccgaactgggaataacgtcaaaacagatagcggaagcca

SEQ ID NO: 278710 - DNA, 75 bp, synthetic construct
  source 1..75: mol_type = other DNA
acccaacggttgggacaatcagtggaaaggggacgaagattaccttaagtggctggaccactgtctggcccagtt

SEQ ID NO: 278711 - DNA, 75 bp, synthetic construct
  source 1..75: mol_type = other DNA
agatgccgggtatgaggcgaagggcagggcactgaaacagcatgtgatggctccgctgattgcttactttcgtga

SEQ ID NO: 278712 - DNA, 75 bp, synthetic construct
  source 1..75: mol_type = other DNA
acggcaaaacagattgcggatgccacaggaaagaaaaacatggtgtcgcactggttcagtgccagccagtggcag

SEQ ID NO: 278713 - DNA, 75 bp, synthetic construct
  source 1..75: mol_type = other DNA
gaatataagcatctgcggcggtattttggcgtgacggcgcaggtgtcgtacacggatgtgtggacgcataaaccg

SEQ ID NO: 278714 - DNA, 75 bp, synthetic construct
  source 1..75: mol_type = other DNA
agtctttacctgttctgtggtcatcgcctggcatctgatatcgaaatcatgatgcgcgaatgctttaacgtgctg

SEQ ID NO: 278715 - DNA, 75 bp, synthetic construct
  source 1..75: mol_type = other DNA
gatgcgtgaacgcttcagtgtgctgaaccatattatctgggcaaagccgtccggacgctggaacgggtgcaacaa

SEQ ID NO: 278716 - DNA, 75 bp, synthetic construct
  source 1..75: mol_type = other DNA
agagtgaatataagcatctgcggcggtattttggcgtgacggcgcaggtgccgtacacggatgtgtggacgcata

SEQ ID NO: 278717 - DNA, 75 bp, synthetic construct
  source 1..75: mol_type = other DNA
ccggcagtatacggaactgctgagtgaatataaaaatttgcggcggtatttcggtgtgacggcgcaggttccgta

SEQ ID NO: 278718 - DNA, 75 bp, synthetic construct
  source 1..75: mol_type = other DNA
cgtgcgattggtgttgagctggagaccggacgttttgaacagacagtcagggaagttcaggatttaatcgtttga

SEQ ID NO: 278719 - DNA, 75 bp, synthetic construct
  source 1..75: mol_type = other DNA
cgtgcaattggtgtcgagctggaggctgaacgttttgagcagaccgcaagagatgtacagaatttaatcagaaag

SEQ ID NO: 278720 - DNA, 75 bp, synthetic construct
  source 1..75: mol_type = other DNA
aaaggggacgaagattaccttaagtggctggacctctgtctggcccagttctggcgggtgttgaaacctgccgga

SEQ ID NO: 278721 - DNA, 75 bp, synthetic construct
  source 1..75: mol_type = other DNA
agcggcagaaaaacaccagcgtggggaactggaaaaaccacaccaccagctggtatgcacatacagcgaactgag

SEQ ID NO: 278722 - DNA, 75 bp, synthetic construct
  source 1..75: mol_type = other DNA
tatgggatggttgcgcagcgtcaggcatgaaattatccagtgtggcaattatggcccgcctggctgatttcagta

SEQ ID NO: 278723 - DNA, 75 bp, synthetic construct
  source 1..75: mol_type = other DNA
cgccagggtaccgtggcatttgaagagaagtatggctcccaactggagctgatatttcgttttatcgatcgtgcg

SEQ ID NO: 278724 - DNA, 75 bp, synthetic construct
  source 1..75: mol_type = other DNA
gaacgaaagcgattatctgaaattacagtcgctgtttgcccgggtggcagaagagaaacatcagcggggtgaact

SEQ ID NO: 278725 - DNA, 75 bp, synthetic construct
  source 1..75: mol_type = other DNA
agaaatgttgcagcagataatcagcgcaagcagtcgtccgggagacctggttgcagatttcttcatggggtcggg

SEQ ID NO: 278726 - DNA, 75 bp, synthetic construct
  source 1..75: mol_type = other DNA
gtcgtgcgattggcgttgaactggagaccggacgttttgagcagacagtcagggaagttcaggatttaatcgttt

SEQ ID NO: 278727 - DNA, 75 bp, synthetic construct
  source 1..75: mol_type = other DNA
acgtccaggcaaatagctgacgccaccggaaagaaaaatatggcgtctcactggttcggtaccagtcagtggcaa

SEQ ID NO: 278728 - DNA, 75 bp, synthetic construct
  source 1..75: mol_type = other DNA
tttccgtatcggcagctgttccttatacggatgtctggacgcataaacctgtacagttttatccgggcaaacatc

SEQ ID NO: 278729 - DNA, 75 bp, synthetic construct
  source 1..75: mol_type = other DNA
tggtcagcacatacagcgaactgaaccggcaatatgtcagcctgctggaagagtataaatctttgcggcgttatt

SEQ ID NO: 278730 - DNA, 75 bp, synthetic construct
  source 1..75: mol_type = other DNA
ggaaagcctgcgggcgtatttcccggcaacagaacgcattctgtttgcagaacattatcaggggccataccagcc

SEQ ID NO: 278731 - DNA, 75 bp, synthetic construct
  source 1..75: mol_type = other DNA
aaaagcggcactttcactgggacgccgtgcgattggcgtggaactggaagaagagagatttaatcagactgtaac

SEQ ID NO: 278732 - DNA, 75 bp, synthetic construct
  source 1..75: mol_type = other DNA
aaacagcatgtgatggccccgctgatttcttactttcgtgatgcgcgtgcagccctggggataacggcaaaacag

SEQ ID NO: 278733 - DNA, 75 bp, synthetic construct
  source 1..75: mol_type = other DNA
cgtccgggagatttggtggctgatttttttatggggtctggctcaacaataaaagcagcactttcactgggacgt

SEQ ID NO: 278734 - DNA, 75 bp, synthetic construct
  source 1..75: mol_type = other DNA
atgacgggcaaagaggcaattatttattacctggggacgcataagagcttctgtgcgcaggacgttgctgcggca

SEQ ID NO: 278735 - DNA, 75 bp, synthetic construct
  source 1..75: mol_type = other DNA
atgacgggcaaagaggcaattattcattacctgaaaacgcaccggactttctgcgcgccggatgtagctgcggca

SEQ ID NO: 278736 - DNA, 75 bp, synthetic construct
  source 1..75: mol_type = other DNA
atgagcctcttaattaacagggtgacaacggtagtgagctcattaagtcattaccattgtcatggacgtacagct

SEQ ID NO: 278737 - DNA, 75 bp, synthetic construct
  source 1..75: mol_type = other DNA
attatctggagacgcacaagagcttctgtgcgccggacgttgttgcgacaacaggtgtgacattaaccagcataa

SEQ ID NO: 278738 - DNA, 75 bp, synthetic construct
  source 1..75: mol_type = other DNA
ctgtgcgcaggacgttgccgcggtaacaggcgcaacggtaaccagcataaatcaggctgcggctaaaatggcgcg

SEQ ID NO: 278739 - DNA, 75 bp, synthetic construct
  source 1..75: mol_type = other DNA
tgcaggaatcctggtcattgatggtaaggtctggcgaacacggtgtattaccgggttgctaccagggaagaacgg

SEQ ID NO: 278740 - DNA, 75 bp, synthetic construct
  source 1..75: mol_type = other DNA
tatgccgaagcgggcaagctggtgaccttcggcattgtgccggatctaccagaaaccggttatggctatattcgt

SEQ ID NO: 278741 - DNA, 75 bp, synthetic construct
  source 1..75: mol_type = other DNA
ccgcttatggccgctttcccgcgtactttaccccaagcagtttttatgcctgaaaggcgatctcaccatgctgca

SEQ ID NO: 278742 - DNA, 75 bp, synthetic construct
  source 1..75: mol_type = other DNA
cgctggcggtggtgttagtggtaaggtatatggttcaggtggcggtggcgcatacgatgccggttatagcggaac

SEQ ID NO: 278743 - DNA, 75 bp, synthetic construct
  source 1..75: mol_type = other DNA
ctcttaacttacaggatgacaacggtagtgagcctatttagtcattaccgttgtcattgccgtcccgttgaccag

SEQ ID NO: 278744 - DNA, 75 bp, synthetic construct
  source 1..75: mol_type = other DNA
ggaagacgcctggcgtgatatcaccaatgcctggcagttacgcacacgccaactggcctgtctgcaactgttagc

SEQ ID NO: 278745 - DNA, 75 bp, synthetic construct
  source 1..75: mol_type = other DNA
cggtaaaacgttgctggcgctggtggaaaaagcgcaggcattgccggaagaggccttaccgcagccgatgcttaa

SEQ ID NO: 278746 - DNA, 75 bp, synthetic construct
  source 1..75: mol_type = other DNA
ttctttgccgccccctgttttattggtgagattgagttaatcgataaagaccatgaaccgcgtgcggtgcaggct

SEQ ID NO: 278747 - DNA, 75 bp, synthetic construct
  source 1..75: mol_type = other DNA
ggagagcgcccgggctgtgctggctgcgggatcaggtaaggcagaaccggtctctgcatccacaaccgccatgtt

SEQ ID NO: 278748 - DNA, 75 bp, synthetic construct
  source 1..75: mol_type = other DNA
gaggcgaaaggtcgtgaacaactggcggcaacgctggcggcgatgccggagatgacggtggaaaaagcccgcccg

SEQ ID NO: 278749 - DNA, 75 bp, synthetic construct
  source 1..75: mol_type = other DNA
ccaggtgcggggcgtactgctggacattgacagtccgggcgggcaggccgccggcgcgtttgactgcgctgacat

SEQ ID NO: 278750 - DNA, 75 bp, synthetic construct
  source 1..75: mol_type = other DNA
cagctatgccggtcatctggcgcaggccggtgtggatatcacgctgatttacgcaggggcgcacaaggtggatgg

SEQ ID NO: 278751 - DNA, 75 bp, synthetic construct
  source 1..75: mol_type = other DNA
tcagttaagtaccactcgcgaagagatggcgaccttctcaaacccggcttataccttgccattccgtaatactaa

SEQ ID NO: 278752 - DNA, 75 bp, synthetic construct
  source 1..75: mol_type = other DNA
acgactgccgctggatgaaaaactaaaagtggatatcagccagacgccggagatgaaaggggtctattcgcgcgt

SEQ ID NO: 278753 - DNA, 75 bp, synthetic construct
  source 1..75: mol_type = other DNA
gcagagtatttaggcgtttcttatcgacacctcttatatgttctcgcacaattcattcacgacggtttattaatt

SEQ ID NO: 278754 - DNA, 75 bp, synthetic construct
  source 1..75: mol_type = other DNA
gtgaaagaaatccacaataatgaacttaagcagcaactgattagtgagtccgcatttaatgagtgctttttaacg

SEQ ID NO: 278755 - DNA, 75 bp, synthetic construct
  source 1..75: mol_type = other DNA
gttattaaacgacacgctatttttacgaaaactctgcgtcaccttaagccataaaaattatcgcaatattgtttc

SEQ ID NO: 278756 - DNA, 75 bp, synthetic construct
  source 1..75: mol_type = other DNA
ccgaaccggtctctgcatccacaaccgccttgtttgaacatttcatggcgaatcattcaccggcagcggtgcggg

SEQ ID NO: 278757 - DNA, 75 bp, synthetic construct
  source 1..75: mol_type = other DNA
tttaaggtgtgtcgccagagtgccgcgatgaagcgggtgttggcggtgtatggagatatgaacttaaacttgctg

SEQ ID NO: 278758 - DNA, 75 bp, synthetic construct
  source 1..75: mol_type = other DNA
aaaaataagaaaggatatctcattaaaaatagaaagaagttgttgggactggcgctggagatggacccggagaat

SEQ ID NO: 278759 - DNA, 75 bp, synthetic construct
  source 1..75: mol_type = other DNA
atggaagaaaaacaactgaacataacacatgaaaaagtaagagtgttgctaaccattgaaaatggaaaagtaatt

SEQ ID NO: 278760 - DNA, 75 bp, synthetic construct
  source 1..75: mol_type = other DNA
ggggcatcaaatcaatggtcattgagaccgctgacaacatcaccttgaaaaccagtgagtttgtactggaggctg

SEQ ID NO: 278761 - DNA, 75 bp, synthetic construct
  source 1..75: mol_type = other DNA
ggggcatcaaatcaatggtcattgagaccgctgacaacatcaccatgaaaaccagtgagtttgttctggaggctg

SEQ ID NO: 278762 - DNA, 75 bp, synthetic construct
  source 1..75: mol_type = other DNA
ggggcatcaaatcaatggtcattgagaccgctgacaatatcaccctgaaaaccagtgagtttgtcctggaggctg

SEQ ID NO: 278763 - DNA, 75 bp, synthetic construct
  source 1..75: mol_type = other DNA
gcccgctgacaatatcaccttgaaaaccagtgagtttgtactggaggctgaccgcacgcgcattaacagcgaagt

SEQ ID NO: 278764 - DNA, 75 bp, synthetic construct
  source 1..75: mol_type = other DNA
gtccgctgacaatatcaccttgaaaaccagtgagtttgtactggaggctgaccgcacgcgtattaacagcgaagt

SEQ ID NO: 278765 - DNA, 75 bp, synthetic construct
  source 1..75: mol_type = other DNA
gaccgctgacaatatcaccttgaaaaccagtgagtttgtactggaggctgaccgcacgcgaattaacagcgaagt

SEQ ID NO: 278766 - DNA, 75 bp, synthetic construct
  source 1..75: mol_type = other DNA
aaactggcgacctcgaaaccaactggattaactggctgacactgcgcgcgggcaaatcgcgcacctggtggaaac

SEQ ID NO: 278767 - DNA, 75 bp, synthetic construct
  source 1..75: mol_type = other DNA
tgcgccttatcaccaacctaatccgcactggtgtagtcaccgacgtggaccgggagaactggctttgtcgggtga

SEQ ID NO: 278768 - DNA, 75 bp, synthetic construct
  source 1..75: mol_type = other DNA
gtatgtcagaggcatcaaatcaatggtcattgaggccgctgacaacatcaccttgaaaaccagtgagtttgtgct

SEQ ID NO: 278769 - DNA, 75 bp, synthetic construct
  source 1..75: mol_type = other DNA
ggaggctgacaccacgcgcatcaacagcgaggtggtgatcaatggtggcgtcacccaaggcggcggcgcgatgag

SEQ ID NO: 278770 - DNA, 75 bp, synthetic construct
  source 1..75: mol_type = other DNA
gatcagctggctgaccctgcgtgccgggaatgcccggacatggtggcgaccatcggaaggtgagcaggtggtgct

SEQ ID NO: 278771 - DNA, 75 bp, synthetic construct
  source 1..75: mol_type = other DNA
gcaggtggtgctgctgagtctgggaggcaatctggaaaccgcctttgcgttgcccgctgtctattcgaatcagtt

SEQ ID NO: 278772 - DNA, 75 bp, synthetic construct
  source 1..75: mol_type = other DNA
ggccgctgacaatatcaccttgaaaaccagtgagtttgtactggaggctgaccgcacgcggattaacagcgaagt

SEQ ID NO: 278773 - DNA, 75 bp, synthetic construct
  source 1..75: mol_type = other DNA
catcggaaggtgagcaggtggtgctgctgagtctgggaggcaatcttgaaactgcctttgcgctgcccgctgtct

SEQ ID NO: 278774 - DNA, 75 bp, synthetic construct
  source 1..75: mol_type = other DNA
agcaggtggtgctgctgagtctgggcggaaatctggaaaccgcctttgcgttgcccgccatctattcgaatcagt

SEQ ID NO: 278775 - DNA, 75 bp, synthetic construct
  source 1..75: mol_type = other DNA
cgtcgccggatgagcaggtggtggtgctgagcatgggcggcaatctggaaaccgcttttgtgctgcccgccatct

SEQ ID NO: 278776 - DNA, 75 bp, synthetic construct
  source 1..75: mol_type = other DNA
gtatgtcaggggcatcaaatccatggtcattgaggccgctgacaatatcaccctgaaaaccagtgagtttgtact

SEQ ID NO: 278777 - DNA, 75 bp, synthetic construct
  source 1..75: mol_type = other DNA
ggtaaatcacgtacgtggtggaaaccgtcagtgggtgagcaggttgtgctgctgagtcttggcggcaatcttgaa

SEQ ID NO: 278778 - DNA, 75 bp, synthetic construct
  source 1..75: mol_type = other DNA
ggcggcaatctggaaaccgcgtttgcgctgcccgccatctattcgaatcagttcgcgccaccgtcgacgtcggcg

SEQ ID NO: 278779 - DNA, 75 bp, synthetic construct
  source 1..75: mol_type = other DNA
cgacaaacgcttcattgtttcaccgaagttcgatcgtcggacgaaacaaggtaaagctgacgaagaggcatttct

SEQ ID NO: 278780 - DNA, 75 bp, synthetic construct
  source 1..75: mol_type = other DNA
cgcaatggctcacccggcggcgcgctggatgctggaagcgccaggccactgcgaagcatcgatgtactggaatga

SEQ ID NO: 278781 - DNA, 75 bp, synthetic construct
  source 1..75: mol_type = other DNA
gaatacctatcacgaatgccgcataaatgatgaatggggcggcgtggaaattattaaacgccctgactgggcacg

SEQ ID NO: 278782 - DNA, 75 bp, synthetic construct
  source 1..75: mol_type = other DNA
caaagatatgactggtgggcttatgtatcagctcgcccccgcaatatcgcatttaactatatcgtgagggcggcg

SEQ ID NO: 278783 - DNA, 75 bp, synthetic construct
  source 1..75: mol_type = other DNA
ggaaactggagctgatgcgtgatagcgcaatggctcacccggcggcacgctggatgttggaagcacctggttact

SEQ ID NO: 278784 - DNA, 75 bp, synthetic construct
  source 1..75: mol_type = other DNA
tcagcaacgaagactaccacgccggtgacggcgtgagtaaatcgcaactggacatggttgccaagaatccggcgc

SEQ ID NO: 278785 - DNA, 75 bp, synthetic construct
  source 1..75: mol_type = other DNA
taccgtaataatgccattacctacaaagcgcagcgtgacaaaaacgccagagagctgaaactggcgaacgtgaca

SEQ ID NO: 278786 - DNA, 75 bp, synthetic construct
  source 1..75: mol_type = other DNA
atgcagcagcgccagcacgatgttgctgcgctcgatgcaaaatactcgagggaattagccgatgcgagagctgaa

SEQ ID NO: 278787 - DNA, 75 bp, synthetic construct
  source 1..75: mol_type = other DNA
agaactgaagctggcgaactcgacaattactgacatgcaggtgcgccaacgtgatgttgctgcgctcgatgcaaa

SEQ ID NO: 278788 - DNA, 75 bp, synthetic construct
  source 1..75: mol_type = other DNA
tgcactcgatgctaaatacacgaaggagttagctgatgcgaaagctgaaaatgatgctcttcggcgcaagcttga

SEQ ID NO: 278789 - DNA, 75 bp, synthetic construct
  source 1..75: mol_type = other DNA
cgaaacgttctcggtatccgggatggaatcatcagcgaccaagcagccttgagaacgctacaggagtacatcagg

SEQ ID NO: 278790 - DNA, 75 bp, synthetic construct
  source 1..75: mol_type = other DNA
atacacgaaggagttagctgatgcgaaagctgaaaatgatgctcttcggcgtaagcttgataatggtggtcgggt

SEQ ID NO: 278791 - DNA, 75 bp, synthetic construct
  source 1..75: mol_type = other DNA
acaaaccgcggttcttggcggcacgttcacggataataagcagtgcacgctcagcgaggcccggcatcagttgcc

SEQ ID NO: 278792 - DNA, 75 bp, synthetic construct
  source 1..75: mol_type = other DNA
caatggcagaaaccggagaacgcctggttcgctgggaacggacgcacacaccagacccggaaaagcatgaacttt

SEQ ID NO: 278793 - DNA, 75 bp, synthetic construct
  source 1..75: mol_type = other DNA
gcctatatgctcagcggtgaactggcggtggatccctctaacgctggcaccacgggacttcttgatctaaccacc

SEQ ID NO: 278794 - DNA, 75 bp, synthetic construct
  source 1..75: mol_type = other DNA
tgcaaagtcaacgaccggagccagcagcatgggcgatggagaaagcccagggcttacagcagatgctgaactcaa

SEQ ID NO: 278795 - DNA, 75 bp, synthetic construct
  source 1..75: mol_type = other DNA
aaacctccagcgcctccggcatgggcaatgatgccaccgtcgaactctctccagttgctggacgaaacgttctcg

SEQ ID NO: 278796 - DNA, 75 bp, synthetic construct
  source 1..75: mol_type = other DNA
tacggtggcaaaagggaaaacaaccaccctgacggtttcttttgagccggaaagtgcaacagacaagacgttcag

SEQ ID NO: 278797 - DNA, 75 bp, synthetic construct
  source 1..75: mol_type = other DNA
aacaggaataaaaaaggggcacatcctagtggtgaaagaacaataggttacaaacagctcttcaaaataccttat

SEQ ID NO: 278798 - DNA, 75 bp, synthetic construct
  source 1..75: mol_type = other DNA
ctggcagaggaaggcactgaaactgtgggcgttaccgggctgacggtggcaccggcatctgccagtgtaaaagtg

SEQ ID NO: 278799 - DNA, 75 bp, synthetic construct
  source 1..75: mol_type = other DNA
ttatgctaatcgacaccgccatctggggtgaagacggtaactttatcgatgccgtcgcccatatgatcctgcccg

SEQ ID NO: 278800 - DNA, 75 bp, synthetic construct
  source 1..75: mol_type = other DNA
atgttgcagtttattctccgacgtttgggacttgtcatccccacgtttatcggtattacccttctcacatttgcc

SEQ ID NO: 278801 - DNA, 75 bp, synthetic construct
  source 1..75: mol_type = other DNA
acaaccaccctgacggtttcttttgagccggaaagtgcaaccgacaagacgttcagagcggtttccgccgatccg

SEQ ID NO: 278802 - DNA, 75 bp, synthetic construct
  source 1..75: mol_type = other DNA
aggcgtgaagcagggcagtgtcagcattgtgggcatgacttctgacggcgattttgtggctgtgactgcggtggc

SEQ ID NO: 278803 - DNA, 75 bp, synthetic construct
  source 1..75: mol_type = other DNA
taccgtgataacgccatcgcctacaaagagcagcgcgataaaaaagtcagtgagctgaagcaggcgaccgccacc

SEQ ID NO: 278804 - DNA, 75 bp, synthetic construct
  source 1..75: mol_type = other DNA
tcacccccagtgcaaaattttatatagaaggctccagaaattacatttctaataaaaaaggtgatacatctcttt

SEQ ID NO: 278805 - DNA, 75 bp, synthetic construct
  source 1..75: mol_type = other DNA
gagtcagccgaatgttgggaaggatttgacggatgaagagaagaactgcctggccggcggcagtacgggaagccc

SEQ ID NO: 278806 - DNA, 75 bp, synthetic construct
  source 1..75: mol_type = other DNA
agtggagtttggtcttggcgaaggcgtttttgtctttaatcataccaataacagtgatgccggctaccaggtcga

SEQ ID NO: 278807 - DNA, 75 bp, synthetic construct
  source 1..75: mol_type = other DNA
ttctctatggcaatttcgctggcgggctggagttaaaccaggtcagtgaggaagagcaggctattctttcggtgc

SEQ ID NO: 278808 - DNA, 75 bp, synthetic construct
  source 1..75: mol_type = other DNA
gttatcagtgaaccagaagcaacgttatgttgcaatgctgcaacattttatcggcgagtgggaaagttggcatat

SEQ ID NO: 278809 - DNA, 75 bp, synthetic construct
  source 1..75: mol_type = other DNA
accagccacatgttcttccatatatgattagcaactgtacaatatatttcgttccgaactgtcaggataattact

SEQ ID NO: 278810 - DNA, 75 bp, synthetic construct
  source 1..75: mol_type = other DNA
ccagcttatcgccatgaaaacccgggggcagttaacctatagagctattcagggaaaacctgttgttcatgccag

SEQ ID NO: 278811 - DNA, 75 bp, synthetic construct
  source 1..75: mol_type = other DNA
ctgtcagcagcttcaaaaatcgttacggtatcgattttgatgaacagcaggaacgtcgcgtaaagactgaacaga

SEQ ID NO: 278812 - DNA, 75 bp, synthetic construct
  source 1..75: mol_type = other DNA
ggttcgttacggaacaacatttatgccggagggcagggtgttactgcgatatctgaagcaacagcagtttgtgga

SEQ ID NO: 278813 - DNA, 75 bp, synthetic construct
  source 1..75: mol_type = other DNA
ttgagcaacgtctagggcgcttcaatcgctattccagaagcttaaagggcatcaagcctgtagaaagcctcgtca

SEQ ID NO: 278814 - DNA, 75 bp, synthetic construct
  source 1..75: mol_type = other DNA
tatcgtttatttcatcgactgttacgtaatcgtcgcgaagatccttctcttgccttgcttttccctgggttatcg

SEQ ID NO: 278815 - DNA, 75 bp, synthetic construct
  source 1..75: mol_type = other DNA
atgctatgtcatcaaacaggtatcgtgttgttactctccgggacaccgatgcatggcaacgaactcaatttcctc

SEQ ID NO: 278816 - DNA, 75 bp, synthetic construct
  source 1..75: mol_type = other DNA
tgaagaaagtattaagtcagatattataaaggcagaagcagatatcgatcttttcagaaggattgatatgaacat

SEQ ID NO: 278817 - DNA, 75 bp, synthetic construct
  source 1..75: mol_type = other DNA
tctgatgacatcggaggagtatgctacgcgagttgtattctttaacagaacgctggacatgtacatatccgcttt

SEQ ID NO: 278818 - DNA, 75 bp, synthetic construct
  source 1..75: mol_type = other DNA
ttcccttgcggcatttatcctggtgagtgagcttttatcttcctggggtgataagtatcttgatatctgccttgt

SEQ ID NO: 278819 - DNA, 75 bp, synthetic construct
  source 1..75: mol_type = other DNA
ctccccacataacagcgaatcaacatcggtgtttcttccctttgttcaacaggtccgtgagaaccgtaatcgcca

SEQ ID NO: 278820 - DNA, 75 bp, synthetic construct
  source 1..75: mol_type = other DNA
cggcggtgatttatatcgtctccaccaacgtgattgccgggattgtgccaaatatggagctggcaaattcaacgg

SEQ ID NO: 278821 - DNA, 75 bp, synthetic construct
  source 1..75: mol_type = other DNA
cctcctgtacttgaagaatcaaatggagagcatgcgcccacagacgctaaggggcatcatctttcgccagcactg

SEQ ID NO: 278822 - DNA, 75 bp, synthetic construct
  source 1..75: mol_type = other DNA
aagaaacaatactaacaagtcctgaaccagcagaggatgtccgagaaacggtagccgccgtggagaaagcgagtc

SEQ ID NO: 278823 - DNA, 75 bp, synthetic construct
  source 1..75: mol_type = other DNA
ctgggcctgcgccaatgtggatgccagagcggcgcgcgaagttagcgaacttaaagaactgcacaacaatacctt

SEQ ID NO: 278824 - DNA, 75 bp, synthetic construct
  source 1..75: mol_type = other DNA
tgccgatcttctccgacagaatgcgctttaaaacctggtatcacgctgcgccttcctttattaacttgtccattg

SEQ ID NO: 278825 - DNA, 75 bp, synthetic construct
  source 1..75: mol_type = other DNA
cttggttgccttgggttaggcgttgtgcgtccggcacaaaccgcggttcttggcggcacattctggcagcaagtt

SEQ ID NO: 278826 - DNA, 75 bp, synthetic construct
  source 1..75: mol_type = other DNA
aagatgccgggctggttcgttacggaacaacatttataccggagggcagggtgttgttgcgccatctgaaacagc

SEQ ID NO: 278827 - DNA, 75 bp, synthetic construct
  source 1..75: mol_type = other DNA
aatgccgggaacggcgcatcaactgatgcgtgtgctttcagatgttctgctgaagtatgagccacgtattaagcg

SEQ ID NO: 278828 - DNA, 75 bp, synthetic construct
  source 1..75: mol_type = other DNA
atgatctggcagcctgagttcacagataaaacactctccaggaaaaccggggcggttcagaatgatattctgtca

SEQ ID NO: 278829 - DNA, 75 bp, synthetic construct
  source 1..75: mol_type = other DNA
ccgacagtaacaatattattagtagtgaaaatactgaagccattacggatagtttggaagagtctggcgcggata

SEQ ID NO: 278830 - DNA, 75 bp, synthetic construct
  source 1..75: mol_type = other DNA
ctggcgcatttacctgactacggtctgccggatatgaccaaaatccttcaggggatgccgggtatggcgcatgaa

SEQ ID NO: 278831 - DNA, 75 bp, synthetic construct
  source 1..75: mol_type = other DNA
cggtgctcgataacatgcagcgtattctgaatacccgggccgggagccttaaacatcttccggactatgggctgc

SEQ ID NO: 278832 - DNA, 75 bp, synthetic construct
  source 1..75: mol_type = other DNA
tcgacttcacctccaacctgcatttagaccgtgaaacagttccggctggttttgaaacctttaaattaaccttaa

SEQ ID NO: 278833 - DNA, 75 bp, synthetic construct
  source 1..75: mol_type = other DNA
gtgaccatgaccgacaataacgtagaaattcactgcctgatccgttctctgatcgacagcggtaaagactacgta

SEQ ID NO: 278834 - DNA, 75 bp, synthetic construct
  source 1..75: mol_type = other DNA
cggatgagcaagttcacatcgaaagcgttggtcattactggacactgctgactgaactgctgaaagaaattccgg

SEQ ID NO: 278835 - DNA, 75 bp, synthetic construct
  source 1..75: mol_type = other DNA
aaattcactgtctgatccgttctctgatcgacagcggtaaagactacgtggtgagcatgctggattcgctgggta

SEQ ID NO: 278836 - DNA, 75 bp, synthetic construct
  source 1..75: mol_type = other DNA
catgaccgaagaagccggtatggatggcgcgttcggcttacagagcaactggttacaggctgacattctgattaa

SEQ ID NO: 278837 - DNA, 75 bp, synthetic construct
  source 1..75: mol_type = other DNA
cggtgaaaggttccggtaccacactgtgggtttacaacggcaaggctgatgcttatgcaaacccgttgtcagacg

SEQ ID NO: 278838 - DNA, 75 bp, synthetic construct
  source 1..75: mol_type = other DNA
gtgggtttacaccggcaagggtgatgcttatgcaaacccgttgtcagacgatgactggcagcgactggctaaggt

SEQ ID NO: 278839 - DNA, 75 bp, synthetic construct
  source 1..75: mol_type = other DNA
gcaacattgaccaacgacattatttcagaaatgaattatttagcgaactaacatgggttatagataccaatccta

SEQ ID NO: 278840 - DNA, 75 bp, synthetic construct
  source 1..75: mol_type = other DNA
cacagccgctgtgggatatttttgccaaaatttgttctattcctcacccgtcctatcatgaagagcaactcgctg

SEQ ID NO: 278841 - DNA, 75 bp, synthetic construct
  source 1..75: mol_type = other DNA
tttgaaaccttcaagttaaccttaaaaggtctgaaaggcggtcactccggcggtgaaatccacgttggcctgggt

SEQ ID NO: 278842 - DNA, 75 bp, synthetic construct
  source 1..75: mol_type = other DNA
tggcctggaagcccggcgagaaagggcagcgcgatttgattgcctggtttgacagcagtgagacccgggcctaca

SEQ ID NO: 278843 - DNA, 75 bp, synthetic construct
  source 1..75: mol_type = other DNA
atgcctgtaccaaatccagcaataccggtgaaaggtgccggaaccaccctgtgggtttataacggaaacggcgac

SEQ ID NO: 278844 - DNA, 75 bp, synthetic construct
  source 1..75: mol_type = other DNA
tcgtaggttatggtttcttagacgttactatttttttataaaatatatgtttatgaaaggaataagacattttga

SEQ ID NO: 278845 - DNA, 75 bp, synthetic construct
  source 1..75: mol_type = other DNA
ccggcaaataatcaatgccagtagtcgacctggtgatctggttgctgatttctttatgggatccggttccacaat

SEQ ID NO: 278846 - DNA, 75 bp, synthetic construct
  source 1..75: mol_type = other DNA
cttctgtagcggaagaacgcagcgaaattacgccggccactgcaattaaggtgacaccgacatccggtacggtgg

SEQ ID NO: 278847 - DNA, 75 bp, synthetic construct
  source 1..75: mol_type = other DNA
aaatgccacactacgcgacctgcttccccatagtctggcgattaagggggttaaatgccacgggacacgaccagc

SEQ ID NO: 278848 - DNA, 75 bp, synthetic construct
  source 1..75: mol_type = other DNA
gttgtgagttaatcaacgctgattgcctggagtttatccagaccttaccggaaaactctgtcgatctgatagtca

SEQ ID NO: 278849 - DNA, 75 bp, synthetic construct
  source 1..75: mol_type = other DNA
gcggaaactaaagataataacacaaagaagaatggtaacactgaaagccaaccaatggcagatgagaaaataaaa

SEQ ID NO: 278850 - DNA, 75 bp, synthetic construct
  source 1..75: mol_type = other DNA
gcagcgcgatttgatcgcctggtttgacagcagtgagaccctggcctacaaaatccgtttcccgaatggcacggt

SEQ ID NO: 278851 - DNA, 75 bp, synthetic construct
  source 1..75: mol_type = other DNA
gggaaaacaaccaccctgactgtttcttttgagccggaaagtgcaaccgacaagacgttcagagcggtttccgcc

SEQ ID NO: 278852 - DNA, 75 bp, synthetic construct
  source 1..75: mol_type = other DNA
gattcagtggcgactggtactacctgtatcaggtcaggaagaacatccttccggcccctgacactgtaccgctca

SEQ ID NO: 278853 - DNA, 75 bp, synthetic construct
  source 1..75: mol_type = other DNA
atggcaacaccaaatcccctggagccggtaaaaggagccggtaccaccctgtgggtttataacggtcagggtgac

SEQ ID NO: 278854 - DNA, 75 bp, synthetic construct
  source 1..75: mol_type = other DNA
gaaggatctgacccccggcgagatgacggcggaatcctacgatgataactatctggatgatgaggatgctgactg

SEQ ID NO: 278855 - DNA, 75 bp, synthetic construct
  source 1..75: mol_type = other DNA
gataaaacaaaagccaccgtgtcggtcagtggtatgaccatcaccgtgaacggcgttgctgcggttgcagaaatc

SEQ ID NO: 278856 - DNA, 75 bp, synthetic construct
  source 1..75: mol_type = other DNA
accgcagagtcctatgacgacagttatctcgatgatgaagatccggactgggccgcgaccggacaggggcagaaa

SEQ ID NO: 278857 - DNA, 75 bp, synthetic construct
  source 1..75: mol_type = other DNA
cgatgtgttccgtggctgggtgagcagtattggcaaggccgtcaccgcaaaagaagtgatcacccgtacgataaa

SEQ ID NO: 278858 - DNA, 75 bp, synthetic construct
  source 1..75: mol_type = other DNA
atgccaacacctaatccccttgagccggtaaaaggctcaggcaccacactctggctttattccgggaatggtgat

SEQ ID NO: 278859 - DNA, 75 bp, synthetic construct
  source 1..75: mol_type = other DNA
accgccgaatctgaggatgatacctacatcgatgatgagaatgctgactggacatcaaccatgcaggggcagaaa

SEQ ID NO: 278860 - DNA, 75 bp, synthetic construct
  source 1..75: mol_type = other DNA
accgcagatttctatgacgacagttatctcgatgatgaagatgcggactgggccgcgaccggacaggggcagaaa

SEQ ID NO: 278861 - DNA, 75 bp, synthetic construct
  source 1..75: mol_type = other DNA
agcggggatgtgcgggcctataaaatccgtttcccgaacggcacggtggatgtgttccgtggctgggtcagcagt

SEQ ID NO: 278862 - DNA, 75 bp, synthetic construct
  source 1..75: mol_type = other DNA
gtcggtgaaactgtgcaactggttgtatctgttcttccggccagtgcgtcagataaatccttccgcgtatcgtca

SEQ ID NO: 278863 - DNA, 75 bp, synthetic construct
  source 1..75: mol_type = other DNA
aagaggtcatgacccggacggccaaaatcaccaacaacggcaaaccatcactggcagaagacagtggtgccgcgc

SEQ ID NO: 278864 - DNA, 75 bp, synthetic construct
  source 1..75: mol_type = other DNA
atcccggttgtgacggggaacggtcagtttgctgacgtggcggaaatcacagttactgaagcagcaactggcggg

SEQ ID NO: 278865 - DNA, 75 bp, synthetic construct
  source 1..75: mol_type = other DNA
cagaaatctgcaggtgataccagttttacgctggcctggaaaccgggagaggaaggccagaaagggcttataggc

SEQ ID NO: 278866 - DNA, 75 bp, synthetic construct
  source 1..75: mol_type = other DNA
ctggcggaggatcggggtgacatcacaccggtcacggggattactgtgacgccaccaacgggcaatgtggcaaaa

SEQ ID NO: 278867 - DNA, 75 bp, synthetic construct
  source 1..75: mol_type = other DNA
caccacgctgaccgtggcattccagccggagggcgcaaccgacaagagcttccgtgcggtgtctgcggataaaac

SEQ ID NO: 278868 - DNA, 75 bp, synthetic construct
  source 1..75: mol_type = other DNA
gggatttcttatggtgattttaaattaaagttaacacatgacagcagaacggatagtaaaacatataaacaaaat

SEQ ID NO: 278869 - DNA, 75 bp, synthetic construct
  source 1..75: mol_type = other DNA
gacaccccagacggggaatgtggcaaaaggtcagagcaccaccctgaccgtggccgttcagccggaaggggcgac

SEQ ID NO: 278870 - DNA, 75 bp, synthetic construct
  source 1..75: mol_type = other DNA
aagcggggatgtgcgggcctataaaatccgtttcccaaatggcacggtggatgtgttccgtggctgggtcagcag

SEQ ID NO: 278871 - DNA, 75 bp, synthetic construct
  source 1..75: mol_type = other DNA
gagaagctaaaaattatatttcaagagaagaattactaggaaaaacaatgattttatatcatattggtggtaata

SEQ ID NO: 278872 - DNA, 75 bp, synthetic construct
  source 1..75: mol_type = other DNA
tctgccggtgacaccagttttacgctggcctggaagcccggcgagaaagggcagcgtgatttgattgcctggttt

SEQ ID NO: 278873 - DNA, 75 bp, synthetic construct
  source 1..75: mol_type = other DNA
aaaacttccgccagtcgctgtttgccgcgcaagatgcacaaagtattctgacgctgctggaaacggaattaacct

SEQ ID NO: 278874 - DNA, 75 bp, synthetic construct
  source 1..75: mol_type = other DNA
gcgtcctggctggaaagtcaggggattgatacagcgaagagttttgatgctgtacagggcgcggccacgccccgt

SEQ ID NO: 278875 - DNA, 75 bp, synthetic construct
  source 1..75: mol_type = other DNA
tctcgcaggcacatattgtgcaggtgatcgtcaactctatcgtcttatcgatagcggtgggtattggctgtactt

SEQ ID NO: 278876 - DNA, 75 bp, synthetic construct
  source 1..75: mol_type = other DNA
cacattttactgccgctgttacgcccagccattctctcggccctgatttacagttttgtgcgggctatcacgaca

SEQ ID NO: 278877 - DNA, 75 bp, synthetic construct
  source 1..75: mol_type = other DNA
accacgccggacattcgctacgtgcgtgaggcgctgtaccagacagcccgtcatggcgggtttatggccgtcatc

SEQ ID NO: 278878 - DNA, 75 bp, synthetic construct
  source 1..75: mol_type = other DNA
tcaggatgcccgtttccgccagttgcaccgtgttctgaaagacagttgtcaggctggtttcagtcacgttctggt

SEQ ID NO: 278879 - DNA, 75 bp, synthetic construct
  source 1..75: mol_type = other DNA
aggcggggttcagccacgttttggtgattgaggaggcccacagtctgcccattccgacactgaaacacctcaaac

SEQ ID NO: 278880 - DNA, 75 bp, synthetic construct
  source 1..75: mol_type = other DNA
aaagaccatcgagttcaccaccatgctgtgctttgccgtaccgggtacggtggcgggcgtctcgtatattctcgc

SEQ ID NO: 278881 - DNA, 75 bp, synthetic construct
  source 1..75: mol_type = other DNA
cgctgcgccgcgacctgattgaacgcgtcaaccgcgagaacgcgccggtgattgtaatcgagccatacatcatcg

SEQ ID NO: 278882 - DNA, 75 bp, synthetic construct
  source 1..75: mol_type = other DNA
tcgtttctggcgtttaaatttcagcgtgccggaaaaggagtttcagaggtgctggatgatagcgccgccgatgct

SEQ ID NO: 278883 - DNA, 75 bp, synthetic construct
  source 1..75: mol_type = other DNA
gtcattattttgatgccggctgggcattgctctgtatggcgtttatcgtcatcagcgccaccgtggctggacgcg

SEQ ID NO: 278884 - DNA, 75 bp, synthetic construct
  source 1..75: mol_type = other DNA
ctttatcaagctatttggtcagggaatgagcgacggcgcgtggccttcactgctggataccctgctctacgccgg

SEQ ID NO: 278885 - DNA, 75 bp, synthetic construct
  source 1..75: mol_type = other DNA
tcgacgtactggcgacgcaaatttacttctatattaccggctcgcagctggattatcaggccgccagcacccttg

SEQ ID NO: 278886 - DNA, 75 bp, synthetic construct
  source 1..75: mol_type = other DNA
tatcaaccgcgagaatgcgccggtcattgttatcgagccatacatcatcgcgatggaagacaacgatgtgaaagg

SEQ ID NO: 278887 - DNA, 75 bp, synthetic construct
  source 1..75: mol_type = other DNA
ataccagatactggatacgtggattgcccgcgtcagccgggaagagcgtgaggcactggaagcccgtcaggccgc

SEQ ID NO: 278888 - DNA, 75 bp, synthetic construct
  source 1..75: mol_type = other DNA
ggctttgcgagcttcgtgtttagcggtggacctggtaccgggaaaaaccatctggcagcagcgatcggaaatcat

SEQ ID NO: 278889 - DNA, 75 bp, synthetic construct
  source 1..75: mol_type = other DNA
gttctgtttggcgcataccagatactggatacatggatagcccgcgtcagccgggaagagcgtgaggcactggaa

SEQ ID NO: 278890 - DNA, 75 bp, synthetic construct
  source 1..75: mol_type = other DNA
tttcatatcgtcgcccgtcttgtttacagcaacccctggatggctttttttctggcggagttgattgcggccatc

SEQ ID NO: 278891 - DNA, 75 bp, synthetic construct
  source 1..75: mol_type = other DNA
tggatgcatggattgcccgtgtcagccgggaagagcgtgaggcactggaagccaggcaacaggccatgatggaag

SEQ ID NO: 278892 - DNA, 75 bp, synthetic construct
  source 1..75: mol_type = other DNA
ccaggctgcctactcgatattacaggtgtatgggtgttctccctggggctctggtttcatatcgttgcccgtctg

SEQ ID NO: 278893 - DNA, 75 bp, synthetic construct
  source 1..75: mol_type = other DNA
gagatcctggaagctgaggcgcagagaacaggccagagcaagacaaccgttctaaaggcagcgctggccgcattc

SEQ ID NO: 278894 - DNA, 75 bp, synthetic construct
  source 1..75: mol_type = other DNA
ttgttaatcacaaaccacaactcgcccgcgaagtgcggagggcactgcgtcaggaagtacatttgtgccaaaaat

SEQ ID NO: 278895 - DNA, 75 bp, synthetic construct
  source 1..75: mol_type = other DNA
tatcaaccgcgagaatgcgccggtgattgttatcgagccatacatcatcgccatggaagacaacgatgtgaaagg

SEQ ID NO: 278896 - DNA, 75 bp, synthetic construct
  source 1..75: mol_type = other DNA
ctatggcggtggcatcggttctcgttttttccctcgccggctgtggtgataaagaagaaaccaaaaaatttaccg

SEQ ID NO: 278897 - DNA, 75 bp, synthetic construct
  source 1..75: mol_type = other DNA
tatactgatgctcaagcaacagagccattctcaatggaattaccacattcggatgaaatatgcattcatttaatt

SEQ ID NO: 278898 - DNA, 75 bp, synthetic construct
  source 1..75: mol_type = other DNA
gtgaggcgctgtaccagacagcccgtcatggtggatttatggccgtcatcggtgagtccggtgcgggtaaatcca

SEQ ID NO: 278899 - DNA, 75 bp, synthetic construct
  source 1..75: mol_type = other DNA
atgagtaacaaaatcattacgctatctggcgctgctaatgaagtgctttatgcgctgtttttccgtggcgcgttg

SEQ ID NO: 278900 - DNA, 75 bp, synthetic construct
  source 1..75: mol_type = other DNA
actggcttcctatgtccgcacggccatcatgatggaatgtttccccggtggtgttatctggcagcagtgccgtcg

SEQ ID NO: 278901 - DNA, 75 bp, synthetic construct
  source 1..75: mol_type = other DNA
cgcgtgggtgccttacaccaacttctcaccgatttacgaaggtaaatgcggtatgagcggtggccgtgtagaagg

SEQ ID NO: 278902 - DNA, 75 bp, synthetic construct
  source 1..75: mol_type = other DNA
ccgttggattattgctggtgttacagccgtggcaactcgatttctcctcgatgaaaagcgccatcctggcaatcc

SEQ ID NO: 278903 - DNA, 75 bp, synthetic construct
  source 1..75: mol_type = other DNA
tacgtggtcgcggaatgcgcccgacgccgtttaaatacaccttagccattgccctgttacaaacctgcgggatgg

SEQ ID NO: 278904 - DNA, 75 bp, synthetic construct
  source 1..75: mol_type = other DNA
gcccgccatccgcgcgtggatttattgtcgttaacatcctggcagatgctttatgcggcgctggtgatgagtgcg

SEQ ID NO: 278905 - DNA, 75 bp, synthetic construct
  source 1..75: mol_type = other DNA
agtcttatccggtcgctccgtctcctgaacctgccggcgcttgaaagtgttctggagagcggaagtctgcttgat

SEQ ID NO: 278906 - DNA, 75 bp, synthetic construct
  source 1..75: mol_type = other DNA
atattaaagtcaaaggacgacatcctatatacattatctattgtttttgttggtggtaatgtcccgttctttgat

SEQ ID NO: 278907 - DNA, 75 bp, synthetic construct
  source 1..75: mol_type = other DNA
aggaactggcgcaatataatttgtggctggattatctggacgcactggagctggtcgatacttccggtgcgccag

SEQ ID NO: 278908 - DNA, 75 bp, synthetic construct
  source 1..75: mol_type = other DNA
aaagtctggcagatcggtgatgagctctacgtcagaagtaacatgcagctgcaggatgagtttgaaaaaacgctt

SEQ ID NO: 278909 - DNA, 75 bp, synthetic construct
  source 1..75: mol_type = other DNA
aaataaaaaataagaaaaagtcaatggaagaaactgttgctcggtggatcgcagcccaaaaggggcaccgagcgt

SEQ ID NO: 278910 - DNA, 75 bp, synthetic construct
  source 1..75: mol_type = other DNA
ggagatagatctcgattctgtcagcgttcacggtatacgggcagcccggtttgaatactccactgatgccgtcag

SEQ ID NO: 278911 - DNA, 75 bp, synthetic construct
  source 1..75: mol_type = other DNA
tcggtgccttcgactttaccgccttacgctgcattttcggcgctctcgttttattcatcgtccttttattacgtg

SEQ ID NO: 278912 - DNA, 75 bp, synthetic construct
  source 1..75: mol_type = other DNA
atcagtgccaccatcgttggccgcggtctaggctacgccgccatcgtgctgtttatcgaattaagcgcgataatg

SEQ ID NO: 278913 - DNA, 75 bp, synthetic construct
  source 1..75: mol_type = other DNA
attatcaatccaggcgctactggttctggtaatactgtttctgacggtcataaagaagtgccacaggaggggttc

SEQ ID NO: 278914 - DNA, 75 bp, synthetic construct
  source 1..75: mol_type = other DNA
agtctgataaaatcaaaaatccggtaaaacatgctgcccgtgagatggagctttccctgttccggcctgcggcgc

SEQ ID NO: 278915 - DNA, 75 bp, synthetic construct
  source 1..75: mol_type = other DNA
gctacgcgttcgcgagtgctacgacggtggtcagtcagaggccgcattgctggatgacctctgcaaagtcgatct

SEQ ID NO: 278916 - DNA, 75 bp, synthetic construct
  source 1..75: mol_type = other DNA
attttattaagcaacgcggcgtgaatgtttttattcaggacgtccccggtgatcaaaaagaacaaatacctgact

SEQ ID NO: 278917 - DNA, 75 bp, synthetic construct
  source 1..75: mol_type = other DNA
atgatggggcgctccggctacataacggaatttatggtggagtggtttgggctgaccaacaccaactggctgtat

SEQ ID NO: 278918 - DNA, 75 bp, synthetic construct
  source 1..75: mol_type = other DNA
tttgggtgcattattggttacatgccttccatgtttgcttacacgctttatggttcgctgttagataatttttct

SEQ ID NO: 278919 - DNA, 75 bp, synthetic construct
  source 1..75: mol_type = other DNA
ttcagcagtcgctatgctactttttattcaactaccacacgactcaatgaatgtttatcttggaatgactgcaac

SEQ ID NO: 278920 - DNA, 75 bp, synthetic construct
  source 1..75: mol_type = other DNA
tttttatgcgtcagacgctgccctaccagagcatgcagcgcagcgcggattatagctgggcgtcaaactctcgca

SEQ ID NO: 278921 - DNA, 75 bp, synthetic construct
  source 1..75: mol_type = other DNA
acgcccggtgaaaatggtcacggttgcggacacaatttgctgggaaccgccgcctttgccgctgcaatagccgtc

SEQ ID NO: 278922 - DNA, 75 bp, synthetic construct
  source 1..75: mol_type = other DNA
gttaacgcaacatatggtttccgtcagtaaatatgttgcacctgagtttcacggaaagaaaatcggactcgtcct

SEQ ID NO: 278923 - DNA, 75 bp, synthetic construct
  source 1..75: mol_type = other DNA
ctcgtgggtgcttacgggattattaaccagtacggactaaaaatggtgggcgggccagttggcggttatctcgca

SEQ ID NO: 278924 - DNA, 75 bp, synthetic construct
  source 1..75: mol_type = other DNA
cacattctggctgtacgaaagagtacactattgccaccaatcgacacaattatccggcatcaagtgagcgatatc

SEQ ID NO: 278925 - DNA, 75 bp, synthetic construct
  source 1..75: mol_type = other DNA
cggaagtggtcaacgggcatacggacgttatcggctcaaccagtaaccgacacgttgtgacggtacggaatgcag

SEQ ID NO: 278926 - DNA, 75 bp, synthetic construct
  source 1..75: mol_type = other DNA
cgctgctgcaaattgacacacttatccggcaactggctaaaatatcatcaatgacagaaagtattggaggtaaac

SEQ ID NO: 278927 - DNA, 75 bp, synthetic construct
  source 1..75: mol_type = other DNA
taataatggaaaaacacgaggtgtaaatgttggagcaggaggctcttttattaactcggccttagggaacatcaa

SEQ ID NO: 278928 - DNA, 75 bp, synthetic construct
  source 1..75: mol_type = other DNA
ggactgggggaaatgaaaccattcctggttttagtggcactgcggattttttcaatgcgacacgttttgtaacag

SEQ ID NO: 278929 - DNA, 75 bp, synthetic construct
  source 1..75: mol_type = other DNA
gcagggttttcacattgtcgactgcgcatggcaggatgaaacccaactacccacctggattatgagctggccggt

SEQ ID NO: 278930 - DNA, 75 bp, synthetic construct
  source 1..75: mol_type = other DNA
aaagataccttcacaaaaaatattggtgcatgtcgcgcttttcacagtgctattagtacaggggcagggaactgg

SEQ ID NO: 278931 - DNA, 75 bp, synthetic construct
  source 1..75: mol_type = other DNA
ccagatggtaagcctgttcgcctgactcatatgtccgtgggcgacggtggcggcacgttgcccacaccagacagt

SEQ ID NO: 278932 - DNA, 75 bp, synthetic construct
  source 1..75: mol_type = other DNA
ataacgtccatgttatgcgctttgtctccggcagtattcaaagtaataaaaccataaatattacagggcgtgtta

SEQ ID NO: 278933 - DNA, 75 bp, synthetic construct
  source 1..75: mol_type = other DNA
agcggtaaaggccgcgtatgatcttgctaacgcaaaatataccgctcaggacgccacgacggcacaaaaagggat

SEQ ID NO: 278934 - DNA, 75 bp, synthetic construct
  source 1..75: mol_type = other DNA
tgaattaattgatacaacacaggcaaggccaattcagtattgcattaatggaacgtggtataacgcggggagtat

SEQ ID NO: 278935 - DNA, 75 bp, synthetic construct
  source 1..75: mol_type = other DNA
caacccgcaaaccctctgcgggggatgttggtgcatatacgcaggcagaatgtaactcaaggtttattacaggta

SEQ ID NO: 278936 - DNA, 75 bp, synthetic construct
  source 1..75: mol_type = other DNA
ctgatggaagtgaaaccgataataacctggatatgtctgactccgctggattggtcattaacctgaagggtacgg

SEQ ID NO: 278937 - DNA, 75 bp, synthetic construct
  source 1..75: mol_type = other DNA
cgggttgaggagggtgctgttggaaccaacagcggaaatattaccgtacaggatggcggtgtgggattaattgcc

SEQ ID NO: 278938 - DNA, 75 bp, synthetic construct
  source 1..75: mol_type = other DNA
gttctgtcagcccgggagatattgttgccggcaaccgtattgaaacctctgccgcaggtacactggatcttcgcg

SEQ ID NO: 278939 - DNA, 75 bp, synthetic construct
  source 1..75: mol_type = other DNA
atgttgtgcaactgggtggcagcattgcgcaatggactgacggtcaggaccgtctgcaactggggattatggccg

SEQ ID NO: 278940 - DNA, 75 bp, synthetic construct
  source 1..75: mol_type = other DNA
taccacttcactgtcctggtatgcggatgaaaaacttgccgctaccgatgcccacggcaccttcactctcagcga

SEQ ID NO: 278941 - DNA, 75 bp, synthetic construct
  source 1..75: mol_type = other DNA
gtgaaggggcaacctggaacctgctggatggcgggcagggagattctgattccctgatttttgataacgccattc

SEQ ID NO: 278942 - DNA, 75 bp, synthetic construct
  source 1..75: mol_type = other DNA
tgacggcagcacactgacaggagaagtgactgcaggaaatggcaataataatgtaacactcaatggtaaggctca

SEQ ID NO: 278943 - DNA, 75 bp, synthetic construct
  source 1..75: mol_type = other DNA
tgtaactggtggtgcgacagcgacgctgaaacagggggcatcagttaaccttgtaggggatggcgctgttgtcgc

SEQ ID NO: 278944 - DNA, 75 bp, synthetic construct
  source 1..75: mol_type = other DNA
ggggcgattggcgttgaggccagcaataaagggactgttaaccttgatggttcggcagtaccgaactttgctgct

SEQ ID NO: 278945 - DNA, 75 bp, synthetic construct
  source 1..75: mol_type = other DNA
atgtatccggaaaaatcagtcttgccggtacgggggctgtgggggtttttgctaaagatggcggcagtctgaccc

SEQ ID NO: 278946 - DNA, 75 bp, synthetic construct
  source 1..75: mol_type = other DNA
tggctccggcgctctggtgaaacagggggcgggtaatctgatcattaatcatgagctgacttataccggtgatac

SEQ ID NO: 278947 - DNA, 75 bp, synthetic construct
  source 1..75: mol_type = other DNA
aggggcatcctctgatctgacggcatccggtaagaactcgtatgcgcttgttgccactggcaggtctgacacagg

SEQ ID NO: 278948 - DNA, 75 bp, synthetic construct
  source 1..75: mol_type = other DNA
attgaatcgggcagcgaactggccattattcctgcagttgcaggcaactttacctttgatccactgttaacaggc

SEQ ID NO: 278949 - DNA, 75 bp, synthetic construct
  source 1..75: mol_type = other DNA
aacaccaactgcgccaaaagggactaataatactcagatcgcaagcacggcttatgttatggctgcgatcgctgc

SEQ ID NO: 278950 - DNA, 75 bp, synthetic construct
  source 1..75: mol_type = other DNA
caaccacaaatatccagggcggggcgttactggtgttatttcttttggcgttaacagagtcaaacgatattgcac

SEQ ID NO: 278951 - DNA, 75 bp, synthetic construct
  source 1..75: mol_type = other DNA
atgattctctgtgatttattcggctattttaagtatgaaaagtatggagggtacggcattttgaatacaggacat

SEQ ID NO: 278952 - DNA, 75 bp, synthetic construct
  source 1..75: mol_type = other DNA
agagcgaattttcgtagcgcgacaccttacggttttgcaagagctgtatttgaagcaaataaggagggaatccgt

SEQ ID NO: 278953 - DNA, 75 bp, synthetic construct
  source 1..75: mol_type = other DNA
ggggtctaattaatgatgaagatgctctgaaagaaatttttaagcgaagcaatattcgcatggcagggaatgtct

SEQ ID NO: 278954 - DNA, 75 bp, synthetic construct
  source 1..75: mol_type = other DNA
gttacggattcaccactgttaattaccggttcgataaatgcaagtggactggtatttatcgactcatattacgat

SEQ ID NO: 278955 - DNA, 75 bp, synthetic construct
  source 1..75: mol_type = other DNA
gtggggcatcgtcatttgtttttcactggtgatttcaggtccacgctggatgacgttgacgttttttgcgctgat

SEQ ID NO: 278956 - DNA, 75 bp, synthetic construct
  source 1..75: mol_type = other DNA
aggaattgaagcatcgttaaaaaaatcgggccttgaatactttgatctctatttattgcaccaggcaatgcgcga

SEQ ID NO: 278957 - DNA, 75 bp, synthetic construct
  source 1..75: mol_type = other DNA
caaattagttcgcttgatttgggttatgttggggaatcggtaaaacattttaatcctgagtttgttcgtggttgt

SEQ ID NO: 278958 - DNA, 75 bp, synthetic construct
  source 1..75: mol_type = other DNA
cgacacatcaacagcgtatcgaagaaaattttgctatttgggatttctcactgacagagaaagaaatggcgcaaa

SEQ ID NO: 278959 - DNA, 75 bp, synthetic construct
  source 1..75: mol_type = other DNA
cgcacgctggttcgcagataaagcgaaaaaagatccggttttccagttcaaagcaatgcaggttgtctggcagtg

SEQ ID NO: 278960 - DNA, 75 bp, synthetic construct
  source 1..75: mol_type = other DNA
tgcttttctccgaaataatttacaacgtattgtgtttttagctggttttccgccgtgcacggaccttgctgtttc

SEQ ID NO: 278961 - DNA, 75 bp, synthetic construct
  source 1..75: mol_type = other DNA
ggcagagctgattgcggccattctcgttctgtttggcgcataccagatactggatacatggatagcccgcgtcag

SEQ ID NO: 278962 - DNA, 75 bp, synthetic construct
  source 1..75: mol_type = other DNA
ttagtgcaggaattgcaaatgctggatgaaggcaacgttgctgcatttgaaggacgagatattgcgacatttgat

SEQ ID NO: 278963 - DNA, 75 bp, synthetic construct
  source 1..75: mol_type = other DNA
caatgccacaagccagttccgtggtttacataagcctgattggtggcgcagggtataacgttggcgccccgcatc

SEQ ID NO: 278964 - DNA, 75 bp, synthetic construct
  source 1..75: mol_type = other DNA
cattattggcgctgttgatggtgatgacccagcagtattcagaccaatacaaaaatacatcaatggcacatggta

SEQ ID NO: 278965 - DNA, 75 bp, synthetic construct
  source 1..75: mol_type = other DNA
tggcggtaactcgattgttttgggtgataatgacaccggattcaaacagaatggtgatggtattctggatgttta

SEQ ID NO: 278966 - DNA, 75 bp, synthetic construct
  source 1..75: mol_type = other DNA
ttacagttcgcacattaaaccgactgctgctgaggttggggcgttgtcattatctggcggtcaattgaatggtgc

SEQ ID NO: 278967 - DNA, 75 bp, synthetic construct
  source 1..75: mol_type = other DNA
gccaccacagcgcgaaaaggtcttgtccagctcagtagcgccaccaacagcgattctgaaacgcttgcggcaacg

SEQ ID NO: 278968 - DNA, 75 bp, synthetic construct
  source 1..75: mol_type = other DNA
gtaactttgattcccgctatgtccgggatatccggcttggtggtgctgccacatacaaacctgcgaacaatggca

SEQ ID NO: 278969 - DNA, 75 bp, synthetic construct
  source 1..75: mol_type = other DNA
atatccatttatcgacaactgccggtggtgtgacgtcgggcacacctggaaaaatcttcatttttacgcccgtaa

SEQ ID NO: 278970 - DNA, 75 bp, synthetic construct
  source 1..75: mol_type = other DNA
gttactggcagagatgagccgcattgcagcggatgtgatactggaaatctgccatcaggcagatgtgatactgag

SEQ ID NO: 278971 - DNA, 75 bp, synthetic construct
  source 1..75: mol_type = other DNA
tccagcagggaaaccgctggcttaactggatggagaaacagccggaaggttcagtgcgtccggtagtcattgaat

SEQ ID NO: 278972 - DNA, 75 bp, synthetic construct
  source 1..75: mol_type = other DNA
ggttcaggctggcaactgtaaccatgccccaggccagttccgtggtttacataagcctgattggtggtgcagggt

SEQ ID NO: 278973 - DNA, 75 bp, synthetic construct
  source 1..75: mol_type = other DNA
caacaaggctaatggcactgatgctatcgctctgggtaatgctagcctgtcgagcggcttaaactcgattgccct

SEQ ID NO: 278974 - DNA, 75 bp, synthetic construct
  source 1..75: mol_type = other DNA
aaggtaattaaacaatcttctgaaaccaaaattcagtttgccgccattggtgcgacaaccaaagaagatgcggct

SEQ ID NO: 278975 - DNA, 75 bp, synthetic construct
  source 1..75: mol_type = other DNA
ggcgtgggcgctacgtttgcccgcgtaatctgacggcgcttgccagtactgaacccacgcaacaggatctgctgg

SEQ ID NO: 278976 - DNA, 75 bp, synthetic construct
  source 1..75: mol_type = other DNA
catcccctctgcttccggcaccggttcgggcagtcattcataccgtgcgggaaaccgttgtgtcagtcgcacggg

SEQ ID NO: 278977 - DNA, 75 bp, synthetic construct
  source 1..75: mol_type = other DNA
ctgaatcaggccgacaaaatcgaaccctgccacgaatgggatactcgtaccagcacaccttcatcacagcaaaag

SEQ ID NO: 278978 - DNA, 75 bp, synthetic construct
  source 1..75: mol_type = other DNA
ccaacgtggcattgcaggatcagatctacagcaaagatttaccgttgctgaaaaagatcattcccgatcttaaat

SEQ ID NO: 278979 - DNA, 75 bp, synthetic construct
  source 1..75: mol_type = other DNA
ccgcaaccttgcgttcgctgaacagtttttcgcgtttgcaggagatgagcgggctgaaagagaaagcgggcgacc

SEQ ID NO: 278980 - DNA, 75 bp, synthetic construct
  source 1..75: mol_type = other DNA
ggaagagcaaaaacgttgtgcgaagctgaagggcgatctcgacacttataaatgggatggtctgcgcgatcatac

SEQ ID NO: 278981 - DNA, 75 bp, synthetic construct
  source 1..75: mol_type = other DNA
cttggtcgcgctaacaaagatcgcgaccaggacatgacttatcagtcagggacttctttcaacgacttcaaggcg

SEQ ID NO: 278982 - DNA, 75 bp, synthetic construct
  source 1..75: mol_type = other DNA
atgtatgaggagcgtgtgacatttttcatgacagtaaaacaggtgataacctcctttcgtaagggggattcacag

SEQ ID NO: 278983 - DNA, 75 bp, synthetic construct
  source 1..75: mol_type = other DNA
atgtatgaggagtgtgtgacatttttcatgagagtaaaacaggtgataacctcctttcgtaaggggtattcacag

SEQ ID NO: 278984 - DNA, 75 bp, synthetic construct
  source 1..75: mol_type = other DNA
ggcgtatgctgccggagctggacctggtgctgtgggtcatcaaggccgacgaccgggcgctgtcggtggacgagc

SEQ ID NO: 278985 - DNA, 75 bp, synthetic construct
  source 1..75: mol_type = other DNA
cggatcaggcatctattgaacgtcgtaaccttgctgtgaagaaagtgcaggataaatggaagtcagaaggcaaag

SEQ ID NO: 278986 - DNA, 75 bp, synthetic construct
  source 1..75: mol_type = other DNA
tcagtaagttggcagcatcaccggcaggcttatgaagcgctgttctggacgcaaagtgacaaccctgctctggtg

SEQ ID NO: 278987 - DNA, 75 bp, synthetic construct
  source 1..75: mol_type = other DNA
gctggtgggcttacagtcctttgccgaaggtcttgatctgaaaggcgatctgctcagccaggtgcatatccacaa

SEQ ID NO: 278988 - DNA, 75 bp, synthetic construct
  source 1..75: mol_type = other DNA
ccattaccgcaatgtttaagccgcatcacccggtctgcgtggtatccgcctgcagcggctggggcgtggaggaga

SEQ ID NO: 278989 - DNA, 75 bp, synthetic construct
  source 1..75: mol_type = other DNA
tcgctctgtaacgaactctttcggggggaagtctccgccgtcagtgatgtgaacgcctgcacccgcgacgtactg

SEQ ID NO: 278990 - DNA, 75 bp, synthetic construct
  source 1..75: mol_type = other DNA
caggcccgtgaacagtttaccggtgcggtggaccggatatttgacacggcggagagcgtctgtgttgcctctgtt

SEQ ID NO: 278991 - DNA, 75 bp, synthetic construct
  source 1..75: mol_type = other DNA
tctcctgtgctctgcggactttgacaccttctttgcgccgccatcatgtggtgctgtgtgtgaatcctgacggct

SEQ ID NO: 278992 - DNA, 75 bp, synthetic construct
  source 1..75: mol_type = other DNA
tgaccagcgtcggatacgaaacccccggctccttcggcagttggtgtgcggatctgaacctgcactgtattaccg

SEQ ID NO: 278993 - DNA, 75 bp, synthetic construct
  source 1..75: mol_type = other DNA
gaacgcctgtacccgtgccgtgctgcgcttccggctacgcagcgggcgtcacagtctggtgattgttgatttgcc

SEQ ID NO: 278994 - DNA, 75 bp, synthetic construct
  source 1..75: mol_type = other DNA
atatccacaaaatcgcttttccgcctatcgacagcccggtggtgatcaccgaaggggaatggctgaaaagcctca

SEQ ID NO: 278995 - DNA, 75 bp, synthetic construct
  source 1..75: mol_type = other DNA
tttactgctggtgctggacgaaggtcatcacctgccggatgtggcgcgggatgcgctggagatgagtgccgaaat

SEQ ID NO: 278996 - DNA, 75 bp, synthetic construct
  source 1..75: mol_type = other DNA
aaactctggcggctggcgtctctggcgcaatcttctggtgcgccggtgaccaaatgggcgacgcgggaagagcgc

SEQ ID NO: 278997 - DNA, 75 bp, synthetic construct
  source 1..75: mol_type = other DNA
tgatatccacaccagtgcgggccgtcattcaggccgtgcgcaccaccgtggtctctgtggcccgcgccgtctggg

SEQ ID NO: 278998 - DNA, 75 bp, synthetic construct
  source 1..75: mol_type = other DNA
ccagcgcgccgcccgcgatcacgtgatgaccgtaaaaaagaatctccacgatatcgagctggaaggccaccactt

SEQ ID NO: 278999 - DNA, 75 bp, synthetic construct
  source 1..75: mol_type = other DNA
aacgctgtacgatctgctcgacgttcgcgcattactggagggcgaatcggcaaggctggcggcaacgctgggaac

SEQ ID NO: 279000 - DNA, 75 bp, synthetic construct
  source 1..75: mol_type = other DNA
atgtatgaggagtgtgtgacatttttcatgatagtaaaacaggtgataacctcctttcgtaaggggaattcacag

SEQ ID NO: 279001 - DNA, 75 bp, synthetic construct
  source 1..75: mol_type = other DNA
tacaccatcggtggcgggacggtgatatcgcagccgcccagcaataacaatatggaaaaactgggcatggggatt

SEQ ID NO: 279002 - DNA, 75 bp, synthetic construct
  source 1..75: mol_type = other DNA
agcgctggagtcggtttttcaccgatgctggaagaaaccacaaaagagaacatggaggcgctggtgaagctggtt

SEQ ID NO: 279003 - DNA, 75 bp, synthetic construct
  source 1..75: mol_type = other DNA
gtggcctttgataaggcgcaactgagttgccagaacatggccagacggatgatggacttttcagagaataatcag

SEQ ID NO: 279004 - DNA, 75 bp, synthetic construct
  source 1..75: mol_type = other DNA
tgacggacggttttaaaaacctgatgggggatgtgatacagggggctacgggggcggtggccagcctgccggcga

SEQ ID NO: 279005 - DNA, 75 bp, synthetic construct
  source 1..75: mol_type = other DNA
gggatgtctgagccgtatgctgcagcgcaggatgccgcgattgaagaaggaagccgccgtattgaggcgctggac

SEQ ID NO: 279006 - DNA, 75 bp, synthetic construct
  source 1..75: mol_type = other DNA
ataggggaagagttcaagaatatcgtctccacaacgccggatgcggtggctgctgataaccagttaaaaacctcc

SEQ ID NO: 279007 - DNA, 75 bp, synthetic construct
  source 1..75: mol_type = other DNA
caagagatggctatggttttgaggaagactgggcagaagtttatacctcgaaaaatcttccaccagaaagctacc

SEQ ID NO: 279008 - DNA, 75 bp, synthetic construct
  source 1..75: mol_type = other DNA
gaaacgggcggattctggatccgggaaattggtgtgtttgatgagcacggcgatttaatcgcggtgggcaatact

SEQ ID NO: 279009 - DNA, 75 bp, synthetic construct
  source 1..75: mol_type = other DNA
gcagcgaggtctgcttccgcagcgaagacatccgaaacgaacgcgaaagcgtcggaaaccagtgcagaatcctca

SEQ ID NO: 279010 - DNA, 75 bp, synthetic construct
  source 1..75: mol_type = other DNA
ggcgagctggcgatggcggatacgatggagctggcgctgacgatgcgccggatgctgatcaccggtcagggggaa

SEQ ID NO: 279011 - DNA, 75 bp, synthetic construct
  source 1..75: mol_type = other DNA
ggctatccagtgggtgtccgaactgacagacgagctgatggcgaaaattcgcagccatgaatacagccggtcaac

SEQ ID NO: 279012 - DNA, 75 bp, synthetic construct
  source 1..75: mol_type = other DNA
ggctatccagtgggtgtctgaactgactgacgagttgatggcgaaaattcgcagccatgaatacagccggtcaat

SEQ ID NO: 279013 - DNA, 75 bp, synthetic construct
  source 1..75: mol_type = other DNA
ccggttaccagtacatcaacagtcgggagtaccagttgtaccggaagtgtctgcagtaagttcagcaatgctgag

SEQ ID NO: 279014 - DNA, 75 bp, synthetic construct
  source 1..75: mol_type = other DNA
gttgcagaagtggaaaaattggctgggcagaaactggtagcaaaagctaagccgggagaatacattcgcgggata

SEQ ID NO: 279015 - DNA, 75 bp, synthetic construct
  source 1..75: mol_type = other DNA
cttgatgaaagcggaaacggcacattcaactggcagatgagcccgtgtaatctgaagatggcaaaagctatctga

SEQ ID NO: 279016 - DNA, 75 bp, synthetic construct
  source 1..75: mol_type = other DNA
gcgacgcagcccttgatgccgccagtgattcggttcgtcctctgaccactaatggttgtgacgaatctcgcctga

SEQ ID NO: 279017 - DNA, 75 bp, synthetic construct
  source 1..75: mol_type = other DNA
atgtatgaggagagtgtgacatttttcatgaaagtaaaacaggtgataacctcctttcgtaaggggcattcacag

SEQ ID NO: 279018 - DNA, 75 bp, synthetic construct
  source 1..75: mol_type = other DNA
ggcaaaagctcgtagctcgggccaaaccgggggaatatgtacaagggataaacggtaaatggatgcgaaaatctt

SEQ ID NO: 279019 - DNA, 75 bp, synthetic construct
  source 1..75: mol_type = other DNA
cgtttcttgttgggctggtaagcagcaatgtaatggcattgactctggatgaagccagaactcaggggcgagtag

SEQ ID NO: 279020 - DNA, 75 bp, synthetic construct
  source 1..75: mol_type = other DNA
agcggggatgaagaccaacagccgggagtggcggttgccggaaccgggttcacgccgatgctggaagaagcggtg

SEQ ID NO: 279021 - DNA, 75 bp, synthetic construct
  source 1..75: mol_type = other DNA
gtgcagtaagttcagtaatgctgaagaggcagcaaaggcggtggtgagggtgctgggcgatcgttccatgcggac

SEQ ID NO: 279022 - DNA, 75 bp, synthetic construct
  source 1..75: mol_type = other DNA
tgacaaacgtcgtggcactggcagtcatgctggcctgcagcacaatggccggcgcggcggagaatgaacgcagta

SEQ ID NO: 279023 - DNA, 75 bp, synthetic construct
  source 1..75: mol_type = other DNA
gcgacgcaaccctcgatgccgccagtgattcggttcgacctctgacaactaatggttgtgacgaatctcgcctga

SEQ ID NO: 279024 - DNA, 75 bp, synthetic construct
  source 1..75: mol_type = other DNA
catttcttgttgggctggtaagcagcaatgtaatggcattgactctggatgaagccagaactcaggggcgggtag

SEQ ID NO: 279025 - DNA, 75 bp, synthetic construct
  source 1..75: mol_type = other DNA
ggaaacggccctgctgatgcgccgcatgatggtcaccggtatgtcagagcctaatgccgccgcccagccaaaagc

SEQ ID NO: 279026 - DNA, 75 bp, synthetic construct
  source 1..75: mol_type = other DNA
actggcgaccggtgcgaacgcgctggatacggctgcggctatccgtgctgaactggcgaagatggaaccgttctt

SEQ ID NO: 279027 - DNA, 75 bp, synthetic construct
  source 1..75: mol_type = other DNA
gctggtcgattccgttctccgttatgctggtcgttccgctgggggttatcggtgcgttgctggctgccaccttcc

SEQ ID NO: 279028 - DNA, 75 bp, synthetic construct
  source 1..75: mol_type = other DNA
ctgtacgcgattttgaaccgccccgggtttcctggagagtgttttatctgtgaactcaggctgccagatcatcgt

SEQ ID NO: 279029 - DNA, 75 bp, synthetic construct
  source 1..75: mol_type = other DNA
ccgccgaaagaagccacgcgtaagtcaatgggacagattcagggcgcgctggtcggtatcgcgatggtactgtcg

SEQ ID NO: 279030 - DNA, 75 bp, synthetic construct
  source 1..75: mol_type = other DNA
ctgatgacctcactggcatttatcctcggcgttatgccgctggttatcagcactggtgctggttccggcgcacaa

SEQ ID NO: 279031 - DNA, 75 bp, synthetic construct
  source 1..75: mol_type = other DNA
cagttgtttggttcccagtacgcgatgcgtatctggatgaacccgaacgaactgaacaaataccagttaacacca

SEQ ID NO: 279032 - DNA, 75 bp, synthetic construct
  source 1..75: mol_type = other DNA
gctgaacaaattccagctaacgccggttgatgtcattaccgccatcaaagcgcagaacgcccaggttgcggcggg

SEQ ID NO: 279033 - DNA, 75 bp, synthetic construct
  source 1..75: mol_type = other DNA
gggtctccacactggaacagacgaccgaaaatcaacgtcgggaaatcgaaagcgcgggttttaatgtcagacctc

SEQ ID NO: 279034 - DNA, 75 bp, synthetic construct
  source 1..75: mol_type = other DNA
tattcgggttcactgcctggctcttggcggtgtggatctgaccagccccgcggggaagatgaccatgcaggttat

SEQ ID NO: 279035 - DNA, 75 bp, synthetic construct
  source 1..75: mol_type = other DNA
cagttgttcggttcacagtacgcgatgcgtatctggatgaacccgaatgaactgaacaaattccagctaacgccg

SEQ ID NO: 279036 - DNA, 75 bp, synthetic construct
  source 1..75: mol_type = other DNA
ggcatggcctatctgttcgtgcgtctgccaagctccttcttgccagatgaagaccagggcgtatttatgaccatg

SEQ ID NO: 279037 - DNA, 75 bp, synthetic construct
  source 1..75: mol_type = other DNA
tactggtgctggttccggcgcgcagaacgcagtaggtaccggtgtaatgggcgggatggtgaccgcaacggtact

SEQ ID NO: 279038 - DNA, 75 bp, synthetic construct
  source 1..75: mol_type = other DNA
tatcaacgacattaacaccactctgggtgctgcatggggcggcagctacgtgaacgactttatcgaccgtggtcg

SEQ ID NO: 279039 - DNA, 75 bp, synthetic construct
  source 1..75: mol_type = other DNA
gctcaggatgaaaaggtctaccgtaccggacacgtcaaaaaactgacgtccggcgaccgctgggccggtggtaag

SEQ ID NO: 279040 - DNA, 75 bp, synthetic construct
  source 1..75: mol_type = other DNA
acgcttgatctggtgctgggtgaacacgatctggcagcgccggtggattaccgcgaacaggcggagtccatgttt

SEQ ID NO: 279041 - DNA, 75 bp, synthetic construct
  source 1..75: mol_type = other DNA
cgtcatcggtgcccctgtctccctgccgtccatgaaagcggcgatggataaggacagcgtgccggcggatatctg

SEQ ID NO: 279042 - DNA, 75 bp, synthetic construct
  source 1..75: mol_type = other DNA
tactaattaatcaggccaacgattatatgaacagtaaacaatggcctggtaaagcggctattggtcgtctgaaag

SEQ ID NO: 279043 - DNA, 75 bp, synthetic construct
  source 1..75: mol_type = other DNA
ctatgatcgccaccgtcagcctgagtgaaggcactacctggaccaaagcaccatggcggtttgaagccggtacac

SEQ ID NO: 279044 - DNA, 75 bp, synthetic construct
  source 1..75: mol_type = other DNA
ccggtatggaagcggtccgtacggccacagggctgcgtcctaacctgatgaccatgggtgccggcgtgatggcgc

SEQ ID NO: 279045 - DNA, 75 bp, synthetic construct
  source 1..75: mol_type = other DNA
cttccctggatggggcagatgatttgggatgcgcaatttgatggacacggcctcaccatgtgcaatatgtttcgc

SEQ ID NO: 279046 - DNA, 75 bp, synthetic construct
  source 1..75: mol_type = other DNA
gcgactcgcgccttctcgcagattaaagatgcgatggtattcgcctttaacctgcctgcgattgtggaactgggt

SEQ ID NO: 279047 - DNA, 75 bp, synthetic construct
  source 1..75: mol_type = other DNA
ctgcctacgggggttggctacgactggacggggatgtcctatcaggaacgtctctccggcaaccaggcgccttcg

SEQ ID NO: 279048 - DNA, 75 bp, synthetic construct
  source 1..75: mol_type = other DNA
gcgcgaactgtatgccgcccgtctggcacaggacaaaaccgtctataaagcgacaaatgtgaaaaccctgaaggc

SEQ ID NO: 279049 - DNA, 75 bp, synthetic construct
  source 1..75: mol_type = other DNA
atcactgtcgttataccgatatctataaggtggtcgtggttggttctgacgccgggttcctgctctctggcctca

SEQ ID NO: 279050 - DNA, 75 bp, synthetic construct
  source 1..75: mol_type = other DNA
tgctgaagttccacccggcgattcaggccgcgattggtgccaacgagcgcaagcgtatcaccatcgaaattctga

SEQ ID NO: 279051 - DNA, 75 bp, synthetic construct
  source 1..75: mol_type = other DNA
gactggggcgcaatgcgatggatatcagaaaaacggttgaacaactggctgcttcagatattcgcgttcactgcc

SEQ ID NO: 279052 - DNA, 75 bp, synthetic construct
  source 1..75: mol_type = other DNA
aacgtatattctctgcttctgcatcgtactgtttttcctgatcagatattcgcttgcgcgttatacaggaccggg

SEQ ID NO: 279053 - DNA, 75 bp, synthetic construct
  source 1..75: mol_type = other DNA
tcgatgcagaaaccaacctctgcgaagaactccacgaacatgccgagtcactacaccaacaactgaacgcaaagc

SEQ ID NO: 279054 - DNA, 75 bp, synthetic construct
  source 1..75: mol_type = other DNA
gtgatgacgaaacaacagaaagctgcgcttaatatggcgaagtttatccaggggcagactctgcttctgctggaa

SEQ ID NO: 279055 - DNA, 75 bp, synthetic construct
  source 1..75: mol_type = other DNA
tattcgcgttcactgcctcgcgctgggcggagttgatttgacaagcccggcaggaaaaatgaccatgcaggtcat

SEQ ID NO: 279056 - DNA, 75 bp, synthetic construct
  source 1..75: mol_type = other DNA
cctagttttaaccggttgcttgatcgtctggaaagtggcgatgtattgatagtcacaaaactggatcgcctcggt

SEQ ID NO: 279057 - DNA, 75 bp, synthetic construct
  source 1..75: mol_type = other DNA
gttttcgacattctaccgccagcgttcgaaatgtttgaaatagaaaagtacaaaataagatcagtagaatcatta

SEQ ID NO: 279058 - DNA, 75 bp, synthetic construct
  source 1..75: mol_type = other DNA
gctcaggcatttgaattgccgctggtgaccagcgtcggatacgaaacccccggctccttcggcagttggtgtgcg

SEQ ID NO: 279059 - DNA, 75 bp, synthetic construct
  source 1..75: mol_type = other DNA
taatggtgtggatttaaacagaaactttccggcggcgaactggaaggaaggtgaaacagtttatcgctggaacag

SEQ ID NO: 279060 - DNA, 75 bp, synthetic construct
  source 1..75: mol_type = other DNA
tggtttgattctggctggcactcacggtgatgaaaactcttcggtcgtcacgctctcctgtgctctgcggacttt

SEQ ID NO: 279061 - DNA, 75 bp, synthetic construct
  source 1..75: mol_type = other DNA
ctgaggcggacctttgcgaaaagctccatgaggatgcggaactactctgtcgcactctgactattcgtctggatg

SEQ ID NO: 279062 - DNA, 75 bp, synthetic construct
  source 1..75: mol_type = other DNA
ggcggtcacgtaatatctggctcgaggcagagtacgctgaacgcgttttcaatcatgagcataaacccggcgcgc

SEQ ID NO: 279063 - DNA, 75 bp, synthetic construct
  source 1..75: mol_type = other DNA
cattacgggcaatgaaaaatggtgttacaggcaacagtgcacaggcttatgttcgctggtatcaaaatgagcggc

SEQ ID NO: 279064 - DNA, 75 bp, synthetic construct
  source 1..75: mol_type = other DNA
ctaatctctatccggcgttgattgaagccgggttaaccggagaaaaactgatcctgttaacggccgatcgcccgc

SEQ ID NO: 279065 - DNA, 75 bp, synthetic construct
  source 1..75: mol_type = other DNA
attgaaatggtggttaacgacaccgacggcgcgcaaacgctccagcaacttctggcgcaggtaagccatttatga

SEQ ID NO: 279066 - DNA, 75 bp, synthetic construct
  source 1..75: mol_type = other DNA
attgcgccaggtttccgcgccgctggtattaattgtggtgaacaacaacggcgggcaaattttctcgctgttgcc

SEQ ID NO: 279067 - DNA, 75 bp, synthetic construct
  source 1..75: mol_type = other DNA
aatggcaggcaagctgtgaacccgaagagtactggattgtggatgacatcgaagggcggcttgatccggcgcacc

SEQ ID NO: 279068 - DNA, 75 bp, synthetic construct
  source 1..75: mol_type = other DNA
tgccagtatcagcgccattgcccgcgagtttgggacctcacgacaaaccatcatgcgcctgcgtggcgatgcagt

SEQ ID NO: 279069 - DNA, 75 bp, synthetic construct
  source 1..75: mol_type = other DNA
gttggcaacagcgtcttggcgactggtggcaggacgataaaccgtggctgcgtgaagcgcctcgtctggaaagtg

SEQ ID NO: 279070 - DNA, 75 bp, synthetic construct
  source 1..75: mol_type = other DNA
accatcgaccatgctctcggtacgcttcatgctggtggagtccatatcaactgcccgtttgctgaaccgctgtat

SEQ ID NO: 279071 - DNA, 75 bp, synthetic construct
  source 1..75: mol_type = other DNA
aactcttggctggccgctgatcggtgatgtgctgtcgcaaaccgggcagccgctgccgtgtgccgatctctggtt

SEQ ID NO: 279072 - DNA, 75 bp, synthetic construct
  source 1..75: mol_type = other DNA
tattgatgggctggtttctaccgctgcgggcgttcagcgggcgagtggaaaacctacgctagcgatagtgggcga

SEQ ID NO: 279073 - DNA, 75 bp, synthetic construct
  source 1..75: mol_type = other DNA
ggcaattgtttgttggtaacagcctggtggtacgtctgattgatgcgctttcgcaacttccggcaggttacccgg

SEQ ID NO: 279074 - DNA, 75 bp, synthetic construct
  source 1..75: mol_type = other DNA
ggcaactgtttgtcggtaacagcctggtggtgcgtctgattgatgcgctctcgcaacttccggcaggttatccgg

SEQ ID NO: 279075 - DNA, 75 bp, synthetic construct
  source 1..75: mol_type = other DNA
tcgctacttcccacaccaaaaagcgagcgtgagcgtttttatttaatgccacagaacgttcattttgagcacgct

SEQ ID NO: 279076 - DNA, 75 bp, synthetic construct
  source 1..75: mol_type = other DNA
cgctgccgtgtgccgatctttggttaggcaatgccaaagcgaccagcgaactgcaacaggcgcaaattgtggtgc

SEQ ID NO: 279077 - DNA, 75 bp, synthetic construct
  source 1..75: mol_type = other DNA
gctgtgcgtcgttgggctgatgatcataaccctgcgttttgcaccagcacgttttccgcagctgtgggtcaaaga

SEQ ID NO: 279078 - DNA, 75 bp, synthetic construct
  source 1..75: mol_type = other DNA
acctgatggactgggtgtttcatgcgctgtgcgttgttgggttgatgatcataaccctgcgctttgcaccggcac

SEQ ID NO: 279079 - DNA, 75 bp, synthetic construct
  source 1..75: mol_type = other DNA
cgcaatgcgctggatatgtggatggagcggttagggatactggcgggaacacatgaaaacgtaaccacgctacca

SEQ ID NO: 279080 - DNA, 75 bp, synthetic construct
  source 1..75: mol_type = other DNA
gcgaaacgcaatgcgctggatatgtggacggagcggttagggatactggcgggagcacatgaaaacgtaaccgca

SEQ ID NO: 279081 - DNA, 75 bp, synthetic construct
  source 1..75: mol_type = other DNA
gggagtgggattttaaggaaatgctctggacagtaccgaaggagcacagcaaaacgaaggtcgccatattcaggc

SEQ ID NO: 279082 - DNA, 75 bp, synthetic construct
  source 1..75: mol_type = other DNA
cgtgatgcgctggatatgtggacggagcggttaggaatactggcgggaacacatgaaaacgtaaccacgctacca

SEQ ID NO: 279083 - DNA, 75 bp, synthetic construct
  source 1..75: mol_type = other DNA
ttttttaatgatggtggcaaccttagcgtaaggcattcaaccaatggcctgttaacctggtatttcacttacagg

SEQ ID NO: 279084 - DNA, 75 bp, synthetic construct
  source 1..75: mol_type = other DNA
cggaacgcctgaagctgggaaattatcctgatctgagcctgaaagcagccagggaaaaagcggcacagtgtcgcg

SEQ ID NO: 279085 - DNA, 75 bp, synthetic construct
  source 1..75: mol_type = other DNA
gcttgcgtcagtggattttaggtttgcctggtgatgcgaccgactacaaactggacgatcagtaccgcctgagcg

SEQ ID NO: 279086 - DNA, 75 bp, synthetic construct
  source 1..75: mol_type = other DNA
aggcacacgggcttattgcttggagaactgaaagggcaatcatccgtagcagagtacggaagaacggcacacaga

SEQ ID NO: 279087 - DNA, 75 bp, synthetic construct
  source 1..75: mol_type = other DNA
ccgctcaccagttaccaggaatacaaagggtgtataaccactcccgctatctggatgcaaaacgccacgcgctcg

SEQ ID NO: 279088 - DNA, 75 bp, synthetic construct
  source 1..75: mol_type = other DNA
aaccatgctgaacgatttaggcgtggatccgcatattgtcgagcagcttacagcccaccagatgccagggatgca

SEQ ID NO: 279089 - DNA, 75 bp, synthetic construct
  source 1..75: mol_type = other DNA
gatccgcatattgtcgagcaacttaccgcccaccagatgccagggatgcaacgagtctataaccactcccgctat

SEQ ID NO: 279090 - DNA, 75 bp, synthetic construct
  source 1..75: mol_type = other DNA
caccttttcgttgataacggctcactggtggcaaccggtgccagctctatgtcatgggaataccgctacaccctg

SEQ ID NO: 279091 - DNA, 75 bp, synthetic construct
  source 1..75: mol_type = other DNA
aaatgagaatccggcagtcgaaaccgtagcatggaaagacgctgttgactgggttctcgaagaggcttgtcaggc

SEQ ID NO: 279092 - DNA, 75 bp, synthetic construct
  source 1..75: mol_type = other DNA
tggttgccacggggaccagctccatgtcatgggagtaccgctacaccctgaacgtggtgattgaggatttcagcg

SEQ ID NO: 279093 - DNA, 75 bp, synthetic construct
  source 1..75: mol_type = other DNA
tactgacggcagtgtgtcgagtgttgaagctgtagcggaacccgataaacctgaagaaatgtggacggtgaaacg

SEQ ID NO: 279094 - DNA, 75 bp, synthetic construct
  source 1..75: mol_type = other DNA
tgaggtggatattttacgcaacgatgtctgtgatatcagccttaacctgcaactgacggagcgtgtgctggtcag

SEQ ID NO: 279095 - DNA, 75 bp, synthetic construct
  source 1..75: mol_type = other DNA
cactgacggcggtatctcaacggttgaggcggagccagaacccgacgagccagaagaaatgtggacggtgaaacg

SEQ ID NO: 279096 - DNA, 75 bp, synthetic construct
  source 1..75: mol_type = other DNA
ggctgattgccgtggatttacagtgcggcagcccgtggaatgcggcagcgatgcttgcgatgcgcaatcctcgtc

SEQ ID NO: 279097 - DNA, 75 bp, synthetic construct
  source 1..75: mol_type = other DNA
ccgctggggtgaaagaagtgcgcgcatggaccatccccgtcggcgcaactgcaccgcaagcggctggcaaaatcc

SEQ ID NO: 279098 - DNA, 75 bp, synthetic construct
  source 1..75: mol_type = other DNA
acgtcatgagatgaattacaccgtacagaaagcgttaaagcccgtaacggttggcgatgcgcttacctactggct

SEQ ID NO: 279099 - DNA, 75 bp, synthetic construct
  source 1..75: mol_type = other DNA
tactgacggcagtgtgtcgagcgttgaagcggtagcggaacccgatgaacctgaagaaatgtggacggtgaaacg

SEQ ID NO: 279100 - DNA, 75 bp, synthetic construct
  source 1..75: mol_type = other DNA
catctgtttgtggataacggttctctggttgccacgggggccagctccatgtcgtgggagtaccgttacaccctg

SEQ ID NO: 279101 - DNA, 75 bp, synthetic construct
  source 1..75: mol_type = other DNA
ttgaatttgtgcccggcgagaacgccggagacatcgtagcaaagctggaaaagttagtaagcattcacaatcaag

SEQ ID NO: 279102 - DNA, 75 bp, synthetic construct
  source 1..75: mol_type = other DNA
caatatcagacacgcggtgcatttgcgtatatttccgaccagcagaaagtgtatgcccgcttcttctggcagcaa

SEQ ID NO: 279103 - DNA, 75 bp, synthetic construct
  source 1..75: mol_type = other DNA
ccagggaaagtgtctgcggacgctggtttcccgtgtcagcgatgtgaccgtgcaggaggctgccgccatcgcatg

SEQ ID NO: 279104 - DNA, 75 bp, synthetic construct
  source 1..75: mol_type = other DNA
ttccgcagccggactatcgaaaagctggacgcgaacgatgcagaagcgccgacttagcggcaagattgaagattt

SEQ ID NO: 279105 - DNA, 75 bp, synthetic construct
  source 1..75: mol_type = other DNA
tgacgatgttgagtttcaggagcgcatagcagaacacatccggtacatagttgaaaccattgctcaccatcaggc

SEQ ID NO: 279106 - DNA, 75 bp, synthetic construct
  source 1..75: mol_type = other DNA
gtttgaaaagcggtggatttaaaatgactgtatctgactctactgagactcatgctaaatgtatttggcatgata

SEQ ID NO: 279107 - DNA, 75 bp, synthetic construct
  source 1..75: mol_type = other DNA
tggacgcgaacgatgcaaaagcgccgacttagcggcaagatcgaagatttttcccgccgtttgtggggaaaataa

SEQ ID NO: 279108 - DNA, 75 bp, synthetic construct
  source 1..75: mol_type = other DNA
ctttctttatcttggccgaaattgcacactgaataatattggagcagttattttaggtcgtaatgattttataat

SEQ ID NO: 279109 - DNA, 75 bp, synthetic construct
  source 1..75: mol_type = other DNA
ggaactggagctgaatgctcaaccgggtaacgtgcagttagtcgacaataaaggtcagcgttataccgccgatga

SEQ ID NO: 279110 - DNA, 75 bp, synthetic construct
  source 1..75: mol_type = other DNA
tgggggctgagctgtcaaacgctgcgcgccaggcccgaaccagtttcggtggtcaggctgcggtacaactcgcgg

SEQ ID NO: 279111 - DNA, 75 bp, synthetic construct
  source 1..75: mol_type = other DNA
gacgttatcaataccgaactggcactggcggatctcgacacctgtgaacgtgcaattcatcgcgtacagaagaag

SEQ ID NO: 279112 - DNA, 75 bp, synthetic construct
  source 1..75: mol_type = other DNA
acgaagacggttttgaaaacaacccgtatctcgatcaggtacgtgaaatcgctgcgaaagaaggttccgttgtcg

SEQ ID NO: 279113 - DNA, 75 bp, synthetic construct
  source 1..75: mol_type = other DNA
atgaatgcctggcttatccccgatcgcattgaagagcagtcatgggcacgacactaccggcaaattgcccgtgaa

SEQ ID NO: 279114 - DNA, 75 bp, synthetic construct
  source 1..75: mol_type = other DNA
acaaacaaagatatcaaatcgctcaattttgatgtgaagttaccgcttaatgtcgtcacagaaaccgcaaaacag

SEQ ID NO: 279115 - DNA, 75 bp, synthetic construct
  source 1..75: mol_type = other DNA
aatctgcaacgtcatggagccagcaaaaaagccattgcccgtgcatttgatgacgatgtcgattttcaggaacgc

SEQ ID NO: 279116 - DNA, 75 bp, synthetic construct
  source 1..75: mol_type = other DNA
tgctcactaacccattgggcagcacggaactggagctgaatgctcaaccgggtaacgtgcagttagtcgacaata

SEQ ID NO: 279117 - DNA, 75 bp, synthetic construct
  source 1..75: mol_type = other DNA
ggtgcgcaggtcagtcgtgaagaggcgcgacagtggcgtgtgcagcacccgcttgccgttgatgtgccggagaga

SEQ ID NO: 279118 - DNA, 75 bp, synthetic construct
  source 1..75: mol_type = other DNA
tatgagtcgtcttgtccggcaggatatttttccccgtcagtgctggcgttcgttatatcaccggggacatgaaac

SEQ ID NO: 279119 - DNA, 75 bp, synthetic construct
  source 1..75: mol_type = other DNA
tgacgcggagcacaaatatgagaagcaaaatcagaccgcagaaaattttgttctggaacccggagaaacgctttt

SEQ ID NO: 279120 - DNA, 75 bp, synthetic construct
  source 1..75: mol_type = other DNA
gagtgcgcacgaagaacgattatatccacgagtccaaactccaggaccaataaatctcactatgagagggtgatt

SEQ ID NO: 279121 - DNA, 75 bp, synthetic construct
  source 1..75: mol_type = other DNA
tgtatgcttctcgctggctgcttgcccccgtgtactttggcctttcgctggcgttagttgctctggcgctgaagt

SEQ ID NO: 279122 - DNA, 75 bp, synthetic construct
  source 1..75: mol_type = other DNA
tgctggtgcgctatgccgcgcagaatctgtatgcgccgctgcgcaccgttgaagccctgcccggcgtcacgcctg

SEQ ID NO: 279123 - DNA, 75 bp, synthetic construct
  source 1..75: mol_type = other DNA
gccacactggaaggcaaagtacgcctgcaaagcgcgggcggcaaggtcttcctgctggcgaatacagcgttcccg

SEQ ID NO: 279124 - DNA, 75 bp, synthetic construct
  source 1..75: mol_type = other DNA
ttgttatagccagtgtattcacagtgatttgcaagacctgccggagtcatcgaagacctatgctctggagcaaat

SEQ ID NO: 279125 - DNA, 75 bp, synthetic construct
  source 1..75: mol_type = other DNA
aagacaccaccgtgctctatctcatcacccgcaatcatcgtcctgaacaggcgatcctgccggagcctacaccgg

SEQ ID NO: 279126 - DNA, 75 bp, synthetic construct
  source 1..75: mol_type = other DNA
tgctggttactctgcccctgcacgccgtcgaactggtgaaatgggagcgcatccccctgccggtggcgctgaaca

SEQ ID NO: 279127 - DNA, 75 bp, synthetic construct
  source 1..75: mol_type = other DNA
aaatttatagggcctacatttctattgtctttagcttatttagtagcaagattctatcttttcttttcgagatat

SEQ ID NO: 279128 - DNA, 75 bp, synthetic construct
  source 1..75: mol_type = other DNA
agttttttcgaaaagtacctgcagcatttcttgtggctattacatgtgttttaggtcttatactttttctgccag

SEQ ID NO: 279129 - DNA, 75 bp, synthetic construct
  source 1..75: mol_type = other DNA
tcctccagtcagtcacaattaacgataacaaagtgccacgagactggatttttaccgcagtgtacgtggaaaaga

SEQ ID NO: 279130 - DNA, 75 bp, synthetic construct
  source 1..75: mol_type = other DNA
gaagtgtatcagcgtaaagaagaagtggttggtgctgagatgatgcgtcacttcgaaaaaggcgtcatgctgcaa

SEQ ID NO: 279131 - DNA, 75 bp, synthetic construct
  source 1..75: mol_type = other DNA
atgcgtatttttgcttccgaccgagtatccggcatgatgcgtaaactgggtatgaagccaggcgaagccattgaa

SEQ ID NO: 279132 - DNA, 75 bp, synthetic construct
  source 1..75: mol_type = other DNA
tggatctccccgcctggggcaccacccacgccgattatttttacggtgccatcccctgcacgcgacagatgaccg

SEQ ID NO: 279133 - DNA, 75 bp, synthetic construct
  source 1..75: mol_type = other DNA
gagttagagaacggccagggttacttcttcccgcttcacattgaaagaatctcgatgatcaccccaatcgaccgc

SEQ ID NO: 279134 - DNA, 75 bp, synthetic construct
  source 1..75: mol_type = other DNA
tgaatacgaatggtttgccaggtgaaagcactgccatgaaggtttctgatattccgggcgttctgcagaagatgt

SEQ ID NO: 279135 - DNA, 75 bp, synthetic construct
  source 1..75: mol_type = other DNA
ccggcgttgaccattttattgggtaaaaccaccctgaccacgccggcaggacgcgaggggttttccccccgggtc

SEQ ID NO: 279136 - DNA, 75 bp, synthetic construct
  source 1..75: mol_type = other DNA
tgtatgacgacctgaatgtgaatggtctgcctggtgaaagcgcagccatgaagacttctgatattccgggtgttc

SEQ ID NO: 279137 - DNA, 75 bp, synthetic construct
  source 1..75: mol_type = other DNA
cgtgaagcggccagcaacctagccacgacacgcaatctgcttgaaaaattcaagcatgaaattgcgattattaag

SEQ ID NO: 279138 - DNA, 75 bp, synthetic construct
  source 1..75: mol_type = other DNA
cgtgcaggaagacggctccgttgcaacgatggatcagcagctggagtacctgcagtattgcattacgggcctgca

SEQ ID NO: 279139 - DNA, 75 bp, synthetic construct
  source 1..75: mol_type = other DNA
tcattattgagtcaactgcctccagatttttcttgccaaacggcaatgccctgcaggaagaagctatgtctctgt

SEQ ID NO: 279140 - DNA, 75 bp, synthetic construct
  source 1..75: mol_type = other DNA
aaggcttctgatattccgggtgttctgcagaagatgttcagtggcgaaggccccggctggctgcagacaatgacc

SEQ ID NO: 279141 - DNA, 75 bp, synthetic construct
  source 1..75: mol_type = other DNA
aataatgtcattcagcctgtcaaccagttcttggtttttgaacttgatgtgcgcggagcccttcttaaagtatct

SEQ ID NO: 279142 - DNA, 75 bp, synthetic construct
  source 1..75: mol_type = other DNA
gcagcattctttccagatcggcaagtcgatcggcctgttgcccggtgataagatgaaacccccaccggtctcatc

SEQ ID NO: 279143 - DNA, 75 bp, synthetic construct
  source 1..75: mol_type = other DNA
cgttgattatcccaggctcactgatatggatgacaacgttgattcaatggggggaaaatccgctttactggccgt

SEQ ID NO: 279144 - DNA, 75 bp, synthetic construct
  source 1..75: mol_type = other DNA
tctgcctggtgaaaacactgccatgaaggcttctgatattccgggtgttctgcagaagatgttcagtggtgaagg

SEQ ID NO: 279145 - DNA, 75 bp, synthetic construct
  source 1..75: mol_type = other DNA
aaaccactctgaccacaccggcaggacgtgagggactttctccccgggtcagttacggaaagggggctgaggatt

SEQ ID NO: 279146 - DNA, 75 bp, synthetic construct
  source 1..75: mol_type = other DNA
gtaaaaaatgttgcgcactttgaagaccgcgtaggctacacaacacgaatgatattgggagtgccgaacaaatga

SEQ ID NO: 279147 - DNA, 75 bp, synthetic construct
  source 1..75: mol_type = other DNA
cgctgagtacaggcaacgcgctgctccaggcggtggatattgaagtcagccttcacgaagacttttcgtcggtga

SEQ ID NO: 279148 - DNA, 75 bp, synthetic construct
  source 1..75: mol_type = other DNA
gcggtgctcaataccgggcacctgcatccgaaagtggttgcggcagtggaagcgcagttgaaaaaactgtcgcac

SEQ ID NO: 279149 - DNA, 75 bp, synthetic construct
  source 1..75: mol_type = other DNA
ccaggcggtggatattgaagtcagccgtcacgaagacttttcgtcggtgattcagtcaagacgcgcctggtttag

SEQ ID NO: 279150 - DNA, 75 bp, synthetic construct
  source 1..75: mol_type = other DNA
ggcgatcgatctctccagcggacaaccccggcggcgttatagtttcaaattactgtggcacgatcgccagcgttg

SEQ ID NO: 279151 - DNA, 75 bp, synthetic construct
  source 1..75: mol_type = other DNA
gcactgcgtcgcggtggctgtcaggtgctgtacgcggaagataacgtggtggtgtttgtgcgcgtgctaaatcag

SEQ ID NO: 279152 - DNA, 75 bp, synthetic construct
  source 1..75: mol_type = other DNA
aaagcgccgtggagtatggacggctggcggctggcggctggatgtggtgcatatgctgggggaggcgggtggggc

SEQ ID NO: 279153 - DNA, 75 bp, synthetic construct
  source 1..75: mol_type = other DNA
gaacaccggcacgcgtaaatcctgggcggcgggcgatgccacttcccgcgcggtacgtctggcactgatggcgaa

SEQ ID NO: 279154 - DNA, 75 bp, synthetic construct
  source 1..75: mol_type = other DNA
ccgaaatgctcggcctgacccgcgaggaaattctcaacgccgtttcgctggcgtgggtggacggtcagtcgctgc

SEQ ID NO: 279155 - DNA, 75 bp, synthetic construct
  source 1..75: mol_type = other DNA
gctctcgaatacccggcctgtaaaaaactgctggggccaattgttcctggcaccgtcgtacccaacggcgtgcgc

SEQ ID NO: 279156 - DNA, 75 bp, synthetic construct
  source 1..75: mol_type = other DNA
ggcggtgttacagattgccagcggtgcgctgagtaatcagcaaatccttgaggagaaaacggtagcgggctgggt

SEQ ID NO: 279157 - DNA, 75 bp, synthetic construct
  source 1..75: mol_type = other DNA
tgaagaagtggtggtggagtacccaattggtcatgctcgccgccgtcaggatggcattccgaagctggtcgataa

SEQ ID NO: 279158 - DNA, 75 bp, synthetic construct
  source 1..75: mol_type = other DNA
ttcccgactcgtcagcagcagcgcattctggacgtctctctcgacagaactcgccttgaacagatgccggtcaat

SEQ ID NO: 279159 - DNA, 75 bp, synthetic construct
  source 1..75: mol_type = other DNA
tcgacagccacgatactgcgcgatttaaaacgctgctcggtcgggatattgcgcgcctgccgctggcggtggtct

SEQ ID NO: 279160 - DNA, 75 bp, synthetic construct
  source 1..75: mol_type = other DNA
ggctctggccgtgatactaaatatgacgtctcgcgtaagcgtaaagtcttcaaaggcgatatcgaagataaattc

SEQ ID NO: 279161 - DNA, 75 bp, synthetic construct
  source 1..75: mol_type = other DNA
aacttggtgatttaacaaagtggtcatcaggtggaacacctaataaatcggaggattcatattggaatggtacta

SEQ ID NO: 279162 - DNA, 75 bp, synthetic construct
  source 1..75: mol_type = other DNA
ttaacaagacccgtggcgatattgcttccaaacgtggcaataacattgatttgacccgtctgaaagatggcaata

SEQ ID NO: 279163 - DNA, 75 bp, synthetic construct
  source 1..75: mol_type = other DNA
gtgacgacgccagccgatcaataccaattaacggaccgggcgactaagtacgccattctgctgattgcgctgact

SEQ ID NO: 279164 - DNA, 75 bp, synthetic construct
  source 1..75: mol_type = other DNA
cgatagccggacggaccagggccaggcagagcagcttggcgtgaagttcttccccgcgatgatgctggttaaccc

SEQ ID NO: 279165 - DNA, 75 bp, synthetic construct
  source 1..75: mol_type = other DNA
ggctctggtcgcgataccaaatatgacgtctcgcctaagcgtaaagtctacaaaggcgatatcgaagataaattc

SEQ ID NO: 279166 - DNA, 75 bp, synthetic construct
  source 1..75: mol_type = other DNA
accgtggcgaagcctgtgaagtggtgctacccgcgtcgccgttactcaatgtcgcgcaatggcaacgcaaggagg

SEQ ID NO: 279167 - DNA, 75 bp, synthetic construct
  source 1..75: mol_type = other DNA
gaactatcgcggcttcacattcccgttgtggggatttcttgccaataccgatatctcttatgatccgcagcaaat

SEQ ID NO: 279168 - DNA, 75 bp, synthetic construct
  source 1..75: mol_type = other DNA
ctcatcaacagcaattgcgcatgtttaatcagctcgacagccacgatactgcgcgatttaaaacacttctcggtc

SEQ ID NO: 279169 - DNA, 75 bp, synthetic construct
  source 1..75: mol_type = other DNA
agaaatttgagttattttctatgtcgttatatagacaagttcacgaattcaaaaaacaagcccaaaccctaacag

SEQ ID NO: 279170 - DNA, 75 bp, synthetic construct
  source 1..75: mol_type = other DNA
gaactaaaaaaactccgcgacaccctgctcccgaaactcatctccggtgagctatccctggaagatcttccggat

SEQ ID NO: 279171 - DNA, 75 bp, synthetic construct
  source 1..75: mol_type = other DNA
tgtcgcgcaatggcaacgcaaagaaggccatgggcaactgacagacgggattctggctttgcctgccatttcggc

SEQ ID NO: 279172 - DNA, 75 bp, synthetic construct
  source 1..75: mol_type = other DNA
acagcattagcacaaaactgtcttttgtggataacagctggcccgttgaacaacagaaaaatgtcatgctcggcg

SEQ ID NO: 279173 - DNA, 75 bp, synthetic construct
  source 1..75: mol_type = other DNA
tgcattcatcccccatcgtcagcgcaccggcgaagctttcggtgctggacgccaacggcagtctgttgcaaaccg

SEQ ID NO: 279174 - DNA, 75 bp, synthetic construct
  source 1..75: mol_type = other DNA
aagcgaaatctacaacacccgcttgtatatctttaccgatcgcccgctatatcgcgcaggcgatcgtatcgatgt

SEQ ID NO: 279175 - DNA, 75 bp, synthetic construct
  source 1..75: mol_type = other DNA
tgtgcgaagaacttcgtcctgatattgactggtcatatttacgacgttcggcatgttgttcgcagaatatgtcag

SEQ ID NO: 279176 - DNA, 75 bp, synthetic construct
  source 1..75: mol_type = other DNA
aacgagcttgtgctgttgtcggtgggcaatcagcaatggctaggcttttaggtgtatcacctccaagcgtaaatc

SEQ ID NO: 279177 - DNA, 75 bp, synthetic construct
  source 1..75: mol_type = other DNA
aggcgcatccagcaatttcatctcgccgcagccgggcaacatctatattccgctaggcaagcaagagccggggct

SEQ ID NO: 279178 - DNA, 75 bp, synthetic construct
  source 1..75: mol_type = other DNA
ggcaatgtagcgttaaaccttcccgccgccgataaaccgagccgctatttactgaccgtctccgccagcgatggc

SEQ ID NO: 279179 - DNA, 75 bp, synthetic construct
  source 1..75: mol_type = other DNA
tgatctgccgacgtcacagttttggtcgtacgcgacatacttcagggtattgtcctttgaaggtgatgctgccaa

SEQ ID NO: 279180 - DNA, 75 bp, synthetic construct
  source 1..75: mol_type = other DNA
agctcaaaaataacggcatgacaatgttaatgtcgactcatcatccgctccatgccaacgccattgccgacagca

SEQ ID NO: 279181 - DNA, 75 bp, synthetic construct
  source 1..75: mol_type = other DNA
ggcggggcccggagcgcgctttacctggtggggtgaagatggcaatggcgacgccttcctcacggcatgggcatg

SEQ ID NO: 279182 - DNA, 75 bp, synthetic construct
  source 1..75: mol_type = other DNA
accgcaatcaggtctatagcagtagttttcgcgtagccaactatatcaagccacattttgagattggtttagctc

SEQ ID NO: 279183 - DNA, 75 bp, synthetic construct
  source 1..75: mol_type = other DNA
accgtctggcggtaaatccttcaccgttaatttcgataaaccaggtaactacaatctgacgttacgcgataaaga

SEQ ID NO: 279184 - DNA, 75 bp, synthetic construct
  source 1..75: mol_type = other DNA
tgactggtcatatttacgacgttcggcatgttgttcgcagaatatgtcagtgaagcaactaaatgacagtaacaa

SEQ ID NO: 279185 - DNA, 75 bp, synthetic construct
  source 1..75: mol_type = other DNA
ccccggacagactggcaacagtttgcccggaaaagggctgaacactgccaccggcgctgccggggaagggtgtaa

SEQ ID NO: 279186 - DNA, 75 bp, synthetic construct
  source 1..75: mol_type = other DNA
tgcccgtgtggcgccccgtacagactggcagcagtttgcacggcagagagccgaacgctgtcagcgacggggata

SEQ ID NO: 279187 - DNA, 75 bp, synthetic construct
  source 1..75: mol_type = other DNA
gcgtgccggtgggcgggctgttattctggaggtcagtggacgctggatggaagcggcagaagcatggcgacgggc

SEQ ID NO: 279188 - DNA, 75 bp, synthetic construct
  source 1..75: mol_type = other DNA
gcgggaattttgtatgcggtgatcggcggactgcgcgcaatggcagtggcggactccatcaacggtattgggctg

SEQ ID NO: 279189 - DNA, 75 bp, synthetic construct
  source 1..75: mol_type = other DNA
atgggctgggaagtgacttcagcggtgacgctgatcttcctcgcgctaatctttttaccgcgctatctgaagcgc

SEQ ID NO: 279190 - DNA, 75 bp, synthetic construct
  source 1..75: mol_type = other DNA
tgccggtgttgcgccccggacagactggcagcagtttgcccgaaaaagggctgcacactgccaccggcgctgccg

SEQ ID NO: 279191 - DNA, 75 bp, synthetic construct
  source 1..75: mol_type = other DNA
gatcgaaggtcagaaaaatgcgcatggcatcctgctggatacaggggctgtggggctggttattgatggtgcgaa

SEQ ID NO: 279192 - DNA, 75 bp, synthetic construct
  source 1..75: mol_type = other DNA
ggcagtaccgaactttgctgctgacggctctggtattaccgaacagattgcttttcgtattatcggagatggtgc

SEQ ID NO: 279193 - DNA, 75 bp, synthetic construct
  source 1..75: mol_type = other DNA
agacagatgatggatacacatttagcatttcaccttacgaagacgggtaccgcttatcagtctcgcctgaaaatc

SEQ ID NO: 279194 - DNA, 75 bp, synthetic construct
  source 1..75: mol_type = other DNA
tgcttctctgagtcatgccgtagtggatgcttcaaaagcacaatcctttaccaataaaggtcagattaaagctgc

SEQ ID NO: 279195 - DNA, 75 bp, synthetic construct
  source 1..75: mol_type = other DNA
cagtaatttcagcggtgaattccgtgtgcagaaagatgctgctctgcgggcttcagatgaaaaacacctgggcac

SEQ ID NO: 279196 - DNA, 75 bp, synthetic construct
  source 1..75: mol_type = other DNA
tggatgaaaacgggcaggctatttctcacagtcagacgtttgatgtcactcagggcggtgaagttgtagctcagg

SEQ ID NO: 279197 - DNA, 75 bp, synthetic construct
  source 1..75: mol_type = other DNA
atgttaataacgcggtctctgtcgccagcgagcgtgcgggggaaaaaggtttgttggtctatcggtcagtgattg

SEQ ID NO: 279198 - DNA, 75 bp, synthetic construct
  source 1..75: mol_type = other DNA
atgcgggaagaatttgctgaccgctggcaggcccgtgcgggagataaaacgccgtcggatgcgctggaaaaactt

SEQ ID NO: 279199 - DNA, 75 bp, synthetic construct
  source 1..75: mol_type = other DNA
cgccaatccgtttgaacttcgtcagtttgcgctcagtcacggcgtggcgatggacgggctacaggtgattgatcc

SEQ ID NO: 279200 - DNA, 75 bp, synthetic construct
  source 1..75: mol_type = other DNA
caaaaagcgcctgccagcccgctacaaggcaaggccaatgtgatggtttttccgtcgctggaagccggaaatatt

SEQ ID NO: 279201 - DNA, 75 bp, synthetic construct
  source 1..75: mol_type = other DNA
tggacggcttttttacccgctatggtaaacacaccattctggtatgccgattattgccttttgtgccttttgatc

SEQ ID NO: 279202 - DNA, 75 bp, synthetic construct
  source 1..75: mol_type = other DNA
ctgtcgtggaccagttcgatggccggcgcggcgctgtgcttttttatcgccagagtgatgggccgcgaagtggtg

SEQ ID NO: 279203 - DNA, 75 bp, synthetic construct
  source 1..75: mol_type = other DNA
cgtgagcgcgcaccaaagctggtggttgatggcgagttacagtttgacgccgccttcgtgccggaagtggcggcg

SEQ ID NO: 279204 - DNA, 75 bp, synthetic construct
  source 1..75: mol_type = other DNA
cattctggtcgccaatccgtttgaacttcgtcagtttgcgctcagtcatggcgtggcgatggacgggctacaggt

SEQ ID NO: 279205 - DNA, 75 bp, synthetic construct
  source 1..75: mol_type = other DNA
atgctgtcgttttccagcaacggcagcgcccgtcacccttgcgttgctaacgttcagcaggcgaccgaaatcgtc

SEQ ID NO: 279206 - DNA, 75 bp, synthetic construct
  source 1..75: mol_type = other DNA
aggtgaaacgggcaacacactgaccatcaacggcaactatcacggcgataacggaagccagattaacatcaacag

SEQ ID NO: 279207 - DNA, 75 bp, synthetic construct
  source 1..75: mol_type = other DNA
cgggaatggcgttttccagtgcggggcttgggttgtgccacgcgatggcgcatcagccaggggcggcgctgcata

SEQ ID NO: 279208 - DNA, 75 bp, synthetic construct
  source 1..75: mol_type = other DNA
ggcttgctcgcgcaggcgataaaacgccgccggacgcgctggataaactcaccgatccgctgatgtttgccgccg

SEQ ID NO: 279209 - DNA, 75 bp, synthetic construct
  source 1..75: mol_type = other DNA
ttcctgatgctgccacagtacagcggcccggcgttgggctttgccgattgcagcgtggtgccacagccgacggcg

SEQ ID NO: 279210 - DNA, 75 bp, synthetic construct
  source 1..75: mol_type = other DNA
tacgagattgtctgggacgaagatcagacgcacaaattcaaaaatatctctccgcatttgcagcgcattaaggcg

SEQ ID NO: 279211 - DNA, 75 bp, synthetic construct
  source 1..75: mol_type = other DNA
gtggtaatcaccctgatcccgctttccatcttgtttaccggtgcatcgctggaaaccatgaaaactaccgtcgta

SEQ ID NO: 279212 - DNA, 75 bp, synthetic construct
  source 1..75: mol_type = other DNA
gttcctgatcgccactgtcggcgcgctgaccatttctctggtggtgacggcggcaacctttacccgtgggctttc

SEQ ID NO: 279213 - DNA, 75 bp, synthetic construct
  source 1..75: mol_type = other DNA
accatggcggcgaccagtacgcgtaatctccaggaaggtgacgatcctgaccgtgggctgcgtcttttctggtgc

SEQ ID NO: 279214 - DNA, 75 bp, synthetic construct
  source 1..75: mol_type = other DNA
gtgctgattgtcggcccaaccgaatttattaccaacagcatcatcaatgccatcggcctgaccacgcaaaacttc

SEQ ID NO: 279215 - DNA, 75 bp, synthetic construct
  source 1..75: mol_type = other DNA
cttacagccctgcccttcctcgttattttactggtgaaagtcggtggctttattcgctggctgaaacaggattac

SEQ ID NO: 279216 - DNA, 75 bp, synthetic construct
  source 1..75: mol_type = other DNA
aaacttcttacagatgagcttattcaccgatccgcttggcgatggctcatttacccgcaactggaccgttttcta

SEQ ID NO: 279217 - DNA, 75 bp, synthetic construct
  source 1..75: mol_type = other DNA
tcaggggctgcgctgcgatgtctgttatcgcgaatgcccgaaaattgatgaggcgattaccctggaactggagcg

SEQ ID NO: 279218 - DNA, 75 bp, synthetic construct
  source 1..75: mol_type = other DNA
gccataaacgagaacgcctttgccagtgcctgtgtacgttgcggtcagtgtgttcaggcttgcccttacgacacc

SEQ ID NO: 279219 - DNA, 75 bp, synthetic construct
  source 1..75: mol_type = other DNA
tcaggggctgcgctgcgatgtttgttatcgcgaatgcccgaaaattgatgaggcaatcaccctggagctggagcg

SEQ ID NO: 279220 - DNA, 75 bp, synthetic construct
  source 1..75: mol_type = other DNA
ctgagggttatgactccacggcacatgccatctcgctggagacgggctaccgccacgatattgcgctgagtaacc

SEQ ID NO: 279221 - DNA, 75 bp, synthetic construct
  source 1..75: mol_type = other DNA
cggcgatgtctacaacagtggcaagattgctatgagccatgaaggcgaaacgggcaacacactaaccatcaacgg

SEQ ID NO: 279222 - DNA, 75 bp, synthetic construct
  source 1..75: mol_type = other DNA
cgcctctacgcgttttaccgacggcggccagtttggtctgggtgcggaagtggcggtaagcacacaaaaactcca

SEQ ID NO: 279223 - DNA, 75 bp, synthetic construct
  source 1..75: mol_type = other DNA
cgcgcgcggcccaatggggctggaagctctgaccacctacaagtggatcggcattggtgattacaccattcgtgc

SEQ ID NO: 279224 - DNA, 75 bp, synthetic construct
  source 1..75: mol_type = other DNA
cgcgcgtggcccgatgggcctggaagcactgaccacttacaagtggatcggcatcggtgattacaccattcgtgc

SEQ ID NO: 279225 - DNA, 75 bp, synthetic construct
  source 1..75: mol_type = other DNA
ctgccgtccgaagcaaaacagccggagccgacgccagaatgctcgccgacatgctcggagatattgcagcagaag

SEQ ID NO: 279226 - DNA, 75 bp, synthetic construct
  source 1..75: mol_type = other DNA
gtaacctcgccgatccggtggggcaggtaatcgatggcggcgtactggacagcggcctgcgtcttgagcgtcgtc

SEQ ID NO: 279227 - DNA, 75 bp, synthetic construct
  source 1..75: mol_type = other DNA
gcagttgcaggcaggccccgcgaaggtggtggctgttaaagccgaagagtatgacgatgagtttctgtcattaga

SEQ ID NO: 279228 - DNA, 75 bp, synthetic construct
  source 1..75: mol_type = other DNA
aggagatatattttctgagaatgaacattactactatagaaaaataccttatcaagcattgggatttgctgggtt

SEQ ID NO: 279229 - DNA, 75 bp, synthetic construct
  source 1..75: mol_type = other DNA
tgatctggataaagcaattgagttaggaatagattcgaggactaaatcagttaaaattttagctagcattgataa

SEQ ID NO: 279230 - DNA, 75 bp, synthetic construct
  source 1..75: mol_type = other DNA
gctctttaattgtcagtactcagcgaccctcagagctttctcctactgttttggcaatgtgttcaaactggtttt

SEQ ID NO: 279231 - DNA, 75 bp, synthetic construct
  source 1..75: mol_type = other DNA
cccgcgaggtcgcctcttcccacaagacaacaaccactccggttcgcgtggtattcactccccgcgcgtggacgc

SEQ ID NO: 279232 - DNA, 75 bp, synthetic construct
  source 1..75: mol_type = other DNA
gtggtgtaatcaccaatgacccgactcagcgtatctcgctgcaatcctggcggtgtgcgtacgcggtggggcgat

SEQ ID NO: 279233 - DNA, 75 bp, synthetic construct
  source 1..75: mol_type = other DNA
gcagattatagcttatgccattggtttcattaagagaaacaacgacgggtgtatttttgtttcagaggattggag

SEQ ID NO: 279234 - DNA, 75 bp, synthetic construct
  source 1..75: mol_type = other DNA
gcagacgcgcgtgccaatggccttagcgaagcgatgcttgaccgtctggcactgacgcccgcacggctgaaaggc

SEQ ID NO: 279235 - DNA, 75 bp, synthetic construct
  source 1..75: mol_type = other DNA
cacgcggcaaccttagcgaagtgctcaataatgtcgaagcaggggaagaggttgaaatcacccgcagaggccgtg

SEQ ID NO: 279236 - DNA, 75 bp, synthetic construct
  source 1..75: mol_type = other DNA
cgcgcgcggcccaatggggctggaagcgctgaccacctacaaatggatcggcatcggtgattacaccgttcgtgc

SEQ ID NO: 279237 - DNA, 75 bp, synthetic construct
  source 1..75: mol_type = other DNA
tggcggtaagcacacaaaaactccacgcgcgcggcccaatggggctggaagcgctgaccacctacaaatggatcg

SEQ ID NO: 279238 - DNA, 75 bp, synthetic construct
  source 1..75: mol_type = other DNA
gcatcggctaacccggttactgaactcactgggggccagggaaacaccgccgccacttcaggtttttctgaccac

SEQ ID NO: 279239 - DNA, 75 bp, synthetic construct
  source 1..75: mol_type = other DNA
tggtgcaattgcgctgcacaacgcagccggtgtgccgctgcgttctcttggtacggggtcgtcccgtcttctggt

SEQ ID NO: 279240 - DNA, 75 bp, synthetic construct
  source 1..75: mol_type = other DNA
acgaagacggttttgaaaacaacccgtatcttgaccaggtgcgtgaaatcgcggcgaaagaaggttctgttgtgg

SEQ ID NO: 279241 - DNA, 75 bp, synthetic construct
  source 1..75: mol_type = other DNA
ccgaacaatgtcggcaggctgtgctggcgatacgacaaaacagaatatgtgcgaaagagggcagcgcctcagatc

SEQ ID NO: 279242 - DNA, 75 bp, synthetic construct
  source 1..75: mol_type = other DNA
gaacgctaccgggcaggaatgacgtgtgagcgcgtttacgactcggtgagagagtcaaataacgggatctggcaa

SEQ ID NO: 279243 - DNA, 75 bp, synthetic construct
  source 1..75: mol_type = other DNA
gccgcgaacagtcgacaatcccggtgatcacaggcggtataggcgtatgccatatttacgttgatgaaagcgcag

SEQ ID NO: 279244 - DNA, 75 bp, synthetic construct
  source 1..75: mol_type = other DNA
ttaacgaagtggattcgtccgctgtttacgttaacgcctctacgcgttttaccgacggcggccagtttggtctgg

SEQ ID NO: 279245 - DNA, 75 bp, synthetic construct
  source 1..75: mol_type = other DNA
ggcgtatgccatatttacgttgatgaaagtgtagagatcgctgaagcattaaaagtgatcgtcaacgcgaaaact

SEQ ID NO: 279246 - DNA, 75 bp, synthetic construct
  source 1..75: mol_type = other DNA
ggtgattgatggaggtgtgctggacagcggcctgcgtctggagcgtcgccgcgtgccgctgggtgttataggtgt

SEQ ID NO: 279247 - DNA, 75 bp, synthetic construct
  source 1..75: mol_type = other DNA
gatgatcctgccgagcagttccgatgctacagcccttttaaccgcattgaaaaacatgcacgcccgattactgga

SEQ ID NO: 279248 - DNA, 75 bp, synthetic construct
  source 1..75: mol_type = other DNA
ttgccgccaaaggcattaccgggccggaggcaattaaggagatcgttgcatctcttgaggcagcaaaaggttcag

SEQ ID NO: 279249 - DNA, 75 bp, synthetic construct
  source 1..75: mol_type = other DNA
atgttacgacgcatgatcctttcggtactgtttctctggtgtgcagtggctcaggccctgccatcagcttctttt

SEQ ID NO: 279250 - DNA, 75 bp, synthetic construct
  source 1..75: mol_type = other DNA
aacagcccagaaggtcccgagaaaaaattccgtctgcggttgcgtaactgtgagctggcgggaatgggtaaacgg

SEQ ID NO: 279251 - DNA, 75 bp, synthetic construct
  source 1..75: mol_type = other DNA
gatttcaggctggtttaaggagacgctgggcattcactccccgagccaggtgtttgccgggttcggcgacaatat

SEQ ID NO: 279252 - DNA, 75 bp, synthetic construct
  source 1..75: mol_type = other DNA
tacttcggtatcgatatgccgaagaactttaccgattttggcggcaatctgattaacggtctggtgaacggtatc

SEQ ID NO: 279253 - DNA, 75 bp, synthetic construct
  source 1..75: mol_type = other DNA
gcccggtggcgaaaatctcaagttgcgatgaatgaaattgcaatcagcataggtagttcgcttcgcccggcactg

SEQ ID NO: 279254 - DNA, 75 bp, synthetic construct
  source 1..75: mol_type = other DNA
tatcaaaaatgtcatctggcaggcggagcggggactggggcaggaaacacccgttgagtctctgttgacgcagta

SEQ ID NO: 279255 - DNA, 75 bp, synthetic construct
  source 1..75: mol_type = other DNA
ggcggctacggtacgcgctggttagcgatgatcagttatttcatcgccgccgtagtgattgtctacctgattttt

SEQ ID NO: 279256 - DNA, 75 bp, synthetic construct
  source 1..75: mol_type = other DNA
gcatttaccgacgtatcattaaccagaatgctgagccacaacaactggttagcgttgggcgtaaatttggcttct

SEQ ID NO: 279257 - DNA, 75 bp, synthetic construct
  source 1..75: mol_type = other DNA
ctacatgacaggctttatcctgtcgatcattctgacggtgattccgttctggatggtgatgacaggagctgcctc

SEQ ID NO: 279258 - DNA, 75 bp, synthetic construct
  source 1..75: mol_type = other DNA
ctgcctctccggccgtaattctgggaacaatcctggcaatggcagtggtacaggttctggtgcatctggtgtgct

SEQ ID NO: 279259 - DNA, 75 bp, synthetic construct
  source 1..75: mol_type = other DNA
ctacatgacaggctttatcctgtcgataatcctgacggtgatcccgttctggatggtaatgacaggaactgcctc

SEQ ID NO: 279260 - DNA, 75 bp, synthetic construct
  source 1..75: mol_type = other DNA
ggccaactggcttcgtctgatgctcgcactgggggaaggaggtaaactccgctggctggtgacaggctttggtgc

SEQ ID NO: 279261 - DNA, 75 bp, synthetic construct
  source 1..75: mol_type = other DNA
agtggtggttagtgagtttgaattcatgaacgttaaccaacagggccagcagcaaggccagcagcagaaagcgca

SEQ ID NO: 279262 - DNA, 75 bp, synthetic construct
  source 1..75: mol_type = other DNA
gatgttcggcaatatgaccggaacgacggcacgaaggggactgcggtagaagtggcggttaacgaatttgaattc

SEQ ID NO: 279263 - DNA, 75 bp, synthetic construct
  source 1..75: mol_type = other DNA
gatgtccctcctgatttcgatgacgacatcccatttgctcctatggggttacaatatggcaaaagcaggatctac

SEQ ID NO: 279264 - DNA, 75 bp, synthetic construct
  source 1..75: mol_type = other DNA
acctcggctgcggtggttagctttcccaccgttggcggtgtcatcagcaaaagcctcggacgcatcgctggcagt

SEQ ID NO: 279265 - DNA, 75 bp, synthetic construct
  source 1..75: mol_type = other DNA
gcctgaccggcgtcggcggcgccctgttctccccgtcgatagaggccctgctggcgcgggccggtacccacagcc

SEQ ID NO: 279266 - DNA, 75 bp, synthetic construct
  source 1..75: mol_type = other DNA
agcagaaagcgcctccgcagcagcagaataataacgggaataatccgccgatggactttgatgacgatatcccgt

SEQ ID NO: 279267 - DNA, 75 bp, synthetic construct
  source 1..75: mol_type = other DNA
attaccgccgggctattacagatcctttctaacctcgccaatgattacggcgatgcggtaaaaggcagcgataaa

SEQ ID NO: 279268 - DNA, 75 bp, synthetic construct
  source 1..75: mol_type = other DNA
ccgccagccagcagatggcacaggcattgattccacccgcaccgggtatcgttgttccgggcattgcggtgtcgg

SEQ ID NO: 279269 - DNA, 75 bp, synthetic construct
  source 1..75: mol_type = other DNA
gctcgttggcgaaaatcacaggttgcgctgaatgaagtggcgttgagtatcggcagttcgttgtgcccggcgctg

SEQ ID NO: 279270 - DNA, 75 bp, synthetic construct
  source 1..75: mol_type = other DNA
agcagaaagcgccgccgcagcagcagaataataacgggaataatgttcctcctgacttcgatgacgacatcccgt

SEQ ID NO: 279271 - DNA, 75 bp, synthetic construct
  source 1..75: mol_type = other DNA
ccggtggcgatgcgaccaatgctggaacgcactgtcaagggagcgttactgactaacctgctgtttgttttaggg

SEQ ID NO: 279272 - DNA, 75 bp, synthetic construct
  source 1..75: mol_type = other DNA
gtttaatctcttttcgctgcatagcctgtggggctggctgttcctgctggcggcaccattactggtgaagcaagc

SEQ ID NO: 279273 - DNA, 75 bp, synthetic construct
  source 1..75: mol_type = other DNA
tctcttagaaattaaccatgcgcacttgcagttaatggaatccttattggatgaagggaagaaacacaatatttt

SEQ ID NO: 279274 - DNA, 75 bp, synthetic construct
  source 1..75: mol_type = other DNA
aaaacctgaaggaaaaattgctgctatgcgcggttaatgaatttgccgaatatggttacgaaggggccagagtag

SEQ ID NO: 279275 - DNA, 75 bp, synthetic construct
  source 1..75: mol_type = other DNA
atgaataatgaagatcaccgtcgtcgcgtgcttcattcactggaacaggcgttgagcaaagaccgggtaaaaacc

SEQ ID NO: 279276 - DNA, 75 bp, synthetic construct
  source 1..75: mol_type = other DNA
tgtgttgcgtttgttaggaataacactgtcatgcagaaaaccggtcatcttactgggggcagacgcgaagagact

SEQ ID NO: 279277 - DNA, 75 bp, synthetic construct
  source 1..75: mol_type = other DNA
ttccaagacgtaggtgaattaagggaggtacttcatccaccaggagagatagagttagccaaagcgcttaagagc

SEQ ID NO: 279278 - DNA, 75 bp, synthetic construct
  source 1..75: mol_type = other DNA
atgtatcttgataccagcaacgtacaaagcctgaaggaaaagctgttgttatgtgcggttaatgaatttgccgaa

SEQ ID NO: 279279 - DNA, 75 bp, synthetic construct
  source 1..75: mol_type = other DNA
acgcgcttgcagatgggtcgcaggttacttccttgcgcacaggatatagttataccagcgttattgtcgttagtg

SEQ ID NO: 279280 - DNA, 75 bp, synthetic construct
  source 1..75: mol_type = other DNA
aagttaatattatcagcattgaagatccacctgagtatgaaattgacggcacggctcagttacctataacgaacg

SEQ ID NO: 279281 - DNA, 75 bp, synthetic construct
  source 1..75: mol_type = other DNA
gccacgctgtacggctttgcgatggcgctcggtctgctggagcagaaaattcacgctcgtggacccggtgaacag

SEQ ID NO: 279282 - DNA, 75 bp, synthetic construct
  source 1..75: mol_type = other DNA
atgaataatgaagatcaccgtcgccgcgtactgcattcgctggaacaggcgttgagcaaagaccgggtgaaaacc

SEQ ID NO: 279283 - DNA, 75 bp, synthetic construct
  source 1..75: mol_type = other DNA
ccagtcgaaaccggagcatggcaagacgctgttgactgggtgctcaaagaggcttgtcaggttgtaaacactggc

SEQ ID NO: 279284 - DNA, 75 bp, synthetic construct
  source 1..75: mol_type = other DNA
gagaccgaagaggaaagaggagctgaatacaggaaagctattatagcagctttacgttcggatcccgatattatt

SEQ ID NO: 279285 - DNA, 75 bp, synthetic construct
  source 1..75: mol_type = other DNA
cgccatactgacggggctgatgagattgaggttgaagataatatccactgcgctatagcagagggatatcagtac

SEQ ID NO: 279286 - DNA, 75 bp, synthetic construct
  source 1..75: mol_type = other DNA
atgacgacgattacagaaatcatcggacgtgtgaatacacaactggttgacccgatgatggttcgctggcccctg

SEQ ID NO: 279287 - DNA, 75 bp, synthetic construct
  source 1..75: mol_type = other DNA
cgccgtgctcctctttttactgcgccggctgacgcggcgcggcaggaacgctgcctgtggtcagtgtcccgcgtc

SEQ ID NO: 279288 - DNA, 75 bp, synthetic construct
  source 1..75: mol_type = other DNA
cgacctgtattgtctgtggcactcttcggctgcaacattcggcgcgttattttttaacgtctttgccggaaacgc

SEQ ID NO: 279289 - DNA, 75 bp, synthetic construct
  source 1..75: mol_type = other DNA
tcaacgtggttcgtgcaactattgatggcttggaaaatatgaattctccagaaatggtcgctgccaagcgtggta

SEQ ID NO: 279290 - DNA, 75 bp, synthetic construct
  source 1..75: mol_type = other DNA
gtgcaatgcgcgccgttctggaagtcgctggggttcataacgtactggctaaagcgtatggttccaccaacccga

SEQ ID NO: 279291 - DNA, 75 bp, synthetic construct
  source 1..75: mol_type = other DNA
ctctccaggaaaaccggggcggttcacctgcaggaattgtgcgattattacaatgatgctgtgagggcagtgatt

SEQ ID NO: 279292 - DNA, 75 bp, synthetic construct
  source 1..75: mol_type = other DNA
ccaggcgcggtgatcaacgccgatcacaccatcacttttattgcgctgaaaccaggcttgctcactggaaaagcg

SEQ ID NO: 279293 - DNA, 75 bp, synthetic construct
  source 1..75: mol_type = other DNA
gatttaatgctttctttgctaaaagaagcggcaaaaaaaatgattaacacctgtaatgagtatcagaaaagacac

SEQ ID NO: 279294 - DNA, 75 bp, synthetic construct
  source 1..75: mol_type = other DNA
tcagcggatagtggcagtggaaaaggctgtaaatgagtatatgaagcctttcttgattgggaaaaatcctgcccg

SEQ ID NO: 279295 - DNA, 75 bp, synthetic construct
  source 1..75: mol_type = other DNA
gaaacgctcagttgtgtccctggcgcacgccagactttacctgatggcgcaatacagcttcttgacgtgatatgc

SEQ ID NO: 279296 - DNA, 75 bp, synthetic construct
  source 1..75: mol_type = other DNA
ggtggtgcagaatcggggctggctgcgcagcattatcagagttttgttgagcaacttgggatcaaacagggggca

SEQ ID NO: 279297 - DNA, 75 bp, synthetic construct
  source 1..75: mol_type = other DNA
tctgacgcaggatgatgacacgcctgtaccgctggaagaggcttatgttaacccgctggttgactggatgttgtt

SEQ ID NO: 279298 - DNA, 75 bp, synthetic construct
  source 1..75: mol_type = other DNA
tgcccgccaacgcctgccgccacgctgtacggctttgcaatggcgctcggcctgctggagcagaaaattcacgcc

SEQ ID NO: 279299 - DNA, 75 bp, synthetic construct
  source 1..75: mol_type = other DNA
tcttgacgccaaaagcagcaatagtgagttaaccaaaacagagatcttcgcagtcaagaaacagatcaaagagct

SEQ ID NO: 279300 - DNA, 75 bp, synthetic construct
  source 1..75: mol_type = other DNA
gcaggggtatggcgaagataacgaagagcaggaagaagggctgcgatgcattgcggtaccggtatttgatcgctt

SEQ ID NO: 279301 - DNA, 75 bp, synthetic construct
  source 1..75: mol_type = other DNA
tgaacacacagaatgcaaaacattcaacatcaaagtgtaagttactaccacaggaattacgaattcattgtgtta

SEQ ID NO: 279302 - DNA, 75 bp, synthetic construct
  source 1..75: mol_type = other DNA
tttcgctgtgaagcgacaactggaagagcttcgccagcacctgctaaatgctgacatatggagcaaacccgatga

SEQ ID NO: 279303 - DNA, 75 bp, synthetic construct
  source 1..75: mol_type = other DNA
attgtgtcagtgtccgattgaatgttgaagaactgcaactccttaatataaagcgaggctcttataaaaaaggcg

SEQ ID NO: 279304 - DNA, 75 bp, synthetic construct
  source 1..75: mol_type = other DNA
agtaaaggagaatggctcagattaacctctcttgataggcttcctcctgttgttcctgccatcaatgttgaagca

SEQ ID NO: 279305 - DNA, 75 bp, synthetic construct
  source 1..75: mol_type = other DNA
gacccggacagtgcccggattaaagcggattcagcactggccagacataacgaataccagcagtgcccggattaa

SEQ ID NO: 279306 - DNA, 75 bp, synthetic construct
  source 1..75: mol_type = other DNA
ccgctggctggataagtggtatccgggcaaaggtgacacgctgacgctgaaaatgggctatcagggcgagaaact

SEQ ID NO: 279307 - DNA, 75 bp, synthetic construct
  source 1..75: mol_type = other DNA
tccgggccatggctgataaccactgcccgccatgcatttgaccgcaacagcggctacatcaccgaactggaggtg

SEQ ID NO: 279308 - DNA, 75 bp, synthetic construct
  source 1..75: mol_type = other DNA
ggcggcaaatcacggatatctggtgctgattggcgactgtgcgcatcaaaatcagcaggaaaaacctttatcgat

SEQ ID NO: 279309 - DNA, 75 bp, synthetic construct
  source 1..75: mol_type = other DNA
ggcgctgatgaaagagagccatacgggagaaagcccctatctgaccggaaaagggttcgccggatacccggcccc

SEQ ID NO: 279310 - DNA, 75 bp, synthetic construct
  source 1..75: mol_type = other DNA
cagcgatgttctgagtccggtgttcacgctatggtatctgcagaagaacatcaccaccgatatcgccccctatgt

SEQ ID NO: 279311 - DNA, 75 bp, synthetic construct
  source 1..75: mol_type = other DNA
caatctctacatgcctgccgggcaggaggcagagcaccgttttgcgatgggcgaactgcctgatgaagtgctgga

SEQ ID NO: 279312 - DNA, 75 bp, synthetic construct
  source 1..75: mol_type = other DNA
tcaccaagctaatccagttggatgagtattccgggcaacatccgattcatggactgccgccgctggcggaggcca

SEQ ID NO: 279313 - DNA, 75 bp, synthetic construct
  source 1..75: mol_type = other DNA
atggcctatgcgcaccttgcgcctgattacctgcaaaacgcagtagcgttaaacccattaaagggaggtttaacg

SEQ ID NO: 279314 - DNA, 75 bp, synthetic construct
  source 1..75: mol_type = other DNA
ctgatattccacccaatcaggcaacacacatcctgcgccataccttcgcaagccatttcatgatgaacgggggca

SEQ ID NO: 279315 - DNA, 75 bp, synthetic construct
  source 1..75: mol_type = other DNA
tatagttataccagcgttattgtcgttagtggtgagtcgtcggtatatctgaatggagatacgacaatcagcgga

SEQ ID NO: 279316 - DNA, 75 bp, synthetic construct
  source 1..75: mol_type = other DNA
cgtggcgttctcaaaagatagctgctggattgaaaccgtcatctgctaacaggtacatgaaccgactatccggca

SEQ ID NO: 279317 - DNA, 75 bp, synthetic construct
  source 1..75: mol_type = other DNA
cacagaaaacgccagcgaaagaaatcgatctcgccagaaagcggttagcggaggtacttaatgaaactggtaagc

SEQ ID NO: 279318 - DNA, 75 bp, synthetic construct
  source 1..75: mol_type = other DNA
atggcaacgcgccgtcagccgttaattcccggctggttaattccaggagtaagcgccgccacgctggtggtagcg

SEQ ID NO: 279319 - DNA, 75 bp, synthetic construct
  source 1..75: mol_type = other DNA
ggcgttaattgtgctggcgctgctgctgttgctgccaccgttactggcggtgatcgtcgatggggtaaatcgcca

SEQ ID NO: 279320 - DNA, 75 bp, synthetic construct
  source 1..75: mol_type = other DNA
acggcgacaaatcccgccggttgctgcactaatctttatgctctgtttcgccagcttcgccaccgtgctatcgct

SEQ ID NO: 279321 - DNA, 75 bp, synthetic construct
  source 1..75: mol_type = other DNA
gacgttatcaggttgatgtaaggcctcagggggcgggaggaaggcggattcgtaagattttcaccctgaaatcaa

SEQ ID NO: 279322 - DNA, 75 bp, synthetic construct
  source 1..75: mol_type = other DNA
gatacactggatggcgactactggcgtgttgcgcttttgtgtttaagcacaggggcgcgctggagtgaagcttgt

SEQ ID NO: 279323 - DNA, 75 bp, synthetic construct
  source 1..75: mol_type = other DNA
gatcttgataagctgaaaattatcgcgtggcgttctcaaaagatagctgctggattgaaaccgtcatctgctaac

SEQ ID NO: 279324 - DNA, 75 bp, synthetic construct
  source 1..75: mol_type = other DNA
tggtcagacactggagatgagcggaatgctgatcctcgccacgcccggcattgtgctggcaacgggcttcttttt

SEQ ID NO: 279325 - DNA, 75 bp, synthetic construct
  source 1..75: mol_type = other DNA
gtacgcaaggaaggctggacaacgtcaccaaaaccaggcgtccagggtggcaaagctcgactggttcacgtcaat

SEQ ID NO: 279326 - DNA, 75 bp, synthetic construct
  source 1..75: mol_type = other DNA
caaccgatgtttttgttgcccctggcgtcacgattggcgacggcaccgtcgtgggtgcgcgaagcagtgttttta

SEQ ID NO: 279327 - DNA, 75 bp, synthetic construct
  source 1..75: mol_type = other DNA
gctgcagcatgttgtgtcagtcgctggggattgaaggctggtcgcgcttgaaagtggtggaactgcgcgctctga

SEQ ID NO: 279328 - DNA, 75 bp, synthetic construct
  source 1..75: mol_type = other DNA
atgctgctatggagcagtcgcgaactgcgggcgcggcaaaaaatgctggcgggtcaggcgctggagatgagcggc

SEQ ID NO: 279329 - DNA, 75 bp, synthetic construct
  source 1..75: mol_type = other DNA
caatcgcttggtctggagtggacattttctccctacggcctgcaaggtattttgctggcgcacgtattttttaat

SEQ ID NO: 279330 - DNA, 75 bp, synthetic construct
  source 1..75: mol_type = other DNA
ggcgcaaaaataggaaaaaacgtagtcattcgcccgtcggtaaaaatcacttacccatggaaattaaccattgga

SEQ ID NO: 279331 - DNA, 75 bp, synthetic construct
  source 1..75: mol_type = other DNA
ggtaaagtacaccctgtgtcatcttcaagcatcaaaccggtagtagactactacattaatggagataatctctat

SEQ ID NO: 279332 - DNA, 75 bp, synthetic construct
  source 1..75: mol_type = other DNA
gggttagaacttataaagatacttttcagctaattatctataaagaaggaattagatataataaaccagttatct

SEQ ID NO: 279333 - DNA, 75 bp, synthetic construct
  source 1..75: mol_type = other DNA
aaccattggcgcacattcggtgatatcgcaaaaaagttatttatgcaccgggagccacgaccatgcaagtcaaca

SEQ ID NO: 279334 - DNA, 75 bp, synthetic construct
  source 1..75: mol_type = other DNA
caccaaaacctggcgtccagggtggcaaagcccgactggttcacgtcaatgaacaggttcgtgaatatattcgca

SEQ ID NO: 279335 - DNA, 75 bp, synthetic construct
  source 1..75: mol_type = other DNA
gagccgctgccgctggtcggtgaaggcagcgacaactacgcgggcgatgaaatggtcaccaaagtagtgccggta

SEQ ID NO: 279336 - DNA, 75 bp, synthetic construct
  source 1..75: mol_type = other DNA
ttttcaccaatgcgttaatggcgatcccttacgcgctgaaagtgctggaaaacccgatgcgcgatatcaccgccc

SEQ ID NO: 279337 - DNA, 75 bp, synthetic construct
  source 1..75: mol_type = other DNA
ataagaagctctttaaaagaagaatttgtatctgcagagtataacatattactttgttatcctaacaaagaaatt

SEQ ID NO: 279338 - DNA, 75 bp, synthetic construct
  source 1..75: mol_type = other DNA
ctggcgaacaaaaatgtgaaggtgtggatccgctatgttgttgtcccaggctggtctgacgatgacgattcagcg

SEQ ID NO: 279339 - DNA, 75 bp, synthetic construct
  source 1..75: mol_type = other DNA
agcgaccagcgaccagcgaccagcgaccagcgaccagcgaccagcagtaaatcaagaaagtctgtaaaatctgtt

SEQ ID NO: 279340 - DNA, 75 bp, synthetic construct
  source 1..75: mol_type = other DNA
aatcagattgacgtgtgcaaccccggaaatttacgtgggcccgttaatatttacactatggttctggctgattcc

SEQ ID NO: 279341 - DNA, 75 bp, synthetic construct
  source 1..75: mol_type = other DNA
aacagcgatgtcaattgcctgtcagaatcagattgacgtgtgcaaccccggaaatttacgtgggcccgttaatat

SEQ ID NO: 279342 - DNA, 75 bp, synthetic construct
  source 1..75: mol_type = other DNA
accgtcggattatgggttctcctgtaacgatacctaatgacaagtggctacagggttattcattcctttcagcgg

SEQ ID NO: 279343 - DNA, 75 bp, synthetic construct
  source 1..75: mol_type = other DNA
aacatgctgaaatctatgggtatctcaaggtattgaaaatgggagcgatgcacttaggtgcagacttcaaaattt

SEQ ID NO: 279344 - DNA, 75 bp, synthetic construct
  source 1..75: mol_type = other DNA
attattgcccagttcgcatattatctggcaggctttccctggtatgaggggaatatcctgtttgcctttgcagtg

SEQ ID NO: 279345 - DNA, 75 bp, synthetic construct
  source 1..75: mol_type = other DNA
atgaaaaagataagaggtttgtgtcttccggtaatgctgggggcagtgttaatgtctcagcatgcacatgcagct

SEQ ID NO: 279346 - DNA, 75 bp, synthetic construct
  source 1..75: mol_type = other DNA
gaggactggaatcagaccaggccagtagatgctaggccaacgctggaggatttcaaaaagacggtaggtgattac

SEQ ID NO: 279347 - DNA, 75 bp, synthetic construct
  source 1..75: mol_type = other DNA
ttcagatatattatattgccatgattttattgattcagaacatgtaaactcctggctggttgaaccacatgagtg

SEQ ID NO: 279348 - DNA, 75 bp, synthetic construct
  source 1..75: mol_type = other DNA
cgcctcggcttcggaaatcgcccgcgtgctggaaagcctgacgaaaacagcggcgagaaccagcctgcgacgctg

SEQ ID NO: 279349 - DNA, 75 bp, synthetic construct
  source 1..75: mol_type = other DNA
taattagagatgaaattaacaaagaacatttgacagctcatcaaaatagaataaaccttgctgaggttgctgagg

SEQ ID NO: 279350 - DNA, 75 bp, synthetic construct
  source 1..75: mol_type = other DNA
cggcccgacaaaaccttggcattactgggccggttatccaagcgcgcagccatttatcaaagccaaagaagcatc

SEQ ID NO: 279351 - DNA, 75 bp, synthetic construct
  source 1..75: mol_type = other DNA
gggcgattaaaaccgcgatggcggagaccaacgccgagttaaccgactggcgcgaccttcagctcgccgccggtt

SEQ ID NO: 279352 - DNA, 75 bp, synthetic construct
  source 1..75: mol_type = other DNA
taatggtgatcgacttcgatcattgccaagtaccaagaactggacttatgcaatatattttcgatttattattgc

SEQ ID NO: 279353 - DNA, 75 bp, synthetic construct
  source 1..75: mol_type = other DNA
gcctgccgatgatatcgacggcgaaagcgtgcgctgtttccactatttccgcgccgtctgcgccatgaccagtgc

SEQ ID NO: 279354 - DNA, 75 bp, synthetic construct
  source 1..75: mol_type = other DNA
caccattgatgacctgtggcgggatatgcgctggtcggtctcgcgcctgcaggataagccgcgctgtatcgtggg

SEQ ID NO: 279355 - DNA, 75 bp, synthetic construct
  source 1..75: mol_type = other DNA
ctatatggatcaagatatccttaatcttatcctgttagggaaagttaaattcattgatgctaaatacaatacgca

SEQ ID NO: 279356 - DNA, 75 bp, synthetic construct
  source 1..75: mol_type = other DNA
aacgatgcgcaatccattacgatggtgcagaagaagcgatgcgctggcaatcccgcgaggtgacgacggtcgttg

SEQ ID NO: 279357 - DNA, 75 bp, synthetic construct
  source 1..75: mol_type = other DNA
ggctggcaagacattaaggtcgccgataacgctgacaacgatgcgcttttacggcattacaataactctcataac

SEQ ID NO: 279358 - DNA, 75 bp, synthetic construct
  source 1..75: mol_type = other DNA
ggggagagcgatctgttgtttgccctctcgcaacacgcggttgcttttgcccaatcacagctgcatcagcaagat

SEQ ID NO: 279359 - DNA, 75 bp, synthetic construct
  source 1..75: mol_type = other DNA
ctgaaaccaaacaatagtaatcagttaagatatagtgccaaacatatgctaaaaaagcatagatacctaaaggga

SEQ ID NO: 279360 - DNA, 75 bp, synthetic construct
  source 1..75: mol_type = other DNA
ccaatgggcggctcagcaggtttctgcacgagctattgcaatgctaaatgagccagaaataatcaaaaataacac

SEQ ID NO: 279361 - DNA, 75 bp, synthetic construct
  source 1..75: mol_type = other DNA
tcatcctttttgagtataattttcattataagaatataagatctaaaaatactcttgatatagcatttggaattg

SEQ ID NO: 279362 - DNA, 75 bp, synthetic construct
  source 1..75: mol_type = other DNA
gcaaggcggaaagcaccgaggcggttatcgatgagctgtggcgggatatgcgctggtctgtggcgcgtattcagg

SEQ ID NO: 279363 - DNA, 75 bp, synthetic construct
  source 1..75: mol_type = other DNA
aaacgggaagttgaatgatcccaaaaacgggaagttgaatgatcccaaaaacgggatgcagaacctatcagttaa

SEQ ID NO: 279364 - DNA, 75 bp, synthetic construct
  source 1..75: mol_type = other DNA
atgacaatcgtaaaaacccataccggtaccgtgatcaccaaagatggcccgcaggtaaaaaaattgcaccaaaca

SEQ ID NO: 279365 - DNA, 75 bp, synthetic construct
  source 1..75: mol_type = other DNA
ggtctctgaagcgactcagtccggtctcagtgatgtgaaggataccgctcctgaaaagggggctgaaatatccgt

SEQ ID NO: 279366 - DNA, 75 bp, synthetic construct
  source 1..75: mol_type = other DNA
tctggccgcactaccgcaaacagcttgccctgccggatttcagtccgttgtcacaggacagactcgccattcagt

SEQ ID NO: 279367 - DNA, 75 bp, synthetic construct
  source 1..75: mol_type = other DNA
tcgcggtgaaaaatccacggcctccggtcgctatcagcagctttacctgttctggccgcattaccgcaaacagct

SEQ ID NO: 279368 - DNA, 75 bp, synthetic construct
  source 1..75: mol_type = other DNA
tttgttcgcgagtttggctgtactcctggagaatatcgggaaagagtcagacagcttcaggaggttatcttataa

SEQ ID NO: 279369 - DNA, 75 bp, synthetic construct
  source 1..75: mol_type = other DNA
gagctgtggcgggatatgcgctgggcagtggcgcgcatccaggacaagccgcgctgcatcgtgagtcaaatctga

SEQ ID NO: 279370 - DNA, 75 bp, synthetic construct
  source 1..75: mol_type = other DNA
tgacagcaccattgatgagctgtggcgggatatgcgctgggcggtggcgcgcatccaggacaagccgcgctgcat

SEQ ID NO: 279371 - DNA, 75 bp, synthetic construct
  source 1..75: mol_type = other DNA
caccattgatgagctgtggcgggatatgcgctgggcagtggcgcgcatccaggacaagccgcgctgcatcgtgag

SEQ ID NO: 279372 - DNA, 75 bp, synthetic construct
  source 1..75: mol_type = other DNA
gatcaccggattttgctggggtggacgtatcacctggctgtatgccgcgcacaacccacagctgaaagcggcggt

SEQ ID NO: 279373 - DNA, 75 bp, synthetic construct
  source 1..75: mol_type = other DNA
caccattgatgagctgtggcgggatatgcgctgggcggtggcgcgcatccagggcaagccgcgctgcatcgtgag

SEQ ID NO: 279374 - DNA, 75 bp, synthetic construct
  source 1..75: mol_type = other DNA
gtggatgccagtgcgaaaggcgacaagaaggctgacagcattgacagcaccattgatgaactgtggcgggatatg

SEQ ID NO: 279375 - DNA, 75 bp, synthetic construct
  source 1..75: mol_type = other DNA
ggactgcagattgtgctgggggcggcagccatcgtgggctctttcttcacggccggtgcctcgatggcgttatgg

SEQ ID NO: 279376 - DNA, 75 bp, synthetic construct
  source 1..75: mol_type = other DNA
ggcgaatctcccaggacatcagtacccgtgatgaaggcggtgacgggaaggtggtggttatcgggcggcaggggt

SEQ ID NO: 279377 - DNA, 75 bp, synthetic construct
  source 1..75: mol_type = other DNA
gaaatgctggttggctcccggcgaatctctcaggacatcagtacccgtgatgaaggcggtggcgggaaggtcgtg

SEQ ID NO: 279378 - DNA, 75 bp, synthetic construct
  source 1..75: mol_type = other DNA
cgcactgacagaggcgcagccgggcgatgtgctgctgtgctgctttggttcatcggtgccgaatcatgccgccat

SEQ ID NO: 279379 - DNA, 75 bp, synthetic construct
  source 1..75: mol_type = other DNA
atgattttttatcgcgctttcaacttttgcgcccgcaaattaaccgggaaaccttaaatcatcgtcaggctgccg

SEQ ID NO: 279380 - DNA, 75 bp, synthetic construct
  source 1..75: mol_type = other DNA
ctgaagaagaggtcgctattcccccttccgccgtcgaagttatcggtgtgctgccgcctgtcgatagcgtaactg

SEQ ID NO: 279381 - DNA, 75 bp, synthetic construct
  source 1..75: mol_type = other DNA
tattatcccgcccgatttaccctatcgcgccagtgaagatgaagtctccgctgtgtttgaaatgccgctcgctca

SEQ ID NO: 279382 - DNA, 75 bp, synthetic construct
  source 1..75: mol_type = other DNA
actgggtgccagcatgatactgggcggtgtggctcagatgctggccccgaaggcaaagacgccggagtacaaaag

SEQ ID NO: 279383 - DNA, 75 bp, synthetic construct
  source 1..75: mol_type = other DNA
caactgagtaaacgggagaggtattccgaaaaatggcaacgacgaacgcattctgtctggcgtcaccgccactgg

SEQ ID NO: 279384 - DNA, 75 bp, synthetic construct
  source 1..75: mol_type = other DNA
cggggtgacggactgttacacgctgttccgggatgcctaccatctggcgggaattgatatgccggattttgagcg

SEQ ID NO: 279385 - DNA, 75 bp, synthetic construct
  source 1..75: mol_type = other DNA
cgactggtttttacaggatttccctgccttccgcacagcctggcgatatcctgctgtgctgctttggtgcttcgg

SEQ ID NO: 279386 - DNA, 75 bp, synthetic construct
  source 1..75: mol_type = other DNA
aaggcaaaaacaccggagtacagggcgacggataacggtaaacagaacacgtacttttcctcactggacaacatg

SEQ ID NO: 279387 - DNA, 75 bp, synthetic construct
  source 1..75: mol_type = other DNA
cggactgttacacgctgttccgggacgcttaccatctggcgggaattgagatgccggattttcatcgcggggatg

SEQ ID NO: 279388 - DNA, 75 bp, synthetic construct
  source 1..75: mol_type = other DNA
cagagatgcagggtgagattgtggcactggtccacagtcatccctgtggtctgccctggctgagtgaggctgacc

SEQ ID NO: 279389 - DNA, 75 bp, synthetic construct
  source 1..75: mol_type = other DNA
cgcacacactccctctggcgtcacctggcatggctcgcatctgcctttacggggattttcaacgatttggccgcc

SEQ ID NO: 279390 - DNA, 75 bp, synthetic construct
  source 1..75: mol_type = other DNA
cgcacacactccctctggcgtcacctggcatggcacgcatctgcctttacggggatttgcaacgatttggccgcc

SEQ ID NO: 279391 - DNA, 75 bp, synthetic construct
  source 1..75: mol_type = other DNA
ctgctgtgctgctttggcgcatcggtgccgaatcatgccgccatttactgtggcaacggtgaactgcttcaccat

SEQ ID NO: 279392 - DNA, 75 bp, synthetic construct
  source 1..75: mol_type = other DNA
gtggaataccgtagcctgacgcttgatgattttttatcgcgctttcaacttttgcgcccgcaaattaaccgggaa

SEQ ID NO: 279393 - DNA, 75 bp, synthetic construct
  source 1..75: mol_type = other DNA
gccggaggcgtatttccggatgtcgccggaggactggctgcgggcagagatgcagggtgagattatggcgctggt

SEQ ID NO: 279394 - DNA, 75 bp, synthetic construct
  source 1..75: mol_type = other DNA
cgattctggcgcatgcccggcggtgtgcgcctgcggagtcgtgcggcttcgtggtgagaacgccggagggggagc

SEQ ID NO: 279395 - DNA, 75 bp, synthetic construct
  source 1..75: mol_type = other DNA
taaagagtgccctgccctggtggctggtctgccggggtgacattcaccggttccgctgtgtgccgcacctgaccg

SEQ ID NO: 279396 - DNA, 75 bp, synthetic construct
  source 1..75: mol_type = other DNA
agcagttggtccccgtagacattgagcgcgtttatatttgcactgcttttcctgccatgttggagaatgttcaga

SEQ ID NO: 279397 - DNA, 75 bp, synthetic construct
  source 1..75: mol_type = other DNA
aagagtgccctgccctggtggctggtctgccggggggaaattcacaaattccgctgtgtgccgcacctgaccggg

SEQ ID NO: 279398 - DNA, 75 bp, synthetic construct
  source 1..75: mol_type = other DNA
tgagcaaacagaacgaagaaaacctgctgccgaaaaccattctctactgcctgaacccgcgcgataacgaagtgc

SEQ ID NO: 279399 - DNA, 75 bp, synthetic construct
  source 1..75: mol_type = other DNA
ctggatcacttcgccgctcacggctgtaaagtgtctgaccatgcgctggacgtggtgatgtttgctgaagcgaac

SEQ ID NO: 279400 - DNA, 75 bp, synthetic construct
  source 1..75: mol_type = other DNA
ggatgactggtggcgcaacggccagaacctgtacctggacaatatggcggtcaccggcttttaccgggtgcccct

SEQ ID NO: 279401 - DNA, 75 bp, synthetic construct
  source 1..75: mol_type = other DNA
gaaaaatggcaacgacgaacgcattctgtctggcgtcaccgccactggcacgcatctgccttcacggggatttac

SEQ ID NO: 279402 - DNA, 75 bp, synthetic construct
  source 1..75: mol_type = other DNA
ggtctgctggggggaaattcataaattccgctgtgtgccacatctgacaggacggcgctttgagcacggggtgac

SEQ ID NO: 279403 - DNA, 75 bp, synthetic construct
  source 1..75: mol_type = other DNA
atgattttttatcgcgctttcaacttttgcgtccgcaaatgaaccgggaaacgttaaatcatcgtcaggctgccg

SEQ ID NO: 279404 - DNA, 75 bp, synthetic construct
  source 1..75: mol_type = other DNA
atcgcaccggaagactggctgcgggcagagatgtcgggggagattgtggcgctggttcacagtcatcccggtggt

SEQ ID NO: 279405 - DNA, 75 bp, synthetic construct
  source 1..75: mol_type = other DNA
agccctgcgtgaatatctccgcagagccggaggcgtattttcgtattgcaccggaagactggctgcaggcacaga

SEQ ID NO: 279406 - DNA, 75 bp, synthetic construct
  source 1..75: mol_type = other DNA
agcttgcaggcggtttctggttatcccgtttccgacagtttgctggacccggcagccgaagccgctatgggccat

SEQ ID NO: 279407 - DNA, 75 bp, synthetic construct
  source 1..75: mol_type = other DNA
tgcccgccttcacgaacaactgggtgagggggcggtcatccatattgtgccgcgactggccggtgcagggaaagg

SEQ ID NO: 279408 - DNA, 75 bp, synthetic construct
  source 1..75: mol_type = other DNA
gtcagcggcgcagccgggcgatgtgctgctgtgctgctttggttcatcggtgccgaatcatgccgctatttactg

SEQ ID NO: 279409 - DNA, 75 bp, synthetic construct
  source 1..75: mol_type = other DNA
gcgctggcactggcgcattttcagggcaaaaataatttactgcgtcgacttaacgccctcaaacgcgctgacttt

SEQ ID NO: 279410 - DNA, 75 bp, synthetic construct
  source 1..75: mol_type = other DNA
ggctgagcgaggccgaccggcggctgcagataaaaagtgcactgtcctggtggctggtctgccggggggacattc

SEQ ID NO: 279411 - DNA, 75 bp, synthetic construct
  source 1..75: mol_type = other DNA
tcaatggcgttatggggttcagccctggcagccggtggtttttctgccaccacgatgctgttttcacttggagcc

SEQ ID NO: 279412 - DNA, 75 bp, synthetic construct
  source 1..75: mol_type = other DNA
gtgaacacggcagcggaagccatccgcgcactgtcgatgcaggtgccgggctttcgccgtcagatgaacgaaggc

SEQ ID NO: 279413 - DNA, 75 bp, synthetic construct
  source 1..75: mol_type = other DNA
gtcgtgcggcttcgtggtgagaacgccggagggggagcggtatatcccttgtgtgaatatttccgcagagccgga

SEQ ID NO: 279414 - DNA, 75 bp, synthetic construct
  source 1..75: mol_type = other DNA
ttgagatgccgaattttcatcgcggggatgactggtggcgtcacggtcagaatctctatcttgacaatatggagg

SEQ ID NO: 279415 - DNA, 75 bp, synthetic construct
  source 1..75: mol_type = other DNA
agggaacggtcatccacattgtgccgcgactggccggcgccggaaagggtggactgcagattgtgctgggggctg

SEQ ID NO: 279416 - DNA, 75 bp, synthetic construct
  source 1..75: mol_type = other DNA
agggaacggtcatccacattgtgccgcgactggccggcgccggaaagggaggactgcagattgtgctgggggcgg

SEQ ID NO: 279417 - DNA, 75 bp, synthetic construct
  source 1..75: mol_type = other DNA
agggaacggtcatccacattgtgccgcgactggccggtgccggaaagggcggactgcagattgtgctgggggctg

SEQ ID NO: 279418 - DNA, 75 bp, synthetic construct
  source 1..75: mol_type = other DNA
agggaacggtcatccacattgtgccgcgactggccggggccggaaagggcggactgcagattgtgctgggggcag

SEQ ID NO: 279419 - DNA, 75 bp, synthetic construct
  source 1..75: mol_type = other DNA
agggaacggtcatccacattgtgccgcgactggccggggccggaaagggaggactgcagattgtgctgggggccg

SEQ ID NO: 279420 - DNA, 75 bp, synthetic construct
  source 1..75: mol_type = other DNA
agggaacggtcatccacattgtgccgcgactggccggcgccggaaaggggggactgcagattgtgctgggggcag

SEQ ID NO: 279421 - DNA, 75 bp, synthetic construct
  source 1..75: mol_type = other DNA
tgcagataaaaagtgccctgccctggtggctggtctgccggggggacattcataaattccgctgtgtgccgcacc

SEQ ID NO: 279422 - DNA, 75 bp, synthetic construct
  source 1..75: mol_type = other DNA
cacccgtgtgacctggagcgataacatcaaaaatgagtccgataccattgaggtggagctggacgacaccgatgg

SEQ ID NO: 279423 - DNA, 75 bp, synthetic construct
  source 1..75: mol_type = other DNA
cacagtacggcgaaaccgatgttggatttctcaaacgcctggccagcgaatatggctatgcggtaaaggtgacca

SEQ ID NO: 279424 - DNA, 75 bp, synthetic construct
  source 1..75: mol_type = other DNA
ctcatggagaaagagggtaaaggtgttgttgaagcgacactgatggcagtacgtatgcgtctgcgtcctatcctg

SEQ ID NO: 279425 - DNA, 75 bp, synthetic construct
  source 1..75: mol_type = other DNA
aaccgggtctataaatctgcaaaggtaaaacaccagaaaagcagcagtaaaaaactgatcgtctacgaagctgat

SEQ ID NO: 279426 - DNA, 75 bp, synthetic construct
  source 1..75: mol_type = other DNA
aaagctgatcgtttatgaagctgatggcggtaccagcgaaagcgacaaacaaaccaaaggcggtaaggtcaccag

SEQ ID NO: 279427 - DNA, 75 bp, synthetic construct
  source 1..75: mol_type = other DNA
tgttcctgatggggcagcagcttcagtggtaattgctgccgaagtgaacgttgctgaagtagaaaaaggggtctg

SEQ ID NO: 279428 - DNA, 75 bp, synthetic construct
  source 1..75: mol_type = other DNA
ggtgaaatgctggttggctcccggcgaatctcccaggacatcagtacccgtgatgaaggtggtggcgggaaggtg

SEQ ID NO: 279429 - DNA, 75 bp, synthetic construct
  source 1..75: mol_type = other DNA
tggtgtttttcaggtggtgctgggggttgcagcgattgtcgggtcatttttcactggtggtgcaacactggcggc

SEQ ID NO: 279430 - DNA, 75 bp, synthetic construct
  source 1..75: mol_type = other DNA
ggcgtggcccagatgctggccccgaaggcaaagacgccggagtacaaaagcacggataacggcagacagaacacg

SEQ ID NO: 279431 - DNA, 75 bp, synthetic construct
  source 1..75: mol_type = other DNA
cgatatttgcatgggtgctggccattattctgatgatggcgggcgcactggcgatcctacaattacccgtcgctc

SEQ ID NO: 279432 - DNA, 75 bp, synthetic construct
  source 1..75: mol_type = other DNA
gcgacagcggagctggtgctcaatcgtctcgacgagctggcgcagtacttcccgcacggactggaatacaaggtg

SEQ ID NO: 279433 - DNA, 75 bp, synthetic construct
  source 1..75: mol_type = other DNA
agggaacggtcatccacattgtgccgcgactggccggtgccggaaagggtggactgcagattgtgctgggggccg

SEQ ID NO: 279434 - DNA, 75 bp, synthetic construct
  source 1..75: mol_type = other DNA
cgggatgcctaccatctggcggggattgagatgccggattttcagcgcgaggatgagtggtggcgcaacggtcag

SEQ ID NO: 279435 - DNA, 75 bp, synthetic construct
  source 1..75: mol_type = other DNA
ggaattgatatgccggattttgagcgtgaggatgactggtggcgcaacggtcagaacctttacctggacaatatg

SEQ ID NO: 279436 - DNA, 75 bp, synthetic construct
  source 1..75: mol_type = other DNA
tgaacacggcagcggaagccatccgtgccctgtcgatgcagatgccgggattccgccgccagatgaacgaaggct

SEQ ID NO: 279437 - DNA, 75 bp, synthetic construct
  source 1..75: mol_type = other DNA
tgaccggacggcgctttgaacatggtgtgacggactgttacaccctgttccgggatgcataccatctggcaggga

SEQ ID NO: 279438 - DNA, 75 bp, synthetic construct
  source 1..75: mol_type = other DNA
cacggtcgccagacaaataaacccgtacatcaacgtcgatataacggtcctgcggtggcggatgagttcgacaac

SEQ ID NO: 279439 - DNA, 75 bp, synthetic construct
  source 1..75: mol_type = other DNA
cgcgactggccggggccggaaagggtggactgcagattgtgctgggggcggcggccatcgtggggtctttcttca

SEQ ID NO: 279440 - DNA, 75 bp, synthetic construct
  source 1..75: mol_type = other DNA
ggataccgcgtcggaggcggtgtatgcccgtcttcatgagccactgagcgggagggccgtgattcatattgtacc

SEQ ID NO: 279441 - DNA, 75 bp, synthetic construct
  source 1..75: mol_type = other DNA
cctcttgggtgtatccggaaggctgtagagagtacttacgttctgatatcgtatcaatgcttgaaactctcaaga

SEQ ID NO: 279442 - DNA, 75 bp, synthetic construct
  source 1..75: mol_type = other DNA
tggtaccagatacgtattgccggtgatgacacggcaccggaggcggtgtatgcccgccttcacgaacaactgggt

SEQ ID NO: 279443 - DNA, 75 bp, synthetic construct
  source 1..75: mol_type = other DNA
agtgaccgaaggctgcgggaacagaaaatgaagattaaccacagggggttttgtttttattggcccgaaaaaact

SEQ ID NO: 279444 - DNA, 75 bp, synthetic construct
  source 1..75: mol_type = other DNA
cgatggcgttatggggttcagccctggcagccggtggtttttctgccaccacgatgctgttttcactgggggcca

SEQ ID NO: 279445 - DNA, 75 bp, synthetic construct
  source 1..75: mol_type = other DNA
ttacggtgaaatgctggttggctcccggcgaatctcccaggacatcagtacccgtgatgaaggcggtgacgggaa

SEQ ID NO: 279446 - DNA, 75 bp, synthetic construct
  source 1..75: mol_type = other DNA
ccatccgtgccctgtcgcagcaggtgccgggattcaggcagaaactgtatgagggatggtatcagttacgcattg

SEQ ID NO: 279447 - DNA, 75 bp, synthetic construct
  source 1..75: mol_type = other DNA
caacggataacggtaaacagaacacgtacttttcctcactggacaacatgattgcccagggcaacccgatgccgg

SEQ ID NO: 279448 - DNA, 75 bp, synthetic construct
  source 1..75: mol_type = other DNA
gcgccctgtcgctgcaggtgccgggattccgccgtcagatgaacgaaggctggtaccagatacgtattgccggtg

SEQ ID NO: 279449 - DNA, 75 bp, synthetic construct
  source 1..75: mol_type = other DNA
agggaacggtcatccacattgtgccgcgactggccggagccggaaaggggggactgcagattgtgctgggggccg

SEQ ID NO: 279450 - DNA, 75 bp, synthetic construct
  source 1..75: mol_type = other DNA
agggaacggtcatccacattgtgccgcgactggccggagccggaaagggcggactgcagattgtgctgggggcgg

SEQ ID NO: 279451 - DNA, 75 bp, synthetic construct
  source 1..75: mol_type = other DNA
atggcgcgcatctgcctttacggggatttacaacgatttggccgcctcagcctgtatgtgaacacggcagcggaa

SEQ ID NO: 279452 - DNA, 75 bp, synthetic construct
  source 1..75: mol_type = other DNA
gccggaggagtattttcgtatcgccccggaagactggctgcgggcagagatgcagggggagattgtggcgctggt

SEQ ID NO: 279453 - DNA, 75 bp, synthetic construct
  source 1..75: mol_type = other DNA
tggcacacacacggcggtgtgtgcctgcggagtcgtgcggcttcgtggtgagaacgccggagggggagcggtatc

SEQ ID NO: 279454 - DNA, 75 bp, synthetic construct
  source 1..75: mol_type = other DNA
atctggaccaccaacgataacgcgctctatgcgtcgggtttaggtttcgccaacattaccgggatgtcgagcaaa

SEQ ID NO: 279455 - DNA, 75 bp, synthetic construct
  source 1..75: mol_type = other DNA
atgtcggcaattttggcggtttcctttccattaataaactttcgcagtaaatcccggtttatgacacagactgaa

SEQ ID NO: 279456 - DNA, 75 bp, synthetic construct
  source 1..75: mol_type = other DNA
ataaactttcgcagtaaatcctgttttatgacacagactgaatcagcgattctggtgcatgcccggcggtgtgcg

SEQ ID NO: 279457 - DNA, 75 bp, synthetic construct
  source 1..75: mol_type = other DNA
gccggaggggtattttcgtatcgcgccggaagactggctgcgggcagagatgcagggggagattgtggcactggt

SEQ ID NO: 279458 - DNA, 75 bp, synthetic construct
  source 1..75: mol_type = other DNA
gaaaccgttctggcgcatgggccggtgcgcagcattttgtcgcgtcctgatacgctgcattgcagctacgaagaa

SEQ ID NO: 279459 - DNA, 75 bp, synthetic construct
  source 1..75: mol_type = other DNA
tgatcctcggtgaaactggcacgggtaaagagctgattgcccgcgcgatccataatctcagtgggcgtaataatc

SEQ ID NO: 279460 - DNA, 75 bp, synthetic construct
  source 1..75: mol_type = other DNA
cccgcccacgaacagagcgaagtcgatgaagccggaaccctcaccgaacgcgtgttcaaaagtaaagagatgctg

SEQ ID NO: 279461 - DNA, 75 bp, synthetic construct
  source 1..75: mol_type = other DNA
gtgcgtcttattacgcgtcgcgtgaaaaagacaccccccattaaatatgaagacgaaactgttctggcacacggt

SEQ ID NO: 279462 - DNA, 75 bp, synthetic construct
  source 1..75: mol_type = other DNA
cttcgacattgacgatatcagcatcgtcttacgcagccaccgtaaaaacaaactcaacatctactccactcacta

SEQ ID NO: 279463 - DNA, 75 bp, synthetic construct
  source 1..75: mol_type = other DNA
caggaaatccaccgtctgaaagagcggctggttgatgaaaacctcgccctgacagaacaactcaacaatgtggat

SEQ ID NO: 279464 - DNA, 75 bp, synthetic construct
  source 1..75: mol_type = other DNA
ctgcccaccagcctcgttatcgctttctttgaactgcgtcatttatatcaactcatcacacgtagcgattctgtc

SEQ ID NO: 279465 - DNA, 75 bp, synthetic construct
  source 1..75: mol_type = other DNA
cgcatttagctgggtcacgcgcaaactgaaaggccacgtctcgctgccgctggtaaccaccaaccggattaacga

SEQ ID NO: 279466 - DNA, 75 bp, synthetic construct
  source 1..75: mol_type = other DNA
cggctttgctcaaaccggggcagcgtcttctggtgcatgacgcgcctgtttacccgacgacacgggtattattga

SEQ ID NO: 279467 - DNA, 75 bp, synthetic construct
  source 1..75: mol_type = other DNA
tggtcactattgcctgatgccactggcggcggaagggcatatttttggtggctgtgaatttattcgttatgacga

SEQ ID NO: 279468 - DNA, 75 bp, synthetic construct
  source 1..75: mol_type = other DNA
ctaactgatgaggtcatggcgttcaattcacactgtggcaacggaattctacatggatggacgacggctcaagag

SEQ ID NO: 279469 - DNA, 75 bp, synthetic construct
  source 1..75: mol_type = other DNA
ttaagatatggttttcaaacaagtattttatctgtagatgaattgtcacgttatttatttgtctggttaacattt

SEQ ID NO: 279470 - DNA, 75 bp, synthetic construct
  source 1..75: mol_type = other DNA
tgatagtgaatttggcgagattattggccgcagcgaagccatgtacagcgtgcttaaacaagttgaaatggtggc

SEQ ID NO: 279471 - DNA, 75 bp, synthetic construct
  source 1..75: mol_type = other DNA
aaaatcgctgtgcgagattcgttacagagacggatacagggaggtggcggctttcatggcttacgaatccggtaa

SEQ ID NO: 279472 - DNA, 75 bp, synthetic construct
  source 1..75: mol_type = other DNA
tatttataaaaatgaatagtttgtttgactacgttactaaaatctcctttgaattattaaagagtaacttcccaa

SEQ ID NO: 279473 - DNA, 75 bp, synthetic construct
  source 1..75: mol_type = other DNA
ctccgacggggttgttcatcgagaagcaacttgaccaggaagcaatggaagaacagaaacggcatcaggagcgat

SEQ ID NO: 279474 - DNA, 75 bp, synthetic construct
  source 1..75: mol_type = other DNA
gcagggcgagctttctattgcctgcctgccagtattttcacagtcttttttacctccgctgctgcaaccgtttct

SEQ ID NO: 279475 - DNA, 75 bp, synthetic construct
  source 1..75: mol_type = other DNA
tgaaaaggtgattgggctgaaactgtttgagcgcatacgcggaagattacatcctaccgtgcaaggactgcggct

SEQ ID NO: 279476 - DNA, 75 bp, synthetic construct
  source 1..75: mol_type = other DNA
atgcttagacaacatcaggatagcctcttaccgcgctttgcgcaaggagaagaaggccatgaaactaccacgaag

SEQ ID NO: 279477 - DNA, 75 bp, synthetic construct
  source 1..75: mol_type = other DNA
tctgcccgttacacgctgccgctggcggtggttccggcggtccttgttcagcactgctgcacgattgccttttat

SEQ ID NO: 279478 - DNA, 75 bp, synthetic construct
  source 1..75: mol_type = other DNA
gcacgtagccgagcgagttgaaaaagccagcattcagctcgcacttagtgctttacgtgatgaactgaacatatc

SEQ ID NO: 279479 - DNA, 75 bp, synthetic construct
  source 1..75: mol_type = other DNA
gaaaccgttctggcgcacggtccggtgcgcagcattttgtctcgtcctgatacgctgcattgcagttacgaagaa

SEQ ID NO: 279480 - DNA, 75 bp, synthetic construct
  source 1..75: mol_type = other DNA
gggatgacccgttggcagcgcaagtgatcaataccgcagacggaaagagaagggtggtttgcttcgcagaagatg

SEQ ID NO: 279481 - DNA, 75 bp, synthetic construct
  source 1..75: mol_type = other DNA
gctcagcatatcctctgccaagttacttggagagcaatgtcactacggcagagctttacaaggcggcaacagggg

SEQ ID NO: 279482 - DNA, 75 bp, synthetic construct
  source 1..75: mol_type = other DNA
aggaaaaccttcctctgaccatcgttctagcaaagcctgggatctcgcagagttggacgggccgaatccttactg

SEQ ID NO: 279483 - DNA, 75 bp, synthetic construct
  source 1..75: mol_type = other DNA
gttcaaagttgactatgaaaacttctgcgaacggctcagacaggttaagcccgatttaccacgcgggcaggccac

SEQ ID NO: 279484 - DNA, 75 bp, synthetic construct
  source 1..75: mol_type = other DNA
caagaaaataataaatacttaatttcctctattataacaaatgcctttggtataaagagtaacgaaaaaggcata

SEQ ID NO: 279485 - DNA, 75 bp, synthetic construct
  source 1..75: mol_type = other DNA
tgattttgaatgatattccattcaattttgctgttattctcccagtaaacggtagagacacgctttgtatttata

SEQ ID NO: 279486 - DNA, 75 bp, synthetic construct
  source 1..75: mol_type = other DNA
ggcgtgttaatccctcggattacggtaactttgattcccgttatgtgaaagatgttcgacttggttcacagcaat

SEQ ID NO: 279487 - DNA, 75 bp, synthetic construct
  source 1..75: mol_type = other DNA
cttcgatatggatttcacacaagcatattatcgattgatgaattatcccgacttttatttgtctggttaacattt

SEQ ID NO: 279488 - DNA, 75 bp, synthetic construct
  source 1..75: mol_type = other DNA
aaagaaatattgaagagcgtgtttctataatagtatatcaagcagaacgagtatcttcacttataattaataaaa

SEQ ID NO: 279489 - DNA, 75 bp, synthetic construct
  source 1..75: mol_type = other DNA
gagaaactcccatattatatttgcatgggagggtttaagtaataaatacaatcatgaaaaactatcaaatatatt

SEQ ID NO: 279490 - DNA, 75 bp, synthetic construct
  source 1..75: mol_type = other DNA
atgtttgtgaaacctgttaaagggcggtcagttcctgaccctgcccgcggcgaccttttgcccgccgaagggcga

SEQ ID NO: 279491 - DNA, 75 bp, synthetic construct
  source 1..75: mol_type = other DNA
gatgcgctacaaggaatggtgctgggttatttaagccacatacttgccgatatgctgacacccgccggtgttccc

SEQ ID NO: 279492 - DNA, 75 bp, synthetic construct
  source 1..75: mol_type = other DNA
atttctacggcatcggggcagatcaaggcttcatggttccggtcttcgagaagccgttaagcgctgatcaggcat

SEQ ID NO: 279493 - DNA, 75 bp, synthetic construct
  source 1..75: mol_type = other DNA
taatatagcgggtgtttattacagacccgttcaaaagtatataaatggcacctggtataatgtagcgagcgttta

SEQ ID NO: 279494 - DNA, 75 bp, synthetic construct
  source 1..75: mol_type = other DNA
ccgttatctggtggtcaactgaatggtgcactgggtatcggaacatccagtgctcttggcggtaattcgattgta

SEQ ID NO: 279495 - DNA, 75 bp, synthetic construct
  source 1..75: mol_type = other DNA
gcgaaagaagctgcaccagggcttaagggcggtgcagctaaaaaagagttctctatgacgtacacgacgccagcg

SEQ ID NO: 279496 - DNA, 75 bp, synthetic construct
  source 1..75: mol_type = other DNA
agagagattacacgacttattggtgatgcgcaggaagctacagtcactagttatgagttaatcgctgaagcctgg

SEQ ID NO: 279497 - DNA, 75 bp, synthetic construct
  source 1..75: mol_type = other DNA
ttgtcaattttccaaagaaaggaattgtcgttgttacaacaataatgaacggatgctgacacaacatcgcttcac

SEQ ID NO: 279498 - DNA, 75 bp, synthetic construct
  source 1..75: mol_type = other DNA
cattcctgatcgtgtagtcgagcaactgttggctatgcgtcagcaaagaaaaaaacatcttcatgccatcataga

SEQ ID NO: 279499 - DNA, 75 bp, synthetic construct
  source 1..75: mol_type = other DNA
gtgccgctaccgtattcagaccaccttagataatgagctggatttctttgatcaagaacttcttatgatgaaccg

SEQ ID NO: 279500 - DNA, 75 bp, synthetic construct
  source 1..75: mol_type = other DNA
taagcgaatagccgagcgcggggagaatatccaggtctggatagatcctgtggtatttaatgatctgctgaactg

SEQ ID NO: 279501 - DNA, 75 bp, synthetic construct
  source 1..75: mol_type = other DNA
gcgctgcgggtgacacaaattgatgtcagcgcaggtgagaagccagggatggtgaatgtgcagcggctagaattt

SEQ ID NO: 279502 - DNA, 75 bp, synthetic construct
  source 1..75: mol_type = other DNA
ctatcgacattgttgtttgtgaacttgccgataaagcggcagggcctgaaggcgatatttttgccgcccataaaa

SEQ ID NO: 279503 - DNA, 75 bp, synthetic construct
  source 1..75: mol_type = other DNA
atgctgtgccgcaatatcggcattattcaacacggtgagctggtggaaaatacctcgatgaaggcgctgctggcg

SEQ ID NO: 279504 - DNA, 75 bp, synthetic construct
  source 1..75: mol_type = other DNA
aaattgccagagcagtgaacaactcgctcaaaggtggacaatcccaaccgaaacgtatacgaattacacatatag

SEQ ID NO: 279505 - DNA, 75 bp, synthetic construct
  source 1..75: mol_type = other DNA
cagaccacggcccgtatttgttccgaattgacagataagtccagcctaatctacgaagttaatgtaggcggtaat

SEQ ID NO: 279506 - DNA, 75 bp, synthetic construct
  source 1..75: mol_type = other DNA
cggctaagtgcggagataatgagtctccaaaaagagtttgaaaactatatcatgttatgcaaagggcgaactgtt

SEQ ID NO: 279507 - DNA, 75 bp, synthetic construct
  source 1..75: mol_type = other DNA
tgaaaccgtgcagcaaattgtggtgaatcaggcagggtactacggtgtggagcgcaaagaagcgtacatccgcag

SEQ ID NO: 279508 - DNA, 75 bp, synthetic construct
  source 1..75: mol_type = other DNA
gctaaacgtcagttgggactggtgccgcaggaatttaacttcaacccgtttgaaaccgtgcagcaaattgtggtg

SEQ ID NO: 279509 - DNA, 75 bp, synthetic construct
  source 1..75: mol_type = other DNA
agtgcaggtgcacacgcgcatactgtcggtattggtgctcatacgcactccgttgcgattggctcacacggacac

SEQ ID NO: 279510 - DNA, 75 bp, synthetic construct
  source 1..75: mol_type = other DNA
caggacgctacgacaacacaaaaaggaattgtccagctcagtagtgcaaccaacagcgcatctgaaacgcttgcc

SEQ ID NO: 279511 - DNA, 75 bp, synthetic construct
  source 1..75: mol_type = other DNA
tctaaatacagtgttaacacttcttctgcaggcgctcatacgcactctgtatcgggtactgctgcaagcgcaggt

SEQ ID NO: 279512 - DNA, 75 bp, synthetic construct
  source 1..75: mol_type = other DNA
gacggggggagcagcactgcgtgctggggctggtttagttcgagtattgacccgcagtgaaaatattgcgccact

SEQ ID NO: 279513 - DNA, 75 bp, synthetic construct
  source 1..75: mol_type = other DNA
gttgatatcccttccggcctgctggctgaaaccggcgctacgccaggcgcggtgatcaacgccgatcacaccatt

SEQ ID NO: 279514 - DNA, 75 bp, synthetic construct
  source 1..75: mol_type = other DNA
cggctggcaaaagcggtcggcattgaggtcacgctgctggcccaggaaagtgacaaatcgttaccggaagaggcc

SEQ ID NO: 279515 - DNA, 75 bp, synthetic construct
  source 1..75: mol_type = other DNA
cttttataccggtgtggggagttgccggactctccagattcgcgctcattacaagaatggcggtctgttttaccg

SEQ ID NO: 279516 - DNA, 75 bp, synthetic construct
  source 1..75: mol_type = other DNA
gtgcggtcgtcacaaaagatatcccggacaacgtcgtcgtgggcggcaacccagccagaatcattaaaaagctgt

SEQ ID NO: 279517 - DNA, 75 bp, synthetic construct
  source 1..75: mol_type = other DNA
gaaagatctgcgtgactgcctgctgatccaactctcccaattcgataaaactacgccgtggctggaagaggcgag

SEQ ID NO: 279518 - DNA, 75 bp, synthetic construct
  source 1..75: mol_type = other DNA
aaccgaaaagttaacggaaaagcactgactgcggatataacattaacgccgaaagatattggtactttaaattca

SEQ ID NO: 279519 - DNA, 75 bp, synthetic construct
  source 1..75: mol_type = other DNA
acaagcgagttccatcgtttacatcgcattgattggtggcgctggttacaacgtcggctccccacagcaggcagg

SEQ ID NO: 279520 - DNA, 75 bp, synthetic construct
  source 1..75: mol_type = other DNA
caggaacaggacggcattaaatcgcacacccacagcgccagcgtatccagtacggatttggggacgaaaaacaca

SEQ ID NO: 279521 - DNA, 75 bp, synthetic construct
  source 1..75: mol_type = other DNA
atgaagaaaaaccccgtaagtataccacacacagtctggtacgccgacgatatccgccgcggagaacgcgaggcg

SEQ ID NO: 279522 - DNA, 75 bp, synthetic construct
  source 1..75: mol_type = other DNA
atatgcgtggctggacgattaagggcaagcccgccagtgatcgagccgtattgtctcaggaacaggacggcatta

SEQ ID NO: 279523 - DNA, 75 bp, synthetic construct
  source 1..75: mol_type = other DNA
ccggacaggccgcgtcgtcggctcagtcagcgtcttccagcgcaggaacggcatcgacaaaggcccgtgaagcag

SEQ ID NO: 279524 - DNA, 75 bp, synthetic construct
  source 1..75: mol_type = other DNA
ggtaatggtattcgttggccaggaggcggcggttctgcgttagcattttatgatggcggtgggttcacttatgtc

SEQ ID NO: 279525 - DNA, 75 bp, synthetic construct
  source 1..75: mol_type = other DNA
ttatccttgattttaagagtgggcgtggtttttatgagtctcattcgttaatcgttaacgataacttgtcgtgca

SEQ ID NO: 279526 - DNA, 75 bp, synthetic construct
  source 1..75: mol_type = other DNA
gttatgccctgatgcaggggcagacttttgacaaatctgcatacccgaaacttgcagtcgcttatccgtcaggcg

SEQ ID NO: 279527 - DNA, 75 bp, synthetic construct
  source 1..75: mol_type = other DNA
tcccggcgctttcagccattgaagaagggtttgacgtctttgtcgtgactgacgcgtcagggacctttaatgaaa

SEQ ID NO: 279528 - DNA, 75 bp, synthetic construct
  source 1..75: mol_type = other DNA
cgaatgcggctgcgtcacaacaatcagcagccacttctgcatccaccgcgaccacgaaagcgtcagaagcagcca

SEQ ID NO: 279529 - DNA, 75 bp, synthetic construct
  source 1..75: mol_type = other DNA
tcgtcgtttgattacggaaccaaatccacgaataacaccggggcgcatacccatagtattagcgggaccgcaaat

SEQ ID NO: 279530 - DNA, 75 bp, synthetic construct
  source 1..75: mol_type = other DNA
cctcagccagagatgcgtcggcttcaaaagaggcggcaaaatcatcagaaacgagcgcagcctcgagcgccagta

SEQ ID NO: 279531 - DNA, 75 bp, synthetic construct
  source 1..75: mol_type = other DNA
tgatgcaagtacgacgaaaaaggggatagtacagctcagcagtgcgaccaacagcacatctgaaacgcttgccgc

SEQ ID NO: 279532 - DNA, 75 bp, synthetic construct
  source 1..75: mol_type = other DNA
cagcgccagcgcatccagtacggatttggggacgaaaaacacatcgtcgtttgattacggaaccaaatccacgaa

SEQ ID NO: 279533 - DNA, 75 bp, synthetic construct
  source 1..75: mol_type = other DNA
gcgcatgtggctgcttttgccagaagggcaacggatacatatgccgatgcggatggtggcgttccctggaatgcc

SEQ ID NO: 279534 - DNA, 75 bp, synthetic construct
  source 1..75: mol_type = other DNA
gctttgatccggttggcgtggcagcgaaagatctgcgtgactgtctgctgatccaactctcccaattcgacaaaa

SEQ ID NO: 279535 - DNA, 75 bp, synthetic construct
  source 1..75: mol_type = other DNA
tgtgataaagaatccacaccttcgttgaacatccagatagcagataacggaagcgtacatatcaatggcgttgca

SEQ ID NO: 279536 - DNA, 75 bp, synthetic construct
  source 1..75: mol_type = other DNA
tcccccttttaatggttggtttaacagtggcggggtcttactcgatctttaacgcaaaaccgtcgaagcctgact

SEQ ID NO: 279537 - DNA, 75 bp, synthetic construct
  source 1..75: mol_type = other DNA
cgatcacgccagtggtggcagttattcaggatggtgtctcagtggcatgttgatgtggttatcgttgagcggcgt

SEQ ID NO: 279538 - DNA, 75 bp, synthetic construct
  source 1..75: mol_type = other DNA
tgcatctctactgtgattgtcgccagtgtacaaatggtaaatatcagtcgccagacttcggtgagtatatcggta

SEQ ID NO: 279539 - DNA, 75 bp, synthetic construct
  source 1..75: mol_type = other DNA
aggatttacactatcaaatttcaagcatcttgccgatgatgaatcattaggcggtatgtggttttatcaaaagtg

SEQ ID NO: 279540 - DNA, 75 bp, synthetic construct
  source 1..75: mol_type = other DNA
tgatgatcttgatctaaacaattctcgccttgtacatacggcatcttacagcctggtgatttctgaaaccaaaac

SEQ ID NO: 279541 - DNA, 75 bp, synthetic construct
  source 1..75: mol_type = other DNA
tgaaaaagtgattgggatgaaattgtttgagcgcgtacgcggacgattacatcctaccgtgcaagggctgcggtt

SEQ ID NO: 279542 - DNA, 75 bp, synthetic construct
  source 1..75: mol_type = other DNA
ttcatcctgatgaccggcgaactggcagcgttaattcaaaacctgatcgaaggattgggcggcgaagcacaacgt

SEQ ID NO: 279543 - DNA, 75 bp, synthetic construct
  source 1..75: mol_type = other DNA
tgaagccgagctgaaatcgttgctggaagatggcggcgtgatccgcgcgaagaaacaagatctgaccagcgaaga

SEQ ID NO: 279544 - DNA, 75 bp, synthetic construct
  source 1..75: mol_type = other DNA
caatcacattgaagccggaaaagtggtgactaaactggcgctcgactggcagcagcgcattcagtttgtgatgtg

SEQ ID NO: 279545 - DNA, 75 bp, synthetic construct
  source 1..75: mol_type = other DNA
tggcgaataagcgccgacaaaacgcgtgcttttgcgccagggcataaaattttgaggagcaacaaaggagagtga

SEQ ID NO: 279546 - DNA, 75 bp, synthetic construct
  source 1..75: mol_type = other DNA
tcagatcattaccaacaatgccagttctgcgttttatatgaccgggattgatgtgtatccgaatgccggggtggt

SEQ ID NO: 279547 - DNA, 75 bp, synthetic construct
  source 1..75: mol_type = other DNA
tgtcatcctgttgttttttctcggtctgagtctggccgctaatgtccttgcctggttgcgaattgaagatctgga

SEQ ID NO: 279548 - DNA, 75 bp, synthetic construct
  source 1..75: mol_type = other DNA
atacaactcaaacttttctagatgagtctgactttgagtcggtatttactgctgttaaaagcaggttgcttgatc

SEQ ID NO: 279549 - DNA, 75 bp, synthetic construct
  source 1..75: mol_type = other DNA
atgcatgaatcgacgatatctcgcgtgaccacgcaaaaatacctgcatagtccacgaggcatttttgaactgaag

SEQ ID NO: 279550 - DNA, 75 bp, synthetic construct
  source 1..75: mol_type = other DNA
gcaaaccttgcaagattacctgatgtggcaggtcgaactgacgccgttttccgatactgaccgcgctatcgccac

SEQ ID NO: 279551 - DNA, 75 bp, synthetic construct
  source 1..75: mol_type = other DNA
actgggttacagggacgggatgacaactatccggtcatttaaggaactggtaaatgagaaagaaaaaccaacgaa

SEQ ID NO: 279552 - DNA, 75 bp, synthetic construct
  source 1..75: mol_type = other DNA
aaggggccagcggcgtgaacgacagcacgggtgtagcggagaaaaccgaacgcccgctggacgtggcgattcagg

SEQ ID NO: 279553 - DNA, 75 bp, synthetic construct
  source 1..75: mol_type = other DNA
tgagcggtgcttctcagaccctgtacgagcagcagattagcgccaacaacctggcgaacgtcaacaccaacggtt

SEQ ID NO: 279554 - DNA, 75 bp, synthetic construct
  source 1..75: mol_type = other DNA
atggctatttccgcaagttacaccatgcatctctactgtgattgttgccagtgtacaaatggtaaatatcaaacg

SEQ ID NO: 279555 - DNA, 75 bp, synthetic construct
  source 1..75: mol_type = other DNA
tatttgtagagggtgaaagtgagttggaagcttttggaaacatgaagatgactgaacatttccctcatttaagaa

SEQ ID NO: 279556 - DNA, 75 bp, synthetic construct
  source 1..75: mol_type = other DNA
ccaacttgttatcattcgatgagctaaatgttgataacttaaacgacttaaactgcattgtcggtcgcaataacg

SEQ ID NO: 279557 - DNA, 75 bp, synthetic construct
  source 1..75: mol_type = other DNA
tactcaagcaaatattcttaccctcatcacattttgacaatatatttagtgcagtcaaaaaaagactcttgtata

SEQ ID NO: 279558 - DNA, 75 bp, synthetic construct
  source 1..75: mol_type = other DNA
cgggaatgatcggtgaaagtcccgctgatataccaagcaatttagttccttatatattacaagttgctatgggta

SEQ ID NO: 279559 - DNA, 75 bp, synthetic construct
  source 1..75: mol_type = other DNA
gggacgttgaaattaatcaattgcgctataaaaaacgatgtggctaattttatttttagctcttctgcaacggtt

SEQ ID NO: 279560 - DNA, 75 bp, synthetic construct
  source 1..75: mol_type = other DNA
cgctactttaatccagtaggggctcacagatcaggaattattggcgaagatccagttggaataccaaataatcta

SEQ ID NO: 279561 - DNA, 75 bp, synthetic construct
  source 1..75: mol_type = other DNA
gcagaagcagacgataagtacgctggcaaccgtttcagcagggctggccggcggtcttaccggaaacagcactgc

SEQ ID NO: 279562 - DNA, 75 bp, synthetic construct
  source 1..75: mol_type = other DNA
caagtggataaccggtggctggaatcctaaattcgatccgactctactaaaatatactgaagttaaagggcagtt

SEQ ID NO: 279563 - DNA, 75 bp, synthetic construct
  source 1..75: mol_type = other DNA
ctggatatattggatctcatacaactgcagcattactcgaaaatggttatgacaatatagttgtcatagataacc

SEQ ID NO: 279564 - DNA, 75 bp, synthetic construct
  source 1..75: mol_type = other DNA
ttccattaaatgaaaaatgtaaagtaggtggtacaacaaatccttatggcacttcgaaattaatggcagaacaaa

SEQ ID NO: 279565 - DNA, 75 bp, synthetic construct
  source 1..75: mol_type = other DNA
tcctctacattattataatactaatgtttcagcaactttaaacttagtagaggcaatgctaaaaaatgatgtttg

SEQ ID NO: 279566 - DNA, 75 bp, synthetic construct
  source 1..75: mol_type = other DNA
tctgatcctaccaaagcgtatgaagaattaggatggaaagcaaggcgagggttagaagatatgattcgtgatgca

SEQ ID NO: 279567 - DNA, 75 bp, synthetic construct
  source 1..75: mol_type = other DNA
ttaatcttggcaccggcaatggtgtatcagttttacaagtaattgatgcctttgaaaaggcaagtgacaagaaag

SEQ ID NO: 279568 - DNA, 75 bp, synthetic construct
  source 1..75: mol_type = other DNA
cgttattttaaccctacaggcgcacatcctagtggtcttattggggaggacccgaacggcattccaaataatctt

SEQ ID NO: 279569 - DNA, 75 bp, synthetic construct
  source 1..75: mol_type = other DNA
atttgggaatgattatcctaccagggatggatatggagttcgggattttattcatgttatggatcttgccgatgg

SEQ ID NO: 279570 - DNA, 75 bp, synthetic construct
  source 1..75: mol_type = other DNA
ttgtcggccctgcgcttcaccggtgagtttccgaaaaagctgaccctggtcggcgtgatcccggaatcgctggag

SEQ ID NO: 279571 - DNA, 75 bp, synthetic construct
  source 1..75: mol_type = other DNA
caagtgcttgatgattccagccatcgcggggaacgctcgttggaagttatgtgccatccggcgtttgtcgataat

SEQ ID NO: 279572 - DNA, 75 bp, synthetic construct
  source 1..75: mol_type = other DNA
gtgttgacatcagcgtcgttgaaaggtgctatcgctcagcgtggttatcggttggggagttatcgggatgtgtaa

SEQ ID NO: 279573 - DNA, 75 bp, synthetic construct
  source 1..75: mol_type = other DNA
cttactgtttcccacggttaacggagctggaagtgctgacatcagcgtcgttgaaatatgcaattgctgagcgtg

SEQ ID NO: 279574 - DNA, 75 bp, synthetic construct
  source 1..75: mol_type = other DNA
atggctatcgagtgggggccggcagtaaagcctggaagggtagaaataacgatcagccgttttgaaactgtggcg

SEQ ID NO: 279575 - DNA, 75 bp, synthetic construct
  source 1..75: mol_type = other DNA
gataatcatggtgcaaaactgagcgaagaaggggaaatgctttaccagaatgccttggtgcttgatgaacaaata

SEQ ID NO: 279576 - DNA, 75 bp, synthetic construct
  source 1..75: mol_type = other DNA
cgtcactgcgagtacctgctgacccgtcgtctggatgctcagggtgattttttctggggctttacggaactctcc

SEQ ID NO: 279577 - DNA, 75 bp, synthetic construct
  source 1..75: mol_type = other DNA
gtgaacctcccacaagacggtatcaaattgcatcgcggtaacttcaccgctatcggtcagcagatccagccttat

SEQ ID NO: 279578 - DNA, 75 bp, synthetic construct
  source 1..75: mol_type = other DNA
ccccaacaaaggggcgcttgcaggtaagagcctgataagcgcggcggggcgaaaattccagagcgcagcgtgtgc

SEQ ID NO: 279579 - DNA, 75 bp, synthetic construct
  source 1..75: mol_type = other DNA
aaacgattacaggcatttaaattccagttaagacccggtggtcaacaggagcgtgaaatgaggcgcttcgcaggc

SEQ ID NO: 279580 - DNA, 75 bp, synthetic construct
  source 1..75: mol_type = other DNA
atgtggtacaccgaaatcagcgaatacctcatcagccggggtaagactttcgctacgccagagtgggtgaaggat

SEQ ID NO: 279581 - DNA, 75 bp, synthetic construct
  source 1..75: mol_type = other DNA
ttgccgaaaccaacgtcggcaccagcttcagtggagatcgtgttgtttcctccggataaccggcttcgcgatctg

SEQ ID NO: 279582 - DNA, 75 bp, synthetic construct
  source 1..75: mol_type = other DNA
ggtggacgacagccaggtgaaaagaatgctggtggagtgggggccggttatcccggaagggaaggtcgaaatcac

SEQ ID NO: 279583 - DNA, 75 bp, synthetic construct
  source 1..75: mol_type = other DNA
acaatttaggcacagggcatggttattcggttcttgaacttttggctgcttttcaacggataacctctgttaata

SEQ ID NO: 279584 - DNA, 75 bp, synthetic construct
  source 1..75: mol_type = other DNA
ccgcagttgtggctgaatgaaggcggtcagagcgcggcgggcgcgctggtggaatggacgctgcgccagcatgcg

SEQ ID NO: 279585 - DNA, 75 bp, synthetic construct
  source 1..75: mol_type = other DNA
tcatatctgaagaaagcgtatgtcgcacttcgtcattaacacctttgactgctgatctggcaggtacagtatgta

SEQ ID NO: 279586 - DNA, 75 bp, synthetic construct
  source 1..75: mol_type = other DNA
attgatgtcggagcaatgatacattgggaaaagcggccttatgacggcgacagagaacataacctatatcttaaa

SEQ ID NO: 279587 - DNA, 75 bp, synthetic construct
  source 1..75: mol_type = other DNA
tggaaatgcttcctgcccctatggtactactaaagtcatgctggagcaggttttatcagactacgcgaaatctga

SEQ ID NO: 279588 - DNA, 75 bp, synthetic construct
  source 1..75: mol_type = other DNA
aaaagctatcttggaaagcagaaaaaaaattaaaagaaatgatcgaagatgtatggcgttggcaaacaaataatc

SEQ ID NO: 279589 - DNA, 75 bp, synthetic construct
  source 1..75: mol_type = other DNA
ggcaacgaggtcgccagtacctgcaccttgacttgtaaatggaactacctggcccacgaacagcgttttagccag

SEQ ID NO: 279590 - DNA, 75 bp, synthetic construct
  source 1..75: mol_type = other DNA
ctgataagcccgtggtcgcaaagtatgacggtaaaagacgccgccatgcagtggggattctggcatcttgggcaa

SEQ ID NO: 279591 - DNA, 75 bp, synthetic construct
  source 1..75: mol_type = other DNA
catcaatccgctgtgcgtaaagtgcttggcgataacttgttgttggcgatgggagtgatgctggaagaagcgcag

SEQ ID NO: 279592 - DNA, 75 bp, synthetic construct
  source 1..75: mol_type = other DNA
gaatacaccggtctggcgctgcgtcagtcgtgcctggtctggccgaactcgttctggtttggcattccggcgacg

SEQ ID NO: 279593 - DNA, 75 bp, synthetic construct
  source 1..75: mol_type = other DNA
atggtcaaggtgataaatatcaacgggaatttagttgaattacctgagccctcagcaaagttatccaaagctgaa

SEQ ID NO: 279594 - DNA, 75 bp, synthetic construct
  source 1..75: mol_type = other DNA
gcatattaaaactggttctgtatcagacgaagcttttccatcatcggaggaagaacgacgaaagttactgatgac

SEQ ID NO: 279595 - DNA, 75 bp, synthetic construct
  source 1..75: mol_type = other DNA
acaaattttgccgactggatcactgagtttggtaaggctgctcggacaggtaactggcgtcctttttttgttaaa

SEQ ID NO: 279596 - DNA, 75 bp, synthetic construct
  source 1..75: mol_type = other DNA
taagttatctaagtttcgtaagtaaaggagtgggtcaatccacatcagcatattttattgcagcaataggatgcg

SEQ ID NO: 279597 - DNA, 75 bp, synthetic construct
  source 1..75: mol_type = other DNA
cctctgatttttgaaggtgatattagagacgttaatttactaaaaaaaatatttactgacaacaaaatatccgat

SEQ ID NO: 279598 - DNA, 75 bp, synthetic construct
  source 1..75: mol_type = other DNA
ttccgcttgatgagtcgtgtgatactggagatactacaaatccatatggaacttcaaaacattttttggagcaga

SEQ ID NO: 279599 - DNA, 75 bp, synthetic construct
  source 1..75: mol_type = other DNA
cgttatttcaatccggttggtgctcacccttcggggttattgggggagagcccaattggtatacctaataatctt

SEQ ID NO: 279600 - DNA, 75 bp, synthetic construct
  source 1..75: mol_type = other DNA
tgatgaactgctggaagtaaccgacctggtaatgctcgatctcaaacagatgaacgacgagatccaccaaaatct

SEQ ID NO: 279601 - DNA, 75 bp, synthetic construct
  source 1..75: mol_type = other DNA
gtgccgttgttgcgtgacgacgaaagtgatctcattctttgggaatcaaacgccattgtccgctatctggcggca

SEQ ID NO: 279602 - DNA, 75 bp, synthetic construct
  source 1..75: mol_type = other DNA
tggaaatgattatgacacaccggatggaactggtgtaagggacttcatccatgtaatggatcttgctacggggca

SEQ ID NO: 279603 - DNA, 75 bp, synthetic construct
  source 1..75: mol_type = other DNA
ttaacttaggaactgggacaggctattctgttcttgagttagttaatacttttgaagaagtgacaggaattaaga

SEQ ID NO: 279604 - DNA, 75 bp, synthetic construct
  source 1..75: mol_type = other DNA
ttaatcttggcaccggtatcggctattccgtactcgaccttgtgaacgcgttcgaaaaagcggcgcagacaaaaa

SEQ ID NO: 279605 - DNA, 75 bp, synthetic construct
  source 1..75: mol_type = other DNA
acgagtcgggaataatcggggaaaatcctgcagatataccaagcaatttagttccatatatattacaagttgcga

SEQ ID NO: 279606 - DNA, 75 bp, synthetic construct
  source 1..75: mol_type = other DNA
ataacctaggcacaggtaaaggatattcagtaaaagagattattgatgcctttcaaaaaataaccggaataaaaa

SEQ ID NO: 279607 - DNA, 75 bp, synthetic construct
  source 1..75: mol_type = other DNA
ataatctcgggacgggcacaggatactcagtactggaacttgttgatgcatttcaaagagttactgcacgtaaag

SEQ ID NO: 279608 - DNA, 75 bp, synthetic construct
  source 1..75: mol_type = other DNA
tacctttagatgaaaattgcagaattggaggtacaacgaatccatacggcacgtccaagttattcgtagaaaaat

SEQ ID NO: 279609 - DNA, 75 bp, synthetic construct
  source 1..75: mol_type = other DNA
gcttccctgagtgaatacaccactgagtttaaccgcctttctgccctcttctcgcaggagtggcaacgcgtaacg

SEQ ID NO: 279610 - DNA, 75 bp, synthetic construct
  source 1..75: mol_type = other DNA
gcggcaatgctggcgcatcgcactgctggcgggtgtgcctcgctgagtgaatacaccgctgaatttaaccgcctt

SEQ ID NO: 279611 - DNA, 75 bp, synthetic construct
  source 1..75: mol_type = other DNA
tcaccacaaaagcccattccagccaccgatgctttcctggctgaagtacgagcgcagggcgtggagatgtttgcg

SEQ ID NO: 279612 - DNA, 75 bp, synthetic construct
  source 1..75: mol_type = other DNA
ttgtgtgattattttctggaaaatacaagattttcagacatcacttattttatgcagtatatttctatgcttgtt

SEQ ID NO: 279613 - DNA, 75 bp, synthetic construct
  source 1..75: mol_type = other DNA
tacctcgatgaaggcgctgctggcgaagctgaaatcagaaacctttattctcgatctcgcaccgaaaagcccgtt

SEQ ID NO: 279614 - DNA, 75 bp, synthetic construct
  source 1..75: mol_type = other DNA
aatcaggcagggtactacggtgtggagcgcaaagaagcgtacatccgcagcgaaaagtatcttaaacagctcgat

SEQ ID NO: 279615 - DNA, 75 bp, synthetic construct
  source 1..75: mol_type = other DNA
ccgggaaattatccggtcgtgaaactgacaatgaagtatgaggcgatgcccaaagtggctgacgctctgctgttg

SEQ ID NO: 279616 - DNA, 75 bp, synthetic construct
  source 1..75: mol_type = other DNA
tccacgctggttgatggcaagattgagaagacagccatctctatccgcagcgtactgactaactatgtcaaggcg

SEQ ID NO: 279617 - DNA, 75 bp, synthetic construct
  source 1..75: mol_type = other DNA
aacatttcttgccggtacgccagcctccacgctggttgatggcaagattgagaagacagccatctctatccgcag

SEQ ID NO: 279618 - DNA, 75 bp, synthetic construct
  source 1..75: mol_type = other DNA
cttaaatatatgattacagtaatatttaccgtattggaccagaatgaaaaaaaatggaatcattcatcaattaaa

SEQ ID NO: 279619 - DNA, 75 bp, synthetic construct
  source 1..75: mol_type = other DNA
ctccagaataaggatgaggtgtttgagcgagggatgatcaacgtatttaggggactgggctgggattacaaaacc

SEQ ID NO: 279620 - DNA, 75 bp, synthetic construct
  source 1..75: mol_type = other DNA
tggagccagacatatcacaaaagaaaactggcagtaattggactgctggatgaccagtaccctttggctattttc

SEQ ID NO: 279621 - DNA, 75 bp, synthetic construct
  source 1..75: mol_type = other DNA
gcggaagagaacgggcgatctgttaactctgagatttacaagcgagtgatggacagcctgaagagagaggggata

SEQ ID NO: 279622 - DNA, 75 bp, synthetic construct
  source 1..75: mol_type = other DNA
gctgatccggttgatttccgtatctggagcgtacaagacaagtttaagaacgttgagctattcgcggaaagctct

SEQ ID NO: 279623 - DNA, 75 bp, synthetic construct
  source 1..75: mol_type = other DNA
gcgatgaacgcgcgactgaagagcgccgcgccggatattattgcggcgcgaaaatccgccacaacaacgcctgca

SEQ ID NO: 279624 - DNA, 75 bp, synthetic construct
  source 1..75: mol_type = other DNA
tcaaaaaatgagtgtggaaggtttacctgctgtgatgctgattgttgcggaaaacgatatcaatattatagtcag

SEQ ID NO: 279625 - DNA, 75 bp, synthetic construct
  source 1..75: mol_type = other DNA
tgcattgcgtaaagattttcctgttttatctcatcaacatgcaggtgtaccagactctccaaaaattctttgcct

SEQ ID NO: 279626 - DNA, 75 bp, synthetic construct
  source 1..75: mol_type = other DNA
agagaaagcaaaggaagagtgtcgctcatttagtgcagaagtaattaaacgggtgatggacagcctgaagagaga

SEQ ID NO: 279627 - DNA, 75 bp, synthetic construct
  source 1..75: mol_type = other DNA
ttttgccaaggcgtccaaacatgtcgccgcgctcaagaactcattggattactactatggatcgtctgtaatccc

SEQ ID NO: 279628 - DNA, 75 bp, synthetic construct
  source 1..75: mol_type = other DNA
atgcactttgtgacaagttggaaagcaaaaaagttgatgaagtcgtacgaaatcttgtttctagcggctggaata

SEQ ID NO: 279629 - DNA, 75 bp, synthetic construct
  source 1..75: mol_type = other DNA
ttacgtttatctgaacggtacgcgactgcttgtggaacttccgtaccagaccgtacgagaaatcattagcgaagc

SEQ ID NO: 279630 - DNA, 75 bp, synthetic construct
  source 1..75: mol_type = other DNA
cttgccagcaagctgggtctggatgccttcgtgctgtttaaaaatccacgcatggccatctttttcctctttgcc

SEQ ID NO: 279631 - DNA, 75 bp, synthetic construct
  source 1..75: mol_type = other DNA
tgcagaacgtgcatacatgctgtgtcacctggtgtgtgcgggcgtacttttttatgcggcatccgtaactgatcc

SEQ ID NO: 279632 - DNA, 75 bp, synthetic construct
  source 1..75: mol_type = other DNA
gggcacgtctggtgcaggaagggaaccggttgcattaccttgcagaccgcgccggtatcagaggccggttcagcg

SEQ ID NO: 279633 - DNA, 75 bp, synthetic construct
  source 1..75: mol_type = other DNA
tcgaatacacctcctccttctgccgacctggtggctgctgtcctcgcggaagcgaacacgcctcctgagatgtgg

SEQ ID NO: 279634 - DNA, 75 bp, synthetic construct
  source 1..75: mol_type = other DNA
ggttggccgctggcaacctgggggatgaattactcaggttttaaaataccggaagcgaaaggggaaatcgtcgcc

SEQ ID NO: 279635 - DNA, 75 bp, synthetic construct
  source 1..75: mol_type = other DNA
aactttctagataatcaggaaaaaggcggcggtactatgggcggtgatactattatcaatgccccattatatgta

SEQ ID NO: 279636 - DNA, 75 bp, synthetic construct
  source 1..75: mol_type = other DNA
caacagttaacacctattaccggtcacctgaccgtggagcgttaaagggtaagcatctgatcagtgagatgggta

SEQ ID NO: 279637 - DNA, 75 bp, synthetic construct
  source 1..75: mol_type = other DNA
acagtccggtatgtcggtatcacaactacagaagctacagaaggcattctatcaaactggtattggtgccgaagg

SEQ ID NO: 279638 - DNA, 75 bp, synthetic construct
  source 1..75: mol_type = other DNA
gtactaatgaacgtcaattagcagagtttgaccgtcaacaaaaagaaatagtagaaactatcaaaaagagtgcaa

SEQ ID NO: 279639 - DNA, 75 bp, synthetic construct
  source 1..75: mol_type = other DNA
aattatttattggcgcgctgaaagataaagatgtcatcgtgatgagcgtcaacggcgacaaagtgacagaagatg

SEQ ID NO: 279640 - DNA, 75 bp, synthetic construct
  source 1..75: mol_type = other DNA
atgaagctgatcttgcctttcccgcccagcgtgaacacgtactggcgacaccccaacaaaggggtgtttgctggt

SEQ ID NO: 279641 - DNA, 75 bp, synthetic construct
  source 1..75: mol_type = other DNA
atgaagctgatcatgcctttcccgcccagcgtgaacacgtactggcgacaccccaacaaaggggggtttgctggt

SEQ ID NO: 279642 - DNA, 75 bp, synthetic construct
  source 1..75: mol_type = other DNA
gacaactataacaaggcgctgtttgacgccctgacccacgcgggggtgtgggacataagcgctaacttaagggtt

SEQ ID NO: 279643 - DNA, 75 bp, synthetic construct
  source 1..75: mol_type = other DNA
ggaagacgacagtcaggtgaaaagaatgctggtggagtggggaccggttatcccggaggggaaggtcgagatcac

SEQ ID NO: 279644 - DNA, 75 bp, synthetic construct
  source 1..75: mol_type = other DNA
atgaagctgatcgtgcctttcccgcccagcgtgaacacgtactggcgacaccccaacaaaggggagtttgctggt

SEQ ID NO: 279645 - DNA, 75 bp, synthetic construct
  source 1..75: mol_type = other DNA
atgaagctgatcgtgcctttcccacccagcgtgaacacgtactggcgacaccccaacaaaggggggtttgctggt

SEQ ID NO: 279646 - DNA, 75 bp, synthetic construct
  source 1..75: mol_type = other DNA
aaagagaagcaatcctccgccagaatgatttactaattcaggacaaggaatcatttgaaaaacgtaaagcagcta

SEQ ID NO: 279647 - DNA, 75 bp, synthetic construct
  source 1..75: mol_type = other DNA
gcgatgcagataccgaaaacacggcgtccacagcagttggcgctgaaggtggctcagcttccaccggagggactg

SEQ ID NO: 279648 - DNA, 75 bp, synthetic construct
  source 1..75: mol_type = other DNA
tcgccttcacctggcgaaaaattacaacgcgcagcaaaacaactcgaggtgttttccgggataactagtgattga

SEQ ID NO: 279649 - DNA, 75 bp, synthetic construct
  source 1..75: mol_type = other DNA
ttgtcttgcattcataacagttataagatatatgctttcatatttttataaaagattaaaacaactgtccagtaa

SEQ ID NO: 279650 - DNA, 75 bp, synthetic construct
  source 1..75: mol_type = other DNA
tctgccggccgggtggctgctgttcttgcggaaacgaacacacctcctgagacgcgcacattacagacagaaaac

SEQ ID NO: 279651 - DNA, 75 bp, synthetic construct
  source 1..75: mol_type = other DNA
atgcgttatctgcagggtatcgacaggcccggacgcgaaaagtttaccatccgggaatggatgaagggccaggcc

SEQ ID NO: 279652 - DNA, 75 bp, synthetic construct
  source 1..75: mol_type = other DNA
tatctacgacaagggctgtacgttcattgaggatttctacgatgaatcccgggataaagtgcttaatgcgctgga

SEQ ID NO: 279653 - DNA, 75 bp, synthetic construct
  source 1..75: mol_type = other DNA
cagtgacctggcaagcggaaagggaagcatctcaaaagcgatgatgcgatggaacactaacaggagaactggtta

SEQ ID NO: 279654 - DNA, 75 bp, synthetic construct
  source 1..75: mol_type = other DNA
ttacaaaaagtccgatgcacagatgggcgactggcaaagcgggattatggatgcgttgaatgattacgctgataa

SEQ ID NO: 279655 - DNA, 75 bp, synthetic construct
  source 1..75: mol_type = other DNA
atacgcatcgacagcggcaattcctatcgttggtcccgcgcttgcacctgcagcgatggcaacagctgcggcagt

SEQ ID NO: 279656 - DNA, 75 bp, synthetic construct
  source 1..75: mol_type = other DNA
tccgctcaggctggcgtggcatttgcgacagctcgccgctggaagaaggaagcacaggacgcaggcgatgactgg

SEQ ID NO: 279657 - DNA, 75 bp, synthetic construct
  source 1..75: mol_type = other DNA
gatcagcaaccgtgatcacattctggaaccctctgccggcaccggggccatactgcgggcgattcgggataccgc

SEQ ID NO: 279658 - DNA, 75 bp, synthetic construct
  source 1..75: mol_type = other DNA
atatttttataattcaagcaattaagagtatgtgttggcggggtttttcgtacgtgaaagtcatcgctgtggacg

SEQ ID NO: 279659 - DNA, 75 bp, synthetic construct
  source 1..75: mol_type = other DNA
gggatgcggtgctggatattggtcgcccggacactgcccagggaatgctggagaaagcagaggctttgcggacaa

SEQ ID NO: 279660 - DNA, 75 bp, synthetic construct
  source 1..75: mol_type = other DNA
gcaaactgcaagccatcagacttaaagctcgcgctcactctcattgcagacctagggaaggtgcgaataagcggg

SEQ ID NO: 279661 - DNA, 75 bp, synthetic construct
  source 1..75: mol_type = other DNA
aaaccgatccggcttggggctgcatctgtcggctggcgctctacctctgtagacgagtggctcgcttcccgaaca

SEQ ID NO: 279662 - DNA, 75 bp, synthetic construct
  source 1..75: mol_type = other DNA
tgtcgccgctggataaatataccgcccggcagaaagagctgaatcaggccctgaaagacgggaaaatcctgcagg

SEQ ID NO: 279663 - DNA, 75 bp, synthetic construct
  source 1..75: mol_type = other DNA
tgttttttgacttagatggaacattgcatcaacaggatatgtttggcagttttctgcgctacttactgcgccgac

SEQ ID NO: 279664 - DNA, 75 bp, synthetic construct
  source 1..75: mol_type = other DNA
tttctgcgctatttactacgtcgccaaccgctgaatgcgttacttgtcctgccgttgttaccgattatagccatt

SEQ ID NO: 279665 - DNA, 75 bp, synthetic construct
  source 1..75: mol_type = other DNA
atggcatttaagatctggcaaattggtttgcatttacaacagcaagaagcggtagcggttgcgatcgtgcggggc

SEQ ID NO: 279666 - DNA, 75 bp, synthetic construct
  source 1..75: mol_type = other DNA
tgttttttgacttagatggaacgctgcatcaacaagatatgttcggcagttttctgcgctatttattgcgtcgtc

SEQ ID NO: 279667 - DNA, 75 bp, synthetic construct
  source 1..75: mol_type = other DNA
ttgcggataaacaggcgggccagaaaaacgcacttacattgcaggaacaatccctgctggcccatgagaaagaga

SEQ ID NO: 279668 - DNA, 75 bp, synthetic construct
  source 1..75: mol_type = other DNA
gcgcttgaaaccgagctccggacgctggagaagcacagcggagcgaatgagaaaatcagccagcagcgccgggat

SEQ ID NO: 279669 - DNA, 75 bp, synthetic construct
  source 1..75: mol_type = other DNA
cgccaggagaacgccgcgcgtaaggccggtatttcagtgggtcagtataacgcagcgatgcgtatgctcccggcg

SEQ ID NO: 279670 - DNA, 75 bp, synthetic construct
  source 1..75: mol_type = other DNA
gctgcggcggcgaactttcattttgcgaccggcggatttacggggacgggcggcaaatatgagcctgcggggata

SEQ ID NO: 279671 - DNA, 75 bp, synthetic construct
  source 1..75: mol_type = other DNA
gcggtgccggaagtccggcgcagatgcggcggacggaaggcattaattttaatcagaacaatcacgtggtgattc

SEQ ID NO: 279672 - DNA, 75 bp, synthetic construct
  source 1..75: mol_type = other DNA
ttgcattgcaggaaaaatccctgctggttcatgagaaagaaacgctggagtacaaacgccagctggctgagctgg

SEQ ID NO: 279673 - DNA, 75 bp, synthetic construct
  source 1..75: mol_type = other DNA
tcagcttgccggtggtcagagtccgtggttgatcctgctgcagcagggcgggcagattaaggactcctttggtgg

SEQ ID NO: 279674 - DNA, 75 bp, synthetic construct
  source 1..75: mol_type = other DNA
ggtctgtcccggtcaactatctatgaaaagctaaatcccgaatccaggtattacgacgaaacgtttccaaaaccc

SEQ ID NO: 279675 - DNA, 75 bp, synthetic construct
  source 1..75: mol_type = other DNA
tcggtggcaccggaagtccggcgcaaatgcggcgttcagagggtatcagatttgagcagaacaacaacgtggtga

SEQ ID NO: 279676 - DNA, 75 bp, synthetic construct
  source 1..75: mol_type = other DNA
ggctggagtgagtgggaagagagtgccacggacagtatgtcgcaggttaaaagtgctgccacgcagacctttgat

SEQ ID NO: 279677 - DNA, 75 bp, synthetic construct
  source 1..75: mol_type = other DNA
atggcatttaagatctggcaaattggtttgcatttacaacagcaagaagcggtagcgatcgtgcggggcgcaaaa

SEQ ID NO: 279678 - DNA, 75 bp, synthetic construct
  source 1..75: mol_type = other DNA
cttacaggcggcgaacgatatcgccacgaaaggctttgatgagcagacccgtcgcctgaaagaaaacatggggac

SEQ ID NO: 279679 - DNA, 75 bp, synthetic construct
  source 1..75: mol_type = other DNA
cggatatcgccacgcagcttgccggtggtcagaatccctggctgattcctgctgcaacagggcggtcaggtgaag

SEQ ID NO: 279680 - DNA, 75 bp, synthetic construct
  source 1..75: mol_type = other DNA
aattggaagtcattggattatgttgcaggttggtttatgaaggctgtcgactacggtagtcaaactaactcgtct

SEQ ID NO: 279681 - DNA, 75 bp, synthetic construct
  source 1..75: mol_type = other DNA
caataacattcacattttggctagtaaagaagggcaagtaacacaaatgctggcttcactcaaggccagcccagc

SEQ ID NO: 279682 - DNA, 75 bp, synthetic construct
  source 1..75: mol_type = other DNA
tgggtgaatacatcaggtgatacctatgacatttatgtagaaataggtaattacgccacaggtgttaatattcag

SEQ ID NO: 279683 - DNA, 75 bp, synthetic construct
  source 1..75: mol_type = other DNA
gacgctggagacctgggcggataaaacagggaaggcattcaaatcgatgtgggatgccattctggatatcggtcg

SEQ ID NO: 279684 - DNA, 75 bp, synthetic construct
  source 1..75: mol_type = other DNA
aacggctgaatgagctggcacagcaggctgcgcggtttgagcagcagggcgcgaagcaggcggcaatcagtgccc

SEQ ID NO: 279685 - DNA, 75 bp, synthetic construct
  source 1..75: mol_type = other DNA
tgagccgtcaggcgctggctgcacaaaaagccgggatttccgtcgggcagtataaagcggccatgcgtaccctgc

SEQ ID NO: 279686 - DNA, 75 bp, synthetic construct
  source 1..75: mol_type = other DNA
tacatcttgttctgcacgatatatcaggcaatccgatcaaagtttctgaagggctggaatttgtgcaatcaggta

SEQ ID NO: 279687 - DNA, 75 bp, synthetic construct
  source 1..75: mol_type = other DNA
gttggatttactaattttgcatgggtgaatacatccagtgatacctatgatgtttatgttgaaataggtaattac

SEQ ID NO: 279688 - DNA, 75 bp, synthetic construct
  source 1..75: mol_type = other DNA
cagctcagtagcgccaccaacagtgattcggaaacgctggccgcaacaccaaaagcggtgaagtctgcctatgac

SEQ ID NO: 279689 - DNA, 75 bp, synthetic construct
  source 1..75: mol_type = other DNA
tttcgcgaaatgtatcacggtggcaagcacacgctgattctaccgggggtttcatcggaagggcgcgagtatctt

SEQ ID NO: 279690 - DNA, 75 bp, synthetic construct
  source 1..75: mol_type = other DNA
ttgatcccgaaagcgtcgcgatatgtggcgaaggcggatttgatccctgggaggccgtttctgttcgtcagccgc

SEQ ID NO: 279691 - DNA, 75 bp, synthetic construct
  source 1..75: mol_type = other DNA
tcattgaaggcttccgcgagaaagggatggatatgtatggcccagtaccgggtgatactgtttttattcatgcat

SEQ ID NO: 279692 - DNA, 75 bp, synthetic construct
  source 1..75: mol_type = other DNA
ttggataaaccacgtggcctgttgaatgtccttgatgacctctgggtttttcgcgtgacgggacatattccattc

SEQ ID NO: 279693 - DNA, 75 bp, synthetic construct
  source 1..75: mol_type = other DNA
tccctgcgcttcgattacagcgaagactcactcagccccgcctataacgtgactgccgcgcaaagcaaagagctg

SEQ ID NO: 279694 - DNA, 75 bp, synthetic construct
  source 1..75: mol_type = other DNA
ctgtgcgtcagccgccgctaccgccgccaggtggagatttcgctatcgcgctggggctggcgcttggagaggggt

SEQ ID NO: 279695 - DNA, 75 bp, synthetic construct
  source 1..75: mol_type = other DNA
ccgcgacgttagccattaattctgaaagtctcgcgatatgcggcgaaggcggatttgacccctggaatgcggttt

SEQ ID NO: 279696 - DNA, 75 bp, synthetic construct
  source 1..75: mol_type = other DNA
ttccgccaggtcagagaggcgcatcggcgcgagcttattgatgattacgttgagctgatttctgacttgatcagg

SEQ ID NO: 279697 - DNA, 75 bp, synthetic construct
  source 1..75: mol_type = other DNA
gtttccagcagtctcagcgcagatcaataaagtcaaagaatggcgcttaaagagcgagcggcaggcaacgcgttc

SEQ ID NO: 279698 - DNA, 75 bp, synthetic construct
  source 1..75: mol_type = other DNA
ggtggtttcagacgatatcctgcaaactccacttgatcaagctgaaatcgagtttgaacatgaaggcagcgaaac

SEQ ID NO: 279699 - DNA, 75 bp, synthetic construct
  source 1..75: mol_type = other DNA
acaggagaatcactggtaacctgtatgtcattacttaaatcaggtaaaattgacggttttgttttcgctccactc

SEQ ID NO: 279700 - DNA, 75 bp, synthetic construct
  source 1..75: mol_type = other DNA
tttttttaggtgaagctgccggcattggacctgaactggttgccaaagtcgtagctgatggtactgtctataaat

SEQ ID NO: 279701 - DNA, 75 bp, synthetic construct
  source 1..75: mol_type = other DNA
ttgaaatgatcccctggcgtggcgtgtttttaacggcagaaggagagaagctggcgcaggaaagccgcgagcgac

SEQ ID NO: 279702 - DNA, 75 bp, synthetic construct
  source 1..75: mol_type = other DNA
cgtgtacggtgataatccggctgcgctggcgaaggccacatctgcactgaagaacacctggtctgcggaggagca

SEQ ID NO: 279703 - DNA, 75 bp, synthetic construct
  source 1..75: mol_type = other DNA
agtttttcgcaggttaaaagtgctgccacgcagacctttgacggtattgcacagaatatgacggcgatgctgacc

SEQ ID NO: 279704 - DNA, 75 bp, synthetic construct
  source 1..75: mol_type = other DNA
ggagtacaaacgccagctggctgagctgggagacaaagttgaacaccagaaacggctgaatgagctggcacagca

SEQ ID NO: 279705 - DNA, 75 bp, synthetic construct
  source 1..75: mol_type = other DNA
agccgaagtcgtcaggagtcaaagtgtcagccggtgagcgtcaggaagaccaggcgcatgctgccctgctggcgc

SEQ ID NO: 279706 - DNA, 75 bp, synthetic construct
  source 1..75: mol_type = other DNA
cgtgaaattcaactaccttgggttgtgtcttatgacaatgtgcctgaaataaaaagcatatatcatgaattcaac

SEQ ID NO: 279707 - DNA, 75 bp, synthetic construct
  source 1..75: mol_type = other DNA
aaattttttggttttgatatggataacgaattcatcagtggttttgatgtaggagcatggggagtattactctga

SEQ ID NO: 279708 - DNA, 75 bp, synthetic construct
  source 1..75: mol_type = other DNA
tgctggcccatgagcaagagacgctggagtacaaacgccagctggctgacctgggtgacaaggttgaacaccaga

SEQ ID NO: 279709 - DNA, 75 bp, synthetic construct
  source 1..75: mol_type = other DNA
ggtgccggaagtccggcgcagatgcggcgggcggaaggcattagttttaatcagaacaatcacgtggtgattcag

SEQ ID NO: 279710 - DNA, 75 bp, synthetic construct
  source 1..75: mol_type = other DNA
tgaatgagctggcacagcaggcggcgcggtttgaacagcagcagagcgcgaagcaggcggcaatcagcgcaaaag

SEQ ID NO: 279711 - DNA, 75 bp, synthetic construct
  source 1..75: mol_type = other DNA
tattgcacagaatatggcggcaatgctgaccggcagtgagcaggactggcgcggtttcacccgttccgtgctctc

SEQ ID NO: 279712 - DNA, 75 bp, synthetic construct
  source 1..75: mol_type = other DNA
ccgggccgaacgggacgcatcacagctgaagtataccgaagaggcgcagaaggcttacgaacggctgcagacgcc

SEQ ID NO: 279713 - DNA, 75 bp, synthetic construct
  source 1..75: mol_type = other DNA
cgggcaattatcaaaacgttgctgatgggtgacgatccgagttcggtcgatctctattccgacgttgatgatatt

SEQ ID NO: 279714 - DNA, 75 bp, synthetic construct
  source 1..75: mol_type = other DNA
gcaatttgcccacaatattgagaacatctggggattcaaagaggtggtgatcgccggtcctaaggactacgtgaa

SEQ ID NO: 279715 - DNA, 75 bp, synthetic construct
  source 1..75: mol_type = other DNA
tgccgctattataaatactatgacgccgggcgatgtttatcagacactgaccacacgtcacccttctgcggaatc

SEQ ID NO: 279716 - DNA, 75 bp, synthetic construct
  source 1..75: mol_type = other DNA
aaatgctgaataaggcacagcaggcattcgatgaggcggataaaaaatggcaatggtatcagagtcgcagtaacc

SEQ ID NO: 279717 - DNA, 75 bp, synthetic construct
  source 1..75: mol_type = other DNA
accagccggattggcgtcggcaacctgtaccgcctgatgcggggctatgcggaaggtggttatgtgggcggtgcc

SEQ ID NO: 279718 - DNA, 75 bp, synthetic construct
  source 1..75: mol_type = other DNA
ctcatgagaaagagacgctggagtacaaacgccagctggctgagctgggagacaagattgaacaccagaagcggc

SEQ ID NO: 279719 - DNA, 75 bp, synthetic construct
  source 1..75: mol_type = other DNA
gccacgctgcagtcggatatggaaaaagccggtgaactggccaccagggaccgggccgaacgggacgcatcacag

SEQ ID NO: 279720 - DNA, 75 bp, synthetic construct
  source 1..75: mol_type = other DNA
tggtgaacagtttgatgccatcaaccagagtgtcgcgcgttttgcgtctgcatccggtgtggaggtggataaagt

SEQ ID NO: 279721 - DNA, 75 bp, synthetic construct
  source 1..75: mol_type = other DNA
tcattcttaaagcgaagattgcgattaataactgggacggacggaatgattcgcttccagcaattcttgacgctg

SEQ ID NO: 279722 - DNA, 75 bp, synthetic construct
  source 1..75: mol_type = other DNA
cgcggctatgcggaaggtggttatgtgggcggtgccggaagtccggcgcagatgcggcgggcggaaggcattaat

SEQ ID NO: 279723 - DNA, 75 bp, synthetic construct
  source 1..75: mol_type = other DNA
cgccaatggtaaccatatcacgtttgtcagccacggtgagacgacgttactgacggagcagggcaaactgaaatt

SEQ ID NO: 279724 - DNA, 75 bp, synthetic construct
  source 1..75: mol_type = other DNA
ggaacaaaattctttgggtttgatatggataacgaatacatcgccgggttcgatgacggcgcatgggggagatta

SEQ ID NO: 279725 - DNA, 75 bp, synthetic construct
  source 1..75: mol_type = other DNA
ggctctaaattctttggcttcgacatggacaacgaatatatcgccggatttgatgatggcgcatgggggaaatta

SEQ ID NO: 279726 - DNA, 75 bp, synthetic construct
  source 1..75: mol_type = other DNA
ttattgacctgagtctggatgcggtccgtttcgatgagcagatgacccgcgtaaggcgtcatttctcagggctgg

SEQ ID NO: 279727 - DNA, 75 bp, synthetic construct
  source 1..75: mol_type = other DNA
gaaatttgcacagcagcagcgggcaaaacaggctgccatcagtgcaaggggcagggggctgacagacaggcaggc

SEQ ID NO: 279728 - DNA, 75 bp, synthetic construct
  source 1..75: mol_type = other DNA
gaagaaaatcacagcggagaagagtacgacggcagtaaaacccggcgtacttaatgggcgctatcgtgtgacgtt

SEQ ID NO: 279729 - DNA, 75 bp, synthetic construct
  source 1..75: mol_type = other DNA
atcgcaaggcgggaaaaagcgttttgcctgtctcttttaaacatctccgagaacaggagagtagtgcgtattttc

SEQ ID NO: 279730 - DNA, 75 bp, synthetic construct
  source 1..75: mol_type = other DNA
gatcttgtgctttgcgatgtgcgaatggcagagatggatggtatcgccacgctcaaagagatcaaagcgttaaat

SEQ ID NO: 279731 - DNA, 75 bp, synthetic construct
  source 1..75: mol_type = other DNA
atttcgacaccctgcaggcgacgctggaaaaggcgctcgcgcatacgcacagtattgatgctgaaacgcctgcgg

SEQ ID NO: 279732 - DNA, 75 bp, synthetic construct
  source 1..75: mol_type = other DNA
ggatcggacgtagccgtgttgtcagccagcctatctcaggtgtttatttcagctgggataccgacgggcttggat

SEQ ID NO: 279733 - DNA, 75 bp, synthetic construct
  source 1..75: mol_type = other DNA
tgccatttgtgtcggtgcggcactgattgtgctggaaggttttttaccttctaaagcgaaaaacaataataaacc

SEQ ID NO: 279734 - DNA, 75 bp, synthetic construct
  source 1..75: mol_type = other DNA
gatcttgtgctttgcgatgtgcgaatggcggagatggacggcatcgccacgctgaaagagatcaaagcgttaaat

SEQ ID NO: 279735 - DNA, 75 bp, synthetic construct
  source 1..75: mol_type = other DNA
ctgctggctctggcctgaagatgcagatcgtcgacaaccaggacatgacgatatcggtctgggtgttccctgaga

SEQ ID NO: 279736 - DNA, 75 bp, synthetic construct
  source 1..75: mol_type = other DNA
gcggactctattttgcgccgcaacggctgcatattggcgcggatgcatggcggcaatactggcaacagcgtcagg

SEQ ID NO: 279737 - DNA, 75 bp, synthetic construct
  source 1..75: mol_type = other DNA
gatcggcagcagaaacggctgtttattcgtaacttctttacgcttcaggatcggctggatttaacccatgagtat

SEQ ID NO: 279738 - DNA, 75 bp, synthetic construct
  source 1..75: mol_type = other DNA
gtatgatccggattcaggttatacgtcgctgagcgatgacacctaccgcatcattctgaaagcaaaaatcgctat

SEQ ID NO: 279739 - DNA, 75 bp, synthetic construct
  source 1..75: mol_type = other DNA
ccaactaccacgccaccagaccgaaatactttgatcacatcgacctgagcacccggccgctgattgacatcacat

SEQ ID NO: 279740 - DNA, 75 bp, synthetic construct
  source 1..75: mol_type = other DNA
tatctcaccgttaaatcagctggcgtatgggccggtgatgttgaaacgccttcggtagaaacaccgtcagaaggc

SEQ ID NO: 279741 - DNA, 75 bp, synthetic construct
  source 1..75: mol_type = other DNA
tatggttggtcaggatttgtgggtttcctttatgcagcttctgccttatatgctgcaaaccggtatcctgatcct

SEQ ID NO: 279742 - DNA, 75 bp, synthetic construct
  source 1..75: mol_type = other DNA
acggcgttgatgggcttcctgcaactgcttattggtcgcgataaatacagtatttccgcttcaaccgttggcgat

SEQ ID NO: 279743 - DNA, 75 bp, synthetic construct
  source 1..75: mol_type = other DNA
cttcgtcgtcagcgcgttccttggctgggaagtggtgtggaattcaccgcagcgtgatgatgactccacttcctg

SEQ ID NO: 279744 - DNA, 75 bp, synthetic construct
  source 1..75: mol_type = other DNA
aacaaagcgatccggcacggcggactccgggctggttacggcagttaaaacgtctgcgcaaaatacgtgaaccgc

SEQ ID NO: 279745 - DNA, 75 bp, synthetic construct
  source 1..75: mol_type = other DNA
tcattgactgggagtatgccggtgatggcgatatcgcgctggaactggcggcggtgtgggtggaaaatactcacc

SEQ ID NO: 279746 - DNA, 75 bp, synthetic construct
  source 1..75: mol_type = other DNA
cttccattttgcgaccggcggatttacgggcacgggcggcaaatatgagcctgcggggatagttcaccgcgggga

SEQ ID NO: 279747 - DNA, 75 bp, synthetic construct
  source 1..75: mol_type = other DNA
aaaaggaacgtgaacggaaagcaaatcagtggttgcagcagcagattcttgcagaacattgccgtcgccacggta

SEQ ID NO: 279748 - DNA, 75 bp, synthetic construct
  source 1..75: mol_type = other DNA
caaggtatcgtcgcccggataagatagtttcatatcgagaaagatgttttccacttttccccggttatctttttg

SEQ ID NO: 279749 - DNA, 75 bp, synthetic construct
  source 1..75: mol_type = other DNA
gaatatccacaaggagaaattacctattacaaatatcttcctaagaacggctggaaactgcctgcaggctatacc

SEQ ID NO: 279750 - DNA, 75 bp, synthetic construct
  source 1..75: mol_type = other DNA
atgcccatctccgcaagcgagaaagcggcattgccgaagactgatatccgcgccgttcatcaggcgctggatgcc

SEQ ID NO: 279751 - DNA, 75 bp, synthetic construct
  source 1..75: mol_type = other DNA
cgaaagagtatggcggcttctggcgcgtgacgttatcgttgttgttagaagtgctgttctccgtgttgttggcac

SEQ ID NO: 279752 - DNA, 75 bp, synthetic construct
  source 1..75: mol_type = other DNA
ccacgacaagatttgcagccgttttcaaacatctcgaacggcttaacttctcctactactgccctatggctactg

SEQ ID NO: 279753 - DNA, 75 bp, synthetic construct
  source 1..75: mol_type = other DNA
tatcattttgtcgaactatatattactggggatggggcataaaaaaatattttcacgtataccgatgattacagc

SEQ ID NO: 279754 - DNA, 75 bp, synthetic construct
  source 1..75: mol_type = other DNA
attcatgtatgtcttgatgcaacaggcagctatggtacagctctcgctacttttctgtacgaaaagaatctgaaa

SEQ ID NO: 279755 - DNA, 75 bp, synthetic construct
  source 1..75: mol_type = other DNA
agtgaccgtttttctgggactcaatccccgccatcatcagtccggaacgtcggttcggggtaaaactcgcatgtc

SEQ ID NO: 279756 - DNA, 75 bp, synthetic construct
  source 1..75: mol_type = other DNA
gaattgctgaaaactcttaaattaaacggaatatttgcttcaaaactgcatcagttgaatagctgttatacgggc

SEQ ID NO: 279757 - DNA, 75 bp, synthetic construct
  source 1..75: mol_type = other DNA
taatttcatgcaaggctactggattagtcgcccgttaccgctggacgattttgtccgctggctgaagaaaccgta

SEQ ID NO: 279758 - DNA, 75 bp, synthetic construct
  source 1..75: mol_type = other DNA
gcgcctcgctgggcgcgcgtgaacgggtcgtggtggtcgatgtggacgatgcgcggctggtgctcggcgttaccg

SEQ ID NO: 279759 - DNA, 75 bp, synthetic construct
  source 1..75: mol_type = other DNA
ctgctgcctggctggtaaaacggctgggatttgcccctaaacgcactggcgttaacggtctgaaaattagcgcca

SEQ ID NO: 279760 - DNA, 75 bp, synthetic construct
  source 1..75: mol_type = other DNA
cgtcacagctgaagtataccggagaggcacagaaggcgtatgaacggatgctgtcgccgctggataaatataccg

SEQ ID NO: 279761 - DNA, 75 bp, synthetic construct
  source 1..75: mol_type = other DNA
gccacgaaaggctttgatgagcagacccgccgcctgaaagagaacatggggacgctggaaacctgggcggataaa

SEQ ID NO: 279762 - DNA, 75 bp, synthetic construct
  source 1..75: mol_type = other DNA
actcccgcgaggagtacctggcctttctcggagaagaagcagaacgggacatcccctatgatccggagcctgtcg

SEQ ID NO: 279763 - DNA, 75 bp, synthetic construct
  source 1..75: mol_type = other DNA
gccagttatctgagcaggaaaaatccctgctggcccatgagcaagagacgcttgagtacaaacgccagctggctg

SEQ ID NO: 279764 - DNA, 75 bp, synthetic construct
  source 1..75: mol_type = other DNA
gtgtctgccggtgagcgccaggaagaccgggcacatgcagccctgctggcgcttgaaaccgagctcaggacgctg

SEQ ID NO: 279765 - DNA, 75 bp, synthetic construct
  source 1..75: mol_type = other DNA
tggtggatggatcagtacactgtttggttttggcaaagtcgatggcttcaactttggtagttttgtggttgccgt

SEQ ID NO: 279766 - DNA, 75 bp, synthetic construct
  source 1..75: mol_type = other DNA
atcaccgatacttacctcgcgtgtgtggacgttgaaagagcacttgatgcaaacaatgatcctatcggtatcgcc

SEQ ID NO: 279767 - DNA, 75 bp, synthetic construct
  source 1..75: mol_type = other DNA
agttggatcccggtcgtttctggatttttgttaagccgggttattcgtaaagatcgcgatgagccgttcgtctat

SEQ ID NO: 279768 - DNA, 75 bp, synthetic construct
  source 1..75: mol_type = other DNA
ggtgctaatgggcggtgccgtttttttaatagtcaaaggatggagtgaaagtagcgatgtcgataacgacggcga

SEQ ID NO: 279769 - DNA, 75 bp, synthetic construct
  source 1..75: mol_type = other DNA
actggaaggtctgctgcgcctcgcgcatccgatcattccgttcatcaccgaaactatctggcagcgcgtaaaagt

SEQ ID NO: 279770 - DNA, 75 bp, synthetic construct
  source 1..75: mol_type = other DNA
tcagttagtaattcgttgggttattgcgacatggcgccgtcgtagcggaagcgttccgaaacctgcgaacatttg

SEQ ID NO: 279771 - DNA, 75 bp, synthetic construct
  source 1..75: mol_type = other DNA
ataaaatcaatcgcatctaggtttagtgactatcttcacaataaaaataaacgtttaaagaagtatacacattta

SEQ ID NO: 279772 - DNA, 75 bp, synthetic construct
  source 1..75: mol_type = other DNA
tgtttccgctgctggcgcaagccgccggggaggggatgtggcaggcgagcagtgtgggcgttacgttgaatcacc

SEQ ID NO: 279773 - DNA, 75 bp, synthetic construct
  source 1..75: mol_type = other DNA
ggccttttccggtataccggcgatagaaccgttgcgatttatctgggaagtgcctggcggtgggcggttaattcc

SEQ ID NO: 279774 - DNA, 75 bp, synthetic construct
  source 1..75: mol_type = other DNA
gaaccgttgcgctttatctgggaagtgcctggcggtgggaggttaattccaccgctaaaggtacaacggaatgaa

SEQ ID NO: 279775 - DNA, 75 bp, synthetic construct
  source 1..75: mol_type = other DNA
taatcaaatacttatcagacaactctcacaaactaaccccgcttgtcttggcggtttcggttcttgtcgcctttc

SEQ ID NO: 279776 - DNA, 75 bp, synthetic construct
  source 1..75: mol_type = other DNA
gtttcccgcgagtggatgaaggggatatgagccggatgcgcgccacgctggtacgcggtaatacgctggcagaac

SEQ ID NO: 279777 - DNA, 75 bp, synthetic construct
  source 1..75: mol_type = other DNA
gaagtgcctggcggtgggcggttaattccgccgttaaagattcaacggaatgaagtgattgtaaattatcgttaa

SEQ ID NO: 279778 - DNA, 75 bp, synthetic construct
  source 1..75: mol_type = other DNA
agggtaacgttatcgacccactggatatggttgacggtatttcgctgccagaactgctggaaaaacgtaccggca

SEQ ID NO: 279779 - DNA, 75 bp, synthetic construct
  source 1..75: mol_type = other DNA
acgacggcagtaaaacccggcgtacttaatgggcgctatcgtgtgacatttgccaatggtaaccacattacgttt

SEQ ID NO: 279780 - DNA, 75 bp, synthetic construct
  source 1..75: mol_type = other DNA
acggttaaatcactgcttgattcattagcgacgttacccgcgcaaaacaaagctcaggaagtcttactggatgtg

SEQ ID NO: 279781 - DNA, 75 bp, synthetic construct
  source 1..75: mol_type = other DNA
tggtgatgaggttgatgtttctggtgttgccgacattctggctgggggcgatgacgtgggctggagtgagggttg

SEQ ID NO: 279782 - DNA, 75 bp, synthetic construct
  source 1..75: mol_type = other DNA
tggcagcctgagttcacagataaaacactctccaggaaacccggggcggttcaagtcggtgccgtagtcggcgga

SEQ ID NO: 279783 - DNA, 75 bp, synthetic construct
  source 1..75: mol_type = other DNA
gaagaaagttactgaggaaaagagtacgacggcagtaaaacccggcgtacttaatgggcgctatcgtgtgacgtt

SEQ ID NO: 279784 - DNA, 75 bp, synthetic construct
  source 1..75: mol_type = other DNA
aggcgaaaagtacgcctcctgaggcagcgaaagccatgaccgtggcgattcgcacatatttacagcaaaacgccg

SEQ ID NO: 279785 - DNA, 75 bp, synthetic construct
  source 1..75: mol_type = other DNA
atgatgcgtctcaggttgatgaagcggcgctggccgacaccgagtggctgaaacaggcgatcgttgcggtacgta

SEQ ID NO: 279786 - DNA, 75 bp, synthetic construct
  source 1..75: mol_type = other DNA
tcacgccctgccgatgatcaacatccttacctttgacggcgatatccgtgaaagcgcccaggtgttcgataccaa

SEQ ID NO: 279787 - DNA, 75 bp, synthetic construct
  source 1..75: mol_type = other DNA
gtgaaaatcactccggcgcacgactttaacgactatgaagtgggtaaacgtcacgcgctgccgatgatcaacatc

SEQ ID NO: 279788 - DNA, 75 bp, synthetic construct
  source 1..75: mol_type = other DNA
gagtaatttggcgcatctgcaacaggtggtaggtcatgagaaaagcggtttagggattaccagacgctatttgca

SEQ ID NO: 279789 - DNA, 75 bp, synthetic construct
  source 1..75: mol_type = other DNA
caggcggctttaccaccagaaaagcgtcgaccgtttcgcgcggcggctatggtcgttcttccagcgcccgtgggc

SEQ ID NO: 279790 - DNA, 75 bp, synthetic construct
  source 1..75: mol_type = other DNA
agggtaacgtgattgacccgctggatatggtcgacggtatttcgctgccagaactgctggaaaaacgtaccggta

SEQ ID NO: 279791 - DNA, 75 bp, synthetic construct
  source 1..75: mol_type = other DNA
agataaagttcaggttgtgggagaagtggatatttctgatgagggaaaccggaaagccacggtggatgtactgac

SEQ ID NO: 279792 - DNA, 75 bp, synthetic construct
  source 1..75: mol_type = other DNA
acttcccccttctgcgccagcggaagatatgccaccggccgattttcagtctgtcatgaaaaacttgcttaagcg

SEQ ID NO: 279793 - DNA, 75 bp, synthetic construct
  source 1..75: mol_type = other DNA
ttattttgttcccttgagcttttgtttgcccgcgatgatgacaagccttgcgttaatcgtgtaatcatcactttg

SEQ ID NO: 279794 - DNA, 75 bp, synthetic construct
  source 1..75: mol_type = other DNA
gtcacccacagcaactttattgcccagaatgacggcatcatgaacatcagcggcaccggtgctgtggctatggaa

SEQ ID NO: 279795 - DNA, 75 bp, synthetic construct
  source 1..75: mol_type = other DNA
cgattgatgtttctgcgaagtcactggtagtcagcgctaataatgccggcgatcagaatgccttcttctggaacc

SEQ ID NO: 279796 - DNA, 75 bp, synthetic construct
  source 1..75: mol_type = other DNA
aaaaacctttgagctgcgtgaagggctgaacgtcactccatatgccggggttaaactgcgtcacacactggaagg

SEQ ID NO: 279797 - DNA, 75 bp, synthetic construct
  source 1..75: mol_type = other DNA
ctgggcacattatcgcaagcacaatccgggaatgctgggccgtcgttgttgatggttttgacgcatactacgaac

SEQ ID NO: 279798 - DNA, 75 bp, synthetic construct
  source 1..75: mol_type = other DNA
atacactaccgttacgcactgactggctggatgctatagccggctcgctgatcaaagaagccctgaactgtactg

SEQ ID NO: 279799 - DNA, 75 bp, synthetic construct
  source 1..75: mol_type = other DNA
ccagccacacaactcacaggccccctgccgccacctgcctctccccttgttcaggaagccgcatcactggattcc

SEQ ID NO: 279800 - DNA, 75 bp, synthetic construct
  source 1..75: mol_type = other DNA
cacctgagttgcggggcctataccagtttgttggggcggagctattctggtggtggttctggcgctggtggcgga

SEQ ID NO: 279801 - DNA, 75 bp, synthetic construct
  source 1..75: mol_type = other DNA
atggcagggatatatcgctgtattttgctgttgatagttgctttttttttctcttcgttgagttatgcgaaaaac

SEQ ID NO: 279802 - DNA, 75 bp, synthetic construct
  source 1..75: mol_type = other DNA
actgatttgttcaggcgtggccttctattctctctatatcaatgtcggagatgtattctttggtgatgctgccaa

SEQ ID NO: 279803 - DNA, 75 bp, synthetic construct
  source 1..75: mol_type = other DNA
agatggcgtggtgctgggcgcagtatattcaacggtagataccgcgccagtagcatcgcgcgacaaacgctatgt

SEQ ID NO: 279804 - DNA, 75 bp, synthetic construct
  source 1..75: mol_type = other DNA
gcaacaacgggcaaaacgggcagccattgaggcgaaaaaccgggggcttactgaccggcaggcagcgcgggacgc

SEQ ID NO: 279805 - DNA, 75 bp, synthetic construct
  source 1..75: mol_type = other DNA
accctggcaggtggtgcagcgtcgtatattgctgaaataatcaaaaataccccccccccggactgtgcgggaagt

SEQ ID NO: 279806 - DNA, 75 bp, synthetic construct
  source 1..75: mol_type = other DNA
cgccaggagaacgccgcgcgcaaagcgggtatttctgtgggtcagtataacgcagcaatgcgtatgctcccggca

SEQ ID NO: 279807 - DNA, 75 bp, synthetic construct
  source 1..75: mol_type = other DNA
ccgtcttcgtcaataactacaacgacggcgatatgaccgtgccgtttggcggctataagcagagcggcaacggtc

SEQ ID NO: 279808 - DNA, 75 bp, synthetic construct
  source 1..75: mol_type = other DNA
tgttatcggtcataacgtaaaaattggtgagaattgttccatcaaacccggcgtaaccatcggcctacgtggcca

SEQ ID NO: 279809 - DNA, 75 bp, synthetic construct
  source 1..75: mol_type = other DNA
tagcatcgcgcgacaaacgctatgtccagttttccgatggcgcagcgtttgaatatgaccgcagcacccaccagc

SEQ ID NO: 279810 - DNA, 75 bp, synthetic construct
  source 1..75: mol_type = other DNA
gatagtcgggagtatcggcagcgccattggcggtgctttcggtggtgcgtctgcctccacggggacggccattca

SEQ ID NO: 279811 - DNA, 75 bp, synthetic construct
  source 1..75: mol_type = other DNA
atcggctgatggtacgcggctgtggaaactgccggtgacccccttactcaccttctccgtgaatggtcagtccgt

SEQ ID NO: 279812 - DNA, 75 bp, synthetic construct
  source 1..75: mol_type = other DNA
ctgggagacaagattgaacaccagaagcggctgaatgagctggcacagcaggcggcgcggtttgaacagcagcaa

SEQ ID NO: 279813 - DNA, 75 bp, synthetic construct
  source 1..75: mol_type = other DNA
acgttctccccgtccggctttgagcgtgaagtggtgaaaggcgcgaaagtctacggctatcgcgagaaaccccgt

SEQ ID NO: 279814 - DNA, 75 bp, synthetic construct
  source 1..75: mol_type = other DNA
cggccagcgatgccggacactggcactacgcgatgtatgtcatgccggatgacaaaaccaaaacatcgttaatcc

SEQ ID NO: 279815 - DNA, 75 bp, synthetic construct
  source 1..75: mol_type = other DNA
aaatacgttaacccggattatcgccaccgcattgcttttctcgaagagccgtgcaaaacccgcgatgattcgcga

SEQ ID NO: 279816 - DNA, 75 bp, synthetic construct
  source 1..75: mol_type = other DNA
gctgaagccttcgggaagctgaccactgacccgacgtcgggactgatggcgatggcgcgccagttccgtaacgtg

SEQ ID NO: 279817 - DNA, 75 bp, synthetic construct
  source 1..75: mol_type = other DNA
atttatggaaagcggaaaatcagtatgcggtcctgaaagaggcagccacgaaacggcagttatctgagcaggaaa

SEQ ID NO: 279818 - DNA, 75 bp, synthetic construct
  source 1..75: mol_type = other DNA
ggaaactgccttctccctgtcctggcgagcatgaactggtttcagaagtggtggaggcggggcagcctgcaccgg

SEQ ID NO: 279819 - DNA, 75 bp, synthetic construct
  source 1..75: mol_type = other DNA
acactggattttaccggcgggaaacccgttaagcgctggagtgcggagcgtaaggcagccgctcggcgacgtaat

SEQ ID NO: 279820 - DNA, 75 bp, synthetic construct
  source 1..75: mol_type = other DNA
ttttaatgtcagtatataataaagaatcatctataaacttaagacaagcgttgaatagtatttggatggatcaac

SEQ ID NO: 279821 - DNA, 75 bp, synthetic construct
  source 1..75: mol_type = other DNA
gcgctactgaataaagcggttgcattggggtttctgataaaacatgaatacccggtaatagccggaaaaaaatca

SEQ ID NO: 279822 - DNA, 75 bp, synthetic construct
  source 1..75: mol_type = other DNA
ggctgtttgactccatcaaaacggtaatgaggaacaacgttccggtgccgttcgacgcgaaaaaccgcgaaatgt

SEQ ID NO: 279823 - DNA, 75 bp, synthetic construct
  source 1..75: mol_type = other DNA
gcccggtgcgccgctggagcgaagaacgtaaggctgcggtacgacggcggaatctggagaaacgtatcaacaggc

SEQ ID NO: 279824 - DNA, 75 bp, synthetic construct
  source 1..75: mol_type = other DNA
ggatctgatgcaggcgcagcaggtacgtcgctggccgggtagcacgctgcctgtcgtggaagttgatgcactgga

SEQ ID NO: 279825 - DNA, 75 bp, synthetic construct
  source 1..75: mol_type = other DNA
cgtacggggattggcgcaatcacacttatcgatatggatgatgtgtgcgtcactaataccaatcggcaaattcac

SEQ ID NO: 279826 - DNA, 75 bp, synthetic construct
  source 1..75: mol_type = other DNA
attacaggcatttctggatggtattcctccccgggccccttcagttaagaggctgaaattcacaggtaatgtccc

SEQ ID NO: 279827 - DNA, 75 bp, synthetic construct
  source 1..75: mol_type = other DNA
tttgcaacagtgccccatcagggacaaagatctggctggtcgctggcatcaccgatatgagaaacggcttcaacg

SEQ ID NO: 279828 - DNA, 75 bp, synthetic construct
  source 1..75: mol_type = other DNA
caaaagcggaagtgatggcggagcgtattcgccagattaacccggagtgtcgggtgacagtggtggacgatttcg

SEQ ID NO: 279829 - DNA, 75 bp, synthetic construct
  source 1..75: mol_type = other DNA
gatggtgaccgccacctttggttttgttgcggtttctcatgcgctgaagaagatgatggtgaaagcggcgcgtca

SEQ ID NO: 279830 - DNA, 75 bp, synthetic construct
  source 1..75: mol_type = other DNA
ttgatccgacgcagattcaggttaccgatctggcgaaaacgattcaggaccctctggcggcgaagttgcgcgagc

SEQ ID NO: 279831 - DNA, 75 bp, synthetic construct
  source 1..75: mol_type = other DNA
caagctgcgaccactaaacttgcttacttcatcaacaacgtcgtaaacgcagtagaagacgaaaaattatgctct

SEQ ID NO: 279832 - DNA, 75 bp, synthetic construct
  source 1..75: mol_type = other DNA
tgtgtaatggcgatcctgacgatctgatcctcaaacttgccgatatgccaggtgagaaagtggcgaaggtcaaag

SEQ ID NO: 279833 - DNA, 75 bp, synthetic construct
  source 1..75: mol_type = other DNA
ggataaagtacgcgagcaggtgcaggcggcgcacgcgctggggctgacggcggtgatcagttcttccatcgagtc

SEQ ID NO: 279834 - DNA, 75 bp, synthetic construct
  source 1..75: mol_type = other DNA
ccgtgatgcaatgactaatagttattctctggaaaaactggtttatctggttaaatcaattaaatctggcaaatg

SEQ ID NO: 279835 - DNA, 75 bp, synthetic construct
  source 1..75: mol_type = other DNA
gcaaacaagcacctgaagcgtttttccgcgaagcaatgactaatagttattctctggaaaaactggtttatctgg

SEQ ID NO: 279836 - DNA, 75 bp, synthetic construct
  source 1..75: mol_type = other DNA
atgtctaacgttaccatttctaaaaaaaccatcgtcgacgctgctgtggttatcgctaatgagttacaagttgca

SEQ ID NO: 279837 - DNA, 75 bp, synthetic construct
  source 1..75: mol_type = other DNA
aaggcagcattttccatctgatggaaccggacataaatcaggagatctatggcctgcccggctatctttctgcca

SEQ ID NO: 279838 - DNA, 75 bp, synthetic construct
  source 1..75: mol_type = other DNA
tttttatgcgtaatgaattgataccgctacaaaacagaatagaagaactcaataaatggctcaaagatgacataa

SEQ ID NO: 279839 - DNA, 75 bp, synthetic construct
  source 1..75: mol_type = other DNA
atttttgaatatcaagaacgtgagccgggatgacatgatggcagcacaccgagtgccgccgcaaatgatggggat

SEQ ID NO: 279840 - DNA, 75 bp, synthetic construct
  source 1..75: mol_type = other DNA
ttccgtcagccctgctcaatgagtccgccacgctgttccgtcgcaagtattacattaacggcagtcatgcgggct

SEQ ID NO: 279841 - DNA, 75 bp, synthetic construct
  source 1..75: mol_type = other DNA
aaggatgggcttcagatcattcctctgtcagaagtcgcggcgaaggatgagtttctgaatatcaaaaatgtcagc

SEQ ID NO: 279842 - DNA, 75 bp, synthetic construct
  source 1..75: mol_type = other DNA
ggcctgcccggttatctttctgccattccatccgccctgctcaacgaatccgccacgctgttccgccgcaagtat

SEQ ID NO: 279843 - DNA, 75 bp, synthetic construct
  source 1..75: mol_type = other DNA
cgcgatgacatgatggcggcacaccgcgtgccgccgcagatgatggggataatgcctaataatgtcggggggttt

SEQ ID NO: 279844 - DNA, 75 bp, synthetic construct
  source 1..75: mol_type = other DNA
ggggatgtggagaaggcggcgaatgtatttgtgcgtaatgagcttattccattacaaaaaatactcgaagaaata

SEQ ID NO: 279845 - DNA, 75 bp, synthetic construct
  source 1..75: mol_type = other DNA
gtaacgcctacctggagaaacgcacaaaccggttcggtgaagttatcgcccttgagcctgtgctggcaaaataca

SEQ ID NO: 279846 - DNA, 75 bp, synthetic construct
  source 1..75: mol_type = other DNA
attacaaaaaaggatgaaagaagttaatgaatggctagaagataaaattattcaattcaaaaaatataaccttga

SEQ ID NO: 279847 - DNA, 75 bp, synthetic construct
  source 1..75: mol_type = other DNA
accggacatcaaccaggagatctacggtctgcccggttatctttctgccattccgtcagctctgctcaacgagtc

SEQ ID NO: 279848 - DNA, 75 bp, synthetic construct
  source 1..75: mol_type = other DNA
gcttcagagacgctttgaggagcttaataaatggctggataaaaacgcgatagggttcacaaattacgaattata

SEQ ID NO: 279849 - DNA, 75 bp, synthetic construct
  source 1..75: mol_type = other DNA
actgcaaaagcgactgcaggagcttaacaactggctgggtgaagaggtgatccgttttgaagcctatgacttagg

SEQ ID NO: 279850 - DNA, 75 bp, synthetic construct
  source 1..75: mol_type = other DNA
attttcttcagactgatttaacccgttatcagaaagaaacgttgatcattattctcagcgcaagtggcagaccat

SEQ ID NO: 279851 - DNA, 75 bp, synthetic construct
  source 1..75: mol_type = other DNA
agcacggcttgttgaatttcagagagtgcctggctgctcatctgtcttgaatggtgtcaggttcccgtttgatag

SEQ ID NO: 279852 - DNA, 75 bp, synthetic construct
  source 1..75: mol_type = other DNA
atgatgcaaaaaattctacgggtcattgccgttagcgcggtcttttgggttcgttcggtatcggctgaccctggg

SEQ ID NO: 279853 - DNA, 75 bp, synthetic construct
  source 1..75: mol_type = other DNA
acctaatgcgaacacggattacaccactggtaatttaactaatacggcttcttctggtgcatctaatgttcagat

SEQ ID NO: 279854 - DNA, 75 bp, synthetic construct
  source 1..75: mol_type = other DNA
tggaacaatgacgagctcgctttttttactaacccagaggctgcggcagtagcaaatccaatcgccgcaacagcc

SEQ ID NO: 279855 - DNA, 75 bp, synthetic construct
  source 1..75: mol_type = other DNA
ttatgcactaccactattatgcgttccccctgcttattatgctcgatatgttcataaaagagagctgtaatgcgg

SEQ ID NO: 279856 - DNA, 75 bp, synthetic construct
  source 1..75: mol_type = other DNA
ctatgtggaatgcgtacagacagatcgttggtatgagccgccagtgagtttcgacgggctggcgcgtacctttcg

SEQ ID NO: 279857 - DNA, 75 bp, synthetic construct
  source 1..75: mol_type = other DNA
cgctggtatgagccgcctgtgagtttcgacggcctggcgcgaacattccgcgccgccgtacaccacagctcaccg

SEQ ID NO: 279858 - DNA, 75 bp, synthetic construct
  source 1..75: mol_type = other DNA
ctgcgtcgacgaaccagatccagcataaaagtcagactacagccgaagcattcagcttcggtgatcccgttcctg

SEQ ID NO: 279859 - DNA, 75 bp, synthetic construct
  source 1..75: mol_type = other DNA
agaaactaattaaagaaatcaaagagcgtatcagcagcctggaggttcgagacgatattgagcgccgggcttatg

SEQ ID NO: 279860 - DNA, 75 bp, synthetic construct
  source 1..75: mol_type = other DNA
gctgacggtgaactacaccgacaacccgcactttcctgaagttctccgtctggagatggaagagtgtaaacgcag

SEQ ID NO: 279861 - DNA, 75 bp, synthetic construct
  source 1..75: mol_type = other DNA
atgacaactttcaccgacaaagaactgattaaagaaatcaaagagcgcataggcagcctggacgttcgagacaat

SEQ ID NO: 279862 - DNA, 75 bp, synthetic construct
  source 1..75: mol_type = other DNA
attgcagtaaagtgcaacattctgaccagtacctacatccctcacccgctgctcagccagcaggatttttcacgt

SEQ ID NO: 279863 - DNA, 75 bp, synthetic construct
  source 1..75: mol_type = other DNA
gccgtgcaggatcgcaacgatatcgaaatgcttcgcgaaaacatggtgaagtcgaaaggccgcaacaactttaaa

SEQ ID NO: 279864 - DNA, 75 bp, synthetic construct
  source 1..75: mol_type = other DNA
catactgtcgtttttatcgtggagctttaccgttctggtaatcagtcgcattggtgtggctttcgcccatgctat

SEQ ID NO: 279865 - DNA, 75 bp, synthetic construct
  source 1..75: mol_type = other DNA
aaccgtggtagtggtcaccgcccattacacggcctacagctatatcgaacctttcgtacaaaacatagccggatt

SEQ ID NO: 279866 - DNA, 75 bp, synthetic construct
  source 1..75: mol_type = other DNA
atgaaaaatataaatgtgcctgaaatatcatttatctttgataatgataaaactgaagttttctcaagaatggca

SEQ ID NO: 279867 - DNA, 75 bp, synthetic construct
  source 1..75: mol_type = other DNA
gcacaacgctaacagaagctacggcaccgaaaaacacaggcgtaagtgccgaggctttcagctttggcgatccga

SEQ ID NO: 279868 - DNA, 75 bp, synthetic construct
  source 1..75: mol_type = other DNA
gtttactggtgggtgccgtccttcaacgagccgacagccttcgcgcccggctccgtgtttcacctgctggagcct

SEQ ID NO: 279869 - DNA, 75 bp, synthetic construct
  source 1..75: mol_type = other DNA
tgtatatcaccgacgcattgcaggaccgcgattacattgactcacttcgcgaaaacatggccaggtcgaaaggcc

SEQ ID NO: 279870 - DNA, 75 bp, synthetic construct
  source 1..75: mol_type = other DNA
atgagcaagaaaaaagggaaaataccgcaacctgcggcaaaaaaaatgaccgccagcgccccgaaaatggaggca

SEQ ID NO: 279871 - DNA, 75 bp, synthetic construct
  source 1..75: mol_type = other DNA
cctgtttatgtattcgcccaacggtaaaaaggacggcatccagataatcccgttgtcggaagttgcagcaaagga

SEQ ID NO: 279872 - DNA, 75 bp, synthetic construct
  source 1..75: mol_type = other DNA
aactgtggtggttgtcaccgcccattacacggcatacagctatatcgagccttttgtacaaaacattgcgggatt

SEQ ID NO: 279873 - DNA, 75 bp, synthetic construct
  source 1..75: mol_type = other DNA
gaacacagctcccaggtaatgtattactcgctggctatcggtcatcacgttggcgtgattgattgtctgaatgtc

SEQ ID NO: 279874 - DNA, 75 bp, synthetic construct
  source 1..75: mol_type = other DNA
cgccgcgcagaaccaggaggacgtgaacaacatccgccaggccatgaaaagcgccaaagggccaggcaacttccg

SEQ ID NO: 279875 - DNA, 75 bp, synthetic construct
  source 1..75: mol_type = other DNA
agcgtcaggggtttgaagcctgcatggcactggcgcagggcagcgaagctcaaaagcagatgttgcaagacgcca

SEQ ID NO: 279876 - DNA, 75 bp, synthetic construct
  source 1..75: mol_type = other DNA
ggggatgtggagaaggctagtaaggttttcgtcactaatgaattaaaaccattgcaaaggaaaatactcgatctc

SEQ ID NO: 279877 - DNA, 75 bp, synthetic construct
  source 1..75: mol_type = other DNA
ccttcaatgcaggttttttgagatcaatgaatgggttggtgtagatattattaagtttaataaagcccctctctt

SEQ ID NO: 279878 - DNA, 75 bp, synthetic construct
  source 1..75: mol_type = other DNA
ctatgtggaatgtgtacagacagatcgctggtatgagccgcctgtgagtttcgacgccctagcgcgcatcttccg

SEQ ID NO: 279879 - DNA, 75 bp, synthetic construct
  source 1..75: mol_type = other DNA
ggggatgtagagaaagcgagcctcgtctttgtccgcaatgagctgatgccattgcagaaacgactgcaggaactg

SEQ ID NO: 279880 - DNA, 75 bp, synthetic construct
  source 1..75: mol_type = other DNA
ttcagcttcggcgatcccgttccagttctggaccgccgagaattactggactatgtggaatgcgtacagatggac

SEQ ID NO: 279881 - DNA, 75 bp, synthetic construct
  source 1..75: mol_type = other DNA
tgtcagaagtcgcagcgaaagatgaatttctgaacatcaagaacgtgagccgggacgacatgatggctgcacacc

SEQ ID NO: 279882 - DNA, 75 bp, synthetic construct
  source 1..75: mol_type = other DNA
gcttaagcaggcaatggtggggattgtcgggagtatcggcagcgccattggcggggctgaaccgccccggaaatc

SEQ ID NO: 279883 - DNA, 75 bp, synthetic construct
  source 1..75: mol_type = other DNA
gcaggaaaaatccctgctgacccatgagaaagagacgctggagtacaaacgccagctggctgagctgggagacaa

SEQ ID NO: 279884 - DNA, 75 bp, synthetic construct
  source 1..75: mol_type = other DNA
gaaacgacagttatctgagcaggaaaaatccctgctggcgcataaagacgagacgctggagtacaaacgccagct

SEQ ID NO: 279885 - DNA, 75 bp, synthetic construct
  source 1..75: mol_type = other DNA
gtcgggagtatcggcagcgccattggcggggctgaaccgacccggaaatactggagactaaactcactgagaaag

SEQ ID NO: 279886 - DNA, 75 bp, synthetic construct
  source 1..75: mol_type = other DNA
ttgtcgtttgcctgtatcctcttttcctgtttgctctctgtgtagtgaacatgtataacgcgcatcaccgcatag

SEQ ID NO: 279887 - DNA, 75 bp, synthetic construct
  source 1..75: mol_type = other DNA
tccagtgtcttctgtgtggctgatatgtacaacccagataatgatcgtgaagaatacgaatttaacgatgagcaa

SEQ ID NO: 279888 - DNA, 75 bp, synthetic construct
  source 1..75: mol_type = other DNA
cgcattcaggaccagcttaatgaacggggctaccaaattttcaatctgaatgaaggaacagatagttataatgtg

SEQ ID NO: 279889 - DNA, 75 bp, synthetic construct
  source 1..75: mol_type = other DNA
tacaaccggctggtacgccgtttgcgttcgctgggactggcagattttgggcattatctgaatatgctggaatct

SEQ ID NO: 279890 - DNA, 75 bp, synthetic construct
  source 1..75: mol_type = other DNA
aagcatttcaaagagaacatttaataaccgccagtattgagttaactcagcattgtaattttaaatgtctccatt

SEQ ID NO: 279891 - DNA, 75 bp, synthetic construct
  source 1..75: mol_type = other DNA
attatggctttatatggatcctggttttgattctattgttgcatttttggctgcagttagcgctttagctggatt

SEQ ID NO: 279892 - DNA, 75 bp, synthetic construct
  source 1..75: mol_type = other DNA
cccgctacgcagacgactgtaatgtgtatgtgaagagtgaacgggcaggcaaccgtatgatggcggggctgacgc

SEQ ID NO: 279893 - DNA, 75 bp, synthetic construct
  source 1..75: mol_type = other DNA
ggtgaagatgcgaaactgattgctgttccgcacagcaagctgagcaaagaatacgatcacattaaagacgttaac

SEQ ID NO: 279894 - DNA, 75 bp, synthetic construct
  source 1..75: mol_type = other DNA
gttgaaggctgggataacgctgaagctgctaaagctgaaatcgttgcttccttcgagcgcgcaaagaataaataa

SEQ ID NO: 279895 - DNA, 75 bp, synthetic construct
  source 1..75: mol_type = other DNA
aggtgaagatgaagaaggtgagctggctaattttgctgcagatcgcttttatgagctcacaaaaaacctgatagc

SEQ ID NO: 279896 - DNA, 75 bp, synthetic construct
  source 1..75: mol_type = other DNA
agagatctgaacaggtggataaggcgaaggttgcgaagtgtcctgtggaaacagtggaaaacgggcagcaagcgc

SEQ ID NO: 279897 - DNA, 75 bp, synthetic construct
  source 1..75: mol_type = other DNA
cccggataagagaactgacggggcgtaacacgggcaaaagcctagagcagcttatcgaaccgttaaagcgatatc

SEQ ID NO: 279898 - DNA, 75 bp, synthetic construct
  source 1..75: mol_type = other DNA
ttatcgccatgaagagttgaaaaatctgacgccgcagcaactgcagcggtacttcatgcgagggacgggaccgca

SEQ ID NO: 279899 - DNA, 75 bp, synthetic construct
  source 1..75: mol_type = other DNA
agcttgtcattcatatctcgattgtgggggggcaggcacatgattacaccgtcgaggggttcaaggcgatggtgg

SEQ ID NO: 279900 - DNA, 75 bp, synthetic construct
  source 1..75: mol_type = other DNA
ccagtggattgatgaagccggtgacagggacgttattatcgataacggcgctccgtcatttattccgttatcaag

SEQ ID NO: 279901 - DNA, 75 bp, synthetic construct
  source 1..75: mol_type = other DNA
gggcagcggtaaaagttacatattggcgcggatagaggaagtggtgaaacaggaattcgggggcagcgtcattgt

SEQ ID NO: 279902 - DNA, 75 bp, synthetic construct
  source 1..75: mol_type = other DNA
ctttgagcatttattaaaggatcaattcaaagttttcgaagaagcaggttatacagtaagctcgcaaattctgaa

SEQ ID NO: 279903 - DNA, 75 bp, synthetic construct
  source 1..75: mol_type = other DNA
ctggtgctttcaggcatcgcgctggtagtgaccgtgggcgtctacggtctggtaggggttatcgttaagattgat

SEQ ID NO: 279904 - DNA, 75 bp, synthetic construct
  source 1..75: mol_type = other DNA
ggttcgcgtctttgggcgaacgtaaccatttaccatgagatccagatcggtcagaattgcctgatccagtccgga

SEQ ID NO: 279905 - DNA, 75 bp, synthetic construct
  source 1..75: mol_type = other DNA
aaccgacagaatcttaccttgaagaaattttgccgcaggcgctcaatggcaggagtgaagacgagttcctgacag

SEQ ID NO: 279906 - DNA, 75 bp, synthetic construct
  source 1..75: mol_type = other DNA
atgacaacattgatcgacacagtaaaaccaacggaatcctaccttgaggacattttgccgcaggcgctcaatggc

SEQ ID NO: 279907 - DNA, 75 bp, synthetic construct
  source 1..75: mol_type = other DNA
ccactacttaaacctgacggattgctgtttgcggggcactctgaaaatttcagccaccttgagcgcagcttcacg

SEQ ID NO: 279908 - DNA, 75 bp, synthetic construct
  source 1..75: mol_type = other DNA
caagctggaaaaggagcagcgaaaactcatccccgttgatgaagtagtcatcgtctattcgtccatgagaaaggc

SEQ ID NO: 279909 - DNA, 75 bp, synthetic construct
  source 1..75: mol_type = other DNA
ggggagaacgaagccggacaacgtttgtgtgggaagggttccggctgttacaggagacaacgtggcagggaaagc

SEQ ID NO: 279910 - DNA, 75 bp, synthetic construct
  source 1..75: mol_type = other DNA
ttatccgatgaagcgtgggaaaagttaatgttgtcagatgaaaacaataaacaacatatacgcgaggccatcgtg

SEQ ID NO: 279911 - DNA, 75 bp, synthetic construct
  source 1..75: mol_type = other DNA
atgagcttactcaacgtccctgcgggtaaagatctgccggaagacatctacgttgttattgagatcccggctaac

SEQ ID NO: 279912 - DNA, 75 bp, synthetic construct
  source 1..75: mol_type = other DNA
tgtattcatatataatattttaggtgtactgaatggtgtagttagtatcggccacttcattatgattacatcata

SEQ ID NO: 279913 - DNA, 75 bp, synthetic construct
  source 1..75: mol_type = other DNA
tatcgccctcccgccagagcatatctcatgcactggtcatggttgattgctcatgaaatcgttcaggcaaaaaac

SEQ ID NO: 279914 - DNA, 75 bp, synthetic construct
  source 1..75: mol_type = other DNA
agaaaagtgtaatggtaattagtctctggatgggagcacatcttgtcatatcgggagagataagcatcgggcagt

SEQ ID NO: 279915 - DNA, 75 bp, synthetic construct
  source 1..75: mol_type = other DNA
cgtaaagcggcagaagaaaaagccgcagaagaagaacgtaaagcagcagaagcaaaacgcctggcagaagaaaag

SEQ ID NO: 279916 - DNA, 75 bp, synthetic construct
  source 1..75: mol_type = other DNA
tcagcaggactgccagcaagttaaggatgaggcaaaacgccttgaggccgtgctgaatgttgagtgccggtcggt

SEQ ID NO: 279917 - DNA, 75 bp, synthetic construct
  source 1..75: mol_type = other DNA
tgacattgctcgatgatatcgccactttgctggacgatatctccgtgatgggcaagctggcggcgaagaaaaccg

SEQ ID NO: 279918 - DNA, 75 bp, synthetic construct
  source 1..75: mol_type = other DNA
aacgtggccgagtccggaacccatcaggaattactagctcgccctgacggcatttaccgctaccttcatcagttg

SEQ ID NO: 279919 - DNA, 75 bp, synthetic construct
  source 1..75: mol_type = other DNA
cactgtggttggcgagcaaggttctgggctgtctggtggtcaacgacagcgtatagctatcgctcgtgcgcttat

SEQ ID NO: 279920 - DNA, 75 bp, synthetic construct
  source 1..75: mol_type = other DNA
gagttgataaagtaaatgcttatttcgaacctaatgcgaacacggattacaccactggtaatttaactaatacgg

SEQ ID NO: 279921 - DNA, 75 bp, synthetic construct
  source 1..75: mol_type = other DNA
ctgggtgctaagttattcagacatttgcttgcattgcctgtttcatattttgaaaatcgcagggtcggagagacc

SEQ ID NO: 279922 - DNA, 75 bp, synthetic construct
  source 1..75: mol_type = other DNA
gtctggagagaggatggacgtcattttattctgactaaaatcagtaaagaagtaaacagatatcttatttttgat

SEQ ID NO: 279923 - DNA, 75 bp, synthetic construct
  source 1..75: mol_type = other DNA
tgttattactgtcgcattatctgttgtagtggtgtttgagattatactcagcggtttaagaacttacatttttgc

SEQ ID NO: 279924 - DNA, 75 bp, synthetic construct
  source 1..75: mol_type = other DNA
agaaattttgattttcttgaaggtaaagcatttgcagataaagtagccgctgtccaagctgcaaccacgcgaaag

SEQ ID NO: 279925 - DNA, 75 bp, synthetic construct
  source 1..75: mol_type = other DNA
atatcgaggttgaggctgtcaccaaaatgctggcctgcggcacgcggataccgggcgtgaaggaatacaactgcg

SEQ ID NO: 279926 - DNA, 75 bp, synthetic construct
  source 1..75: mol_type = other DNA
gttaatattgaagaaatgtcttacatagatgaagcattacagtgcccgattacgctggcaattcctcaacgaggt

SEQ ID NO: 279927 - DNA, 75 bp, synthetic construct
  source 1..75: mol_type = other DNA
cgaaagcaaccattggctgctgaatgacgtgtgccgtctggcggtggagaatctgctgtatgccgcccgaaaacg

SEQ ID NO: 279928 - DNA, 75 bp, synthetic construct
  source 1..75: mol_type = other DNA
atgaacaatatcaaaatgataacattctttcatgcccatgagaaaacaccattcatgatctgtattgtaaacaaa

SEQ ID NO: 279929 - DNA, 75 bp, synthetic construct
  source 1..75: mol_type = other DNA
acagcataacgattaatgatacacgtacaggtaaccagtatcagcggaaactggatcgcactacctgtggaatag

SEQ ID NO: 279930 - DNA, 75 bp, synthetic construct
  source 1..75: mol_type = other DNA
gttccttgccaaccgggtgtgtggagagaagctgccgcaggtgtaccgtgctctggggatggataaaccggaacc

SEQ ID NO: 279931 - DNA, 75 bp, synthetic construct
  source 1..75: mol_type = other DNA
gagagccaataacattatcaatgcttgtggccagagagcagtgtgagtttgattgcagtatcggtcactttacgg

SEQ ID NO: 279932 - DNA, 75 bp, synthetic construct
  source 1..75: mol_type = other DNA
actcagaccacgcagacgcctgacgcctttttaaccagctatcaacgacaaatgtgcactgacccaacggtgaaa

SEQ ID NO: 279933 - DNA, 75 bp, synthetic construct
  source 1..75: mol_type = other DNA
accgttgccagagtaagggaactggagcaaattcgtaattttttaaccggacaagcgttgacatcagttcttgat

SEQ ID NO: 279934 - DNA, 75 bp, synthetic construct
  source 1..75: mol_type = other DNA
gactttagttatatggaacatagcccggcgcgggttattgcccagcgagtcgcgcaagaactacaacgtggtgat

SEQ ID NO: 279935 - DNA, 75 bp, synthetic construct
  source 1..75: mol_type = other DNA
gtgtggattacttattcactttattatgaaaaataaagcttattcagaaaatgtatttataaccgaaaaaaggaa

SEQ ID NO: 279936 - DNA, 75 bp, synthetic construct
  source 1..75: mol_type = other DNA
atgttgttttatcttttatgcttacctcttattactgctttattaataatgttgaaaacagagtaatcgatgcgg

SEQ ID NO: 279937 - DNA, 75 bp, synthetic construct
  source 1..75: mol_type = other DNA
atgctgaccggcagcgaacagaactggcgtggtttcacccgttctgtgctctccatgctgacagagatttttctg

SEQ ID NO: 279938 - DNA, 75 bp, synthetic construct
  source 1..75: mol_type = other DNA
acgctgaaaaagccgaagcagtccgctgcgggagagcgtcaggaagatcgagcacatgcagctcttcttgcgtta

SEQ ID NO: 279939 - DNA, 75 bp, synthetic construct
  source 1..75: mol_type = other DNA
tgctgttgaacagggcctgagccgccaggcgctggctgcacaaaaagcagggatttccgtcgggcagtataaagc

SEQ ID NO: 279940 - DNA, 75 bp, synthetic construct
  source 1..75: mol_type = other DNA
gaaaaagccgaagtcgtcaggcgtaaaagtgtcagccggtgagcgtcaggaagaccagtcgcatgccgcgctgct

SEQ ID NO: 279941 - DNA, 75 bp, synthetic construct
  source 1..75: mol_type = other DNA
cggtgtatgacatggcccgcaagggggcgcaggatgagattcaggcgcagatgcgtgatggcggcgtcttttccg

SEQ ID NO: 279942 - DNA, 75 bp, synthetic construct
  source 1..75: mol_type = other DNA
cagtttgatgcgatcaaccagagtgttgcgcgttttgcgtctgcatccggtgtggaggtggataaagtcgctgaa

SEQ ID NO: 279943 - DNA, 75 bp, synthetic construct
  source 1..75: mol_type = other DNA
gaaaaagccgaagtcgtcaggcgtcaaagtgtcagccggtgagcgtcaggaagaccagacgcatgccgctctgct

SEQ ID NO: 279944 - DNA, 75 bp, synthetic construct
  source 1..75: mol_type = other DNA
gaaaaagccgaagtcgtcaggcgttaaagtgtcagccggtgagcgtcaggaagaccagccgcatgccgccctgct

SEQ ID NO: 279945 - DNA, 75 bp, synthetic construct
  source 1..75: mol_type = other DNA
gtaaggcgtcatttttcaggtctggataccgacgccagaaaaaccgccagtgctgttgaacagggcctgagccgc

SEQ ID NO: 279946 - DNA, 75 bp, synthetic construct
  source 1..75: mol_type = other DNA
gggccagcaacccgccacggacattgcgccgcatcgattgccgactgccgcgacattttgcagatgcagcaactt

SEQ ID NO: 279947 - DNA, 75 bp, synthetic construct
  source 1..75: mol_type = other DNA
gggcctgcaacccgccacggacattgcgccgcatcgattgccgactgccgtgacattttgcagatggagcaactt

SEQ ID NO: 279948 - DNA, 75 bp, synthetic construct
  source 1..75: mol_type = other DNA
ttccgggccgctgaaagtcggcaactcgctggtagatgcgtttactttgcaatactacgaaggttttccgatgga

SEQ ID NO: 279949 - DNA, 75 bp, synthetic construct
  source 1..75: mol_type = other DNA
atgaacaaaacgctaatcgccgcagctgtggcagggatagttttaatcgcttcaaacgctcaggcacaaaccgta

SEQ ID NO: 279950 - DNA, 75 bp, synthetic construct
  source 1..75: mol_type = other DNA
tatcggcagcgccattggcggtgctttcggtggtggtgcgtctgcctccacggggacggccattcaggctgcggc

SEQ ID NO: 279951 - DNA, 75 bp, synthetic construct
  source 1..75: mol_type = other DNA
tctgtgcgcatatggatgaagtgggatttatggtgcgcagcatctcccgcgaaggggcgattgatgtgctgccgg

SEQ ID NO: 279952 - DNA, 75 bp, synthetic construct
  source 1..75: mol_type = other DNA
gagcagattgcgtatgttgcacagctgcagcgttccggagacgaggccggggcattgcaggcggcgaacgatatc

SEQ ID NO: 279953 - DNA, 75 bp, synthetic construct
  source 1..75: mol_type = other DNA
gatatgttcagtaacggcggcacggacggtggagcggtgcacttaaccggtactggcgtacccacagtggtaatg

SEQ ID NO: 279954 - DNA, 75 bp, synthetic construct
  source 1..75: mol_type = other DNA
catgcgcgtggacattggtgcgcgctcgtatgacgaagtgatgcaggcgggaattcgtccaggcgatcgcgtcac

SEQ ID NO: 279955 - DNA, 75 bp, synthetic construct
  source 1..75: mol_type = other DNA
tcgtctcggttgctacctgttagtgaccttactgcgcgaactgcacgacgccgaactgcctgcggaagtgtggct

SEQ ID NO: 279956 - DNA, 75 bp, synthetic construct
  source 1..75: mol_type = other DNA
cgcaggtaaaaagtgctgccacgcagacctttgacggtattgcacagaatatggcagcgatgctgaccggcagcg

SEQ ID NO: 279957 - DNA, 75 bp, synthetic construct
  source 1..75: mol_type = other DNA
gaaggtggttatgtgggcggtgccggaagtccggcgcagatgcggcgggcggaaggcattagttttaatcagaac

SEQ ID NO: 279958 - DNA, 75 bp, synthetic construct
  source 1..75: mol_type = other DNA
ttactgatgatcaacgccgtcgggcgtttggtcgtccgctcgattttgttttctaccgtgggctgaatgttagtg

SEQ ID NO: 279959 - DNA, 75 bp, synthetic construct
  source 1..75: mol_type = other DNA
aagcttctgtactggtgactcgcgcttctgatcacaatccgctactcgttgaattcagtcccggcaaacctgata

SEQ ID NO: 279960 - DNA, 75 bp, synthetic construct
  source 1..75: mol_type = other DNA
gcctcaggtccggctggagcgagtggaaagagagtgccacggacagtatgtcgcaggttaaaagtgcagccacgc

SEQ ID NO: 279961 - DNA, 75 bp, synthetic construct
  source 1..75: mol_type = other DNA
gttcaccgcggggagtttgttttcacgaaagaggcaaccagccggataggtgtggggaatctttaccgtctgatg

SEQ ID NO: 279962 - DNA, 75 bp, synthetic construct
  source 1..75: mol_type = other DNA
cgattactatcgaaaccatcgccgggacagaacctgccgcgcatttgcgccgggcaattatcaaaacgttgctga

SEQ ID NO: 279963 - DNA, 75 bp, synthetic construct
  source 1..75: mol_type = other DNA
acggtcaggtggtggacaacaccgggcagccgattcgctgggaaggtcgcgcgagcaaatttgctgattatctgc

SEQ ID NO: 279964 - DNA, 75 bp, synthetic construct
  source 1..75: mol_type = other DNA
tgatactggcaccgcatatctggcgatgctgaataatgtttatctcggcggcattgataacccaacgtcgcgccg

SEQ ID NO: 279965 - DNA, 75 bp, synthetic construct
  source 1..75: mol_type = other DNA
ctgcttcctcggggacggccattgaggctgcggcggcgaacttccatttcgcgaccggaggatttacggggacgg

SEQ ID NO: 279966 - DNA, 75 bp, synthetic construct
  source 1..75: mol_type = other DNA
cgacccgccatccctctgcggaatctcgccgttatctttataaagtgaataccgcgcaaaaatcttaccgccgcc

SEQ ID NO: 279967 - DNA, 75 bp, synthetic construct
  source 1..75: mol_type = other DNA
atctggggcttcaaagaggtggtgatcgccggtcctaaggactacgtgaaatacaccgatcaatatcagacccgc

SEQ ID NO: 279968 - DNA, 75 bp, synthetic construct
  source 1..75: mol_type = other DNA
caggctgatgctgctgagcagagtctgagccgacaggcgctggctgcacaaaaagccgggatatccgtcgggcag

SEQ ID NO: 279969 - DNA, 75 bp, synthetic construct
  source 1..75: mol_type = other DNA
ggaagtccggcgcaaatgcggcgttcagagggtatcaggtttgagcagaacaacaacgtggtgattcagaacgac

SEQ ID NO: 279970 - DNA, 75 bp, synthetic construct
  source 1..75: mol_type = other DNA
agtttttcgcaggttaaaaacgcggccacgcagacctttgacggtattgcacagaatatggcagcgatgctgacc

SEQ ID NO: 279971 - DNA, 75 bp, synthetic construct
  source 1..75: mol_type = other DNA
ccggtggtcagaatccctggctgattctgctgcaacagggcggtcaggtgaaggacgccttcggcgggatgatcc

SEQ ID NO: 279972 - DNA, 75 bp, synthetic construct
  source 1..75: mol_type = other DNA
aaccatgtggtgattaacaacgacggcacgaacggtcagatagggccacaggcactgaaggcggtttatgacgta

SEQ ID NO: 279973 - DNA, 75 bp, synthetic construct
  source 1..75: mol_type = other DNA
cgcattccacggaagcgcactttgtacaccgtatggagatccctgtggtatggggcgaaatcttcctgctggtgg

SEQ ID NO: 279974 - DNA, 75 bp, synthetic construct
  source 1..75: mol_type = other DNA
acacgatttgcttaccctgcaacaacgttggctgccgaagctggggattgttcaaaaggttctgaacctgctgac

SEQ ID NO: 279975 - DNA, 75 bp, synthetic construct
  source 1..75: mol_type = other DNA
gcagttccggcattcctgccgtgctggcggcgtgtggggccagcctggtcggcgtgttgatgctgcgctttttca

SEQ ID NO: 279976 - DNA, 75 bp, synthetic construct
  source 1..75: mol_type = other DNA
gctggggagagtgggcggaaagtgcgacggacagtttttcgcaggttaaaagtgtggccacgcagacctttgacg

SEQ ID NO: 279977 - DNA, 75 bp, synthetic construct
  source 1..75: mol_type = other DNA
ttgatgctggtgctggcggtgttgttgggggcttataccggttttctgctgtcggcgctgaaatcgtatccgttc

SEQ ID NO: 279978 - DNA, 75 bp, synthetic construct
  source 1..75: mol_type = other DNA
tatcaatcataatttcgccactgaaagcgaagcgcgtcaggcattaaatgaagagacagatgcgcagggcgcaac

SEQ ID NO: 279979 - DNA, 75 bp, synthetic construct
  source 1..75: mol_type = other DNA
gtactaccatgtgattctgatgcgggaaccggggagtaacggcaatatgcacgccagcgcggatatttatcgcta

SEQ ID NO: 279980 - DNA, 75 bp, synthetic construct
  source 1..75: mol_type = other DNA
cggggctatgcggaaggtggttatgtcggcggtgccggaagtccggcgcagatgcggcgggcggaaggcattaat

SEQ ID NO: 279981 - DNA, 75 bp, synthetic construct
  source 1..75: mol_type = other DNA
gccagtgcgcagaaggcatttgatgaagcggataaaaaatggcagtggtaccagagccggagcctgcgccacggt

SEQ ID NO: 279982 - DNA, 75 bp, synthetic construct
  source 1..75: mol_type = other DNA
cgctggcgtacgcctggtaccagggagattccacgctttcagcgtttaataaaaccctggttctttccggtaatc

SEQ ID NO: 279983 - DNA, 75 bp, synthetic construct
  source 1..75: mol_type = other DNA
actgtgttttgtctggatggtgagggattcgctttgcggatttcgtatcgagcagggaaatacggtgcttgtggc

SEQ ID NO: 279984 - DNA, 75 bp, synthetic construct
  source 1..75: mol_type = other DNA
gtcagccggtgagcgtcaggaagacctgacgcatgcggcgctgctggcgcttgaaaccgagctccggacgctgga

SEQ ID NO: 279985 - DNA, 75 bp, synthetic construct
  source 1..75: mol_type = other DNA
cacatctgcactgaagaacacctggtctgcggaggagcagcttcgtggaagctggatggccgggctgaagtccgg

SEQ ID NO: 279986 - DNA, 75 bp, synthetic construct
  source 1..75: mol_type = other DNA
ggggcactgaaacagacatgggcggatgaagacatgctgcgcggtgactggctggccgggctgaagtccggctgg

SEQ ID NO: 279987 - DNA, 75 bp, synthetic construct
  source 1..75: mol_type = other DNA
gcgaaaacagcaagatgtcatggacgcaatcagaaaccggttcagcgattacctggaaatacccaagctgcattc

SEQ ID NO: 279988 - DNA, 75 bp, synthetic construct
  source 1..75: mol_type = other DNA
gcgacgtagagaaagcggcgaaggttttttccatcaacgaactggccccgatacaagaaagcctgaaagagttaa

SEQ ID NO: 279989 - DNA, 75 bp, synthetic construct
  source 1..75: mol_type = other DNA
cgttaattattttgttgtcttctctggttatgggctgtacgcaacataaaacagatatgccccgacagttggtta

SEQ ID NO: 279990 - DNA, 75 bp, synthetic construct
  source 1..75: mol_type = other DNA
gatgacatgatggcagcgcaccgtgtgccaccgcagatgatgggaatcatgccgagtaacgttggggggtttgga

SEQ ID NO: 279991 - DNA, 75 bp, synthetic construct
  source 1..75: mol_type = other DNA
cagccagcagtctttcgcccgtttcgttcaggattatctggtgtttggtaatgcttatctggaaaagcgcaccaa

SEQ ID NO: 279992 - DNA, 75 bp, synthetic construct
  source 1..75: mol_type = other DNA
tacctgaggtcactgtagcaacagaaccgcagccctctgcagaatgcttcacctttggcgatcccattccggtac

SEQ ID NO: 279993 - DNA, 75 bp, synthetic construct
  source 1..75: mol_type = other DNA
tggatggccggtctgaagtccggctggggcgagtgggcagaaagtgcgacggacagtttttcgcaggttaaaagc

SEQ ID NO: 279994 - DNA, 75 bp, synthetic construct
  source 1..75: mol_type = other DNA
aagtccggcgcaaatgcggcgttcagagggtatcagatttgagcagaacaacaacgtggtgattcagaacgacgg

SEQ ID NO: 279995 - DNA, 75 bp, synthetic construct
  source 1..75: mol_type = other DNA
gcgcagtgcgggctgacggcggaacagatggccgcgcaactggaggcggaatacatcccggagaggaaacttcat

SEQ ID NO: 279996 - DNA, 75 bp, synthetic construct
  source 1..75: mol_type = other DNA
gatgagcaggttgtaaaggcgatggcaaaatggcgatttgagaaggacaagccgcgtaaaggcgtgaagaaaaca

SEQ ID NO: 279997 - DNA, 75 bp, synthetic construct
  source 1..75: mol_type = other DNA
tggtcaatattaaaccagtatgataacaatacggttaataatctaaaaaatatatttactcagaatatccagata

SEQ ID NO: 279998 - DNA, 75 bp, synthetic construct
  source 1..75: mol_type = other DNA
ccgcgaccagttgttgaatctggcgaataccactgacggtaacgggcgctacatttttgctggttataaaaccga

SEQ ID NO: 279999 - DNA, 75 bp, synthetic construct
  source 1..75: mol_type = other DNA
gtgctctcacaagcgcaggcgcaaaacagtcagtacacgctggcgcgtactttcgcgacgcaaaaagtgtcgctg

SEQ ID NO: 280000 - DNA, 75 bp, synthetic construct
  source 1..75: mol_type = other DNA
agcgagtcgttaacccttctgacgatcccattgcagcatcacaagccgtagttctctcccaggcacaggcgcaaa

SEQ ID NO: 280001 - DNA, 75 bp, synthetic construct
  source 1..75: mol_type = other DNA
acgcgactatttcatcttacatcatgcagcaaacggcgttgcaggcgtcgtacaaagcgtttactgatatgcagg

SEQ ID NO: 280002 - DNA, 75 bp, synthetic construct
  source 1..75: mol_type = other DNA
gcagcggcattggataaaactaaccgtgggctgaaaaattcgctgaataatgtcctgactgtacgcgcagaatta

SEQ ID NO: 280003 - DNA, 75 bp, synthetic construct
  source 1..75: mol_type = other DNA
atctgcgccgtttagcgaaacggatggcgaatatatcggtggaaaagaaagtattaagcaacaggtcgatgcttc

SEQ ID NO: 280004 - DNA, 75 bp, synthetic construct
  source 1..75: mol_type = other DNA
ttttccgatggatcaggtggcctggggagaaatcaaatctgaccagcagtggaaggtgttgtcgaagctgaaaaa

SEQ ID NO: 280005 - DNA, 75 bp, synthetic construct
  source 1..75: mol_type = other DNA
ccgtatcagttgcatgaccagaacgaacgcacgccgattggcggcaaaatcgttttccagcgttggcatgacagc

SEQ ID NO: 280006 - DNA, 75 bp, synthetic construct
  source 1..75: mol_type = other DNA
cggttaccaggacagcctgtttacctcaccggaagtggcgcgcaatgttgcgaaaccgctggtcagttatatcga

SEQ ID NO: 280007 - DNA, 75 bp, synthetic construct
  source 1..75: mol_type = other DNA
tgacgctggaattaagcggttgcccgatagatgccaacggtttctgcccgatggataagtttgatagcgtgttga

SEQ ID NO: 280008 - DNA, 75 bp, synthetic construct
  source 1..75: mol_type = other DNA
caaagccctggtcaccgatcgcaccagtgcaccgaaaatcacggtattagttgggcacgactccaacattgctct

SEQ ID NO: 280009 - DNA, 75 bp, synthetic construct
  source 1..75: mol_type = other DNA
ttcaaatgctcaggcacaaaccgtaccggaaggctatcagctacagcaagtgctcatgatgagccgccataactt

SEQ ID NO: 280010 - DNA, 75 bp, synthetic construct
  source 1..75: mol_type = other DNA
ccagtaacgcggtagcggaaccagacggtagcgcttctgaaaccaatcttttgccatgctggatagcgccatcgc

SEQ ID NO: 280011 - DNA, 75 bp, synthetic construct
  source 1..75: mol_type = other DNA
ggcgaaaaaggattatgaagggccttattcagttcttcctgacgggcggtatatttctccagcggcgtcagcaga

SEQ ID NO: 280012 - DNA, 75 bp, synthetic construct
  source 1..75: mol_type = other DNA
gttattgacctgagtctggatgcggtccgtttcgatgagcagatgagccgggtaaggcgtcatttttcaggtctg

SEQ ID NO: 280013 - DNA, 75 bp, synthetic construct
  source 1..75: mol_type = other DNA
gcggctatgcggaagggggttatgtgggtggtgccggaagtccggcgcagatgcggcgggcggaaggtattaatt

SEQ ID NO: 280014 - DNA, 75 bp, synthetic construct
  source 1..75: mol_type = other DNA
accttgagtgacgatgaccgggcatcgctggcaacggatattcaggggctccgtgaccagttgttgaatctggcg

SEQ ID NO: 280015 - DNA, 75 bp, synthetic construct
  source 1..75: mol_type = other DNA
tagcgaagcggataaagaaatcgctgctgcggcgttagataaaaccaaccgcggactgaaaaactcgctgaacaa

SEQ ID NO: 280016 - DNA, 75 bp, synthetic construct
  source 1..75: mol_type = other DNA
cagccctaaaaacgccggtcgcggatagcgaagcggataaagaaaccgccgctgcggcactggataaaaccaacc

SEQ ID NO: 280017 - DNA, 75 bp, synthetic construct
  source 1..75: mol_type = other DNA
gaatctggcctgcaattccgcgtgatcaaccagggtgaaggcgcaattccggcacgtactgaccgcgttcgtgtt

SEQ ID NO: 280018 - DNA, 75 bp, synthetic construct
  source 1..75: mol_type = other DNA
tatcgaaatggttcgtcgatatgctcacctcgcgcctaatcaccttaccgaacacgcacggcaaatagactcgat

SEQ ID NO: 280019 - DNA, 75 bp, synthetic construct
  source 1..75: mol_type = other DNA
ttcgctgggcgtttttatctgggcgtggccggatggaccgcagttaatggccgagcgattgcagcagcttgcaag

SEQ ID NO: 280020 - DNA, 75 bp, synthetic construct
  source 1..75: mol_type = other DNA
aaaggggcacagatggaaatttatggtatgatagtgactgatgaagggttcgtggagcgtgtagttaaagttagt

SEQ ID NO: 280021 - DNA, 75 bp, synthetic construct
  source 1..75: mol_type = other DNA
tgtaacaatagaggggagacctgtcgcttatcatggttcagttgttggggttaataaccataactgccttggtaa

SEQ ID NO: 280022 - DNA, 75 bp, synthetic construct
  source 1..75: mol_type = other DNA
ccgtggtgagccggctgaattcccggttaacggcgtgatcccaggctggattgaagcactgactctgatgccggt

SEQ ID NO: 280023 - DNA, 75 bp, synthetic construct
  source 1..75: mol_type = other DNA
acagtgggacgatgactactggaaagaagggaaaagtgaggtggaagacggtgtttacgatcagttaagcgcccg

SEQ ID NO: 280024 - DNA, 75 bp, synthetic construct
  source 1..75: mol_type = other DNA
cgtggcactgcgatttcgtcgcgccagatggatcaagaattagacgctctcttgaaacatcggacaaaaggcaag

SEQ ID NO: 280025 - DNA, 75 bp, synthetic construct
  source 1..75: mol_type = other DNA
gcctgagttcacagataaaacactctccaggaaaaccggggcggttcatacagaggaggaatcgaagcgcctgtt

SEQ ID NO: 280026 - DNA, 75 bp, synthetic construct
  source 1..75: mol_type = other DNA
aagggaaaaagtgctgttgaagacggcgtttatgatcaactcagcgcccgccttgcacagtggcaacgttgtttt

SEQ ID NO: 280027 - DNA, 75 bp, synthetic construct
  source 1..75: mol_type = other DNA
gttttggggctggagggaattggcgaggctggctggcgtacgctgcaccagactcatcgctttgaacatctcttt

SEQ ID NO: 280028 - DNA, 75 bp, synthetic construct
  source 1..75: mol_type = other DNA
tcagtatcctgtgctggcaatcgtcggcgcaggcggcctgcccggcatggtcgccagtcaaagcacatgacgaaa

SEQ ID NO: 280029 - DNA, 75 bp, synthetic construct
  source 1..75: mol_type = other DNA
gactacagcgcagcgcctccgggtagcggcgtcgggccgtttatcatgcagcaggaaggcatggggcgtctgttt

SEQ ID NO: 280030 - DNA, 75 bp, synthetic construct
  source 1..75: mol_type = other DNA
ggcgaaatatccaaagctggccgttgcttatccttccggtaatctgcctgatttgcgcggtgagtttctgcgtgg

SEQ ID NO: 280031 - DNA, 75 bp, synthetic construct
  source 1..75: mol_type = other DNA
ctttgatacacaaaatgtcgtgagaacatcaacagaaactcgctcccgcaatatcgcgtttaacttcctcgtaag

SEQ ID NO: 280032 - DNA, 75 bp, synthetic construct
  source 1..75: mol_type = other DNA
ccgcaggaactggcatatggtgagcgcggcgctggcgcgtccatcccgccgttcagcactttggtgtttgaagtc

SEQ ID NO: 280033 - DNA, 75 bp, synthetic construct
  source 1..75: mol_type = other DNA
tttcgttcatggcggagccatgctgcaggaagtgtgtgttcctgtgttgaagattcgcgcgcttgaaaagaaagc

SEQ ID NO: 280034 - DNA, 75 bp, synthetic construct
  source 1..75: mol_type = other DNA
aagtagatgacttcaaagctcatcggcatgagtcctatttttatgcaggagtatcacgtaacgaggtacctctga

SEQ ID NO: 280035 - DNA, 75 bp, synthetic construct
  source 1..75: mol_type = other DNA
aaggccattcactcagagaccactcacataaccagcaggtctggacaggttcaaatacaacatcgtcaactattg

SEQ ID NO: 280036 - DNA, 75 bp, synthetic construct
  source 1..75: mol_type = other DNA
ggcgaacgcggcggctctcggtaccagactcaacctgacgcagatggccgtcggtgatgcgaatggtacgctgct

SEQ ID NO: 280037 - DNA, 75 bp, synthetic construct
  source 1..75: mol_type = other DNA
tatgtcgacgataaggttattgaggtgaaagcctatgccgatagtctgctggccgcacacctcgccgccgctgac

SEQ ID NO: 280038 - DNA, 75 bp, synthetic construct
  source 1..75: mol_type = other DNA
cggctttccgctgccgtggccgcaggcaactccgccgagtggctggctgaaatgcaacggtgcggcttttgacaa

SEQ ID NO: 280039 - DNA, 75 bp, synthetic construct
  source 1..75: mol_type = other DNA
actgttcgatgagaccggcgcgctgattgccgtggggaattgcccggaaagctataagccgcagctcgttgaagg

SEQ ID NO: 280040 - DNA, 75 bp, synthetic construct
  source 1..75: mol_type = other DNA
ggtgatcagattgctctggagcattttgccagctttttatggggctttatgatacccgcaaaaataccagaataa

SEQ ID NO: 280041 - DNA, 75 bp, synthetic construct
  source 1..75: mol_type = other DNA
gggatgcacttaaaaaaatgataatggatacaaataatggtgatcagattgctctggagcattttgccagctttt

SEQ ID NO: 280042 - DNA, 75 bp, synthetic construct
  source 1..75: mol_type = other DNA
tgaaaaaacaaatcgggaatcatcaccgttgggtatttgtgtataaggaaagctgtaccaaaccagacggaacga

SEQ ID NO: 280043 - DNA, 75 bp, synthetic construct
  source 1..75: mol_type = other DNA
cgcgtggaacagcagtcgctgctttcgcatccggcaaactggctgacgttacaacgtttaaacgatacccagtat

SEQ ID NO: 280044 - DNA, 75 bp, synthetic construct
  source 1..75: mol_type = other DNA
ataaccgtttgcggctgatgcaactggcggggccagggcgcgctttacctggtggggtgaagatggcaatggcga

SEQ ID NO: 280045 - DNA, 75 bp, synthetic construct
  source 1..75: mol_type = other DNA
taccagccaggcgaactggtaaatgtggaattaacctcattgctgaagggcaaacctgtttctgcacaactaacg

SEQ ID NO: 280046 - DNA, 75 bp, synthetic construct
  source 1..75: mol_type = other DNA
agcgttattgacgctggaacgcgatcgagtggaacagcagtcgctgctatcgcgcccggcaaactggctgaagtt

SEQ ID NO: 280047 - DNA, 75 bp, synthetic construct
  source 1..75: mol_type = other DNA
catgacgttgctgaaaaaagcgcagttgaagtccacggtgatgccacaggttcagcaatatgcgtgggataaagc

SEQ ID NO: 280048 - DNA, 75 bp, synthetic construct
  source 1..75: mol_type = other DNA
cgggcaggggcgtgcgtatttgcgctcggaaaaaaatctctacatgaagtggagtatgccaacggtctatcgcct

SEQ ID NO: 280049 - DNA, 75 bp, synthetic construct
  source 1..75: mol_type = other DNA
agactggcagcggtcggcaggtgccagggcagaactggcactggcggagaagctggggcatgcggttattttaca

SEQ ID NO: 280050 - DNA, 75 bp, synthetic construct
  source 1..75: mol_type = other DNA
tgctgaaaggctggcagcggtcagcaggcgctaaggcggaactggcactggcggagaagctggggcatgcagtta

SEQ ID NO: 280051 - DNA, 75 bp, synthetic construct
  source 1..75: mol_type = other DNA
gtgaggatttatatcgccggtccgatgacgggatatgaaaatttcaaccgcgaggcgtttcacagggcggaagat

SEQ ID NO: 280052 - DNA, 75 bp, synthetic construct
  source 1..75: mol_type = other DNA
aactattcccacaggataaagccgttcaagctgaatcaaaattagagaaagccacagatgtaggaaaatggcaca

SEQ ID NO: 280053 - DNA, 75 bp, synthetic construct
  source 1..75: mol_type = other DNA
agcaaccaaatctttctgagatatctaaatgccgagcagaaaatgataaagaagccagactaaactgctacgata

SEQ ID NO: 280054 - DNA, 75 bp, synthetic construct
  source 1..75: mol_type = other DNA
caaccgtgaggcgtttcacaaggcggaagaggcgctgaaacgggaagggcataccgtcttaaacccggcagtgct

SEQ ID NO: 280055 - DNA, 75 bp, synthetic construct
  source 1..75: mol_type = other DNA
gggtatcgggcaacgacggtggtatttgtctctgataccgtggcgttgagtaaagtgtcgggtaacgagcttctg

SEQ ID NO: 280056 - DNA, 75 bp, synthetic construct
  source 1..75: mol_type = other DNA
aatggccaagaaagcctttaaggcttgtttaatgtggtgtaatgaaaaagaaaatacactacatataaagaaaat

SEQ ID NO: 280057 - DNA, 75 bp, synthetic construct
  source 1..75: mol_type = other DNA
aaacgaaatggtcgtcctactgtgatcatcgactgttttactgatgaaggtcgtcttcaatacaacgatattcca

SEQ ID NO: 280058 - DNA, 75 bp, synthetic construct
  source 1..75: mol_type = other DNA
actgctttactgatgaaggtcgtgaacaatacaacaacattccggcaattattgttcgtgatgacctgccgtttg

SEQ ID NO: 280059 - DNA, 75 bp, synthetic construct
  source 1..75: mol_type = other DNA
cagaatacacgccaaaaccagcgtccgttgcaacgaaggctacgcatctttcatttataaaggccctgctaagag

SEQ ID NO: 280060 - DNA, 75 bp, synthetic construct
  source 1..75: mol_type = other DNA
ctgctgtggatattaatgggataaatcatacggataaggatataaattatatacacatcaatggttacggcggac

SEQ ID NO: 280061 - DNA, 75 bp, synthetic construct
  source 1..75: mol_type = other DNA
gtgacaaccgtctgcgagggctatggtacaccgaattatcctatcaaagaaccccgcgagatgaaggaacctgca

SEQ ID NO: 280062 - DNA, 75 bp, synthetic construct
  source 1..75: mol_type = other DNA
gccgtttattctgacaaaaagaaaatatccaggttcttttatctgctgacacctgtcagataccttctggctgct

SEQ ID NO: 280063 - DNA, 75 bp, synthetic construct
  source 1..75: mol_type = other DNA
atgaaggataatatcgtagattttcaaagaatcagggacagcatgactgatcattcaactgatgttgcaaatgat

SEQ ID NO: 280064 - DNA, 75 bp, synthetic construct
  source 1..75: mol_type = other DNA
ttactaatggtaaccacattacgtttgtcagccacggtgagacgaccttactgagcgaaaagggcaaactgaaat

SEQ ID NO: 280065 - DNA, 75 bp, synthetic construct
  source 1..75: mol_type = other DNA
tgaatcccatttctctagtgcatgttatgcgttttgccgtaataagaagccgaccattgttgttaactgcttcac

SEQ ID NO: 280066 - DNA, 75 bp, synthetic construct
  source 1..75: mol_type = other DNA
gtcacaacattcttttcaactctgatgaatctcatttctctagtgcatggtatgccttccaccgtaataagaagc

SEQ ID NO: 280067 - DNA, 75 bp, synthetic construct
  source 1..75: mol_type = other DNA
gccgccgacttcttcccgcccgatttcagccagtggcaggattacctcaccgaaatggccgtcacgctgcaaatc

SEQ ID NO: 280068 - DNA, 75 bp, synthetic construct
  source 1..75: mol_type = other DNA
gtggtatctgaagagcaacgcgtattccggcgctgtcagttcattttatcactgacactgatacctgctttatta

SEQ ID NO: 280069 - DNA, 75 bp, synthetic construct
  source 1..75: mol_type = other DNA
cacctgctggggctgaaagtgggcgacaaaactaccttttcgctggagcctgatgcggcgtttggcgtgccgtca

SEQ ID NO: 280070 - DNA, 75 bp, synthetic construct
  source 1..75: mol_type = other DNA
gtcagctggcaacggggaacccgctggtctggcgcacagccggcaccggaagaaacgttcggcgaggcaacggcg

SEQ ID NO: 280071 - DNA, 75 bp, synthetic construct
  source 1..75: mol_type = other DNA
gccggcaccggaagaaacattcggtgaggcaacggcgctcagtaagatcctgcagatgaatgcgtcctttaatct

SEQ ID NO: 280072 - DNA, 75 bp, synthetic construct
  source 1..75: mol_type = other DNA
ggcgagcagccaggggaaagcgacattcttattacccgcaaacaggataaatactggcgactgggattttctctt

SEQ ID NO: 280073 - DNA, 75 bp, synthetic construct
  source 1..75: mol_type = other DNA
ttgactggaaaattatgttgcaggaacgagagggctgaggaacaaagcttattccggcgctgtccgtccttgctg

SEQ ID NO: 280074 - DNA, 75 bp, synthetic construct
  source 1..75: mol_type = other DNA
tatcgacagcaaagatgatttaaaaagcctgctgctggtagacagtgcgctgcgcattacagcattaggtgacac

SEQ ID NO: 280075 - DNA, 75 bp, synthetic construct
  source 1..75: mol_type = other DNA
ctgttccgcagtcggaagccgacgaaacccgtaataaagcccgcgctgtactgcgcgctattgccaccgcgcatc

SEQ ID NO: 280076 - DNA, 75 bp, synthetic construct
  source 1..75: mol_type = other DNA
tttctgaacatctgatgctggtggatctcgcccgtaatgaccttgcgcgcatttgcactcctggcagccgctacg

SEQ ID NO: 280077 - DNA, 75 bp, synthetic construct
  source 1..75: mol_type = other DNA
aggcccgtaggtcgcgtaactacattaatgatacggaaatccaggtgcagcgccggcagacagcggcctggcgac

SEQ ID NO: 280078 - DNA, 75 bp, synthetic construct
  source 1..75: mol_type = other DNA
ataaacccggagaagctcattcatcagcctggaccctggctgcaaaacgtgggcgggatgcaggaggcggaaaat

SEQ ID NO: 280079 - DNA, 75 bp, synthetic construct
  source 1..75: mol_type = other DNA
gccatattcatgttccgcgtgatggtcgtgactacgatccggatgttctgcagaaggcggttctggatgcggtga

SEQ ID NO: 280080 - DNA, 75 bp, synthetic construct
  source 1..75: mol_type = other DNA
ctggcgtggcgtacgccactgccggagcaggaattatatctgggaatggattacggcgaggtgggcggagccggc

SEQ ID NO: 280081 - DNA, 75 bp, synthetic construct
  source 1..75: mol_type = other DNA
accgaagatgccgcagagttgcgccgccgtacgctggagtcttaccgccatctgtgcgcctgttccctgatgcta

SEQ ID NO: 280082 - DNA, 75 bp, synthetic construct
  source 1..75: mol_type = other DNA
gtatgggcaaaagcacgcgcagcgatctcgcgtgcgggtattcatgtatttgggtttcgggttgttgagcctcac

SEQ ID NO: 280083 - DNA, 75 bp, synthetic construct
  source 1..75: mol_type = other DNA
taataaactggcagaagtatcgggagctgaaaacccatttgaaagaccctacgatgataagccgtatcctcgcgc

SEQ ID NO: 280084 - DNA, 75 bp, synthetic construct
  source 1..75: mol_type = other DNA
catgagatacccgactggttagccgggtattttggccgtcgttacgaaaagctgtttgctggtcgtgacgggcgt

SEQ ID NO: 280085 - DNA, 75 bp, synthetic construct
  source 1..75: mol_type = other DNA
tgcaaaaagcggccagcgcttatgtatcccgcaaaacactgggcgaatggatagaccagaaaaagcggaatctgg

SEQ ID NO: 280086 - DNA, 75 bp, synthetic construct
  source 1..75: mol_type = other DNA
gcgatctggttgttcgtctggcttatgaaatcactgagcagggtaatgaatacgcagaggacgtgcagcgcgttc

SEQ ID NO: 280087 - DNA, 75 bp, synthetic construct
  source 1..75: mol_type = other DNA
tctgctggatgacgacatttacgcgagtgtggagtggttatctgacgctgagaggatatgaggaacgacaaaaaa

SEQ ID NO: 280088 - DNA, 75 bp, synthetic construct
  source 1..75: mol_type = other DNA
ttgtcgtgactgacgcgtcagggacctttaatgaaattacccggcattcggcatgggatcgcatgtcgcaagctg

SEQ ID NO: 280089 - DNA, 75 bp, synthetic construct
  source 1..75: mol_type = other DNA
ttgacctgggcgcattgcaggccggggcgtcggtgaagggtgaattcgaaaaacgtttcaaagggctgatggcgg

SEQ ID NO: 280090 - DNA, 75 bp, synthetic construct
  source 1..75: mol_type = other DNA
atggtcactaagttacaacttcccgaatatgactctattaaggtactccgaaccatcatttcagaaagagagaga

SEQ ID NO: 280091 - DNA, 75 bp, synthetic construct
  source 1..75: mol_type = other DNA
gaattaaacctttgttgcatcagtgtgtgaaggtgctggataaacccggcatcacgccagatggtttaacattag

SEQ ID NO: 280092 - DNA, 75 bp, synthetic construct
  source 1..75: mol_type = other DNA
ttacgcactggtgccttttgggtttatcctcgccgcaccggagcaaaacgccctggcaggcggctggctgctgtt

SEQ ID NO: 280093 - DNA, 75 bp, synthetic construct
  source 1..75: mol_type = other DNA
agcattgattgaggtggctgagcgtatagtacgagtttatcgatgtggagatgtgaattgttgtctggaacggtt

SEQ ID NO: 280094 - DNA, 75 bp, synthetic construct
  source 1..75: mol_type = other DNA
ggcactggtcgctgcagttagcgccaatgtaaaagccattgatgaacggcagccttttgccgcgcagctggcggc

SEQ ID NO: 280095 - DNA, 75 bp, synthetic construct
  source 1..75: mol_type = other DNA
ggcgctggttgccgccgttgccgccaatgtaaaagccattgatgaacggcagctttttgccgcgcagttggcggc

SEQ ID NO: 280096 - DNA, 75 bp, synthetic construct
  source 1..75: mol_type = other DNA
cgggcgcggtgagcagttgcgggcagcaagcgcaaacgcgtgggttgaaacatctgttcgtgatggcagacagct

SEQ ID NO: 280097 - DNA, 75 bp, synthetic construct
  source 1..75: mol_type = other DNA
aattactcagatagttcaaacgttgtcaaaaaagcagctctacatttagcatttcttattttttcaatcgttgat

SEQ ID NO: 280098 - DNA, 75 bp, synthetic construct
  source 1..75: mol_type = other DNA
ccaggagctatttgccgtagctggccttcacgattgcgctatgccagaggttttatagaacagtggcaaaagact

SEQ ID NO: 280099 - DNA, 75 bp, synthetic construct
  source 1..75: mol_type = other DNA
ttcctcactttcagttcgaaaaagtgggatattatggtgagttattcacagtagtggtagttaatcagacatttg

SEQ ID NO: 280100 - DNA, 75 bp, synthetic construct
  source 1..75: mol_type = other DNA
tgtcctgctaacgccatccggcagagcatctgccctggcatttatggtgacctggcgtgccgatcgtcgctataa

SEQ ID NO: 280101 - DNA, 75 bp, synthetic construct
  source 1..75: mol_type = other DNA
agcttggcctgcgcgagcatattcagcgacgcaaggccttctttagcactaaacgcacgcaggcgctgaaaaacc

SEQ ID NO: 280102 - DNA, 75 bp, synthetic construct
  source 1..75: mol_type = other DNA
ttcttgagaatgcggaaatgagaacccgttatagccaatacgcggtaaccattgatttggcattccaagatgatt

SEQ ID NO: 280103 - DNA, 75 bp, synthetic construct
  source 1..75: mol_type = other DNA
atgcgggtggtagtttatcatctgagtttggaagctccattatccagaaaaagaaagatgcaatggaggctggga

SEQ ID NO: 280104 - DNA, 75 bp, synthetic construct
  source 1..75: mol_type = other DNA
tggcgtgctgattgcgaagaaaggtcagttactgagtagctttgcgcatctgcgtgatgacggtacaaccgcatc

SEQ ID NO: 280105 - DNA, 75 bp, synthetic construct
  source 1..75: mol_type = other DNA
aaaacgctaacgtcgtaatggtgatgggtggtaacgctgctgaagcgcatcccgtcggtttccgctgggcgatgg

SEQ ID NO: 280106 - DNA, 75 bp, synthetic construct
  source 1..75: mol_type = other DNA
agttaaatagattagtcataactaaggctggtaaacagttatatgacgaaaaatttcacgatggtataaacataa

SEQ ID NO: 280107 - DNA, 75 bp, synthetic construct
  source 1..75: mol_type = other DNA
ttaataggcggcggacttgttttttttgctgtatgccacgaacaggttcgaagttcattaagaaagttggatgaa

SEQ ID NO: 280108 - DNA, 75 bp, synthetic construct
  source 1..75: mol_type = other DNA
gctggagctgagccgtaataacagcaatgcccatgaggccgggctggcgcttgcaagggcgcaacagctgatggc

SEQ ID NO: 280109 - DNA, 75 bp, synthetic construct
  source 1..75: mol_type = other DNA
ctcatggcgcgatacatcatcgggcgactgtcgacgaaccataacattttatggtttcagtgaacggcctgccgt

SEQ ID NO: 280110 - DNA, 75 bp, synthetic construct
  source 1..75: mol_type = other DNA
ttgttcgtctgtatgaacaagacgcgctgcggatgggtaaaaaagagcagttcccgtatgtgggtacgacctatc

SEQ ID NO: 280111 - DNA, 75 bp, synthetic construct
  source 1..75: mol_type = other DNA
aatgaagaagaaaaacaacgtctcactgctcgcctgaacgaactacgtcagcaactgaccgaagccgcgccgccg

SEQ ID NO: 280112 - DNA, 75 bp, synthetic construct
  source 1..75: mol_type = other DNA
cccacatcggcgttgatgtaccaaacgccgatgcattcttcccggcaagcatgatgcgtaacttaggctttgtgc

SEQ ID NO: 280113 - DNA, 75 bp, synthetic construct
  source 1..75: mol_type = other DNA
tgcggtttcgctaactttggttctatcggagtagtggtgggggcgttttctgcggttgcgccacaccgtgcgccg

SEQ ID NO: 280114 - DNA, 75 bp, synthetic construct
  source 1..75: mol_type = other DNA
cgacgttgttctctaaccacattcctgattatcgtaatttgatgaccagttatgacacattaacgaagcagaaat

SEQ ID NO: 280115 - DNA, 75 bp, synthetic construct
  source 1..75: mol_type = other DNA
tggcgcagctcctcatattaaaatctatgaaggagagtatgataaggcaatgaaagatgcagatggctggctaga

SEQ ID NO: 280116 - DNA, 75 bp, synthetic construct
  source 1..75: mol_type = other DNA
ggcaggttttatcttcgccttccgtgtacttccggccatcatttttgttacagcgcttatcagtctgctgtacta

SEQ ID NO: 280117 - DNA, 75 bp, synthetic construct
  source 1..75: mol_type = other DNA
ccggaagtttgattggacagaagctggcgattaatgaatttgtcgcttacctcaatttctcaccctatctacaaa

SEQ ID NO: 280118 - DNA, 75 bp, synthetic construct
  source 1..75: mol_type = other DNA
gaatggtggtattgctgacgattgcgtttttactgtcagtaaacaagaagaagatcagcctgcgtaccgttggcg

SEQ ID NO: 280119 - DNA, 75 bp, synthetic construct
  source 1..75: mol_type = other DNA
cgcacggcgcaccactgggggaagaagaagtggcgctggcacggcaaaaactgggctggcaccatccgccatttg

SEQ ID NO: 280120 - DNA, 75 bp, synthetic construct
  source 1..75: mol_type = other DNA
atgtcccgaaaagaccttgccaatgcgattcgcgcactcagtatggatgcggtacaaaaagccaattctggtcat

SEQ ID NO: 280121 - DNA, 75 bp, synthetic construct
  source 1..75: mol_type = other DNA
agcgctcagctgcgacccaaacgcccgggctgagcaacctagtgcttgtcctgatatcaacacgctttataccaa

SEQ ID NO: 280122 - DNA, 75 bp, synthetic construct
  source 1..75: mol_type = other DNA
gatgctgctctacagtttgctacatctgaccggttacgacctgccgctggaagagctgaagaacttccgtcagct

SEQ ID NO: 280123 - DNA, 75 bp, synthetic construct
  source 1..75: mol_type = other DNA
cgaccgatattttcgacgcccaggatgaggaatatcgggagtcggtgttgccttctaacgttgcggctcgcgtgg

SEQ ID NO: 280124 - DNA, 75 bp, synthetic construct
  source 1..75: mol_type = other DNA
agagaaattagcgggagaaggtcgcaatgttcgcgtagtttccctgccctcgaccgatattttcgacgcccagga

SEQ ID NO: 280125 - DNA, 75 bp, synthetic construct
  source 1..75: mol_type = other DNA
gtgcgaaataagcaggtggtgttactcattgccggaatatccggcgtcgcgacgggaataatcgtcagcctgaat

SEQ ID NO: 280126 - DNA, 75 bp, synthetic construct
  source 1..75: mol_type = other DNA
aggaaggtgtacaacaaggcaaaggacgcggcgttcatctgccagcgtttgatgacttctggaataacaaagagt

SEQ ID NO: 280127 - DNA, 75 bp, synthetic construct
  source 1..75: mol_type = other DNA
atttaactcatatgaaccattgtcgtcatcttttttatattataacaaagaaaaaaaacaaaatatatttaacat

SEQ ID NO: 280128 - DNA, 75 bp, synthetic construct
  source 1..75: mol_type = other DNA
tcattgccggaatatccggtatcgcgacaggaataatcgtcagcctgaatatcccctttatccgtcaggggcttt

SEQ ID NO: 280129 - DNA, 75 bp, synthetic construct
  source 1..75: mol_type = other DNA
gggcaattgtgggatggattttggtgtctgaaatatattacagccgcatgaccggtctgaatgaatcatcagaaa

SEQ ID NO: 280130 - DNA, 75 bp, synthetic construct
  source 1..75: mol_type = other DNA
tcatcagtgatatcagaggaaacttataatgacagaaaacaaaaagaatcaggaattcaaaatcagaaaaattag

SEQ ID NO: 280131 - DNA, 75 bp, synthetic construct
  source 1..75: mol_type = other DNA
tcacgatccgcaggcggtgaaagaagcgattctcgaagcgcaaagcgtgaaagataagccgtcgttgattatctg

SEQ ID NO: 280132 - DNA, 75 bp, synthetic construct
  source 1..75: mol_type = other DNA
ctgcaaatgctcggcgacgcgctgggggagcagtacgctcagcatggtaactggcgtttcctgcgtaataatgat

SEQ ID NO: 280133 - DNA, 75 bp, synthetic construct
  source 1..75: mol_type = other DNA
ggttggtccgcgagcgccgattccacctgacggtacacggcgacccattctggtcaacggtgcggaagtgggcgc

SEQ ID NO: 280134 - DNA, 75 bp, synthetic construct
  source 1..75: mol_type = other DNA
gggctggcgatttgcctgaacattgttgaagcacataatggtcgcattattgctgcccattcgccttttggcggg

SEQ ID NO: 280135 - DNA, 75 bp, synthetic construct
  source 1..75: mol_type = other DNA
cgattttatggccgatatttcacacgaactgcgtacgccattagcggtgctgcgcggtgaactggaagccattca

SEQ ID NO: 280136 - DNA, 75 bp, synthetic construct
  source 1..75: mol_type = other DNA
cgcgaccgtttaatgcagttattcaataacttactggaaaacagtctacgttacacagacagcggcggcagcctg

SEQ ID NO: 280137 - DNA, 75 bp, synthetic construct
  source 1..75: mol_type = other DNA
cactggcgcgcggtttgctggccccggtgaaacgactggtagatggtacgcacaaactggcagcaggcgatttta

SEQ ID NO: 280138 - DNA, 75 bp, synthetic construct
  source 1..75: mol_type = other DNA
atggatgaagaagaaccggtatctcaaaaatttgacagcctgaatgatctcctcaatgaactgaatcgggctggc

SEQ ID NO: 280139 - DNA, 75 bp, synthetic construct
  source 1..75: mol_type = other DNA
aggactgggagaaaacgacgcagaaatatatcaatgaattgcaggcgaatccggcgaaaattgcgacccgtaaag

SEQ ID NO: 280140 - DNA, 75 bp, synthetic construct
  source 1..75: mol_type = other DNA
aaagcgcggcagattatggtttatacccatgactcgattggtctgggggaagatggtccgacgcaccaggcggtt

SEQ ID NO: 280141 - DNA, 75 bp, synthetic construct
  source 1..75: mol_type = other DNA
cgggttagggctttacctgctggacaaggagcgttttcacctggaccagaaagccaaaggtcataatgcaccgga

SEQ ID NO: 280142 - DNA, 75 bp, synthetic construct
  source 1..75: mol_type = other DNA
aatcctctggattgcgtcagtcgcagtgatttacttcgtgaaacggacctggcaaaaattgccgcaatccttatc

SEQ ID NO: 280143 - DNA, 75 bp, synthetic construct
  source 1..75: mol_type = other DNA
aatttactgtgccactacaaattacctgtaaagttattaatgagccttatatctctggtcagcgttattgcacgt

SEQ ID NO: 280144 - DNA, 75 bp, synthetic construct
  source 1..75: mol_type = other DNA
ttatggtattttgcttaacttttatggctatcgtgacatcaataatgttgtatcatatttctggtataagaatga

SEQ ID NO: 280145 - DNA, 75 bp, synthetic construct
  source 1..75: mol_type = other DNA
gccagcgttaaagggatgaatgaacctgctgatggtgccatgaatcttgttaaaaccagtaatggctggaaagcc

SEQ ID NO: 280146 - DNA, 75 bp, synthetic construct
  source 1..75: mol_type = other DNA
gccagcgttaaaggaatgaatgaacctgctgatggtgcaatgaatctcgttaaaaccagtaatggctggagagct

SEQ ID NO: 280147 - DNA, 75 bp, synthetic construct
  source 1..75: mol_type = other DNA
gtatctgatgcaatgcacgcctggggtattgacggccaccagctgacggtggaaatcacggaaagcatgatgatg

SEQ ID NO: 280148 - DNA, 75 bp, synthetic construct
  source 1..75: mol_type = other DNA
accgatcgtttattcagccgcctgcgtgaattgctgagcactggcgtagggatcgtctttatctcccacaagctg

SEQ ID NO: 280149 - DNA, 75 bp, synthetic construct
  source 1..75: mol_type = other DNA
tgtctgatgcaatgcaagcctggggtattgacggccaccagctgacggtagaaatcacggaaagcatgatgatgg

SEQ ID NO: 280150 - DNA, 75 bp, synthetic construct
  source 1..75: mol_type = other DNA
atgattgacgataaacccttcccgcttaccttgagtattggcatcagctacgacgtgggtaaaaaccgcgattac

SEQ ID NO: 280151 - DNA, 75 bp, synthetic construct
  source 1..75: mol_type = other DNA
tatccgaacaaggtcgtcgcctgtatcagcttgcactagggccacttgcgttggcatttgtaggagccacagatc

SEQ ID NO: 280152 - DNA, 75 bp, synthetic construct
  source 1..75: mol_type = other DNA
cgatgttcgaagtaggcgcaccaccattgacacactgtgtcacgtcagggaatacgccattcagacttaatctgc

SEQ ID NO: 280153 - DNA, 75 bp, synthetic construct
  source 1..75: mol_type = other DNA
ctactttggttccttaccaggccacggtgttgaaaacgtacggcgaccgctggtaaacactcttaaccttgccga

SEQ ID NO: 280154 - DNA, 75 bp, synthetic construct
  source 1..75: mol_type = other DNA
agaaaattgttcgcgtgtcttatacatggaagttggcggatgttcctgcatgggtggacaaaaaagcgttctcca

SEQ ID NO: 280155 - DNA, 75 bp, synthetic construct
  source 1..75: mol_type = other DNA
tgatgttctggaagtaacggataagggacaagaggttgagttctgggatcgcaaggatggtgtctgtattggtca

SEQ ID NO: 280156 - DNA, 75 bp, synthetic construct
  source 1..75: mol_type = other DNA
attgatggcaacatgggtcatctgctcgatgcagaagaagatggtcttgatatttctgacttcatgacgttcgag

SEQ ID NO: 280157 - DNA, 75 bp, synthetic construct
  source 1..75: mol_type = other DNA
attgtggatgagccaacgcgtggtgtggacgtctcggcgcgtaacgacatctatcagttgctccgcagtattgcc

SEQ ID NO: 280158 - DNA, 75 bp, synthetic construct
  source 1..75: mol_type = other DNA
ctgtcgttcgatctctcttatatgtcttcttttgaagacaaagtaaagacatcttcaattattagtgatttatgc

SEQ ID NO: 280159 - DNA, 75 bp, synthetic construct
  source 1..75: mol_type = other DNA
tgttttattgataacgagcagagggataatacattattaatgattggtaaagttatcgactataaggaggaagtt

SEQ ID NO: 280160 - DNA, 75 bp, synthetic construct
  source 1..75: mol_type = other DNA
ttatggatataaagacattaataacgtagtgtctgctttctggcataaagaagagtttcttctccaccagaaaag

SEQ ID NO: 280161 - DNA, 75 bp, synthetic construct
  source 1..75: mol_type = other DNA
aaatttgcaaaatgaattagcaatgattactagttcatcgctttctgaaacgattgaagggttaagcctgggata

SEQ ID NO: 280162 - DNA, 75 bp, synthetic construct
  source 1..75: mol_type = other DNA
gcctctttacttgactggtttatggagattaaggatcttccagagcgtgagaagcacttaaaggttattattagg

SEQ ID NO: 280163 - DNA, 75 bp, synthetic construct
  source 1..75: mol_type = other DNA
tactctgaccgatagcgataaattaaaagaactatcattaaagaacagtgggctgctggaacagcatgatcctaa

SEQ ID NO: 280164 - DNA, 75 bp, synthetic construct
  source 1..75: mol_type = other DNA
gtctgaaatatattacagccgcatgaccagtctgaataaattatcagaaatatcagagggaacttataatgaaag

SEQ ID NO: 280165 - DNA, 75 bp, synthetic construct
  source 1..75: mol_type = other DNA
tgggcgcggtacaccccgtagcgggttatctcttcctggaggtgatccctgacagtgaggttggcttcgttgata

SEQ ID NO: 280166 - DNA, 75 bp, synthetic construct
  source 1..75: mol_type = other DNA
gcaagagccgttactcttccccagcctgacagtaaaagaaaacattctctttggtttacctaagcaccggaattc

SEQ ID NO: 280167 - DNA, 75 bp, synthetic construct
  source 1..75: mol_type = other DNA
tctaatttataccttttatctgtattactctgctataatatgataacttttgtcatatatggtttcctgaattct

SEQ ID NO: 280168 - DNA, 75 bp, synthetic construct
  source 1..75: mol_type = other DNA
tcattgccggaatatccggcatcgcgacgggaataatcgtcagcctgaatatcccctttatccggcaggggcttt

SEQ ID NO: 280169 - DNA, 75 bp, synthetic construct
  source 1..75: mol_type = other DNA
tgatgcctgctatggctcgccatcaggatcggcgcaaacttttgatgctggcactggcgttacaactggtgggtt

SEQ ID NO: 280170 - DNA, 75 bp, synthetic construct
  source 1..75: mol_type = other DNA
tacggggcaacaaagtatcgtcgatgagggcggcatactatatctctctgggatatcgagtaaatcacaaagctg

SEQ ID NO: 280171 - DNA, 75 bp, synthetic construct
  source 1..75: mol_type = other DNA
gttccggattatacggtgaaggtgagaaagtggttttgtgtgatgtgtgacgaagattatgagggggaaaagtgc

SEQ ID NO: 280172 - DNA, 75 bp, synthetic construct
  source 1..75: mol_type = other DNA
taggaactgagcggttcagtcgcggaaatcagttgcagagctgtaatgatatctccgggagtgctgcgttggtag

SEQ ID NO: 280173 - DNA, 75 bp, synthetic construct
  source 1..75: mol_type = other DNA
atggctatttctcaaaactttaaaacgcaggttgtatttggggggagaatagacccgtcgtttcggcgcggtaca

SEQ ID NO: 280174 - DNA, 75 bp, synthetic construct
  source 1..75: mol_type = other DNA
tgcagcgtcgggggtgctcgatggactgagacaggctgcgagttcgtacaatcgtggcgcgatgtttgataaacc

SEQ ID NO: 280175 - DNA, 75 bp, synthetic construct
  source 1..75: mol_type = other DNA
gataatgtagcaaaagcaaaagccgacgaagccgtggataatatgcgacaccctgaacgtcttgctcgtgcaaaa

SEQ ID NO: 280176 - DNA, 75 bp, synthetic construct
  source 1..75: mol_type = other DNA
atgcgaattctgaactgctatatggcgaatgacagcaaaggccattttgttacggcgaaagaagccgcgaagcac

SEQ ID NO: 280177 - DNA, 75 bp, synthetic construct
  source 1..75: mol_type = other DNA
gtgatgtgtgacgaagattatgaaggagaaaagtgctgcccgcgttgtggtaccggggtatacagcagggagggg

SEQ ID NO: 280178 - DNA, 75 bp, synthetic construct
  source 1..75: mol_type = other DNA
aaccgccaggacgttttgtgctgtgtgtcctgtggatgcccgttaacacttcagcggggcaatgacggacaacca

SEQ ID NO: 280179 - DNA, 75 bp, synthetic construct
  source 1..75: mol_type = other DNA
gggaaaagtgctgcccacgctgcggtaccggggtatacagcagggcgtgggggcggcaggaggtgccgtcggaag

SEQ ID NO: 280180 - DNA, 75 bp, synthetic construct
  source 1..75: mol_type = other DNA
ctgtcgctgagaaaatcctgctgcgatgcacctggcttgacccggcagagaaatctatggtcacccccgtttttg

SEQ ID NO: 280181 - DNA, 75 bp, synthetic construct
  source 1..75: mol_type = other DNA
gtcgcggaaatcagttgcagagctgtaatgatatctccgggagtgctgcgttggtaggggcatcccgggatagag

SEQ ID NO: 280182 - DNA, 75 bp, synthetic construct
  source 1..75: mol_type = other DNA
taacgataaaacaagcgatagatttgattaatttacgccactatcttctgcctgcaattcagaggaagttcgtct

SEQ ID NO: 280183 - DNA, 75 bp, synthetic construct
  source 1..75: mol_type = other DNA
aaagcggaaatggctctggcggagaagctagggcatgtggttgtttttcagagggggcgatatgccgattctctg

SEQ ID NO: 280184 - DNA, 75 bp, synthetic construct
  source 1..75: mol_type = other DNA
agctagggcatgtggttgtttttcagaggggggcgatatgccgattctctggtttcaggaggtgtgggaaaaaga

SEQ ID NO: 280185 - DNA, 75 bp, synthetic construct
  source 1..75: mol_type = other DNA
ggttcgagttctgctgtgataacggagagagactgcgtgtcacgttcgcgctggactgctgtgatcgtgaggcac

SEQ ID NO: 280186 - DNA, 75 bp, synthetic construct
  source 1..75: mol_type = other DNA
gtgagggtttatatcgccggtccgatgacgggatatgaaaattttaaccgcgaggcatttcacaaaacggaagag

SEQ ID NO: 280187 - DNA, 75 bp, synthetic construct
  source 1..75: mol_type = other DNA
tgacgggatatgaaaatttcaaccgcgaggcatttcacaaggcggaagaagcactgaaacgggaagggcataccg

SEQ ID NO: 280188 - DNA, 75 bp, synthetic construct
  source 1..75: mol_type = other DNA
actgcggcgcacgtagcgccaggtttaaaagcgtcgatgtccagtagtggagaagcaaattgtgcaatgatcggc

SEQ ID NO: 280189 - DNA, 75 bp, synthetic construct
  source 1..75: mol_type = other DNA
aagaaaacccatatgtaccaacaaatgcgggatttcatgattttaaggcggtgattgatggtcagcagcgtctca

SEQ ID NO: 280190 - DNA, 75 bp, synthetic construct
  source 1..75: mol_type = other DNA
aactggatgaactgacaaaaaatatttatcagaacaacgaaatggggttttatattgaaagagactggttcttaa

SEQ ID NO: 280191 - DNA, 75 bp, synthetic construct
  source 1..75: mol_type = other DNA
ctttatacaaaaataagaactgagaacatcatccactacttcaatgagagcagtcaggatattgaccatgtgctg

SEQ ID NO: 280192 - DNA, 75 bp, synthetic construct
  source 1..75: mol_type = other DNA
gctgaatggctggcagcggtcggcaggtgctaaggcagaactggcactggcggagaagctggggcatgcggttat

SEQ ID NO: 280193 - DNA, 75 bp, synthetic construct
  source 1..75: mol_type = other DNA
accagagaacctcagcttttatgaaaatccggagcactgggacaccatacctaatcttcatttactgaatcactc

SEQ ID NO: 280194 - DNA, 75 bp, synthetic construct
  source 1..75: mol_type = other DNA
aaaaaagaggactcatttccagtgaattttccagaaaaactctgcttaaactttataccaagataagaactgaga

SEQ ID NO: 280195 - DNA, 75 bp, synthetic construct
  source 1..75: mol_type = other DNA
aaagttattaatgagccttatatctctggtcagcgttattgcacgtgccggggaatataaaaattacagccggga

SEQ ID NO: 280196 - DNA, 75 bp, synthetic construct
  source 1..75: mol_type = other DNA
ggacgactggcttagtgccttactggcgaatctggaaccagccgcaagaagccgcatgatgcgtcagctggcgca

SEQ ID NO: 280197 - DNA, 75 bp, synthetic construct
  source 1..75: mol_type = other DNA
atttgccggtaccccatgggtgctgtccgacaccggctggcatctgcctactggaattctgcaggaaactggcac

SEQ ID NO: 280198 - DNA, 75 bp, synthetic construct
  source 1..75: mol_type = other DNA
gtggtgatttatccggtctccgtaatcggcggagaggccagcacaaaccggactgcgccactgctgtgtgaaccg

SEQ ID NO: 280199 - DNA, 75 bp, synthetic construct
  source 1..75: mol_type = other DNA
gtggctgaactgcagaaggtggacaactggctgagtgcattattggcgaatctggagccagccgcaagaagccgc

SEQ ID NO: 280200 - DNA, 75 bp, synthetic construct
  source 1..75: mol_type = other DNA
cgcaccacaaaatacctgaaaacttccgccagcgccgactctgccagcgtgcagtttgaaggcaaggtgcagcgc

SEQ ID NO: 280201 - DNA, 75 bp, synthetic construct
  source 1..75: mol_type = other DNA
gcgaatctggaaccagccgcaagaagccgcatgatgcgtcagctggcgcaggaactgcgccggacacagcagcag

SEQ ID NO: 280202 - DNA, 75 bp, synthetic construct
  source 1..75: mol_type = other DNA
gcgacaatagcgttacaaaacggttttatcaccgactcacaccagttcctgcaaaccctgctgctgcgcgaaaaa

SEQ ID NO: 280203 - DNA, 75 bp, synthetic construct
  source 1..75: mol_type = other DNA
cgattttatggctgatatctctcacgaactgcgcacgcctttagcagtactgcgcggggaactggaagccattca

SEQ ID NO: 280204 - DNA, 75 bp, synthetic construct
  source 1..75: mol_type = other DNA
cacggctggcgcacgcaattttgggtggttgatcaaaataataaagtgctggttggcccgcgagcaccggttcca

SEQ ID NO: 280205 - DNA, 75 bp, synthetic construct
  source 1..75: mol_type = other DNA
ccgccagcgccgactctgccagcgtgcagtttgaaggtaaggtgcagcgtattgcccgtgttcatcactacggct

SEQ ID NO: 280206 - DNA, 75 bp, synthetic construct
  source 1..75: mol_type = other DNA
ttgacctgaatattcagggcaatggcgcttattccgttctgaagcagttggcgacaatggcgttacaaaacggtt

SEQ ID NO: 280207 - DNA, 75 bp, synthetic construct
  source 1..75: mol_type = other DNA
agcctgcgttaaactacccttcgtgttattcgcccgcaaagcacaggccattaactggaaagccagcgacggcta

SEQ ID NO: 280208 - DNA, 75 bp, synthetic construct
  source 1..75: mol_type = other DNA
cgcaccacaaaatacctgaaaactgcagccagcgccgattctgccagcgtacagtttgaaggtaaggtgcagcgt

SEQ ID NO: 280209 - DNA, 75 bp, synthetic construct
  source 1..75: mol_type = other DNA
caattgtcataaatcgctggcgcatctgttgatgatgaacgatgtcgtgccggtctggctaaaaccaacacgtaa

SEQ ID NO: 280210 - DNA, 75 bp, synthetic construct
  source 1..75: mol_type = other DNA
tgcgataccggaaaagactgccggagtggcaagatccagtaccgagtaaggctcgcggagatcgatactccagag

SEQ ID NO: 280211 - DNA, 75 bp, synthetic construct
  source 1..75: mol_type = other DNA
gaaacctggtatcaaacactcgcctggtgggcgctgcctgccgttgttgcgctctttgcctggtggtggcaaagc

SEQ ID NO: 280212 - DNA, 75 bp, synthetic construct
  source 1..75: mol_type = other DNA
gaggcggccacaaaggtgatggatggctacgtcgagttcacccaggcgcatgccgacgtgccgtggcgcagcatg

SEQ ID NO: 280213 - DNA, 75 bp, synthetic construct
  source 1..75: mol_type = other DNA
atggcttgctctacaacaccgactggatcaaacagacgctggatgtcccctcgatccacttcgattccgcctggg

SEQ ID NO: 280214 - DNA, 75 bp, synthetic construct
  source 1..75: mol_type = other DNA
taaaaccaaagcaatgggattattgcgtgggttgacggaatttaaacgctcttacgatctcaacctgcggatcaa

SEQ ID NO: 280215 - DNA, 75 bp, synthetic construct
  source 1..75: mol_type = other DNA
cgcctcctaggcgtaaatgatgatgttgaggcaatgacccgcgacatgattctgcaatggctggcggggggactt

SEQ ID NO: 280216 - DNA, 75 bp, synthetic construct
  source 1..75: mol_type = other DNA
ccgccagcgccgactctgccagcgtacagtttgaaggtaaggtacagcgtattgcccgtgttcaccattacggtc

SEQ ID NO: 280217 - DNA, 75 bp, synthetic construct
  source 1..75: mol_type = other DNA
attgcccgcgttcatcactacggcttacgtgatcgcgtcagtcgcaaaggacctgaggtccgttacgcagagcgt

SEQ ID NO: 280218 - DNA, 75 bp, synthetic construct
  source 1..75: mol_type = other DNA
atgatgcgccagctggcgcaggaactacgccggacacagcagcagaatatcagaatgcagcgcaatccagatggc

SEQ ID NO: 280219 - DNA, 75 bp, synthetic construct
  source 1..75: mol_type = other DNA
aaattgttgggtttcagttcagtttcaataaacgtagtccatgatattatatattcgaggatatccaatttagat

SEQ ID NO: 280220 - DNA, 75 bp, synthetic construct
  source 1..75: mol_type = other DNA
ttttcgatcgcggcagtagcaaaggacctgaggtccgtttcgccgaacgccgccttctgggtgtaaatgatgatg

SEQ ID NO: 280221 - DNA, 75 bp, synthetic construct
  source 1..75: mol_type = other DNA
catctggggacggatgatggcggcctcgctggtgaccgcattgccggtggtgattatgtatgcgctttcggaacg

SEQ ID NO: 280222 - DNA, 75 bp, synthetic construct
  source 1..75: mol_type = other DNA
gatggcgctgatcatcaccatggtgacgcaaactctgcccaccgccgtgtttatgctgaaaagctacttcgacac

SEQ ID NO: 280223 - DNA, 75 bp, synthetic construct
  source 1..75: mol_type = other DNA
gatgatggtgtctcacttgaccgaagctatgaaccgctatcgagaaggaaagggtggcaagccggggagagtgtt

SEQ ID NO: 280224 - DNA, 75 bp, synthetic construct
  source 1..75: mol_type = other DNA
gctgtaaagcgttacaagacatcagaaatgctgcgttttatttttgctaccattgcatacgatcccgatccagat

SEQ ID NO: 280225 - DNA, 75 bp, synthetic construct
  source 1..75: mol_type = other DNA
tggcgacggcggccgtcaggccgacgagctggaagccgcgcttgaccgcctgctaggaacgaccatcaagagcgt

SEQ ID NO: 280226 - DNA, 75 bp, synthetic construct
  source 1..75: mol_type = other DNA
cagtggacagaccaaacggaacaatccggcctcaatgcgtcgccctcccgagagcgaccgacagcccgacttttt

SEQ ID NO: 280227 - DNA, 75 bp, synthetic construct
  source 1..75: mol_type = other DNA
cttttgcgaagagttcgcccgttccagcagcagctacctgcaagaacgtgccctggacgtacgcgacgtctgctt

SEQ ID NO: 280228 - DNA, 75 bp, synthetic construct
  source 1..75: mol_type = other DNA
acccccagccagttcctcgaactggataaaaatcacctcaaaggattgttgctcaaaagcggcggcaccacgtca

SEQ ID NO: 280229 - DNA, 75 bp, synthetic construct
  source 1..75: mol_type = other DNA
ttgctggtcggtttagggctggatgaactgagcatgagcgcaccatcaattccggcggcaaaagcgcggatggcg

SEQ ID NO: 280230 - DNA, 75 bp, synthetic construct
  source 1..75: mol_type = other DNA
ccgctatccgcgtaaactggaagccgacttgtgggcgcgcgaggccgttttctctaccggtctgggctttagttt

SEQ ID NO: 280231 - DNA, 75 bp, synthetic construct
  source 1..75: mol_type = other DNA
caagcccgtaccgctgacggtatccgcattgaaattgccgctaacatcgctcactccgtggaagcgcaggccgca

SEQ ID NO: 280232 - DNA, 75 bp, synthetic construct
  source 1..75: mol_type = other DNA
tcaacattccgacgctggttggtgtggatattgatgccctcactccgtggcagcatcaaacgatttatatcgacg

SEQ ID NO: 280233 - DNA, 75 bp, synthetic construct
  source 1..75: mol_type = other DNA
tgcggttttttttaggcggcaggtgttacacggctgaaaaacttgaaaaggattatctggctgaagttgctaatt

SEQ ID NO: 280234 - DNA, 75 bp, synthetic construct
  source 1..75: mol_type = other DNA
acgcgctggcgggccgtgaagcggcaatcgtgactgatattgccggaaccacgcgtgacgtgctgcgtgagcata

SEQ ID NO: 280235 - DNA, 75 bp, synthetic construct
  source 1..75: mol_type = other DNA
acgcgtgacgtgttgcgtgagcatatccacattgacggaatgccgctgcatatcatcgacactgccgggctacgt

SEQ ID NO: 280236 - DNA, 75 bp, synthetic construct
  source 1..75: mol_type = other DNA
aattgaacaggccgaccgcgtgctgtttatggtcgatggcaccacgacagacgccgttgatccggcagagatctg

SEQ ID NO: 280237 - DNA, 75 bp, synthetic construct
  source 1..75: mol_type = other DNA
ttggtatcgagcgcgcgtggcaggaaattgaacaggccgaccgcgtgctgtttatggtcgatggcaccacaacag

SEQ ID NO: 280238 - DNA, 75 bp, synthetic construct
  source 1..75: mol_type = other DNA
tttatggttgatggcacgacgacagacgccgttgatccggcagaaatctggccggaatttatcgcccgtctgcct

SEQ ID NO: 280239 - DNA, 75 bp, synthetic construct
  source 1..75: mol_type = other DNA
acgccagttcggaacaggcagcccgttcggcacttaactcgctgcaaggcgcattctccgcacgggtcaaccatc

SEQ ID NO: 280240 - DNA, 75 bp, synthetic construct
  source 1..75: mol_type = other DNA
ttcggcgctaaactcgctgcaaggcgcattctccgcacgggtcaaccatctggtggaagccctcacccacttgcg

SEQ ID NO: 280241 - DNA, 75 bp, synthetic construct
  source 1..75: mol_type = other DNA
gcaataaagccgatattactggcgaaacgctggggatgagtgaagttaacggccatgcattgattcgcctctcag

SEQ ID NO: 280242 - DNA, 75 bp, synthetic construct
  source 1..75: mol_type = other DNA
ttaaccccgctgactgtgagacgtttgtgcaaggcattgttcggcagaacaggaagccagtggctggttgttgaa

SEQ ID NO: 280243 - DNA, 75 bp, synthetic construct
  source 1..75: mol_type = other DNA
gaagccagcgacgaagtggaacgtattggtatcgagcgcgcatggcaggaaatcgaacaggctgaccgcgtgctg

SEQ ID NO: 280244 - DNA, 75 bp, synthetic construct
  source 1..75: mol_type = other DNA
gcgcagcagaacttaagcgaaatcacaggagaatttacttctgacgatctgctgggacggattttctccagcttc

SEQ ID NO: 280245 - DNA, 75 bp, synthetic construct
  source 1..75: mol_type = other DNA
ttggtatcgagcgcgcgtggcaggaaattgaacaggccgaccgcgtactgtttatggtcgatggcaccacgacag

SEQ ID NO: 280246 - DNA, 75 bp, synthetic construct
  source 1..75: mol_type = other DNA
gcaacgccggggcgattgtggtcgaaccgacagacgcggtagcgcgttattatcaacaagaagcccgcgtacagg

SEQ ID NO: 280247 - DNA, 75 bp, synthetic construct
  source 1..75: mol_type = other DNA
agcagaaaaaactgctctggcaggtgatcaaagggcggatactgtttccggcgctgaccgcgctcagcgtcacgg

SEQ ID NO: 280248 - DNA, 75 bp, synthetic construct
  source 1..75: mol_type = other DNA
gcgcgtgattatcagcttcaggttcaacatgctgctaattcagcagccggtgacgacgaaattgttcaaaaaatg

SEQ ID NO: 280249 - DNA, 75 bp, synthetic construct
  source 1..75: mol_type = other DNA
ggagctaaaaatacaggtggacgtccttctgggccgaagaacttcaacccaaccaatacggttgataaagacaaa

SEQ ID NO: 280250 - DNA, 75 bp, synthetic construct
  source 1..75: mol_type = other DNA
ggcggagactggcgggtgcgccagcagctgcctgtcggagtcgggccgacgaccggatgccgccaggcagccggg

SEQ ID NO: 280251 - DNA, 75 bp, synthetic construct
  source 1..75: mol_type = other DNA
aacaagaacacagggaaagaagtctctgagattcgctttaccgcacgggagaaaatgaccgggctggaaagttat

SEQ ID NO: 280252 - DNA, 75 bp, synthetic construct
  source 1..75: mol_type = other DNA
tcttactggataaccgctctccggatgaacgcgaagcacatcttaatgaccatccctttttgcgcagatggtatg

SEQ ID NO: 280253 - DNA, 75 bp, synthetic construct
  source 1..75: mol_type = other DNA
gggccggtagtgttccttgcctccagcgcttcagattatgtgaatggttataccattgccgtggatggcggttgg

SEQ ID NO: 280254 - DNA, 75 bp, synthetic construct
  source 1..75: mol_type = other DNA
tttcttgcctccagtgcttcagattatgtgaatggttataccattgccgtggatggcggttggctggctcgttaa

SEQ ID NO: 280255 - DNA, 75 bp, synthetic construct
  source 1..75: mol_type = other DNA
cgtgacgcgattgatggcgaacgaatgggctaaacacaacattaatgttaatgcgatagccccgggttgtactga

SEQ ID NO: 280256 - DNA, 75 bp, synthetic construct
  source 1..75: mol_type = other DNA
acatcttcctgctgtcccgcattgcgcattacctgaaaatcattcagcgcgagaatatcggtaccaccaaagacc

SEQ ID NO: 280257 - DNA, 75 bp, synthetic construct
  source 1..75: mol_type = other DNA
ttgaaggacatatcctgtcgaacagctgtcatgggcaggccggtcagcctttctgtatccacagggtcggtttta

SEQ ID NO: 280258 - DNA, 75 bp, synthetic construct
  source 1..75: mol_type = other DNA
cgtgacgcgcctgatggcgaacgaatgggcaaaacataacatcaacgttaatgcgattgctccgggttacatggc

SEQ ID NO: 280259 - DNA, 75 bp, synthetic construct
  source 1..75: mol_type = other DNA
tttggggatgatgtttataagtataagggcggtgataaaaacgatactgtatttggtgccggccttgcggtgggc

SEQ ID NO: 280260 - DNA, 75 bp, synthetic construct
  source 1..75: mol_type = other DNA
gcgtccggcaagccacgttgaaacgctgtgtaatactttttcatcacaaattgagtggcataacctgcgcactga

SEQ ID NO: 280261 - DNA, 75 bp, synthetic construct
  source 1..75: mol_type = other DNA
cactcactaatttgaatccgcgcattattcgcgcccgcaccgtgtgcagcggtagcgcaggtggcattctgacgc

SEQ ID NO: 280262 - DNA, 75 bp, synthetic construct
  source 1..75: mol_type = other DNA
ttgctggtcggtttagggctggatgagctgagcatgagcgcaccgtcaattccggcggcgaaagcgcgaatggcg

SEQ ID NO: 280263 - DNA, 75 bp, synthetic construct
  source 1..75: mol_type = other DNA
gcacaccagcgtttgagccagtggctacgtgatgaattcccccactgcgacgcgccgctggcagaagttaaatct

SEQ ID NO: 280264 - DNA, 75 bp, synthetic construct
  source 1..75: mol_type = other DNA
aatggattggtctgtgcggtgaactgggagcgaaaggttccgtgctgccgttgctggtcggtttagggctggatg

SEQ ID NO: 280265 - DNA, 75 bp, synthetic construct
  source 1..75: mol_type = other DNA
cggcaccgggcaaactgacgcagcccgccatttgtatggctgatgaactgacccccagccagttcctcgaactgg

SEQ ID NO: 280266 - DNA, 75 bp, synthetic construct
  source 1..75: mol_type = other DNA
gataatggctatacggtcattaccgctattagcggaggaaaaattaccgaaaaagacgctactcttaaggttagt

SEQ ID NO: 280267 - DNA, 75 bp, synthetic construct
  source 1..75: mol_type = other DNA
acgttctccgtcaaatataaaactacagatggacggtgctgtacgtaaagatggcagtgaagtatggcttaacat

SEQ ID NO: 280268 - DNA, 75 bp, synthetic construct
  source 1..75: mol_type = other DNA
tcggaaagaccagtgatgaacatggttgagaatatgctcgatcaggcattcaaaaagcttaatcctcacgagcat

SEQ ID NO: 280269 - DNA, 75 bp, synthetic construct
  source 1..75: mol_type = other DNA
ctccgctcacggcagcctgaaaatcatgatcccgatgatctcttcaatggaagagatcttatgggtgaaagaaaa

SEQ ID NO: 280270 - DNA, 75 bp, synthetic construct
  source 1..75: mol_type = other DNA
gcgatacttccctgcgcgaacatttactggcaggcgtcagcgccggattaagctgcgccgaagcgattgtcgcca

SEQ ID NO: 280271 - DNA, 75 bp, synthetic construct
  source 1..75: mol_type = other DNA
ctaaggttactcgtcactacaacagcctgaatccggcattcttgcgggcgctcgattacgccgtgcaggcggtgc

SEQ ID NO: 280272 - DNA, 75 bp, synthetic construct
  source 1..75: mol_type = other DNA
tatgacccgctcttcgccatcagcctcggcggtcaaacgcctgatgaactgctacggcggttcactcaatcagta

SEQ ID NO: 280273 - DNA, 75 bp, synthetic construct
  source 1..75: mol_type = other DNA
tattgcggatgttagcagacaaaaaattattttgccgttattaataaaaaatagagattcaataccggttgactt

SEQ ID NO: 280274 - DNA, 75 bp, synthetic construct
  source 1..75: mol_type = other DNA
aagggggcagaaaaactgcccggtcgtaatgacccgtgtcagtgtggcagtggtaaaaaatttaaaaagtgctgc

SEQ ID NO: 280275 - DNA, 75 bp, synthetic construct
  source 1..75: mol_type = other DNA
aatgaagattcagcggcaccggttatccgcttgatcaatgcgattttgagtgaggccatcaaagaaaccgcctcc

SEQ ID NO: 280276 - DNA, 75 bp, synthetic construct
  source 1..75: mol_type = other DNA
tagaaaatctcattcagcttccgcacggtattatcttggtgacagggccgacaggctccggtaaagcaccacgct

SEQ ID NO: 280277 - DNA, 75 bp, synthetic construct
  source 1..75: mol_type = other DNA
cggaatttcagccgaatatcattcatccctgatattaccgggtcatcacggtcagtgatgaacgtgatgttgcca

SEQ ID NO: 280278 - DNA, 75 bp, synthetic construct
  source 1..75: mol_type = other DNA
agcaatgaagaggtaacaaacgaagttcgttgcttcaaccaatattatggtgccgggagtgcagaaaaaatatat

SEQ ID NO: 280279 - DNA, 75 bp, synthetic construct
  source 1..75: mol_type = other DNA
atgaataaaataagcggggagtcgctttttaatatttcgtcattgccagtacaggctgagcaggctatttacgat

SEQ ID NO: 280280 - DNA, 75 bp, synthetic construct
  source 1..75: mol_type = other DNA
tgggatgttcatggagttctttaaccagaaacctgacttcgcctgataatcgtgttctatcctctgtaagggatg

SEQ ID NO: 280281 - DNA, 75 bp, synthetic construct
  source 1..75: mol_type = other DNA
tgcagaaattaaaactgaaatagatgctctggaagcggagagtaaagttttgtttgcccggcgtgatgctttgga

SEQ ID NO: 280282 - DNA, 75 bp, synthetic construct
  source 1..75: mol_type = other DNA
gattacagccagtgcagcctgcgacctccactggatatgaactacctggtgtttaatcaggagtatgtagacgat

SEQ ID NO: 280283 - DNA, 75 bp, synthetic construct
  source 1..75: mol_type = other DNA
tggccattgctctgatcggatgcgtaccaaaaccacctcaagatgaaaagtcagctggcgggtacgttgatattt

SEQ ID NO: 280284 - DNA, 75 bp, synthetic construct
  source 1..75: mol_type = other DNA
caccgaatggcgcgacgttcacgtcaatccggaagtggccctgagtccggaccgttctgaatacatcaagcaatt

SEQ ID NO: 280285 - DNA, 75 bp, synthetic construct
  source 1..75: mol_type = other DNA
cccagagcggataccagggagggttctcgggtacggtaatgcaaactgcggggtctgcggtatttaatttgtata

SEQ ID NO: 280286 - DNA, 75 bp, synthetic construct
  source 1..75: mol_type = other DNA
acgcaaaatatgcgggaagttctccggcgcgcacctcttacagcgactgtatggtagagatgaacgatgtgttcg

SEQ ID NO: 280287 - DNA, 75 bp, synthetic construct
  source 1..75: mol_type = other DNA
gaccagacatctttcttcctgggaacaaatggtcagtctaaccgtaaggccgagcactacttcctcaacggtaaa

SEQ ID NO: 280288 - DNA, 75 bp, synthetic construct
  source 1..75: mol_type = other DNA
ttacccctggaagagagccttgccgtaattggtcaacaaagcagtaataaacgactggctgacgtgttaaatcag

SEQ ID NO: 280289 - DNA, 75 bp, synthetic construct
  source 1..75: mol_type = other DNA
cacattaatggtcagagccgcagataaccaggagacactccaacaaaatcggatcgccttaacgctctccatctt

SEQ ID NO: 280290 - DNA, 75 bp, synthetic construct
  source 1..75: mol_type = other DNA
ttggaaaagctggctgattacaatgaaaaccggcagaaaatccgcagcaagctcattcagtcactgatctacccc

SEQ ID NO: 280291 - DNA, 75 bp, synthetic construct
  source 1..75: mol_type = other DNA
cggcgtgcgccatattccgatgggtgtaccgctacagaccgaaatgcacgcgtatatggagatcctgaaaaaata

SEQ ID NO: 280292 - DNA, 75 bp, synthetic construct
  source 1..75: mol_type = other DNA
aatttagtgccgaaaaccacctttatcgatggtgtggaccagacatccttcttcctgggaacaaatggtcagtct

SEQ ID NO: 280293 - DNA, 75 bp, synthetic construct
  source 1..75: mol_type = other DNA
gaaagtggcgaatttagtgccgaaaaccacctttatcgatggtgtggaccagacatctttcttcctgggaacaaa

SEQ ID NO: 280294 - DNA, 75 bp, synthetic construct
  source 1..75: mol_type = other DNA
gcttcaactcagtgtccgatatgtataccgaatggcgtgatgttcacgtaaacccggaagtcgccctgagcccgg

SEQ ID NO: 280295 - DNA, 75 bp, synthetic construct
  source 1..75: mol_type = other DNA
aggcatgatccaaccgcgtaaatctgacggtattgtcgatctggcggatctcttccctacggcgctggatctggc

SEQ ID NO: 280296 - DNA, 75 bp, synthetic construct
  source 1..75: mol_type = other DNA
tgccggtgatgcagcatcctgcacaagacaaagaaacccagcagaagctggcagaacttgagaaaaaaaccggta

SEQ ID NO: 280297 - DNA, 75 bp, synthetic construct
  source 1..75: mol_type = other DNA
atccatcagacggacgacggcgagctgtttattgatacctgcctgacgaccaccgccgaagcgagcattgtcttt

SEQ ID NO: 280298 - DNA, 75 bp, synthetic construct
  source 1..75: mol_type = other DNA
ctccggcatcaatattgtggttgaagtatttgtgaactgccagtatggctacgacattcactgcgatgttaccgg

SEQ ID NO: 280299 - DNA, 75 bp, synthetic construct
  source 1..75: mol_type = other DNA
tgttttctgtgaaaagccgcttgcggttacagcagatgattgtcagcgtgtgatcggagctgaacgtaaaaatgg

SEQ ID NO: 280300 - DNA, 75 bp, synthetic construct
  source 1..75: mol_type = other DNA
ttaccgctgatgcctgcgtgaagtctcaggaaacagggaataccgagattgttgaattaccctcaaaacctgatt

SEQ ID NO: 280301 - DNA, 75 bp, synthetic construct
  source 1..75: mol_type = other DNA
gtcgttgacgtcgatagtgttaatctcactgaactgattaacaaggtcgctgaaaacggttattcactccgtgtg

SEQ ID NO: 280302 - DNA, 75 bp, synthetic construct
  source 1..75: mol_type = other DNA
tgcgatcctggaccggctgatgcacaacgctcaccggctgtcactgaagggagaatcgatgaggaagaggagaag

SEQ ID NO: 280303 - DNA, 75 bp, synthetic construct
  source 1..75: mol_type = other DNA
catgaaatcgatgttatgcactggttactcaacgaagattatagaacagttaaggtctacttcccacgtcagtcc

SEQ ID NO: 280304 - DNA, 75 bp, synthetic construct
  source 1..75: mol_type = other DNA
ttatcataatcgtgatgccgcgctggcctttgtcgacaagatcgacccacgcgattgtcgtctgaaggtcggcaa

SEQ ID NO: 280305 - DNA, 75 bp, synthetic construct
  source 1..75: mol_type = other DNA
gcgcaggatctgaaatgggccaatgaagccagggctaagcaggctgaaaatctgtccgctctggagcaggatatc

SEQ ID NO: 280306 - DNA, 75 bp, synthetic construct
  source 1..75: mol_type = other DNA
aataactggtattacgatcctcatacttagtatttcgacacttgacactataaactcagtaaaaactataattgt

SEQ ID NO: 280307 - DNA, 75 bp, synthetic construct
  source 1..75: mol_type = other DNA
agaactgacagattctcacctcaacaccaatctggcctgccagatggcaggccagatttaaacgtctgtcagaaa

SEQ ID NO: 280308 - DNA, 75 bp, synthetic construct
  source 1..75: mol_type = other DNA
ctggagcaggatatcaccaatctggaaaaagcagcggcattaaccattgccagaatgattacatacccgcgttaa

SEQ ID NO: 280309 - DNA, 75 bp, synthetic construct
  source 1..75: mol_type = other DNA
attaaggctgcgcaggacctgaaatgggccaatgaagccagggctaagcaggctgaaaatctgtccgctctggag

SEQ ID NO: 280310 - DNA, 75 bp, synthetic construct
  source 1..75: mol_type = other DNA
atgaacaggttatttatcctgacagtgattttttcactgttatgctcacttccttccgcacaggcatccccacag

SEQ ID NO: 280311 - DNA, 75 bp, synthetic construct
  source 1..75: mol_type = other DNA
ttcgccagcttgccgctgctaacattttccctggcgacatgctgtttaaaaacttcggtgtcacccgtcacgggc

SEQ ID NO: 280312 - DNA, 75 bp, synthetic construct
  source 1..75: mol_type = other DNA
atgagcagtttattgaagcgccgggcattcgtgggatggtcatgctggtgttcacgctgccgggctttgatcggg

SEQ ID NO: 280313 - DNA, 75 bp, synthetic construct
  source 1..75: mol_type = other DNA
cgcatacgtgaagggcatgtggaagatgtttatgcgtatcggcgcagacaaagatttagcgtacggtatggggag

SEQ ID NO: 280314 - DNA, 75 bp, synthetic construct
  source 1..75: mol_type = other DNA
tgtttaaaaacttcggtgtcacccgtcacgggcgtgtggtgttttatgattacgatgaaatttgctacatgacgg

SEQ ID NO: 280315 - DNA, 75 bp, synthetic construct
  source 1..75: mol_type = other DNA
cattaatggaattactgcttcaggaagcagcggaaaaaatcaccgatctcggcgaacaaattgtgattcgccatc

SEQ ID NO: 280316 - DNA, 75 bp, synthetic construct
  source 1..75: mol_type = other DNA
tgaagggcatgtggaagatgtttatgcgtatcggcgcaggcaaagatttagcgtacggtatggggagatgctttt

SEQ ID NO: 280317 - DNA, 75 bp, synthetic construct
  source 1..75: mol_type = other DNA
cgcatattcctgaactgaaaaagcttggagtcattaaagacaaaaatgacctgcttaataatccctgcctgaata

SEQ ID NO: 280318 - DNA, 75 bp, synthetic construct
  source 1..75: mol_type = other DNA
aatgtttgcctgaatatacagacaggtgcatggatccttgcccggcattttcagcagtgtggtgtgaactgggag

SEQ ID NO: 280319 - DNA, 75 bp, synthetic construct
  source 1..75: mol_type = other DNA
tgccgccgtaaacagtaacacactggatagctgctttattcaggcaggaaaacgttactccatcgatcccggact

SEQ ID NO: 280320 - DNA, 75 bp, synthetic construct
  source 1..75: mol_type = other DNA
tggttgaaatcggtagatttggcgctctacaaagcaaagaaagccggacgtaaccgcaccgaagtggcggcctga

SEQ ID NO: 280321 - DNA, 75 bp, synthetic construct
  source 1..75: mol_type = other DNA
ttcacagcaatatcatggtgtgaacaactggcaaacatggaatttccagtgcccgtcaggtcatgtattgtctgg

SEQ ID NO: 280322 - DNA, 75 bp, synthetic construct
  source 1..75: mol_type = other DNA
gttgccttaaaacagcgaaataaaacgcttgccgccatcagcatttcaatacccgtatttcgtgcgacaaaagaa

SEQ ID NO: 280323 - DNA, 75 bp, synthetic construct
  source 1..75: mol_type = other DNA
gatggtgacatcatctgacgtcattctggcgttgtccaacagcggggaaacaccggaaatactggcgttgctgcc

SEQ ID NO: 280324 - DNA, 75 bp, synthetic construct
  source 1..75: mol_type = other DNA
tgaccatagatgttttaaatcttaacgatagagaacatttggttaagccaagatgtgaaacaggatctataattg

SEQ ID NO: 280325 - DNA, 75 bp, synthetic construct
  source 1..75: mol_type = other DNA
atgcattcgtttcttcattttttacgtgatgataacccgggctcattggacgataatctgaattttgttccgtta

SEQ ID NO: 280326 - DNA, 75 bp, synthetic construct
  source 1..75: mol_type = other DNA
gatgggggttgactggagtgatgcaaatcttgccgggagtttgattgggcagaagctggcgatcaatgaatttgt

SEQ ID NO: 280327 - DNA, 75 bp, synthetic construct
  source 1..75: mol_type = other DNA
ttttctgcggttgcgccacaccgtgcgccggaaatcgcccagcttggtttacgcgcgctggcggcggcgacactt

SEQ ID NO: 280328 - DNA, 75 bp, synthetic construct
  source 1..75: mol_type = other DNA
tgcagtggatcaatcaacatcaattctggatacactgttcgccatgacgtcatgtaagaccggtgctgcttcagt

SEQ ID NO: 280329 - DNA, 75 bp, synthetic construct
  source 1..75: mol_type = other DNA
acggatggtgccgctcaatatctggctggaacaagtggaaggtcagcagctgcgcgacgccattgaagagtacgg

SEQ ID NO: 280330 - DNA, 75 bp, synthetic construct
  source 1..75: mol_type = other DNA
cgtatacgtgaagggcatgtggaagatgtttatgcgtatcggcgcaggcagcggtttagcgttcgattcgtataa

SEQ ID NO: 280331 - DNA, 75 bp, synthetic construct
  source 1..75: mol_type = other DNA
gaataaaagccgtgacattcattacatcgttcgccatctgacggaaacgctggggacagacaacctcgcggaaag

SEQ ID NO: 280332 - DNA, 75 bp, synthetic construct
  source 1..75: mol_type = other DNA
taccgacttaggtctgctctctaccagcctgccgggttatttgacgctgccgtcagaaaaacaggttgatttgca

SEQ ID NO: 280333 - DNA, 75 bp, synthetic construct
  source 1..75: mol_type = other DNA
tcccggaacactacgagccgattgaaacgccgctgggtactaacccgctgcatccgaacgtggtgtctaacccgg

SEQ ID NO: 280334 - DNA, 75 bp, synthetic construct
  source 1..75: mol_type = other DNA
tgtcagccaggcgcaaccaacgcccaccagcatccagagagtttgcggccacagctgccagagatgacgcccctc

SEQ ID NO: 280335 - DNA, 75 bp, synthetic construct
  source 1..75: mol_type = other DNA
cttacctgagtttctcaccgtatttgcaaaccgcaggcactctggatgctaaaaccgtagcgattatttcttttg

SEQ ID NO: 280336 - DNA, 75 bp, synthetic construct
  source 1..75: mol_type = other DNA
agcgtaagctgaacggttgggataacgataaacaacatgcgatatatgacaacgcaatcggctttaacatcgaac

SEQ ID NO: 280337 - DNA, 75 bp, synthetic construct
  source 1..75: mol_type = other DNA
actatttcacggagtctcgcactggcgatgacaacataacatgggagaatgacgacaaaacgggctcactggtgt

SEQ ID NO: 280338 - DNA, 75 bp, synthetic construct
  source 1..75: mol_type = other DNA
ccgggatcggacttacggtggtcttgaccgtattgcttctgctaaccaggtgacgaccggtgtcacaactcgcgt

SEQ ID NO: 280339 - DNA, 75 bp, synthetic construct
  source 1..75: mol_type = other DNA
actccgtcgactgggagcgtgaacgcttcaccatggacgaaggcctgtccaatgcggtgaaagaagttttcgttc

SEQ ID NO: 280340 - DNA, 75 bp, synthetic construct
  source 1..75: mol_type = other DNA
tgtgaaattgccgcagaacgttggcgcagcggtaagcgcgtgctcatcgcctgtgaagatgaaaagcaggcttac

SEQ ID NO: 280341 - DNA, 75 bp, synthetic construct
  source 1..75: mol_type = other DNA
tttataagaatggttcacttgcaaatgatagttgttattttgtcgggcttgataaaaataggttgtcaataatcg

SEQ ID NO: 280342 - DNA, 75 bp, synthetic construct
  source 1..75: mol_type = other DNA
agaggcaccaggacaaccggaacctgtacgtaccgttgatgcgctcggtaacgtccattacgacgataaccaggt

SEQ ID NO: 280343 - DNA, 75 bp, synthetic construct
  source 1..75: mol_type = other DNA
ggtgggtcgccagggtcgcggtaaagcggacctgatgaaacaacgtggcgaaaaccgctataccattctggataa

SEQ ID NO: 280344 - DNA, 75 bp, synthetic construct
  source 1..75: mol_type = other DNA
caataatgtttgatcatgaatattatcggtgtgatatagaaaatgcagctaaagagccgttgtcacccaaaaagt

SEQ ID NO: 280345 - DNA, 75 bp, synthetic construct
  source 1..75: mol_type = other DNA
cgatcttttacagcccgtatttgcagttgccggtgggtgataaacgccgttctggtttcttgatcccgaacgcca

SEQ ID NO: 280346 - DNA, 75 bp, synthetic construct
  source 1..75: mol_type = other DNA
ctggcaccgggttacacccaaacgctggaaccgcgtgcgcaatacctgtacgtgccgtatcgcgatcagagcgat

SEQ ID NO: 280347 - DNA, 75 bp, synthetic construct
  source 1..75: mol_type = other DNA
aggtgtgcaatacagctcctgctgctatgcaattcgcgtcggttacgagcggaagctgaacggttgggataacga

SEQ ID NO: 280348 - DNA, 75 bp, synthetic construct
  source 1..75: mol_type = other DNA
acttgggcgagaaaatgaaatagtggatcctaatgatagtttcattgggtgggtacccccggtagccagccttcc

SEQ ID NO: 280349 - DNA, 75 bp, synthetic construct
  source 1..75: mol_type = other DNA
atgccggacaacgtagattttattcaggaacaacaggctgaattactggagcgccagattaacgcggcaagagta

SEQ ID NO: 280350 - DNA, 75 bp, synthetic construct
  source 1..75: mol_type = other DNA
gtgctgatgttgattgccgctattgtcggtgatgcagtgaactataccattggacggttatttggtgacaaactg

SEQ ID NO: 280351 - DNA, 75 bp, synthetic construct
  source 1..75: mol_type = other DNA
cgtcgggattattgtggtttccatattgccgggcgtcatcgaaattatccgtcacaaacgcgctgcggcacgcgc

SEQ ID NO: 280352 - DNA, 75 bp, synthetic construct
  source 1..75: mol_type = other DNA
atgccggacaacatagattttattcaggaacaacaggctgaattactggagcgccagattaacgcggcaagggta

SEQ ID NO: 280353 - DNA, 75 bp, synthetic construct
  source 1..75: mol_type = other DNA
attacgccagatggtttaacattagtgggatttgccatcggcgtgctggctctgccgtttctggcgctgggctgg

SEQ ID NO: 280354 - DNA, 75 bp, synthetic construct
  source 1..75: mol_type = other DNA
aggttaaactggcattaaccgagcaaggttactatttgcagttaccgccaccacccgaagatttgctgaagcaac

SEQ ID NO: 280355 - DNA, 75 bp, synthetic construct
  source 1..75: mol_type = other DNA
catgcagagatgctgacgattacccatccggcgtatggcaatagtatgacgtttaaagcgccagcggatttttaa

SEQ ID NO: 280356 - DNA, 75 bp, synthetic construct
  source 1..75: mol_type = other DNA
attaaatccagtctggacgttcagggttccatctcacgcacattatatttgcgagcaatgggtggaagtatttaa

SEQ ID NO: 280357 - DNA, 75 bp, synthetic construct
  source 1..75: mol_type = other DNA
agttcttcaaaaaattcgacctgatggacgaagaagggaaccgcattgcgctggatagcatggtgcatcgcagcg

SEQ ID NO: 280358 - DNA, 75 bp, synthetic construct
  source 1..75: mol_type = other DNA
tcatcagttttacgagaaacatggcggcaaaacgattattctcgcccgttttgtgccgatcgtcagaacgttcgc

SEQ ID NO: 280359 - DNA, 75 bp, synthetic construct
  source 1..75: mol_type = other DNA
attttatcctgcacattgacgtgcatctggcagagctggtcgcggagtacggcgtctgggtttatgccattttgt

SEQ ID NO: 280360 - DNA, 75 bp, synthetic construct
  source 1..75: mol_type = other DNA
cgactggccaaaccgcccgaaacagaaagtctgttacgaaacgggtaagcctgcgcagacagaatatgaagtcgt

SEQ ID NO: 280361 - DNA, 75 bp, synthetic construct
  source 1..75: mol_type = other DNA
gtttgcgaagagtgtgacgtgccaatacctgctgcccgtcgtgcggcttatccgtcagccacgcgttgtgtttcc

SEQ ID NO: 280362 - DNA, 75 bp, synthetic construct
  source 1..75: mol_type = other DNA
ctcgcctggtttggacggtagtaatcggagataaaaagggcggtgaagagcctcattttgattattctgtggctt

SEQ ID NO: 280363 - DNA, 75 bp, synthetic construct
  source 1..75: mol_type = other DNA
tatctcttttggtggatggataacagttagtaatatcataagcccaatcatggcatatttcgaccgctttatcat

SEQ ID NO: 280364 - DNA, 75 bp, synthetic construct
  source 1..75: mol_type = other DNA
caattatcggctcaggtaaaattgagcgcgtacgggcagctgtcgaagcagaaacactgaaaatgacccgtcaac

SEQ ID NO: 280365 - DNA, 75 bp, synthetic construct
  source 1..75: mol_type = other DNA
ccatgcaaagagaacaggctttggttgttgattatcgttcgatgactaatgaaccagcggttcgtatgttatacc

SEQ ID NO: 280366 - DNA, 75 bp, synthetic construct
  source 1..75: mol_type = other DNA
gtaggttcagagaagctccgctgcacgctgagtggcgaaatcccgacatgggaaaatgcgaacgagggcaatatt

SEQ ID NO: 280367 - DNA, 75 bp, synthetic construct
  source 1..75: mol_type = other DNA
tctcccgaaaaccttagtaggcatcagaaatattacgaagagttgattgaaggtaaagtcgtctttggtgatgtt

SEQ ID NO: 280368 - DNA, 75 bp, synthetic construct
  source 1..75: mol_type = other DNA
caaatggtggaaatcctccgcgggctgatgcgcgactcgcggattctgatcctcgatgaacctaccgcctcgctt

SEQ ID NO: 280369 - DNA, 75 bp, synthetic construct
  source 1..75: mol_type = other DNA
atttatctcgttccccaggaaccgctgctttttccaagcctgtcgataaaagaaaacatcctgtttggtctggca

SEQ ID NO: 280370 - DNA, 75 bp, synthetic construct
  source 1..75: mol_type = other DNA
tattgtttttatctcgcataagctgccggaaattcgccagattgccgatcgaattagcgtgatgcgcgacggaac

SEQ ID NO: 280371 - DNA, 75 bp, synthetic construct
  source 1..75: mol_type = other DNA
gtttaatgatgattatttccagccgctgcgtgatgaactggctgtggtggcagaggagttaaacgcgggctcgat

SEQ ID NO: 280372 - DNA, 75 bp, synthetic construct
  source 1..75: mol_type = other DNA
agcaaaaaatcctgattgccaaatgtctggaagcctcgccgcaagtattgattgtcgatgagccgacgcgcggcg

SEQ ID NO: 280373 - DNA, 75 bp, synthetic construct
  source 1..75: mol_type = other DNA
taccagctgttgcgcagcatcgccgcacaaaatgtggcagtgctgcttatctcctccgatctggaagagatcgaa

SEQ ID NO: 280374 - DNA, 75 bp, synthetic construct
  source 1..75: mol_type = other DNA
aatggagaagccctgttgacactactggataacgccttgcctgcgggtgtggaaaatgaacaatcaccaaactgc

SEQ ID NO: 280375 - DNA, 75 bp, synthetic construct
  source 1..75: mol_type = other DNA
atggttcagcgtattactattgcaccgcaaggcccggagttttcccgttttgtgatgggctactggcgactaatg

SEQ ID NO: 280376 - DNA, 75 bp, synthetic construct
  source 1..75: mol_type = other DNA
ttttcagatcctttctggtttccggatgagtgtatgaacgtcaataagaaaaaactggccgatatttttggcgtt

SEQ ID NO: 280377 - DNA, 75 bp, synthetic construct
  source 1..75: mol_type = other DNA
caggccatgtcagaagcgtctgcagatgaacgcctgacggcagggatgcaggtgtttatggagtgtctggcaaaa

SEQ ID NO: 280378 - DNA, 75 bp, synthetic construct
  source 1..75: mol_type = other DNA
tgtcgggaaacattgaaaggctgggaggttactaacagtaacattaaaaaggccgggaatttaagagcgttgata

SEQ ID NO: 280379 - DNA, 75 bp, synthetic construct
  source 1..75: mol_type = other DNA
agattcgaggtaaatacattcgcatctggttcatgtttcgaggaaaacgatgtcgggaaacattgaaaggctggg

SEQ ID NO: 280380 - DNA, 75 bp, synthetic construct
  source 1..75: mol_type = other DNA
acagcagttcgcgcagcattggctcgtacatcatgtggatggggattgttgccgactgcgtgaccagcgccattt

SEQ ID NO: 280381 - DNA, 75 bp, synthetic construct
  source 1..75: mol_type = other DNA
cctttatgtttggcacaggctatgaaaaaaccgggcttggacgccgcattgcgctgattctggtgaaaaagatgg

SEQ ID NO: 280382 - DNA, 75 bp, synthetic construct
  source 1..75: mol_type = other DNA
gcagttcgcgcagcattggctcgtacatcatgtggatggggattgttgccgactgcgtgaccagcgccattttct

SEQ ID NO: 280383 - DNA, 75 bp, synthetic construct
  source 1..75: mol_type = other DNA
ccctgtgccatccggctgaacgctggctgatgatctgtgcccgtatcagctggcacctgacccgccagcagcatc

SEQ ID NO: 280384 - DNA, 75 bp, synthetic construct
  source 1..75: mol_type = other DNA
cgccggtactgaagtctggcgatcaggtgccgcgctggcagagacggaactgcaggcaatgggcccgctctgttc

SEQ ID NO: 280385 - DNA, 75 bp, synthetic construct
  source 1..75: mol_type = other DNA
ccgcgatggtcggttacagcgtggtggcgctgatgctgcttctgcgcattatctgctgggacgacattgtcagta

SEQ ID NO: 280386 - DNA, 75 bp, synthetic construct
  source 1..75: mol_type = other DNA
tgcgctggatatctggcaggatccgcaggccatgtcagaggcatcagcagatgaacgtctgaccgcagggatgca

SEQ ID NO: 280387 - DNA, 75 bp, synthetic construct
  source 1..75: mol_type = other DNA
gaggggaccgtggcaggggacagtgacatgctgcgacgcgcgttcagcaacctgctctccaatgccattaaatac

SEQ ID NO: 280388 - DNA, 75 bp, synthetic construct
  source 1..75: mol_type = other DNA
gagcatttgcagcaaggtaaagcgcaactgttaggtgcctgggcaggtgaactgctggcggaagagttgcgcctg

SEQ ID NO: 280389 - DNA, 75 bp, synthetic construct
  source 1..75: mol_type = other DNA
gtcctcagaccagtaacgagcgattggcggaagagtcaaatagtgatcatggactctatggcggtattcaatggg

SEQ ID NO: 280390 - DNA, 75 bp, synthetic construct
  source 1..75: mol_type = other DNA
ggagaaacatgatgtggatctggccgccgaactgaatgaattacgtgagttattcgagcccctggcagacgaaac

SEQ ID NO: 280391 - DNA, 75 bp, synthetic construct
  source 1..75: mol_type = other DNA
tgtgaacgtgatgattacgaatacgatgtccggccaggttcccgctaatctggaacgtttgtttgaccggttcta

SEQ ID NO: 280392 - DNA, 75 bp, synthetic construct
  source 1..75: mol_type = other DNA
gcatctctcgacgtgtagccgtagcaccggaagaaggtaaaagtaaacatttcatcattactgtcgccacggata

SEQ ID NO: 280393 - DNA, 75 bp, synthetic construct
  source 1..75: mol_type = other DNA
gcactggatgagcgtaaggggagatatctgaccggttcggaactaaaaacggcggtgtacggcatccggcagtcg

SEQ ID NO: 280394 - DNA, 75 bp, synthetic construct
  source 1..75: mol_type = other DNA
cgaccagcttcccgccatgctctggcgattaagggggttaaatgccaggatacgcgaccagcattccccatggtc

SEQ ID NO: 280395 - DNA, 75 bp, synthetic construct
  source 1..75: mol_type = other DNA
gattacgcctgcttcttctcggcgaactctgcccagaaaccggcgttgtatgataccgctgacgccactgccaac

SEQ ID NO: 280396 - DNA, 75 bp, synthetic construct
  source 1..75: mol_type = other DNA
gccctcagaccagtaacgagcgattggcagaagagtcaaatagtgaacatgaactctatggcggtattcaatggg

SEQ ID NO: 280397 - DNA, 75 bp, synthetic construct
  source 1..75: mol_type = other DNA
cgtcagctggatgccgtgcttcatcatccggaatttcagaaagtggaatccctgtggcggggcgtgaagtctctg

SEQ ID NO: 280398 - DNA, 75 bp, synthetic construct
  source 1..75: mol_type = other DNA
tcgtttgcctttgcatccaacatggtacgcagcttcatcaacaacggctggtgtgtacaaatccgtggcccgcag

SEQ ID NO: 280399 - DNA, 75 bp, synthetic construct
  source 1..75: mol_type = other DNA
atgaaaccttccactgaatggtggcgatatcttgcgccgctggcggtcatcgccattattgctctacttccggtt

SEQ ID NO: 280400 - DNA, 75 bp, synthetic construct
  source 1..75: mol_type = other DNA
tagaaaccgataccgaaggctatctcaaagagagtagtcagtggagcgaaacactggcggtggtcattgcagaga

SEQ ID NO: 280401 - DNA, 75 bp, synthetic construct
  source 1..75: mol_type = other DNA
aagagatagagaccgataccgaaggctatctcaaagagagtagcctgtggagcgaacctctggcagccgtgattg

SEQ ID NO: 280402 - DNA, 75 bp, synthetic construct
  source 1..75: mol_type = other DNA
tcgatcaaaccacgctgcgctttctcggcattgggctgcttttgataatcgccgtctatttatggttttgcgcct

SEQ ID NO: 280403 - DNA, 75 bp, synthetic construct
  source 1..75: mol_type = other DNA
ttttcggctatttcgccaaaacgcgcgccggaaatcgcccagcttggtttacgggcgctggcggcggcgacactt

SEQ ID NO: 280404 - DNA, 75 bp, synthetic construct
  source 1..75: mol_type = other DNA
gtgctggcaccgctggcgtggattatgggcgtggactggagtgatgccaaccttgcgggtagcctgattgggcag

SEQ ID NO: 280405 - DNA, 75 bp, synthetic construct
  source 1..75: mol_type = other DNA
gtcctacagcgatgcgggtagcgcctttatttttggttcgctggtggggccgaaaatggatgtcctgtttgacgg

SEQ ID NO: 280406 - DNA, 75 bp, synthetic construct
  source 1..75: mol_type = other DNA
tttgtgctgatgaacacagaaggtcatgattgcggcttcaacggcggtgaaatgacgctgtcgctggcggaccgc

SEQ ID NO: 280407 - DNA, 75 bp, synthetic construct
  source 1..75: mol_type = other DNA
gttgagaacggcgacattcagttcgtaccgaagcagtacgaaaacatgtatttctcctggatgcgcgatattcag

SEQ ID NO: 280408 - DNA, 75 bp, synthetic construct
  source 1..75: mol_type = other DNA
actttgcggtatcactgccgacaccatcatgctgcagccgttcccgcagtatgatgcatctcaggttgatgaagc

SEQ ID NO: 280409 - DNA, 75 bp, synthetic construct
  source 1..75: mol_type = other DNA
actgctgctggcgctgatctgttacctgctactggaaagccaggcgaagaagctacgggcgaaaaatgaagcggc

SEQ ID NO: 280410 - DNA, 75 bp, synthetic construct
  source 1..75: mol_type = other DNA
tcgtcagttatctgatttacggctgctatgacctgctcgcccgcttttactgcggtcacaaactggcgaagcgcc

SEQ ID NO: 280411 - DNA, 75 bp, synthetic construct
  source 1..75: mol_type = other DNA
attttctcgctcagtattaccaccaactggctgggctatattttgctggcagggattatctttaccgcaggcgtg

SEQ ID NO: 280412 - DNA, 75 bp, synthetic construct
  source 1..75: mol_type = other DNA
gggcggcacgctggaagtgaaaaccattgcgattatctcctttgcgctttgtggttttgctaactttggttctat

SEQ ID NO: 280413 - DNA, 75 bp, synthetic construct
  source 1..75: mol_type = other DNA
tttgcaaacacatttacccaagaataggtcattacccgctagcccggtgcgatacccgtcactgggtaaagtgtt

SEQ ID NO: 280414 - DNA, 75 bp, synthetic construct
  source 1..75: mol_type = other DNA
gcgacaggaaactaaaggcgctgcaaggaacgcatagggatcgtgttgaaatgcttgctgacggagaggggttag

SEQ ID NO: 280415 - DNA, 75 bp, synthetic construct
  source 1..75: mol_type = other DNA
tgtaaacaggccttaagattctgcaaggttcgccgttatgcctcatgtgatgccctggcttttatgacaatccag

SEQ ID NO: 280416 - DNA, 75 bp, synthetic construct
  source 1..75: mol_type = other DNA
cgtgatcgttggactgatcctcgaacccgtgccgggtgccgtggtggcgatggtgggtatctccatcatcgccat

SEQ ID NO: 280417 - DNA, 75 bp, synthetic construct
  source 1..75: mol_type = other DNA
gcaaaacaggcattgaggttctgtaatgttcggcattatgccgtttgcgatgcgcttgcccacttaactttaagc

SEQ ID NO: 280418 - DNA, 75 bp, synthetic construct
  source 1..75: mol_type = other DNA
aatgggattttaacgaatggatttggaccgttccaagaaataacagcaaaagtagcaaaaagattattcgaccaa

SEQ ID NO: 280419 - DNA, 75 bp, synthetic construct
  source 1..75: mol_type = other DNA
tctgtcgtttagcgaaacaccgccaaaaagcattattgaagctgcggcgaacggtgcaatgaccgggctgaaaat

SEQ ID NO: 280420 - DNA, 75 bp, synthetic construct
  source 1..75: mol_type = other DNA
agccttcgcaggtcacatttgaaaatctgtcgttcagcgaaacgccgccaaaaagctttatcgaagcggcggcga

SEQ ID NO: 280421 - DNA, 75 bp, synthetic construct
  source 1..75: mol_type = other DNA
cgcattcttggcagtatttttcagaaagccctcaacatcagcaaaatcgaatcttttgttgcggttaccactatt

SEQ ID NO: 280422 - DNA, 75 bp, synthetic construct
  source 1..75: mol_type = other DNA
acaggaattgtactgggtgaagaacgttcccgccaggctgcttcgcttaaagggcgtaggctatacaaagatttt

SEQ ID NO: 280423 - DNA, 75 bp, synthetic construct
  source 1..75: mol_type = other DNA
cgacgacgacccgcaggcgtccaacgagaaaatcctcgaagcgattttattagtctggctggacgaagccgagtg

SEQ ID NO: 280424 - DNA, 75 bp, synthetic construct
  source 1..75: mol_type = other DNA
aaaaccagcgggagcggtagcagaaaaaactgcggcggtggctgaaaaaaccgcagcatcagataaggggacgtc

SEQ ID NO: 280425 - DNA, 75 bp, synthetic construct
  source 1..75: mol_type = other DNA
tcacggccagaatctctatcttgacaatatggaggcaacgggtttttaccgtgtcccactgacagaggcgcagcc

SEQ ID NO: 280426 - DNA, 75 bp, synthetic construct
  source 1..75: mol_type = other DNA
tgcatctggactctcatttgatggagacccgccaacattccatgaactgcgcagcctgtcggcgaggctataccg

SEQ ID NO: 280427 - DNA, 75 bp, synthetic construct
  source 1..75: mol_type = other DNA
ccgtgcagcaaagtcagaagtaaggcgctcaaggctgacagctaatgagtatgtcgctatttaccatgctgctga

SEQ ID NO: 280428 - DNA, 75 bp, synthetic construct
  source 1..75: mol_type = other DNA
gaccaacgtgaaagtgtttggcgagatggagttctggtttgccattatcaaggttgttgccgtggtggcgatgat

SEQ ID NO: 280429 - DNA, 75 bp, synthetic construct
  source 1..75: mol_type = other DNA
tagcttgagttactctcacttcaacaacgacctgtctgcaaccatgagcaacggtacttacgtttgttgtggttt

SEQ ID NO: 280430 - DNA, 75 bp, synthetic construct
  source 1..75: mol_type = other DNA
ctctgctctgcgctgtggtactggatggtatgaccgggactaagcacaaggcgaatagtgaactggtcggtcagg

SEQ ID NO: 280431 - DNA, 75 bp, synthetic construct
  source 1..75: mol_type = other DNA
tattggtagtggtgtggcaccccagtacggtttatataccgcagctgttgcggggattgtcattgctctgacggg

SEQ ID NO: 280432 - DNA, 75 bp, synthetic construct
  source 1..75: mol_type = other DNA
agccacgcaagcaccttaaaatcaccatcatacactaaatcagtaagttggcagcattaccaagcacccgaactg

SEQ ID NO: 280433 - DNA, 75 bp, synthetic construct
  source 1..75: mol_type = other DNA
caataaaggcgataccgtggatgtcacctttgaagatgaaaaaggtggtaagcacaccgtgacgctggagaaagg

SEQ ID NO: 280434 - DNA, 75 bp, synthetic construct
  source 1..75: mol_type = other DNA
atgcgtgtgtatttgttctttgctagtgctcgcattgttggaaatacgcgtaaatgttataagtgtcatctctct

SEQ ID NO: 280435 - DNA, 75 bp, synthetic construct
  source 1..75: mol_type = other DNA
ccgccgtattctttgtggtgattaacgccatcaacctgaccaacgttaaagtgtttggcgagatggagttctggt

SEQ ID NO: 280436 - DNA, 75 bp, synthetic construct
  source 1..75: mol_type = other DNA
gtctgttaatggcgctggtcgtttctgcgctggtaattaactgggcgatgattagcctggcgcacataaaattcc

SEQ ID NO: 280437 - DNA, 75 bp, synthetic construct
  source 1..75: mol_type = other DNA
tacctgtgcgatcagcgggcatccgagcaggcgcgtgaccgttaccgtgaggcgctggcctggctgaaagacgtc

SEQ ID NO: 280438 - DNA, 75 bp, synthetic construct
  source 1..75: mol_type = other DNA
ttcaacaatcgacgacaactacgaacactacacatataacggcacctacaataatgccgctgatactcatgttgt

SEQ ID NO: 280439 - DNA, 75 bp, synthetic construct
  source 1..75: mol_type = other DNA
cgctgattctgggtggtgatcatctgcgaccaaaatcgctggtcgatagcgaaacgcttatcgtggtgtacatct

SEQ ID NO: 280440 - DNA, 75 bp, synthetic construct
  source 1..75: mol_type = other DNA
cattctcagggcggaattcagggggcagtacattgtttatttatgcatctggaggtaatggaggatctgccggag

SEQ ID NO: 280441 - DNA, 75 bp, synthetic construct
  source 1..75: mol_type = other DNA
tgtaaatggcactttcagcggtcaggtaaaaggcaatagcggaaactttgacgtaaatgtcaccgctggcggtga

SEQ ID NO: 280442 - DNA, 75 bp, synthetic construct
  source 1..75: mol_type = other DNA
tatcatctggatgttgcacggttcgctgtgtgaaatacggatgagcttctggggtgcggagtttgcggcgttctt

SEQ ID NO: 280443 - DNA, 75 bp, synthetic construct
  source 1..75: mol_type = other DNA
atgggatttatgccgttttgttccgcacatccgctggtgctggaagctgcaatccgctacgccagtgcaaaccaa

SEQ ID NO: 280444 - DNA, 75 bp, synthetic construct
  source 1..75: mol_type = other DNA
tgatcgcaattgcggtggaaacggatgccatcatcgaagcgggcccgcatatcctgttgcctccttcccgttcgt

SEQ ID NO: 280445 - DNA, 75 bp, synthetic construct
  source 1..75: mol_type = other DNA
agctgttattgcacatcctgctgctgataacgcaatgcaaaccactgcaacattcgataattccacactgatggg

SEQ ID NO: 280446 - DNA, 75 bp, synthetic construct
  source 1..75: mol_type = other DNA
ggcctttatcaactgttggtgtagaaaacagcgactctgaatacagcgaatttgatcacatcatcggtaacgaag

SEQ ID NO: 280447 - DNA, 75 bp, synthetic construct
  source 1..75: mol_type = other DNA
tgatgaaaacttcttcccacgtggtgcagatagttatcgcgatgctgatggtgaagtagacaccaacggttggga

SEQ ID NO: 280448 - DNA, 75 bp, synthetic construct
  source 1..75: mol_type = other DNA
caatagtctgacaatcaaaaacagcactattcacggtatgatttattccgagtgcatgacaactgattgtgctga

SEQ ID NO: 280449 - DNA, 75 bp, synthetic construct
  source 1..75: mol_type = other DNA
ttctctgctgctaacaaagctgacctgggtgcatacacctatcaggctgaacagcgcggtaacaccgttgttctg

SEQ ID NO: 280450 - DNA, 75 bp, synthetic construct
  source 1..75: mol_type = other DNA
gcatgcgttatgaactgggtgtagatgcaggttataccttcacctacagcgaagaccaggctctgactccgtact

SEQ ID NO: 280451 - DNA, 75 bp, synthetic construct
  source 1..75: mol_type = other DNA
cccgacagtttctaatatcacctatgtgattcgtgatggtaatgcttctccggccactggggtaaatacctctgc

SEQ ID NO: 280452 - DNA, 75 bp, synthetic construct
  source 1..75: mol_type = other DNA
cgaaggcttccagcaggccgttgctgctcacaaatttaacgtccttgccagccagccggcagatttcgaccgcac

SEQ ID NO: 280453 - DNA, 75 bp, synthetic construct
  source 1..75: mol_type = other DNA
attgcttctgataacgtactgggcggcaaaatcgccggtgattacatcgcgaagaaagcgggtgaaggtgccaaa

SEQ ID NO: 280454 - DNA, 75 bp, synthetic construct
  source 1..75: mol_type = other DNA
ctgttgaccgctcatccggatgttcaggctgtattcgcgcagaatgatgaaatggcgctgggcgcgctgcgcgca

SEQ ID NO: 280455 - DNA, 75 bp, synthetic construct
  source 1..75: mol_type = other DNA
ttcccggtagataaatggcatggtctgatggagaacccaacaacagcagatgccatcctggacagactggtacat

SEQ ID NO: 280456 - DNA, 75 bp, synthetic construct
  source 1..75: mol_type = other DNA
caggcaagtattatgaagtctatcgagggaaggatcgtttagtaatggtgattaacggtgcaggctttgtgaacg

SEQ ID NO: 280457 - DNA, 75 bp, synthetic construct
  source 1..75: mol_type = other DNA
tggtggtgctggactcccagaacaacccggcaaaagaactggcgaatgtgcaggacttaactgttcgcggcacca

SEQ ID NO: 280458 - DNA, 75 bp, synthetic construct
  source 1..75: mol_type = other DNA
ggataacgcagaaactttcactctgccgatgtttaacctggcgatcccaaccgaactgccgggcgtagacactaa

SEQ ID NO: 280459 - DNA, 75 bp, synthetic construct
  source 1..75: mol_type = other DNA
cccgacccaatacgcagaagtgctggtgaaacgtatgcaggcggcaggcgcgcaggcgtatctggttaacaccgg

SEQ ID NO: 280460 - DNA, 75 bp, synthetic construct
  source 1..75: mol_type = other DNA
tcctgacggccgatgcttttggcgtactgccgccggtttctcgcctgaccgccgatcaaactcagtaccacttcc

SEQ ID NO: 280461 - DNA, 75 bp, synthetic construct
  source 1..75: mol_type = other DNA
cacagaaagagggattcgagcaagctttgaattttatcaaagatgttagttcttctcttagtctgacaacggatg

SEQ ID NO: 280462 - DNA, 75 bp, synthetic construct
  source 1..75: mol_type = other DNA
cgcctgatatctgcttttgttttaatacccgtagtcatcgcggcactgtttctgttgccgccggtggggttcgct

SEQ ID NO: 280463 - DNA, 75 bp, synthetic construct
  source 1..75: mol_type = other DNA
tgaccaaacagctttccggcaaacgtctgttcgttgtcgacgctttctgtggtgcgaacccggatactcgtcttt

SEQ ID NO: 280464 - DNA, 75 bp, synthetic construct
  source 1..75: mol_type = other DNA
cctcagacctacgacgaactgtcgttcgaggaaaggctgacgctgctggttgatgacgagcttctgagcagggaa

SEQ ID NO: 280465 - DNA, 75 bp, synthetic construct
  source 1..75: mol_type = other DNA
cgtcgctcagcctcagtgcgccggaactgaccagcagcggcgtacttgttgcttccgccctgaatacacagtcac

SEQ ID NO: 280466 - DNA, 75 bp, synthetic construct
  source 1..75: mol_type = other DNA
cggggtaaaacactgcataccgcagggaccacgcagggacagaatctcaccgtgcaggcggacaactgggcgaac

SEQ ID NO: 280467 - DNA, 75 bp, synthetic construct
  source 1..75: mol_type = other DNA
acactggatataccggacatccgcaacagcgggcttatcaccggtgataatggtttaacgttaaacactgcctcc

SEQ ID NO: 280468 - DNA, 75 bp, synthetic construct
  source 1..75: mol_type = other DNA
tgatgcactggtgctgaaggcgcaggatgtgacacagaacggtgtgctgtccggcggcaaagggctgacagtcag

SEQ ID NO: 280469 - DNA, 75 bp, synthetic construct
  source 1..75: mol_type = other DNA
tctgctttcggccggcacgctctcccttgatggaaattcactggataaccgcggcactgtccagggtgaccatgt

SEQ ID NO: 280470 - DNA, 75 bp, synthetic construct
  source 1..75: mol_type = other DNA
ctgaataacagtggcgccgttcagggagctaccctgacgctcggcagtacaacgctcagcaacagtggctccctg

SEQ ID NO: 280471 - DNA, 75 bp, synthetic construct
  source 1..75: mol_type = other DNA
tgaccgacgtggcggaagaagcggatgtgctgctgctgaacacctgctcaatccgcgagaaggctcaggaaaaag

SEQ ID NO: 280472 - DNA, 75 bp, synthetic construct
  source 1..75: mol_type = other DNA
ggatagcagaagagatcgaaacggcagaacacattaagaagttacgtgacatgcgttcaaaaagcagaggtaacc

SEQ ID NO: 280473 - DNA, 75 bp, synthetic construct
  source 1..75: mol_type = other DNA
ctgcataaatcactgatggtgggaatgggctacagcgtcaatgtggggaataacgtcaccttctcggtgggcaag

SEQ ID NO: 280474 - DNA, 75 bp, synthetic construct
  source 1..75: mol_type = other DNA
aaataaggaccataacaacagcggcgatattctcattaccgggagccagattaagtccggcaatgacaccagcct

SEQ ID NO: 280475 - DNA, 75 bp, synthetic construct
  source 1..75: mol_type = other DNA
tcttccatcagttgggtcgctggaaactgttaaaagagaagaatccagacctgattatcggcgtcggtggctgcg

SEQ ID NO: 280476 - DNA, 75 bp, synthetic construct
  source 1..75: mol_type = other DNA
actggtggcgggtgaaattcgtcagcagcgcatggacgcctggcgggcagcgtgcctgcaaaatccgcaaggtat

SEQ ID NO: 280477 - DNA, 75 bp, synthetic construct
  source 1..75: mol_type = other DNA
tgaaacagctgctcggcgaggcgacggttgaatcgctgcgctatgccctcttttttgagaaaacgcttactaccg

SEQ ID NO: 280478 - DNA, 75 bp, synthetic construct
  source 1..75: mol_type = other DNA
tttttatgatcatcaccggctttgcgctgtacagcgaacacagccagtacgctatttttgcgccgttccgttatg

SEQ ID NO: 280479 - DNA, 75 bp, synthetic construct
  source 1..75: mol_type = other DNA
catgtcttcgatgacgattttgaactttacggaggatgctttaatgaacaaagtgatgaaagctgtgggttgggc

SEQ ID NO: 280480 - DNA, 75 bp, synthetic construct
  source 1..75: mol_type = other DNA
caaaagccagcaatacggcgaaaattcatccacggaacggatgagcaaaacgcagctatagcgaaaactatcgac

SEQ ID NO: 280481 - DNA, 75 bp, synthetic construct
  source 1..75: mol_type = other DNA
gagctgatgacccgcatccgtgggtttgaaaacatctgcaatgagctcggttatgtcggtgagttttacaccctg

SEQ ID NO: 280482 - DNA, 75 bp, synthetic construct
  source 1..75: mol_type = other DNA
tttgctcaaagcagggcggcaaagcggggaaagcggagtcgatcgttactttgagcaacaggtttcgctggcggc

SEQ ID NO: 280483 - DNA, 75 bp, synthetic construct
  source 1..75: mol_type = other DNA
tttgatttatatgtggaacattctgatgtatgcaattccgtatacgttatatgcgcttgcagcagggtttcttgt

SEQ ID NO: 280484 - DNA, 75 bp, synthetic construct
  source 1..75: mol_type = other DNA
catggctactatccctgccctcgtacattctcaaactgcctttgtctggcgctttatcatctttggcgcgtcaga

SEQ ID NO: 280485 - DNA, 75 bp, synthetic construct
  source 1..75: mol_type = other DNA
catccataagctatcccttattgcttgatcggctggaatgctgctttaaaaaatcctcaagcgcaaaattggtat

SEQ ID NO: 280486 - DNA, 75 bp, synthetic construct
  source 1..75: mol_type = other DNA
atgctactgccgctcttcattctggttggttttattgcaggttattttgttaatgccatggcctatcacctctcg

SEQ ID NO: 280487 - DNA, 75 bp, synthetic construct
  source 1..75: mol_type = other DNA
aggaattcaaaatcagaaaaattaaacgggattataagtacagttgcagagtttctgacagatattttgatctgt

SEQ ID NO: 280488 - DNA, 75 bp, synthetic construct
  source 1..75: mol_type = other DNA
gaattaatattcgggaatatcatgatattactgctgaaatgtcgtatgcgccgggagaacaaattaagggagggc

SEQ ID NO: 280489 - DNA, 75 bp, synthetic construct
  source 1..75: mol_type = other DNA
cgtcgcctcgctgataccgaaaccgcgcacggtctgagcgttgagtttgccgccgtccatgatgccgccgacgct

SEQ ID NO: 280490 - DNA, 75 bp, synthetic construct
  source 1..75: mol_type = other DNA
accgcacaggtttaccgcaaagctatcgatgatgccgctgcgggcaaaccgtttgacaccagcctgctggaaacc

SEQ ID NO: 280491 - DNA, 75 bp, synthetic construct
  source 1..75: mol_type = other DNA
ctggaaggtctggcgcatcgtggttacaccgaaggtttcctgcgtcgtcatactcacgacgattatcagaactac

SEQ ID NO: 280492 - DNA, 75 bp, synthetic construct
  source 1..75: mol_type = other DNA
atgacgttggcaacatcgtacacaagtacgagccgattccggtgcaaaatgttgagccgacgctgggtatcggcg

SEQ ID NO: 280493 - DNA, 75 bp, synthetic construct
  source 1..75: mol_type = other DNA
tgtctgataaattgttaaagagcagttgcgacgcggctttcagctcactgtcgcgaggtggcgtatattacgctt

SEQ ID NO: 280494 - DNA, 75 bp, synthetic construct
  source 1..75: mol_type = other DNA
ttgcgtgtttccatcggcctcatccgtcgccagataccgataaaggcgctgtagaaagcgtgcgtgactggttac

SEQ ID NO: 280495 - DNA, 75 bp, synthetic construct
  source 1..75: mol_type = other DNA
gaacgcctgaccaaaatgggcgtgcattcgctgaaaatcgaaggccgtactaaatctttctactattgcgcacgc

SEQ ID NO: 280496 - DNA, 75 bp, synthetic construct
  source 1..75: mol_type = other DNA
ccgactcaggaagcaaaaaccagcaatacggcgaaagttcagccacggaacggatgagcaaaacgcagctatagc

SEQ ID NO: 280497 - DNA, 75 bp, synthetic construct
  source 1..75: mol_type = other DNA
ttgggagagggtgacaaagaaatatgttggtgaggatgaaatagcccctgcaatcactcgcatgtttaatgaggt

SEQ ID NO: 280498 - DNA, 75 bp, synthetic construct
  source 1..75: mol_type = other DNA
gaagtgaaaggcggaagctaacgaccagactcagggacaaaaaacgggtcatcgggcgtgattttgtccacggaa

SEQ ID NO: 280499 - DNA, 75 bp, synthetic construct
  source 1..75: mol_type = other DNA
acaggctaacgccgtgaactgggcgacggtgaaattctggcagcaaatgggtctgacccgcgtgatcctctctcg

SEQ ID NO: 280500 - DNA, 75 bp, synthetic construct
  source 1..75: mol_type = other DNA
ttcattcgtgctgaactggctgatattgatgacaccggatttagcgaactcaaaacgctgtacgcctggtacatg

SEQ ID NO: 280501 - DNA, 75 bp, synthetic construct
  source 1..75: mol_type = other DNA
agctatttagagccgcgcagccttactccgccaaagctaagaatatccttaagcgagttgcaaaactggcagaaa

SEQ ID NO: 280502 - DNA, 75 bp, synthetic construct
  source 1..75: mol_type = other DNA
tatgcagtttacgacgaatggccccttggtcccgatgttcgtattttcttacggcatgtacttttcagaaaatta

SEQ ID NO: 280503 - DNA, 75 bp, synthetic construct
  source 1..75: mol_type = other DNA
atgtcgcaaaaatcgcttacagccatcacgttctgtgtgacggcaatcctcatcatctggatgctgcacggctcg

SEQ ID NO: 280504 - DNA, 75 bp, synthetic construct
  source 1..75: mol_type = other DNA
tcacgttctgtgtgacggcaatcctcatcatctggatgttgcacggctcgctgtgtgaaatacggatgagcttct

SEQ ID NO: 280505 - DNA, 75 bp, synthetic construct
  source 1..75: mol_type = other DNA
tcacgttctgcgtgacggcaatcctcatcatctggatgctgcacggttcgctgtgtgaaatacggatgagtttct

SEQ ID NO: 280506 - DNA, 75 bp, synthetic construct
  source 1..75: mol_type = other DNA
tgtgctgtatcaggggcggattgtgaaatctggcgattttacgttggtcaaacaactggaggagcagggttatgg

SEQ ID NO: 280507 - DNA, 75 bp, synthetic construct
  source 1..75: mol_type = other DNA
tcgtgacccggataacccttttaatacgtggactggtatagggaagcgcccggcctggctaactgcaaaattgga

SEQ ID NO: 280508 - DNA, 75 bp, synthetic construct
  source 1..75: mol_type = other DNA
tggcggtcgtcagtaccggccatgtaaaaaaagaagacgcggaactactggacaaggtctgtaacgatgacttgt

SEQ ID NO: 280509 - DNA, 75 bp, synthetic construct
  source 1..75: mol_type = other DNA
atggctatcaaactcattgctatcgatatggatcccccccttctcccccccgacccccccatttcccccgccgtt

SEQ ID NO: 280510 - DNA, 75 bp, synthetic construct
  source 1..75: mol_type = other DNA
cgcaaaccgctctcagctatgacgactaccgtttcctggaaaaactctctcgcgaagtcggttctcatttccacg

SEQ ID NO: 280511 - DNA, 75 bp, synthetic construct
  source 1..75: mol_type = other DNA
catcatctggatgttacatggttcgctgtgtgaaatacggatgaacatctggggagcggagtttgcggcgttctt

SEQ ID NO: 280512 - DNA, 75 bp, synthetic construct
  source 1..75: mol_type = other DNA
cacaattacctgaaagagctgcatatggaacagccgggcgactactgcattacttacaacggtgcgctggtgcag

SEQ ID NO: 280513 - DNA, 75 bp, synthetic construct
  source 1..75: mol_type = other DNA
gtggcgaactttgtcaccaaatctaaccttgaagatggcgtggcgtttgctattgagaagtatgtgctgaattaa

SEQ ID NO: 280514 - DNA, 75 bp, synthetic construct
  source 1..75: mol_type = other DNA
cacagctacctgaaagagctgcatatggaacagccgggcgactactgtattacttataacggcgcactggtgcag

SEQ ID NO: 280515 - DNA, 75 bp, synthetic construct
  source 1..75: mol_type = other DNA
cgtcagtaaccagtttttcctgcaaacggcacttaatgcggtgcgcagctatcgcggccaggaaacgctcgaccg

SEQ ID NO: 280516 - DNA, 75 bp, synthetic construct
  source 1..75: mol_type = other DNA
ggctttattttttaaccattctaatttgacagttattatactcaccttgtgtggagtatttatatcgataagtaa

SEQ ID NO: 280517 - DNA, 75 bp, synthetic construct
  source 1..75: mol_type = other DNA
tatgctagtccttaataaatataatcccagccagagcgagatgcaagttttgagcgtcggtaatgactccaactt

SEQ ID NO: 280518 - DNA, 75 bp, synthetic construct
  source 1..75: mol_type = other DNA
acggcatcatggtcggtgttgataccaaaattgacggtaacaacgctaagtggatcgtcggtgcggctgcaggct

SEQ ID NO: 280519 - DNA, 75 bp, synthetic construct
  source 1..75: mol_type = other DNA
aagagcaactacagctaacggtctgccaacgtctgattgcagaaaagagctatttttcccaagaggagctccgcc

SEQ ID NO: 280520 - DNA, 75 bp, synthetic construct
  source 1..75: mol_type = other DNA
cagttaatcgtcaggccaatgtcagccagccagatacaccgtttggtggtggacagactgtggttactccacaaa

SEQ ID NO: 280521 - DNA, 75 bp, synthetic construct
  source 1..75: mol_type = other DNA
agatttcaccatggcgcaggaaattgccgataccatcaaccgcacacgtggatacggtaacgcgacggcgttaga

SEQ ID NO: 280522 - DNA, 75 bp, synthetic construct
  source 1..75: mol_type = other DNA
ctgctcaggctaactacggctacggtattgttgctatgaactctgatggtcacctgactatcaatggtaacggcg

SEQ ID NO: 280523 - DNA, 75 bp, synthetic construct
  source 1..75: mol_type = other DNA
tgaacaacggttctgaatgggatactacaggtcgttccatcgttgataccttgacagttaataatgcttctcagg

SEQ ID NO: 280524 - DNA, 75 bp, synthetic construct
  source 1..75: mol_type = other DNA
tgtgctgtatcagggacgaattgtgaaatccggcgatttcacgttggtcaaacaactggaggagcagggttatgg

SEQ ID NO: 280525 - DNA, 75 bp, synthetic construct
  source 1..75: mol_type = other DNA
gctacaaacagccttactcctgatgcaacatatgaaaacaatgactggaaacgtgttgttgatgacaaggtcttc

SEQ ID NO: 280526 - DNA, 75 bp, synthetic construct
  source 1..75: mol_type = other DNA
ctataccgatgctaactacctcggtggtggtgacgtagatcaagactggtccgcgaacgtgggtgttaaatatac

SEQ ID NO: 280527 - DNA, 75 bp, synthetic construct
  source 1..75: mol_type = other DNA
aactgggtgatgctggttacgtgactccttacggcagcgtttctggtctgttccagtctggtgatgactaccagc

SEQ ID NO: 280528 - DNA, 75 bp, synthetic construct
  source 1..75: mol_type = other DNA
attacgttgctgcgtggcgtgggcttactggggaaagaagatctgcttttaaggcctgggcggccttcgggaatt

SEQ ID NO: 280529 - DNA, 75 bp, synthetic construct
  source 1..75: mol_type = other DNA
aacgtgattgcggcaaaaagtgacgctgaagggatactggaaaatgctttctggcaaattgcgctcaatgaggat

SEQ ID NO: 280530 - DNA, 75 bp, synthetic construct
  source 1..75: mol_type = other DNA
gattcgtttctacatgcgcaaaattgccgacaacatgccgcagagcgacgccgacaaactcgtcctgtttaacct

SEQ ID NO: 280531 - DNA, 75 bp, synthetic construct
  source 1..75: mol_type = other DNA
gctgaacggtgatgtagcggcaacagaacgcgagttgcagtacaccagcgaagtgctggggctgaaatacgacaa

SEQ ID NO: 280532 - DNA, 75 bp, synthetic construct
  source 1..75: mol_type = other DNA
gatcgcgtttccagcccgcaatggcaggctacgttgaaagcgatcgttccgtcttatggacgcaagctgaacggt

SEQ ID NO: 280533 - DNA, 75 bp, synthetic construct
  source 1..75: mol_type = other DNA
cggtgaagagaagaaaaaacctttgccattacgttgctgcgcggcgtgggcttactggggaaagaagatctgctt

SEQ ID NO: 280534 - DNA, 75 bp, synthetic construct
  source 1..75: mol_type = other DNA
cgcacatttcaagtgggatttagataaccctaatactaaatatgccgttcttaccaatgctgccgcaaatgcgct

SEQ ID NO: 280535 - DNA, 75 bp, synthetic construct
  source 1..75: mol_type = other DNA
agcaatggcttaccacatcataacccatcaaatcatgttgatacctttgatataatccaagaaacaagagtctaa

SEQ ID NO: 280536 - DNA, 75 bp, synthetic construct
  source 1..75: mol_type = other DNA
ttaacagctcaagtagttcgtaatcatggtgtggaacttcctatagtcaaaactgaaaatggatggaagcttgtt

SEQ ID NO: 280537 - DNA, 75 bp, synthetic construct
  source 1..75: mol_type = other DNA
aatgtcagggcaaaggggagagagtcatttaagtatgaaactgtgcaagaaaaacaatgtaaactttccataatg

SEQ ID NO: 280538 - DNA, 75 bp, synthetic construct
  source 1..75: mol_type = other DNA
atgaaaaccttaagtgggaaagagtttaggaaattatttaatcgttatgagacaggattctatctaagtgagttt

SEQ ID NO: 280539 - DNA, 75 bp, synthetic construct
  source 1..75: mol_type = other DNA
cttcttcccggcagtgctgtccgtcattatggtgttctggattggcgcgaagatgcgtaaccgtaagcaggaagt

SEQ ID NO: 280540 - DNA, 75 bp, synthetic construct
  source 1..75: mol_type = other DNA
ttatcaataccgttccgcatatgagctttgtctggggcgaggataacgtcaatttcctgcgcgcccgttacgccg

SEQ ID NO: 280541 - DNA, 75 bp, synthetic construct
  source 1..75: mol_type = other DNA
gatgatttagcatttattatagataacatagatgcagctttggacatatttaaagcacattaccctaacgatcct

SEQ ID NO: 280542 - DNA, 75 bp, synthetic construct
  source 1..75: mol_type = other DNA
aggtatcagtaaaaatctcttagctaattttttaataatcgaagagcctgaggctcatattcatacgcacataca

SEQ ID NO: 280543 - DNA, 75 bp, synthetic construct
  source 1..75: mol_type = other DNA
tacaaaaagtcggcgcattatttatggcgctgccgaccattaatgtgggtgatgctgccattggcattgtgacgc

SEQ ID NO: 280544 - DNA, 75 bp, synthetic construct
  source 1..75: mol_type = other DNA
gccggtaaaattcgcgctattggcgtcagtaacttccatcctgaccgactggctgaccttatcgcctttaataaa

SEQ ID NO: 280545 - DNA, 75 bp, synthetic construct
  source 1..75: mol_type = other DNA
atgcaaactgtaaaactgaacaatggtatagaaatgcccctgctggggtttggtgtattccagatgacggatgcc

SEQ ID NO: 280546 - DNA, 75 bp, synthetic construct
  source 1..75: mol_type = other DNA
ggtggaaatttagtaaatataaaaaatgccagaaatgctttagcgcatggctcagaatcctttctgaacaagggc

SEQ ID NO: 280547 - DNA, 75 bp, synthetic construct
  source 1..75: mol_type = other DNA
tgagggtacgcataccagaattgctaaaagaggctttggagaagaaagcacgggctaataagagaacactgacct

SEQ ID NO: 280548 - DNA, 75 bp, synthetic construct
  source 1..75: mol_type = other DNA
tgcagtacaccagcgaggtgctgggcctgaaatatgacaagccgcaggcggcagacagcacgccgaaaccgcagg

SEQ ID NO: 280549 - DNA, 75 bp, synthetic construct
  source 1..75: mol_type = other DNA
gcgagatcacccgccagttaattgcttccttgcagaagaaatctaacttctcgctgcaactcagcagcgaagtcc

SEQ ID NO: 280550 - DNA, 75 bp, synthetic construct
  source 1..75: mol_type = other DNA
gctcgcgccggtattcaaccgattccgggacgtctgacattcttcccgaatcgcagtgcggcaatggctgatttg

SEQ ID NO: 280551 - DNA, 75 bp, synthetic construct
  source 1..75: mol_type = other DNA
ccatagccactgtggttgccgctaattatggtcgtattatgcgcgaaggcgacggcagtccggatgcagcgctca

SEQ ID NO: 280552 - DNA, 75 bp, synthetic construct
  source 1..75: mol_type = other DNA
tcgcagacaaggcgatttgggtagaaacccgcaaagagcagcaaccgctggccagttttcagaatgaggttcagc

SEQ ID NO: 280553 - DNA, 75 bp, synthetic construct
  source 1..75: mol_type = other DNA
ccaatgcggcagcgaatgcggttggcgcagcagggggatttgcggtatccagactccccggagtagacccaatgt

SEQ ID NO: 280554 - DNA, 75 bp, synthetic construct
  source 1..75: mol_type = other DNA
cgcctggttcagatctgctttgctgaacaactggccgaaacgtcacggtgtgaaagacggtgtctggcaaggaat

SEQ ID NO: 280555 - DNA, 75 bp, synthetic construct
  source 1..75: mol_type = other DNA
ggaactgactttacaggggctacaacagacctgcggtgaggtgaaacataactttttgctgaggcttgccgacca

SEQ ID NO: 280556 - DNA, 75 bp, synthetic construct
  source 1..75: mol_type = other DNA
ctccgtacttcaaactggcttacgtctacgacgactctaacaacgataacgatgtgaacggtgattccatcgata

SEQ ID NO: 280557 - DNA, 75 bp, synthetic construct
  source 1..75: mol_type = other DNA
ttctggtgaatatatgttccctgcttttgattctttttcgcctactaagcaaaacgtcaaatatatattcacaaa

SEQ ID NO: 280558 - DNA, 75 bp, synthetic construct
  source 1..75: mol_type = other DNA
gatgtcgcctttaccgaaggtaatgccgggatgaagttcgaactgcgcccaggcacttctgatggcgtgatgcaa

SEQ ID NO: 280559 - DNA, 75 bp, synthetic construct
  source 1..75: mol_type = other DNA
cgtaggtgtacatggaccgctggatgcaacattcggcccggtgctggagttgatggacaagaaccgcacgggggc

SEQ ID NO: 280560 - DNA, 75 bp, synthetic construct
  source 1..75: mol_type = other DNA
ggtaactctgcggaacctagtgattactctggtaacggcgaagctaatgatgtagctctgtatttcagtgatagt

SEQ ID NO: 280561 - DNA, 75 bp, synthetic construct
  source 1..75: mol_type = other DNA
cgtctgcaacagattgccggctcttctgacccgcaggccatgatgcagatgctggcacagacagtattgcagggg

SEQ ID NO: 280562 - DNA, 75 bp, synthetic construct
  source 1..75: mol_type = other DNA
catgcgggaatggccacagcgtgacggtgtgagtgccgttttctggcaggctaatggcccgacgttgctggcgta

SEQ ID NO: 280563 - DNA, 75 bp, synthetic construct
  source 1..75: mol_type = other DNA
taaactttgaccattcaaccctgttgggtgatgtcgagttcacaagccactggaataacgatggcgtattcttct

SEQ ID NO: 280564 - DNA, 75 bp, synthetic construct
  source 1..75: mol_type = other DNA
gggtagatgacgctcagaacgttgacgaactgaatattactctgaataacggtagtaagtgggttggttcagcaa

SEQ ID NO: 280565 - DNA, 75 bp, synthetic construct
  source 1..75: mol_type = other DNA
attactcctgcagaagttaatgctaaaggtgaagttgtaactccacagacctataatggctataatttctataac

SEQ ID NO: 280566 - DNA, 75 bp, synthetic construct
  source 1..75: mol_type = other DNA
aaagacattggatatgtttggtttattcaatgttactcaaatggcattagagatacccagttccgttccaggcat

SEQ ID NO: 280567 - DNA, 75 bp, synthetic construct
  source 1..75: mol_type = other DNA
ctgaaagcacaactacaggccatgctccccgggcttgttgctcaggggatacagcagatatgctgtgcccctcgg

SEQ ID NO: 280568 - DNA, 75 bp, synthetic construct
  source 1..75: mol_type = other DNA
aaccgctgggaggcgttgccggagacagtgcagcaattacctgtccggctacagccttcccgcacaggtcataac

SEQ ID NO: 280569 - DNA, 75 bp, synthetic construct
  source 1..75: mol_type = other DNA
ttgttccgccagcagttagggattagcgtattaagctggcgcgaggaccagcgcatcagtcaggcgaagctgctt

SEQ ID NO: 280570 - DNA, 75 bp, synthetic construct
  source 1..75: mol_type = other DNA
taacaaacgtttttttgtgattgttaaagaaatccgccgggaattgcgtaaccttcatgggcgttgctggcaccg

SEQ ID NO: 280571 - DNA, 75 bp, synthetic construct
  source 1..75: mol_type = other DNA
gggcgtactggtcagccccgggaagcggttactgattcactggttaaatctgccagaaacctgctttcacaggaa

SEQ ID NO: 280572 - DNA, 75 bp, synthetic construct
  source 1..75: mol_type = other DNA
agcgattcagacgaaatattgatgctgtggtggagccattatccgtattactccgtccataccgtcagttgttgc

SEQ ID NO: 280573 - DNA, 75 bp, synthetic construct
  source 1..75: mol_type = other DNA
aacatagtaaaaccagatatacatcccgcaaccgggaactatgtcttacagttatttcctgcacatgatgaaata

SEQ ID NO: 280574 - DNA, 75 bp, synthetic construct
  source 1..75: mol_type = other DNA
aatgtcactcagatggcattagaaatacgcagcaccgttcctggtatctctggtaaatatggtgttcagatgaac

SEQ ID NO: 280575 - DNA, 75 bp, synthetic construct
  source 1..75: mol_type = other DNA
ctgcatcagggaattattttttacagatattccctctgcatgatgaaataggagttaactatagagctcttccag

SEQ ID NO: 280576 - DNA, 75 bp, synthetic construct
  source 1..75: mol_type = other DNA
gattaaagccagacactattttatggtgggctggtgcgacactgggggctgccgatttaaacaaggccgagtttg

SEQ ID NO: 280577 - DNA, 75 bp, synthetic construct
  source 1..75: mol_type = other DNA
gctattacatcggctgcaacatcagccactacttcgacggtaaccaccgagccaaaagacccaataccatggttt

SEQ ID NO: 280578 - DNA, 75 bp, synthetic construct
  source 1..75: mol_type = other DNA
aaaagacccaataccatggtttggattaacagctcaagtagttcgtaatcatggtgtggaacttcctatagtcaa

SEQ ID NO: 280579 - DNA, 75 bp, synthetic construct
  source 1..75: mol_type = other DNA
gattctggcacgtatggaacagatccttgccagtcgggctttaaccgatgacgagcgcgcacagcttttatatga

SEQ ID NO: 280580 - DNA, 75 bp, synthetic construct
  source 1..75: mol_type = other DNA
aattcccacagatatgacacaaaaagacatatttcaactaggaagtcgcttctctccattacccggtaaatctga

SEQ ID NO: 280581 - DNA, 75 bp, synthetic construct
  source 1..75: mol_type = other DNA
tgtgttatgtaccaatacgatgcacaaagtagcagatgtcatcgagtctcgttgctcactgcctttcttacatat

SEQ ID NO: 280582 - DNA, 75 bp, synthetic construct
  source 1..75: mol_type = other DNA
gcggaaaaacgcatccgggaatgcaatctggacagccagggcgcgatttatctctgcgagtcagccaaagccgga

SEQ ID NO: 280583 - DNA, 75 bp, synthetic construct
  source 1..75: mol_type = other DNA
ctggctattaatggtgcgccactgaaaaattacgaacaaaccaaagcgctcattgatgccgatcagcagcgcctc

SEQ ID NO: 280584 - DNA, 75 bp, synthetic construct
  source 1..75: mol_type = other DNA
tcagctatgagcaactgacccgggtagcggaaaaaaatatccgtgaatgcgagctgaacagcaagggcgcgcttt

SEQ ID NO: 280585 - DNA, 75 bp, synthetic construct
  source 1..75: mol_type = other DNA
gaacgtaacagaattggttctggataccggttatacggtaactggggcgggcacttatagtggcggttctgtggt

SEQ ID NO: 280586 - DNA, 75 bp, synthetic construct
  source 1..75: mol_type = other DNA
cagcgttctgttgaacagagtcttgagcaactctctcagatctcgtcagagttcgaaccatcaagccaaaagcgc

SEQ ID NO: 280587 - DNA, 75 bp, synthetic construct
  source 1..75: mol_type = other DNA
tgggtagcgcctccgtaatacagtccgcagggccagggattatcctgggttacgccattgctggttttatcgcct

SEQ ID NO: 280588 - DNA, 75 bp, synthetic construct
  source 1..75: mol_type = other DNA
gttgcactctgcctttcttacacattgcggatgccaccggacgtgcaattaccggggccggaatgactcgtgtgg

SEQ ID NO: 280589 - DNA, 75 bp, synthetic construct
  source 1..75: mol_type = other DNA
gcagtggtcggcaatgttctatctcagccagagctggctgcagactaaaaactacgataagcacggtaatcaaac

SEQ ID NO: 280590 - DNA, 75 bp, synthetic construct
  source 1..75: mol_type = other DNA
cataccgcttcatgctcatgcctcgtctacttctgaagatgaaatgattgtcacgggcaacaccgccgccgacac

SEQ ID NO: 280591 - DNA, 75 bp, synthetic construct
  source 1..75: mol_type = other DNA
gttggcatctgctataaacagcaagggtcagacgcggcgctggcgctggggcataaactggtggcgggtgaaatt

SEQ ID NO: 280592 - DNA, 75 bp, synthetic construct
  source 1..75: mol_type = other DNA
gagaagagttaaaaaatatcccagaaggtaaggactctttgattgagtcatatgcagaaaaaagagaacatactt

SEQ ID NO: 280593 - DNA, 75 bp, synthetic construct
  source 1..75: mol_type = other DNA
gaactggcgattactggtgcgccaatgaaaaattacgaacaaaccaaagcgctcattgacgtcgatcatcagcgt

SEQ ID NO: 280594 - DNA, 75 bp, synthetic construct
  source 1..75: mol_type = other DNA
ttttcactcagctatgaacaactgacccggtttgcggaaaaacgcatccgggaatgcaatctggacagccagggc

SEQ ID NO: 280595 - DNA, 75 bp, synthetic construct
  source 1..75: mol_type = other DNA
aatctgggtgccgttgccgtcgataccggtatctttaccggccgctcaccaaaagataagtatatcgtccgtgac

SEQ ID NO: 280596 - DNA, 75 bp, synthetic construct
  source 1..75: mol_type = other DNA
actaacccgcagtggaaagaacagggtctgaactccgaaaacttcgtggcgtttaacctgaccgagcgcatgcag

SEQ ID NO: 280597 - DNA, 75 bp, synthetic construct
  source 1..75: mol_type = other DNA
gataattatctgttaggcttattaagagaagagttaaaaaatatcccagaaggtaaggactctttgattgagtca

SEQ ID NO: 280598 - DNA, 75 bp, synthetic construct
  source 1..75: mol_type = other DNA
aagccggatgatcggttcgaatcacctgccggaatgcctgcgcgagcgaatgacccaggcggcgattgcggtagt

SEQ ID NO: 280599 - DNA, 75 bp, synthetic construct
  source 1..75: mol_type = other DNA
tgcgcctgtgggtgctggaagatgaaagccggatgattggttctaatcacctaccggaatgtctgcgcgagcgaa

SEQ ID NO: 280600 - DNA, 75 bp, synthetic construct
  source 1..75: mol_type = other DNA
tgaaaacctgctggctgccgaaatgctaaaaaccgacgcccgtcaggatttgcacctgtgggtgctggaagatga

SEQ ID NO: 280601 - DNA, 75 bp, synthetic construct
  source 1..75: mol_type = other DNA
atggatgaagaaagggggttttcactcagctatgaacaactgacccggtttgcggaacaacgcatccggaaatgc

SEQ ID NO: 280602 - DNA, 75 bp, synthetic construct
  source 1..75: mol_type = other DNA
aagccggatgatcggttcgaatcacctgccggaatgcctgcgcgaacgcatgacgcaggcggcgattgcagtggt

SEQ ID NO: 280603 - DNA, 75 bp, synthetic construct
  source 1..75: mol_type = other DNA
ctcgctgcccagctggatacggcgctgacaacgcaactcaccaccggcagcaccgacggtcatctggcctggctg

SEQ ID NO: 280604 - DNA, 75 bp, synthetic construct
  source 1..75: mol_type = other DNA
tgtgtggaattgagcagcgatccacacatgatcggtgatgcaatggcggcattcgaggagcaatatcaatttagt

SEQ ID NO: 280605 - DNA, 75 bp, synthetic construct
  source 1..75: mol_type = other DNA
agattgtgtcactcctaccgctcggcctgctggttcacgatcaggaatcgaatcgcacagtaataagcaataaga

SEQ ID NO: 280606 - DNA, 75 bp, synthetic construct
  source 1..75: mol_type = other DNA
caaacaactggcgaatcaggcagatgtgctggtgcggctggtcgatgaaatacagttagcgaacatgcttgcgga

SEQ ID NO: 280607 - DNA, 75 bp, synthetic construct
  source 1..75: mol_type = other DNA
tcatgaaatggataatttgcacttcccgtttatcaaccagacccaaaacgatcgctatggcaaggcggacccgct

SEQ ID NO: 280608 - DNA, 75 bp, synthetic construct
  source 1..75: mol_type = other DNA
aacaggccaacgccctcgatgaacgcgaaagtttttctaacatgcgccgcctggcctggcagaacggtcattact

SEQ ID NO: 280609 - DNA, 75 bp, synthetic construct
  source 1..75: mol_type = other DNA
cgatagctggaagagcgagactgcgcttttctccgtgcaggatttaattgatgaagtggtgccttctgtattgcc

SEQ ID NO: 280610 - DNA, 75 bp, synthetic construct
  source 1..75: mol_type = other DNA
ccagcccgggggcttgcagaaagcgcagcaaaacttaactcgccggaaagcaaacaactggcgaatcaggcggac

SEQ ID NO: 280611 - DNA, 75 bp, synthetic construct
  source 1..75: mol_type = other DNA
tctgttccagcatcccgtgttaacggcaattggcgagaagtatggcaaaagcgtgggtcaggttgttttgcctgg

SEQ ID NO: 280612 - DNA, 75 bp, synthetic construct
  source 1..75: mol_type = other DNA
gtggttccggcggtcaaccagattgaagttaaccccttcaaccagcaacttcatgccgttccgtggatgcaaagc

SEQ ID NO: 280613 - DNA, 75 bp, synthetic construct
  source 1..75: mol_type = other DNA
gcaggcaagatccgcgctattggcgtcagtaacttccatcctgaccgactggctgaccttatcgcctttaataaa

SEQ ID NO: 280614 - DNA, 75 bp, synthetic construct
  source 1..75: mol_type = other DNA
ctgctgattaacaatcatctgaaagcacacgatatgcgccgcggcgatcgcgatgccttacgacgtattttgctg

SEQ ID NO: 280615 - DNA, 75 bp, synthetic construct
  source 1..75: mol_type = other DNA
atgttgctgacgggcttgtatcagccacaaagcggcgaaatcttgctggatggcaaccctgtcagcggcgaacaa

SEQ ID NO: 280616 - DNA, 75 bp, synthetic construct
  source 1..75: mol_type = other DNA
cctgaaccggctgcaacttgattacgttgacctgtacctgattcaccagccttacggcgatgtccatggggcctg

SEQ ID NO: 280617 - DNA, 75 bp, synthetic construct
  source 1..75: mol_type = other DNA
ctattaatgatttaatcccgccagggatgccgctggatagcttccgtcttgaaccagaagcaggtactgcgggta

SEQ ID NO: 280618 - DNA, 75 bp, synthetic construct
  source 1..75: mol_type = other DNA
gatgatttactcccctcctctccgaatgctgcgcttgaagcgggattaacggaaatagatctttttgaagccaca

SEQ ID NO: 280619 - DNA, 75 bp, synthetic construct
  source 1..75: mol_type = other DNA
gttgaaggttattcacattacgacctgtatgataagccagaacctgtgaaacaggcactcgataaattaattcct

SEQ ID NO: 280620 - DNA, 75 bp, synthetic construct
  source 1..75: mol_type = other DNA
gatgctttttttgaagacgccttacagggaatgggacagagcacagaatatgagcctgtcttcgtcagcgaaaat

SEQ ID NO: 280621 - DNA, 75 bp, synthetic construct
  source 1..75: mol_type = other DNA
tccacggtgcggctaacatcctgaatttgcaaaagttgattaatattagccatcagttagaaataacacctgttt

SEQ ID NO: 280622 - DNA, 75 bp, synthetic construct
  source 1..75: mol_type = other DNA
ttaccttacgttgatgccgggcgtattggtgtactgggtatttgtggtggaggtggatatgccattaatgccgca

SEQ ID NO: 280623 - DNA, 75 bp, synthetic construct
  source 1..75: mol_type = other DNA
gctattttctcaccagactgttgccgttggatgggatgcattccatcttgcagaagtgctattaactcaaccctt

SEQ ID NO: 280624 - DNA, 75 bp, synthetic construct
  source 1..75: mol_type = other DNA
actcggttttcaggccccactctatttgtggcaggtctgtgacaacggtgattatcaggccggacgccccctgca

SEQ ID NO: 280625 - DNA, 75 bp, synthetic construct
  source 1..75: mol_type = other DNA
caaagcgtcctgaaaccgctgctggcaggcggcgcattctcttccctgcgcctgcgtggtctgatgttcagcccg

SEQ ID NO: 280626 - DNA, 75 bp, synthetic construct
  source 1..75: mol_type = other DNA
taccttccagtccgggaccgatccagatatcgcgcaagtgcaggtgcagaacaaactccagctcgccacgccgtt

SEQ ID NO: 280627 - DNA, 75 bp, synthetic construct
  source 1..75: mol_type = other DNA
atgtgacgatcgttgtcctcagtacattaaattctcccacatcattaataaaatgacagccgccgtacagcgcgc

SEQ ID NO: 280628 - DNA, 75 bp, synthetic construct
  source 1..75: mol_type = other DNA
gactacaaagcgcgaaatggggttgagcatatgtgtgttggctgcggacgatgtgacgatcgttgtcctcagtac

SEQ ID NO: 280629 - DNA, 75 bp, synthetic construct
  source 1..75: mol_type = other DNA
taatgctggaagcacaaaccctgccgctgacggaacagggcatgtcgcaactgctgaccaataaccgccatgatt

SEQ ID NO: 280630 - DNA, 75 bp, synthetic construct
  source 1..75: mol_type = other DNA
atgcacattggacaggcccttgatttggtatcccgttacgattctctgcgtaacccactgacttctctgggggat

SEQ ID NO: 280631 - DNA, 75 bp, synthetic construct
  source 1..75: mol_type = other DNA
aacgctacgcaagcgccgtcttcccctcgaaatgatggtctggtgtattgttggcatggcgcttgagcgtaagaa

SEQ ID NO: 280632 - DNA, 75 bp, synthetic construct
  source 1..75: mol_type = other DNA
tctctgggggattacctcgaccccgaactcatctctcgttgccttgccgaatcaggtactgtaacgctacgcaag

SEQ ID NO: 280633 - DNA, 75 bp, synthetic construct
  source 1..75: mol_type = other DNA
actggcgaccggtgtcgatgtttttctcgatatcgactggcagggtgcgcagcaaattcgccagaagatgccgca

SEQ ID NO: 280634 - DNA, 75 bp, synthetic construct
  source 1..75: mol_type = other DNA
ttgaccgatttgaagaccattattcgcgccgaacgtctgcgcatgagccgccaaaagcagcatcatgacgcttta

SEQ ID NO: 280635 - DNA, 75 bp, synthetic construct
  source 1..75: mol_type = other DNA
ctgccgccgcgatgggaaatctgcctgacggcgcggtggcgattaccgcttctgtgacggatctcagcggcaata

SEQ ID NO: 280636 - DNA, 75 bp, synthetic construct
  source 1..75: mol_type = other DNA
aaataccccacagccccgaaaaagagccagtcagttgcttaactgactggcattatcccttctggggccgttttt

SEQ ID NO: 280637 - DNA, 75 bp, synthetic construct
  source 1..75: mol_type = other DNA
ggatctgtacagtcatcgctgggaaatcgaactgggatacagggagataaaacagacgatgcaactgagcaggct

SEQ ID NO: 280638 - DNA, 75 bp, synthetic construct
  source 1..75: mol_type = other DNA
tgagaatgctgatgacattgcagggcgcttcaccgggacgtataccggagctgatgcgcgatcttgcaagtatgg

SEQ ID NO: 280639 - DNA, 75 bp, synthetic construct
  source 1..75: mol_type = other DNA
gatcgcagagggtttagctggcaagaacaaacgccatatctcacgattattgatatcatgagggcccgtcgcgat

SEQ ID NO: 280640 - DNA, 75 bp, synthetic construct
  source 1..75: mol_type = other DNA
atgaacactctacctgctacaatttctccggcggcgaagccctgtccgtcgcccgttgcagtctggcaaatgtta

SEQ ID NO: 280641 - DNA, 75 bp, synthetic construct
  source 1..75: mol_type = other DNA
gccagtcagttgcttaactgactggcattatcccttctggggccgtttttttgttttacccaaagcaactttccc

SEQ ID NO: 280642 - DNA, 75 bp, synthetic construct
  source 1..75: mol_type = other DNA
ccgttacgattaataatgtggaatacaccactgcggtgcaggccgatggtagctggagcgtgggcgtcacggcgg

SEQ ID NO: 280643 - DNA, 75 bp, synthetic construct
  source 1..75: mol_type = other DNA
gtgacagcgtctacccggaacgttttgtcaaagcactggcggatatgggtatcgatagcctgctgatcccggaag

SEQ ID NO: 280644 - DNA, 75 bp, synthetic construct
  source 1..75: mol_type = other DNA
gaccgcgtctccgggggatctgacgaaatgcagatcctgacgctgggtcgcgcggtgctgaagcaataccgctaa

SEQ ID NO: 280645 - DNA, 75 bp, synthetic construct
  source 1..75: mol_type = other DNA
ctggacatcatgctgccgggcaatcgccccttccgttgcccccagtgccgttattcaggcccgccagcgcctggg

SEQ ID NO: 280646 - DNA, 75 bp, synthetic construct
  source 1..75: mol_type = other DNA
ccaccgtgtcgctgtccactacggctacgacgataagggccgcctgacgggcgaacggcagacggtggagaaccc

SEQ ID NO: 280647 - DNA, 75 bp, synthetic construct
  source 1..75: mol_type = other DNA
gtgacagcgtctacccggaacgatttgttaaagcactggcggatatgggtatcgatagcctgctgatccccgaag

SEQ ID NO: 280648 - DNA, 75 bp, synthetic construct
  source 1..75: mol_type = other DNA
tggcgtgacctgcgtgtagaccgcgtttccggaggatctgacgaaatgcagatcctgacgctgggtcgtgcggtg

SEQ ID NO: 280649 - DNA, 75 bp, synthetic construct
  source 1..75: mol_type = other DNA
ggttcaccatgacatcattgacgctatcgaaaacatgaagcgtccgttcaaaggcgactggctggactgcgcgaa

SEQ ID NO: 280650 - DNA, 75 bp, synthetic construct
  source 1..75: mol_type = other DNA
tggtatcccgttacgattctctgcgtaacccactgacttctctgggggattacctcgatcccgaactcatctctc

SEQ ID NO: 280651 - DNA, 75 bp, synthetic construct
  source 1..75: mol_type = other DNA
tggtgatgagaatgctgatgacattgcagggcgcttcaccgggacgtataccggagctgatgcgcgatcttgcaa

SEQ ID NO: 280652 - DNA, 75 bp, synthetic construct
  source 1..75: mol_type = other DNA
ggccgggactgggaaatgaagtgacagcccgcctgctgaccgtgacgcgcaaaggaaaagtctgccatctgctga

SEQ ID NO: 280653 - DNA, 75 bp, synthetic construct
  source 1..75: mol_type = other DNA
accagcccgcaggcacgaaaaaagtggccgggactgggaaatgaagtgacagcccgcctgctgaccgtgacgcgc

SEQ ID NO: 280654 - DNA, 75 bp, synthetic construct
  source 1..75: mol_type = other DNA
acaaaccggcgataacactctgacgttaatggataaaggttattactcactgggactgttaaatgcctggagcct

SEQ ID NO: 280655 - DNA, 75 bp, synthetic construct
  source 1..75: mol_type = other DNA
gtaatgcctttcccgggaatggattgccagtgcggggactgtggagcttaattccggtgttggtggcctttccgt

SEQ ID NO: 280656 - DNA, 75 bp, synthetic construct
  source 1..75: mol_type = other DNA
attctggtgctgggtagccagaaagcactggcactgcaggccgcagttgaaggttgcgtgaaccacatgtggacc

SEQ ID NO: 280657 - DNA, 75 bp, synthetic construct
  source 1..75: mol_type = other DNA
aatgacgtaaatcaggtaccaaaatatgcgctgaccgttggtgtgggtacactgctggatgccgaagaagtaatg

SEQ ID NO: 280658 - DNA, 75 bp, synthetic construct
  source 1..75: mol_type = other DNA
gctatctgcatgggctggcccagacgctgaacgtctgaccgttacggctctgcccgccattaccacttatggcga

SEQ ID NO: 280659 - DNA, 75 bp, synthetic construct
  source 1..75: mol_type = other DNA
gcgctggagcatcagaaaacgttggagcttgaacgatcgcagcgacagcgcacgtataacggcccgacattggga

SEQ ID NO: 280660 - DNA, 75 bp, synthetic construct
  source 1..75: mol_type = other DNA
tgatgatcgttaaattccatccccgggggcgcggtggtggtgccggtccggtggattacctgctgggaaaagacc

SEQ ID NO: 280661 - DNA, 75 bp, synthetic construct
  source 1..75: mol_type = other DNA
tctatcgacagatttcgttgctggctaaagaaaagccggtagaaggcagtccactgtttttactacaaacgtgta

SEQ ID NO: 280662 - DNA, 75 bp, synthetic construct
  source 1..75: mol_type = other DNA
gcatctctttgggatgcaaggaacgtgacagagcgtctgatcactgcaaccgatcgcctggcagattatcctcgg

SEQ ID NO: 280663 - DNA, 75 bp, synthetic construct
  source 1..75: mol_type = other DNA
attgctgccgccgcgctggcgatggcgctgatcgacctgctgcgtaaatctcctgaaccgactcaacctgcggca

SEQ ID NO: 280664 - DNA, 75 bp, synthetic construct
  source 1..75: mol_type = other DNA
agtgctcaaaaccatccactccagctaacagtgatcgggaaatcggctcaagaggtagcagccaggattggtatt

SEQ ID NO: 280665 - DNA, 75 bp, synthetic construct
  source 1..75: mol_type = other DNA
gagcaggcgtcaccgatttcgctgaccgtagtcggaatcgcgccggaagagctatctgcatgggctggcccagac

SEQ ID NO: 280666 - DNA, 75 bp, synthetic construct
  source 1..75: mol_type = other DNA
gcagtggttgcaggaaaacggcatcacccgcgctaccgtcgcgccagactggatgtccattccttgtggctatat

SEQ ID NO: 280667 - DNA, 75 bp, synthetic construct
  source 1..75: mol_type = other DNA
gagcagaatttaccgctttcgctaaccgtagtcgggatcgcgccggaagagctatctgcatgggctgacgcagac

SEQ ID NO: 280668 - DNA, 75 bp, synthetic construct
  source 1..75: mol_type = other DNA
aacggcatcacccgcgctaccgtcgcgccggactggatgtccattccttgtgggtttatggctggcgatgcgcaa

SEQ ID NO: 280669 - DNA, 75 bp, synthetic construct
  source 1..75: mol_type = other DNA
gattaacgacggcatcgaccgtggcttgtgggatttacagaataaatcagagcggcagaatgacattctggtgaa

SEQ ID NO: 280670 - DNA, 75 bp, synthetic construct
  source 1..75: mol_type = other DNA
aaggaatggtgggagacaaacgacccgcccggaacctttcgccttgatatcggtgtgctggaaagcggcatcacg

SEQ ID NO: 280671 - DNA, 75 bp, synthetic construct
  source 1..75: mol_type = other DNA
aaaaattccggagcgaatgacattccgcgcgaacaatcgcgttgatgctcagcgtaacggtacacactccacccg

SEQ ID NO: 280672 - DNA, 75 bp, synthetic construct
  source 1..75: mol_type = other DNA
tcacggcattgaaagattctcgctggtttataccgctggaacgtcagggcttacaaaacctgctcaacgaacgca

SEQ ID NO: 280673 - DNA, 75 bp, synthetic construct
  source 1..75: mol_type = other DNA
cctcggtgaacaccagtaagacgatactttcctatgaagttcaggccggggttttccgctttattgactaccagc

SEQ ID NO: 280674 - DNA, 75 bp, synthetic construct
  source 1..75: mol_type = other DNA
gattgccgtgaacctgcgcgtcgtcaatgtgagtaccggtgagatcctctcctcggtgaacaccagtaagacgat

SEQ ID NO: 280675 - DNA, 75 bp, synthetic construct
  source 1..75: mol_type = other DNA
tgagaaagagcctcgccggtatcgagaggacgatcgcccacaaggaaggtcaacgcccaccagggaaagagtacc

SEQ ID NO: 280676 - DNA, 75 bp, synthetic construct
  source 1..75: mol_type = other DNA
cgctgccgagtattttggtaaaacatggactgctcctggcttgaaccagacagaaggatgcaaagctatctcgga

SEQ ID NO: 280677 - DNA, 75 bp, synthetic construct
  source 1..75: mol_type = other DNA
gcgatagccagcaccctgaaatcagcgtcactttccgacatcgaaatgcgtggtttcacctttgatcaaaaacgc

SEQ ID NO: 280678 - DNA, 75 bp, synthetic construct
  source 1..75: mol_type = other DNA
acgctgaagccggacgccaggcggcctgccagttgatcgagcaggtaaccggacgcagcgaaccccaacaaatcg

SEQ ID NO: 280679 - DNA, 75 bp, synthetic construct
  source 1..75: mol_type = other DNA
acgcagaagccgggcgccaggcggcctgccagttaatcaaacagataaccgggcgtagcgaaccgcaacaaatca

SEQ ID NO: 280680 - DNA, 75 bp, synthetic construct
  source 1..75: mol_type = other DNA
tggggcctggtttacattatctctatgaagcgattaatccagcggaattacgggagcatatagaaaactatcatc

SEQ ID NO: 280681 - DNA, 75 bp, synthetic construct
  source 1..75: mol_type = other DNA
caacgaagttagacgggcatacaaccggagcaactacatagaaaaacgcatcgtgctgatgcgctggtggggcga

SEQ ID NO: 280682 - DNA, 75 bp, synthetic construct
  source 1..75: mol_type = other DNA
acggcaaaaactcgaagcagaggctcgacgacagggcaacacgttcgaaaatgtggccgcattgtggtacgaaat

SEQ ID NO: 280683 - DNA, 75 bp, synthetic construct
  source 1..75: mol_type = other DNA
accaggggaaaaggaatacaccctgcaagatggcggaggattatttcttctggtgaagccctccggatcaaaaat

SEQ ID NO: 280684 - DNA, 75 bp, synthetic construct
  source 1..75: mol_type = other DNA
atgagatcgacttcgacgcaaaagaatggcgtatccctgctggtcgcatgaagatgaagcgtgagcatatcgttc

SEQ ID NO: 280685 - DNA, 75 bp, synthetic construct
  source 1..75: mol_type = other DNA
aagaaccgaacagttgcggcaaaaaaatgctactgagaacacctttcaaaaagttgcttccgaatggttcaaaac

SEQ ID NO: 280686 - DNA, 75 bp, synthetic construct
  source 1..75: mol_type = other DNA
gcgacagaacgacaaaccagattactcattgagtggcagctactgaccgtaacgcgccccgccgaagcctcatca

SEQ ID NO: 280687 - DNA, 75 bp, synthetic construct
  source 1..75: mol_type = other DNA
gaattgaagatgtaattatcggtacttgtcgcagttttggaagagataactatcaccggaaaattttctatctac

SEQ ID NO: 280688 - DNA, 75 bp, synthetic construct
  source 1..75: mol_type = other DNA
cggaagttggaaatatcagccttacaaccagtgaaccagactttgaatttgacccgtatattttggaggaatttt

SEQ ID NO: 280689 - DNA, 75 bp, synthetic construct
  source 1..75: mol_type = other DNA
cgctgttctttgatgtggtgcgcattatcgacgcgcgtcgtccggcgatgtttgtgctcgaaaacgtcaaaaacc

SEQ ID NO: 280690 - DNA, 75 bp, synthetic construct
  source 1..75: mol_type = other DNA
tgcttcaggcatcgagacaacgtaacaagcacaactcctacgcttacacaaacaacccaaccagctacgaactac

SEQ ID NO: 280691 - DNA, 75 bp, synthetic construct
  source 1..75: mol_type = other DNA
ttgccgttggaaatatcagtcttacaaccagtgagccagactttgaatttgacgtgtacgcacaagcagaaggat

SEQ ID NO: 280692 - DNA, 75 bp, synthetic construct
  source 1..75: mol_type = other DNA
atgtcaaccagaaagagcacgaagaacagcatcaagaattatttgaataactttgattcttacggacaactacca

SEQ ID NO: 280693 - DNA, 75 bp, synthetic construct
  source 1..75: mol_type = other DNA
accagcggaaaaagaatacaccttacaggatggcggcgggctttttctcgttattaagccgtctggttcgaaact

SEQ ID NO: 280694 - DNA, 75 bp, synthetic construct
  source 1..75: mol_type = other DNA
cgttgcacggttcgaagggtcttgaatggaaaaatgtaattattatgagttgtaatgcagatcagattccaagta

SEQ ID NO: 280695 - DNA, 75 bp, synthetic construct
  source 1..75: mol_type = other DNA
taacactagcatcgttggggatgatgatcaggcaatttattcattcagggcatcaggtggagtcaaaatattcca

SEQ ID NO: 280696 - DNA, 75 bp, synthetic construct
  source 1..75: mol_type = other DNA
ttgcggatttactctgccgaacgccccactaactccgcgtcaggatattaaagcctttgtcgaactgcatatcta

SEQ ID NO: 280697 - DNA, 75 bp, synthetic construct
  source 1..75: mol_type = other DNA
tgacgcaatgcgcggcccgcgcggcctgaaagcggtaggcccgtatgtggtcaccaaagcgatggcatccggcgt

SEQ ID NO: 280698 - DNA, 75 bp, synthetic construct
  source 1..75: mol_type = other DNA
atggatatcattattgtaccccgagaccaacgtattcctgcctcaggcattagtacggcttacttgcatgtggat

SEQ ID NO: 280699 - DNA, 75 bp, synthetic construct
  source 1..75: mol_type = other DNA
tccttctttctttttaagagaatgcagtgaagaaaagataaaagaagcagctaatattcgaatttctccacttta

SEQ ID NO: 280700 - DNA, 75 bp, synthetic construct
  source 1..75: mol_type = other DNA
tcataacggcgaagcgtttgatataccatttattcgacacgagttttcagggtatggagtaagactgccagacgt

SEQ ID NO: 280701 - DNA, 75 bp, synthetic construct
  source 1..75: mol_type = other DNA
atatcgagtctacgggactggatttccttgctggtcataaaattattgaaatcgcaattacccgctatgaactgg

SEQ ID NO: 280702 - DNA, 75 bp, synthetic construct
  source 1..75: mol_type = other DNA
ttacgacgaatgggttacgctggtgtgctggtatctcacggactacgcgcaatattcagcacggcggcgaatgaa

SEQ ID NO: 280703 - DNA, 75 bp, synthetic construct
  source 1..75: mol_type = other DNA
atggcacgaaaaaccactccactaaccatcacggagatcaaaaacgcacgaccaggggaaaaggaatacaccctg

SEQ ID NO: 280704 - DNA, 75 bp, synthetic construct
  source 1..75: mol_type = other DNA
ttacggcgcatgggattcgctggcgtgctggtgtctcatggattacgcgccatattcagcacagcagcgaacgag

SEQ ID NO: 280705 - DNA, 75 bp, synthetic construct
  source 1..75: mol_type = other DNA
ggcgggattctggtttctcacggtatgcgcgccatattcagcaccgcagcgaacgaagaaggatttgagccggac

SEQ ID NO: 280706 - DNA, 75 bp, synthetic construct
  source 1..75: mol_type = other DNA
gtcaaaaacctgaagagtcacgataagggaaaaacgttccgcatcatcatgcagacgctggacgaactgggctat

SEQ ID NO: 280707 - DNA, 75 bp, synthetic construct
  source 1..75: mol_type = other DNA
gctaaatggatgggctttacccatctcgaactgctgccaattaacgaacatccattcgatggtagttggggctat

SEQ ID NO: 280708 - DNA, 75 bp, synthetic construct
  source 1..75: mol_type = other DNA
cgccaccgatgtgtgggtgattgaaccaaaaaccggacgcaaagtcgctaaactggagtgtctcgactctcgtgg

SEQ ID NO: 280709 - DNA, 75 bp, synthetic construct
  source 1..75: mol_type = other DNA
cgcatggcagaaattcgctaacctgcgcgcctactatggctggatgtgggcattcccgggcaagaaactgctgtt

SEQ ID NO: 280710 - DNA, 75 bp, synthetic construct
  source 1..75: mol_type = other DNA
ataaaggttattactcactgggactgttaaatgcctggagcctggcgggagaacaccgccactggatgatacctc

SEQ ID NO: 280711 - DNA, 75 bp, synthetic construct
  source 1..75: mol_type = other DNA
gccttgagcctggcgggagaacaccgccactggatgatccctctcagaaagggagcgcaatatgaagagatcaga

SEQ ID NO: 280712 - DNA, 75 bp, synthetic construct
  source 1..75: mol_type = other DNA
ggcgcgcatgcagatactatggatggcgtcacgggtacgcgtttttctgtctgggctccaaacgcccgccgggtc

SEQ ID NO: 280713 - DNA, 75 bp, synthetic construct
  source 1..75: mol_type = other DNA
ctcgaaatgatggtctggtgtattgttggcatggcgcttgagcgtaaagaacctcttcaccagattgtgaaccgc

SEQ ID NO: 280714 - DNA, 75 bp, synthetic construct
  source 1..75: mol_type = other DNA
cagcccgcaggcacgaaaaaagtggccgggactgggaaatgaagtgacagcccgcctgctgaccgtgacgcgcaa

SEQ ID NO: 280715 - DNA, 75 bp, synthetic construct
  source 1..75: mol_type = other DNA
ggactgttaaatacctggagcctggcgggagaacaccgccactggatgatccctctcagaaagggagcgcaatat

SEQ ID NO: 280716 - DNA, 75 bp, synthetic construct
  source 1..75: mol_type = other DNA
catgaagctggacccgattcatcgtcagtaccatcacgacaagctgaccttcggcatgctgtacaactacaccga

SEQ ID NO: 280717 - DNA, 75 bp, synthetic construct
  source 1..75: mol_type = other DNA
aagaacgctcggtgctgatctttgtgcgtcgcgataaagagggtaacgaaatcatcgttgccagtaactttacgc

SEQ ID NO: 280718 - DNA, 75 bp, synthetic construct
  source 1..75: mol_type = other DNA
cgcaggcacgaaaaaagtggccgggactgggaaatgaagtgactgtccgcctgctgaccgtgacgcgcaaaggaa

SEQ ID NO: 280719 - DNA, 75 bp, synthetic construct
  source 1..75: mol_type = other DNA
gggattgttaaatgcctggagcctggcgggagaacaccgccactggatgatccctctcagaaagggagcgcaata

SEQ ID NO: 280720 - DNA, 75 bp, synthetic construct
  source 1..75: mol_type = other DNA
ttgtcgcagctttggaagggataactatcaccggaagattttctatttgcttcgaagccttgataagattagctc

SEQ ID NO: 280721 - DNA, 75 bp, synthetic construct
  source 1..75: mol_type = other DNA
aggcattgacgaagtaattcgggcaattacaccgaggaaccgttacatgtcaaccagaaagagcacgaagaacac

SEQ ID NO: 280722 - DNA, 75 bp, synthetic construct
  source 1..75: mol_type = other DNA
aggctgaagatttaattatcggattttgcagaaatgaaggtcatccgaaatacaacaaaaaactattttatcttc

SEQ ID NO: 280723 - DNA, 75 bp, synthetic construct
  source 1..75: mol_type = other DNA
cggaaatgggaaatatcagccttacgaccagtgagccggatttcgagtttgacccgtatttagttacagaaggat

SEQ ID NO: 280724 - DNA, 75 bp, synthetic construct
  source 1..75: mol_type = other DNA
ttgaggttggcaatatcagccttacgaaaagtgaaccagatttcgagtttgacccgtatattttggaggaatttt

SEQ ID NO: 280725 - DNA, 75 bp, synthetic construct
  source 1..75: mol_type = other DNA
ttgaggttggtaatatcagccttacgattagtgagccagactttgaatttgacgtatacgcacaagcagaggaat

SEQ ID NO: 280726 - DNA, 75 bp, synthetic construct
  source 1..75: mol_type = other DNA
ttcatggtgaaaaagaaacacataacgggaaagagtttgtatatgcgaggtctttgcatgagccttatggtgata

SEQ ID NO: 280727 - DNA, 75 bp, synthetic construct
  source 1..75: mol_type = other DNA
gttaacgataagcatttgaaaattggaacttttaagttcaacacaaaaaaacattacgaggacaacgtttttaaa

SEQ ID NO: 280728 - DNA, 75 bp, synthetic construct
  source 1..75: mol_type = other DNA
gatgaaaacaaatatctgttatccatatatcctgaattccatacaaaactgtttcctgattcgatactcaccaca

SEQ ID NO: 280729 - DNA, 75 bp, synthetic construct
  source 1..75: mol_type = other DNA
tccgccctggttgtggaaaaccggcggatataccgggttcagcaacaaaatcagtgagctgaccgataacggaac

SEQ ID NO: 280730 - DNA, 75 bp, synthetic construct
  source 1..75: mol_type = other DNA
acgacattccccatgcagcccaagttcaacaagcggccataccaccgccaacggaaatgccgtttctcacagccc

SEQ ID NO: 280731 - DNA, 75 bp, synthetic construct
  source 1..75: mol_type = other DNA
atgagcgcaccatcaattccggcggcgaaagcgcggatggcgcaacttgatagccgtgagtgccgccagttgctc

SEQ ID NO: 280732 - DNA, 75 bp, synthetic construct
  source 1..75: mol_type = other DNA
tgggaaacactgccgtttcaggttgccatcatgaacagcatggggaatgaccggatccgcactgttaatctgatt

SEQ ID NO: 280733 - DNA, 75 bp, synthetic construct
  source 1..75: mol_type = other DNA
ttcactaagtatggaaacctcgtttctgaattacatatggcaacacttgctgttatcccctttgcatttactgca

SEQ ID NO: 280734 - DNA, 75 bp, synthetic construct
  source 1..75: mol_type = other DNA
tctaagtaccagtattgtcggcgcagcagaaacccgcccccgtaacattgcgtttaattacatcgtaagggcagc

SEQ ID NO: 280735 - DNA, 75 bp, synthetic construct
  source 1..75: mol_type = other DNA
ccgtgaaaaatccgtggacgtggtctgctatgacgaactttcctcgttcgagccggatgtcgaaaaagaggggtc

SEQ ID NO: 280736 - DNA, 75 bp, synthetic construct
  source 1..75: mol_type = other DNA
ttttattgagcataaatcacgcaacagccttcttttccagcccacggattctgctgctgaagattttatgaaatc

SEQ ID NO: 280737 - DNA, 75 bp, synthetic construct
  source 1..75: mol_type = other DNA
ctggatttgtgacaataccgggatgtggacgcgcgacggcctggcattttacagcgccggcgatgaggagatgcc

SEQ ID NO: 280738 - DNA, 75 bp, synthetic construct
  source 1..75: mol_type = other DNA
gctataaagagactgaaaaaacatcagcgatgacaaccacacactctacaaaacttcagccatctgaggtagcct

SEQ ID NO: 280739 - DNA, 75 bp, synthetic construct
  source 1..75: mol_type = other DNA
tgtttaagatgagagaagatgcgccaccattaaatctcacagaagacattacgccccctttttcgacaaaggcga

SEQ ID NO: 280740 - DNA, 75 bp, synthetic construct
  source 1..75: mol_type = other DNA
caggtactgatggataaggttgtgcgttacacggcggcggtgcctgcccgggtgccctcgtggactcgtcgcctg

SEQ ID NO: 280741 - DNA, 75 bp, synthetic construct
  source 1..75: mol_type = other DNA
gcgcaaactggttgctgaagatcagcaaaaaatcatcgacggcatgaaagacgcgggcgttgaagtgattaccga

SEQ ID NO: 280742 - DNA, 75 bp, synthetic construct
  source 1..75: mol_type = other DNA
gctggcgcaggcagaagcgtttcgcggtttaggggtagaaattaaacgcgagattaatccggatttggctgaaca

SEQ ID NO: 280743 - DNA, 75 bp, synthetic construct
  source 1..75: mol_type = other DNA
tggcccaggaagcgatcaacctgacccgcgcgctgaaaggcgataacaaaacccaggggaactggggcgaagtgg

SEQ ID NO: 280744 - DNA, 75 bp, synthetic construct
  source 1..75: mol_type = other DNA
ggaaaacgtaaaaccttcgtgaacaccacgctcggtgagacatgggaagcgaaaatcggcgaacgtccggatgct

SEQ ID NO: 280745 - DNA, 75 bp, synthetic construct
  source 1..75: mol_type = other DNA
cgaaatcaccgcagaagagacagcggaactgctgaaaaactcccattcagtgatcattactccggggtacggcat

SEQ ID NO: 280746 - DNA, 75 bp, synthetic construct
  source 1..75: mol_type = other DNA
actggtggcggaagagctggtggagaagtgggaaaaaggaaagatgcgtctgctgtgggataacaaaaagcggcg

SEQ ID NO: 280747 - DNA, 75 bp, synthetic construct
  source 1..75: mol_type = other DNA
accctgctgggggataagcgtattgaggggtcggtgtggccaaaatccattcgcggctcgacgcctaaaatcaaa

SEQ ID NO: 280748 - DNA, 75 bp, synthetic construct
  source 1..75: mol_type = other DNA
gcttatttttattggtctctattatggcatgcaatgtttttgcattttctatttctggtggtggtagtgaggcga

SEQ ID NO: 280749 - DNA, 75 bp, synthetic construct
  source 1..75: mol_type = other DNA
ttcgtcgttctgaagaatgcctgcatatcatccctacacgagagaatgagggagaaaatggtgatatagggccac

SEQ ID NO: 280750 - DNA, 75 bp, synthetic construct
  source 1..75: mol_type = other DNA
ggagaagccgccagagcaccacaacaaaagacctgatgactcttaaatgggatgctttgtctgtccttgttaaag

SEQ ID NO: 280751 - DNA, 75 bp, synthetic construct
  source 1..75: mol_type = other DNA
gatcatgataatcagcaaatctttaatccgcaggagcggcggatgatcgagcgggtactcaatcttaaccagcgt

SEQ ID NO: 280752 - DNA, 75 bp, synthetic construct
  source 1..75: mol_type = other DNA
tgtggttggacggtgtagggatgtcgcagggaaaacctgaaaatcgggtggatctaaaaccagagacagagacaa

SEQ ID NO: 280753 - DNA, 75 bp, synthetic construct
  source 1..75: mol_type = other DNA
taaaatcctcaacgacagtactggagtcggatgtacctacatcgtggcaggaatcttcccgctatgaaccccgtc

SEQ ID NO: 280754 - DNA, 75 bp, synthetic construct
  source 1..75: mol_type = other DNA
ggcgatggtaatctagatgtttatgctaataacgtccatgttatgcgctttgtctccggaagcattcaaagtaat

SEQ ID NO: 280755 - DNA, 75 bp, synthetic construct
  source 1..75: mol_type = other DNA
gaagaatgcctgcatatcatccctacacgagagaatgagggagaaaatggtgatatagggccactacgccccttt

SEQ ID NO: 280756 - DNA, 75 bp, synthetic construct
  source 1..75: mol_type = other DNA
atgagaacccaggtacaggctttacggaagaaacaaaaaaatacattggatcaaatatttaaatctcctgttcct

SEQ ID NO: 280757 - DNA, 75 bp, synthetic construct
  source 1..75: mol_type = other DNA
aactacccggagggcgttttcacacaggttattgtcgatctccacccagccattgcggcagtattcgttcagagc

SEQ ID NO: 280758 - DNA, 75 bp, synthetic construct
  source 1..75: mol_type = other DNA
accgacgccgttttctttccgccaatcagacgctgcgtcagcgcacaaccgaagcagtgatgcgcctgttaagcg

SEQ ID NO: 280759 - DNA, 75 bp, synthetic construct
  source 1..75: mol_type = other DNA
cgcggcatgatatacagaaaaacgcggacggttcctggaccgtgaatggtcatatgccgctggaagatctggtgc

SEQ ID NO: 280760 - DNA, 75 bp, synthetic construct
  source 1..75: mol_type = other DNA
atctgtgatcgttttaaccggacattaagagagcaatttattgagtttaatgaaattttactctttgaggatctg

SEQ ID NO: 280761 - DNA, 75 bp, synthetic construct
  source 1..75: mol_type = other DNA
gttgatctgatggatgaagtgctgaagtcccggcgtaccgcctggatggttgccaccggttcagcggtggtaact

SEQ ID NO: 280762 - DNA, 75 bp, synthetic construct
  source 1..75: mol_type = other DNA
gctttcctgataatccggagattttttcgcagacagaggcacaacaactggtggcggaggaactggtggaaaagt

SEQ ID NO: 280763 - DNA, 75 bp, synthetic construct
  source 1..75: mol_type = other DNA
cgtcgtatgccatccgttttcctgatgatccggagattttttcgcagacagaggcgcagcaactggtcgcggaag

SEQ ID NO: 280764 - DNA, 75 bp, synthetic construct
  source 1..75: mol_type = other DNA
gatcccacgcctgtggatgaagccacgtcgtatgccatccgttttcctgatgatccggagattttttcgcagaca

SEQ ID NO: 280765 - DNA, 75 bp, synthetic construct
  source 1..75: mol_type = other DNA
caggcagggcatgaacgggcgcgccgggaatatcacgaacaggcgctggcgggaacaaatgccgccgtggatgca

SEQ ID NO: 280766 - DNA, 75 bp, synthetic construct
  source 1..75: mol_type = other DNA
gttgctgaccgcctgcaacagcgcgccgcgacccgtcgtggtcactcagacgcagcacgcaccgctgccggaaag

SEQ ID NO: 280767 - DNA, 75 bp, synthetic construct
  source 1..75: mol_type = other DNA
aatccccgcacatctgctaacgctcaacgaggccactcacgaagtacagcaggtcaagctgacccgcgaccagac

SEQ ID NO: 280768 - DNA, 75 bp, synthetic construct
  source 1..75: mol_type = other DNA
gccttaaatgggagaagggtaaaccggaaacggtgtattacctgtgtgagcataatggctgtgtgatccgtcagt

SEQ ID NO: 280769 - DNA, 75 bp, synthetic construct
  source 1..75: mol_type = other DNA
acacgggcatgtggacccgtgacggtctgacgtttttcagcgcccggggtgatgaaattccgccgccgcgctcca

SEQ ID NO: 280770 - DNA, 75 bp, synthetic construct
  source 1..75: mol_type = other DNA
cctttcgcggtcgcggtacaaatggggattaccttcctgttctcggtgatgtctggtgtgatgtcccgctgcgac

SEQ ID NO: 280771 - DNA, 75 bp, synthetic construct
  source 1..75: mol_type = other DNA
cggatggcggagaacgccgatactcgcggcattgaacgcgtgaactatctggcactgctggcactcggcactttc

SEQ ID NO: 280772 - DNA, 75 bp, synthetic construct
  source 1..75: mol_type = other DNA
tcgcgttgggcattatcgcctttatcgctggcctggatatgtttaacggcctaacccatatgcaccgcccggtgg

SEQ ID NO: 280773 - DNA, 75 bp, synthetic construct
  source 1..75: mol_type = other DNA
gatttgtctcacgaagatttcctgagcataattcgtttaattgaatcttatgttttccgccgtgcagtatgtgca

SEQ ID NO: 280774 - DNA, 75 bp, synthetic construct
  source 1..75: mol_type = other DNA
aacacggggttagggcaatgtgaaatatgggatcgtgcagcgatacaaaagagagcggaacgtctgtccgagctg

SEQ ID NO: 280775 - DNA, 75 bp, synthetic construct
  source 1..75: mol_type = other DNA
ctattgtggttggtatccccatagaacagggcaagatatagttgttcatcatgttcactcagaagtagaacttcg

SEQ ID NO: 280776 - DNA, 75 bp, synthetic construct
  source 1..75: mol_type = other DNA
tggcgcagcttaatggtgtgggtgagaatcactggagcgcggcaattttaaaacgtgcgctggcgaatgactcgg

SEQ ID NO: 280777 - DNA, 75 bp, synthetic construct
  source 1..75: mol_type = other DNA
tatatcctgacgccggtgctgtggaagtacctctatcgatatgcgaaaaaacatcaggcgcgcggtaacggcttc

SEQ ID NO: 280778 - DNA, 75 bp, synthetic construct
  source 1..75: mol_type = other DNA
atggggatttctgtacaggtcagcggtgaccagcggctggaggatatccgccgcgccgttgaaaaactggcagat

SEQ ID NO: 280779 - DNA, 75 bp, synthetic construct
  source 1..75: mol_type = other DNA
ggttgagtagtggtgaagctcagccgtgggaaaaggacgcgtttttacggaaggtgaaagcagggataaggaaat

SEQ ID NO: 280780 - DNA, 75 bp, synthetic construct
  source 1..75: mol_type = other DNA
tcggcgatgagttgcgtgaatttatcgagtccttaattgaatccggcgactatcgcacccaaagcgaagtgatcc

SEQ ID NO: 280781 - DNA, 75 bp, synthetic construct
  source 1..75: mol_type = other DNA
aatcaggccatgctggtcagcggaggtttgctggtaaaagatataactaaagcggctatatcattcatgagtcgc

SEQ ID NO: 280782 - DNA, 75 bp, synthetic construct
  source 1..75: mol_type = other DNA
cgcgaaaacctggtgtaatagatagcgggatggaggcgctggttgcggatattcgtacgtttgctgactattttt

SEQ ID NO: 280783 - DNA, 75 bp, synthetic construct
  source 1..75: mol_type = other DNA
tgatgatgtggctgaccgggtgcggcgggccgtctgtgaaatacgtgccggtgaagccagtgccgatccccgctg

SEQ ID NO: 280784 - DNA, 75 bp, synthetic construct
  source 1..75: mol_type = other DNA
ctcatttcacaaatcagtgaggcggccacgaatgaaaaacaacagaacattcagcacagcgaggagcagcagagc

SEQ ID NO: 280785 - DNA, 75 bp, synthetic construct
  source 1..75: mol_type = other DNA
gtaaaaggcgatgcggcaaacaccggcgtgcatgcgctgctcggcctgcataacgacagtttctacggcctgcgc

SEQ ID NO: 280786 - DNA, 75 bp, synthetic construct
  source 1..75: mol_type = other DNA
actggatgtccattccttgtgggaatatgattttccatgctgaccgagtgatcgctagaatcgatatatgccagg

SEQ ID NO: 280787 - DNA, 75 bp, synthetic construct
  source 1..75: mol_type = other DNA
gcgatcaataattctcggtctcgagcaaccgataagacgtttctcgaacatctgtcggttattgctaatgttctt

SEQ ID NO: 280788 - DNA, 75 bp, synthetic construct
  source 1..75: mol_type = other DNA
tgttccgcgataccgctcacgcgcataaaacgctcgacggcaaagtcggtgatgatctgaaagcctcccttgaag

SEQ ID NO: 280789 - DNA, 75 bp, synthetic construct
  source 1..75: mol_type = other DNA
atgacagttacatcgcatcgtggctgaaggtgttgcagcaagacaaaaaagcgattttccgcgccagcggtttag

SEQ ID NO: 280790 - DNA, 75 bp, synthetic construct
  source 1..75: mol_type = other DNA
agaaagtcaccgaccagattattgctgagctggaaaacggcaatgtgccgtggatccgaccctggcgcgatggcg

SEQ ID NO: 280791 - DNA, 75 bp, synthetic construct
  source 1..75: mol_type = other DNA
atccgcgccagcggtatggcgcgccacgccagtgaatggctactcaacgctataccacaaccctgtcagcttagc

SEQ ID NO: 280792 - DNA, 75 bp, synthetic construct
  source 1..75: mol_type = other DNA
gaaaaccgcgccggggcggcggagaaaaaagttcagcaactcaccgcgcagcagcaaaaaaaccagaactcgact

SEQ ID NO: 280793 - DNA, 75 bp, synthetic construct
  source 1..75: mol_type = other DNA
tgaaggtgcggctgaaaaagcccgcacgcaaatcgaatctcaattacccgcaggttataagccggtttatcttaa

SEQ ID NO: 280794 - DNA, 75 bp, synthetic construct
  source 1..75: mol_type = other DNA
atttacaagtgccgtaatcaagttggagcgaatgaatctcatgaaccatactatggattcggtaacaacctccgc

SEQ ID NO: 280795 - DNA, 75 bp, synthetic construct
  source 1..75: mol_type = other DNA
atgttgcctgcccgcactgcggggaggagcagtacctttaaatttggcgataaagagacgccgtttggcctcaaa

SEQ ID NO: 280796 - DNA, 75 bp, synthetic construct
  source 1..75: mol_type = other DNA
agtaatcgtcgtgttgatgaacaaaatcgtcagagtttgaacagcttgctatcgccgctacgggagcaactggat

SEQ ID NO: 280797 - DNA, 75 bp, synthetic construct
  source 1..75: mol_type = other DNA
aatacctctctggaggcggatctgcgtgaagtaaccacgcggatggaagctgcacagcaacatgctgacgataag

SEQ ID NO: 280798 - DNA, 75 bp, synthetic construct
  source 1..75: mol_type = other DNA
aacacctctctggaggctgatctgcgtgaagtgaccacgcggatggaggccgcacagcaacacgctgacgataaa

SEQ ID NO: 280799 - DNA, 75 bp, synthetic construct
  source 1..75: mol_type = other DNA
atatgtgcagaacgctcttctttcccaggggtgggcaccaaagaaagaagagctagtgcttgcaagcacagtcga

SEQ ID NO: 280800 - DNA, 75 bp, synthetic construct
  source 1..75: mol_type = other DNA
ggcgttatgagcatcaaagccgcaacgcccagcaaatcgccgatcgcgccagcaagctgtacgacaagatgcgtt

SEQ ID NO: 280801 - DNA, 75 bp, synthetic construct
  source 1..75: mol_type = other DNA
gccgcagggaaaagatgtggtgatcgacgccaaaatgacgctggtcgcctatgaacgctatttcaacgccgaaga

SEQ ID NO: 280802 - DNA, 75 bp, synthetic construct
  source 1..75: mol_type = other DNA
gatctggagctggactggattgactgggataacggtgcactacgaattggcgcaatgtctcgcttgcagtcactg

SEQ ID NO: 280803 - DNA, 75 bp, synthetic construct
  source 1..75: mol_type = other DNA
gttggtacaaataataatagcggtcttgatattaaaacccgccgcctgagtaaactagtgacagaggtggcgccg

SEQ ID NO: 280804 - DNA, 75 bp, synthetic construct
  source 1..75: mol_type = other DNA
ttgccagctgcatttgaatcactaaagaaagataaagtaaacaaacttgaacgcagcctgattatcgatcttgga

SEQ ID NO: 280805 - DNA, 75 bp, synthetic construct
  source 1..75: mol_type = other DNA
acgcccgctcgcggatgcagccggatgtcatcgtgcggctgccgcagggaaaagatgtggtgatcgacgccaaaa

SEQ ID NO: 280806 - DNA, 75 bp, synthetic construct
  source 1..75: mol_type = other DNA
gcgaggaaagtaatgtcatttacggcatactcggatccatgctggccatagtcccggcggtaggcccattgctcg

SEQ ID NO: 280807 - DNA, 75 bp, synthetic construct
  source 1..75: mol_type = other DNA
cactgcgtgaagctctcggttttgtttactcacgccatgttcgtaatcagtcgaccattggtggtgaaatcgccg

SEQ ID NO: 280808 - DNA, 75 bp, synthetic construct
  source 1..75: mol_type = other DNA
taccggtttacgatctggatggcgtgatgaagaccttccaggggcgtgacattaccggtgcagcagaacgtcgct

SEQ ID NO: 280809 - DNA, 75 bp, synthetic construct
  source 1..75: mol_type = other DNA
atgaaaagtggccggaagcaacaaaacgcgccgttatccgcgatgcgtatttcattcactgccataaaggcacta

SEQ ID NO: 280810 - DNA, 75 bp, synthetic construct
  source 1..75: mol_type = other DNA
gcgccctgcgacgagccattgaaccgctgggatacctcattcgcgtgtctgagtggtgggagttcgacggcgaac

SEQ ID NO: 280811 - DNA, 75 bp, synthetic construct
  source 1..75: mol_type = other DNA
gagatcccgggggatattttcgcggcggcagcaacttacgacggggaagtcattaccatttatccggacgattaa

SEQ ID NO: 280812 - DNA, 75 bp, synthetic construct
  source 1..75: mol_type = other DNA
ctctgcacagcctcaattaccggcgaatattctcaaagaatttgtcctgtctattccaccagtaaaagaacaaca

SEQ ID NO: 280813 - DNA, 75 bp, synthetic construct
  source 1..75: mol_type = other DNA
gtgttctactcataaaactaaataaaaatatagtgttgcctagttttatgaaattagtattcaataatatctctg

SEQ ID NO: 280814 - DNA, 75 bp, synthetic construct
  source 1..75: mol_type = other DNA
ggcgggaaaccgttccgtataccggtttcagatacacaggcttaccgtcaatttggtaactcagtcgtcgtaccg

SEQ ID NO: 280815 - DNA, 75 bp, synthetic construct
  source 1..75: mol_type = other DNA
acccttttttttgatgtcgcccggatcatccgagccaaacagcctgccattttcgttcttgagaacgtaaaaaat

SEQ ID NO: 280816 - DNA, 75 bp, synthetic construct
  source 1..75: mol_type = other DNA
cgtggccagtttgcttcgaagccgtattgagatcgccgttgcggctcgtctcaagggagaatttgaagcggcatc

SEQ ID NO: 280817 - DNA, 75 bp, synthetic construct
  source 1..75: mol_type = other DNA
gcctgattgcggatgcgaagcccgccagccgtcacctgattggtctgaatattattcaggacattcccggtcata

SEQ ID NO: 280818 - DNA, 75 bp, synthetic construct
  source 1..75: mol_type = other DNA
gcaggaccagggcatcactgaagatacctatctggaacttgagcgactgataagcgatgccaaaccatgtagccg

SEQ ID NO: 280819 - DNA, 75 bp, synthetic construct
  source 1..75: mol_type = other DNA
atttggtaactcagtcgtcgtaccggtatttgcagcagttgcgaaactgcttaagccctatattttgcaggccac

SEQ ID NO: 280820 - DNA, 75 bp, synthetic construct
  source 1..75: mol_type = other DNA
cataattgcacagccgaactaatcccggcagatcccgaagccaccgcgcacgccggactatggatcggtaagagt

SEQ ID NO: 280821 - DNA, 75 bp, synthetic construct
  source 1..75: mol_type = other DNA
atggcatacagcaaatatctgaatgatcccctcgacgaacgctatctgattgagccaggggagtgggtagaagag

SEQ ID NO: 280822 - DNA, 75 bp, synthetic construct
  source 1..75: mol_type = other DNA
tgagccgggggagtgggtagaagagggggcaattccagacgaagagctggaagttagaaaacaattggctgcatt

SEQ ID NO: 280823 - DNA, 75 bp, synthetic construct
  source 1..75: mol_type = other DNA
ctgatcatcgaagagtaccaggctcaagggggagacgagatcactttccctgatgacctcagccgacagcgtcag

SEQ ID NO: 280824 - DNA, 75 bp, synthetic construct
  source 1..75: mol_type = other DNA
aatgtcttgatgccaactatccagcctccactgcaacgctaatacaactttatctgatcggcctgttaggactca

SEQ ID NO: 280825 - DNA, 75 bp, synthetic construct
  source 1..75: mol_type = other DNA
ttcgttgctttactccctcgataaacatcactgcaccgctgaattggttccggcagatccacagaataccgcgca

SEQ ID NO: 280826 - DNA, 75 bp, synthetic construct
  source 1..75: mol_type = other DNA
tcgcgattacattgactcactccgcgaaaacatggctaattcgaaaggccgcaataactttaaaaatctgtttct

SEQ ID NO: 280827 - DNA, 75 bp, synthetic construct
  source 1..75: mol_type = other DNA
aacggcgcacatgccggatacatcatgtacgtcaccgatgccgtgcaggaccgcaacgatatcgaaatgcttcgc

SEQ ID NO: 280828 - DNA, 75 bp, synthetic construct
  source 1..75: mol_type = other DNA
aaggacgggcttcagattattcctctgtcagaagtcgcggcaaaggatgaatttttgaatatcaagaacgtgagc

SEQ ID NO: 280829 - DNA, 75 bp, synthetic construct
  source 1..75: mol_type = other DNA
ccacaacgaccgccagcgcaccgcaaaaaatggaggcattcacctttggcgagccctccgccgttctggatcgcc

SEQ ID NO: 280830 - DNA, 75 bp, synthetic construct
  source 1..75: mol_type = other DNA
tgtcagaagtcgcggcgaaggatgagtttctgaatatcaaaaatgtcagtcgcgatgacatgatggcagcacatc

SEQ ID NO: 280831 - DNA, 75 bp, synthetic construct
  source 1..75: mol_type = other DNA
tgctgccgtgcatcacagctccccgatttacgtcaaacgtaatattctggcctcgacatttatcccgcatccgtg

SEQ ID NO: 280832 - DNA, 75 bp, synthetic construct
  source 1..75: mol_type = other DNA
atgaagagtactgagtttcatcctgtccattatgatgtgcacggacgcctgcgtttacccttcctcttctggttt

SEQ ID NO: 280833 - DNA, 75 bp, synthetic construct
  source 1..75: mol_type = other DNA
taaatcatatcaacgttcagcaagggccaatttttagtcatagcgccatggtgctgcaagcggctattcacgggc

SEQ ID NO: 280834 - DNA, 75 bp, synthetic construct
  source 1..75: mol_type = other DNA
aagctatttcctcgatatcaaagagatattttcgcaattaaccgaagcgacgcgtaaactccaggcccgtagcgc

SEQ ID NO: 280835 - DNA, 75 bp, synthetic construct
  source 1..75: mol_type = other DNA
tttcctattcatactgttaggcttatcctcccttataatttcgctatataccttcggaaggtgttggttagtgtt

SEQ ID NO: 280836 - DNA, 75 bp, synthetic construct
  source 1..75: mol_type = other DNA
ttgacagtgacacgaatgccattgacgtcgcggtcaagcggcttcgcgctaaaatagacaatgattacgagccga

SEQ ID NO: 280837 - DNA, 75 bp, synthetic construct
  source 1..75: mol_type = other DNA
aactggccggggctacgggtggaaaaactgtacgccgaatatttattgccggtgtgttcgccgctactgctgact

SEQ ID NO: 280838 - DNA, 75 bp, synthetic construct
  source 1..75: mol_type = other DNA
gtaatcgttcactcctgctgaccgaggaagggcaaagctatttcctcgatatcaaagagatattttcgcaattaa

SEQ ID NO: 280839 - DNA, 75 bp, synthetic construct
  source 1..75: mol_type = other DNA
aacaggctgtcattctcaacgcaccacgccaccagaaactgaaggaaatgagtgaaggtattgtgtcgatgtttc

SEQ ID NO: 280840 - DNA, 75 bp, synthetic construct
  source 1..75: mol_type = other DNA
agataatcaggatgtcgttgccgcactcattgtgaatgagtatcgagcacagggcggcggcactatcgattttcc

SEQ ID NO: 280841 - DNA, 75 bp, synthetic construct
  source 1..75: mol_type = other DNA
gggcattccggcggtgctggcattcttactgagtggtcggcgggatacgtttccccgtatctggcacgtgctcta

SEQ ID NO: 280842 - DNA, 75 bp, synthetic construct
  source 1..75: mol_type = other DNA
gccgctatttccatcttcagttctgcaagttcaagtactgatggaattatttttgctttaaaacaaaacaagatt

SEQ ID NO: 280843 - DNA, 75 bp, synthetic construct
  source 1..75: mol_type = other DNA
ggaacccgtgccgtgatgttcagccagcctgccagccagttactggcaggtgcgcgcatggatgtgtatgtcatc

SEQ ID NO: 280844 - DNA, 75 bp, synthetic construct
  source 1..75: mol_type = other DNA
acgtgcttatacggtcaaatgacagggaacagccagaacgagtgtaatgctgctgttaaggctttcaaatcgatt

SEQ ID NO: 280845 - DNA, 75 bp, synthetic construct
  source 1..75: mol_type = other DNA
ctatgtggaatgcgtacagatggatcgctggtatgagccgcccgtcagctttgacgggctggcacgaaccttccg

SEQ ID NO: 280846 - DNA, 75 bp, synthetic construct
  source 1..75: mol_type = other DNA
ctcctgacaacgcaaatcttatggggcgtttcttttattactgccatcgccatgtggtattacacattgtggttg

SEQ ID NO: 280847 - DNA, 75 bp, synthetic construct
  source 1..75: mol_type = other DNA
gttgtgttcctaaacactatattatctggttactgatttccgtattactggcggttaaagcctttgcgttttcgc

SEQ ID NO: 280848 - DNA, 75 bp, synthetic construct
  source 1..75: mol_type = other DNA
ggatttcagccgcctcgtgctggattatctggtctttgccaacggctatcttgagaaacgcatgagcgttaccgg

SEQ ID NO: 280849 - DNA, 75 bp, synthetic construct
  source 1..75: mol_type = other DNA
tgtggtgttgctggagcgtctgagggcatttacagataccgcttgccggcatgagctggtcgggagtggtttatt

SEQ ID NO: 280850 - DNA, 75 bp, synthetic construct
  source 1..75: mol_type = other DNA
caatgatgcgcttgtatgagtccaaagcagcaaggaatgcgctcttacgtctggcaaacactaaagctggaacgc

SEQ ID NO: 280851 - DNA, 75 bp, synthetic construct
  source 1..75: mol_type = other DNA
taaaaatcaaacttcagccgaagctttcagctttggtgatcccattcctgtactggaccgccgcgaactgctgga

SEQ ID NO: 280852 - DNA, 75 bp, synthetic construct
  source 1..75: mol_type = other DNA
tgtacgtcaccgatgccgtgcaggatcgcaacgatatcgaaatgctccgcgaaaacatggtcaagtcgaaaggcc

SEQ ID NO: 280853 - DNA, 75 bp, synthetic construct
  source 1..75: mol_type = other DNA
cgcgaccagcggcaaaaacaatgaccgccagcgccccgaaaatggaggcattcacctttggtgagccggtgccgg

SEQ ID NO: 280854 - DNA, 75 bp, synthetic construct
  source 1..75: mol_type = other DNA
gccacatcagaatcgatgggcgtgacaccaatgacatctgatgttatcacgccgaaaaatgctttcactcgtggc

SEQ ID NO: 280855 - DNA, 75 bp, synthetic construct
  source 1..75: mol_type = other DNA
ctatgccccgcaggggaaagctgacggcattaaaattatcccgctcagtgaagtagcaacgaaggacgatttttt

SEQ ID NO: 280856 - DNA, 75 bp, synthetic construct
  source 1..75: mol_type = other DNA
taatatcaaaaaagccagcgcggaagatctaatgagtgcccatcgagtccccccgcaaatgatggggatgatgcc

SEQ ID NO: 280857 - DNA, 75 bp, synthetic construct
  source 1..75: mol_type = other DNA
gaaccgattcggtgaagttatcgcccttgagcctgcgctggcaaaatacacccgacgcggattagacctggatac

SEQ ID NO: 280858 - DNA, 75 bp, synthetic construct
  source 1..75: mol_type = other DNA
atattaacggagacagtggggcagaaaatgtggctacttgacgccagggagcggagcatttttttacaggcttta

SEQ ID NO: 280859 - DNA, 75 bp, synthetic construct
  source 1..75: mol_type = other DNA
gtttatgtactcgcctaatggtaaaaaagacggacttcagattatcccgttgtcagaagtcgcagcgaaggatga

SEQ ID NO: 280860 - DNA, 75 bp, synthetic construct
  source 1..75: mol_type = other DNA
cccgccgtggcgtggaggaggatgtttactggtgggtgccgtccttcaacgagccgacagccttcgcgcccggct

SEQ ID NO: 280861 - DNA, 75 bp, synthetic construct
  source 1..75: mol_type = other DNA
agatggtatgagccaccggtcagctttaccggtctggcaaaaagcctgcgtgctgccgtacatcacagctcaccg

SEQ ID NO: 280862 - DNA, 75 bp, synthetic construct
  source 1..75: mol_type = other DNA
aaggacgggcttcagatcatcccgttgtcagaagtcgcggcgaaggatgagtttctgaacatcaagaacgtgagc

SEQ ID NO: 280863 - DNA, 75 bp, synthetic construct
  source 1..75: mol_type = other DNA
tacattaacggcagtcatgcaggcttcatcatgtatatgactgacgccgcgcagaaccaggaggatgtgaacaac

SEQ ID NO: 280864 - DNA, 75 bp, synthetic construct
  source 1..75: mol_type = other DNA
ttctggaccgccgagaactgctggattatgtggaatgcgtacagatggaccgctggtatgagccgcccgtcagct

SEQ ID NO: 280865 - DNA, 75 bp, synthetic construct
  source 1..75: mol_type = other DNA
tatcaatcaggagctgtacggcctgccggaatatctcagcgcccttaactctgcctggctgaatgagtcggccac

SEQ ID NO: 280866 - DNA, 75 bp, synthetic construct
  source 1..75: mol_type = other DNA
ttccgtcagccctgctcaacgagtccgccacgctgttccgccggaagtattacattaacggcagtcatgcaggct

SEQ ID NO: 280867 - DNA, 75 bp, synthetic construct
  source 1..75: mol_type = other DNA
ctccgcaatgcgatgaaaagcgccaaaggaccaggtaacttccgcaatctgtttatgtactcgcctaacggcaaa

SEQ ID NO: 280868 - DNA, 75 bp, synthetic construct
  source 1..75: mol_type = other DNA
gacctgctggacgcgcaccgcatcccctttcagttgatgggcggcaagccggagaacgtcgggtcactgggcgat

SEQ ID NO: 280869 - DNA, 75 bp, synthetic construct
  source 1..75: mol_type = other DNA
caaaaagcctgcgcgcctccgttcatcacagctcgccgatttacgtgaaacgtaacattctggcgagcacctaca

SEQ ID NO: 280870 - DNA, 75 bp, synthetic construct
  source 1..75: mol_type = other DNA
aaagcgttacagcaccaccggtaaggtcatcagactggaaacctcaccggcaaaatatacccgccgtggcgtgga

SEQ ID NO: 280871 - DNA, 75 bp, synthetic construct
  source 1..75: mol_type = other DNA
actggatattggtgctgtagccattaccgatcgcgagaaattgctggcctttaccgggatcggtgacgaccatca

SEQ ID NO: 280872 - DNA, 75 bp, synthetic construct
  source 1..75: mol_type = other DNA
cctggcaacaccttccggcttttacacttcaaccaattgttgagaatgcgataaaacatggcacatcacaattgc

SEQ ID NO: 280873 - DNA, 75 bp, synthetic construct
  source 1..75: mol_type = other DNA
ccgtgggtgcggcactgtttatgcgtatattgctggataaacgcgcgatgtttgagaaatacacctcggcgtttt

SEQ ID NO: 280874 - DNA, 75 bp, synthetic construct
  source 1..75: mol_type = other DNA
gagagcgatgaaagaatcgcaagaaaatattttgtcaaaaataaaaaatcaaaattgcttttaattaacaatgca

SEQ ID NO: 280875 - DNA, 66 bp, synthetic construct
  source 1..66: mol_type = other DNA
atgaagtatgtctttattgaaaaacatcaggctgagttcagcatcaaagcaatgtgccgcgtgctc

SEQ ID NO: 280876 - DNA, 75 bp, synthetic construct
  source 1..75: mol_type = other DNA
gttgatataaagaagtttcaaaagcgatatattggaatcgaatcaaaaagtgaaataaatgagcaaaagaaattt

SEQ ID NO: 280877 - DNA, 75 bp, synthetic construct
  source 1..75: mol_type = other DNA
tggcaagtaccggatgaagtcaaactaccgaaaaccttgacgctggtttatcacctaccgatagaacttcatacc

SEQ ID NO: 280878 - DNA, 75 bp, synthetic construct
  source 1..75: mol_type = other DNA
cacatttgcaatcgacactggacgcggtgcaagtaatgcctgatgaggaaaaccgatttaatgccctgaaagcgg

SEQ ID NO: 280879 - DNA, 75 bp, synthetic construct
  source 1..75: mol_type = other DNA
ttattggctggcacacaggctggcgagctattgtagtcatctggcgcatccgcaattatcgctggtgggaaccgg

SEQ ID NO: 280880 - DNA, 75 bp, synthetic construct
  source 1..75: mol_type = other DNA
cacgagattttctccttgaaatcaaaccactgtttccgctcatagagatccccgcattctgggatgatgatgagg

SEQ ID NO: 280881 - DNA, 75 bp, synthetic construct
  source 1..75: mol_type = other DNA
gctcaatttttcgcctggttgctgtgctggcacgatattggaaaatttgcccgctcttttcaacaactttacctg

SEQ ID NO: 280882 - DNA, 75 bp, synthetic construct
  source 1..75: mol_type = other DNA
gctggcacgctttggtaaagaaggtagctcacagcgtgccggaaaagtccttattagcactcaggtattggagca

SEQ ID NO: 280883 - DNA, 75 bp, synthetic construct
  source 1..75: mol_type = other DNA
cgccacctgccggatgagtttgacgattacgtcgctaacccgaaaccaaacggttatcagtccattcataccgtg

SEQ ID NO: 280884 - DNA, 75 bp, synthetic construct
  source 1..75: mol_type = other DNA
ggactttgcttataacaagctgaaaaccatccgtaagctgaacgggatgctggtcgtcggtactcaatccccggc

SEQ ID NO: 280885 - DNA, 75 bp, synthetic construct
  source 1..75: mol_type = other DNA
cataacgaccgcaatacgtttaccgacaatcttcataaagattccggcaacccgtatgccgatgaagttagccgt

SEQ ID NO: 280886 - DNA, 75 bp, synthetic construct
  source 1..75: mol_type = other DNA
cgatgcggttcaatctgattgccgtatggctgagagcgaagggaaagccggtagcaaaccgtttatttggcgcaa

SEQ ID NO: 280887 - DNA, 75 bp, synthetic construct
  source 1..75: mol_type = other DNA
aaaatcgacaacgactttgagccgaagctgattcagaccgtgcgcggcgtgggctatatgcttgaggtacctgat

SEQ ID NO: 280888 - DNA, 75 bp, synthetic construct
  source 1..75: mol_type = other DNA
caactgatggagattctgtgtaccagaaatggtgaaagattatcgacaagagaaagattgcttattagcgaaagt

SEQ ID NO: 280889 - DNA, 75 bp, synthetic construct
  source 1..75: mol_type = other DNA
aatgcttggtggggaatattacaccgtaaaaagcggtgagccgacaggatggaatccttttgctctggaggcaac

SEQ ID NO: 280890 - DNA, 75 bp, synthetic construct
  source 1..75: mol_type = other DNA
ctgctggaaacggcacatagccgggtggcgtggctatctgacaccgctggcctgccggaaaaaacacagaaattt

SEQ ID NO: 280891 - DNA, 75 bp, synthetic construct
  source 1..75: mol_type = other DNA
aggttatccgctcgccacgggtgattctgacccatatcagccaccagtttgatgcgtggctgatggaaaacgcac

SEQ ID NO: 280892 - DNA, 75 bp, synthetic construct
  source 1..75: mol_type = other DNA
caacctgcaagtgctgggccgcgtgctgggtaaactcaaccaggtgccagatgttatcgacgcgcgtcggttgca

SEQ ID NO: 280893 - DNA, 75 bp, synthetic construct
  source 1..75: mol_type = other DNA
tctatctcctgtatcgggtaacatcgctgctggatggtcgtcggcttgttattttcttcgatgagttctggaaat

SEQ ID NO: 280894 - DNA, 75 bp, synthetic construct
  source 1..75: mol_type = other DNA
agatggaacagagttcctggatgacccggatatctgtggtcctatcactttctatctcctgtatcgggtaacatc

SEQ ID NO: 280895 - DNA, 75 bp, synthetic construct
  source 1..75: mol_type = other DNA
atgcaaaaatggcaacacatgcaactcaaacgcgccttaaaaacgttctaaacaaaggagatttaactcccgagg

SEQ ID NO: 280896 - DNA, 75 bp, synthetic construct
  source 1..75: mol_type = other DNA
tgttaacggtgtccgtctgacgccgcgcggctggtttgaatttaccgaagcctggcttcccgcaccgtcgcaatg

SEQ ID NO: 280897 - DNA, 75 bp, synthetic construct
  source 1..75: mol_type = other DNA
gaacgtgcttggcgttgccagccgtagcgataccaaacagcaactggcgaccatcgacatgaccattgagattta

SEQ ID NO: 280898 - DNA, 75 bp, synthetic construct
  source 1..75: mol_type = other DNA
ttcacctaccagttgcagatgggtgaccagattgaaattatcacccagaaacagccgaatcccagccgtgactgg

SEQ ID NO: 280899 - DNA, 75 bp, synthetic construct
  source 1..75: mol_type = other DNA
cacgctggtggaaattgccgcaatcgccaaatccagggggcaactggtggtgccgcacggttcgtctgtttactc

SEQ ID NO: 280900 - DNA, 75 bp, synthetic construct
  source 1..75: mol_type = other DNA
agaggggcttgagcgttcagcagaacagggagccagccttggggctgcgatgcgcgatgctataacaggcgaaag

SEQ ID NO: 280901 - DNA, 75 bp, synthetic construct
  source 1..75: mol_type = other DNA
taataactgaattaatcaaaaatatttctatagccctacgagagaacgatattggttttccttgtattagatctc

SEQ ID NO: 280902 - DNA, 75 bp, synthetic construct
  source 1..75: mol_type = other DNA
aacgtttgcaggattgttacgccgcgctgggcatagtgcacactcactatcgccacttgccggatgagttcgatg

SEQ ID NO: 280903 - DNA, 75 bp, synthetic construct
  source 1..75: mol_type = other DNA
actatcgtttctctgccatcaggtgattatgccctgaacaagccgggtttatcaccgcaagacctgacttcgttt

SEQ ID NO: 280904 - DNA, 75 bp, synthetic construct
  source 1..75: mol_type = other DNA
tggagttttttctccgccatcagggcgaagtgctgccccgctcgcttatcgcctcacaggtgtgggacatgaatt

SEQ ID NO: 280905 - DNA, 75 bp, synthetic construct
  source 1..75: mol_type = other DNA
ttatgatagagcgatcagactggtatctgaaactcttacacctctaattcaggcttcaagtgagaaagcccagca

SEQ ID NO: 280906 - DNA, 75 bp, synthetic construct
  source 1..75: mol_type = other DNA
gagcaccacggcacactgcaatctttccgtacactttcagaaaccggtatcgacattatgcagccggatgttggc

SEQ ID NO: 280907 - DNA, 75 bp, synthetic construct
  source 1..75: mol_type = other DNA
ttgacttacaagcctcataacaatggagaacatcatgaccctaccgaaattaaacaggttcgcgcctggtttact

SEQ ID NO: 280908 - DNA, 75 bp, synthetic construct
  source 1..75: mol_type = other DNA
tgccactggtgcgcgcccggatttggcaaaagagatgggatttatcggcggcaagatgccgacgcactggggacc

SEQ ID NO: 280909 - DNA, 75 bp, synthetic construct
  source 1..75: mol_type = other DNA
ttcggctctgacgcgtctcaggaaaagattcttcagggaatgggggcgacattaaggcaggatgagaaggggaat

SEQ ID NO: 280910 - DNA, 75 bp, synthetic construct
  source 1..75: mol_type = other DNA
ggatggctggagtggcaggcgcagtcaggacgcggaaagcgtggaaaactgcgttttctggtcacgccggaatcg

SEQ ID NO: 280911 - DNA, 75 bp, synthetic construct
  source 1..75: mol_type = other DNA
gttactggttgtggcaccattatttaagtgaatgcgaagaattgcttccttcatcttcactctctccgcgcaaac

SEQ ID NO: 280912 - DNA, 75 bp, synthetic construct
  source 1..75: mol_type = other DNA
tggacaactttctgcctgaagacaaagctgccgcacgagattttctccttgaaatcaaggtactgtttccgctca

SEQ ID NO: 280913 - DNA, 75 bp, synthetic construct
  source 1..75: mol_type = other DNA
accggaatatacccttgagcaatggctgcgttgcgatccgctctggccacatgttttcactgccagcacatatgc

SEQ ID NO: 280914 - DNA, 75 bp, synthetic construct
  source 1..75: mol_type = other DNA
ggatggttggagtggcaggcgcaatcaggacgcggaaagcgcgggcaactacgctttctggtgacgccgcaattc

SEQ ID NO: 280915 - DNA, 75 bp, synthetic construct
  source 1..75: mol_type = other DNA
ggatggctggagtggcaggcgcagtcaggacgcggaaagcgcggacaactacgctttctggtcacgccagaatcg

SEQ ID NO: 280916 - DNA, 75 bp, synthetic construct
  source 1..75: mol_type = other DNA
ggggagtgtattgaagttaaaacaaatgaacctttgaacagcgtgatggaaacactaaatggtggtgggcaatga

SEQ ID NO: 280917 - DNA, 75 bp, synthetic construct
  source 1..75: mol_type = other DNA
atgaacgtttttaatcccgcgcagttccgtgcgcagtttcccgcattacaggatgcgggcgtctatctcgacagt

SEQ ID NO: 280918 - DNA, 75 bp, synthetic construct
  source 1..75: mol_type = other DNA
gagaagatattgatcctgcacaaacggtaatttctgctggcattggtggtgttggcaaggggctggaaaatacag

SEQ ID NO: 280919 - DNA, 75 bp, synthetic construct
  source 1..75: mol_type = other DNA
atgactttttggaatttctggggaaaaacccgacgtggtgagaaaggtggtggcgacgactatcaccttctttgc

SEQ ID NO: 280920 - DNA, 75 bp, synthetic construct
  source 1..75: mol_type = other DNA
caactttcctggtatatctctgcaaccgtcgtactcgcagactggacgggatcgtcaacgcggttttttccacgc

SEQ ID NO: 280921 - DNA, 75 bp, synthetic construct
  source 1..75: mol_type = other DNA
gttggcttcatagcgaacaagagtgtattgcgcgtatcgaatcggcggtaagtcaggggaaatgcatcgcctgga

SEQ ID NO: 280922 - DNA, 75 bp, synthetic construct
  source 1..75: mol_type = other DNA
gcgctgtgccgatggcaaaattctcgccgacaaagtgaaagataagctggaactgacggcgacgttaaccggact

SEQ ID NO: 280923 - DNA, 75 bp, synthetic construct
  source 1..75: mol_type = other DNA
agaggcgtatcaggcactggaacctggcgttaatcaggcccgattactgacgctggaaaacgaagtgaaaaagct

SEQ ID NO: 280924 - DNA, 75 bp, synthetic construct
  source 1..75: mol_type = other DNA
agcgatgaaagagcgtattcctgtgcaaatcaaagtgaagaagatcaacggactgggttacagcaaactggacag

SEQ ID NO: 280925 - DNA, 75 bp, synthetic construct
  source 1..75: mol_type = other DNA
ctgccttcctgaatgccaaaccaaaagaacgcgcggaattgctcgaggagttaaccggcactgaaatctacgggc

SEQ ID NO: 280926 - DNA, 75 bp, synthetic construct
  source 1..75: mol_type = other DNA
accagcgatcgcgagcatctgcggcaatggcagcaacagttaacccatgcagagcaaaaacttaattcacttccg

SEQ ID NO: 280927 - DNA, 75 bp, synthetic construct
  source 1..75: mol_type = other DNA
agcgtttcttgcggcactgatggatgaacaaacactagcgcaactggaacagctcaagcagaatctggaaaacca

SEQ ID NO: 280928 - DNA, 75 bp, synthetic construct
  source 1..75: mol_type = other DNA
cgcgcaaataaaaggatgcaggataatatatctgaatttctgggggcgtatggaataaatcactcagtgtacatg

SEQ ID NO: 280929 - DNA, 75 bp, synthetic construct
  source 1..75: mol_type = other DNA
atgaataacacagacacattagaaaaaataatcagacaccaaaaaaacaaagaccccgcatatccctttcgggag

SEQ ID NO: 280930 - DNA, 75 bp, synthetic construct
  source 1..75: mol_type = other DNA
atgaacgaagatggctcgcctgtttctaaatacataaatgggaaaaaatctatatggttttcttcttcatatatt

SEQ ID NO: 280931 - DNA, 75 bp, synthetic construct
  source 1..75: mol_type = other DNA
ccgttcgccagcaacgggctgtttgccattaccggcccaaccggtgcggggaaaaccaccctgctggacgccatt

SEQ ID NO: 280932 - DNA, 75 bp, synthetic construct
  source 1..75: mol_type = other DNA
gattgaaaaaggcgaacttggccgccacaaacaaattaaaatcattaatccgcaacaaattccgccagaaatcgc

SEQ ID NO: 280933 - DNA, 75 bp, synthetic construct
  source 1..75: mol_type = other DNA
tgatgctgatgctggcctgcggcgtatgtatgacgggccggcgcaccacgcgcacggggctggcgctgtgtctgg

SEQ ID NO: 280934 - DNA, 75 bp, synthetic construct
  source 1..75: mol_type = other DNA
cagttgaagcaggatgcagacaaccgtcagcaacaacaaaccttaatgcagcaaattgcccagacaacacagcag

SEQ ID NO: 280935 - DNA, 75 bp, synthetic construct
  source 1..75: mol_type = other DNA
caacggtgtatctggtgacgaaagggcgtcctgataccgcgtttcttcctgagccagtgaaggcgaaagcaggca

SEQ ID NO: 280936 - DNA, 75 bp, synthetic construct
  source 1..75: mol_type = other DNA
ggcggggcggtctatctgcgggcggaaagtgcgttcccgcagacccgccttcagttacaggatgtggaaagcggg

SEQ ID NO: 280937 - DNA, 75 bp, synthetic construct
  source 1..75: mol_type = other DNA
atgtttgagtcttatatggcagaacgtcttcgccgccgctgggtgcgcctgcgcttatatcgttttattgatttt

SEQ ID NO: 280938 - DNA, 75 bp, synthetic construct
  source 1..75: mol_type = other DNA
atgtgtcgtttttcgtacagtttatcgatgttaatgccccacatacgggaatttcattctttattctggcgacga

SEQ ID NO: 280939 - DNA, 75 bp, synthetic construct
  source 1..75: mol_type = other DNA
cagggggccaggtgacaatttttgatgaagaatacgacgaggttggacaatggcatcttgagcaatatgtcgagg

SEQ ID NO: 280940 - DNA, 75 bp, synthetic construct
  source 1..75: mol_type = other DNA
agtttgtgtccgccaccttccagcaccgctgggttggtcccgccggcacgccggaagacaccaccacggtttatg

SEQ ID NO: 280941 - DNA, 75 bp, synthetic construct
  source 1..75: mol_type = other DNA
aaagttttttctgaagatgaacacgcctcaattcctgactttttggttatctccaccaaaacatggaataaatta

SEQ ID NO: 280942 - DNA, 75 bp, synthetic construct
  source 1..75: mol_type = other DNA
gcagactcgacatattgaaattgccaaagtcttttctgaagatgaacacgcctcaattcctgatgttttggttat

SEQ ID NO: 280943 - DNA, 75 bp, synthetic construct
  source 1..75: mol_type = other DNA
taatttagtccatctcgctaatcagcaacttacccggctgcacgggcgctatctgttacagcgcaaagccagcga

SEQ ID NO: 280944 - DNA, 75 bp, synthetic construct
  source 1..75: mol_type = other DNA
tatagggttacagactactgcgatacattgatgaatattgaatcacgcggcatccacctgactaaaaagaaaatt

SEQ ID NO: 280945 - DNA, 75 bp, synthetic construct
  source 1..75: mol_type = other DNA
gtgagaaagttaagccgacttgaaaaatataacatgaacaaggtttcaatgcgcagccattcaaagattgtcgcc

SEQ ID NO: 280946 - DNA, 75 bp, synthetic construct
  source 1..75: mol_type = other DNA
atttcatttggcgaagtttatactgcgatgcaacaaggcgtagtggatggagcagaaaataatgtaccttcctag

SEQ ID NO: 280947 - DNA, 75 bp, synthetic construct
  source 1..75: mol_type = other DNA
accggtggcgcgcttggcgcggcgcgtctggcttgtctcgccgccggtaaaccgctggcggcggtctgcgaaaaa

SEQ ID NO: 280948 - DNA, 75 bp, synthetic construct
  source 1..75: mol_type = other DNA
agcgataaaactgttaagcagcgttatccggatgacttcaaagcgctggacagctggcgcaaagagtttattaaa

SEQ ID NO: 280949 - DNA, 75 bp, synthetic construct
  source 1..75: mol_type = other DNA
caaggttacagcctggaaacgttgcgcgatctggagatgatcccgctgaccagcgaagaagatcgcaacgggcgc

SEQ ID NO: 280950 - DNA, 75 bp, synthetic construct
  source 1..75: mol_type = other DNA
ctgctgccgggcagtggggcaccttatcttgactcgctggatgacaattcgcacaaacatgcgtttggtgtttcg

SEQ ID NO: 280951 - DNA, 75 bp, synthetic construct
  source 1..75: mol_type = other DNA
aatgaattagggctttttcccgatgttcatcatgcaacaacatttagtattaatatttatggtccattgcaagaa

SEQ ID NO: 280952 - DNA, 75 bp, synthetic construct
  source 1..75: mol_type = other DNA
ggcaggtttcctgcacccggaagggatttatgatgacccgaaaggcgggcaattacgtgcggcggtatatccgag

SEQ ID NO: 280953 - DNA, 75 bp, synthetic construct
  source 1..75: mol_type = other DNA
tggtacgatcaaaacggccgcattatctttactccaagtaaaggcctggtgggcgttggcctgccgcgtaccgcg

SEQ ID NO: 280954 - DNA, 75 bp, synthetic construct
  source 1..75: mol_type = other DNA
tgagcatcgatttagacggaaatatccgccgtatgaatgacatttatttccgtccaattcatcgaaaccagtatt

SEQ ID NO: 280955 - DNA, 75 bp, synthetic construct
  source 1..75: mol_type = other DNA
aacattccccaggaagagaacccgttcctcggctatcgcgcggtacgtatttacccggaatttgctggcctgttc

SEQ ID NO: 280956 - DNA, 75 bp, synthetic construct
  source 1..75: mol_type = other DNA
ctatatggatcgcgacagcgcgccggcagtttgaagcgtaccagcaggtgctactggcggcgggcgacaagccga

SEQ ID NO: 280957 - DNA, 75 bp, synthetic construct
  source 1..75: mol_type = other DNA
agcaaatgatgagaagctgaaacacattatcgccttacttttggaagacgcaaaacgtctacagcaactggaacc

SEQ ID NO: 280958 - DNA, 75 bp, synthetic construct
  source 1..75: mol_type = other DNA
aatgtccgccgtatgaatgacatttatttccgtccaattcatcgaaatcagtattttgaggaaatgaaagcatga

SEQ ID NO: 280959 - DNA, 75 bp, synthetic construct
  source 1..75: mol_type = other DNA
cattctcaaatgtgtatcagaccgatgatctgtacgctaaaactgacacaacatcattgttcgcacctgcggcaa

SEQ ID NO: 280960 - DNA, 75 bp, synthetic construct
  source 1..75: mol_type = other DNA
tcttactgctatagctcacagaatctgttactcgaacattcaggtatgtgtttttctttaccttttgattttatt

SEQ ID NO: 280961 - DNA, 75 bp, synthetic construct
  source 1..75: mol_type = other DNA
ttcgatcgagtcgtgcctataaatttaaaacagttgggtctttttgcgcgtctttatgatgttgtcggaactcct

SEQ ID NO: 280962 - DNA, 75 bp, synthetic construct
  source 1..75: mol_type = other DNA
gtgaaaagtacgggtatggggcatgccaatacctctcttattaaccaactgccagtacttacaaatgatgcttat

SEQ ID NO: 280963 - DNA, 75 bp, synthetic construct
  source 1..75: mol_type = other DNA
aatgaaagagcgttgttcccaatcggtaaccgtaacaaattcagtattaacctgtatgcaacctcagctgccagt

SEQ ID NO: 280964 - DNA, 75 bp, synthetic construct
  source 1..75: mol_type = other DNA
tgttgtgggtacggcgccatgaaccgcagcactttgcgcgtattgcgacggtgttactgccgaaagactacttgc

SEQ ID NO: 280965 - DNA, 75 bp, synthetic construct
  source 1..75: mol_type = other DNA
ctggtcctcacttttatgtaggaaatccgctatataatacgccgaaagctatttgcgatacgcataaagcatacg

SEQ ID NO: 280966 - DNA, 75 bp, synthetic construct
  source 1..75: mol_type = other DNA
tcaggcgctggtggaaatcgacgtactggtggcgcaggcgctggggttaaccctcgaagaactgcttaccattta

SEQ ID NO: 280967 - DNA, 75 bp, synthetic construct
  source 1..75: mol_type = other DNA
tgtctgtgcttgagaaatttgctaagcagccaactagattgagtgacttagaaaaagactattattcaacccaac

SEQ ID NO: 280968 - DNA, 75 bp, synthetic construct
  source 1..75: mol_type = other DNA
atgggtattgtctggtccccatttcttcgtgggtaatcctttcaataagacaccaagagctctctgtgaggcaaa

SEQ ID NO: 280969 - DNA, 75 bp, synthetic construct
  source 1..75: mol_type = other DNA
tcaggtgatggattggttggtggcattaaggaagaaggttatataaaagatgtttactatagccgatggaatact

SEQ ID NO: 280970 - DNA, 75 bp, synthetic construct
  source 1..75: mol_type = other DNA
ttgctaatttgtatgatgagctaggtatacctgcgattgaggccagattacctgcttcatgcggatcacttggtg

SEQ ID NO: 280971 - DNA, 75 bp, synthetic construct
  source 1..75: mol_type = other DNA
actggaaaagtttgctaatcagccgaagagattaggtgatttgcaggggcagtatttttcaacggttatgttcga

SEQ ID NO: 280972 - DNA, 75 bp, synthetic construct
  source 1..75: mol_type = other DNA
ttgatagtgctcttgaggcaggctcatcggttctatggaataataatggtcataattctagacttataaatgttg

SEQ ID NO: 280973 - DNA, 75 bp, synthetic construct
  source 1..75: mol_type = other DNA
tggcttgccgagcagggactggtgcgcaaacgcgttctgattaacggttatttcatcgcggaactgaccggccgg

SEQ ID NO: 280974 - DNA, 75 bp, synthetic construct
  source 1..75: mol_type = other DNA
aaagaagatcgccaggagcaactcgaccgtcaaccggtcggcactggaccgtatcagttgtcggaataccgcgcc

SEQ ID NO: 280975 - DNA, 75 bp, synthetic construct
  source 1..75: mol_type = other DNA
gtacgatatcaaagggctggttcttagcccatttggtaacgcctccttcgctggtgtgtaccgcgaaaagcaaaa

SEQ ID NO: 280976 - DNA, 75 bp, synthetic construct
  source 1..75: mol_type = other DNA
agcgtcttgtcattctgcggtcgctggcggattacaacggcgaactgggtgagtctgtgcttcaggactgtctgg

SEQ ID NO: 280977 - DNA, 75 bp, synthetic construct
  source 1..75: mol_type = other DNA
tttcatcgctgaactgaccggccggggtcaggatgtggcggaaggccgcgccaccgttccgggtgtgaagaaacc

SEQ ID NO: 280978 - DNA, 75 bp, synthetic construct
  source 1..75: mol_type = other DNA
cgctggaactggtgagtttctgctatttgagcttcctgattatttctggtgcttttgtcacgcagtacatacgta

SEQ ID NO: 280979 - DNA, 75 bp, synthetic construct
  source 1..75: mol_type = other DNA
ggacaatatattcgcttacaacgtcatgatgagttctggcgaggcaaaccgttgatgccacaggtggtggtggat

SEQ ID NO: 280980 - DNA, 75 bp, synthetic construct
  source 1..75: mol_type = other DNA
tgacgtactggcatggccagccgccagccagttatctattttgcgcgacgacccacgcctgcgtttaacgctacg

SEQ ID NO: 280981 - DNA, 75 bp, synthetic construct
  source 1..75: mol_type = other DNA
taaataatcccgctgtccgccatgcactggcactggcgattaataaccagcgcctgatgcaatccatctattatg

SEQ ID NO: 280982 - DNA, 75 bp, synthetic construct
  source 1..75: mol_type = other DNA
tatccggttgggcgacggacagtaatgatccggacagtttcttccgtccgttactaagctgtgcggccattcact

SEQ ID NO: 280983 - DNA, 75 bp, synthetic construct
  source 1..75: mol_type = other DNA
cgcagaccaacctcgcccactggtgcgatccgaaattcgacagcgtgttgcgtaaggcgctctcctcgcagcagc

SEQ ID NO: 280984 - DNA, 75 bp, synthetic construct
  source 1..75: mol_type = other DNA
gtggcacctcgcaacccattatgcttcggtcatgtcgcagaatatgcccggaagttagagaaagaagatcgccag

SEQ ID NO: 280985 - DNA, 75 bp, synthetic construct
  source 1..75: mol_type = other DNA
gactggctggcagaacagcagcttgtcaccgtggaaaacctgcgcggcttttatgtcgtgacgctgacctcccgt

SEQ ID NO: 280986 - DNA, 75 bp, synthetic construct
  source 1..75: mol_type = other DNA
cggcatgggcctgcgtaaagaagataacgaactgcgcgaggcactgaacaaagcctttgccgaaatgcgcgctga

SEQ ID NO: 280987 - DNA, 75 bp, synthetic construct
  source 1..75: mol_type = other DNA
agcgggtgggcgtattgcagggcacgacccaggagacatttggtaacgagcactgggcgccaaaaggcattgaaa

SEQ ID NO: 280988 - DNA, 75 bp, synthetic construct
  source 1..75: mol_type = other DNA
ggccgccttgatggcacgctcgatgatgcggtggtgatcactgaagcgctgttgagcaaaccccagggccaaaag

SEQ ID NO: 280989 - DNA, 75 bp, synthetic construct
  source 1..75: mol_type = other DNA
ctatgtggaatgtgttcagacagatcgctggtatgagcctcccgtcagctttgacggactggcgcgcaccttccg

SEQ ID NO: 280990 - DNA, 75 bp, synthetic construct
  source 1..75: mol_type = other DNA
gatctggatgctcgtggggatttggggcgtaccgcacttcatgaggccgtaagtaatgggtattttgatattgtt

SEQ ID NO: 280991 - DNA, 75 bp, synthetic construct
  source 1..75: mol_type = other DNA
attttggtggagagattatagatacagatgcaaggacagaacttggcgagggggttcttcatatagctgttagga

SEQ ID NO: 280992 - DNA, 75 bp, synthetic construct
  source 1..75: mol_type = other DNA
acgtggtgaacgttacacgccagcgaccattcgtgaacgtctgatgatgcgcgattttatggataccttacgcgc

SEQ ID NO: 280993 - DNA, 75 bp, synthetic construct
  source 1..75: mol_type = other DNA
gcggcaggttttgacgttgccgataatgaaattgtacgtcagtgtgaagcgggcgatttggtgatcaccgcagac

SEQ ID NO: 280994 - DNA, 75 bp, synthetic construct
  source 1..75: mol_type = other DNA
atggcactttcatcgcgtaacacacttctagccgcactggcattcatcgcttttcaggcacaggcggtgaacgtc

SEQ ID NO: 280995 - DNA, 75 bp, synthetic construct
  source 1..75: mol_type = other DNA
gcggtggatggaatccaggtgccggcggtgaacgacacagacggtaacggcaagccggacagccaggatgcggca

SEQ ID NO: 280996 - DNA, 75 bp, synthetic construct
  source 1..75: mol_type = other DNA
tggcggggacggtctgggcggtttttcattatgtagtgtcgttttttaatcctgatgaaaatacgctggtaaatg

SEQ ID NO: 280997 - DNA, 75 bp, synthetic construct
  source 1..75: mol_type = other DNA
gtaaatcagtctttaaataatacagacaataaacaggttacaggtgcggataattcacatcctgcaccctctgaa

SEQ ID NO: 280998 - DNA, 75 bp, synthetic construct
  source 1..75: mol_type = other DNA
tatttactgagagctcagatcaactttccagggcaacagatcgcgtacccggtttgccggccagtcctggatatg

SEQ ID NO: 280999 - DNA, 75 bp, synthetic construct
  source 1..75: mol_type = other DNA
tctttactaccacacaaacgggatatattgccccagaaggggaacaacgctataacatgtgtattccaggtaatt

SEQ ID NO: 281000 - DNA, 75 bp, synthetic construct
  source 1..75: mol_type = other DNA
gatgtggtcaatttacttgttaaacgcgctgtatttcataagcaaatttcctccgtggatgaactgacaaaatta

SEQ ID NO: 281001 - DNA, 75 bp, synthetic construct
  source 1..75: mol_type = other DNA
ttatcgttcagcccgtgatggttatggttttgaagccgactggtcagagttttacaccacgacccgcaaaccctc

SEQ ID NO: 281002 - DNA, 75 bp, synthetic construct
  source 1..75: mol_type = other DNA
cggtgctgatctggggaccgccctcgaacgcgccggacacaacttcccctcacaggagatgatccttcacctgaa

SEQ ID NO: 281003 - DNA, 75 bp, synthetic construct
  source 1..75: mol_type = other DNA
ggcgctctggtccctgccccgctggaccggccggatacggcagtttttcgatcacctcccccctggagtatgtac

SEQ ID NO: 281004 - DNA, 75 bp, synthetic construct
  source 1..75: mol_type = other DNA
gaggccagagtcttttatgagaaagcattctcaaatgtgtatcagaccgatgatctgtacgctaaaactgacaca

SEQ ID NO: 281005 - DNA, 75 bp, synthetic construct
  source 1..75: mol_type = other DNA
ttatagcctgagcgccggaaacgtccatcgcagccagtttgccgaagcccaacgcctgaccgcgcgttatgaagc

SEQ ID NO: 281006 - DNA, 75 bp, synthetic construct
  source 1..75: mol_type = other DNA
tgaactttcttctgagatggctcatgcagatattgtactcacaactaataactataaaggtgatattggaaaacc

SEQ ID NO: 281007 - DNA, 75 bp, synthetic construct
  source 1..75: mol_type = other DNA
attgtcgctgccttttctttcgggccagggggtcaagtaacattatttgatgaagaagacgacgaggtgggtaaa

SEQ ID NO: 281008 - DNA, 75 bp, synthetic construct
  source 1..75: mol_type = other DNA
ttatctggtggtcaactgaatggtgcactgggtatcggaacatccagtgctcttggcggtaattcgattgtattg

SEQ ID NO: 281009 - DNA, 75 bp, synthetic construct
  source 1..75: mol_type = other DNA
agcaggagatgttggtgcactgccgttatctggtggtcaactgaatggtgcactgggtatcggaacatccagtgc

SEQ ID NO: 281010 - DNA, 75 bp, synthetic construct
  source 1..75: mol_type = other DNA
tcggctgacgccgacacccaacaacctgtcgaccagagaataaattatcaggtaatactcgacacctatcacgag

SEQ ID NO: 281011 - DNA, 75 bp, synthetic construct
  source 1..75: mol_type = other DNA
cgctggcgctgcatatatggctatgagcaaagcctctgaatttgttactaacagctttgcgaatgctgaaacgct

SEQ ID NO: 281012 - DNA, 75 bp, synthetic construct
  source 1..75: mol_type = other DNA
aattccgccactatgggcgctctgttatttggaggcgctacggcggctgctggcgtgatggctgtaagtaaaacc

SEQ ID NO: 281013 - DNA, 75 bp, synthetic construct
  source 1..75: mol_type = other DNA
aatgttatcgttcccgcagttggagtagttgcattgtatgcgctgaaatccagacctcgtcgtctgattgtctgg

SEQ ID NO: 281014 - DNA, 75 bp, synthetic construct
  source 1..75: mol_type = other DNA
agagtttatgaaaaacctttctaatctcactccgtattttacaaagctgggagaagctacaggaagtctctttga

SEQ ID NO: 281015 - DNA, 75 bp, synthetic construct
  source 1..75: mol_type = other DNA
aacgtgttgatcgtctgctcggtaatgagtctcttcatcacgacatccccctgattttcagaaacattatttcca

SEQ ID NO: 281016 - DNA, 75 bp, synthetic construct
  source 1..75: mol_type = other DNA
gtagacgttaaccagatgtataacattacagaatgggcgtataaaaacggcgttgactctatgatgggtgatcaa

SEQ ID NO: 281017 - DNA, 75 bp, synthetic construct
  source 1..75: mol_type = other DNA
tcgttcctgaacaatataaaggcgctggcactgcaacaactgcacctgataatagtcattctctttttaacacaa

SEQ ID NO: 281018 - DNA, 75 bp, synthetic construct
  source 1..75: mol_type = other DNA
gctaaagcacaattagccgcgcaacgtgtagcggcacgtgaacaaaaagccctggcacaacgcaaagagaaagca

SEQ ID NO: 281019 - DNA, 75 bp, synthetic construct
  source 1..75: mol_type = other DNA
gaggctgaattagtcaaagataagaaaacaggtaaatcagaatggaaaggcggggattctggtattacacagatg

SEQ ID NO: 281020 - DNA, 75 bp, synthetic construct
  source 1..75: mol_type = other DNA
gaaagtgattgaagagtttaaaaagagcatggttgcaatgctgccaatgtttaccaaattaggcgaggctatcgg

SEQ ID NO: 281021 - DNA, 75 bp, synthetic construct
  source 1..75: mol_type = other DNA
ctaacgcagagacgcaaggggagctaattcaacgggccaagctgggcggtgtagacgttaaccagatgtataata

SEQ ID NO: 281022 - DNA, 75 bp, synthetic construct
  source 1..75: mol_type = other DNA
gcttgaagacctgggagatgatcttatgttgacctccaaatattggacacgatccgctaaagaagttgaacaatc

SEQ ID NO: 281023 - DNA, 75 bp, synthetic construct
  source 1..75: mol_type = other DNA
atggttgcaatgctgccaatgtttaccaaattaggcgaggctatcggcggattggttaacgccgtaatgaaagca

SEQ ID NO: 281024 - DNA, 75 bp, synthetic construct
  source 1..75: mol_type = other DNA
ctggcctcctggtatagaacgcaggaagcctgccagagaatggccaaaatcccgggggttggcatgttaacggcc

SEQ ID NO: 281025 - DNA, 75 bp, synthetic construct
  source 1..75: mol_type = other DNA
acctggcaaagaacgtttttcagcttcatggtgtcgatcatgaaggccatactattttgcgtaaaaaactcaccc

SEQ ID NO: 281026 - DNA, 75 bp, synthetic construct
  source 1..75: mol_type = other DNA
ggaaacagcaactgggagggatcagcaaacgtggagatggatatttccgatacctgctggttcacggcgcacgcg

SEQ ID NO: 281027 - DNA, 75 bp, synthetic construct
  source 1..75: mol_type = other DNA
ttggttatctcgccaccaatggcctaaataatttagttcctgaattccaaattttagataatgctgattatggag

SEQ ID NO: 281028 - DNA, 75 bp, synthetic construct
  source 1..75: mol_type = other DNA
gtcggtaatgacggtaatggcaaaaagtcggggcgttattagttggcgaacttggctgattaacgcacttctggt

SEQ ID NO: 281029 - DNA, 75 bp, synthetic construct
  source 1..75: mol_type = other DNA
aaggtggagatgcttttcgcccacctcaaacggatcatgaaactcgaccgtttacgacggcactgttgcaaatag

SEQ ID NO: 281030 - DNA, 75 bp, synthetic construct
  source 1..75: mol_type = other DNA
tcgtcccaatggcagcggtgggttctggaagcgtaaaaacctggattacctgatcaccgaacggtgctatgtcgc

SEQ ID NO: 281031 - DNA, 75 bp, synthetic construct
  source 1..75: mol_type = other DNA
tgaaggcgttaaagctgaagtgtatggtcgaccgaaacacatctacagcatctggcgcaaaatgcagaaaaagaa

SEQ ID NO: 281032 - DNA, 75 bp, synthetic construct
  source 1..75: mol_type = other DNA
gatgcatgaagatgccgaactgggcgttgctgcgcactggaaatacaaagaaggcacggcttctggcggggctcg

SEQ ID NO: 281033 - DNA, 75 bp, synthetic construct
  source 1..75: mol_type = other DNA
tggaattgcgtgatctgttgccatttattccggcggagaaattgctgatcgaaaccgatgcgccgtatttactcc

SEQ ID NO: 281034 - DNA, 75 bp, synthetic construct
  source 1..75: mol_type = other DNA
atgtcatttattaaaactttttccgggaaaccagtcaatgaaccaatagctgttggtgaatctgctgatgagtct

SEQ ID NO: 281035 - DNA, 75 bp, synthetic construct
  source 1..75: mol_type = other DNA
aaacgttctgtgatgaatcatattgcggctctttgtgagtccgggctggtaaaaaaagtcacccggaaaggtgaa

SEQ ID NO: 281036 - DNA, 75 bp, synthetic construct
  source 1..75: mol_type = other DNA
catccgccctggggctgtcttcctccggcgggtgggagtggcagtcgcatattcaccaggcgtcattttgtggcg

SEQ ID NO: 281037 - DNA, 75 bp, synthetic construct
  source 1..75: mol_type = other DNA
atgcccgcctgttccactggtattgaccctggcgaaaacattccgggaagagtggcagtatttacaggtaaggga

SEQ ID NO: 281038 - DNA, 75 bp, synthetic construct
  source 1..75: mol_type = other DNA
atgaatatattaatactggcgtaagtatgcccgcttgttccactggtattgacccgggcgaatacattccgggaa

SEQ ID NO: 281039 - DNA, 75 bp, synthetic construct
  source 1..75: mol_type = other DNA
ggctggctacagtaccgggtaatatgcgttgtttttattatgatgctgaaacatctgagtatacgggctggtctg

SEQ ID NO: 281040 - DNA, 75 bp, synthetic construct
  source 1..75: mol_type = other DNA
ggctggctacagtgccgggcgatatgcgttgtttttattatgatgcagtaacgtatgaatatactggctggtctg

SEQ ID NO: 281041 - DNA, 75 bp, synthetic construct
  source 1..75: mol_type = other DNA
gactttaagcatttcaaaccaggggacaccgtaccagaaatgtaccgtaccgatgagtacaacattaagcagtag

SEQ ID NO: 281042 - DNA, 75 bp, synthetic construct
  source 1..75: mol_type = other DNA
agcgccgcagtagacgcggcagaagcacaacgtcagtcactgattgatactgcaatggcttccattagtctgatt

SEQ ID NO: 281043 - DNA, 75 bp, synthetic construct
  source 1..75: mol_type = other DNA
atgagcgaattgacaacaaataagagcaacagctacctggaacaggcggcgatcctgctgctgtgccttggcgaa

SEQ ID NO: 281044 - DNA, 75 bp, synthetic construct
  source 1..75: mol_type = other DNA
ggatttgaagattataatcactacgttggttatctcgccaccaatggcctaaataatttagttcctgaattccag

SEQ ID NO: 281045 - DNA, 75 bp, synthetic construct
  source 1..75: mol_type = other DNA
tgtacagcgcgggggatgtgttcagtcagcgggatgccctggtggcggcctgtgaaacatccggcggaggtctgc

SEQ ID NO: 281046 - DNA, 75 bp, synthetic construct
  source 1..75: mol_type = other DNA
attgacccgggcgaaaacattccgggaaaagtggcagtatttacgggtaagggatggagccatgaagaagaccat

SEQ ID NO: 281047 - DNA, 75 bp, synthetic construct
  source 1..75: mol_type = other DNA
ctgatgaatatattaatactggtgtaagtatgcccgcctgttccactggtattgacccgggcgaaaacattccgg

SEQ ID NO: 281048 - DNA, 75 bp, synthetic construct
  source 1..75: mol_type = other DNA
agcatatgttggtggctgtgtctgaaaggttatatactctgcataaaacctgacaacacgcagattgccaggcaa

SEQ ID NO: 281049 - DNA, 75 bp, synthetic construct
  source 1..75: mol_type = other DNA
tctggcgcaaaatgcagaaaaagaatctcgcctttgatgagttatttgatgtgcgtgcggtacgtatcgtcgcgg

SEQ ID NO: 281050 - DNA, 75 bp, synthetic construct
  source 1..75: mol_type = other DNA
attggcgctatcattgaaaacgccaaattcaaattgatttataaaatccagaatcccgaaacagcagaatgggcg

SEQ ID NO: 281051 - DNA, 75 bp, synthetic construct
  source 1..75: mol_type = other DNA
aggatgattctgacccgcctgatacaaatagcagagaccagggacagaataaacagcaccccgcgtactgttgct

SEQ ID NO: 281052 - DNA, 75 bp, synthetic construct
  source 1..75: mol_type = other DNA
gagggtgagccgcaatatattccgttaaaagaatggcagacccagcacgccgacattatcggcaccactggtgcc

SEQ ID NO: 281053 - DNA, 75 bp, synthetic construct
  source 1..75: mol_type = other DNA
tatcattttagcgatggcgataacggtagttgtagcaatgctgcattttgttctacccgagtttgccgctatcta

SEQ ID NO: 281054 - DNA, 75 bp, synthetic construct
  source 1..75: mol_type = other DNA
gcgttgggagattaaaggttgttgaaaatgcggttttcttgttccagcacacgaataaacgtggtgcgcttggtc

SEQ ID NO: 281055 - DNA, 75 bp, synthetic construct
  source 1..75: mol_type = other DNA
tggcagactttagtagtgaatggggctggttgctggtgttgttcggctttctgctggcgatagccaataagttgc

SEQ ID NO: 281056 - DNA, 75 bp, synthetic construct
  source 1..75: mol_type = other DNA
cactgtcaccgatagtgaacgggatgcaggcactgctcgcttttgtgcaacagcagcaacagatactggcgttat

SEQ ID NO: 281057 - DNA, 75 bp, synthetic construct
  source 1..75: mol_type = other DNA
ttactcaaaaaaacttttgatgaaggtggctgctgttatgttatcggctccatgcgaaacagcaaaattattacc

SEQ ID NO: 281058 - DNA, 75 bp, synthetic construct
  source 1..75: mol_type = other DNA
ccacccttgaacgcgaattgcgcaccgatgtccgcaccgtgaagtccctgctgccggaaacactgcattatgatc

SEQ ID NO: 281059 - DNA, 75 bp, synthetic construct
  source 1..75: mol_type = other DNA
cccggtattaaaatggtcgctattgctactgctaacaatcgccggtttcatttttcacttagcaatgcgccgaac

SEQ ID NO: 281060 - DNA, 75 bp, synthetic construct
  source 1..75: mol_type = other DNA
ggtaagggtattaccgcatcggttttgctttatcaggcaattctgttaggcgaggctgtttttgttgaagatcca

SEQ ID NO: 281061 - DNA, 75 bp, synthetic construct
  source 1..75: mol_type = other DNA
attttccttgatgagttgaaatatcatatttcacgcccaacaatggaaggattaggtacagcacgagataaaagt

SEQ ID NO: 281062 - DNA, 75 bp, synthetic construct
  source 1..75: mol_type = other DNA
ggggacaaaagctcacgcagatctttacgattctggcgctgacacaaagtgcaggtattacttttttgcaagggg

SEQ ID NO: 281063 - DNA, 75 bp, synthetic construct
  source 1..75: mol_type = other DNA
atggttgcggtaagaagtgcacatatcaataaggctggtgaatttgatccggaaaaatggatcgcaagtctgggt

SEQ ID NO: 281064 - DNA, 75 bp, synthetic construct
  source 1..75: mol_type = other DNA
caaagcctggaaagcccgtttgaatgagggggtaaaccccgaaaccatgctggaaggtgtgaaacgctacgcggg

SEQ ID NO: 281065 - DNA, 75 bp, synthetic construct
  source 1..75: mol_type = other DNA
caacgtggactacagccagatcccggaaggattcgagggggtgatcatgagtctgttaaatgacgttcagaaatt

SEQ ID NO: 281066 - DNA, 75 bp, synthetic construct
  source 1..75: mol_type = other DNA
tccgtttcctccgaacaggttgataacgttcgccggatgttgctggcgatggtcgatgacttccgttgcgtggtc

SEQ ID NO: 281067 - DNA, 75 bp, synthetic construct
  source 1..75: mol_type = other DNA
tgatatcacgaccattctcgccaacgagaaggtgaacgtgcttggcgttgccagccgtagcgacaccaaacagca

SEQ ID NO: 281068 - DNA, 75 bp, synthetic construct
  source 1..75: mol_type = other DNA
gagtgccgaagagcaggatgccgccgcgctgaagcaacttcagcaaaaaagctacacgccgcaaaaccgcagtaa

SEQ ID NO: 281069 - DNA, 75 bp, synthetic construct
  source 1..75: mol_type = other DNA
cagcggcggctgagtccgccgcccgtcagccgcccggtttccgtgacaaacacgtccgcgcaggccgtgacggcg

SEQ ID NO: 281070 - DNA, 75 bp, synthetic construct
  source 1..75: mol_type = other DNA
ttgcatttcatttgataccgctgaaaaacgccgatacgctacttatttgatactaaatcggcgcttttcctttgc

SEQ ID NO: 281071 - DNA, 75 bp, synthetic construct
  source 1..75: mol_type = other DNA
gttgctgatcataacgggaggaattatcggtacgctggtggtggcaatgtatctgccaattttccatttaggcga

SEQ ID NO: 281072 - DNA, 75 bp, synthetic construct
  source 1..75: mol_type = other DNA
tattgctgaccagtgcgagattagcaaacgttctgtgatgaatcatattgcggccctttgtgagtccgggctggt

SEQ ID NO: 281073 - DNA, 75 bp, synthetic construct
  source 1..75: mol_type = other DNA
accagtcactcttttgaaccagtcaatgaaccaatagctgttggtgcatctgctgatgagtctgtgcgagttcgt

SEQ ID NO: 281074 - DNA, 75 bp, synthetic construct
  source 1..75: mol_type = other DNA
agctcccggaggtgggcggggcaaaagcctcccgatctcgggattcagtgagcaggactacggttcaacgaactt

SEQ ID NO: 281075 - DNA, 75 bp, synthetic construct
  source 1..75: mol_type = other DNA
tttatgggcgcagagaaagcacgcgacaaggttattgcaatatttgatcgcagggtgaaggagaggaacgaatga

SEQ ID NO: 281076 - DNA, 75 bp, synthetic construct
  source 1..75: mol_type = other DNA
ttgcgtggctctttgaccacctgccaacggtgtatgcagtaggcgcggcggtcagcatttccgcgctgatgagtc

SEQ ID NO: 281077 - DNA, 75 bp, synthetic construct
  source 1..75: mol_type = other DNA
ggcttccacccaacattacgctgattttgctccccaggtggaggcggtgacaggcgcgacgctgcgcgatgaggt

SEQ ID NO: 281078 - DNA, 75 bp, synthetic construct
  source 1..75: mol_type = other DNA
aaaactggttggcggcatttgcttctctctggggctgattctttgtgttgtctgcggagccgatctctttacttc

SEQ ID NO: 281079 - DNA, 75 bp, synthetic construct
  source 1..75: mol_type = other DNA
ctttctatctggcgattaccgccggtgttttcatctcaatcgcattcgtcttctatatcacagcaaccactggca

SEQ ID NO: 281080 - DNA, 75 bp, synthetic construct
  source 1..75: mol_type = other DNA
atgacaacaaagataaaaggctatccgtttgaggtcaggaacggtgaggggagcgctgtgctggctgaccaggtt

SEQ ID NO: 281081 - DNA, 75 bp, synthetic construct
  source 1..75: mol_type = other DNA
gccttattgaaaatacggaaacagttttctccattattaatacaatcattactggtgttggtgtaggagtggctt

SEQ ID NO: 281082 - DNA, 75 bp, synthetic construct
  source 1..75: mol_type = other DNA
agcgttcagtgatgcaggaactcttaggagatattttcccacttctacagtcaagcgggtattctcattatgggg

SEQ ID NO: 281083 - DNA, 75 bp, synthetic construct
  source 1..75: mol_type = other DNA
ggttttgccgatgatgatctggtcgaaaccaacagtatgctcgatccagtaaaagtgaccctgacttgtccaggg

SEQ ID NO: 281084 - DNA, 75 bp, synthetic construct
  source 1..75: mol_type = other DNA
tcccgtcgaaagaggcactgtatattgcggtcctgcggcaaattctggatatctggctggcaccattaaaggcgt

SEQ ID NO: 281085 - DNA, 75 bp, synthetic construct
  source 1..75: mol_type = other DNA
ttcgtgaagatttcgctccgctggcggcgatcaaagagtacatccgtctgaagctggaagtctcccgcgattatc

SEQ ID NO: 281086 - DNA, 75 bp, synthetic construct
  source 1..75: mol_type = other DNA
cgcgaagaaaaaagcgattcttagcgcggcactggacactttttcacaattcggttttcacggcacaaggctgga

SEQ ID NO: 281087 - DNA, 75 bp, synthetic construct
  source 1..75: mol_type = other DNA
tcagtgacataggcagtcaggtggcggatattgcgcgtacacagggagagctgaatgcgctgaaagtcgcgcagg

SEQ ID NO: 281088 - DNA, 75 bp, synthetic construct
  source 1..75: mol_type = other DNA
cgtggtggatgccacattgcgtgatttgatccaccgtcaggccggggagctggagctggaacgttatgtccgaca

SEQ ID NO: 281089 - DNA, 75 bp, synthetic construct
  source 1..75: mol_type = other DNA
atgaaaacaatcgaacaaaaacttgaacagcgccgcgagtggcagaaggcagccagagaacgagcgatcgctcgg

SEQ ID NO: 281090 - DNA, 75 bp, synthetic construct
  source 1..75: mol_type = other DNA
accaggctctgactccgtacttcaaactggcttacgtctacgacgactctaacaacgataacgatgtgaacggtg

SEQ ID NO: 281091 - DNA, 75 bp, synthetic construct
  source 1..75: mol_type = other DNA
gaacaaagggcaaagcgccttcaacaagctcaacgccagcagcagcgagcgagagaaaaagccgcatcgcctgaa

SEQ ID NO: 281092 - DNA, 75 bp, synthetic construct
  source 1..75: mol_type = other DNA
tttatgaccagaattatgtgaaagcagcggcgactcgtggtttgtcacgctttactattttgcgtcgccatgtgc

SEQ ID NO: 281093 - DNA, 75 bp, synthetic construct
  source 1..75: mol_type = other DNA
aacagagacaaaaagccatgcaaagattggctgacccggcctggcgagaggaacaaagggcaaagcgccttcaac

SEQ ID NO: 281094 - DNA, 75 bp, synthetic construct
  source 1..75: mol_type = other DNA
atctatcagggggagggggagctgggtattacccgcttggcagggagtcgctatctgacgctgcgtggcgacggg

SEQ ID NO: 281095 - DNA, 75 bp, synthetic construct
  source 1..75: mol_type = other DNA
cttgtgggggagatccgtgacggtgaaacagcccagattgctgtgcaggcctcgctgacagggcatttggtgctg

SEQ ID NO: 281096 - DNA, 75 bp, synthetic construct
  source 1..75: mol_type = other DNA
atgactaaaacccaaataaataaattaataaaaatgatgaatgatttagactatccatttgaagcaccgctcaag

SEQ ID NO: 281097 - DNA, 75 bp, synthetic construct
  source 1..75: mol_type = other DNA
ttatggcacagataccggtaatacactgaacatctccaactcaattgttcatggtatggttacatcttaccaggt

SEQ ID NO: 281098 - DNA, 75 bp, synthetic construct
  source 1..75: mol_type = other DNA
tggtgtgctggatgtaaacaccaacatgaatgacatctccagcgtatttgcaactgatactctggaactgaccag

SEQ ID NO: 281099 - DNA, 75 bp, synthetic construct
  source 1..75: mol_type = other DNA
ctgtgactctggatgttgaaagtaacatcaacatcagcaacaactcccatgttgcaggtattactctggttcaaa

SEQ ID NO: 281100 - DNA, 75 bp, synthetic construct
  source 1..75: mol_type = other DNA
cggggtcgaaccgtattgtggcccaggctgcggttggcgcagatgaaattgccattattgaccgaaattgccaca

SEQ ID NO: 281101 - DNA, 75 bp, synthetic construct
  source 1..75: mol_type = other DNA
tatagctggctgttgaccaccgaagaaggaacgcagtacaagggccacgtgagtggaggtaaaacattcaacctc

SEQ ID NO: 281102 - DNA, 75 bp, synthetic construct
  source 1..75: mol_type = other DNA
caaagtgctctatttcgaaaacgaccacgagaagacgttccgtgcaccgaaagcgtatccggagcagtcgatggc

SEQ ID NO: 281103 - DNA, 75 bp, synthetic construct
  source 1..75: mol_type = other DNA
tttagcgtggaatacattcatcaaaattattcttatagcgcatcctggactatgccttgctcaacgaaaccttat

SEQ ID NO: 281104 - DNA, 75 bp, synthetic construct
  source 1..75: mol_type = other DNA
tgagacgatgttttccgatgatggcgtgaacaagttactgaaggatttggacagacggcgcagggcggcagggaa

SEQ ID NO: 281105 - DNA, 75 bp, synthetic construct
  source 1..75: mol_type = other DNA
gtaacgccagtacccaacgtcatggtgtataccttcggtaaaaaaatgccaatggcggtggagggcagcggcgaa

SEQ ID NO: 281106 - DNA, 75 bp, synthetic construct
  source 1..75: mol_type = other DNA
cgggtgattgtcgccccgaaacgctgttacgaaccgcaggcgttgctgaataaacaaaagctgtggggtgcctgc

SEQ ID NO: 281107 - DNA, 75 bp, synthetic construct
  source 1..75: mol_type = other DNA
tgcggggcaatcaattattggcgctgccagtcatcatgaaaactggaataaggatgttggcttccgcgtcctgaa

SEQ ID NO: 281108 - DNA, 75 bp, synthetic construct
  source 1..75: mol_type = other DNA
gacctgggctgataggtatgttcgcaactgtgcaattgctattcttcctctattacctgagggagttccagttgc

SEQ ID NO: 281109 - DNA, 75 bp, synthetic construct
  source 1..75: mol_type = other DNA
atcggtgccatcaaagacggttatgtcacgctttcaccgttaacgccatatgataaatgggatggtgagaaatgg

SEQ ID NO: 281110 - DNA, 75 bp, synthetic construct
  source 1..75: mol_type = other DNA
ccagttaaatcttacagagactcagtcacatcaggcgccggaagcattacagttagcattaaaaaacaaggatga

SEQ ID NO: 281111 - DNA, 75 bp, synthetic construct
  source 1..75: mol_type = other DNA
cgtatctaaaagatactgaatatcagagccttacgagcatgcgcttcgttgatggtcgcagcgcttctaaaaggc

SEQ ID NO: 281112 - DNA, 75 bp, synthetic construct
  source 1..75: mol_type = other DNA
tacgaagtgaaaccgattaccggttttgcgttgattgatgcctggctttcggactcaccgtggcgggatgaaatg

SEQ ID NO: 281113 - DNA, 75 bp, synthetic construct
  source 1..75: mol_type = other DNA
ggcggcgcaagctctccgcaacgcttgagacgatgtttgccgatgatggcgtgaacaagttgctgaaggatttgg

SEQ ID NO: 281114 - DNA, 75 bp, synthetic construct
  source 1..75: mol_type = other DNA
atgaacatgaccaaaaacaccaaactgaaggagcacaccatgaacgacatcaggaagatcagcgacaaagacctg

SEQ ID NO: 281115 - DNA, 75 bp, synthetic construct
  source 1..75: mol_type = other DNA
cattcctttatccatgcagcgacagtttccggatttaacgccgcgtcatattgatcatctgaaaacccttatcgc

SEQ ID NO: 281116 - DNA, 75 bp, synthetic construct
  source 1..75: mol_type = other DNA
tgaaagaattaaataatcccaagcatgacagttacgcaattagtgaaaagagtcacggcagagaagaaacccgtc

SEQ ID NO: 281117 - DNA, 75 bp, synthetic construct
  source 1..75: mol_type = other DNA
ctatgccgtgttacttcttggttgcttgttcatcgataaaacgctccccactgtagatgttgtcattctgtcact

SEQ ID NO: 281118 - DNA, 75 bp, synthetic construct
  source 1..75: mol_type = other DNA
atgaacgacatcaggaggatcagcgacaaagagcttacgaaaatgattgagtcggcgcagcagctgctttcacga

SEQ ID NO: 281119 - DNA, 75 bp, synthetic construct
  source 1..75: mol_type = other DNA
atcttgaccatctgaaacccttattgctaaggggcaaatcagtgtgcgcggcaggggataaattaccggatttac

SEQ ID NO: 281120 - DNA, 75 bp, synthetic construct
  source 1..75: mol_type = other DNA
attgctccgcgccagagctgaactgactgaagaacagaccgtagcgcaaaaacttaaaaatcaggtaacagaagg

SEQ ID NO: 281121 - DNA, 75 bp, synthetic construct
  source 1..75: mol_type = other DNA
atggcctttttattgaataaaagcgatatggcctcctctatcggtatatccgttcaggcatttgataaatggggc

SEQ ID NO: 281122 - DNA, 75 bp, synthetic construct
  source 1..75: mol_type = other DNA
ttgaccatctgaaaacccttattgcgaagggcgcaaatcagtgtgcgcgggcaggggataaattaccggatttgc

SEQ ID NO: 281123 - DNA, 75 bp, synthetic construct
  source 1..75: mol_type = other DNA
gacacctggatctggatgcctggcgtgatttttacatatcgtatctgagaagaagtaaaaacgatgtgcctgatg

SEQ ID NO: 281124 - DNA, 75 bp, synthetic construct
  source 1..75: mol_type = other DNA
gctaaggggcaaatcagtgtgcgcggcaggggataaattaccggatttactcgatgaatatatcagagcaacaac

SEQ ID NO: 281125 - DNA, 75 bp, synthetic construct
  source 1..75: mol_type = other DNA
cgacaagctgattatgagcgtacctgaagtggcgcgggtatttggcaaaaccgggaaagcggaaaccgccaccga

SEQ ID NO: 281126 - DNA, 75 bp, synthetic construct
  source 1..75: mol_type = other DNA
atgtgcgctcggcgctggtggcgattatttcgttgccgctggggttgtgtattgcttttattgtcatgcacttcc

SEQ ID NO: 281127 - DNA, 75 bp, synthetic construct
  source 1..75: mol_type = other DNA
tattgctggcacagataacagtaatgtcactgacaattattcttcttgctgcggacaggcgttttttttcatggg

SEQ ID NO: 281128 - DNA, 75 bp, synthetic construct
  source 1..75: mol_type = other DNA
caaggagtgacgggtgaggcgattgccggggattttactgcttactggagccgcgctcgttgtgatcgctgccct

SEQ ID NO: 281129 - DNA, 75 bp, synthetic construct
  source 1..75: mol_type = other DNA
taccgcagatcaatgaaggcgacttgttgtatatgccatcgacgctgccggggatttccgcagcagaggcggcga

SEQ ID NO: 281130 - DNA, 75 bp, synthetic construct
  source 1..75: mol_type = other DNA
tggcccggagatgcgccggggcattgccgaactgaatggcgaaggcgaagtggcgggcggggtggtgatcctgcg

SEQ ID NO: 281131 - DNA, 75 bp, synthetic construct
  source 1..75: mol_type = other DNA
acagaacaacttggagtcaagtttggtgatggttctatgggtatgatgcctccagcaggctgtcaggttcgaatc

SEQ ID NO: 281132 - DNA, 75 bp, synthetic construct
  source 1..75: mol_type = other DNA
caaaagaagtctctagcctggatgtttatgttattacagatggcgtagaagaaaaatggacatataacccattat

SEQ ID NO: 281133 - DNA, 75 bp, synthetic construct
  source 1..75: mol_type = other DNA
ggctgattctgcttcccatgacgatcggctttctgtggatgtggtttcagcatccggcccagccccgcttcaccc

SEQ ID NO: 281134 - DNA, 75 bp, synthetic construct
  source 1..75: mol_type = other DNA
gaactgacgggaagatacagatacatctttgccggaagaaatgatgttaacaggcctatcagcgatgcaagcgtc

SEQ ID NO: 281135 - DNA, 75 bp, synthetic construct
  source 1..75: mol_type = other DNA
gggaatggtgtgagatcgatttttcccaaaaaatatgggaagtgcctccgacccggatgaaaatgaggaaggaac

SEQ ID NO: 281136 - DNA, 75 bp, synthetic construct
  source 1..75: mol_type = other DNA
aagccgcggagcctgcgagctagctaataaagttcgccaacgatgtggtgaagtgtttcggtatgccattgttac

SEQ ID NO: 281137 - DNA, 75 bp, synthetic construct
  source 1..75: mol_type = other DNA
agtgaaaatggcgtgcctgtttatctgcgtgatgttgcgaaggtccaggttggcccggagatgcgccggggcatt

SEQ ID NO: 281138 - DNA, 75 bp, synthetic construct
  source 1..75: mol_type = other DNA
actatccttaccctttctcaccctgacgcaaccatcgaaaatggtcgcgctgtcactacgtctgttgcggttgcg

SEQ ID NO: 281139 - DNA, 75 bp, synthetic construct
  source 1..75: mol_type = other DNA
gagttctttggcaaacgacacgacaacgtgttacgtgccatcgcaaacattgaatgctcagaaaaatttaacgcc

SEQ ID NO: 281140 - DNA, 75 bp, synthetic construct
  source 1..75: mol_type = other DNA
ccaaatcaccaaaaacggcttcgttttcctggtgatgggcttcactggcaaaaaagccgccgcattcaaggaagc

SEQ ID NO: 281141 - DNA, 75 bp, synthetic construct
  source 1..75: mol_type = other DNA
tgaaagcgtgcccggcggaaggggcaattattcagtatgccaacggtatcgtcgacttccagtccgagcagtgca

SEQ ID NO: 281142 - DNA, 75 bp, synthetic construct
  source 1..75: mol_type = other DNA
ccccccccccccccgccccccccccccccggggcccggggggggggacttccaggaagaagtggcgaaactcatc

SEQ ID NO: 281143 - DNA, 75 bp, synthetic construct
  source 1..75: mol_type = other DNA
ctggcaaaaaagccgccgcattcaaggaagcctacattgctgagttcgaccgcatggaggccgaactgcgccaga

SEQ ID NO: 281144 - DNA, 75 bp, synthetic construct
  source 1..75: mol_type = other DNA
agtgaccggtatttccacccctgtacgtctcaccacccttatggtcgtggaaaacctcggtggtgagttaattaa

SEQ ID NO: 281145 - DNA, 75 bp, synthetic construct
  source 1..75: mol_type = other DNA
aacagggatggactcttgtaaatccgggcgcaattaaaaatatgaccgtagagcagttacttaaatttactcgtt

SEQ ID NO: 281146 - DNA, 75 bp, synthetic construct
  source 1..75: mol_type = other DNA
cggtggcgaaccgttttctggtgctgatgggcgcgttgtttctgagcatctggggcacctggaccatcattaaca

SEQ ID NO: 281147 - DNA, 75 bp, synthetic construct
  source 1..75: mol_type = other DNA
tcactgggaaaaaagccgctgcattcaaagaggcctacatcgctgatgttcgaccgcatggaggcagaactgcac

SEQ ID NO: 281148 - DNA, 75 bp, synthetic construct
  source 1..75: mol_type = other DNA
gctactatccctaccctttctcaccctgatgtaaccatcgaaaacggtcgcgctgtcactacgtctattgcgatc

SEQ ID NO: 281149 - DNA, 75 bp, synthetic construct
  source 1..75: mol_type = other DNA
gttatccgcttcgacgaacacggctacatcaaattcaccgaaaccgttcctgatggcgcactggtctgtactctg

SEQ ID NO: 281150 - DNA, 75 bp, synthetic construct
  source 1..75: mol_type = other DNA
aatgttgttcatggaacttcatggttgaacgtttggggcgaagcgttacaagagaaaataactgggtttgacgtt

SEQ ID NO: 281151 - DNA, 75 bp, synthetic construct
  source 1..75: mol_type = other DNA
aatcagtcttcgtttccggctgcaacaattgacagccagatgctgttgaaaatggttaatgaggcgcggagactg

SEQ ID NO: 281152 - DNA, 75 bp, synthetic construct
  source 1..75: mol_type = other DNA
tagttttgaaggtgatgcaaccgacaacattacccttgctggctcaaatattattaatggtcggattgaaacaat

SEQ ID NO: 281153 - DNA, 75 bp, synthetic construct
  source 1..75: mol_type = other DNA
gcaccggcggcgcacagggcgttccggcatggggctgcgagtgcgcggcctgcgccagagcacgacgctcaccgc

SEQ ID NO: 281154 - DNA, 75 bp, synthetic construct
  source 1..75: mol_type = other DNA
gtgtactgcagattataaattaccgaaggaaagcgccggacagatattaagtcatgtcacggttagttgcaggta

SEQ ID NO: 281155 - DNA, 75 bp, synthetic construct
  source 1..75: mol_type = other DNA
cataatggcgaccgcgaaggaatgcgggtatgtcttaatttgtcccgagtcgaagtattaaaccagcgttatttc

SEQ ID NO: 281156 - DNA, 75 bp, synthetic construct
  source 1..75: mol_type = other DNA
acaagctggcgattggctcactggtggtcaaagtgcagggcaaattgcagagcaggctggtcgcggtctggtaaa

SEQ ID NO: 281157 - DNA, 75 bp, synthetic construct
  source 1..75: mol_type = other DNA
atcctgtttactgctgaattatccgcgatgttcacttcgctagtggaggccgttggtggtgaagcagaacgttaa

SEQ ID NO: 281158 - DNA, 75 bp, synthetic construct
  source 1..75: mol_type = other DNA
aaaatcctgatcgaccgcagcaaccatctggtattcgttgaggcaagcagcgccaaaaaggcagaggaccagctg

SEQ ID NO: 281159 - DNA, 75 bp, synthetic construct
  source 1..75: mol_type = other DNA
gatttcgtgctctttacgggcgaattatctgcactgtttaacgcgctggtggaggccattggcggtgaagcagaa

SEQ ID NO: 281160 - DNA, 75 bp, synthetic construct
  source 1..75: mol_type = other DNA
accctgatcgacgccgggctgcacgatctcaccgatcgctggtcgccaggatcgttccagcagtttttgctgacg

SEQ ID NO: 281161 - DNA, 75 bp, synthetic construct
  source 1..75: mol_type = other DNA
cagtttgatgcgtggctgatggaaaacgcactgccgtcggggtttgaggcggggtttgaggcggggtttgatggg

SEQ ID NO: 281162 - DNA, 75 bp, synthetic construct
  source 1..75: mol_type = other DNA
tgcaggtgacgccgctaccgcttaaccattcgaaactcactttcggctatttactggaaacggcgcacaatcggg

SEQ ID NO: 281163 - DNA, 75 bp, synthetic construct
  source 1..75: mol_type = other DNA
gcttctcgccgtacgcggaagagacggtgatggtcagcgaaaccgccgccagcgtcggcgcgcggcagattgtga

SEQ ID NO: 281164 - DNA, 75 bp, synthetic construct
  source 1..75: mol_type = other DNA
ccaacgctggattcactgaaaggtaaacatgttggtgtgctgcagggatcaacccaggaagcttacgctaacgag

SEQ ID NO: 281165 - DNA, 75 bp, synthetic construct
  source 1..75: mol_type = other DNA
atgaagaagtcgattctcgctctgtctttattagtcggtatttccgcagctgcttccagctacgcggcgctgccg

SEQ ID NO: 281166 - DNA, 75 bp, synthetic construct
  source 1..75: mol_type = other DNA
atgactgactgggggccttttcaccattttgccgccccccgttataacctgctggccaacaccgccaacaacgct

SEQ ID NO: 281167 - DNA, 75 bp, synthetic construct
  source 1..75: mol_type = other DNA
gccgaactgaaagccgcctttgataaggcgcttggcgaactgcgtcaggatggcacttacgacaagatggcgaaa

SEQ ID NO: 281168 - DNA, 75 bp, synthetic construct
  source 1..75: mol_type = other DNA
ctttgttagtcggtctctccgcagcggcttccagctatgcggcgctaccggagacggtacgtatcggaactgata

SEQ ID NO: 281169 - DNA, 75 bp, synthetic construct
  source 1..75: mol_type = other DNA
ggtctattccgatctggctgcaggacgcctggatgccgctctgcaagatgaggttgctgccagcgaaggtttcct

SEQ ID NO: 281170 - DNA, 75 bp, synthetic construct
  source 1..75: mol_type = other DNA
caatgatgtcaatgtttccaaagaaatggacaaaagtggaaatatgacactcagtgtggaaaaagaggattttgt

SEQ ID NO: 281171 - DNA, 75 bp, synthetic construct
  source 1..75: mol_type = other DNA
ctctctatgaatgaatctgaccttgatagtgaagctactaaagaggcttctaaaacatctgacttagatgacctt

SEQ ID NO: 281172 - DNA, 75 bp, synthetic construct
  source 1..75: mol_type = other DNA
tgctgccagatggatggccaacatttaaaagacgcggttttgtgtttagaataataagactgtatttgggggata

SEQ ID NO: 281173 - DNA, 75 bp, synthetic construct
  source 1..75: mol_type = other DNA
aagcactctttgccgtctttggcctgcagttcttccttggggaccggaaatcggctgtttccctgatgaataacc

SEQ ID NO: 281174 - DNA, 75 bp, synthetic construct
  source 1..75: mol_type = other DNA
atggctgaagaaatcgagcgactgaaacaagcactttccgctgcggaaaataatctgattgattccgaatgcctc

SEQ ID NO: 281175 - DNA, 75 bp, synthetic construct
  source 1..75: mol_type = other DNA
ccgttatttactcaaggaagtaaggtccttgttttatacggaaacccttctcgcataataacagacccgcgtcac

SEQ ID NO: 281176 - DNA, 75 bp, synthetic construct
  source 1..75: mol_type = other DNA
gacccgcaggattatgacgagaagtattcaaactggcgtttcagtgatttacccattaaatcggtttacccgcct

SEQ ID NO: 281177 - DNA, 75 bp, synthetic construct
  source 1..75: mol_type = other DNA
gctcaccacgctattatcccgaccactaaaagcgggaaaggcgttcagcttaatgaggggagcccgcagaattcg

SEQ ID NO: 281178 - DNA, 75 bp, synthetic construct
  source 1..75: mol_type = other DNA
agcttttaacgcaagcaaaattgaggctcaccacgctattatcccgaccactaaaagcgggaaaggcgttcagct

SEQ ID NO: 281179 - DNA, 75 bp, synthetic construct
  source 1..75: mol_type = other DNA
tacgtttctatcaggagttaaatccaagacaaaaatcatcattgaccttctggacgagctccctgacagtgagac

SEQ ID NO: 281180 - DNA, 75 bp, synthetic construct
  source 1..75: mol_type = other DNA
gggccaggagttctgcgcggcactgcctcctgaaataactaaaccggatatctcggctatgtgggctgaaaaaca

SEQ ID NO: 281181 - DNA, 75 bp, synthetic construct
  source 1..75: mol_type = other DNA
ctgtgtgaatcggcagacgtggacaagaaaaagactacaccacctcgctatttcacagagtcaaccttactggcc

SEQ ID NO: 281182 - DNA, 75 bp, synthetic construct
  source 1..75: mol_type = other DNA
ctgcgcattgcctatggcaactatggattctttatccgaaacgatggttcaagcacatacttcatgttgaccaat

SEQ ID NO: 281183 - DNA, 75 bp, synthetic construct
  source 1..75: mol_type = other DNA
cagcctctggatgcaactttaaccgctctcgctgcccttgcgactggtgcaaacaaactgccttatttcactggt

SEQ ID NO: 281184 - DNA, 75 bp, synthetic construct
  source 1..75: mol_type = other DNA
gcctggatttggtggtgctgggattaggtgcagatggtcatttttgtggcaatttgccgaatacgacccatttcc

SEQ ID NO: 281185 - DNA, 75 bp, synthetic construct
  source 1..75: mol_type = other DNA
aggggcattcaatcacccatactggatgtgcaaatgttcatggtcgtacggcaataataaaattataaccgatac

SEQ ID NO: 281186 - DNA, 75 bp, synthetic construct
  source 1..75: mol_type = other DNA
tatggcaattttgactccagatatgtgaaagatgttcgacttggttcacagcaatattatggagtgaacaactgg

SEQ ID NO: 281187 - DNA, 75 bp, synthetic construct
  source 1..75: mol_type = other DNA
acagttcgcacattaaaccgactgctgctgaggttggggcgttgtcattatctggcggtcaattgaatggtgcac

SEQ ID NO: 281188 - DNA, 75 bp, synthetic construct
  source 1..75: mol_type = other DNA
ggaaggtttaggcgcggctcgggataaaggcgtgcatattattatggatcaccagtccattgccgatttaaaaga

SEQ ID NO: 281189 - DNA, 75 bp, synthetic construct
  source 1..75: mol_type = other DNA
tttcccctgatattgccgcaacggtagcccccgtgaagatcatgctggatttttgcgaggatgataaccccgcca

SEQ ID NO: 281190 - DNA, 75 bp, synthetic construct
  source 1..75: mol_type = other DNA
tttgagaaggtatctctgggaagtaaactttcaggaaaagatatttcaattgtttcttttgatgattatggcgta

SEQ ID NO: 281191 - DNA, 75 bp, synthetic construct
  source 1..75: mol_type = other DNA
tagcggggctgacgatgccgttttttacgtcgatgaaaagcgatgaacggcagaaggccccgttatggaaaaagc

SEQ ID NO: 281192 - DNA, 75 bp, synthetic construct
  source 1..75: mol_type = other DNA
ggatattattggcaccaccggagccggtaaaggggtagctgccgggatattgctatatcaaagtattattgccgg

SEQ ID NO: 281193 - DNA, 75 bp, synthetic construct
  source 1..75: mol_type = other DNA
tgacagcaatatgatcctgaacctgcctgattttgtcagttttatctttacgacaacaacgctaccttctgcctc

SEQ ID NO: 281194 - DNA, 75 bp, synthetic construct
  source 1..75: mol_type = other DNA
ggaaagctgaccaataccgcagacctgatccgtctgattatccgcgatgaagcagtccacggttactacataggc

SEQ ID NO: 281195 - DNA, 75 bp, synthetic construct
  source 1..75: mol_type = other DNA
taattaattatccgcgagaggttgataattttgccaaaggaggttctcacatcgaggggcgactttcagctgaac

SEQ ID NO: 281196 - DNA, 75 bp, synthetic construct
  source 1..75: mol_type = other DNA
tgccggatatttaagtttatgtattcgtcgtttgctaatcgttgaaaaggtagtttcccggttggttggttttta

SEQ ID NO: 281197 - DNA, 75 bp, synthetic construct
  source 1..75: mol_type = other DNA
gttaaagaattttgccttcgatttgttgctggaactctacgacaacgaactgcaatacaccgatgagctgtacgc

SEQ ID NO: 281198 - DNA, 75 bp, synthetic construct
  source 1..75: mol_type = other DNA
atgaaactctcacgtatcagcgccatcaactggaacaagataacagatgataaagatctggaggtgtggaatcgc

SEQ ID NO: 281199 - DNA, 75 bp, synthetic construct
  source 1..75: mol_type = other DNA
ggtaagttgactaataccgccgacctgatccgtctgattatccgtgatgaagcagtccacggttattacatcggt

SEQ ID NO: 281200 - DNA, 75 bp, synthetic construct
  source 1..75: mol_type = other DNA
cgcaactcgctcgtgaacatgggatcaacgataatttgctgttcaagtggcgccagtactggcgcgaaggaaaac

SEQ ID NO: 281201 - DNA, 75 bp, synthetic construct
  source 1..75: mol_type = other DNA
cgccaccgcgctggcaaccggtcgcctgaaaaccgaggtcgtttgtgccgaatggcaattaccctgcgtagcgga

SEQ ID NO: 281202 - DNA, 75 bp, synthetic construct
  source 1..75: mol_type = other DNA
ggggcaggtggtcgcgatccactgttcctcgcagagcactttattccgttcctcaacgaccatatcaagccatta

SEQ ID NO: 281203 - DNA, 75 bp, synthetic construct
  source 1..75: mol_type = other DNA
atcaacacaactgttcgactgcgcggtagccagtttaatttgcgagacggtcgcggtcagcctgtgccatatttt

SEQ ID NO: 281204 - DNA, 75 bp, synthetic construct
  source 1..75: mol_type = other DNA
gggaacggatgaaaacgttctggttctgaatcgtacctacgctaaccggagcaatgcagagcgcgcagcaaaaat

SEQ ID NO: 281205 - DNA, 75 bp, synthetic construct
  source 1..75: mol_type = other DNA
tccggcatggctcactccgcttgaatggtaccatcagcgaaaatatcctgaatctgctgataagggagctcaaac

SEQ ID NO: 281206 - DNA, 75 bp, synthetic construct
  source 1..75: mol_type = other DNA
aacaaacacgggatggaagcctaccagggcggcacctgcaacgaaacagagatcagcgcccgcacctgtgtgcac

SEQ ID NO: 281207 - DNA, 75 bp, synthetic construct
  source 1..75: mol_type = other DNA
atgccgattgtgcgtatcttatcggtcatttttatcgaattctggcgcggcgtgccgctgattaccgttctgttt

SEQ ID NO: 281208 - DNA, 75 bp, synthetic construct
  source 1..75: mol_type = other DNA
cggcgtctgataaaagaagtatcagtggacattcgatgggcggacatggcgccctgatgattgcgctcagaaacc

SEQ ID NO: 281209 - DNA, 75 bp, synthetic construct
  source 1..75: mol_type = other DNA
atgcgcttctcggaagtggagcagaacgacaaactggaatggctgatccgcaaagacggctgtatgcactgttcc

SEQ ID NO: 281210 - DNA, 75 bp, synthetic construct
  source 1..75: mol_type = other DNA
tgccagaacattgccgcgcagcgatttggattgaagccaacgtaaaaggggatgttgatgccctgcgtgcggcca

SEQ ID NO: 281211 - DNA, 75 bp, synthetic construct
  source 1..75: mol_type = other DNA
atcatctacggtgaacaaggcaaacccgcattcgcatcggaaacgccgctatggttcaacttaagccatagcggt

SEQ ID NO: 281212 - DNA, 75 bp, synthetic construct
  source 1..75: mol_type = other DNA
cgggcgcgaagtgctgattttcgtgaaacactgaatacccgtcgtgaaaagtcgtggcacaagaccaccgttggg

SEQ ID NO: 281213 - DNA, 75 bp, synthetic construct
  source 1..75: mol_type = other DNA
accgtcggggaagtggtgaaggaaatagctgcgcgtcacaaactgaagatggcactgggtaaagacctgtcggat

SEQ ID NO: 281214 - DNA, 75 bp, synthetic construct
  source 1..75: mol_type = other DNA
atctgttattcatccgacaggggcagggtaaaagcgccagtggtaaaccactaccggttatcactatcacacgta

SEQ ID NO: 281215 - DNA, 75 bp, synthetic construct
  source 1..75: mol_type = other DNA
tgcggaatggaccattacgactctgacgcataccgtcagccccgataacggttttacaaccagtctggagcttga

SEQ ID NO: 281216 - DNA, 75 bp, synthetic construct
  source 1..75: mol_type = other DNA
ggcgtcattgccagctggttgcatacccgtgaacccgcgaagaaagaaagcactacagtgaagcgtaagcgcagg

SEQ ID NO: 281217 - DNA, 75 bp, synthetic construct
  source 1..75: mol_type = other DNA
aatggaccattacgactctgacgcataccgtcagccccgataacggttttacaaccagtattgaactcgaagtga

SEQ ID NO: 281218 - DNA, 75 bp, synthetic construct
  source 1..75: mol_type = other DNA
cccgcgaacctgcgaagaaagaaagcactacagtgaagcgtaatcgcaggaccaagaagcagaagaaagagccgg

SEQ ID NO: 281219 - DNA, 75 bp, synthetic construct
  source 1..75: mol_type = other DNA
gttaaaggtaagccctggtacgataactgctatttctacaatttcgatgaaattccatttcgcggcaaagaggga

SEQ ID NO: 281220 - DNA, 75 bp, synthetic construct
  source 1..75: mol_type = other DNA
gccagctggttgcatacccgcgaacccgcgaagaaagaaagcaccgcggtgaagcgtaagcgcaggactaagaag

SEQ ID NO: 281221 - DNA, 75 bp, synthetic construct
  source 1..75: mol_type = other DNA
ggcacaaactgaagatggcattgggtaaagacctgtcagataaacccgtggaacatatagatcagaccaatgaga

SEQ ID NO: 281222 - DNA, 75 bp, synthetic construct
  source 1..75: mol_type = other DNA
gggcaaaagcgccagcggtaaaccactgccggtgatcactatcacacgtaaggacggcgacagtcaccgctttac

SEQ ID NO: 281223 - DNA, 75 bp, synthetic construct
  source 1..75: mol_type = other DNA
taccgtcagcccggataacggttttacaaccagtattgaacttgaagtgaaaattaatgatcttgaaatggaata

SEQ ID NO: 281224 - DNA, 75 bp, synthetic construct
  source 1..75: mol_type = other DNA
tcaacaacagaaaacaacgtgcctgagctgctcccgataacacttgatgccgaagatgttgtccctacaacctcc

SEQ ID NO: 281225 - DNA, 75 bp, synthetic construct
  source 1..75: mol_type = other DNA
aaataagacgatctttgtcaaagatccaggatgataatcaatacgaacaaatgcttagaaaaaattatccgggtt

SEQ ID NO: 281226 - DNA, 75 bp, synthetic construct
  source 1..75: mol_type = other DNA
tggtgcaggggcgtctgcgcctgaaatcctcgaccagtttcttgacgaaaaagaaggtaaccacaccatggcata

SEQ ID NO: 281227 - DNA, 75 bp, synthetic construct
  source 1..75: mol_type = other DNA
tatgacagcgaagattaccaggaagggatgaacgctttcctcgaaaaacgtaaacctaatttcgttggtcattaa

SEQ ID NO: 281228 - DNA, 75 bp, synthetic construct
  source 1..75: mol_type = other DNA
atgtcgccatcattacgcaaggctgttgcagctgctattggtggtggggctgttgctatagcatctgtgttaatc

SEQ ID NO: 281229 - DNA, 75 bp, synthetic construct
  source 1..75: mol_type = other DNA
atttattccccatagattatccatttgagactttatgttctaggatgaagtccaatcccatcaaactaaaactga

SEQ ID NO: 281230 - DNA, 75 bp, synthetic construct
  source 1..75: mol_type = other DNA
cgtattcgctcaaataactgctacggtcaggtctcacggcgtgaccaggagagcgcgctggcgtgctggggaatc

SEQ ID NO: 281231 - DNA, 75 bp, synthetic construct
  source 1..75: mol_type = other DNA
aacctccgccggtcagtcgcgggcaccgggagaggatgacggtacgcaggcccgtcgtcagccggttcgttacag

SEQ ID NO: 281232 - DNA, 75 bp, synthetic construct
  source 1..75: mol_type = other DNA
cacgccactggcggcatggggagccggcggacgcacggtggtggcactgaagctcaccagtacggtcagccgtaa

SEQ ID NO: 281233 - DNA, 75 bp, synthetic construct
  source 1..75: mol_type = other DNA
ggttaatacacatctgcccgggaaaatcaccacactctatccgtcagagccactgacagtcacgccactggcagc

SEQ ID NO: 281234 - DNA, 75 bp, synthetic construct
  source 1..75: mol_type = other DNA
gagcgtgtgaggcgattcgctggtggattaaggacggtggcagagactgccgtatccgttcaaacaactgttacg

SEQ ID NO: 281235 - DNA, 75 bp, synthetic construct
  source 1..75: mol_type = other DNA
gtggcgcatttgaaatgatcatgagttccgatctgattatcgccgccagtacctcaaccttctcaatgacgcctg

SEQ ID NO: 281236 - DNA, 75 bp, synthetic construct
  source 1..75: mol_type = other DNA
tctggaccatctgccgtggagccacccgggtggatggtaagcctgttattcctggcatgaagctgtcgaaggaaa

SEQ ID NO: 281237 - DNA, 75 bp, synthetic construct
  source 1..75: mol_type = other DNA
tggagataggtgattttccggttacattaatccattaccctgtcaaagaaattatcggtttgcccatatttctcc

SEQ ID NO: 281238 - DNA, 75 bp, synthetic construct
  source 1..75: mol_type = other DNA
actgaccaacatgcgtgcttccggtactgacgaagccgttgttctggttccgcctatccgcatgactctggaaca

SEQ ID NO: 281239 - DNA, 75 bp, synthetic construct
  source 1..75: mol_type = other DNA
tctatccgtattcgtaaacgtcacctgacggaaaacgatcgtcgtcgcgctaaccgcgcaccgaaagacgattaa

SEQ ID NO: 281240 - DNA, 75 bp, synthetic construct
  source 1..75: mol_type = other DNA
gaaaacgtgactctggacgttgaagaacagcatcagggttctgtgatgcaggcgctgggcgaacgtaaaggcgac

SEQ ID NO: 281241 - DNA, 75 bp, synthetic construct
  source 1..75: mol_type = other DNA
cgtattcgttcaaataactgttacggtcaggttattcgtcgggatcaggaagcggcgctgacatgctggggtatc

SEQ ID NO: 281242 - DNA, 75 bp, synthetic construct
  source 1..75: mol_type = other DNA
gcccgtataacattggccccggtaagtgtttcccgtcgacgttttataaacgaattaatgcaggcgatcgcaggg

SEQ ID NO: 281243 - DNA, 75 bp, synthetic construct
  source 1..75: mol_type = other DNA
gtcggtaaagtgctgggccacctcggtctggaacgtatcgaaaccgatctggcggaagctggcgatatcgtggcg

SEQ ID NO: 281244 - DNA, 75 bp, synthetic construct
  source 1..75: mol_type = other DNA
atggtaagcctgtcgtccctggcatgaagctgtcgaaggaaaaatgcgaccaggttaacgccattgaacgggata

SEQ ID NO: 281245 - DNA, 75 bp, synthetic construct
  source 1..75: mol_type = other DNA
gattttgaaagagcgcgaagaaactaaaggaaatggatttgtcataccacttggtacaattatgccctccccctg

SEQ ID NO: 281246 - DNA, 75 bp, synthetic construct
  source 1..75: mol_type = other DNA
cgcatacgttcaaataactgctatggacaggttattcgtcgtgaccaggaaagcgcattagcctgttggggaata

SEQ ID NO: 281247 - DNA, 75 bp, synthetic construct
  source 1..75: mol_type = other DNA
aaaacaccgctatcaaatggaatgattaccgtattaacatcgttgataccccggggcacgccgacttcggtggtg

SEQ ID NO: 281248 - DNA, 75 bp, synthetic construct
  source 1..75: mol_type = other DNA
aaactccttcaggaattacatggtttggaatccatttcacccaaaagaattctggtaaaggtcgaaaaactttgc

SEQ ID NO: 281249 - DNA, 75 bp, synthetic construct
  source 1..75: mol_type = other DNA
tctcacggcgtgaccaggtgaaccgccccgggtttcctggagagtattttatctgtgaactcaggctgccagatc

SEQ ID NO: 281250 - DNA, 75 bp, synthetic construct
  source 1..75: mol_type = other DNA
gtgacggcgggcagtccggagaaggcgtttgtggaagagcctgtgacgtcccgcaggggcggggaggtgacgcat

SEQ ID NO: 281251 - DNA, 75 bp, synthetic construct
  source 1..75: mol_type = other DNA
tgctgcaggcgcgtctgctcctcaaatacttgaccagtttctggatgaaaaagagggtaaccacactacggcata

SEQ ID NO: 281252 - DNA, 75 bp, synthetic construct
  source 1..75: mol_type = other DNA
gatattaaatcctggtggttggtcggtgcggtactgacgatattaaccttcctggtgcatatcaccctcggcgtg

SEQ ID NO: 281253 - DNA, 75 bp, synthetic construct
  source 1..75: mol_type = other DNA
ctgctcgcgatgatttgcgtcagatcataacttacatcgccaaggagaacccaccggcagcgcgcagactaaaaa

SEQ ID NO: 281254 - DNA, 75 bp, synthetic construct
  source 1..75: mol_type = other DNA
ggaagagacattaaaagaagccacggataagggcgaagtaaaaatcactggaaatgcggaaaaactcaacgaact

SEQ ID NO: 281255 - DNA, 75 bp, synthetic construct
  source 1..75: mol_type = other DNA
gcaatgcagagaaactcaacgaaatgttaggctatatggataattttgaattctggttcaatattgtgacgccat

SEQ ID NO: 281256 - DNA, 75 bp, synthetic construct
  source 1..75: mol_type = other DNA
aagggcgtacaggccagaagcgcgaaagccgccatcaaaaaagagttgttgccggacttttccggctggattgag

SEQ ID NO: 281257 - DNA, 75 bp, synthetic construct
  source 1..75: mol_type = other DNA
acggttgaaagagcatcttcagcggcctgaagaaaaacgccgcgatgagcagttcgcggcgttttacgattattg

SEQ ID NO: 281258 - DNA, 75 bp, synthetic construct
  source 1..75: mol_type = other DNA
gccgcgcgggccgtttatcgtctgtgtcgatacatccggctcaatgggcggctttaacgaacaatgtgcgaaggc

SEQ ID NO: 281259 - DNA, 75 bp, synthetic construct
  source 1..75: mol_type = other DNA
gtagatacatctggctcaatgggcggctttaatgaacagtgcgcgaaagcgttctgtctggccttgatgcgcatt

SEQ ID NO: 281260 - DNA, 75 bp, synthetic construct
  source 1..75: mol_type = other DNA
tctccaccggaatgttgtgtgcttccgcgtcgagcaacgaaaccggctatttaacgcaaaaattctcccgcgcgc

SEQ ID NO: 281261 - DNA, 75 bp, synthetic construct
  source 1..75: mol_type = other DNA
atgttacccattttgtggctaccatctgctcgcgatgatttgcgtcagatcgtagcctatattgctaaggaaaat

SEQ ID NO: 281262 - DNA, 75 bp, synthetic construct
  source 1..75: mol_type = other DNA
aaaaatgaggtgcttgcagcagatgaaatgaaagaaactattcttgatcgcgcggcgcatctaagctgcgcttca

SEQ ID NO: 281263 - DNA, 75 bp, synthetic construct
  source 1..75: mol_type = other DNA
ctgatcgaaactgcagaagatgtcacgcacaccctccacaacacctattcactgcgtggtgccaaaattcgtcaa

SEQ ID NO: 281264 - DNA, 75 bp, synthetic construct
  source 1..75: mol_type = other DNA
atgcagtcatcattacgcaaagctgtcgcaactgctattggtggcggggctattgccatagcatctgtgctcatc

SEQ ID NO: 281265 - DNA, 75 bp, synthetic construct
  source 1..75: mol_type = other DNA
ctttctgcccatacaacatcggccccggaaaatgcttcccgtccacgttctataagcgaattaacgctggagacc

SEQ ID NO: 281266 - DNA, 75 bp, synthetic construct
  source 1..75: mol_type = other DNA
ccgaaaattcagatcaatgtgccggaagataacgacatggtgctcggaatgtatgaacgcctgggatatgaacac

SEQ ID NO: 281267 - DNA, 75 bp, synthetic construct
  source 1..75: mol_type = other DNA
cctgtgctctggggatttcggcggtgttttctgtggccgctctgccgctgccggtgcaggcggtagagctggtcc

SEQ ID NO: 281268 - DNA, 75 bp, synthetic construct
  source 1..75: mol_type = other DNA
tgtcacggcgtgaccgttatcgatggcaggcgtgttgttaagggcatgacggccactgaggaacaatgccggaag

SEQ ID NO: 281269 - DNA, 75 bp, synthetic construct
  source 1..75: mol_type = other DNA
gattgactgcggcgatcttccgcttgcgctgcgtattggtgcgtatgtggtccgtcacaacctcatcatgccgga

SEQ ID NO: 281270 - DNA, 75 bp, synthetic construct
  source 1..75: mol_type = other DNA
gctggcctggtcgaaactcaataactccaacatgacggaatttgagttctttatggagctacgattgcgtggcgt

SEQ ID NO: 281271 - DNA, 75 bp, synthetic construct
  source 1..75: mol_type = other DNA
atgtcgctgtttgaagtgttaatcattctgacgctggggtcagcggcgggagatgtggcgttttatgatgatgtg

SEQ ID NO: 281272 - DNA, 75 bp, synthetic construct
  source 1..75: mol_type = other DNA
tcaaattgccctcttcacttgctaacacctgggcgaatcgcggttattacggttcagtgagccatgatgtgaaag

SEQ ID NO: 281273 - DNA, 75 bp, synthetic construct
  source 1..75: mol_type = other DNA
gctattcttgaaaccaacggtgaaatcagcgtctatttctttgaagatgacaaggtgaagccggggttacttatt

SEQ ID NO: 281274 - DNA, 75 bp, synthetic construct
  source 1..75: mol_type = other DNA
tcagtgtctatttctttgaagatgacaaggtgaaaccgggtttacttattttacccagtgactgtactcagcgtt

SEQ ID NO: 281275 - DNA, 75 bp, synthetic construct
  source 1..75: mol_type = other DNA
ggtgaaaccgggattacttattttacccagtgactgtactcagcgttacaaagtggtgccggagtcggcggacta

SEQ ID NO: 281276 - DNA, 75 bp, synthetic construct
  source 1..75: mol_type = other DNA
atgtcgccatcattacgcaaggctgttgctgctgctattggtggtggggctgttgccatagcgtctgtgctcatt

SEQ ID NO: 281277 - DNA, 75 bp, synthetic construct
  source 1..75: mol_type = other DNA
taaggacggtggcagagactgccgtattcgttcaaacaactgctacggtcaggtatcccgtcgtgaccaggagag

SEQ ID NO: 281278 - DNA, 75 bp, synthetic construct
  source 1..75: mol_type = other DNA
tcaaataactgctacggacaggttattcgtcgtgaccaggaaagcgcattagcttgttgggggatagatcagtga

SEQ ID NO: 281279 - DNA, 75 bp, synthetic construct
  source 1..75: mol_type = other DNA
aggcgctggcatgggtggagaaaaacatcaaagtgccgctgaccgaacctcagaaggcgggcattgcgtcattct

SEQ ID NO: 281280 - DNA, 75 bp, synthetic construct
  source 1..75: mol_type = other DNA
tatcagagtgccgctgaccgaaccccagaaagcggggatcgcgtcattctgtccgtacaacattggtcccggtaa

SEQ ID NO: 281281 - DNA, 75 bp, synthetic construct
  source 1..75: mol_type = other DNA
atgaacgcaaaaatcagatacggcctgtcggctgccgttctggcgctgattgccgcaggggcgcctgcgcctgat

SEQ ID NO: 281282 - DNA, 75 bp, synthetic construct
  source 1..75: mol_type = other DNA
ttctggatgaaaaggaaggtaaccacaccacagcataccgtgatggtgcgggtatctggaccatctgccgtggag

SEQ ID NO: 281283 - DNA, 75 bp, synthetic construct
  source 1..75: mol_type = other DNA
ggcagggactgccgtattcgctcaaataactgttacggtcaggtatcccgtcgtgaccaggagagcgcgctggcg

SEQ ID NO: 281284 - DNA, 75 bp, synthetic construct
  source 1..75: mol_type = other DNA
tggccccggtaagtgtttcccgtcgacgttttacagacggattaatgcaggagatcgaaaaggtgcctgcgaagc

SEQ ID NO: 281285 - DNA, 75 bp, synthetic construct
  source 1..75: mol_type = other DNA
gtgcctgcgaagcgattcgctggtggattaaggacggcggcagagactgccgtattcgttcaaacaactgttacg

SEQ ID NO: 281286 - DNA, 75 bp, synthetic construct
  source 1..75: mol_type = other DNA
atctgccgtggagccacccggggggatggtaagcctgttattcctggcatgaagctgtcgaaggaaaaatgcgac

SEQ ID NO: 281287 - DNA, 75 bp, synthetic construct
  source 1..75: mol_type = other DNA
atgaatctgagtactaaacaaaaacaacacctgaaaggtctggcacatccgctcaagccagttgttctgcttggc

SEQ ID NO: 281288 - DNA, 75 bp, synthetic construct
  source 1..75: mol_type = other DNA
cgtattcgttccaataactgctacggtcaggtatcccggcgagaccaggagagtgcgctggcgtgctggggtatc

SEQ ID NO: 281289 - DNA, 75 bp, synthetic construct
  source 1..75: mol_type = other DNA
tagccactgggaaggttatgaaaccggcactcgcgcagcggcaaaaggcggtatcaccaccatgatcgaaatgcc

SEQ ID NO: 281290 - DNA, 75 bp, synthetic construct
  source 1..75: mol_type = other DNA
cgtgaaggtcgcgtaactgctcatgactatgtggcttcgcgtccggtatttaccgaagtggaagcgattcgccgc

SEQ ID NO: 281291 - DNA, 75 bp, synthetic construct
  source 1..75: mol_type = other DNA
aggcgctggcatgggtggagaaaaacatcagagtgccgctgaccgaaccccagaaagcggggatcgcgtcattct

SEQ ID NO: 281292 - DNA, 75 bp, synthetic construct
  source 1..75: mol_type = other DNA
agctcgcgttgtagatatcgccgttaaaggcggaaaaattgctgctatcggtcaggatctgggcgatgcaaaaga

SEQ ID NO: 281293 - DNA, 75 bp, synthetic construct
  source 1..75: mol_type = other DNA
gaagtgactcgtgcacgtcaggaaggccaggatgttacctgtgaatcctgcccgcattactttgtgctggatacc

SEQ ID NO: 281294 - DNA, 75 bp, synthetic construct
  source 1..75: mol_type = other DNA
gtatcacgaaaaccatcttacgtggtgatgtgatttacgacatcgaacagggcttccctgttgcgccgaaaggtc

SEQ ID NO: 281295 - DNA, 75 bp, synthetic construct
  source 1..75: mol_type = other DNA
cccttgatcaaaaaatctcagatgttctccgtcaaattgatgaaatagaaaaaatacccgacccggagttttcgg

SEQ ID NO: 281296 - DNA, 75 bp, synthetic construct
  source 1..75: mol_type = other DNA
tgtcggctgccgttctggcgctgattgccgctggtgcgtctgcgcctgacattctcgatcagtttctggatgaaa

SEQ ID NO: 281297 - DNA, 75 bp, synthetic construct
  source 1..75: mol_type = other DNA
aggaaggcaagcacaccacagcataccgtgatggtgcgggtatctggaccatctgccgaggtgccatcatggtgg

SEQ ID NO: 281298 - DNA, 75 bp, synthetic construct
  source 1..75: mol_type = other DNA
atctgccgaggtgccatcatggtggatggtaagcctgtgattcctggcatgaagctgtcgaaggaaaaatgcgac

SEQ ID NO: 281299 - DNA, 75 bp, synthetic construct
  source 1..75: mol_type = other DNA
cagaaagcgggtatcgcgtcattctgtccgtataacattggccccggtaagtgttttccgtcgacgttttataaa

SEQ ID NO: 281300 - DNA, 75 bp, synthetic construct
  source 1..75: mol_type = other DNA
agagactgccgtatccgttcaaacaactgttacggtcaggtatcaagacgtgaccaggagagtgcgctggcatgc

SEQ ID NO: 281301 - DNA, 75 bp, synthetic construct
  source 1..75: mol_type = other DNA
atggcaaacctgtcgttccgggcatgaagttgtcgaaggaaaaatgcgacctggttaacgccattgagcgtgata

SEQ ID NO: 281302 - DNA, 75 bp, synthetic construct
  source 1..75: mol_type = other DNA
atctgccgcggtgcaacgatggtggacggtaagccagtcgtaccaggaatgaaactgtcgaaggaaaaatgcgct

SEQ ID NO: 281303 - DNA, 75 bp, synthetic construct
  source 1..75: mol_type = other DNA
attctcgatcagtttctggatgaaaaagaaggtaaccacacaacggcataccgcgatgggtccggcatctggacc

SEQ ID NO: 281304 - DNA, 75 bp, synthetic construct
  source 1..75: mol_type = other DNA
tgaccgaaccacaaaaagcgggtatcgcgtcattttgtccctataacattggccccggtaagtgtttcccgtcga

SEQ ID NO: 281305 - DNA, 75 bp, synthetic construct
  source 1..75: mol_type = other DNA
cgatataccggaaacaacgcgcggcgctctttactcgttcgtttacaacgtgggtgctggcaatttcagaacatc

SEQ ID NO: 281306 - DNA, 75 bp, synthetic construct
  source 1..75: mol_type = other DNA
cagaaagcgggtattgcgtcattctgtccgtacaacattggtcccggtaagtgtttcccgtctacgttttacaga

SEQ ID NO: 281307 - DNA, 75 bp, synthetic construct
  source 1..75: mol_type = other DNA
gaagttgtcgaaggaaaaatgcgaccaggttaacgccattgagcgtgataaagcgctggcgtgggtggagaaaaa

SEQ ID NO: 281308 - DNA, 75 bp, synthetic construct
  source 1..75: mol_type = other DNA
gcccgtacaacatcgggccttcgaaatgcttcacctcaacgttttaccggaaactgaacgccggagaccggaaag

SEQ ID NO: 281309 - DNA, 75 bp, synthetic construct
  source 1..75: mol_type = other DNA
gaagttatcgaaggaaaagtgcgaccaggttaacgccattgaacgtgataaggcgctggagtgggtggagcgcaa

SEQ ID NO: 281310 - DNA, 75 bp, synthetic construct
  source 1..75: mol_type = other DNA
gcagtatcagtgaatttcgagtgccctgagctggccttcgaagaatcgctaaaacgccatgtctctttgttaagc

SEQ ID NO: 281311 - DNA, 75 bp, synthetic construct
  source 1..75: mol_type = other DNA
gcgatgacgctatcgaccgcaccaccgtgccgttcgacccgaccaacagcagttcgtataccgacagctacacca

SEQ ID NO: 281312 - DNA, 75 bp, synthetic construct
  source 1..75: mol_type = other DNA
gcagaccattgaatttcaaaccgacgctgccgcacccatcgacttaaccgttgattactcgacctgtacgcaata

SEQ ID NO: 281313 - DNA, 75 bp, synthetic construct
  source 1..75: mol_type = other DNA
aggggcaggtggtgctggcgactttcccgaatgaaaacggcctggaggcagtgagcggcaccgcatgggtacaaa

SEQ ID NO: 281314 - DNA, 75 bp, synthetic construct
  source 1..75: mol_type = other DNA
attgttttgatggggcgtttcaattccagagtgaattatttataaatgttttgaaagaaacaaagcctaaaattg

SEQ ID NO: 281315 - DNA, 75 bp, synthetic construct
  source 1..75: mol_type = other DNA
taaaccagggtgatatcaaaggcgcatgtgatcagctacggcgctggacatacgctggcggtaagcaatggaaag

SEQ ID NO: 281316 - DNA, 75 bp, synthetic construct
  source 1..75: mol_type = other DNA
cgtgatggtgcgggtatctggaccatctgccgtggtgccacccgggtggatggtaagcctgtgattcctggcatg

SEQ ID NO: 281317 - DNA, 75 bp, synthetic construct
  source 1..75: mol_type = other DNA
aatgtcgagcgagctgcataaattgtacctttcgctggaggcgtcagtagaagaaaagacccgcgatctccacga

SEQ ID NO: 281318 - DNA, 75 bp, synthetic construct
  source 1..75: mol_type = other DNA
aacatcaaagtgccactgactgaaccccagaaagcgggtattgcgtcattctgtccttacaacattggcccaggt

SEQ ID NO: 281319 - DNA, 75 bp, synthetic construct
  source 1..75: mol_type = other DNA
tggcatgggtggagaaaaacatcaaagtgccactgactgaaccccagaaagcgggtattgcgtcattctgtcctt

SEQ ID NO: 281320 - DNA, 75 bp, synthetic construct
  source 1..75: mol_type = other DNA
cgggttaacgccattgaacgtgataaggcgctggcatgggtggcgaaaaacatcaaagtgccactgactgaaccc

SEQ ID NO: 281321 - DNA, 75 bp, synthetic construct
  source 1..75: mol_type = other DNA
aaacccgggcggaaatattgcatggaatttccgcagaggaagtagaacagttgattaagctcattgcaaaacttg

SEQ ID NO: 281322 - DNA, 75 bp, synthetic construct
  source 1..75: mol_type = other DNA
gctgccgttctggcgctgattgccgcaggtgcttctgcgcctgaaatcctcgaccagtttctggatgaaaaggaa

SEQ ID NO: 281323 - DNA, 75 bp, synthetic construct
  source 1..75: mol_type = other DNA
cggctgaatgctggtgaccgcaggggagcgtgtgaggcgattcgctggtggattaaggacggttgcgtattttca

SEQ ID NO: 281324 - DNA, 75 bp, synthetic construct
  source 1..75: mol_type = other DNA
cgaattaatgcaggtgatcgaaaaggtgcctgcgaagcgattcgctggtggattaaggacggtggcagagactgc

SEQ ID NO: 281325 - DNA, 75 bp, synthetic construct
  source 1..75: mol_type = other DNA
catctccgcagaggaactggaacaactgattacgctcatcgcaaaacttgagcataatatcattgagttacaggc

SEQ ID NO: 281326 - DNA, 75 bp, synthetic construct
  source 1..75: mol_type = other DNA
gatttccgcagaggagctggaacaattgattaagctcattgtaaaaattgagcataacatcatagagttacaggc

SEQ ID NO: 281327 - DNA, 75 bp, synthetic construct
  source 1..75: mol_type = other DNA
cagaacgattttgtcgaggtgatgggcaacgtgctggataatgcctgtaaatattgcctcgagtttgtcgaaatt

SEQ ID NO: 281328 - DNA, 75 bp, synthetic construct
  source 1..75: mol_type = other DNA
tggcagtaaacgtctacccggcaacatcgcggatgccaaaattaaccattgtggtggtggataccattccggtgg

SEQ ID NO: 281329 - DNA, 75 bp, synthetic construct
  source 1..75: mol_type = other DNA
gaaaatatcgacaagcaaagccccaccatgacgctaatttatgatgagaacgggcagcttttatgggcgcaacgt

SEQ ID NO: 281330 - DNA, 75 bp, synthetic construct
  source 1..75: mol_type = other DNA
acattgataatgggagtcaacctgttttcgttatgagaccgactaacaatgatgggcaaactgctgtctatacgc

SEQ ID NO: 281331 - DNA, 75 bp, synthetic construct
  source 1..75: mol_type = other DNA
acattgataatgggagtcagcctgttttcgttatgagaccgactaacaatgatggacagactgctatctatacgc

SEQ ID NO: 281332 - DNA, 75 bp, synthetic construct
  source 1..75: mol_type = other DNA
gttcaggggagtggagaggaaattgaaatcaccgtcaagaccaacggcctgcgccgccgtgtgaaagccacccgt

SEQ ID NO: 281333 - DNA, 75 bp, synthetic construct
  source 1..75: mol_type = other DNA
gcactgatcaggaacggtgaagaacgcgggaacatcgccgaagccctgttccaggtcgcaaaaaccgtgaaagca

SEQ ID NO: 281334 - DNA, 75 bp, synthetic construct
  source 1..75: mol_type = other DNA
cagactttccatggcgtgaattacctttttaatatttcatccatgctgcagataaatattcctttatctcatgcc

SEQ ID NO: 281335 - DNA, 75 bp, synthetic construct
  source 1..75: mol_type = other DNA
cagactttccatggcgtgaattacctttttaatatttcatccatgctgcagataaataattcctttatctcatgc

SEQ ID NO: 281336 - DNA, 75 bp, synthetic construct
  source 1..75: mol_type = other DNA
aaaataggacagggcggattccacgacctggtcgatttccttgtaattttacaatccctttatttaaaatatata

SEQ ID NO: 281337 - DNA, 75 bp, synthetic construct
  source 1..75: mol_type = other DNA
atgtacaacgcacatacccgcctcatccccattgtcagcgcttttgcaccggaggagaaatggtcattccagatg

SEQ ID NO: 281338 - DNA, 75 bp, synthetic construct
  source 1..75: mol_type = other DNA
ggaagataaatggtcattccagatgaaattgcttgccggcatgtcggaatttttcatcgggtacggattctggct

SEQ ID NO: 281339 - DNA, 75 bp, synthetic construct
  source 1..75: mol_type = other DNA
gacgcttccttctgatgagcttaaccgtgcgcggctggcgtgggcgatggactttgctgactggccgcaattgac

SEQ ID NO: 281340 - DNA, 75 bp, synthetic construct
  source 1..75: mol_type = other DNA
gcggatctggagaagcgtttcgacccttcaggcgaacagcgtggcatgagtaccggcatcccgtcactcgaccga

SEQ ID NO: 281341 - DNA, 75 bp, synthetic construct
  source 1..75: mol_type = other DNA
aaggccaaagatgggcaagacaacgctgtacgggcagatggcgatcaactgcgcggttcgtgagaaaaagccagc

SEQ ID NO: 281342 - DNA, 75 bp, synthetic construct
  source 1..75: mol_type = other DNA
gttgaggttccggccgatagctccaagctgccggcacgattcccgtacggtgttcacttcttcatcagtgaggac

SEQ ID NO: 281343 - DNA, 75 bp, synthetic construct
  source 1..75: mol_type = other DNA
ctgctggcgccgaaaggtctggttaaaggctctctgttcgtgattggcgcaaggccaaagatgggcaagacaacc

SEQ ID NO: 281344 - DNA, 75 bp, synthetic construct
  source 1..75: mol_type = other DNA
cggcgaggttatggatgactgggtagcagatctggagaaacgatttgacccttcaggcgaacagcgcggtatgag

SEQ ID NO: 281345 - DNA, 75 bp, synthetic construct
  source 1..75: mol_type = other DNA
gtggaagcaacaggtatcgtatttttagtagtgctcttcgtcattatcatgaccgcagcggatatacaaaagaaa

SEQ ID NO: 281346 - DNA, 75 bp, synthetic construct
  source 1..75: mol_type = other DNA
attgaatttatcgttcaggtgttccagctcattcgcggtgggcgcgagccgtcgctgcaatcccgctctttacta

SEQ ID NO: 281347 - DNA, 75 bp, synthetic construct
  source 1..75: mol_type = other DNA
ggaagattattaccaggagcaggggcgcgactgggagcgttacgcgatggtcaaggcgcggattatgggggatag

SEQ ID NO: 281348 - DNA, 75 bp, synthetic construct
  source 1..75: mol_type = other DNA
gaagcgcaaccgctgctgattttaggcatgggtaagctgggcggtggggaactgaatttctcctcagatatcgat

SEQ ID NO: 281349 - DNA, 75 bp, synthetic construct
  source 1..75: mol_type = other DNA
gagcgatcacttaacctggctggcggaagccatgatagatgccgtcgttcagcaggcgtgggttcaaatggttgc

SEQ ID NO: 281350 - DNA, 75 bp, synthetic construct
  source 1..75: mol_type = other DNA
gtgccgcgtcgccgatgattgccagccagctggcgcgttatccattattgctggatgaattgctcgatccaaaca

SEQ ID NO: 281351 - DNA, 75 bp, synthetic construct
  source 1..75: mol_type = other DNA
tggatttcgcggactggccgcaactaaccggggcgctgaccaggcatatgaccaatgtgcgccgggtgtttaacg

SEQ ID NO: 281352 - DNA, 75 bp, synthetic construct
  source 1..75: mol_type = other DNA
ctggcgttcttgctgttacgcagccgcgttgctcacttgcgtaccatcggaaaaatgggcgttgtccccagtttt

SEQ ID NO: 281353 - DNA, 75 bp, synthetic construct
  source 1..75: mol_type = other DNA
accgctggacaatacgttgactaatttgagtggaaaggatgtcgctggtcttctcgcataccttggttttggaga

SEQ ID NO: 281354 - DNA, 75 bp, synthetic construct
  source 1..75: mol_type = other DNA
cagtggtgcctttgaatccctcaacgaacaatagttatttctccttaatcagaagtatggtgactgaaagaacag

SEQ ID NO: 281355 - DNA, 75 bp, synthetic construct
  source 1..75: mol_type = other DNA
cactggcaccgtaacgtctatgcgccactgaaatactcggtggcggaaattttcgacagcatcgacctgacgcaa

SEQ ID NO: 281356 - DNA, 75 bp, synthetic construct
  source 1..75: mol_type = other DNA
tccgtggccctcagcaacaccaccaacgggctggctgaaatgtaacggtgcagcattttcttctgaaatgtaccc

SEQ ID NO: 281357 - DNA, 75 bp, synthetic construct
  source 1..75: mol_type = other DNA
gggagtctgatcccatcaccgacacttcattcacgagggagtatcggtaatactggcgggagtgaaacccgtcca

SEQ ID NO: 281358 - DNA, 75 bp, synthetic construct
  source 1..75: mol_type = other DNA
tggcattacctgacgcacgcggtgatttcattcgtatctgggatgacggacgcgggattgatgtcggacgtaccc

SEQ ID NO: 281359 - DNA, 75 bp, synthetic construct
  source 1..75: mol_type = other DNA
aggtgaaggacgatatcgcccagttgctgaacaaagactggcgggcagcgatttccagctgtgaattgttgcttt

SEQ ID NO: 281360 - DNA, 75 bp, synthetic construct
  source 1..75: mol_type = other DNA
agctcgatcgtattatcagttggggccagcaatccatcgacttgtggatcggctatgaccgccacgtacataaat

SEQ ID NO: 281361 - DNA, 75 bp, synthetic construct
  source 1..75: mol_type = other DNA
tctatgcagttgtcgattgtggcgggtgagctcaaacgcgcagcagatgccgccgaagagggcggtgatgaattt

SEQ ID NO: 281362 - DNA, 75 bp, synthetic construct
  source 1..75: mol_type = other DNA
gctgaacaaagactggcgggcggcgatctccagctgtgaattgttgctttcggaaacttccggaacgctgcgtga

SEQ ID NO: 281363 - DNA, 75 bp, synthetic construct
  source 1..75: mol_type = other DNA
ttattcgtactgcgatcgatatggataaaaaccgcgtctttgctcagcggttacgtcagtcggtacaaacctatt

SEQ ID NO: 281364 - DNA, 75 bp, synthetic construct
  source 1..75: mol_type = other DNA
cgaaaccatcggcgtgcgcgccaataacgcaatcaacgacatggtgcgtcaacgtctgctgaaccgctttaccag

SEQ ID NO: 281365 - DNA, 75 bp, synthetic construct
  source 1..75: mol_type = other DNA
gattatcttggtttgggagaaggctctgcattgcctgttggtgtaccgattccgtggccttctgctactccgccg

SEQ ID NO: 281366 - DNA, 75 bp, synthetic construct
  source 1..75: mol_type = other DNA
aacctctaatcaactgggggtcttaaatggcaaaaagtggatatttgatgcatcctctaaaggtgcacgaagata

SEQ ID NO: 281367 - DNA, 75 bp, synthetic construct
  source 1..75: mol_type = other DNA
acgggctggctgaaatgtaacggtgcagcattttcttctgaaatgtacccaaatctggcaaaggtttacccaacg

SEQ ID NO: 281368 - DNA, 75 bp, synthetic construct
  source 1..75: mol_type = other DNA
gcatcagcagataactctataacgggtattcaaaggacagcggaggataattttaccggggcatggatatcaatg

SEQ ID NO: 281369 - DNA, 75 bp, synthetic construct
  source 1..75: mol_type = other DNA
gaaatggctgaagaaaaaaacggaggaagccgcacagtcactggctgaacacgtacgttcccgtaaccacccgga

SEQ ID NO: 281370 - DNA, 75 bp, synthetic construct
  source 1..75: mol_type = other DNA
gtcagataacgggagtgcctgctgcctcgctgacggcaaaaggcaccgtacaactgagcagtgccatcaacagca

SEQ ID NO: 281371 - DNA, 75 bp, synthetic construct
  source 1..75: mol_type = other DNA
cgctgacggcaaaaggcaccgtacaactgagcagcgccacggacagtcaatcagaaactgaggctgccacgccga

SEQ ID NO: 281372 - DNA, 75 bp, synthetic construct
  source 1..75: mol_type = other DNA
gagggagtttgattccatcaccaacgcttcattcgcgaggaagtattggtaacacaggtggtagtgaaacccgcc

SEQ ID NO: 281373 - DNA, 75 bp, synthetic construct
  source 1..75: mol_type = other DNA
gaacagatgtctgcgggtatttgcgactcaggattacactcccggcagtgcaaatgttggctatatagcttgtgc

SEQ ID NO: 281374 - DNA, 75 bp, synthetic construct
  source 1..75: mol_type = other DNA
aataaattaccagacttacgcggtgaatttatccgtggctgggatgatggacgtagtgcggatgcggggagaaca

SEQ ID NO: 281375 - DNA, 75 bp, synthetic construct
  source 1..75: mol_type = other DNA
ctggccgccacaccgaaagcggtcaaggctgcatacgacctggcagccggcaaggcgcctgccagccacactcac

SEQ ID NO: 281376 - DNA, 75 bp, synthetic construct
  source 1..75: mol_type = other DNA
ggagtgcctgctgcctcgctgacggcaaaaggcaccgtacaattgagcagtgccatcaacagcacgtctgaaata

SEQ ID NO: 281377 - DNA, 75 bp, synthetic construct
  source 1..75: mol_type = other DNA
acccttacagctattggtcgcgctattatcgctaagggcagtataaaagatgtcctcaattaccttggtttagga

SEQ ID NO: 281378 - DNA, 75 bp, synthetic construct
  source 1..75: mol_type = other DNA
cgcgcgttgctatgctctcctactccaccggtacttctggtgcaggtagcgacgtagaaaaagttcgcgaagcaa

SEQ ID NO: 281379 - DNA, 75 bp, synthetic construct
  source 1..75: mol_type = other DNA
agcaaaaaacgccaaagcatctatcttccatatcgaaggtgacccggatcacccggtcaaccgcggagcactttg

SEQ ID NO: 281380 - DNA, 75 bp, synthetic construct
  source 1..75: mol_type = other DNA
tgcgtggtgacattaatcagtcctcgttcgcgtttcgcgtcgcccgtgatggagagagctggtatgaagacgacg

SEQ ID NO: 281381 - DNA, 75 bp, synthetic construct
  source 1..75: mol_type = other DNA
cgttaaagcagccgctatctgtgccgaacgtggtatcgcaacgtgcgtactgctgggtaacccagcagagatcaa

SEQ ID NO: 281382 - DNA, 75 bp, synthetic construct
  source 1..75: mol_type = other DNA
gcgcgcatttctaaactgtgcgaacgtgctttcgctaccggcctgccggtatttatggtgaacaccaacacctgg

SEQ ID NO: 281383 - DNA, 75 bp, synthetic construct
  source 1..75: mol_type = other DNA
gtgtcccgtattattatgctgatccctaccggaaccagcgtcggactgaccagcgtcagcctcggcgttatccgt

SEQ ID NO: 281384 - DNA, 75 bp, synthetic construct
  source 1..75: mol_type = other DNA
aagacgaggacgataaagatgaagatgaagatgaaagtaaagagaataatcaaaaagattccgccgtccgcgata

SEQ ID NO: 281385 - DNA, 75 bp, synthetic construct
  source 1..75: mol_type = other DNA
acgccttatcagtatgccagtagatgtatcagtgctatgggacgaccttaacgccatgaccaaagcagagctact

SEQ ID NO: 281386 - DNA, 75 bp, synthetic construct
  source 1..75: mol_type = other DNA
agtaagcccgctggttactgccgtatctgacccgtcatcaacctatgacgtaaacctgcaaaccgccgccgctgg

SEQ ID NO: 281387 - DNA, 75 bp, synthetic construct
  source 1..75: mol_type = other DNA
aaaatggcggtgagcaaagagtatatgaaagccgtgcgctggacacgacgattgaaggcggaactcagtctctga

SEQ ID NO: 281388 - DNA, 75 bp, synthetic construct
  source 1..75: mol_type = other DNA
aaaaatcatgaaactgtacagtcgaagaatgcagatagagcaaaactttcgggatgaaaaaagtgaacgctttgg

SEQ ID NO: 281389 - DNA, 75 bp, synthetic construct
  source 1..75: mol_type = other DNA
aagaaagatacatccagatcgcatatttatcttcggtgattattctgatgatgccatcgctttccttgagccgtc

SEQ ID NO: 281390 - DNA, 75 bp, synthetic construct
  source 1..75: mol_type = other DNA
gatattactccgcgcattacctgggctgggtttggctttgcatttttagcgttcgtctccttgctggcggcgtga

SEQ ID NO: 281391 - DNA, 75 bp, synthetic construct
  source 1..75: mol_type = other DNA
atgctaacgctggatacgcttaatgtgatgctggccgtcagcgaagagggattgatcgaagagatgatcatcgcg

SEQ ID NO: 281392 - DNA, 75 bp, synthetic construct
  source 1..75: mol_type = other DNA
atgaataaaaaatatgaactggttgttaaggggataaataattacggggataaggttactgttactgtggtactg

SEQ ID NO: 281393 - DNA, 75 bp, synthetic construct
  source 1..75: mol_type = other DNA
atgaatgaccgtgaaacgcgctgttacagcggggaggtgcgggcggaacaatatgataatgccccgacccacatt

SEQ ID NO: 281394 - DNA, 75 bp, synthetic construct
  source 1..75: mol_type = other DNA
attctgcctggcattgatgcgcattgccctcgctgaaaaccggcgctgctttattatgttattttccaccgagat

SEQ ID NO: 281395 - DNA, 75 bp, synthetic construct
  source 1..75: mol_type = other DNA
aaatcaataccgcgcaacgatgcgcagatggaaaccttccgcaccatggtgcgcgaaccggcgacggttcctgag

SEQ ID NO: 281396 - DNA, 75 bp, synthetic construct
  source 1..75: mol_type = other DNA
agatggaaaccttccgcaccatggtgcgcgaaccggcgaccgttcctgagcaggttgatggtctgcaacaaagcg

SEQ ID NO: 281397 - DNA, 75 bp, synthetic construct
  source 1..75: mol_type = other DNA
gtgttgcaggagtatcgcgacattatcaaactgctggggcgtcagagcgttggcccggatgcctccggctgggtg

SEQ ID NO: 281398 - DNA, 75 bp, synthetic construct
  source 1..75: mol_type = other DNA
accgtacgtaatggttggcgtcatgttgactatcgctaccgcgctgccggtagtgactgtcggttctccgctgcc

SEQ ID NO: 281399 - DNA, 75 bp, synthetic construct
  source 1..75: mol_type = other DNA
gtcgtgggccgggtgtgttgcaggagtatcgtgacattatcaaactgctgggccgccagagcgttggcccggatg

SEQ ID NO: 281400 - DNA, 75 bp, synthetic construct
  source 1..75: mol_type = other DNA
actacggctgcggcgacgtctgtcgccacggatgatgtgcatcctgaagtgacggatattccacccgcgcagtaa

SEQ ID NO: 281401 - DNA, 75 bp, synthetic construct
  source 1..75: mol_type = other DNA
tcagaaactgcgccaggatttccttaacagcctgacggtggagatgttaaatcaggatctgcgtcagcagttgtc

SEQ ID NO: 281402 - DNA, 75 bp, synthetic construct
  source 1..75: mol_type = other DNA
ggccgccagagcgttggcccggatgcctctggctgggtgttccgcctgacgccgtatgtgatggtgggcgtcatg

SEQ ID NO: 281403 - DNA, 75 bp, synthetic construct
  source 1..75: mol_type = other DNA
gaaatcaaaaaacgattcgacaatagattctggcgcgtaattgctgaatgcgatcgccgccgcctcatcggtcgt

SEQ ID NO: 281404 - DNA, 75 bp, synthetic construct
  source 1..75: mol_type = other DNA
ccgatggggcctccggggccagcaggcgacgcaggaaacagcacagtaaaaggcattcgtctgggaaatgagatg

SEQ ID NO: 281405 - DNA, 75 bp, synthetic construct
  source 1..75: mol_type = other DNA
ggaccagctggcccggcaggcccacagggggttgccggaagggacggcaatgtttccaccgggaaatatgcggtt

SEQ ID NO: 281406 - DNA, 75 bp, synthetic construct
  source 1..75: mol_type = other DNA
acaggcgtggcacgctcgtttgaaattctggtaccggttctggccgtcgtcgttaccctgcacccactcaatctt

SEQ ID NO: 281407 - DNA, 75 bp, synthetic construct
  source 1..75: mol_type = other DNA
gctgataaaaatggtaatcctgcgtggattgatatcccgccactctccgctgaacaacagattattcaggctgaa

SEQ ID NO: 281408 - DNA, 75 bp, synthetic construct
  source 1..75: mol_type = other DNA
cgccattacatccttcaaattgccataaaactacagccctgggtagttgcagttcaggacgttgggatgatcagg

SEQ ID NO: 281409 - DNA, 75 bp, synthetic construct
  source 1..75: mol_type = other DNA
tgatcaggatgaatggggggcgcaagcgcggggaatcagagctgcaattaatgccaaacttgatgagccgcataa

SEQ ID NO: 281410 - DNA, 75 bp, synthetic construct
  source 1..75: mol_type = other DNA
tatgcgctgggaaggtgtcagcgatggcctgaaggtgactgccgggagtgttattcagcgcgatgacctggtgca

SEQ ID NO: 281411 - DNA, 75 bp, synthetic construct
  source 1..75: mol_type = other DNA
ttaccgtcactggatggggacgggaacggttggcgttttgattgccagtagcgacctgattaacccgattcttga

SEQ ID NO: 281412 - DNA, 75 bp, synthetic construct
  source 1..75: mol_type = other DNA
acagaccaacagtctgctgaaatgcgccgccgtgaacgcgaggaaccgcagtccaagaagaaaggaggattctga

SEQ ID NO: 281413 - DNA, 75 bp, synthetic construct
  source 1..75: mol_type = other DNA
acgcagccatagtccgggtcaccatcggcgaatacggtggcgatggttttctgaacggcacggtctgtacctgta

SEQ ID NO: 281414 - DNA, 75 bp, synthetic construct
  source 1..75: mol_type = other DNA
ggacagtgatgatgaaacgaaggcagccaccccgaaagcggtgaaagcggcaatggacaaagcggacggatgcct

SEQ ID NO: 281415 - DNA, 75 bp, synthetic construct
  source 1..75: mol_type = other DNA
ttgcttgcaccggcggacaatatctccattgcaaaaaatgaactggcggttctggggacgatttcatggacgtga

SEQ ID NO: 281416 - DNA, 75 bp, synthetic construct
  source 1..75: mol_type = other DNA
acaggatgctgttgattctggaattgccagcgcagaagaaattaacgccttagctgagtggaaaaaataccgggt

SEQ ID NO: 281417 - DNA, 75 bp, synthetic construct
  source 1..75: mol_type = other DNA
aagggcgcggttttgcggtggttgcgggagaagtgcgtaatctggcccagcgtagcgctcaggcggctcgtgaaa

SEQ ID NO: 281418 - DNA, 75 bp, synthetic construct
  source 1..75: mol_type = other DNA
acgggcaaaagatgtgttgagtaatctcaacgaactggacggtttatttcagcagggcgccaccagcatcagcgg

SEQ ID NO: 281419 - DNA, 75 bp, synthetic construct
  source 1..75: mol_type = other DNA
gcaaactgaccatggtcaactgtgccagtccgcactatctgacgcgctttggttatccgcaaagccccgatgatc

SEQ ID NO: 281420 - DNA, 75 bp, synthetic construct
  source 1..75: mol_type = other DNA
ttaaaaccagtattcaaagaggtattgctgaagatgctttgattaaaataattgaatcattagatgataaatctg

SEQ ID NO: 281421 - DNA, 75 bp, synthetic construct
  source 1..75: mol_type = other DNA
gcgtgggtggtgatttttacgagatgagtaaccgagcacaggagatcacagcatcaggcttatcgttgacggcac

SEQ ID NO: 281422 - DNA, 75 bp, synthetic construct
  source 1..75: mol_type = other DNA
cagctggggttttccacggccattgatatttatcttctcgaccaggcattattcataccgcatctcaaatgcggg

SEQ ID NO: 281423 - DNA, 75 bp, synthetic construct
  source 1..75: mol_type = other DNA
gatgaactactttcggctctgttatctgaagcctccaaaatgggggctaatgctatagtaaactttcaatatatt

SEQ ID NO: 281424 - DNA, 75 bp, synthetic construct
  source 1..75: mol_type = other DNA
ctctgcaaaatatcataatgaagatgatgaacttctttccatattgttatctgaagcttccaagatgggggccaa

SEQ ID NO: 281425 - DNA, 75 bp, synthetic construct
  source 1..75: mol_type = other DNA
atagtctggagacaggatgcttttgatgcggaaatcgcgacggcagaagaaaccgccgcgttatctgaatggaaa

SEQ ID NO: 281426 - DNA, 75 bp, synthetic construct
  source 1..75: mol_type = other DNA
catttccctggtttaccctcagcgtcgggagctttcccgccgtgtaaacctgtttatgcagtgggttgcaggcgt

SEQ ID NO: 281427 - DNA, 75 bp, synthetic construct
  source 1..75: mol_type = other DNA
gcaaactgacgatggtcaactgcgccagtccgcactatctgacgcgctttggttatccgcaaagtcccgacgacc

SEQ ID NO: 281428 - DNA, 75 bp, synthetic construct
  source 1..75: mol_type = other DNA
atgtattgatatctgttctcgttgctacagataacattaagtcactaaaaaaagcctaccccaactattttggct

SEQ ID NO: 281429 - DNA, 75 bp, synthetic construct
  source 1..75: mol_type = other DNA
gaagtatgccgcagacctgcaaaatcagcagttcaacaccatcatgaacaacctgaagccgtttactcctctggc

SEQ ID NO: 281430 - DNA, 75 bp, synthetic construct
  source 1..75: mol_type = other DNA
ggagcacaacttggcagcattgttcctggtattggtactggtattggtgccgctgttggtggcggtcttggtctg

SEQ ID NO: 281431 - DNA, 75 bp, synthetic construct
  source 1..75: mol_type = other DNA
ggcaaacatatgccaacaacatgagccagatttcacagcaaagcgcggcactggcggcggcaaacgctaatagac

SEQ ID NO: 281432 - DNA, 75 bp, synthetic construct
  source 1..75: mol_type = other DNA
tgttaaccagcttcagaatctttccagtttagaaggtcaggggcaggcacttaatcagtattacaactctcagca

SEQ ID NO: 281433 - DNA, 75 bp, synthetic construct
  source 1..75: mol_type = other DNA
tctggcaaacgttgggcttggtgcgctgcaaggtcaggcaaacgccgggcagacgtacgccaacaacatgagcag

SEQ ID NO: 281434 - DNA, 75 bp, synthetic construct
  source 1..75: mol_type = other DNA
acagcaggcggcagcatctgcggcgaatgctaaccgaccatcaggattgcaatcagctttgggcggtgccatgag

SEQ ID NO: 281435 - DNA, 75 bp, synthetic construct
  source 1..75: mol_type = other DNA
ccagaatctggcaaatattggtcttggcgcactgcaaggtcaggcaaacgccgggcaaacatatgccaacaacat

SEQ ID NO: 281436 - DNA, 75 bp, synthetic construct
  source 1..75: mol_type = other DNA
ggcgctgctcttggctctattgttccaggacttggcactggattaggtgcggcaattggcggcggacttggcctg

SEQ ID NO: 281437 - DNA, 75 bp, synthetic construct
  source 1..75: mol_type = other DNA
gtccttcgggtggttactgattttggtgtggatctgtttgttataaaaaaatataatgattctacagataaaata

SEQ ID NO: 281438 - DNA, 75 bp, synthetic construct
  source 1..75: mol_type = other DNA
cggaggtgcgtctggtgctattgctggggctggacttgcgaaattaattggttcatcaactccgtggggggctgc

SEQ ID NO: 281439 - DNA, 75 bp, synthetic construct
  source 1..75: mol_type = other DNA
gctggggccggacttgcgaaattaattggttcatcaactccgtggggggctgcgatcggcggcggtcttggtctg

SEQ ID NO: 281440 - DNA, 75 bp, synthetic construct
  source 1..75: mol_type = other DNA
gaccttccggccttcaatctgcaataggcggggctgcctctggagcaattgctggagcacaacttggcagcattg

SEQ ID NO: 281441 - DNA, 75 bp, synthetic construct
  source 1..75: mol_type = other DNA
atgttgttagaacaggggtggctggtcggcgcgcgccgcgttccctcaccacattacgattgtcgcccggatgac

SEQ ID NO: 281442 - DNA, 75 bp, synthetic construct
  source 1..75: mol_type = other DNA
gagcagcattgcacagcaaagcgcagctcttgccgctgctaatgccaacaaaccatcaagtcttcagacagcaat

SEQ ID NO: 281443 - DNA, 75 bp, synthetic construct
  source 1..75: mol_type = other DNA
cgcagacctgcaaaatcagcagtggcagacgatcatgaaaaaccttgctccgttcacgccgcttgcggagcagta

SEQ ID NO: 281444 - DNA, 75 bp, synthetic construct
  source 1..75: mol_type = other DNA
actcccagcagtataaagaccttgcagggcaggcgcgttaccagagtctggcagcagcagaggcaacgggtggat

SEQ ID NO: 281445 - DNA, 75 bp, synthetic construct
  source 1..75: mol_type = other DNA
tatcaatctaaaaaacaccgtgattcatggcggaaacttcaacaaggagatgtccgaggtggcaagttgcattca

SEQ ID NO: 281446 - DNA, 75 bp, synthetic construct
  source 1..75: mol_type = other DNA
caacaatctggcaaacgttggtcttggtgctctgcaaggtcaggcaaacgccgggcagacgtacgccaacaacat

SEQ ID NO: 281447 - DNA, 75 bp, synthetic construct
  source 1..75: mol_type = other DNA
atgttaattttccagattgccaataagcacctcagcaaagctgtttactgcaaaggcggcagcgactccggatct

SEQ ID NO: 281448 - DNA, 75 bp, synthetic construct
  source 1..75: mol_type = other DNA
aacgccggacagaactacgctaacaacgtgagccaattgtatcaacagcaggcggcagcatctgcggcgaatgct

SEQ ID NO: 281449 - DNA, 75 bp, synthetic construct
  source 1..75: mol_type = other DNA
atgcgctcggtatgctgcatgacaaactctcgaccaaaggcgtgaagttcgtcggctactggccaacggaaggat

SEQ ID NO: 281450 - DNA, 75 bp, synthetic construct
  source 1..75: mol_type = other DNA
atgatttttctattgggattgagctggaaggtactgacacgctggcgtacaccgatgcgcagtatcaacagcttg

SEQ ID NO: 281451 - DNA, 75 bp, synthetic construct
  source 1..75: mol_type = other DNA
acgtcagccaactgtatcaacagcaggcggcagcatctgcggctaatgcgaataaaccatcaggatttcagagcg

SEQ ID NO: 281452 - DNA, 75 bp, synthetic construct
  source 1..75: mol_type = other DNA
tgaaatgtggcaaacgaacatgcaaaaccttgcaccgttcacgccactcgctcagcagtacgtatcacagttgca

SEQ ID NO: 281453 - DNA, 75 bp, synthetic construct
  source 1..75: mol_type = other DNA
ccagaatctggcaaatgttggtcttggcgcactgcaaggtcaggcaaacgccgggcagacatatgccaacaacat

SEQ ID NO: 281454 - DNA, 75 bp, synthetic construct
  source 1..75: mol_type = other DNA
actggtgccgctcttggctctattgtccccggacttggtactggattaggagcggcaattggtggcgggcttggc

SEQ ID NO: 281455 - DNA, 75 bp, synthetic construct
  source 1..75: mol_type = other DNA
aaaaacgaggcctggacgtgggagcatcaggcgctggtgcgtgcgcgggtagtgtatggcgatccacagctcact

SEQ ID NO: 281456 - DNA, 75 bp, synthetic construct
  source 1..75: mol_type = other DNA
attgaatttatcgttcaggtgttccagctcattcgcggtgggcgcgaaccgtcgctgcaatcgcgctctttactg

SEQ ID NO: 281457 - DNA, 75 bp, synthetic construct
  source 1..75: mol_type = other DNA
tggttactgaagagagcatattgcagcagctcagccatctggcggagacgctgattgttgcggcgcgtgactggc

SEQ ID NO: 281458 - DNA, 75 bp, synthetic construct
  source 1..75: mol_type = other DNA
tttaatcagcggagaaaacagcgccgccgcgttgctggaaaaaatcaaagctgaacgctcagccagcgggggtaa

SEQ ID NO: 281459 - DNA, 75 bp, synthetic construct
  source 1..75: mol_type = other DNA
caggtgctcgaccatctgatgccgcatctgctaagtgatgtctgtgcgcgtgaagacgctgccgttacgctgtcg

SEQ ID NO: 281460 - DNA, 75 bp, synthetic construct
  source 1..75: mol_type = other DNA
cgttgcaggaagatgacactacgccagtgctggcgcatcttagcgaggacgatcgcaaacaggtgctgacgctga

SEQ ID NO: 281461 - DNA, 75 bp, synthetic construct
  source 1..75: mol_type = other DNA
gaccggggcgctgaccgcacatatgaccaatgtgcgccgggtgtttaatgaattgattggcgacgacgaaagtga

SEQ ID NO: 281462 - DNA, 75 bp, synthetic construct
  source 1..75: mol_type = other DNA
tggtcagacaacgtgcgcattctggaactgctggcgcaaaacgacattatggaagagcaggaagcgatggcgctg

SEQ ID NO: 281463 - DNA, 75 bp, synthetic construct
  source 1..75: mol_type = other DNA
gagggttcggtcatccatattgtgccgcgactggccggtgcagggaaaggcggactgcagattgtgctgggggcg

SEQ ID NO: 281464 - DNA, 75 bp, synthetic construct
  source 1..75: mol_type = other DNA
ctggatgaactgctcgatccaaacactctctaccagccgacggcgaccgatgcttaccgtgatgagttgcgccag

SEQ ID NO: 281465 - DNA, 75 bp, synthetic construct
  source 1..75: mol_type = other DNA
cggctgggagttaggctacagttccgatcttgacctgatcttcctccatgattgcccaatggatgcgatgactga

SEQ ID NO: 281466 - DNA, 75 bp, synthetic construct
  source 1..75: mol_type = other DNA
ttgctgatttccgcaaagagctggataagcgcactattgggccgcgaggacgtcaggtgctcgaccatctgatgc

SEQ ID NO: 281467 - DNA, 75 bp, synthetic construct
  source 1..75: mol_type = other DNA
tgacgcaggtcagaaatctttgtgacgacaaccgtatcaatgccggtgtggtgctttacggtgttctgttcagtg

SEQ ID NO: 281468 - DNA, 75 bp, synthetic construct
  source 1..75: mol_type = other DNA
gatgacttacaagcattctcccgcaaaaaatgaacccgttgcttgttatagcgcattgcttaatgcattgtctaa

SEQ ID NO: 281469 - DNA, 75 bp, synthetic construct
  source 1..75: mol_type = other DNA
ggccagaatctctatcttgacaatatggaggcgactggtttttaccgtgtcgcactgacagaggcgcagccgggc

SEQ ID NO: 281470 - DNA, 75 bp, synthetic construct
  source 1..75: mol_type = other DNA
tgaccggacggcgctttgaacacggggtgacggactgttacaccctgttccgggatgcataccatctggcgggga

SEQ ID NO: 281471 - DNA, 75 bp, synthetic construct
  source 1..75: mol_type = other DNA
caatcaccatgtcgctatattttatctggtatgtattatttgttgagaaatttacggaccgaaaaaatagaggag

SEQ ID NO: 281472 - DNA, 75 bp, synthetic construct
  source 1..75: mol_type = other DNA
ggagtgttctgaacccggtgcctccatcgcaaacatcgccttgggctacagcctcaatgcggctttgttgaataa

SEQ ID NO: 281473 - DNA, 75 bp, synthetic construct
  source 1..75: mol_type = other DNA
tgggttgtttggtggtatggtttcttaaaaaagaataaaagacgaggtgaacaacctaaagtagcaattaccttt

SEQ ID NO: 281474 - DNA, 75 bp, synthetic construct
  source 1..75: mol_type = other DNA
gaaaaaatatggttatcataatgataatacaaaagcgggtgttatcaaaagaaatatgaaaagaaaaattgaaac

SEQ ID NO: 281475 - DNA, 75 bp, synthetic construct
  source 1..75: mol_type = other DNA
tgaacaaggacaacctttttacgatacttcttttaaatttgagcttttttttcctttaataattaaaacattttt

SEQ ID NO: 281476 - DNA, 75 bp, synthetic construct
  source 1..75: mol_type = other DNA
tattaatttctccggagataaatcagacataatttataaagttaatggcctttctatcatacctgaaaatttctt

SEQ ID NO: 281477 - DNA, 75 bp, synthetic construct
  source 1..75: mol_type = other DNA
tttgtggttatctctatcgccgccgggatttccgcactgctgttactgccctttttgaacgcccaggcaccgcgc

SEQ ID NO: 281478 - DNA, 75 bp, synthetic construct
  source 1..75: mol_type = other DNA
gcagccatcgtgggctctttcttcacggccggtgcctcgatggtgttatggggtacagccctgagtgccggcggt

SEQ ID NO: 281479 - DNA, 75 bp, synthetic construct
  source 1..75: mol_type = other DNA
gtgtaatgaagtatttggtgagtttaactttgctggcgaaatagtatggaaaaatagcagcaaaaacgaccaggc

SEQ ID NO: 281480 - DNA, 75 bp, synthetic construct
  source 1..75: mol_type = other DNA
agcagtcatagtgcatggctgacattcatttatcctcgtctttatattgcacgtgaacttttaaaagaggatgga

SEQ ID NO: 281481 - DNA, 75 bp, synthetic construct
  source 1..75: mol_type = other DNA
ccaacaagaagagaacaagaacagtcaaaacctgttaatcaaaggggataacctcgaagtattgaagcatatggt

SEQ ID NO: 281482 - DNA, 75 bp, synthetic construct
  source 1..75: mol_type = other DNA
gcgattcacaagttccgctgtgtgccgcatcttaccgggcggcgctttgagcacggggtgacggactgttacacg

SEQ ID NO: 281483 - DNA, 75 bp, synthetic construct
  source 1..75: mol_type = other DNA
tcgcggggatgactggtggcgtaacggccagaatctctatctggataatctggaggcaactggtttttaccgtgt

SEQ ID NO: 281484 - DNA, 75 bp, synthetic construct
  source 1..75: mol_type = other DNA
atgattgcccagggtaacccgatgccggtgccttacggtgaaatgctggttggttcacgacggatatcccaggac

SEQ ID NO: 281485 - DNA, 75 bp, synthetic construct
  source 1..75: mol_type = other DNA
gcataccatctggcaggcattgatatgccggattttcaccgtgaggatgactggtggtgcaacggtcagaacctt

SEQ ID NO: 281486 - DNA, 75 bp, synthetic construct
  source 1..75: mol_type = other DNA
taaaaagcgcactgccctggtggctggtcagccggggtgacattcacaaattccgctgcgttccgcacctgaccg

SEQ ID NO: 281487 - DNA, 75 bp, synthetic construct
  source 1..75: mol_type = other DNA
actatcgcgtttccactgcgaagcagggtaagagcggtttagggttggcagctcaaagggaagctgtctctgctt

SEQ ID NO: 281488 - DNA, 75 bp, synthetic construct
  source 1..75: mol_type = other DNA
ttagtggcttaccgttaactgaccatgatctcaaacgctttcagaataaggatgacatgggctactatgcttatg

SEQ ID NO: 281489 - DNA, 75 bp, synthetic construct
  source 1..75: mol_type = other DNA
atgaacgaaggctggtatcagatacgtattgccggtgaggataccgcgccggaggcggtgtatgcccgtcttcat

SEQ ID NO: 281490 - DNA, 75 bp, synthetic construct
  source 1..75: mol_type = other DNA
ggagggccgtgattcatattgtaccgcggctggcaggggccgggggaaatggtgtttttcaggttgtgctggggg

SEQ ID NO: 281491 - DNA, 75 bp, synthetic construct
  source 1..75: mol_type = other DNA
acatgattgcacaggggaacccgatgccggtgccttacggtgaaatgctggttggctcacggcgaatctcccagg

SEQ ID NO: 281492 - DNA, 75 bp, synthetic construct
  source 1..75: mol_type = other DNA
cagaaatgcagggtgagattgtcgcgctggtccacagtcatcccggtggtctgccctggctgagtgaagccgaca

SEQ ID NO: 281493 - DNA, 75 bp, synthetic construct
  source 1..75: mol_type = other DNA
catcggtgccgaatcatgccgccatttactgtggtgacggcgagctgctacaccatattcctgaacaactgagca

SEQ ID NO: 281494 - DNA, 75 bp, synthetic construct
  source 1..75: mol_type = other DNA
cgggaattgagatgccggattttcatcgcggggatgactggtggcgtcacggccagaatctctatcttgacaata

SEQ ID NO: 281495 - DNA, 75 bp, synthetic construct
  source 1..75: mol_type = other DNA
atcatcaaatcatcggatgttgaactctctaaagaatcatacagcttaaactggctgggtaagtcctatgcccgt

SEQ ID NO: 281496 - DNA, 75 bp, synthetic construct
  source 1..75: mol_type = other DNA
atttacaccagaacagctttctgatctggcaggtatcgatcttgatgaggctaaacgtatacttgaatttaccac

SEQ ID NO: 281497 - DNA, 75 bp, synthetic construct
  source 1..75: mol_type = other DNA
gcttgagatcgtcaaatcatcggatgttgaactctctaaagagtcatacagcttaaactggctgggtaagtccta

SEQ ID NO: 281498 - DNA, 75 bp, synthetic construct
  source 1..75: mol_type = other DNA
agcagctcgtccccgtggacattgaccgcgtttatatttgcaccgctttccctgccatgctggagaatgcccaag

SEQ ID NO: 281499 - DNA, 75 bp, synthetic construct
  source 1..75: mol_type = other DNA
cgcatctcaccgggcgtcgctttgagcacggggtgacggactgttacacgctgttccgggatgcttatcatctgg

SEQ ID NO: 281500 - DNA, 75 bp, synthetic construct
  source 1..75: mol_type = other DNA
gcgcagcaggtgaaagcagacagtgcaatgtctggcgagttaaagccggtattgaacgactttaaaggcgaaccc

SEQ ID NO: 281501 - DNA, 75 bp, synthetic construct
  source 1..75: mol_type = other DNA
atgcctaatcttcaaaataaagtagagtccaaaccattggatggaaaccatgtaataaagatgttagcaagaaaa

SEQ ID NO: 281502 - DNA, 75 bp, synthetic construct
  source 1..75: mol_type = other DNA
atgtatggataacctacaaaggaaagctaccgggaataattactggttctctgaagactcctccggaatcacaac

SEQ ID NO: 281503 - DNA, 75 bp, synthetic construct
  source 1..75: mol_type = other DNA
gttgataacctacagaggaaaactaccgggaataattacgggttctctgaagactaccaccgctggcctgaagac

SEQ ID NO: 281504 - DNA, 75 bp, synthetic construct
  source 1..75: mol_type = other DNA
gtttttaccgggtgcccctgtcctctgcacaggcgggcgatatcctgctgtgctgctttggcgcatcggtggcca

SEQ ID NO: 281505 - DNA, 75 bp, synthetic construct
  source 1..75: mol_type = other DNA
atgacctttgaatggtggttcgcctacttactgacatcgatcattttaagcctctcgccaggctctggcgcaatc

SEQ ID NO: 281506 - DNA, 75 bp, synthetic construct
  source 1..75: mol_type = other DNA
tttggctgggaattcagcaatggcgcgccgccggagctatcgacctcaagtcgctgtccccaacccaatctcgcc

SEQ ID NO: 281507 - DNA, 75 bp, synthetic construct
  source 1..75: mol_type = other DNA
gcctgaggcatattttcgtattgccccggaagactggctgcgggcacagatgcagggggagattgtggcgctggt

SEQ ID NO: 281508 - DNA, 75 bp, synthetic construct
  source 1..75: mol_type = other DNA
gaatctgctcgcgctgaattgacggcgattaatccggcctggccgaaagcggcattattcaccaccgtgatgcct

SEQ ID NO: 281509 - DNA, 75 bp, synthetic construct
  source 1..75: mol_type = other DNA
ggtgtttcgctcccaaacggaatgaaaatgttgcaacaggagcaaaagataaagaaaaggcatgcttctgccata

SEQ ID NO: 281510 - DNA, 75 bp, synthetic construct
  source 1..75: mol_type = other DNA
cgggcggatatcccgtcgcaggacctggcatgctgcctgccgtatggcggaacaactgaccaccctgcgttaccg

SEQ ID NO: 281511 - DNA, 75 bp, synthetic construct
  source 1..75: mol_type = other DNA
ctctgatttccgccatgaaatgcgttatcagttctggcacgattttctcggcaacgcgccgaccattccgccggt

SEQ ID NO: 281512 - DNA, 75 bp, synthetic construct
  source 1..75: mol_type = other DNA
actgttgcagggtggcgactatgtgatgtttacctacgaaggtctgggaaccggcgtgcaggagtttattctgac

SEQ ID NO: 281513 - DNA, 75 bp, synthetic construct
  source 1..75: mol_type = other DNA
ccagtgctttacggtttgaacgaaacacgtccgagccaggataaagacgacgaacaagaggtgttctacaccacc

SEQ ID NO: 281514 - DNA, 75 bp, synthetic construct
  source 1..75: mol_type = other DNA
gcgattcatattgtgctggttggtgtggggttgggtacgctattttcccgctcagtgattgcgtttgaagtgttg

SEQ ID NO: 281515 - DNA, 75 bp, synthetic construct
  source 1..75: mol_type = other DNA
catctggcggggataacgctgccggattttgtgcgtgaggatgactggtggcgcaacggtcagaacctgtacctg

SEQ ID NO: 281516 - DNA, 75 bp, synthetic construct
  source 1..75: mol_type = other DNA
gaggagcaagaacagaaacaggcagacaatgccccgtcagcgccagcatcacaaaaggccgatcaaacagccgtc

SEQ ID NO: 281517 - DNA, 75 bp, synthetic construct
  source 1..75: mol_type = other DNA
attgctcaggggaacccgatgccggtgccttacggtgaaatgctggttggttcacgacggatatcccaggacatc

SEQ ID NO: 281518 - DNA, 75 bp, synthetic construct
  source 1..75: mol_type = other DNA
gtgccctgtcgctgcaggtgccgggttttcgccgccagatgaacgaaggctggtaccgggtgcgtattgccggtg

SEQ ID NO: 281519 - DNA, 75 bp, synthetic construct
  source 1..75: mol_type = other DNA
tggctgagcgaggcggaccggcggctgcagataaagagcgcactgccctggtggctggtctgccggggtgacatt

SEQ ID NO: 281520 - DNA, 75 bp, synthetic construct
  source 1..75: mol_type = other DNA
ccagcgagcagctggagcacgatattctcgttaatcgccgggaaaaatacgccagccaggttcctgacggtgttg

SEQ ID NO: 281521 - DNA, 75 bp, synthetic construct
  source 1..75: mol_type = other DNA
caggttgtcgaaggtgacgaggtcgacggctggccgctggaggtcgctaaaaaaggtaaaggcgaaggctcgcca

SEQ ID NO: 281522 - DNA, 75 bp, synthetic construct
  source 1..75: mol_type = other DNA
ttgattttcgcggcgcgagtgcaccaggaaatttccggcgactaacgaaacaggttgtcgagggtgacgaagttg

SEQ ID NO: 281523 - DNA, 75 bp, synthetic construct
  source 1..75: mol_type = other DNA
attctgggtggtgtggcgcagatgcttgccccgaaggcaaagacaccggattaccgggcaacggataacggtaaa

SEQ ID NO: 281524 - DNA, 75 bp, synthetic construct
  source 1..75: mol_type = other DNA
tgaaagcgaagggcgaaccactcaaagaaaaaacgtttcataacactacgctcggcgaactctggagcgaagtgg

SEQ ID NO: 281525 - DNA, 75 bp, synthetic construct
  source 1..75: mol_type = other DNA
tagccgaggactgcacctggacccgagacggaatccatttttttgatcatgacggtggcgtcgttcgcgcgccga

SEQ ID NO: 281526 - DNA, 75 bp, synthetic construct
  source 1..75: mol_type = other DNA
tctcaaccgactggtttatgacctgggaacaaaacgttcatgcttcgatgttctgtaatgcatggcagtttttac

SEQ ID NO: 281527 - DNA, 75 bp, synthetic construct
  source 1..75: mol_type = other DNA
gattacttttgatgatattgatactcagtttgacgcgggttgggatgtacttgaatctattcgtaaattctttaa

SEQ ID NO: 281528 - DNA, 75 bp, synthetic construct
  source 1..75: mol_type = other DNA
atgagcaggaaactccgctatggtttatcggctgccgttctggcgctgattggtgcaggggcgtctgcgcctgaa

SEQ ID NO: 281529 - DNA, 75 bp, synthetic construct
  source 1..75: mol_type = other DNA
aatcacggatttatcaataagtctttgcgtgaagttttcgacgttacacgcatgattttgtcagcgaaagaagag

SEQ ID NO: 281530 - DNA, 75 bp, synthetic construct
  source 1..75: mol_type = other DNA
tttgttgaaagtggtttactacaactttccagttgcaagtgctgcggcggtaattttatcacccatgcccatcag

SEQ ID NO: 281531 - DNA, 75 bp, synthetic construct
  source 1..75: mol_type = other DNA
ccgccatcccgggcagtaaaaagacgtaaactttcccagaatcctgccgatattatcccacaactgctggatgaa

SEQ ID NO: 281532 - DNA, 75 bp, synthetic construct
  source 1..75: mol_type = other DNA
atgaacgcaaaaatcagatacggcctgtcggctactgtactagtgctgattggtgcaggcgcgtctgctccgcaa

SEQ ID NO: 281533 - DNA, 75 bp, synthetic construct
  source 1..75: mol_type = other DNA
cgtattcgctcaaataactgttacggtcaggtatcccggagagatcaggagagcgcgctgtcgtgctggggaatc

SEQ ID NO: 281534 - DNA, 75 bp, synthetic construct
  source 1..75: mol_type = other DNA
aggaaggcaaccacaccacggcataccgtgatggtgcaggtatctggaccatctgccgaggtgccatcatggtgg

SEQ ID NO: 281535 - DNA, 75 bp, synthetic construct
  source 1..75: mol_type = other DNA
atctgccgtggagccacccgggtggatggtaagcctgtgattcctggcatgaagctgtcgaaggaaaaatgcgac

SEQ ID NO: 281536 - DNA, 75 bp, synthetic construct
  source 1..75: mol_type = other DNA
atctgccgtggtgccatcctggtggatggcaaacctgtcgttccgggcatgaagttgtcgaaggaaaaatgcgac

SEQ ID NO: 281537 - DNA, 75 bp, synthetic construct
  source 1..75: mol_type = other DNA
cagaaagcggggattgcgtcattctgtccgtacaacattggccccggtaagtgtttcccgtcgacgttttataaa

SEQ ID NO: 281538 - DNA, 75 bp, synthetic construct
  source 1..75: mol_type = other DNA
cacaactggcagagcgtaacgctgagtatgtaacggaaatttcccgacttgagaaagcgtgtgctgcgctggcgg

SEQ ID NO: 281539 - DNA, 75 bp, synthetic construct
  source 1..75: mol_type = other DNA
tctacccccgttccggttttgtcagccagaccgatgatgacaaagcggcagccctggttgcccagcgggtggcgg

SEQ ID NO: 281540 - DNA, 75 bp, synthetic construct
  source 1..75: mol_type = other DNA
cacagcgtgtggcagacattatcacccgcgtcgggcagccccatgtttatcaggtgcttaagggcaaccgccatg

SEQ ID NO: 281541 - DNA, 75 bp, synthetic construct
  source 1..75: mol_type = other DNA
tccctgattggcggcagtattccgggctattcctgtgacaccgcagccaccccgttaatgccttacttcctgagt

SEQ ID NO: 281542 - DNA, 75 bp, synthetic construct
  source 1..75: mol_type = other DNA
atcgtttgtatctgaattgtgtcattctaataataggcagctaaatcttcataacgtgccttttttacacttggt

SEQ ID NO: 281543 - DNA, 75 bp, synthetic construct
  source 1..75: mol_type = other DNA
cccgcaggcgcaggacggcaattatgcctgggcactgtggcagccgtacagctgctgtaagcgcatggggcaaaa

SEQ ID NO: 281544 - DNA, 75 bp, synthetic construct
  source 1..75: mol_type = other DNA
ctgctgccacaccactgatgccttattttctcagcacgctggacagtcttgcctggcgcaccggcatgcctgaat

SEQ ID NO: 281545 - DNA, 75 bp, synthetic construct
  source 1..75: mol_type = other DNA
gtgccgtgtttcctgacggagaccatcaggccgcggaggatggtaatgccgcttttgcgctctggcagccctaca

SEQ ID NO: 281546 - DNA, 75 bp, synthetic construct
  source 1..75: mol_type = other DNA
gacacatttcatcccggaagtggttatttccacctatacggcaccgggtggtaatccctggaaagagatgtcgct

SEQ ID NO: 281547 - DNA, 75 bp, synthetic construct
  source 1..75: mol_type = other DNA
atgactaacagcacagcaattaactatcaggcactacgtgagatagcaaaacaggcaacacaaggcgaatgggtc

SEQ ID NO: 281548 - DNA, 75 bp, synthetic construct
  source 1..75: mol_type = other DNA
tactggctgttctgcaccaaattcagttgcacggtcagaacatcagtgaaagtttcccattatatcccggaagtg

SEQ ID NO: 281549 - DNA, 75 bp, synthetic construct
  source 1..75: mol_type = other DNA
gcctgggcactgtggcagccgtacagctgctgtaagcgcatggggcaaaaatttctgtacagcacaacgttttaa

SEQ ID NO: 281550 - DNA, 75 bp, synthetic construct
  source 1..75: mol_type = other DNA
cggatgcggtggaagaaaacaccggcacccgtaatcacaagtggcagcgcctgaccccttccgtttcttcatcct

SEQ ID NO: 281551 - DNA, 75 bp, synthetic construct
  source 1..75: mol_type = other DNA
caggtcaacgccattgagcgtgataaggcgctggcatgggtggagcgcaatattaaagtaccactgaccgagcca

SEQ ID NO: 281552 - DNA, 75 bp, synthetic construct
  source 1..75: mol_type = other DNA
gcccgtataacattggccccggtaagtgtttcccgtcgacgttttataaacgaattaatgcaggagatcgaaaag

SEQ ID NO: 281553 - DNA, 75 bp, synthetic construct
  source 1..75: mol_type = other DNA
cgtattcgttcaaataactgctatggacaggtctcacggcgtgaccaggagagcgcgctggcgtgctggcgaatt

SEQ ID NO: 281554 - DNA, 75 bp, synthetic construct
  source 1..75: mol_type = other DNA
gactgccgtatccgttcaaataactgctacggtcaggttgttcgccgtgaccaggagagcgcattagcctgttgg

SEQ ID NO: 281555 - DNA, 75 bp, synthetic construct
  source 1..75: mol_type = other DNA
tcggctgccgcgtgcggatgctggaacgtaatccggtggttgccgcattgctcgacgacggcctggcgcgtggtt

SEQ ID NO: 281556 - DNA, 75 bp, synthetic construct
  source 1..75: mol_type = other DNA
ttaaaggcgattatttgccggatgtggtggatgccactgcaggactggggcgcgatgcctttgtgctggcttcag

SEQ ID NO: 281557 - DNA, 75 bp, synthetic construct
  source 1..75: mol_type = other DNA
cggctgaatgccggtgatcgtaagggcgcatgcgaggcgattcgctggtggataaaagatggtgggcgcgattgc

SEQ ID NO: 281558 - DNA, 75 bp, synthetic construct
  source 1..75: mol_type = other DNA
tcgtcttggcgtacgtgcgcgtctggcctcgcaggggtctggtaaatggcagtcttccggtggtgaaaaatcgaa

SEQ ID NO: 281559 - DNA, 75 bp, synthetic construct
  source 1..75: mol_type = other DNA
tggcgcatgctggcatgacccgcagcgtcatcgtctgtaacggctataaagaccgcgaatatatccgcctggcgc

SEQ ID NO: 281560 - DNA, 75 bp, synthetic construct
  source 1..75: mol_type = other DNA
ccacgggcgttcgtgaatccgcgcgtttctatgtggaactgcacaagctgggcgtcaatattcagtgcttcgacg

SEQ ID NO: 281561 - DNA, 75 bp, synthetic construct
  source 1..75: mol_type = other DNA
tgcgaccaggttaatgccattgagcgggataaggcgctggcatgggtggagaaaaacatcaaagtgccactgacc

SEQ ID NO: 281562 - DNA, 75 bp, synthetic construct
  source 1..75: mol_type = other DNA
tgcagaagcaactggatccgcaaaaccgtgcgcatcgtccgataatcgacgaactgcaggaacgtatggcggaca

SEQ ID NO: 281563 - DNA, 75 bp, synthetic construct
  source 1..75: mol_type = other DNA
tattgccacgacaatgcctatgccggagtacgatccagagaatccgccgatgctcggtttctttatggtcggcgc

SEQ ID NO: 281564 - DNA, 75 bp, synthetic construct
  source 1..75: mol_type = other DNA
gatgggttgctggagcctgcgcggttgctggcgaccaaacgcgtggtggtgaagcgcccggactatgcgccgccg

SEQ ID NO: 281565 - DNA, 75 bp, synthetic construct
  source 1..75: mol_type = other DNA
ctacggtctgggagcattcggtcaaaaagcgatggggcgactggatcgtgttacagaagaagtcagcgacaaagc

SEQ ID NO: 281566 - DNA, 75 bp, synthetic construct
  source 1..75: mol_type = other DNA
aggcgctgacattgctgtttggcctgtgggttttcattaccacatggcagattgctgatacgctgttattgcagg

SEQ ID NO: 281567 - DNA, 75 bp, synthetic construct
  source 1..75: mol_type = other DNA
tggaggaatggcagatgcaatcacgaacccggaatggcttagctttattatgtccggcgttatcgccatcattct

SEQ ID NO: 281568 - DNA, 75 bp, synthetic construct
  source 1..75: mol_type = other DNA
aaactgaacgccggagaccgtaaaggcgcatgtgctgaaattcgtcgctggatatatgacggtggtcaggactgc

SEQ ID NO: 281569 - DNA, 75 bp, synthetic construct
  source 1..75: mol_type = other DNA
gcaacgccggggcgaaattgaaactcattccgcgctggctgaacaaggcaagtttgacacagtaagccaggtact

SEQ ID NO: 281570 - DNA, 75 bp, synthetic construct
  source 1..75: mol_type = other DNA
gaacggacatcagcaggattatatggcaatgcagcgtcagctatcgcgggataagccaacgggtaatgaaggctc

SEQ ID NO: 281571 - DNA, 75 bp, synthetic construct
  source 1..75: mol_type = other DNA
tgaaggtttaactgggggcgtaaattggcgtatttcaggataccgtaatgatatcagtgaaatgattaactataa

SEQ ID NO: 281572 - DNA, 75 bp, synthetic construct
  source 1..75: mol_type = other DNA
taaaggatgtgtcaaagacttcgccaccacattctgggcaagaaaacttgattgtactcataaccaatttcctct

SEQ ID NO: 281573 - DNA, 75 bp, synthetic construct
  source 1..75: mol_type = other DNA
gattaaggacggtggcagggactgccgtattcgttcaaacaactgttacggtcaggtatcccgtcgtgaccagga

SEQ ID NO: 281574 - DNA, 75 bp, synthetic construct
  source 1..75: mol_type = other DNA
gaacgcaaattaaatattggactagagaatgtaaagatactaacgaggcgaaattactttcattcgatagaataa

SEQ ID NO: 281575 - DNA, 75 bp, synthetic construct
  source 1..75: mol_type = other DNA
tggcgagtttcaggataccgtaacgatatcagtgaaatgattaactatgatccacatacccttcgttattataac

SEQ ID NO: 281576 - DNA, 75 bp, synthetic construct
  source 1..75: mol_type = other DNA
tctcggtcagttatatggttacaaaggtaatccgaatctcgatccagaaaaaagcaaacagtgggaaggggcgtt

SEQ ID NO: 281577 - DNA, 75 bp, synthetic construct
  source 1..75: mol_type = other DNA
atgagaaatgacggtcaacaatcagggaagcctgctgtcaaccattccaaatacttcaagattgacgttcttgat

SEQ ID NO: 281578 - DNA, 75 bp, synthetic construct
  source 1..75: mol_type = other DNA
atctttcgacggtgatggtatctatgcgtttctgtatgacgacaccgcccatgtaaagcgcctgcaaatgatgaa

SEQ ID NO: 281579 - DNA, 75 bp, synthetic construct
  source 1..75: mol_type = other DNA
cgcccatttgcgcgtctccgctcactgtttgattcgccgtgatggtgaaatagtccagtatgttcctttcgataa

SEQ ID NO: 281580 - DNA, 75 bp, synthetic construct
  source 1..75: mol_type = other DNA
gatgatgcgcgtcacatgtttgatggccgcaaagcagaaaacatccgcatcattaacgtgcgtggcgacagcatg

SEQ ID NO: 281581 - DNA, 75 bp, synthetic construct
  source 1..75: mol_type = other DNA
gagaaagacgagatgaaccgggtattcatcttcgggaaagtcatcgggagcatgccgcagacgtataggaagcat

SEQ ID NO: 281582 - DNA, 75 bp, synthetic construct
  source 1..75: mol_type = other DNA
aaatatgtcagacagtaccgtgcaaccaatacaatcaactgtcagccattcaaaatacttcaagattgacgttct

SEQ ID NO: 281583 - DNA, 75 bp, synthetic construct
  source 1..75: mol_type = other DNA
ggcgcaagtcaaagacgcgttaaccaaaatgcgcgcagcggcgctggatgcgcaaaaagcaacgccgccgaagct

SEQ ID NO: 281584 - DNA, 75 bp, synthetic construct
  source 1..75: mol_type = other DNA
cgctggatgcgcaaaaagcgacgccgccgaagctcgaaggcaaatcaccggacagcccggaaatgaaagacttcc

SEQ ID NO: 281585 - DNA, 75 bp, synthetic construct
  source 1..75: mol_type = other DNA
gatactaccgtcattagaatttatcatttatccattcttgttttgtttttataataccgttgatatgaataaatt

SEQ ID NO: 281586 - DNA, 75 bp, synthetic construct
  source 1..75: mol_type = other DNA
acattacgattgccgcccggatgacgaaacacccaccctgctggtggtgcacaatattagcctgccgccaggcga

SEQ ID NO: 281587 - DNA, 75 bp, synthetic construct
  source 1..75: mol_type = other DNA
cagggattatggcgaatcgcccacgctgccgggttactgtccaccaacgccagggaatgtacccatgccatttaa

SEQ ID NO: 281588 - DNA, 75 bp, synthetic construct
  source 1..75: mol_type = other DNA
gcattaaaagatcatttagctgcctatgaactatcgaaagcgtctgagactgtaagctttaagccaacccgtcag

SEQ ID NO: 281589 - DNA, 75 bp, synthetic construct
  source 1..75: mol_type = other DNA
tgataacaagagctactcaccgtgggacccgatcgagaaagacgagatgaaccgggtgtttatcttcgggaaagt

SEQ ID NO: 281590 - DNA, 75 bp, synthetic construct
  source 1..75: mol_type = other DNA
aagagcttactgggacaccgaagtttatcttcaaccatggaatatatcggacaggatactgtacaggctaaagcg

SEQ ID NO: 281591 - DNA, 75 bp, synthetic construct
  source 1..75: mol_type = other DNA
tacaggtgacgctggatacgctgtcattcgataaatccagggcacagacctgtgggatatggacacctgaagagc

SEQ ID NO: 281592 - DNA, 75 bp, synthetic construct
  source 1..75: mol_type = other DNA
ataccgctgattctggcgtttgcggcatatgaactgtcgacgttaatcacactgacgtttgtggtgtttgcggta

SEQ ID NO: 281593 - DNA, 75 bp, synthetic construct
  source 1..75: mol_type = other DNA
tggacgatgccgttgaaggactggcgaatggcaatgagccgctttattatcgagttcggtgaccgccagggcggt

SEQ ID NO: 281594 - DNA, 75 bp, synthetic construct
  source 1..75: mol_type = other DNA
cggcactgatatcaaaggttaccgatgccgtgatggagcagattgtagaatggcaaaaccgaccactggatgctg

SEQ ID NO: 281595 - DNA, 75 bp, synthetic construct
  source 1..75: mol_type = other DNA
acaggaaaagaagcgattgctctgattaaagcaccgtgggtaacgctggcaacagaagattgtggactgaaattc

SEQ ID NO: 281596 - DNA, 75 bp, synthetic construct
  source 1..75: mol_type = other DNA
atccgggtctgccgggctaccgcccattgcacaggcattaaaagatcatttagctgcctatgaactatcgaaagc

SEQ ID NO: 281597 - DNA, 75 bp, synthetic construct
  source 1..75: mol_type = other DNA
ccgccgccgacaagtggacaggcttccggggcatcccgccctttaccgcccattgcgcaggcattaaaagatcat

SEQ ID NO: 281598 - DNA, 75 bp, synthetic construct
  source 1..75: mol_type = other DNA
taaccggaacagttagcgcagtggcaatgggcgcagtaaatgatgaagtagaactgacgctggctggcggtgcaa

SEQ ID NO: 281599 - DNA, 75 bp, synthetic construct
  source 1..75: mol_type = other DNA
taaccggaacagttagcgcagtagcaatgggcgcggtgaatgatgaagtagaactgacgctggcaggtggtgcaa

SEQ ID NO: 281600 - DNA, 75 bp, synthetic construct
  source 1..75: mol_type = other DNA
ttaaagccccgtgggtaacgctggcaacggaagactgtggactgaaattctctgctcgcaaccagtttgctggca

SEQ ID NO: 281601 - DNA, 75 bp, synthetic construct
  source 1..75: mol_type = other DNA
cataaggggccggaaatgctgttccgcaattacggtaaatacctggctgaatacgacgggaaaaccgcaatggaa

SEQ ID NO: 281602 - DNA, 75 bp, synthetic construct
  source 1..75: mol_type = other DNA
tgaagatcgatggtcaaatggatgagttcttatccaatctgaaatctttaccgcgagacagaaatggcaatatta

SEQ ID NO: 281603 - DNA, 75 bp, synthetic construct
  source 1..75: mol_type = other DNA
gttcttatctaatctgaaatatttaccacgagatagaaatggcaatattatgttgtcagacttaagttctataag

SEQ ID NO: 281604 - DNA, 75 bp, synthetic construct
  source 1..75: mol_type = other DNA
tggctggcaattgactggctgaaaacgcaatacggcgcgccgctacgtacggtcgaagtggtggcgatggcagaa

SEQ ID NO: 281605 - DNA, 75 bp, synthetic construct
  source 1..75: mol_type = other DNA
tttcaagtgcttttatattagctggatgtgatgaaaagccaaaaagtgttgattggtatatggaacatcctaccg

SEQ ID NO: 281606 - DNA, 75 bp, synthetic construct
  source 1..75: mol_type = other DNA
agggccaaaagatcaccgtaacttgcgaaaagatgcagtttttcatcggtgcaccgtctggcagtgactgcacct

SEQ ID NO: 281607 - DNA, 75 bp, synthetic construct
  source 1..75: mol_type = other DNA
actgggaacggcttttggcggtgagctaaaagaaaagggaaaatttatcactaaagagaaagttgcgattgatag

SEQ ID NO: 281608 - DNA, 75 bp, synthetic construct
  source 1..75: mol_type = other DNA
cagtggatgaaaaacggcaacggcaagccggatgcagaggaagcagcagaggcggtgaatgcagcgacacgccaa

SEQ ID NO: 281609 - DNA, 75 bp, synthetic construct
  source 1..75: mol_type = other DNA
taccaaaactaagtatgacatgatcgtcgagaaatattcatctcctgtattaaccgagaagttactggatggtgc

SEQ ID NO: 281610 - DNA, 75 bp, synthetic construct
  source 1..75: mol_type = other DNA
ataacgtgccttttttacacttggtttctcctgaagttttcattgaaagctataggaaacttgacccaatcatca

SEQ ID NO: 281611 - DNA, 75 bp, synthetic construct
  source 1..75: mol_type = other DNA
aataacctgttgttgttacatgacaaaccttcacggccgcagcgggaacataaaggccgaatatcggtgaaggaa

SEQ ID NO: 281612 - DNA, 75 bp, synthetic construct
  source 1..75: mol_type = other DNA
agcgagcttccgacatctccagtggagtggctgacggataatggttcatgctaccgggctaatgaaacacgccag

SEQ ID NO: 281613 - DNA, 75 bp, synthetic construct
  source 1..75: mol_type = other DNA
gagctgaatgatgcggtgacagcggcgaaagctgatgcccagcaggcggtggatggtctgcaggatggtccggtc

SEQ ID NO: 281614 - DNA, 75 bp, synthetic construct
  source 1..75: mol_type = other DNA
aattgtaggaacgcgaaggatgcaatattccgtataaaacaacgtgacgctaaaattccaacctttggagatctt

SEQ ID NO: 281615 - DNA, 75 bp, synthetic construct
  source 1..75: mol_type = other DNA
acaggcaatatcatctttcgagaaggggttaaaaaaaccttcaccagagacgcttacccaaattgcacatatttt

SEQ ID NO: 281616 - DNA, 75 bp, synthetic construct
  source 1..75: mol_type = other DNA
caacccacaatctggagactgacaagcggcaacgcgcgcggctcaacaaaaattgttgaaatagctaatgcattg

SEQ ID NO: 281617 - DNA, 75 bp, synthetic construct
  source 1..75: mol_type = other DNA
gacccgatcgagaaagacgagatgaaccgggtgttcattttcgggaaggttattggcagtatgccgcagacgtat

SEQ ID NO: 281618 - DNA, 75 bp, synthetic construct
  source 1..75: mol_type = other DNA
attaaaggaccaaagcagatgaaggcgctgaataagattttcggctcgttatttatgctggtgggagcgctgtta

SEQ ID NO: 281619 - DNA, 75 bp, synthetic construct
  source 1..75: mol_type = other DNA
tgcatgagaatggaattcttttgaaaaaagaattgttggatgtttttggtctgcctcttcaggatttagttgcaa

SEQ ID NO: 281620 - DNA, 75 bp, synthetic construct
  source 1..75: mol_type = other DNA
gattccagaacacgtcggacgatctgataatgaatctggtaatggggacgatgtttatggtgttgccggcagtct

SEQ ID NO: 281621 - DNA, 75 bp, synthetic construct
  source 1..75: mol_type = other DNA
gggagataaactgaaaagagctaagaaacagcaaaagattctggctacaaaagacaacattgggataaataattg

SEQ ID NO: 281622 - DNA, 75 bp, synthetic construct
  source 1..75: mol_type = other DNA
atgagaaatgacggtcaacaatcagggaaggctgctgtcagccattcaaaatacttcaagattgacgttcttgat

SEQ ID NO: 281623 - DNA, 75 bp, synthetic construct
  source 1..75: mol_type = other DNA
atgagaaatgacggtcaacaatcagggaagcctgctgtcagccattccaaatacttcaaaattgacgttcttgat

SEQ ID NO: 281624 - DNA, 75 bp, synthetic construct
  source 1..75: mol_type = other DNA
aagaaagatcttcaacgtcgcaaaatgagcgcaccgtataaggatttgctggtgaaaaaagtggtcttccagtaa

SEQ ID NO: 281625 - DNA, 75 bp, synthetic construct
  source 1..75: mol_type = other DNA
gttctgatgtcccatgtggcaccggaaattgagtggacggttcgcgtgatctccgcactgctgttgctgggtgtt

SEQ ID NO: 281626 - DNA, 75 bp, synthetic construct
  source 1..75: mol_type = other DNA
gtgaagaagtggcagatcccgcgattcatcaacacggataaagggcactgttgcaaagttagcgatgaggcagcc

SEQ ID NO: 281627 - DNA, 75 bp, synthetic construct
  source 1..75: mol_type = other DNA
atgaacccattcaaaggccggtattttcagcgtgacatcattctgtgggccgtacgctggtactgcaaatacggc

SEQ ID NO: 281628 - DNA, 75 bp, synthetic construct
  source 1..75: mol_type = other DNA
ttgactctgatggatgccgaagcccgcagtcagtgggcaaagaacctggaggagggcgatctcccggcgattagc

SEQ ID NO: 281629 - DNA, 75 bp, synthetic construct
  source 1..75: mol_type = other DNA
gtggcaaagaattactatgacatcaccctcgccctggctggtatttgtcagtcggctcgcctggtgcaacaactc

SEQ ID NO: 281630 - DNA, 75 bp, synthetic construct
  source 1..75: mol_type = other DNA
cgatcgtaaaggtaaagcgaataccggtgtgacactggagccaattaacagccagaatgcgccaaaaggacattt

SEQ ID NO: 281631 - DNA, 75 bp, synthetic construct
  source 1..75: mol_type = other DNA
gcaaaggccaggcctcagcattttattatggtgatcccctgggcgaaatacgcctggtaagcagagtttttgaaa

SEQ ID NO: 281632 - DNA, 75 bp, synthetic construct
  source 1..75: mol_type = other DNA
gtttctgggtaaaatcctcaacaacgtgaagaagtggcagatcccacgatcctcaacacggataaagcgcccgcc

SEQ ID NO: 281633 - DNA, 75 bp, synthetic construct
  source 1..75: mol_type = other DNA
gtcgtaacagcaaagctgcataccggtttctgggtaaaatcctcaacaacgtgaagaagtggcagatcccacgat

SEQ ID NO: 281634 - DNA, 75 bp, synthetic construct
  source 1..75: mol_type = other DNA
tgatgattgtggatgatcatccacttatgcgacgcggtgttcgtcagttactggagcttgatcctggctttgaag

SEQ ID NO: 281635 - DNA, 75 bp, synthetic construct
  source 1..75: mol_type = other DNA
acaacgtgattgaatgcgatcatggcaaactgaaacggataatcggcgccacgctgggatttaaatccatgaaga

SEQ ID NO: 281636 - DNA, 75 bp, synthetic construct
  source 1..75: mol_type = other DNA
cacatggatgaaaccaacgtgaaggtcaatcgccgctgggcgtatctgtaccgggccgtcgacagccggggccgc

SEQ ID NO: 281637 - DNA, 75 bp, synthetic construct
  source 1..75: mol_type = other DNA
gtatttaaagggttaagctgggactacaaaaccaataatccctgttatttcggtaagaagattatcgttaacaat

SEQ ID NO: 281638 - DNA, 75 bp, synthetic construct
  source 1..75: mol_type = other DNA
gcttataccagtctgcttcacgcggataaatctccgctcggcctcgccgatgagcacatcgagacggagaaaatg

SEQ ID NO: 281639 - DNA, 75 bp, synthetic construct
  source 1..75: mol_type = other DNA
ctcagcaacgcgggcagattatgcagccgctgccgcgcgcgtgattagcgaagctggtcacgaaggcaaggttta

SEQ ID NO: 281640 - DNA, 75 bp, synthetic construct
  source 1..75: mol_type = other DNA
ctccaaggcggaggtgctggaaaatatcaaaaacaatttcgacgcgtttcttgctctgacaccagaaacaaaagc

SEQ ID NO: 281641 - DNA, 75 bp, synthetic construct
  source 1..75: mol_type = other DNA
gccaacttggtcattatgttattaactccttactgaaaacagttcctgccagccaaatagtggctatcgctcgta

SEQ ID NO: 281642 - DNA, 75 bp, synthetic construct
  source 1..75: mol_type = other DNA
acagcaaaacgctgagcaaattgattggccgcccaacgacaacattagccgagagcgtaagccatctttttaatg

SEQ ID NO: 281643 - DNA, 75 bp, synthetic construct
  source 1..75: mol_type = other DNA
atccggcaaaagcccaggcactgacagcacaaggcattaccgtgcgtcaggctgactacggcgatgaagccgcac

SEQ ID NO: 281644 - DNA, 75 bp, synthetic construct
  source 1..75: mol_type = other DNA
atgtatatggtcactggcctggcgtgggtgatatgcgacattctgatgaaccggcttccggtgaactgctttcgt

SEQ ID NO: 281645 - DNA, 75 bp, synthetic construct
  source 1..75: mol_type = other DNA
ttactttgaaagagatcaaccgggttaagattatacaggacgtcatcgaacgtcgcatcacaacgcgtcgtgcgg

SEQ ID NO: 281646 - DNA, 75 bp, synthetic construct
  source 1..75: mol_type = other DNA
aagttggagtcattaccgtatcagagcaacagcaaagttaaagtaatcaagggtactttctggctcctgtttaaa

SEQ ID NO: 281647 - DNA, 75 bp, synthetic construct
  source 1..75: mol_type = other DNA
accattccgcaaagccacatataccaacttcccagaaattgacccacgcctgcgtaattaccgctcacgctatgg

SEQ ID NO: 281648 - DNA, 75 bp, synthetic construct
  source 1..75: mol_type = other DNA
tgaagctgtgctggcaggctctggccgcgtggccaggcatgtgctggataaaggtgcgatagaaggcattcaaac

SEQ ID NO: 281649 - DNA, 75 bp, synthetic construct
  source 1..75: mol_type = other DNA
agataatacgatccttgaagagttccttccgcgtttgtttgatgcgcgccttattccaggctttgcaaggcaaag

SEQ ID NO: 281650 - DNA, 75 bp, synthetic construct
  source 1..75: mol_type = other DNA
ttagcccgtctgccgctgcaatcgaaaccgctgaaactaagccgatggataagcaaactacagctcgcagtaaac

SEQ ID NO: 281651 - DNA, 75 bp, synthetic construct
  source 1..75: mol_type = other DNA
ctgcgcgcctcctgccggcgcatggaagcagcgggctggctgcgcaccctgcgcgcgcctaaccagcagctggcc

SEQ ID NO: 281652 - DNA, 75 bp, synthetic construct
  source 1..75: mol_type = other DNA
ggcgatccgctggacgtggcgcagtggctgcatgcctgtcacgatgccggaatagaagttcgtgtacaggttaat

SEQ ID NO: 281653 - DNA, 75 bp, synthetic construct
  source 1..75: mol_type = other DNA
cgtatcaggcctgccgtggggattttgtggtgcgtctcgacggcagcacctgtctgcagttatggaataaagaag

SEQ ID NO: 281654 - DNA, 75 bp, synthetic construct
  source 1..75: mol_type = other DNA
atctgcgcgcctcctgccggcgcatggaagcatcaggctggcttcgcaccctgcgcgccccgaatctgcagctga

SEQ ID NO: 281655 - DNA, 75 bp, synthetic construct
  source 1..75: mol_type = other DNA
atgacgtaggaatggagattcgtgtgcaggttaatgaaagtactgtcacgcaaggggacccggagcaaagcggca

SEQ ID NO: 281656 - DNA, 75 bp, synthetic construct
  source 1..75: mol_type = other DNA
ggagggcgatccgctggaagtggcgcagtggctgcaggcctgtcatgatgccggaataaaagttcgtgtacaggt

SEQ ID NO: 281657 - DNA, 75 bp, synthetic construct
  source 1..75: mol_type = other DNA
cgaacaggcgcgcgtcctagcggagcagcgcgcggcagaagtcgtcgtactgccgctggtcccggtatcagctcc

SEQ ID NO: 281658 - DNA, 75 bp, synthetic construct
  source 1..75: mol_type = other DNA
atggaccagatggcagaaaacacaccagaagttgaaatcgaaaccgatgcgtcagagcagattcctgatgatgtc

SEQ ID NO: 281659 - DNA, 75 bp, synthetic construct
  source 1..75: mol_type = other DNA
aggaagctgagcaggccgtactcgaggaaatccccatcgagacacaaaacgcgatcctgtttgagtcagagaagc

SEQ ID NO: 281660 - DNA, 75 bp, synthetic construct
  source 1..75: mol_type = other DNA
ccgtggcacagcctctgctgctggcagaacaggaccgcctccgggcagaacagcgcgcggcagaagtcgtcgtac

SEQ ID NO: 281661 - DNA, 75 bp, synthetic construct
  source 1..75: mol_type = other DNA
atcaggcctgccgtggggattttgtggtgcgtctcgacggcagcacctgtctgcagggcactgttgcaaatagtc

SEQ ID NO: 281662 - DNA, 75 bp, synthetic construct
  source 1..75: mol_type = other DNA
ccgaacacactcagggcgacacagacgccgaaagcgtctttttttgtgtccgatcactacgcacatcaaatcagc

SEQ ID NO: 281663 - DNA, 75 bp, synthetic construct
  source 1..75: mol_type = other DNA
attctcttattgtgttttattggcatgatcttagcggccataataactaaactaacgtttgtagcgttagcatgg

SEQ ID NO: 281664 - DNA, 75 bp, synthetic construct
  source 1..75: mol_type = other DNA
gacgttccggcgctacgcgagattttacaacgtactggaatgctggaaggggggccgaaaatagctcttccagga

SEQ ID NO: 281665 - DNA, 75 bp, synthetic construct
  source 1..75: mol_type = other DNA
ggctgtcagtgaacagggcgaggcactgccgcaggcgcaagccacggcaataatggcggggatccagccattgcc

SEQ ID NO: 281666 - DNA, 75 bp, synthetic construct
  source 1..75: mol_type = other DNA
ggaccaggggcggatagtcgagcagggggccgcaaaagcgttatttgccgatccccagcagcctcgcacccgcca

SEQ ID NO: 281667 - DNA, 75 bp, synthetic construct
  source 1..75: mol_type = other DNA
gacgtaccggcgttgcgcgaaatattgcaacgcacaggcatgctggacggggggccgaaaattactctacctggc

SEQ ID NO: 281668 - DNA, 75 bp, synthetic construct
  source 1..75: mol_type = other DNA
aagtaatccctggcgacagcccggtggctgtcagcgaacagggagatgtactgccgcaagcgcaagcgacggcaa

SEQ ID NO: 281669 - DNA, 75 bp, synthetic construct
  source 1..75: mol_type = other DNA
taggtgcggatggcactattggtccggctacgcgtgactggttaaacgtcaccccggctcagcgtgccggggttc

SEQ ID NO: 281670 - DNA, 75 bp, synthetic construct
  source 1..75: mol_type = other DNA
cgcgagctgctggcgaaagttgggctggccggtaaagaaaccagctatccacgtcgtttgtctggcggtcaacag

SEQ ID NO: 281671 - DNA, 75 bp, synthetic construct
  source 1..75: mol_type = other DNA
gttcctcgagaagtttctgctgcaaaaaaaaaaaaaaaccccccccgacgatcccccggggggggcgggacgcca

SEQ ID NO: 281672 - DNA, 75 bp, synthetic construct
  source 1..75: mol_type = other DNA
tatgaactggattgctaccgttgtgaaccgttccacatcgactttcgcgacaaatacgcgtgcgctggaagattt

SEQ ID NO: 281673 - DNA, 75 bp, synthetic construct
  source 1..75: mol_type = other DNA
atgttgcggaccgggcgattttttatggaccaggggcggatagtcgagcagggggtagcaaaagcgttatttgct

SEQ ID NO: 281674 - DNA, 75 bp, synthetic construct
  source 1..75: mol_type = other DNA
acggtgctggaaaacattattgaagggcctgtgatcgttaaaggcgaaccgaaagaagaggccacgacacgcgcc

SEQ ID NO: 281675 - DNA, 75 bp, synthetic construct
  source 1..75: mol_type = other DNA
atgttgcggaccgggcgatttttatggaccaggggcggatagtcgagcagggggcagcaaaagcgttatttgctg

SEQ ID NO: 281676 - DNA, 75 bp, synthetic construct
  source 1..75: mol_type = other DNA
tttctacagtctaatatagataaaaagataaatgtcatcgatttcacgattgaagatcaactgttttgcttcggt

SEQ ID NO: 281677 - DNA, 75 bp, synthetic construct
  source 1..75: mol_type = other DNA
ccgtccagaaagtagtattggccatcgacgtattttgttagagttagttcatcagggggcaattcaatttgcaac

SEQ ID NO: 281678 - DNA, 75 bp, synthetic construct
  source 1..75: mol_type = other DNA
taccatcgacaacatatttgtatgcttcaagaagagcaactcgtgttgctagtttgagaacacttagtgatgtaa

SEQ ID NO: 281679 - DNA, 75 bp, synthetic construct
  source 1..75: mol_type = other DNA
caactacgaacagagaagtgaagcttctttaaacatcctttcattccttttagctagaaatcagccactagctag

SEQ ID NO: 281680 - DNA, 75 bp, synthetic construct
  source 1..75: mol_type = other DNA
cctttggtggatgaaattgttacatgctcctcctcgttaggtttgcaagcgataacatggggacgccatcttaaa

SEQ ID NO: 281681 - DNA, 75 bp, synthetic construct
  source 1..75: mol_type = other DNA
attaaagcaagtatacgacatattacattcaacggatgaaaatgcagttccctcatattatttatatgcctcaag

SEQ ID NO: 281682 - DNA, 75 bp, synthetic construct
  source 1..75: mol_type = other DNA
aagacttctctcccagaagccaggactcagtggcattacagcagattaaagagcgtggcgctttaccgatgattg

SEQ ID NO: 281683 - DNA, 75 bp, synthetic construct
  source 1..75: mol_type = other DNA
aaagaagatgtgctaaggacacataacatacttccaaaagcacatattatttgcacacatatggaatctgtaaat

SEQ ID NO: 281684 - DNA, 75 bp, synthetic construct
  source 1..75: mol_type = other DNA
tcacaggacaggctcgccattcagttgatccgcgaacgcggtgcactggatgacatccgggcgggacgcattgag

SEQ ID NO: 281685 - DNA, 75 bp, synthetic construct
  source 1..75: mol_type = other DNA
atgtcaagcgtagtggtataaataatatatatgacttaccttcatttttatctattgatgaaaaatatgaagaca

SEQ ID NO: 281686 - DNA, 75 bp, synthetic construct
  source 1..75: mol_type = other DNA
gagcgtggcgctttaccgatgattgatcgcggcgatattcgtcaggctatcgaccgttgcagcaatatctgggcg

SEQ ID NO: 281687 - DNA, 75 bp, synthetic construct
  source 1..75: mol_type = other DNA
gtggcgtatacgcggccatatcaaaaatgataaaggcgacatctggacaaaagctgcaaattatcattcaagaac

SEQ ID NO: 281688 - DNA, 75 bp, synthetic construct
  source 1..75: mol_type = other DNA
atgaaagtcaaagctgtgtacatcaataaacctggtgaaattgctacccgtctggtcgattatccagtaagaaaa

SEQ ID NO: 281689 - DNA, 75 bp, synthetic construct
  source 1..75: mol_type = other DNA
accgggctggataaacgcattgcgctgtttactatgtcgaaaataggtgccagcagccgcagcattattatcggt

SEQ ID NO: 281690 - DNA, 75 bp, synthetic construct
  source 1..75: mol_type = other DNA
tggctgccatctatgttgatgttatcagcccgcttggcccgcgcattcaggtcactggttcccctgctgtactgc

SEQ ID NO: 281691 - DNA, 75 bp, synthetic construct
  source 1..75: mol_type = other DNA
atgaaagtcaaagctgtgtacatcaataaacccggtgaaattgccactcgcctggtcgattatccggtaaaaaaa

SEQ ID NO: 281692 - DNA, 75 bp, synthetic construct
  source 1..75: mol_type = other DNA
tgaagttcctgaggctgtaaaagagttagatcaatttccggaacgctatctgaaaattaacgtgaaattcattta

SEQ ID NO: 281693 - DNA, 75 bp, synthetic construct
  source 1..75: mol_type = other DNA
ggacttatggcggcactgagtgcgttgcgctatcacgcaacccccattctggttgatattgtcgatgaacggttg

SEQ ID NO: 281694 - DNA, 75 bp, synthetic construct
  source 1..75: mol_type = other DNA
tttgaaacactgctccgttcatccgaaattcgacgtatacgtctgaaagatctgtctctggatagtatgaccggt

SEQ ID NO: 281695 - DNA, 75 bp, synthetic construct
  source 1..75: mol_type = other DNA
cgatgaagatgaagaagacactgtggacgatgccggtatgctcagcaaaaattcccttttacgagcatttaaaga

SEQ ID NO: 281696 - DNA, 75 bp, synthetic construct
  source 1..75: mol_type = other DNA
atgagcaccttaggtcatcaatacgataactcactggtttccaacgcctttggttttttccccctgccgatgaac

SEQ ID NO: 281697 - DNA, 75 bp, synthetic construct
  source 1..75: mol_type = other DNA
ctatagagtgatgcggggggatgatccggacggaatcgtttggttcccggactgttatccgcaaatttactacta

SEQ ID NO: 281698 - DNA, 75 bp, synthetic construct
  source 1..75: mol_type = other DNA
ttttcgctggtggtggcgctacaagaaataaaattgttgaacttgtaaaatcaaaaaaattggggaacgtaatcc

SEQ ID NO: 281699 - DNA, 75 bp, synthetic construct
  source 1..75: mol_type = other DNA
aaccgtacactcaggagcgggcagaaaaactgattgatttattgcagtcgaaaggcaccaccattgcccgcagcc

SEQ ID NO: 281700 - DNA, 75 bp, synthetic construct
  source 1..75: mol_type = other DNA
gcaaagacgcgcgggaagtaccagaccggggaaggtgaccgggtacactctacatcaaaattacgtaacaaaaac

SEQ ID NO: 281701 - DNA, 75 bp, synthetic construct
  source 1..75: mol_type = other DNA
gcttaccgtaaacagcttggcctgaaagatttttctccagaaagccaggacgttgtagctctgcagcagattaaa

SEQ ID NO: 281702 - DNA, 75 bp, synthetic construct
  source 1..75: mol_type = other DNA
cgagtatatccagatatagaggattataccgttgtctcttttcggggaaaagagtattctgttcgctttattaaa

SEQ ID NO: 281703 - DNA, 75 bp, synthetic construct
  source 1..75: mol_type = other DNA
agttcgagcataaggttgacagtttgattgcaaaattcaaagaagcaggcggaacggtcagagagattgaggtat

SEQ ID NO: 281704 - DNA, 75 bp, synthetic construct
  source 1..75: mol_type = other DNA
agtatgaacatagaatcggtgacctgattgcccgatttaaagaggctggtggggtggtaaatgaagttgagttat

SEQ ID NO: 281705 - DNA, 75 bp, synthetic construct
  source 1..75: mol_type = other DNA
atgcaggcactaaattcacagcgtaaagctttcctggatatggtggcatggtcagaaggaacggataacgggcga

SEQ ID NO: 281706 - DNA, 75 bp, synthetic construct
  source 1..75: mol_type = other DNA
gataaagaaacagagaattatgtgtacaaagtacagaagatgactacggaaaatgggtgtttctcaaagctattt

SEQ ID NO: 281707 - DNA, 75 bp, synthetic construct
  source 1..75: mol_type = other DNA
tcgccggatacgggtttgcaacaggcttcggcaattgtggcttcctggtttggttcgcgctctggctggcgtggt

SEQ ID NO: 281708 - DNA, 75 bp, synthetic construct
  source 1..75: mol_type = other DNA
ctctcgcttcgatttacgcttaccagggaacaccccaatagatacaggcaacaggtgggtaagtgatctgtttaa

SEQ ID NO: 281709 - DNA, 75 bp, synthetic construct
  source 1..75: mol_type = other DNA
aaattaaaccgaccagtggggttggcagaaccgctcctcaactttgcttatggatgggtacgggagaaagagaaa

SEQ ID NO: 281710 - DNA, 75 bp, synthetic construct
  source 1..75: mol_type = other DNA
gtatcgtatctggcgaaagagcgtggaaagtatcagaccggagatggggatcgggtccactcaacatcaaaattg

SEQ ID NO: 281711 - DNA, 75 bp, synthetic construct
  source 1..75: mol_type = other DNA
tatgcactggcgaatcacccgattctgctggcggtgctggcggcaatcagcgtggtgttgctggcctgggtactg

SEQ ID NO: 281712 - DNA, 75 bp, synthetic construct
  source 1..75: mol_type = other DNA
acggtgaccgatgatggcagcaccattcagggcaaagatgccgacatcatgatcgtcggtggtatcccggacaaa

SEQ ID NO: 281713 - DNA, 75 bp, synthetic construct
  source 1..75: mol_type = other DNA
attaccgacttcaaccgtgtgcggctggagtttgtcggtcattatcaggacgtgtgcgaaaacccggccagcacc

SEQ ID NO: 281714 - DNA, 75 bp, synthetic construct
  source 1..75: mol_type = other DNA
gcttaccgcaagcagcttgggctgaaagacttctctcccagaagccaggactcagtggcattacagcagattaaa

SEQ ID NO: 281715 - DNA, 75 bp, synthetic construct
  source 1..75: mol_type = other DNA
cgtgtgacagtgcgaaaaatcatcactgaattgattgacgaaggcgtgctggaaagacgggggaatcagggaacc

SEQ ID NO: 281716 - DNA, 75 bp, synthetic construct
  source 1..75: mol_type = other DNA
gaggcatgtggtgaggcctttctggcgcaggttcgccagcaggcagaaaaactggtcagggagatggcggcatga

SEQ ID NO: 281717 - DNA, 75 bp, synthetic construct
  source 1..75: mol_type = other DNA
tcccgcagttgagcccaactcaattgatgaaatgttcattgatttgcgggggggggcccctattaagttgtcaag

SEQ ID NO: 281718 - DNA, 75 bp, synthetic construct
  source 1..75: mol_type = other DNA
gaattgcaggatgaacatcctgaacagccatccatggatgagctggcgcagaccatccgcaaacaactccaggcc

SEQ ID NO: 281719 - DNA, 75 bp, synthetic construct
  source 1..75: mol_type = other DNA
gctgccggacagaataagaaaggaagaccaccacgcaggcccctcagagaacactggacacgggagtttaccgac

SEQ ID NO: 281720 - DNA, 75 bp, synthetic construct
  source 1..75: mol_type = other DNA
aattatgcgcgaacgttacttgacgccgggataaaggtgcccaacgaactttttcacgattttaagcagagatac

SEQ ID NO: 281721 - DNA, 75 bp, synthetic construct
  source 1..75: mol_type = other DNA
gacggtgataacgccaaatgtgctgcgtattacacggcggaagacaacgcgctggcgcatgactggtcagaacgt

SEQ ID NO: 281722 - DNA, 75 bp, synthetic construct
  source 1..75: mol_type = other DNA
gcactcaccgacatgctacaaacctttgtgccttaccgtaccgccgtagagttgtgcgcgctggaacatggtgga

SEQ ID NO: 281723 - DNA, 75 bp, synthetic construct
  source 1..75: mol_type = other DNA
cctaccaccacccgctatgtttcagccatgagtgtggcaaagggcgtggtgtcgctgaccgggcaagaaagtctc

SEQ ID NO: 281724 - DNA, 75 bp, synthetic construct
  source 1..75: mol_type = other DNA
cctattgcgcgtcaggttgcaaaatcaacctggtcgtcgataacggcaaaatcgtccgggcggaggcagcgcagg

SEQ ID NO: 281725 - DNA, 75 bp, synthetic construct
  source 1..75: mol_type = other DNA
atgagtaataaatattgccaggcgctggtagaactgcggaacaaaccagcccatgaactgaaggaagtgggcgat

SEQ ID NO: 281726 - DNA, 75 bp, synthetic construct
  source 1..75: mol_type = other DNA
tatgctgccgttcaggagtatgagtaccaccgcaatagcttgactacgctcgcaaaagtttcttcgattcgttat

SEQ ID NO: 281727 - DNA, 75 bp, synthetic construct
  source 1..75: mol_type = other DNA
cggcggtagcaatggtattccctcgcctaccaccactcgctatgtctctgccatgagcgtggcgaagggcgtggt

SEQ ID NO: 281728 - DNA, 75 bp, synthetic construct
  source 1..75: mol_type = other DNA
gaagaacgggtggtggggaaaaacgggattattgtcgagccacatccggtattacgcaatggggccattgcccgt

SEQ ID NO: 281729 - DNA, 75 bp, synthetic construct
  source 1..75: mol_type = other DNA
tgtttctactcacgtcattttcctccatcaggggaaaatagaagaagaaggggcgccggagcagttattcggtaa

SEQ ID NO: 281730 - DNA, 75 bp, synthetic construct
  source 1..75: mol_type = other DNA
atgaaatacgttgtttccggtggcgctactctcagctttgccgacggttctaaatttgagttgtctcagggcatc

SEQ ID NO: 281731 - DNA, 75 bp, synthetic construct
  source 1..75: mol_type = other DNA
ttcagcaagcggatgatgataacgacgtggcggtatcgggtaatgactctaacttattgatagtgttttatgttc

SEQ ID NO: 281732 - DNA, 75 bp, synthetic construct
  source 1..75: mol_type = other DNA
ccggaagatgcagatcatattacttttattcgcgggcgtattggttttgaactgcctgactggtttatcccgaag

SEQ ID NO: 281733 - DNA, 75 bp, synthetic construct
  source 1..75: mol_type = other DNA
cttgtcgttaaatcgtgtatcaccagagtttaaaacgggtaaagattactcttacattaatggcgcaatcacttt

SEQ ID NO: 281734 - DNA, 75 bp, synthetic construct
  source 1..75: mol_type = other DNA
ccgtgctggattacatagacgaggtgacggcaacagataccagcaccgcacctgatattatttggcctgttttcc

SEQ ID NO: 281735 - DNA, 75 bp, synthetic construct
  source 1..75: mol_type = other DNA
atcgtaaattccttgatattgatatcgataacttcaacgagcggatgaaagccattgcgccgcgcgtggcatttg

SEQ ID NO: 281736 - DNA, 75 bp, synthetic construct
  source 1..75: mol_type = other DNA
gtcttctttcaacgcccaaaggagtgtggcggaggtttttggttgggccgcacctatgaagactgcttctggctt

SEQ ID NO: 281737 - DNA, 75 bp, synthetic construct
  source 1..75: mol_type = other DNA
gcagcggacagctgtcgccggcgtcccacgttatggcctggatggtcaccccaaagggcaggtctcagactctga

SEQ ID NO: 281738 - DNA, 75 bp, synthetic construct
  source 1..75: mol_type = other DNA
caataccgcattgtgaggcgattcatgctaagtcgtcagctatttatctgttaagaccggcgaataaaataaagt

SEQ ID NO: 281739 - DNA, 75 bp, synthetic construct
  source 1..75: mol_type = other DNA
aaaatatttcccggtgtgacgttatgtgttgaatgtcaggcgtatcaggaaaaacagagaaaacactatgcataa

SEQ ID NO: 281740 - DNA, 75 bp, synthetic construct
  source 1..75: mol_type = other DNA
ccctgttccggaggccaggcggaaaatatttcccggtgtgacgttatgtgttgaatgtcagacgtatcaggaaaa

SEQ ID NO: 281741 - DNA, 75 bp, synthetic construct
  source 1..75: mol_type = other DNA
ggtctggcagaacgtcagctggcgggcccgttcccggcgatgcagcttttcagcatcctcaataagggacgcctc

SEQ ID NO: 281742 - DNA, 75 bp, synthetic construct
  source 1..75: mol_type = other DNA
caggagtgccgtcagcaccatcccgacagctggctgaagacggccggttgttatcaccatcctgccggtggaaag

SEQ ID NO: 281743 - DNA, 75 bp, synthetic construct
  source 1..75: mol_type = other DNA
tcatgcagtattcccgccgcgacgggcgtctgccggatgtctcccgcccctggccctggacactcaatgtggccg

SEQ ID NO: 281744 - DNA, 75 bp, synthetic construct
  source 1..75: mol_type = other DNA
caggcacttcaggtttttctgacacggtatccggcccggcggattgacgtgggaattgctcaggtcaatctgggc

SEQ ID NO: 281745 - DNA, 75 bp, synthetic construct
  source 1..75: mol_type = other DNA
cggctggcaccctgtgaagcatggcgggattttgccctgaagagggcatctgcatgtcggtgtaagtgccgataa

SEQ ID NO: 281746 - DNA, 75 bp, synthetic construct
  source 1..75: mol_type = other DNA
aagcggcagaggcctggcagaatgcggcccggctggcaccctgtgaagcatggcgggattttgccctgaagaggg

SEQ ID NO: 281747 - DNA, 75 bp, synthetic construct
  source 1..75: mol_type = other DNA
tagcgactatccagaaaataatggtctgtttgaaaataatgttatcttcagaaagcataatacgcaagcaataat

SEQ ID NO: 281748 - DNA, 75 bp, synthetic construct
  source 1..75: mol_type = other DNA
gaacacggctttatcgccccaagcattaacattgaagagctggacgagcaggctgcgggactgaacatcgtaacc

SEQ ID NO: 281749 - DNA, 75 bp, synthetic construct
  source 1..75: mol_type = other DNA
accaccgttatgtctaacagcttcggcttcggcggcaccaacgccacgctggtaatgcgcaagctgaaagattaa

SEQ ID NO: 281750 - DNA, 75 bp, synthetic construct
  source 1..75: mol_type = other DNA
cgatgcacggcgttgataccccaatcgattacctgaactctcacggtacttcgactccggttggcgacgtgaaag

SEQ ID NO: 281751 - DNA, 75 bp, synthetic construct
  source 1..75: mol_type = other DNA
aggaaggattgattgctcggggctgtatgcctatgacctgacctggcagattgacggtaagacatggaatttgca

SEQ ID NO: 281752 - DNA, 75 bp, synthetic construct
  source 1..75: mol_type = other DNA
acccgtacaccaacctcaatgctgcagccagcattctgcgcgagtgctgggagcgtaaaccgggtagctggctgg

SEQ ID NO: 281753 - DNA, 75 bp, synthetic construct
  source 1..75: mol_type = other DNA
tatgagcgacgcatccatttatgcattcctttctatggagcaggcaatcgcagatgctggcctctccccggaagc

SEQ ID NO: 281754 - DNA, 75 bp, synthetic construct
  source 1..75: mol_type = other DNA
gtcaggtgcccttatcatcagggggatgtatcgttaacaattacagctgcttccataattgaaaatgcagatgtt

SEQ ID NO: 281755 - DNA, 75 bp, synthetic construct
  source 1..75: mol_type = other DNA
tgcgtgaagtcagcaacccttcggcaattttcttaagtcgcggcgatgaagtgacctccggtagctcagtgatgg

SEQ ID NO: 281756 - DNA, 75 bp, synthetic construct
  source 1..75: mol_type = other DNA
gggcacgtaaccaaagatggctcgctggctggccctaaagtgctggaacactgtatcgactgttcggtgcttttg

SEQ ID NO: 281757 - DNA, 75 bp, synthetic construct
  source 1..75: mol_type = other DNA
gggctgcgtgaagttagcaacccttccgccatctttttaagccgcggtgatgaagtgacctccggtagctcagtg

SEQ ID NO: 281758 - DNA, 75 bp, synthetic construct
  source 1..75: mol_type = other DNA
gaagatacaaaaacagggaggtgattatttattcgctgtaaaaggaaaccaggggcggctaaataaagccttcga

SEQ ID NO: 281759 - DNA, 75 bp, synthetic construct
  source 1..75: mol_type = other DNA
gcggtgaaaggaaaccaggggtggctaaataaagcctttgaggaaaaatttccgctgaaagaattaaataatcca

SEQ ID NO: 281760 - DNA, 75 bp, synthetic construct
  source 1..75: mol_type = other DNA
aagacggatgataaatctaatgagattacagctatcccagaacttcttaacatgctggatattaaaggaaaaatc

SEQ ID NO: 281761 - DNA, 75 bp, synthetic construct
  source 1..75: mol_type = other DNA
tcattgcttaaaaaaagtaataaaaccattagcgcacaaaagaacagtgcgatgcgtcgtctgtcaattcacagc

SEQ ID NO: 281762 - DNA, 75 bp, synthetic construct
  source 1..75: mol_type = other DNA
aagccaaagacagccgtcagtgaaatggtgaaggcaaataaattaccaattattgaattgcgtgatccttgcaaa

SEQ ID NO: 281763 - DNA, 75 bp, synthetic construct
  source 1..75: mol_type = other DNA
attatgcaactgattctgaaaaataaaaatgaaagcaatatcacgtcgacgctcaatatttcgcaacaaacatta

SEQ ID NO: 281764 - DNA, 75 bp, synthetic construct
  source 1..75: mol_type = other DNA
ctggtataccctggcggtagagttgctgatgtgtcccaccgcgacattattatccgatctcgaacccattgatag

SEQ ID NO: 281765 - DNA, 75 bp, synthetic construct
  source 1..75: mol_type = other DNA
attctttaatctcacaatatcgggaaattcactgggttttcatggtgtcacgctcctggtattcccaggcagtag

SEQ ID NO: 281766 - DNA, 75 bp, synthetic construct
  source 1..75: mol_type = other DNA
tcattgcttaagaaaagtaataaaactatcagcgcccaaaaaacagtgcgatgcgtcgactggcaattcacagca

SEQ ID NO: 281767 - DNA, 75 bp, synthetic construct
  source 1..75: mol_type = other DNA
atggtggtatgggaagggacgcgcccgctgctggtggagattcaggcgctggtcgatcattcgatgatggcgaat

SEQ ID NO: 281768 - DNA, 75 bp, synthetic construct
  source 1..75: mol_type = other DNA
ttccgcaccttacgcagtcataaaaaccgtttcggcgcggtgaatgagctgggcgtcttcgcgatgactgaacag

SEQ ID NO: 281769 - DNA, 75 bp, synthetic construct
  source 1..75: mol_type = other DNA
ccacgctgttgctgcaaacgctgtgcaaactggcgcagcagatgaaaacgctgtatgtcaccggcgaagagtcgc

SEQ ID NO: 281770 - DNA, 75 bp, synthetic construct
  source 1..75: mol_type = other DNA
gaggagttacagagcggcaaatggggtgaaatcgccccgttcaccgtcacgccggaacttatcgcagcggcaaaa

SEQ ID NO: 281771 - DNA, 75 bp, synthetic construct
  source 1..75: mol_type = other DNA
cagaacaggaagcgcagccgttcacgtttgaatggaacggtcacacctggaatgccggccccgactcgctggccc

SEQ ID NO: 281772 - DNA, 75 bp, synthetic construct
  source 1..75: mol_type = other DNA
ataatgagatttatcgtcatcagcgtgaaatgaaagaggaactgagcaatctcctggatttgaagcaggttaggg

SEQ ID NO: 281773 - DNA, 75 bp, synthetic construct
  source 1..75: mol_type = other DNA
gatgaaagaagagatcgccgcgatgacggacatgaaagcgatcagggcgtacacagtgggctggggggcagatga

SEQ ID NO: 281774 - DNA, 75 bp, synthetic construct
  source 1..75: mol_type = other DNA
cttcgaacttgatggccatcgatgggatgcagggaaagcatcccaggagcggctggcaccagtggtgtcggttgc

SEQ ID NO: 281775 - DNA, 75 bp, synthetic construct
  source 1..75: mol_type = other DNA
cagggggggaaatggggcgaagttgctccctttacggtcacgccggagcatctggaagtcgccagagcggcgaaa

SEQ ID NO: 281776 - DNA, 75 bp, synthetic construct
  source 1..75: mol_type = other DNA
ttacagagcggcaaatggggcgaaatcgccccgttcaccattacacctgaacttatcgcagcggcaaaagatgcc

SEQ ID NO: 281777 - DNA, 75 bp, synthetic construct
  source 1..75: mol_type = other DNA
acctgcacgttgagggacgcataaaagagcagatcaaccgcgccggacacgctgcttggcgagcggatttgcgcg

SEQ ID NO: 281778 - DNA, 75 bp, synthetic construct
  source 1..75: mol_type = other DNA
agcaggtaaagttgtctatgcaacaactggatgagctacttactgcaatggttcaggcgcaggttgatcgcaatg

SEQ ID NO: 281779 - DNA, 75 bp, synthetic construct
  source 1..75: mol_type = other DNA
ctgcaaagcggcaaatggggtgaaatcgccccgttcagcgtcacgcccgaacttatcgcagcggcaaaagatgcc

SEQ ID NO: 281780 - DNA, 75 bp, synthetic construct
  source 1..75: mol_type = other DNA
catcacattgctgctgaaactgagcgcgaagctcgccgcacgctggcgcgggatcacgtctgtttctttgcaggc

SEQ ID NO: 281781 - DNA, 75 bp, synthetic construct
  source 1..75: mol_type = other DNA
tggaacgggtgctggagcgaagcggggaagccccggtctacgggccaaacctgcgcgcctcctgccgtcgtctgg

SEQ ID NO: 281782 - DNA, 75 bp, synthetic construct
  source 1..75: mol_type = other DNA
gcccgcagacggcacttcttccactgatctgccggtggatctgaacggcatgacgtatcaggcctgccgtgggga

SEQ ID NO: 281783 - DNA, 75 bp, synthetic construct
  source 1..75: mol_type = other DNA
ttcagcgtgctgacagaacgcgagctggatgttctgcacgagctggcacaggggctgtcaaataaacagattgcc

SEQ ID NO: 281784 - DNA, 75 bp, synthetic construct
  source 1..75: mol_type = other DNA
agacctgccggtggagctggacgtggcgcagtggctgcatgcctgtcacgatgccggaatagaagttcgtgtaca

SEQ ID NO: 281785 - DNA, 75 bp, synthetic construct
  source 1..75: mol_type = other DNA
gctggaagtggcgcagtggctgcaggcctgtcatgatgccggaatagaagttcgtgtacaggttaatgaaagcgt

SEQ ID NO: 281786 - DNA, 75 bp, synthetic construct
  source 1..75: mol_type = other DNA
tggtgcggttgactgcgaggtgttatttgaaggtgaaacggaattcgtcccgtataccgccatgcaggacgatag

SEQ ID NO: 281787 - DNA, 75 bp, synthetic construct
  source 1..75: mol_type = other DNA
aacaggtgaaactgtcaatgccggaactggaagaactggcggcagcaatggcgcaggctcaggtcgatcgcaatg

SEQ ID NO: 281788 - DNA, 75 bp, synthetic construct
  source 1..75: mol_type = other DNA
acagcgggagatgaaagaagaactgaataacttggatgatttgcgctcaattagagcgattgcaattaacagtaa

SEQ ID NO: 281789 - DNA, 75 bp, synthetic construct
  source 1..75: mol_type = other DNA
ggctttaccctggagtcagcctaatatcgccgaacgtcacgcgatgctgaataatgagttgcgtaaaatttcccg

SEQ ID NO: 281790 - DNA, 75 bp, synthetic construct
  source 1..75: mol_type = other DNA
cacgttcgaatggaacggccgcacctggaacgctggccccgactcactggcccgcctttatccggcagtaatggc

SEQ ID NO: 281791 - DNA, 75 bp, synthetic construct
  source 1..75: mol_type = other DNA
atgacgagatttatcgccgtcagcgggagatgaaggatgagctgaataatctggaggatttgaattcggttagga

SEQ ID NO: 281792 - DNA, 75 bp, synthetic construct
  source 1..75: mol_type = other DNA
cggataataataacgtcgtactgaccagggagaaacttattgcgctgaacgatgccatgatggtggccatggtgg

SEQ ID NO: 281793 - DNA, 75 bp, synthetic construct
  source 1..75: mol_type = other DNA
ccagcggcattcgctaaaatgaacaaaaatggcgtaccggtaacgctggtcatttcgcagctggtgattacttct

SEQ ID NO: 281794 - DNA, 75 bp, synthetic construct
  source 1..75: mol_type = other DNA
tctgtcagttgcgccaaatctgctgaaccagacgttcgctcctacagcaccaaatcaggtctgggtggcagacct

SEQ ID NO: 281795 - DNA, 75 bp, synthetic construct
  source 1..75: mol_type = other DNA
acgtggagttgagcgacggcactttatcgtggttagggaacgccttgttctggatgcctctaccggaaccgcctc

SEQ ID NO: 281796 - DNA, 75 bp, synthetic construct
  source 1..75: mol_type = other DNA
ttgatatcagcaaagagtacgatgaaagcctgggcacggacgatgtgcattatcagtcgttcgcccgtatggcgg

SEQ ID NO: 281797 - DNA, 75 bp, synthetic construct
  source 1..75: mol_type = other DNA
gtaacgcaaaactcgacgaccatgccgccagcgggatgcgcggagaattaaaactgttccagcgttttaatatgc

SEQ ID NO: 281798 - DNA, 75 bp, synthetic construct
  source 1..75: mol_type = other DNA
tttgcgcgcttttttaatcgcttagtcggttgctcgcccagtgcttatcgtgccaaaaaagtacctgtgacgtga

SEQ ID NO: 281799 - DNA, 75 bp, synthetic construct
  source 1..75: mol_type = other DNA
ccggaagatgccgatcatattccttttattcgcgggcgtattggttttgaactgcctgactggtttatcccgaag

SEQ ID NO: 281800 - DNA, 75 bp, synthetic construct
  source 1..75: mol_type = other DNA
ccggaagatgctgagcatattacttttattcgcgggcgtattggttttgaactgcctgactggtttatcccgaag

SEQ ID NO: 281801 - DNA, 75 bp, synthetic construct
  source 1..75: mol_type = other DNA
ccggaagatgctgaacatattgcttttattcgcgggcgtattggttttgaactgcctgactggtttatcccgaag

SEQ ID NO: 281802 - DNA, 75 bp, synthetic construct
  source 1..75: mol_type = other DNA
ctggcgcaggttcgccagcaggcggaaaaactggtcagggagatggcggcatggctcccagctggagctgatatt

SEQ ID NO: 281803 - DNA, 75 bp, synthetic construct
  source 1..75: mol_type = other DNA
atgaacttgaggcatgtggtgaggcgtttctggcgcaggttcgccagcaggcagaacggctggtcagggagatag

SEQ ID NO: 281804 - DNA, 75 bp, synthetic construct
  source 1..75: mol_type = other DNA
ccggaagatgcggatcatattgcttttattcgcgggcgtattggttttgaactgcctgactggtttatcccgaag

SEQ ID NO: 281805 - DNA, 75 bp, synthetic construct
  source 1..75: mol_type = other DNA
gtgcagtggcggcgggaatggcatgggagcatgcgccgtcaggcaccgccactgtggcggtaaaaatcaatgtct

SEQ ID NO: 281806 - DNA, 75 bp, synthetic construct
  source 1..75: mol_type = other DNA
tcgctgcaatcgtgcctcgacaagcgtgcggcaaaaggcggtgtctcaccgcaacaggtggcgcaggcgattgct

SEQ ID NO: 281807 - DNA, 75 bp, synthetic construct
  source 1..75: mol_type = other DNA
cgcgcagaacaatcaggacgcggtgatgccgggttacacccacctgcaacgtgctcaaccggtgacgttcgcaca

SEQ ID NO: 281808 - DNA, 75 bp, synthetic construct
  source 1..75: mol_type = other DNA
aatggcgcaacttcaggagctggcagctgcgatggcgcaggcgcaggttaagcgcaatgacgagatttatcagcg

SEQ ID NO: 281809 - DNA, 75 bp, synthetic construct
  source 1..75: mol_type = other DNA
aggatgcgcttaagcgtctggatgtcagcccgttaggttgtggcgcgctggcgggaacggcttatgaaatcgacc

SEQ ID NO: 281810 - DNA, 75 bp, synthetic construct
  source 1..75: mol_type = other DNA
cctggctggactgcctgcatatggcggcgctggtgctggacggcattcaggtgaaacgtccgcgttgccaggaag

SEQ ID NO: 281811 - DNA, 75 bp, synthetic construct
  source 1..75: mol_type = other DNA
gtgaaacgtccacgttgccaggaagcggctcagcagggttacgccaacgccaccgaactggcggattatctggtg

SEQ ID NO: 281812 - DNA, 75 bp, synthetic construct
  source 1..75: mol_type = other DNA
cgatattcttcgcgcccgttatgtggtgctggcagaaggtgccaacagcgtcctggcggaacgccacgggttagt

SEQ ID NO: 281813 - DNA, 75 bp, synthetic construct
  source 1..75: mol_type = other DNA
atgaagctggttgaacactacatcatgcgtggtacgcgccgtctggtgctgattatcgtcgggtttctgatcttt

SEQ ID NO: 281814 - DNA, 75 bp, synthetic construct
  source 1..75: mol_type = other DNA
attcctggtttgtggttagtacccggactcatgctaatgggcctgctgatgctggtcgcacgcgacttctctttg

SEQ ID NO: 281815 - DNA, 75 bp, synthetic construct
  source 1..75: mol_type = other DNA
cgaaccacccttgcgtggggtgatgccgataatcaacaggtgaaactgtcaatgccggaactggaagaactggcg

SEQ ID NO: 281816 - DNA, 75 bp, synthetic construct
  source 1..75: mol_type = other DNA
gtggtgctggcagaaggtgccaacagcgtcctggctgaacgtcacgggttagtgactcgtcctgctggcgaagcg

SEQ ID NO: 281817 - DNA, 75 bp, synthetic construct
  source 1..75: mol_type = other DNA
gggttaatgcaggatatttcccgtgatttatgggatcaggggaatacacctgttccaccgctgcgccagttgctc

SEQ ID NO: 281818 - DNA, 75 bp, synthetic construct
  source 1..75: mol_type = other DNA
gccgcgttagtaaagcacgataagaatacgaaggatttggatttgcccctatatttccagacacctgttatcact

SEQ ID NO: 281819 - DNA, 75 bp, synthetic construct
  source 1..75: mol_type = other DNA
aaaaactatgcttaatagcaccatttcgatgggttacccggatgttgtaattgcatgtatagcacatcaagtatc

SEQ ID NO: 281820 - DNA, 75 bp, synthetic construct
  source 1..75: mol_type = other DNA
tctggtaccggaaaagcgtcaggaagtaacaaccgaaggcggcctggacgtcgcagggcagcgtgaaaaaatgcg

SEQ ID NO: 281821 - DNA, 75 bp, synthetic construct
  source 1..75: mol_type = other DNA
gaaaaagccgcgcttcagttagcgcaacaacaagcccttgatcgtctccaggtcttgctgcgctttccccagcta

SEQ ID NO: 281822 - DNA, 75 bp, synthetic construct
  source 1..75: mol_type = other DNA
attgtgccgaatgatcaggttgatcagcctgattcacaggtcgtcgggcattgtgccaacgacacgcataaaatt

SEQ ID NO: 281823 - DNA, 75 bp, synthetic construct
  source 1..75: mol_type = other DNA
ctctatacccgtaccaccagcggtaacgtctctgcacctactcaggctacccaggacggcgcatctgccgaaccg

SEQ ID NO: 281824 - DNA, 75 bp, synthetic construct
  source 1..75: mol_type = other DNA
gtcatgagttctcgtatgttattggaatggcgagagacgttttaatcaatcacacacgagatgttgatattaatg

SEQ ID NO: 281825 - DNA, 75 bp, synthetic construct
  source 1..75: mol_type = other DNA
aaaagaagcaaacagccttgtatggctgtgggattatgccaaccgctcacaggcattgttccgtgagttgtatcc

SEQ ID NO: 281826 - DNA, 75 bp, synthetic construct
  source 1..75: mol_type = other DNA
cagtgaacacctcttacgtgcctttcaatggtcagcatattttaaccgctgtggctgccggagtgacttatgtag

SEQ ID NO: 281827 - DNA, 75 bp, synthetic construct
  source 1..75: mol_type = other DNA
taacaaagtccgcactgaaatccgcgacaaggtaatccagtatcaggaagagtgtgacgatgtgctctacgaata

SEQ ID NO: 281828 - DNA, 75 bp, synthetic construct
  source 1..75: mol_type = other DNA
ataaagcaacggtttaaaacctccattgtgaaaatcacaatgcagcttcctggtgatgaacagtgccgtgagatt

SEQ ID NO: 281829 - DNA, 75 bp, synthetic construct
  source 1..75: mol_type = other DNA
agccagacggaccaacgaatctttctgcatgggtaagacttaagaacaaagaattacctccttcactgcatcact

SEQ ID NO: 281830 - DNA, 75 bp, synthetic construct
  source 1..75: mol_type = other DNA
cggatgcgactgatgctctgtttcccggcgaatatgacctttttgacttaatggctcatgttactgaagagaacc

SEQ ID NO: 281831 - DNA, 75 bp, synthetic construct
  source 1..75: mol_type = other DNA
cgcggtgacctcctcgacctcgaaccagacagcttcgaccaaaatattgccattaacacccgcgcgccgttcttc

SEQ ID NO: 281832 - DNA, 75 bp, synthetic construct
  source 1..75: mol_type = other DNA
gcgtaccggttttgattgcagcggtctggtttattacgcttataaagatttggtgaaaattcgtattccgcgtac

SEQ ID NO: 281833 - DNA, 75 bp, synthetic construct
  source 1..75: mol_type = other DNA
tatcagcagcccggaaggcgttgaggaagtgactcgtgcacgtcaggaaggccaggatgttacctgtgaatcctg

SEQ ID NO: 281834 - DNA, 75 bp, synthetic construct
  source 1..75: mol_type = other DNA
ccgctgatgatggcagcgtggaaactggctccggcgctggcggcagggaactgcgtagtgcttaaaccatcagaa

SEQ ID NO: 281835 - DNA, 75 bp, synthetic construct
  source 1..75: mol_type = other DNA
ttcagtaagcgcttactggcacagccgaaaccggaagcggaactgccgcaccgctcgattattttcgtcagttcc

SEQ ID NO: 281836 - DNA, 75 bp, synthetic construct
  source 1..75: mol_type = other DNA
aaaaccgatatgaccattccggcaacggcttattacgacgaactgattgctaaggggttagtgccgtggggacgt

SEQ ID NO: 281837 - DNA, 75 bp, synthetic construct
  source 1..75: mol_type = other DNA
ataactctctttttgctctggatgccggaggcgcaacgggaatagccctgcaaattgttgacggcaagggcacaa

SEQ ID NO: 281838 - DNA, 75 bp, synthetic construct
  source 1..75: mol_type = other DNA
tataagaggtaagctaacttatgaagaggcaaaagcagagattttaaatcaccatatagagaaatcgaataaata

SEQ ID NO: 281839 - DNA, 75 bp, synthetic construct
  source 1..75: mol_type = other DNA
tatgatcatcggttcgtttatgctggtgttcattttcccaccgttttcggcagaaacaactaacagttttgcccg

SEQ ID NO: 281840 - DNA, 75 bp, synthetic construct
  source 1..75: mol_type = other DNA
atgactatgtggcttcgcgtccggtatttaccgaagtggaagcgattcgccgcgtgctgtatctggcgaaagttg

SEQ ID NO: 281841 - DNA, 75 bp, synthetic construct
  source 1..75: mol_type = other DNA
cagagccgcgcaatacggatgcacaacctgaacggatgcagaaccacattacagcactgtacaccaaggctgtgt

SEQ ID NO: 281842 - DNA, 75 bp, synthetic construct
  source 1..75: mol_type = other DNA
ccagcgagagccgtcggacgttgctggctgaagcggccatggcggtgcgggcactgttgggccgaccgcgcgcct

SEQ ID NO: 281843 - DNA, 75 bp, synthetic construct
  source 1..75: mol_type = other DNA
atcaatcacacacgagatgttgatattaatgagccagacggaccaacgaatctttccgcatggatgagacttaag

SEQ ID NO: 281844 - DNA, 75 bp, synthetic construct
  source 1..75: mol_type = other DNA
ttctgcgctgccgcgatgctgtcaataaaggttcggtcccgcacaaattccgcaagtgggtaacagcagaagttc

SEQ ID NO: 281845 - DNA, 75 bp, synthetic construct
  source 1..75: mol_type = other DNA
taaactgtcacgttatctcggtctgagaaatgaagaagctgtccagtcggccaaatcgttacggacgtggaaaaa

SEQ ID NO: 281846 - DNA, 75 bp, synthetic construct
  source 1..75: mol_type = other DNA
tgtgagcgcatacagagcgatatatcacagcgcattatcaataatggcgtacccgaaagcagcttcacgttaagt

SEQ ID NO: 281847 - DNA, 75 bp, synthetic construct
  source 1..75: mol_type = other DNA
cgtggaaagtattgaagagcttgatgcatctcagataccgcaagcagtagagtacatccacagggtagtgcttga

SEQ ID NO: 281848 - DNA, 75 bp, synthetic construct
  source 1..75: mol_type = other DNA
aactcaatggatggctgttcagcatcaaccctgagaaagttcgtgctgacatccgtgataaactgattcagtacc

SEQ ID NO: 281849 - DNA, 75 bp, synthetic construct
  source 1..75: mol_type = other DNA
ggttgccgctgatgggaagcttcgtaagttactctgccttcctttgaagaagttaaatggatggctgttcagtat

SEQ ID NO: 281850 - DNA, 75 bp, synthetic construct
  source 1..75: mol_type = other DNA
aaagggatttggttaacgccatcaaaaaaggcggtgggagttttaaaaccgtttcggattattcaaagatattgc

SEQ ID NO: 281851 - DNA, 75 bp, synthetic construct
  source 1..75: mol_type = other DNA
catcagcgcggtattcgtattctctttgatgtcgtgatgaaccacactggctatgccacgctggcggatatgcag

SEQ ID NO: 281852 - DNA, 75 bp, synthetic construct
  source 1..75: mol_type = other DNA
aaacccgccgccgggcaaacctggcatagttttaacgattacattaatttcagcgacaaaacagggtgggataaa

SEQ ID NO: 281853 - DNA, 75 bp, synthetic construct
  source 1..75: mol_type = other DNA
tcacgaagaatcaaatcatggtttacggtatgcctatgctcaggatgttgaaaaatattatctcagtcagggatt

SEQ ID NO: 281854 - DNA, 75 bp, synthetic construct
  source 1..75: mol_type = other DNA
cccgtgaaatgcatatccttgcacgtcaggccggagggagctttaaaaccattgcagaccgggtcaaaattgcag

SEQ ID NO: 281855 - DNA, 75 bp, synthetic construct
  source 1..75: mol_type = other DNA
cgatgcattttcatattgctaatggttacagctataaagaggcactggcgctcacatcgatggatttagggcacg

SEQ ID NO: 281856 - DNA, 75 bp, synthetic construct
  source 1..75: mol_type = other DNA
atcagcgttttggtattgacagcattgatgaactttcaattgaacaaatcccgctggccgtagagtacatccaca

SEQ ID NO: 281857 - DNA, 75 bp, synthetic construct
  source 1..75: mol_type = other DNA
agtaccaggaagaatgctttactgtgctgcatgactactggactaaaggccatgtggttaacccgcgcaaagcta

SEQ ID NO: 281858 - DNA, 75 bp, synthetic construct
  source 1..75: mol_type = other DNA
aatggcggtgaacttaaaccgcaggaaaacccgaacgcgcaagcaattcaggatgaattaaaagaaatcgattct

SEQ ID NO: 281859 - DNA, 75 bp, synthetic construct
  source 1..75: mol_type = other DNA
ggtctgctgcgtcagtcgtccgacccatacattatggtgcgcgaagcgtacttccagcgtcatgatttcatcgct

SEQ ID NO: 281860 - DNA, 75 bp, synthetic construct
  source 1..75: mol_type = other DNA
caaaaacttatgaaacaactagataagttcaactgtattcatatgaatatggttgctgctgatggaaagcttcgt

SEQ ID NO: 281861 - DNA, 75 bp, synthetic construct
  source 1..75: mol_type = other DNA
aacagacagccttgtatggctgtgggattatgccaaccgctcacaggcattgttccgtgagttgtatcccgcatt

SEQ ID NO: 281862 - DNA, 75 bp, synthetic construct
  source 1..75: mol_type = other DNA
taccgaagcactgtcacttgctgctcgtattccacttgaaggcgaattcatcggaaaacaagagaagaaaaccaa

SEQ ID NO: 281863 - DNA, 75 bp, synthetic construct
  source 1..75: mol_type = other DNA
tttgggtgttcatacaaagaaatcagcgaggagcagtttaccgaagctctgtcacttgcagctcgcgttccgctt

SEQ ID NO: 281864 - DNA, 75 bp, synthetic construct
  source 1..75: mol_type = other DNA
tatgccaaccgctcacaggcattattccgcgaactgtatctggcgctaaagcaaattcaatcaaactattctggc

SEQ ID NO: 281865 - DNA, 75 bp, synthetic construct
  source 1..75: mol_type = other DNA
aagcaaacgagctttctgcaaaagaagcaaacagccttgtatggctatgggattatgccaaccgctcacaggcat

SEQ ID NO: 281866 - DNA, 75 bp, synthetic construct
  source 1..75: mol_type = other DNA
ccttgtatggttatgggattatgccaaccgttcacaggcattattccgcgaactgtatccggcgctaaaacaaat

SEQ ID NO: 281867 - DNA, 75 bp, synthetic construct
  source 1..75: mol_type = other DNA
tgttcgtacaaagaaatcagtgaggagcagtttaccgaagcactatcacttgcagctcgagttccacttgaaggt

SEQ ID NO: 281868 - DNA, 75 bp, synthetic construct
  source 1..75: mol_type = other DNA
agaagaaaaccaacgagctttctgcaaaagaagcaaacagccttgtatggttatgggattatgccaaccgctcac

SEQ ID NO: 281869 - DNA, 75 bp, synthetic construct
  source 1..75: mol_type = other DNA
actggttatagcattttactttgcgcctgaacaacttcttactgatgttattaatacatgggaaagtgctactac

SEQ ID NO: 281870 - DNA, 75 bp, synthetic construct
  source 1..75: mol_type = other DNA
ggcagggacttacggacatgaagcgaaaaaccataaaaattcgctcgggatctatgagttatcctggcatcaggc

SEQ ID NO: 281871 - DNA, 75 bp, synthetic construct
  source 1..75: mol_type = other DNA
ctctttacctggaaatactgacggcgtagcactggtagtctcaacgactaaagtgccttatgaactcgacgtccc

SEQ ID NO: 281872 - DNA, 75 bp, synthetic construct
  source 1..75: mol_type = other DNA
gaaactttttggttatgccaaaactggcctgctctcctcctctgccacttcaggcgtgccgcaggtggagaatat

SEQ ID NO: 281873 - DNA, 75 bp, synthetic construct
  source 1..75: mol_type = other DNA
ccggtattcacaacgaagacaccattgagcagtatcatgcacatggtcgtcagttgggccgtctgctgtaccagg

SEQ ID NO: 281874 - DNA, 75 bp, synthetic construct
  source 1..75: mol_type = other DNA
tggggtgatggcagcacttacaaaggtaacgatatcgaacgcttctatcgttatggcctgctgaccaacgcagaa

SEQ ID NO: 281875 - DNA, 75 bp, synthetic construct
  source 1..75: mol_type = other DNA
atcacgggagagagcggggtagacgctttcgtggcgtatgcggagaaagtttcttctggtgagctggccgcatga

SEQ ID NO: 281876 - DNA, 75 bp, synthetic construct
  source 1..75: mol_type = other DNA
atcagcaatgtataactgaaggcgtggttgcaagcgctctattcgataaagcattccttcagcccggggaagaga

SEQ ID NO: 281877 - DNA, 75 bp, synthetic construct
  source 1..75: mol_type = other DNA
cgggtgaaaaaactgagctgtatatccttcgtgacaagctttaccaggaacgggagtcacgagtaactaaacgac

SEQ ID NO: 281878 - DNA, 75 bp, synthetic construct
  source 1..75: mol_type = other DNA
tgcacaaacaaaccttagtgaagccggtaatgcgcagggacaaaaacctacaactgatctccctaccgtgcaact

SEQ ID NO: 281879 - DNA, 75 bp, synthetic construct
  source 1..75: mol_type = other DNA
agttggtgctgacggatttcagaatggagctgcaaaagccattattccgggtcaagctggttctgaacagtcagg

SEQ ID NO: 281880 - DNA, 75 bp, synthetic construct
  source 1..75: mol_type = other DNA
cgatacggtgaagacgaccaaatcgcattgcaacgcttcattgaagaaattcagtcagaacttgactatcaactg

SEQ ID NO: 281881 - DNA, 75 bp, synthetic construct
  source 1..75: mol_type = other DNA
gagccatggaatacggcgcggagaacgctcgtctgatcgactgccgcaaacaactggtggctgaaggtattgccg

SEQ ID NO: 281882 - DNA, 75 bp, synthetic construct
  source 1..75: mol_type = other DNA
tgaagaggatcgggtggtcgataaccgtatgcacgaccgtttttgtgaactccgcgctgccgcgggccaccctgt

SEQ ID NO: 281883 - DNA, 75 bp, synthetic construct
  source 1..75: mol_type = other DNA
cgctcagtcgcgctccacgccatcgtcgaatttttcgaccggcataacacatccagcggaagtcgctcgttatag

SEQ ID NO: 281884 - DNA, 75 bp, synthetic construct
  source 1..75: mol_type = other DNA
cttccgcactcagggtcgcggaaccgccgatcacgttggcgtgtatgttggcaacggcaaatttattcagtctcc

SEQ ID NO: 281885 - DNA, 75 bp, synthetic construct
  source 1..75: mol_type = other DNA
gctgaataaagactggcgcgcggcgatctccagctgcgaattgttgctttcagaaacctccggtacgctgcgtga

SEQ ID NO: 281886 - DNA, 75 bp, synthetic construct
  source 1..75: mol_type = other DNA
gagctggtggatgcattccgccatgtgagtgatgcgtttgagcaaaccagcgaaaccatcggcgtgcgcgccaat

SEQ ID NO: 281887 - DNA, 75 bp, synthetic construct
  source 1..75: mol_type = other DNA
atgccatttccagcttgttggtgctttcactaaccggctgcgcctggataccctccacgccgctggtacaggggg

SEQ ID NO: 281888 - DNA, 75 bp, synthetic construct
  source 1..75: mol_type = other DNA
agttgctgtccgcacaaggggcaacgctgttaagaacagcaatgctggattattataaccaggacactacgggaa

SEQ ID NO: 281889 - DNA, 75 bp, synthetic construct
  source 1..75: mol_type = other DNA
ggccttgttcaactcagtagcgccaccaacagcacctctgaaacgctggccgccacaccgaaagcggtcaaggct

SEQ ID NO: 281890 - DNA, 75 bp, synthetic construct
  source 1..75: mol_type = other DNA
gtctctgacaacctgacttataagccagagcgtctgacaatggaaaaaggtgactcagtgttctcaccagacgat

SEQ ID NO: 281891 - DNA, 75 bp, synthetic construct
  source 1..75: mol_type = other DNA
cggcgctggggaatgccccgaactttgccacgacaatgcttaatgcactggcaggtaaacaaccgctggacaata

SEQ ID NO: 281892 - DNA, 75 bp, synthetic construct
  source 1..75: mol_type = other DNA
tgccactgcagcagatcggttgccttattttaccggagcagaccgcgcagcgctggcaacccttacagctattgg

SEQ ID NO: 281893 - DNA, 75 bp, synthetic construct
  source 1..75: mol_type = other DNA
cccgtcagccacactcacccgtggagtcagataacgggagtgcctgctgcctcgctgacggcaaaaggcaccgta

SEQ ID NO: 281894 - DNA, 75 bp, synthetic construct
  source 1..75: mol_type = other DNA
gctgctggaactgaaaaacttccgcctgcctggacaggtattcctgaccgggaagagcatgaaggatgcggaaga

SEQ ID NO: 281895 - DNA, 75 bp, synthetic construct
  source 1..75: mol_type = other DNA
atgatcaacccaagaaccattgcgcaagaaatcgcttatgcggatgttgccactcaggcagccaatttgcaggag

SEQ ID NO: 281896 - DNA, 75 bp, synthetic construct
  source 1..75: mol_type = other DNA
caacggcgtgtcgattgttgactatggcatcacgcttgattctcacggccacttacagattgactccgaccagtt

SEQ ID NO: 281897 - DNA, 75 bp, synthetic construct
  source 1..75: mol_type = other DNA
ttcagtatgggtgatgacaccttttctgcgacggggacgttcgaaatgaccatgggcgacagcaccatggatatt

SEQ ID NO: 281898 - DNA, 75 bp, synthetic construct
  source 1..75: mol_type = other DNA
gtctggggattattcagatcccgcgcattgccgtgcgcgaagccctgcgtgccgggaggcttattgaagtattac

SEQ ID NO: 281899 - DNA, 75 bp, synthetic construct
  source 1..75: mol_type = other DNA
gctttgccaaagggaagtgtttcgcgccagatacaggcactggaacatcaacttggcacccagcttctccagcgc

SEQ ID NO: 281900 - DNA, 75 bp, synthetic construct
  source 1..75: mol_type = other DNA
cctttcgctgatttatccgcagcgtcgggagctttcccggcgtgtaaacctgtttatgcagtggctggctggcgt

SEQ ID NO: 281901 - DNA, 75 bp, synthetic construct
  source 1..75: mol_type = other DNA
ttacgatacgctggtggaaaaactcggtgctgcagtggcaacgttaaaatctggtgcgccggatgacgagtctac

SEQ ID NO: 281902 - DNA, 75 bp, synthetic construct
  source 1..75: mol_type = other DNA
gcgcatctcgaacgcgtcagcaaggcagtagaagaggcgaaagcgacagggcacatcaaagtgatcactggcggt

SEQ ID NO: 281903 - DNA, 75 bp, synthetic construct
  source 1..75: mol_type = other DNA
tctgaatggtctggcggcaggtgaatatctcgaaggccacacatcgatgatccgtcgcgatccggtgggggtggt

SEQ ID NO: 281904 - DNA, 75 bp, synthetic construct
  source 1..75: mol_type = other DNA
ggcgttgagtgatttccagagcgccgtcgacgcgctgaacagcgatactgacggcccggtgacttttgccgccac

SEQ ID NO: 281905 - DNA, 75 bp, synthetic construct
  source 1..75: mol_type = other DNA
atgatcaacccaagaaccattgcgcaagaaatcgcctatgcggatgttgccactcaggcggcaaacttgcaggag

SEQ ID NO: 281906 - DNA, 75 bp, synthetic construct
  source 1..75: mol_type = other DNA
caccaccacgattatgctcacctcggatagcaccggggcgcagagcgcgttttcggtgagcgtaacggggcatga

SEQ ID NO: 281907 - DNA, 75 bp, synthetic construct
  source 1..75: mol_type = other DNA
cggggaaatatatttctttttgtgatgcggatgatttgtggcacgagaaaaaattagagcgtcaaatcgaagtgt

SEQ ID NO: 281908 - DNA, 75 bp, synthetic construct
  source 1..75: mol_type = other DNA
gctcaggcggggcagccttcgggctggccggttcccttgaaggccggtttctcacccccgtctgggctaccaccc

SEQ ID NO: 281909 - DNA, 75 bp, synthetic construct
  source 1..75: mol_type = other DNA
ggtcagtcgagcaaatggcactccgtgcattctgcccgcgtccgctcattataccgcagagtcaatggtagctca

SEQ ID NO: 281910 - DNA, 75 bp, synthetic construct
  source 1..75: mol_type = other DNA
cgcaccgttgccggtgatgagcacgccgcacgcctttccctcgttcgcgattacgtcctctcgtttgctggccgc

SEQ ID NO: 281911 - DNA, 75 bp, synthetic construct
  source 1..75: mol_type = other DNA
ccgctactgggtggctgacgccatgaacacgcaggggctgacggtcaatccggactttatccgcgccctgaaccg

SEQ ID NO: 281912 - DNA, 75 bp, synthetic construct
  source 1..75: mol_type = other DNA
ctgaaaaacttccgcctgccgggacaggtgtttctgaccggaaaaagtatgaaggatgtggaagagtatggggaa

SEQ ID NO: 281913 - DNA, 75 bp, synthetic construct
  source 1..75: mol_type = other DNA
gccgcgttggttggctgaagagttcgctgaatccttagagttacaggtattaccgctgccgttaaaacaaaacag

SEQ ID NO: 281914 - DNA, 75 bp, synthetic construct
  source 1..75: mol_type = other DNA
atgaacaatgccaaagcatcattttactttcttttctatatctataatgcgattaagaaaaggaaaagaggttat

SEQ ID NO: 281915 - DNA, 75 bp, synthetic construct
  source 1..75: mol_type = other DNA
tatctggtatgagcaaaaactggaaaaacaaatctcactacttgatagtgggaaatataatgttgttggaagttt

SEQ ID NO: 281916 - DNA, 75 bp, synthetic construct
  source 1..75: mol_type = other DNA
cacgagtggttggcctcgaactggcaaaaatgattgtggatgcgtggctgggcgcacagtacgaaggcggtcgtc

SEQ ID NO: 281917 - DNA, 75 bp, synthetic construct
  source 1..75: mol_type = other DNA
gccgtgacatcaatggtaaaacgcatatcgttcatctgccggatgcgattgcgcgtgatattagcgtgcaactgc

SEQ ID NO: 281918 - DNA, 75 bp, synthetic construct
  source 1..75: mol_type = other DNA
gataaccaccgcattacaacaaaaaagagaaaataacaggagtgatgactatgagtcgtttagtcgtagtatcta

SEQ ID NO: 281919 - DNA, 75 bp, synthetic construct
  source 1..75: mol_type = other DNA
gcccgtatttctgggcgatgatttaaccgatgaatctggcttcgcagtcgttaaccgactgggcggaatgtcagt

SEQ ID NO: 281920 - DNA, 75 bp, synthetic construct
  source 1..75: mol_type = other DNA
actttgagaccggcgacgctggcgaaatgtatgtcgatattaccgggatgcgtaccgataccggtgcgtcagttt

SEQ ID NO: 281921 - DNA, 75 bp, synthetic construct
  source 1..75: mol_type = other DNA
accgaaataccggcctcggcatcagcgacactgagcacatcagccagagcatgcgcgacatactgctgacgccgg

SEQ ID NO: 281922 - DNA, 75 bp, synthetic construct
  source 1..75: mol_type = other DNA
ttgagttgcagattaaggtcgcctgttacatggccgtgctgaaatgggaaccccgcgtcaccctgtcatccgtca

SEQ ID NO: 281923 - DNA, 75 bp, synthetic construct
  source 1..75: mol_type = other DNA
ctttattaaagatgggtgttgttttattaaatttgcttattcctgcaataataatacgattctattcagagtatg

SEQ ID NO: 281924 - DNA, 75 bp, synthetic construct
  source 1..75: mol_type = other DNA
ccacggcgcgcagctttgacgggcgaatgacagttacattaaccggccagcacaacgacaccggccagccacttt

SEQ ID NO: 281925 - DNA, 75 bp, synthetic construct
  source 1..75: mol_type = other DNA
agcgcagttttgacgggcgaatgacggtcacgttaaccggccagcacaacgacaccggccagccactttcgttaa

SEQ ID NO: 281926 - DNA, 75 bp, synthetic construct
  source 1..75: mol_type = other DNA
ctcttgctgataccactccggtaaacgttctgaacgtggcaacaaccaccgctaacgtgttctgggctgatgact

SEQ ID NO: 281927 - DNA, 75 bp, synthetic construct
  source 1..75: mol_type = other DNA
acgatttcttcgagcttcgtgcagatgacctgcgtgatgagcgttcttaccgtcgccgcatccaggcatccgcca

SEQ ID NO: 281928 - DNA, 75 bp, synthetic construct
  source 1..75: mol_type = other DNA
cccggtaacccatgaactgtttgctggcatgaaaacgtcttccttcagcattcctggtattggtgttaacggcat

SEQ ID NO: 281929 - DNA, 75 bp, synthetic construct
  source 1..75: mol_type = other DNA
gagcactccgtgatcctgatccgtggtggtcgtgttaaagacctcccgggggttcgttaccacaccgtacgtggt

SEQ ID NO: 281930 - DNA, 75 bp, synthetic construct
  source 1..75: mol_type = other DNA
gtactcgtgtatatacaaccactcctaaaaaaccgaactccgcgctgcgtaaagtatgccgtgttcgtctgacta

SEQ ID NO: 281931 - DNA, 75 bp, synthetic construct
  source 1..75: mol_type = other DNA
ggccttgcgctgctgctgcaacttcaccgtcgtcgccagaaccttaacatcgattcagtaagtgagatgcgcgga

SEQ ID NO: 281932 - DNA, 75 bp, synthetic construct
  source 1..75: mol_type = other DNA
gcttgcaacggtattgccgggatcggcgctctggtcgacggggctgagattttggcgggcaataaaggcacattg

SEQ ID NO: 281933 - DNA, 75 bp, synthetic construct
  source 1..75: mol_type = other DNA
gctgttattattggacggaaaggaactgttggcaaagtgcacctaagtgagtgtccatgttgggtgagtgacact

SEQ ID NO: 281934 - DNA, 75 bp, synthetic construct
  source 1..75: mol_type = other DNA
ccgctgggacgcaggcgcgggttctgactggcagccgaaaaactcacctccgcagtacgccggtccaatccgttt

SEQ ID NO: 281935 - DNA, 75 bp, synthetic construct
  source 1..75: mol_type = other DNA
acgcagccaacacaacaggcggtacacgaggtaggaacgaccattatcgataatggcgaggcgcaggaattgttc

SEQ ID NO: 281936 - DNA, 75 bp, synthetic construct
  source 1..75: mol_type = other DNA
agcaaagatgtattcgtacacttttccgctatccagggtaatggcttcaaaactctggccgaaggccagaacgtt

SEQ ID NO: 281937 - DNA, 75 bp, synthetic construct
  source 1..75: mol_type = other DNA
atggcaaagattaaaggtcaggttaagtggttcaatgagtctaaaggttttggcttcattactccggctgatggc

SEQ ID NO: 281938 - DNA, 75 bp, synthetic construct
  source 1..75: mol_type = other DNA
atgcctcgaacggcggtgaaatgggcgctggtagcgatactggtgccttttttcctggtgggatgtgtcagcctg

SEQ ID NO: 281939 - DNA, 75 bp, synthetic construct
  source 1..75: mol_type = other DNA
tcgcatcaccgaccagacgggtaaagagcacgttaccactgtccagaccattcttgaccagttaatgccaggcct

SEQ ID NO: 281940 - DNA, 75 bp, synthetic construct
  source 1..75: mol_type = other DNA
tgggtgccggtatcgcgatgagcggcagcctgttaggtccgctgctgttcttcatcctgtttaacctggtacgtc

SEQ ID NO: 281941 - DNA, 75 bp, synthetic construct
  source 1..75: mol_type = other DNA
aactcaagatcattgcaaagcgtaaggactatcaaacttttgatgaggtaatggaatatctggttgacatgttgt

SEQ ID NO: 281942 - DNA, 75 bp, synthetic construct
  source 1..75: mol_type = other DNA
cgcaaaacggtgccgttatggcgctggtcggtggctttgatttcaatcagagcaagtttaaccgcgccacccagg

SEQ ID NO: 281943 - DNA, 75 bp, synthetic construct
  source 1..75: mol_type = other DNA
caggcggtacgtaataacgtgctggactacgacatgcgccacggctatcgcggcccggcaaatgtgctgtggaaa

SEQ ID NO: 281944 - DNA, 75 bp, synthetic construct
  source 1..75: mol_type = other DNA
ggaagtcttcctcgcgattcgcattgaacagttgctgacgaaagacgagatcctcgagctttatctgaacaagat

SEQ ID NO: 281945 - DNA, 75 bp, synthetic construct
  source 1..75: mol_type = other DNA
ccgtcactgtttcatcctcaaccggactgaagcgtggcgataaaatcagcttcactggtgtgaagttcctgtctc

SEQ ID NO: 281946 - DNA, 75 bp, synthetic construct
  source 1..75: mol_type = other DNA
cttcgctccggctgattatcagcagggaaatagctaccgcattatctatctacatgtgcctgcggcgatctggtc

SEQ ID NO: 281947 - DNA, 75 bp, synthetic construct
  source 1..75: mol_type = other DNA
ctttgcccccgctgattatcaacagggaaatagctaccgcattatctacttgcatgtgcctgcggcgatctggtc

SEQ ID NO: 281948 - DNA, 75 bp, synthetic construct
  source 1..75: mol_type = other DNA
aaatcactggcggaaagttgctcctgacagttttgaaatcttaggaacgattgaaactctgcattacctgggtaa

SEQ ID NO: 281949 - DNA, 75 bp, synthetic construct
  source 1..75: mol_type = other DNA
tgccataccagtaattatacgcgtaacaacatacctttcccgggtcccggtatcacaccgatgttctttccgtaa

SEQ ID NO: 281950 - DNA, 75 bp, synthetic construct
  source 1..75: mol_type = other DNA
gtcagattcaggccacaggaagccgtatatattggtaatgatgcctgccatattaccattacctgtaatcagtcc

SEQ ID NO: 281951 - DNA, 75 bp, synthetic construct
  source 1..75: mol_type = other DNA
ctaatgcaaatcacgctgctgattaaaaccgaggggctgacgcaactggtccagcccctgaagcgtccgctttaa

SEQ ID NO: 281952 - DNA, 75 bp, synthetic construct
  source 1..75: mol_type = other DNA
ctgcgcctgccgctgttctacaatttgtcgcccgtcaatcaacgcacggtaattgcgactttgttgaactacttc

SEQ ID NO: 281953 - DNA, 75 bp, synthetic construct
  source 1..75: mol_type = other DNA
ttctgaaagaagcggaaatcatggcggtgttccattacattccgctgcacggttgccctgcgggggaacgctttg

SEQ ID NO: 281954 - DNA, 75 bp, synthetic construct
  source 1..75: mol_type = other DNA
taatgttattgaggcagtgaaagatattacacaagggacgatggctcaggttgtggtggaagcctctggtgcaaa

SEQ ID NO: 281955 - DNA, 75 bp, synthetic construct
  source 1..75: mol_type = other DNA
agttacggcagggaggctcaaaacttttggcggttgttgcgcaagaaggtagtagcaaccgggcaaagattgacc

SEQ ID NO: 281956 - DNA, 75 bp, synthetic construct
  source 1..75: mol_type = other DNA
atacaacagaatcagtgaatactctatcggaaaaatacaagaaggtgcttaatttatttcctgctggtgtcatat

SEQ ID NO: 281957 - DNA, 75 bp, synthetic construct
  source 1..75: mol_type = other DNA
cgcccggacaccatgaacatcgacgaaacgttgattgaagcggcgatcaccgacaaaacgcgcgttatcgtgccg

SEQ ID NO: 281958 - DNA, 75 bp, synthetic construct
  source 1..75: mol_type = other DNA
tggatgacgttatcgcccaggtgaaacagattgtgggtgatatgccggtttacctgacctttgatatcgactgtc

SEQ ID NO: 281959 - DNA, 75 bp, synthetic construct
  source 1..75: mol_type = other DNA
cgagccgggagtgcgatatttaccgctctggcaaagacctgttcaacctgtccttgcccccgctgcgccagaaaa

SEQ ID NO: 281960 - DNA, 75 bp, synthetic construct
  source 1..75: mol_type = other DNA
gaatatctttccatgcatgatgtagaagataaatttccatatgaagtattacacccgcaacatgggattgaaatt

SEQ ID NO: 281961 - DNA, 75 bp, synthetic construct
  source 1..75: mol_type = other DNA
gagttgaggctaaaaatatagagattcatttccctgataacgatggaaatgaatatctttcaatgcatgatgtag

SEQ ID NO: 281962 - DNA, 75 bp, synthetic construct
  source 1..75: mol_type = other DNA
atatttccaaagcccctcttcagaatggccgacgaacccgcagagtcaatatgcctcgtattcgcagaggcgatt

SEQ ID NO: 281963 - DNA, 75 bp, synthetic construct
  source 1..75: mol_type = other DNA
cttacgcactggtagtgaccgcgaccgatcgtgataacgaacaggctcaactttatacacaaattcaggcgcaga

SEQ ID NO: 281964 - DNA, 75 bp, synthetic construct
  source 1..75: mol_type = other DNA
aaattgctgaggcaaatgaaaattttttcaaaaaggtagtattactactaatgaattattggatgatgacattca

SEQ ID NO: 281965 - DNA, 75 bp, synthetic construct
  source 1..75: mol_type = other DNA
cactgcttattgtgtgcggcactgtcacagctgcagataacccgggctggaaaaatgcacgaagcccacagaccg

SEQ ID NO: 281966 - DNA, 75 bp, synthetic construct
  source 1..75: mol_type = other DNA
tgatcctgatgcgcattcctgagatagcctcccgttggggggatggtatctctgcgggtattcaggagctgatac

SEQ ID NO: 281967 - DNA, 75 bp, synthetic construct
  source 1..75: mol_type = other DNA
ggggggcgtcacggtccggcagctattcgccaggtttcgactaatctggcctgggaacacaaccgcttcccgtgg

SEQ ID NO: 281968 - DNA, 75 bp, synthetic construct
  source 1..75: mol_type = other DNA
ccctgcatgacgccactctgcaggcctttctggacggtgtgccaccggatgatcccgccatccgccgcctgaaat

SEQ ID NO: 281969 - DNA, 75 bp, synthetic construct
  source 1..75: mol_type = other DNA
cggtcatcctgaatatcaccagtggtgaaacggacaccactaccctgagtcaggaaatcgacagtcgtctggatc

SEQ ID NO: 281970 - DNA, 75 bp, synthetic construct
  source 1..75: mol_type = other DNA
gaatatcaccagtggtgaaaccgacaccaataccctgagtcaggaaatcgacagtcgtctggatctgcgcattcc

SEQ ID NO: 281971 - DNA, 75 bp, synthetic construct
  source 1..75: mol_type = other DNA
actggctgatgccatcaacagcgttgaccaggataccgtccagacctggttacaggtcggtaagtatatggcgat

SEQ ID NO: 281972 - DNA, 75 bp, synthetic construct
  source 1..75: mol_type = other DNA
tacggcgcaaacatgtcgcagttcgcccggaaccatcagaaggctatgcgccttgttaaagccactacggaatct

SEQ ID NO: 281973 - DNA, 75 bp, synthetic construct
  source 1..75: mol_type = other DNA
tgcttaaccctgaaaaccggcaactgatggaacaaatgatttacggcacgattgagctgggttccacgcaaaagg

SEQ ID NO: 281974 - DNA, 75 bp, synthetic construct
  source 1..75: mol_type = other DNA
tgtgggtatggggattaagcgtagagataccgcagactcagctttctttacgccaaataatactgacaaatttga

SEQ ID NO: 281975 - DNA, 75 bp, synthetic construct
  source 1..75: mol_type = other DNA
ctaaagattgcagcgatggttactcaaaaatttttaccacacttacaggaacgtctgtttcaggcaagttgattg

SEQ ID NO: 281976 - DNA, 75 bp, synthetic construct
  source 1..75: mol_type = other DNA
atgaagcaacctctggcgctgctggggtggggatggggattaagcgtagagataccgcagactcgactttcttca

SEQ ID NO: 281977 - DNA, 75 bp, synthetic construct
  source 1..75: mol_type = other DNA
ctgaaaagcctggcgttgagcgtcgggctggaactggcgggtagcggcgtgcgctgtaatgtggtttcgcctggc

SEQ ID NO: 281978 - DNA, 75 bp, synthetic construct
  source 1..75: mol_type = other DNA
atggatgttgccgacgctgcgcaggtggcgcaggtatgtcagcgactgttagctgaaacggagcgactggacgtg

SEQ ID NO: 281979 - DNA, 75 bp, synthetic construct
  source 1..75: mol_type = other DNA
cgggcttggcagtagccttaccatcaaacaggttgccgattttgatgcgcagatgcgccggatgggtacggatgc

SEQ ID NO: 281980 - DNA, 75 bp, synthetic construct
  source 1..75: mol_type = other DNA
tccgtgtggtggtggaaggtgacgcccgcgtgaaaagcgtcagagtggatcaacccggcgtcagactcagtgcgc

SEQ ID NO: 281981 - DNA, 75 bp, synthetic construct
  source 1..75: mol_type = other DNA
atcgagtggaaagatattactgtgagaatcttgcaaaggaaaaaatcatggctaacggttggacaggtaatatat

SEQ ID NO: 281982 - DNA, 75 bp, synthetic construct
  source 1..75: mol_type = other DNA
cagcgttgagtggaccacagcagataaaacggatgggatgaagttaactgtcgccctgcgtgaaactaccgccgg

SEQ ID NO: 281983 - DNA, 75 bp, synthetic construct
  source 1..75: mol_type = other DNA
ggaaaaaagctaaccccgacaaagcattagatgacaaacctttctggatgaccggtgaagcctggggccacggcg

SEQ ID NO: 281984 - DNA, 75 bp, synthetic construct
  source 1..75: mol_type = other DNA
cagcgacaaaacaggctgggataaatggtggggaaaaaactggatcagaaccgatatcggcgattacgacaatcc

SEQ ID NO: 281985 - DNA, 75 bp, synthetic construct
  source 1..75: mol_type = other DNA
tcggcggcggtacaaaaggtgatttcccgcattatgcctaccatggttattacacacaggactggacgaatcttg

SEQ ID NO: 281986 - DNA, 75 bp, synthetic construct
  source 1..75: mol_type = other DNA
ggcgatttacgcggcctgaccaacaaactggattatctccagcagctcggcgtcaatgccctatggatcagcgcc

SEQ ID NO: 281987 - DNA, 75 bp, synthetic construct
  source 1..75: mol_type = other DNA
aaccggtagcaagcctggtccgtgaatgcccgaaatgggatggattaccgctcacactggatgtcagcgccactt

SEQ ID NO: 281988 - DNA, 75 bp, synthetic construct
  source 1..75: mol_type = other DNA
tacgacctggcagcaaatggcggagaaattgcaggatttcaacgtgttgagctacctctcgtcgcatgatacccg

SEQ ID NO: 281989 - DNA, 75 bp, synthetic construct
  source 1..75: mol_type = other DNA
gtgaagaactgtaaaattccggaggtgaatatgacgattaagaggttttttgtatgtgcaggtgttatgggatgt

SEQ ID NO: 281990 - DNA, 75 bp, synthetic construct
  source 1..75: mol_type = other DNA
aaatataggggcaaatccagactcaacctcgatatcacatcagaagataaagcgattcttgccagaggttgtgtc

SEQ ID NO: 281991 - DNA, 75 bp, synthetic construct
  source 1..75: mol_type = other DNA
aaaagagcgtgtaccagagtcagtattttttgaatgtgaggctattgcccgtagcaaagctctggaactgattaa

SEQ ID NO: 281992 - DNA, 75 bp, synthetic construct
  source 1..75: mol_type = other DNA
attgcgatagtgaagaacggtcaaataacgttacaacccgctgccaccagcaacggtttactcctgctggaacgg

SEQ ID NO: 281993 - DNA, 75 bp, synthetic construct
  source 1..75: mol_type = other DNA
cccgcattatgcctaccacggttattacacacaggactggacgaatcttgatgccaatatgggcaacgaagccga

SEQ ID NO: 281994 - DNA, 75 bp, synthetic construct
  source 1..75: mol_type = other DNA
atgaagaactgtaaaacttcggaggtgaatatgactattaagaagttttttgtatgtgcaggtgtcatgggatgt

SEQ ID NO: 281995 - DNA, 75 bp, synthetic construct
  source 1..75: mol_type = other DNA
tccaccgacaccgatatgcaacgcacgctgtgggtgagcgatgacgccgaagagcagcgtattcgcggctttggc

SEQ ID NO: 281996 - DNA, 75 bp, synthetic construct
  source 1..75: mol_type = other DNA
gcgatggtcagttcgagaccttgatcgttcttctgtgccagcggttgcttggagccgccgtacagggatttgcaa

SEQ ID NO: 281997 - DNA, 75 bp, synthetic construct
  source 1..75: mol_type = other DNA
gcggaatgacagtgaaaaaacagcggatgacgtcattgagcattatgcgtcactggatttgctgatcatcgacga

SEQ ID NO: 281998 - DNA, 75 bp, synthetic construct
  source 1..75: mol_type = other DNA
gtggagatcaccgatgtgatgcgccttacccgtgctgtgaaaaactgctggcggaatgacagcgaaaaaacagcg

SEQ ID NO: 281999 - DNA, 75 bp, synthetic construct
  source 1..75: mol_type = other DNA
gtcattacggcgatattcgtgccaccgcgcagaagtggctggaagaggtggagattcccgccaaccggatcgacg

SEQ ID NO: 282000 - DNA, 75 bp, synthetic construct
  source 1..75: mol_type = other DNA
gccgaccaccttttccggcggcatgcagcagcgtttgcagattgcccgcaacctggtgacgcatccgaagctggt

SEQ ID NO: 282001 - DNA, 75 bp, synthetic construct
  source 1..75: mol_type = other DNA
gtcggcgctatgccggctcatgggagaagtgtcttgctgcgggtaccagcatgatcatgattggcaattgcggta

SEQ ID NO: 282002 - DNA, 75 bp, synthetic construct
  source 1..75: mol_type = other DNA
gactggaaagtggggcaacgcgtcgtgtcagataacagcggtcacgtctgcggcgtttgtccggcctgtgaacaa

SEQ ID NO: 282003 - DNA, 75 bp, synthetic construct
  source 1..75: mol_type = other DNA
caaccggcccccgactggcagacaccgctgaacgggattatttcatcctcagagaacggttgatgaccatgcaga

SEQ ID NO: 282004 - DNA, 75 bp, synthetic construct
  source 1..75: mol_type = other DNA
atgcacaggctgtcatcgctgtgaaatctcttgtactaacttcaatgatggctcagtgggcacttttttctcccg

SEQ ID NO: 282005 - DNA, 75 bp, synthetic construct
  source 1..75: mol_type = other DNA
taaagaaattcctcgtataaaaaaacttcgtgatgccaagcagctagatcattacatgctattcgctaatcgtcg

SEQ ID NO: 282006 - DNA, 75 bp, synthetic construct
  source 1..75: mol_type = other DNA
gagataagctgcgcgctcaaacagcgatgatggaaagccagggggaaaatgcaaagcaatgccgccggattttgc

SEQ ID NO: 282007 - DNA, 75 bp, synthetic construct
  source 1..75: mol_type = other DNA
atgaaagcactggctcggtttggcaaggcctttggcggctacaagatgattgatgtcccacaacccatttgtggc

SEQ ID NO: 282008 - DNA, 75 bp, synthetic construct
  source 1..75: mol_type = other DNA
gcagattgcccgcaacctggtgacgcatccgaagctggtgtttatggacgagccaaccggcgggctggatgtgtc

SEQ ID NO: 282009 - DNA, 75 bp, synthetic construct
  source 1..75: mol_type = other DNA
ggtaatgaacccgaaaacggtaatgttaccgaaagcgggaatatacccaaaaacgggatgttgaatgatcccaaa

SEQ ID NO: 282010 - DNA, 75 bp, synthetic construct
  source 1..75: mol_type = other DNA
gttctgctatcacccgctgtttggcaacttcctgcgccagcgctgccagtgggaactggcggcggagctgccagt

SEQ ID NO: 282011 - DNA, 75 bp, synthetic construct
  source 1..75: mol_type = other DNA
tgaggaagcgactgccgaggcgcgaaagcatcagagcgtacaaccgaccgtcgccaaagaagtaagtcttaattg

SEQ ID NO: 282012 - DNA, 75 bp, synthetic construct
  source 1..75: mol_type = other DNA
gagccggatagagccggaggaagtgagatattttcgtatggaccggagcgctcggtgctcatcgatccgagaact

SEQ ID NO: 282013 - DNA, 75 bp, synthetic construct
  source 1..75: mol_type = other DNA
ccttgcggctttttcccgtatcgcgggcggcggtgttactgcgtccgctcctgtagagctcagggcgctcattga

SEQ ID NO: 282014 - DNA, 75 bp, synthetic construct
  source 1..75: mol_type = other DNA
agggcctgcgtgctggtatggtggcgggcgttatcgttaaccgtacccagcaagagatcccgaatgctgagacga

SEQ ID NO: 282015 - DNA, 75 bp, synthetic construct
  source 1..75: mol_type = other DNA
ttcgctgtacgcaatgagcgaggccgaccgccgtcgcctgctgcgcaccgaatggggcgtggtgcatcagcatcc

SEQ ID NO: 282016 - DNA, 75 bp, synthetic construct
  source 1..75: mol_type = other DNA
ctggatgtgtcggtgcaggcgcgcctgctcgatctgctgcgcggtctggtggtggagctgaatctggcggtggtg

SEQ ID NO: 282017 - DNA, 75 bp, synthetic construct
  source 1..75: mol_type = other DNA
gctcgacggcctgcgccgccaggtgtcggcaggcggcaatatcggcgagcggctgatggcgaccggggcgcgtca

SEQ ID NO: 282018 - DNA, 75 bp, synthetic construct
  source 1..75: mol_type = other DNA
aaggactttgcataattgttgttgataccataaagcggaatataaatataaagagcttcgaaaatcacaatcatg

SEQ ID NO: 282019 - DNA, 75 bp, synthetic construct
  source 1..75: mol_type = other DNA
cccaccattctgatcagcaacctttcaccggaagagttgtgggtgttcatcagcccccgcattgccgacaggatc

SEQ ID NO: 282020 - DNA, 75 bp, synthetic construct
  source 1..75: mol_type = other DNA
gtgtctttaggttatgccttattggaggatatagtaagcaaattaaaacggggtaaatttgaactccaaatacca

SEQ ID NO: 282021 - DNA, 75 bp, synthetic construct
  source 1..75: mol_type = other DNA
atcgatcattttgattgtgctggcacccattgtctcgattgcaattcgtatcgtatcgaagcgttttcgcagcat

SEQ ID NO: 282022 - DNA, 75 bp, synthetic construct
  source 1..75: mol_type = other DNA
caaacagtcaacgggtacgctgttgtcacgtatcacctacgattccgaacaggttgcttcttcttcttccggcgc

SEQ ID NO: 282023 - DNA, 75 bp, synthetic construct
  source 1..75: mol_type = other DNA
tgcgttaatgcgtccgctgaaatcgttgaccaacgttaacgctcagttccagcgcggtatggccgcttgtcagac

SEQ ID NO: 282024 - DNA, 75 bp, synthetic construct
  source 1..75: mol_type = other DNA
tagtatcgaagcgttttcgcaacatcagtaaaaacatgcagaacaccatggggcaggtgaccaccagcgctgaac

SEQ ID NO: 282025 - DNA, 75 bp, synthetic construct
  source 1..75: mol_type = other DNA
gtccatttgtttaacgatacggttgccaacaacattgcttacgcacgtacagaccagtacagccgtgagcaaatt

SEQ ID NO: 282026 - DNA, 75 bp, synthetic construct
  source 1..75: mol_type = other DNA
gcttccattatcggtctgttcgccatgatgttctattacagctggcagttgtcgatcattttgattgtgctggcg

SEQ ID NO: 282027 - DNA, 75 bp, synthetic construct
  source 1..75: mol_type = other DNA
atgtcaggaccttcgaaacccccgccacgcctgcatttgatacgaggcaatccctcaaagcgccccgttaaagac

SEQ ID NO: 282028 - DNA, 75 bp, synthetic construct
  source 1..75: mol_type = other DNA
tgaatgcggaagggatcatttctcagctcgatgcacgtgcgctcgagttactggtggaagcctacaccgaatacc

SEQ ID NO: 282029 - DNA, 75 bp, synthetic construct
  source 1..75: mol_type = other DNA
cccctcaaagcgccccgttaaagaccacaaaaaaaccgctaaaaaggatgaaaaaggtcttcctaaaattccgca

SEQ ID NO: 282030 - DNA, 75 bp, synthetic construct
  source 1..75: mol_type = other DNA
gtaattatatatcatattgttccaatatatcgactaacgtcgtcttgaatggtgatgtttttgttggtagaaaat

SEQ ID NO: 282031 - DNA, 75 bp, synthetic construct
  source 1..75: mol_type = other DNA
agtgatattcgtttgccaactgattactactattttattgccattggtaatcctgacgatagagcattgtggtta

SEQ ID NO: 282032 - DNA, 75 bp, synthetic construct
  source 1..75: mol_type = other DNA
gtggaagggtaccgccgacgagaagcagttgcagcttctgaccgcacatccggcacaccgtttacacagtcagct

SEQ ID NO: 282033 - DNA, 75 bp, synthetic construct
  source 1..75: mol_type = other DNA
ctcgcggccttaataagaaaaactctaagccgacaataatcaataaagattacagtgtagatacactactatcag

SEQ ID NO: 282034 - DNA, 75 bp, synthetic construct
  source 1..75: mol_type = other DNA
acatttaccgacgacccgaacggtgagatcgcgctatgcactttatccgcttttaacctcggagccatccgttca

SEQ ID NO: 282035 - DNA, 75 bp, synthetic construct
  source 1..75: mol_type = other DNA
tgtaaccaactttgcttattacctggcaaagaatggcgttcgttattctgataccgctggcaataaactggtgca

SEQ ID NO: 282036 - DNA, 75 bp, synthetic construct
  source 1..75: mol_type = other DNA
gctgccgccgaaattcttgatacgcatatggcgagcaatctcaaagtcatccaaacccttaatgaaaaaaatagt

SEQ ID NO: 282037 - DNA, 75 bp, synthetic construct
  source 1..75: mol_type = other DNA
aatccattttcgacacttacggtgtgctgccgcgccacccgtcacagttgtacgaactgctgctggaaggtgtgg

SEQ ID NO: 282038 - DNA, 75 bp, synthetic construct
  source 1..75: mol_type = other DNA
aataggacccgtagcgcttcactggtacggcctgatgtatctggtgggtttcatttttgcaatgtggctggcaac

SEQ ID NO: 282039 - DNA, 75 bp, synthetic construct
  source 1..75: mol_type = other DNA
tttaatcagcggattgattggtgaaggtaaagtgcgccatacacaggagaaagaatattctcatattgactgtga

SEQ ID NO: 282040 - DNA, 75 bp, synthetic construct
  source 1..75: mol_type = other DNA
aaaacgcctgcgaaattttttgctgatttagctaaaaagattatatcaaaaaatacaggttttgataagagtagg

SEQ ID NO: 282041 - DNA, 75 bp, synthetic construct
  source 1..75: mol_type = other DNA
aaatacaggttttgataagagtagggttgatgatgatgggggtgatttaaatcatgtaaaacaagttcgtttatc

SEQ ID NO: 282042 - DNA, 75 bp, synthetic construct
  source 1..75: mol_type = other DNA
caataggcgcgtcatacgatgaagagatcacaattaattctccagattggcaaaagctcgcgtgtgtagctttac

SEQ ID NO: 282043 - DNA, 75 bp, synthetic construct
  source 1..75: mol_type = other DNA
gtgaaactgcgtttcgtgatatgctggttttcagacaaaccgtggaatttaaatgcattgagcttgctgcacagc

SEQ ID NO: 282044 - DNA, 75 bp, synthetic construct
  source 1..75: mol_type = other DNA
atgttatactcatttttattttataaagcctatacaaagatgaatttaaataaaaccgttaaaaatcataatatt

SEQ ID NO: 282045 - DNA, 75 bp, synthetic construct
  source 1..75: mol_type = other DNA
tgttagcaattgtcttcgcgagcctgttaagtgcttgtgttcctcaccatcatcaccgccacaacgatggcccgc

SEQ ID NO: 282046 - DNA, 75 bp, synthetic construct
  source 1..75: mol_type = other DNA
ctggtggaagcctacaccgaataccggcatcactgcgaaacactcgatgttgaggggtatacctaccgcacggaa

SEQ ID NO: 282047 - DNA, 75 bp, synthetic construct
  source 1..75: mol_type = other DNA
gtcgaagcactggaaaatctcgacccggattcactgactccgcgtcaggcgctggagtggatttatcgcttgaag

SEQ ID NO: 282048 - DNA, 75 bp, synthetic construct
  source 1..75: mol_type = other DNA
cagatcagccgtgggcaaagccatctggcaccgattaactacatgcgccgccagacgctgaaaaacgccgagcgc

SEQ ID NO: 282049 - DNA, 75 bp, synthetic construct
  source 1..75: mol_type = other DNA
tctcaagctgaaagcccagcacccggagatcctgctgttctatcgcatgggcgacttttacgagctgttttatga

SEQ ID NO: 282050 - DNA, 75 bp, synthetic construct
  source 1..75: mol_type = other DNA
ggttccagagcagccaacgaagccgcattgctggccgggtgttacgtcacattcccggaatggccgcccggtgca

SEQ ID NO: 282051 - DNA, 75 bp, synthetic construct
  source 1..75: mol_type = other DNA
ggttaacggggtggacacaggagagacaacgatgagatggtacaaagcaggtacacaaaacctgaccatcggcag

SEQ ID NO: 282052 - DNA, 75 bp, synthetic construct
  source 1..75: mol_type = other DNA
ccggaactgcgcgcacagttagaaaatatcgatagcgcaccagtacaggcgctgcgtgagaaaatgggcgagttt

SEQ ID NO: 282053 - DNA, 75 bp, synthetic construct
  source 1..75: mol_type = other DNA
acttacgatggtctgtcgctggcgtgggcgtgcgcggaaaatctggcaaataagatcaaagcgttgacgctgttt

SEQ ID NO: 282054 - DNA, 75 bp, synthetic construct
  source 1..75: mol_type = other DNA
cattatggatgccgcgacgcgtcgtaatctggaaatcacccagaatctggcgggtggtgcggaaaatacgctggc

SEQ ID NO: 282055 - DNA, 75 bp, synthetic construct
  source 1..75: mol_type = other DNA
ccgatgggtagtcgtatgctgaaacgctggctacatatgccagtgcgcgatacccgcgtgttgcttgagcgccag

SEQ ID NO: 282056 - DNA, 75 bp, synthetic construct
  source 1..75: mol_type = other DNA
attctggcacgtctggctttacgaactgctcgcccacgcgatctggcccgtatgcgtcacgctttccagcaactg

SEQ ID NO: 282057 - DNA, 75 bp, synthetic construct
  source 1..75: mol_type = other DNA
atgtcgatagtgcaccggtacaggcgctgcgtgagaagatgggcgagtttgccgagctgcgcgatctgctggagc

SEQ ID NO: 282058 - DNA, 75 bp, synthetic construct
  source 1..75: mol_type = other DNA
tgacggcgcgaccgattatctggagcgtctggaagtccgcgagcgtgaacgtaccggcctggacacgctgaaagt

SEQ ID NO: 282059 - DNA, 75 bp, synthetic construct
  source 1..75: mol_type = other DNA
tattgtggcggacaggctggggctgtgcctgcccgcgctgggcaaacctgatgtaatgacccgcgaacaacggga

SEQ ID NO: 282060 - DNA, 75 bp, synthetic construct
  source 1..75: mol_type = other DNA
taaagtgccgtcagctatccacgtaacaccagaggcctacgatggcgggctgctggcaaaagtgcgcgacgggga

SEQ ID NO: 282061 - DNA, 75 bp, synthetic construct
  source 1..75: mol_type = other DNA
atgattttcgcgctaacgcaaattcagtaaaaccacagccaattgcagttctttttaaaacaatgggtgcgtggg

SEQ ID NO: 282062 - DNA, 75 bp, synthetic construct
  source 1..75: mol_type = other DNA
caaaaagcgctctggacagactgaccagagcgaggaaaacaacacagcaggctattctggaacaactgattctga

SEQ ID NO: 282063 - DNA, 75 bp, synthetic construct
  source 1..75: mol_type = other DNA
gtgcgaattgcctgaaagccaaaccggatgcagagagactcatccgaaatctgatttattcaacaaagccgtcaa

SEQ ID NO: 282064 - DNA, 75 bp, synthetic construct
  source 1..75: mol_type = other DNA
atgcatgcatcctgattttctttctgtgtgcttatcctctcctaccatattttgatactgtttttgaacagggct

SEQ ID NO: 282065 - DNA, 75 bp, synthetic construct
  source 1..75: mol_type = other DNA
ttagcatctctttttggtatgctatatagtttcaatttgcaagttgttaacaacactccatcatttgaaccccaa

SEQ ID NO: 282066 - DNA, 75 bp, synthetic construct
  source 1..75: mol_type = other DNA
ctctgctgttttccggaatatcaccggcccaggcgctggatgtcggcgatatatcatcgtttatgaacagtgaca

SEQ ID NO: 282067 - DNA, 75 bp, synthetic construct
  source 1..75: mol_type = other DNA
acccgcgtggacacggcggataacaaaggacgggttgcactttggcagggtgataagttcattcccgtgaaatag

SEQ ID NO: 282068 - DNA, 75 bp, synthetic construct
  source 1..75: mol_type = other DNA
gtgtccgttaaactcaggctacctcacaaaaacagtaccgacagtggtcgccttatcaatatccgtctcgaacgg

SEQ ID NO: 282069 - DNA, 75 bp, synthetic construct
  source 1..75: mol_type = other DNA
ggagatcatcaggcgatggattgatagcgtagcacagatagaaacggaagcttttgctaaaaagctcattgatgc

SEQ ID NO: 282070 - DNA, 75 bp, synthetic construct
  source 1..75: mol_type = other DNA
ggcgagataaacagaatcaatttttatcgaaaaatggagaaaatctgaattcgttaaaatcgcgtcatgtgcagg

SEQ ID NO: 282071 - DNA, 75 bp, synthetic construct
  source 1..75: mol_type = other DNA
agtgtctgtgctgaagaggatttttgcaaaaaaatgcatgacgctttcaggaaacggtttattgatggaaaaaaa

SEQ ID NO: 282072 - DNA, 75 bp, synthetic construct
  source 1..75: mol_type = other DNA
aagagctgaaattcaccagcgtgttcgtgacccacgaccaggaagaagcgatggaagtcgccaaccgcgtggtgg

SEQ ID NO: 282073 - DNA, 75 bp, synthetic construct
  source 1..75: mol_type = other DNA
gctgaacgatatctcactggatattccttctggtcagatggtcgcgctgctggggccgtccggttccggaaaaac

SEQ ID NO: 282074 - DNA, 75 bp, synthetic construct
  source 1..75: mol_type = other DNA
agcgtttattcgttggcctgcaacatgcgcggttgtacaacggcgatcagcgtattgaaacccgcgatgaggagc

SEQ ID NO: 282075 - DNA, 75 bp, synthetic construct
  source 1..75: mol_type = other DNA
atgagccagaacgctacggttaacgttgatgtcaaattaggcgtcaataaattccatgttgatgagggccatcca

SEQ ID NO: 282076 - DNA, 75 bp, synthetic construct
  source 1..75: mol_type = other DNA
gatactgaagccagctacgacttcggtgcgcgttacttcgttatcgatagcgcagctgccactgccggtaaaatt

SEQ ID NO: 282077 - DNA, 75 bp, synthetic construct
  source 1..75: mol_type = other DNA
atactgatgattctacatttctgacccctaacagcgcagagaaaattcgctggagcctgacagaaatcaatacag

SEQ ID NO: 282078 - DNA, 75 bp, synthetic construct
  source 1..75: mol_type = other DNA
cagttccacgttggcgcgcatcgctggccgctgggatatacacctgcgtatcaggggccggtagatcttttcctg

SEQ ID NO: 282079 - DNA, 75 bp, synthetic construct
  source 1..75: mol_type = other DNA
acagcgtgtggcactggcgcgcgcgctggctgtagaaccgcaaattctgctgcttgatgaaccgtttggcgcgct

SEQ ID NO: 282080 - DNA, 75 bp, synthetic construct
  source 1..75: mol_type = other DNA
gtcggtttcgtgttccagcattacgcgctgttccgtcatatgacggtattcgacaatatcgcttttggcctgacg

SEQ ID NO: 282081 - DNA, 75 bp, synthetic construct
  source 1..75: mol_type = other DNA
tcgtacaaccgctggggtggtacaacgaaccgctgacagttgtgatgcatggcgatgacgccccgcaacgcggtg

SEQ ID NO: 282082 - DNA, 75 bp, synthetic construct
  source 1..75: mol_type = other DNA
gccggtacaggtactggaagccagcccgaaaggccactacacccaattagttgtgcagccgctggggtggtatga

SEQ ID NO: 282083 - DNA, 75 bp, synthetic construct
  source 1..75: mol_type = other DNA
ccgaaaggtcactacacccaattagtggtgcagccgctggggtggtacaacgaactgctgacggtcgtgatgcat

SEQ ID NO: 282084 - DNA, 75 bp, synthetic construct
  source 1..75: mol_type = other DNA
atgcggaacctgtcgggtgctttgcggcaacactatcctcgaacaatggcaataccctgctggcactttcggtat

SEQ ID NO: 282085 - DNA, 75 bp, synthetic construct
  source 1..75: mol_type = other DNA
tagcgatactgatgggaatattattatcaccctcagtatttgcaacgacggatattaatgttgagttcacggcca

SEQ ID NO: 282086 - DNA, 75 bp, synthetic construct
  source 1..75: mol_type = other DNA
gaatccctaagatgggtctggataagatcgcgaataaaacgacagaatctcaggctgattttaaactggttgcta

SEQ ID NO: 282087 - DNA, 75 bp, synthetic construct
  source 1..75: mol_type = other DNA
tcaacttctgtgctaaacgcattctgatacgtaatcaaatgagtaaaataatcagacatacagacacagacgaaa

SEQ ID NO: 282088 - DNA, 75 bp, synthetic construct
  source 1..75: mol_type = other DNA
gtttgaccagttcctgcgtatgatgcagggcggggcgcagtttggcggcggttatcagcagcagtctggcggagg

SEQ ID NO: 282089 - DNA, 75 bp, synthetic construct
  source 1..75: mol_type = other DNA
atccaaaggtcgcgtcacggaggctgatattcatatcgccagccagttgatggaccgaatgaatcttcatggcgc

SEQ ID NO: 282090 - DNA, 75 bp, synthetic construct
  source 1..75: mol_type = other DNA
gcaagcgcagcgtggcccgacgctggaagatgcctgtaatgtgctgggcgtgaagccgacggatgatgcgaccac

SEQ ID NO: 282091 - DNA, 75 bp, synthetic construct
  source 1..75: mol_type = other DNA
aaaaagcgctgcatgttgatgtgaaagatgtccccggcgctaatggcgtttcttggtgcggaactgaaaagtggt

SEQ ID NO: 282092 - DNA, 75 bp, synthetic construct
  source 1..75: mol_type = other DNA
atcagcatggcatcgatgctgtattcagcgtgttgaacagtattgttacgctggatgaagctttcagcggggctt

SEQ ID NO: 282093 - DNA, 75 bp, synthetic construct
  source 1..75: mol_type = other DNA
ggtgcttcgcgtatttttggcccgcaaaaaggggctaatgaagccacgattatcgagctggacaagaatctctct

SEQ ID NO: 282094 - DNA, 75 bp, synthetic construct
  source 1..75: mol_type = other DNA
gcgtcaggcgtgggttaccgggccattgggcgagaaagtgaaggccagttgggggatttctggcgacggcaaaac

SEQ ID NO: 282095 - DNA, 75 bp, synthetic construct
  source 1..75: mol_type = other DNA
cagcgtgttgaacagcattgttaccctggatgaagctttcagcggggcttatgacaatatttaccgcgcttcacg

SEQ ID NO: 282096 - DNA, 75 bp, synthetic construct
  source 1..75: mol_type = other DNA
cacggcaaagtaccgattggcgtagcgaatgtcgcgaagaaataccataaaccggtaattggtattgcagggagt

SEQ ID NO: 282097 - DNA, 75 bp, synthetic construct
  source 1..75: mol_type = other DNA
aatcagttggatcgacactaccctgtcaggtaatcagtccggcacctctccaaaactgattatcccacttgcatc

SEQ ID NO: 282098 - DNA, 75 bp, synthetic construct
  source 1..75: mol_type = other DNA
gtaatccggtacagcaggcgctgaaagatttccacgagaagtactattccgccaatctgatgaaggcggttattt

SEQ ID NO: 282099 - DNA, 75 bp, synthetic construct
  source 1..75: mol_type = other DNA
tgaaagaggtgctggcctatcgcgacgccttaaaatcaggggctcgaccagagtttatggttatcggcaacatga

SEQ ID NO: 282100 - DNA, 75 bp, synthetic construct
  source 1..75: mol_type = other DNA
ataaaggcctggctaatcgcgatcaggttgtggcggcaatttttagctatctcaatctgttacgtgaaaaaggca

SEQ ID NO: 282101 - DNA, 75 bp, synthetic construct
  source 1..75: mol_type = other DNA
ctgatccgcaggcggttaaatcgctttcggcgctggtagtgcccgttgggtcgctggaagatcctgaggcgtatc

SEQ ID NO: 282102 - DNA, 75 bp, synthetic construct
  source 1..75: mol_type = other DNA
aaggtaaattctacgcactgccgcaatccccacagttgttcaaacagctgctgatgatgtccggttttgaccgtt

SEQ ID NO: 282103 - DNA, 75 bp, synthetic construct
  source 1..75: mol_type = other DNA
acatcgaaactccgatgctgaccaaagccacgccggaaggcgcgcgtgactacctggtgccttctcgtgtgcaca

SEQ ID NO: 282104 - DNA, 75 bp, synthetic construct
  source 1..75: mol_type = other DNA
actaccgcgccacccgtcgcaactttacgagatgctactggaaggtgtggtgctgtttattatcctcaacctgta

SEQ ID NO: 282105 - DNA, 75 bp, synthetic construct
  source 1..75: mol_type = other DNA
tgcgtctgaaagtgggtaaagaccttggtctgaccgacgaaagcaaatgggcgccgctgtgggttatcgacttcc

SEQ ID NO: 282106 - DNA, 75 bp, synthetic construct
  source 1..75: mol_type = other DNA
gtccggcgaacgatccgaaaggccgcgtcgctgctctgcgtgttccgggcggtgcatcgctgacccgtaagcaga

SEQ ID NO: 282107 - DNA, 75 bp, synthetic construct
  source 1..75: mol_type = other DNA
gaaatattatgcggcccagctgctcgacaatatggcccgccgtcgagccccagctgttaacgtattggatttgtg

SEQ ID NO: 282108 - DNA, 75 bp, synthetic construct
  source 1..75: mol_type = other DNA
gcttcgggaagttcacccgcattaatcattccgtcaacttccgacactacatcaaccaccgattatattggtatg

SEQ ID NO: 282109 - DNA, 75 bp, synthetic construct
  source 1..75: mol_type = other DNA
atcgccttcggtatttgcaacggatgttaatgtcgattttaccgctaccgtgaaagcaacaacctgtaatattac

SEQ ID NO: 282110 - DNA, 75 bp, synthetic construct
  source 1..75: mol_type = other DNA
atgataaaaatcacaccacataaaataacaatactcatgggactattgttatcgccttcggtatttgcaacggat

SEQ ID NO: 282111 - DNA, 75 bp, synthetic construct
  source 1..75: mol_type = other DNA
gggttcaaaaaacgtaatgctggtgatgaaacatttttaaaaccaaacagcgcagaaaaaatacgctggagtgca

SEQ ID NO: 282112 - DNA, 75 bp, synthetic construct
  source 1..75: mol_type = other DNA
cggtagcacttcgcgaaacccgaccaggttcaggaagagcaggtagttttaaagcacttgcgacattcaatttca

SEQ ID NO: 282113 - DNA, 75 bp, synthetic construct
  source 1..75: mol_type = other DNA
gatggcaataatcagtacacgctacggatattaaatgttgctctggataaaatcataaacaagatgccagaagca

SEQ ID NO: 282114 - DNA, 75 bp, synthetic construct
  source 1..75: mol_type = other DNA
ctttcctcgttaggagacacatcttttaaacgacttatgagtcgaccacatataccaaactatgtttacaatctt

SEQ ID NO: 282115 - DNA, 75 bp, synthetic construct
  source 1..75: mol_type = other DNA
aggtgcattataaagataaggcctgatgctttattgcaagttgataatgtgacaattaatgatatagatgtagat

SEQ ID NO: 282116 - DNA, 75 bp, synthetic construct
  source 1..75: mol_type = other DNA
gttgtgaaggccgatgccgataaacaggcgctggagctgctggtgaaagcgtgccccgcaggtctgtacaagaag

SEQ ID NO: 282117 - DNA, 75 bp, synthetic construct
  source 1..75: mol_type = other DNA
attagctggattgatacaaccctgacaggaaatcaatcaggaagttcacccgcgctaattatccccctggccagt

SEQ ID NO: 282118 - DNA, 75 bp, synthetic construct
  source 1..75: mol_type = other DNA
gtcttgaaatgactgtcgcgctacgtgaaaccgcagcagggcaaggcgtgccggggatttttcgcgccctggcga

SEQ ID NO: 282119 - DNA, 75 bp, synthetic construct
  source 1..75: mol_type = other DNA
attcaggtcatattaatgtagggttatgtgcttgggctaatgtatatgattgcaaggtttctaatttaaaaataa

SEQ ID NO: 282120 - DNA, 75 bp, synthetic construct
  source 1..75: mol_type = other DNA
ctggaagcattgtcggattacgttgggctgttaacgcgtaacccgcgctacgccgccgtgacgaccgccgcgagt

SEQ ID NO: 282121 - DNA, 75 bp, synthetic construct
  source 1..75: mol_type = other DNA
aaaaggccgtgccacgtaactacgatgattcgctgccgggtgacagtaaagcattcctcgcgcaactctcgctgc

SEQ ID NO: 282122 - DNA, 75 bp, synthetic construct
  source 1..75: mol_type = other DNA
gtccggtggcccgccaggtggaagggatgttcgtgcagatgatgttgaaaagcatgcgcgacgctttaccaaaag

SEQ ID NO: 282123 - DNA, 75 bp, synthetic construct
  source 1..75: mol_type = other DNA
ggtagctccagtcgcccctgaaccgatacaggaaggccaaccggaagatcagccacaaacctcgcaaacgcaacc

SEQ ID NO: 282124 - DNA, 75 bp, synthetic construct
  source 1..75: mol_type = other DNA
ccagtgccgcctgggatgcacaatcgcttaatgacctgaaagcgaaagtgggcgaagatccggcggcaaatattc

SEQ ID NO: 282125 - DNA, 75 bp, synthetic construct
  source 1..75: mol_type = other DNA
atgattagcgacagcaaactactggcaagtgccgcctgggatgcgcaatcgcttaacgatctgaaagcgaaagcg

SEQ ID NO: 282126 - DNA, 75 bp, synthetic construct
  source 1..75: mol_type = other DNA
ttttacgacgtcaggatgtttcgcccgcttcgatgaaccggctgtgaacggggattcgcccgacagtcccttcca

SEQ ID NO: 282127 - DNA, 75 bp, synthetic construct
  source 1..75: mol_type = other DNA
gctggaacggttgatcgcgcaaaacccggttagttacaacttccatgtgccgttggcagatggtggcgtcctgct

SEQ ID NO: 282128 - DNA, 75 bp, synthetic construct
  source 1..75: mol_type = other DNA
ttgccggagcggggattgtgcctgcgtcgtcaccgttgggtgagtggcgcgaaacaggcgtcaaactttctacca

SEQ ID NO: 282129 - DNA, 75 bp, synthetic construct
  source 1..75: mol_type = other DNA
gaacaaccactgccagatgaagcgacaccagcggcaccgatgaaattcccgctcgaaaccgtggtgcgttatcaa

SEQ ID NO: 282130 - DNA, 75 bp, synthetic construct
  source 1..75: mol_type = other DNA
aacagcacgataaacgttccgacatcaaagaacgtgaatggcaggttgataaagcgcgtatcatgaaaaacgctc

SEQ ID NO: 282131 - DNA, 75 bp, synthetic construct
  source 1..75: mol_type = other DNA
gactttggcctgtctgctgcatccgacccccgcgctgagcggtttcccgcatcaggccgcgacccaggttattgc

SEQ ID NO: 282132 - DNA, 75 bp, synthetic construct
  source 1..75: mol_type = other DNA
ccagcagcatgacgaacagggcacgcaaccggacagcgtgaccgctgaaaattatgcgcgtgttgttgctgaggt

SEQ ID NO: 282133 - DNA, 75 bp, synthetic construct
  source 1..75: mol_type = other DNA
atgacagaagccgaaatactgggattaatccgccgcgtcgccggaatcagccagcaggctgacgaaaaaaccgcg

SEQ ID NO: 282134 - DNA, 75 bp, synthetic construct
  source 1..75: mol_type = other DNA
ccagcaggctggcgaacaggaggccacgcagccggacagcgttatcgctgagaactatgcgcgtgtagtagctga

SEQ ID NO: 282135 - DNA, 75 bp, synthetic construct
  source 1..75: mol_type = other DNA
atgaccgagaccgaagcgctcgggataatccgcagtattaccggaatcagccagcaggctggcgaacaggaggcc

SEQ ID NO: 282136 - DNA, 75 bp, synthetic construct
  source 1..75: mol_type = other DNA
taatccgccgcgttaccggaatcagccaggaagcaggcaaacaggaggccacgcagccggacagcgtgatagccg

SEQ ID NO: 282137 - DNA, 75 bp, synthetic construct
  source 1..75: mol_type = other DNA
aacggcgtggatatgcgcgacatacggatcagattccttgagttgctggcataccgtcgccgttctcaacaacga

SEQ ID NO: 282138 - DNA, 75 bp, synthetic construct
  source 1..75: mol_type = other DNA
attatgcgcgtgtggttgctgaggtgatgcgccgtgatggtattgagcttaacggcgtggatatgcgcaacatac

SEQ ID NO: 282139 - DNA, 75 bp, synthetic construct
  source 1..75: mol_type = other DNA
atgaccgaagccgaaatgctcaaaatgattcgccgtgctgccggaatcagccaggcagcaggcaaacaggaggcc

SEQ ID NO: 282140 - DNA, 75 bp, synthetic construct
  source 1..75: mol_type = other DNA
tacggatcagagttctggagttgttgtcatatcgtcgccgcgtggagatgtatcgggagagcgagaaaaagactt

SEQ ID NO: 282141 - DNA, 75 bp, synthetic construct
  source 1..75: mol_type = other DNA
tacgcaatatacgcaccagagttctggagttgttgtcatatcgtcgccgcgtggagatgtaccaggagaaagaaa

SEQ ID NO: 282142 - DNA, 75 bp, synthetic construct
  source 1..75: mol_type = other DNA
ataccgtcgccgcgtggagatgtatcgggagaaggagaaaatcacgtaccactggaagaagccggaacggttgcg

SEQ ID NO: 282143 - DNA, 75 bp, synthetic construct
  source 1..75: mol_type = other DNA
tgattcgccgtgctgccggaatcagaccaccagcaggcaaacaggaggccacgcatccggacagcgtgatagccg

SEQ ID NO: 282144 - DNA, 75 bp, synthetic construct
  source 1..75: mol_type = other DNA
gatgcgccgtgacggtatcgagcttaacggcgtggatatgcgcaacatacgcaccagagttctggagatgttgtc

SEQ ID NO: 282145 - DNA, 75 bp, synthetic construct
  source 1..75: mol_type = other DNA
gaaaaacaaacctccgcgcgccgttttactcgcagtcagtcgctgaatgtggtggaacgtcaggcaattccagaa

SEQ ID NO: 282146 - DNA, 75 bp, synthetic construct
  source 1..75: mol_type = other DNA
atggccgtttctggcctgcatggcatgatttgcgcttttggacgggagattcagtgtgctgattggctatgtaag

SEQ ID NO: 282147 - DNA, 75 bp, synthetic construct
  source 1..75: mol_type = other DNA
atcgcctgactcccgaacaactcgtctggatgactcgcctcactgaagccggttactactgctttgaggcgcgca

SEQ ID NO: 282148 - DNA, 75 bp, synthetic construct
  source 1..75: mol_type = other DNA
atggtggcagagggccaaaagaagggatatcccgatctttctatagaccttgcttgtgggggataccacggaatg

SEQ ID NO: 282149 - DNA, 75 bp, synthetic construct
  source 1..75: mol_type = other DNA
atgaattatcaattatatgtccgtaattacagtcgtaacaccaactacgagatcgttgctacggttgatggcctg

SEQ ID NO: 282150 - DNA, 75 bp, synthetic construct
  source 1..75: mol_type = other DNA
gcactcaacggttcagggcgtatctgctgaacgcgcctggcgcgatccggcagagatgatcgttattaattattc

SEQ ID NO: 282151 - DNA, 75 bp, synthetic construct
  source 1..75: mol_type = other DNA
aactggaatatgctattcgcgatggtaattttaattctctacctattacgcgtgtttatgattcatccaataatg

SEQ ID NO: 282152 - DNA, 75 bp, synthetic construct
  source 1..75: mol_type = other DNA
aagctttgacaaaacgctgcaggaagccgccatcaaacacctctggacctatccctacacgccaaaaatgaacgc

SEQ ID NO: 282153 - DNA, 75 bp, synthetic construct
  source 1..75: mol_type = other DNA
gaaacaggatttgttattggtgatactggtcccggtgtttcaactagagatcgagatataatatttgatatggga

SEQ ID NO: 282154 - DNA, 75 bp, synthetic construct
  source 1..75: mol_type = other DNA
aagagaataaaaattgcaatatgtggtggacccatacaccttgttgtaatgacaacattttgcggctattcttga

SEQ ID NO: 282155 - DNA, 75 bp, synthetic construct
  source 1..75: mol_type = other DNA
gtggacccatacatctccttgccggatggcgggtaagaggctaagatctgaattgctaggttcattcgttggcct

SEQ ID NO: 282156 - DNA, 75 bp, synthetic construct
  source 1..75: mol_type = other DNA
atagatttgcttgacattcgaccaaaattccgtcgtgctatagcgcctgtaggccaagacctgttaactcagtca

SEQ ID NO: 282157 - DNA, 75 bp, synthetic construct
  source 1..75: mol_type = other DNA
ttcagccgtgcagcccggctgttcccggtcggtatcagccagataatcacagataacggaaaagagttcctggga

SEQ ID NO: 282158 - DNA, 75 bp, synthetic construct
  source 1..75: mol_type = other DNA
gaaaaacgcgctgccgccgtgctctgcgcaagcctttccggctgacaacactggctatgcgccgccaccgtgtcg

SEQ ID NO: 282159 - DNA, 75 bp, synthetic construct
  source 1..75: mol_type = other DNA
ctgcacgaaaacatcgaaatctgctctaaatacctggcgcgcatgtccaaaatcggcatgactctggaaatcgaa

SEQ ID NO: 282160 - DNA, 75 bp, synthetic construct
  source 1..75: mol_type = other DNA
aaagactccgtaagctacggcgtagtgaaaatgaacatcgataccgatacccaatgggcaacctgggaaggcgtt

SEQ ID NO: 282161 - DNA, 75 bp, synthetic construct
  source 1..75: mol_type = other DNA
atttacaacatcctgacgccggaacagaaaaagcaatttaatgctaattttgagaagcgtctgacagaacgtcca

SEQ ID NO: 282162 - DNA, 75 bp, synthetic construct
  source 1..75: mol_type = other DNA
cccgcgccgctgcactcactgccacgccgcaggtcgacaaagtggtgttatcacggttgattgatatcaccaccg

SEQ ID NO: 282163 - DNA, 75 bp, synthetic construct
  source 1..75: mol_type = other DNA
gtcatcaccacttagcgaatggcgcgaaaccggtgtcaaactttctaccatgttgaacgtttttggattgcatta

SEQ ID NO: 282164 - DNA, 75 bp, synthetic construct
  source 1..75: mol_type = other DNA
gggcatcaaaaatccggtgatggtcggggcgattcccttcgatccacgtcagccttcgtcgctgtatattcccga

SEQ ID NO: 282165 - DNA, 75 bp, synthetic construct
  source 1..75: mol_type = other DNA
gccataaaaatgtcccgtatctggctggacagaaccattctgctcctgcttgttatcctgtcattcgtcatgctt

SEQ ID NO: 282166 - DNA, 75 bp, synthetic construct
  source 1..75: mol_type = other DNA
gtaaaggttttttctcaggcgcggtaataggggctttaggtgggttgattggcctcggaggggctgaatttcgcc

SEQ ID NO: 282167 - DNA, 75 bp, synthetic construct
  source 1..75: mol_type = other DNA
ggatactggggtggtcagagctggtgccgggtgctgaggacgtactgccagcgccgctgccgccgtaccgggtgc

SEQ ID NO: 282168 - DNA, 75 bp, synthetic construct
  source 1..75: mol_type = other DNA
agaaaaagcaatttaatgcgaattttgagaagcgtctgacagaacgcccggcagcaaaaggtaaaatgcctgaaa

SEQ ID NO: 282169 - DNA, 75 bp, synthetic construct
  source 1..75: mol_type = other DNA
gcgaggaagaattacagcgtagcgtgcctgaaatcgccgcccgctatcgtcgccagctaaaagcccgtctcagtg

SEQ ID NO: 282170 - DNA, 75 bp, synthetic construct
  source 1..75: mol_type = other DNA
aaaaacttcgcctgattcgagaggcagagggattgtcacgtagagagatggaagaggtgacaggggtatctcaat

SEQ ID NO: 282171 - DNA, 75 bp, synthetic construct
  source 1..75: mol_type = other DNA
aatgacattttttgtcattggtaatattgtattgtcatctttttttaaggagggggtggcagaacttaacaaatt

SEQ ID NO: 282172 - DNA, 75 bp, synthetic construct
  source 1..75: mol_type = other DNA
ggacagcaacgactgaccgccgtgcaacgggccatgcagcagggggccgcgaatgataactggtttgaaccggag

SEQ ID NO: 282173 - DNA, 75 bp, synthetic construct
  source 1..75: mol_type = other DNA
ccctcttctccccgtcactcgctcgccattggggttgcctcaattgtggctgtgctctggttgtctgcggggaaa

SEQ ID NO: 282174 - DNA, 75 bp, synthetic construct
  source 1..75: mol_type = other DNA
catcgtgatgggcgtaagagcgcaacaaaaaaaaaaacccgccgttcgctggtggaagccgcatttagccaatta

SEQ ID NO: 282175 - DNA, 75 bp, synthetic construct
  source 1..75: mol_type = other DNA
agggacgtaactggtatcacgtggcaccggtggcgttaagtcttctggtgctgcttccggccattgttctgcaca

SEQ ID NO: 282176 - DNA, 75 bp, synthetic construct
  source 1..75: mol_type = other DNA
gcgattatccagatcattttgtttaaaggaagcccggtcgctattgtgctttctgccatggccggcgggttcgcc

SEQ ID NO: 282177 - DNA, 75 bp, synthetic construct
  source 1..75: mol_type = other DNA
tggtggacccgagagattcccgtggcgccacccggtcatgtactggattgtgtgtgatacccgcagggcgatgta

SEQ ID NO: 282178 - DNA, 75 bp, synthetic construct
  source 1..75: mol_type = other DNA
gggcgaaaaaggtggcttcaggacagcagatacccgatccggtgatcagcatacaggcaaagccagaacccatga

SEQ ID NO: 282179 - DNA, 75 bp, synthetic construct
  source 1..75: mol_type = other DNA
cgtgacagcaatggcaaaaaggagcatgtcgctagaattttcaatgaactatttgtccagttacaggctgcattt

SEQ ID NO: 282180 - DNA, 75 bp, synthetic construct
  source 1..75: mol_type = other DNA
aacaaattagagaatctctaaaaacactatctcatcatggatatcaaataattttctctacccattcatctcaaa

SEQ ID NO: 282181 - DNA, 75 bp, synthetic construct
  source 1..75: mol_type = other DNA
tgatccgcatagctgtgatgacggtatccacgcagccgcaactggcgctatttggctgggggcgattcagggttt

SEQ ID NO: 282182 - DNA, 75 bp, synthetic construct
  source 1..75: mol_type = other DNA
acgcagccaccctgggagggataacgcctgcacagtggctcatggaggaatgcaggcgagggaaggcagcaggac

SEQ ID NO: 282183 - DNA, 75 bp, synthetic construct
  source 1..75: mol_type = other DNA
gcagtacttttggcaaggattcagacatcgtgatgggcgtaagagcgcaacaaaaaaaaaaaaccccgccgttcg

SEQ ID NO: 282184 - DNA, 75 bp, synthetic construct
  source 1..75: mol_type = other DNA
aaccggctgaccgggaaacgatggcggcagaactgcaacgcactaatccggcggaactgctgtatgcagaagatt

SEQ ID NO: 282185 - DNA, 75 bp, synthetic construct
  source 1..75: mol_type = other DNA
gccatccggtggttgaacaggtactgaacgagccgtttatcgctaacccgctgaatctgtcgccacagcgccgca

SEQ ID NO: 282186 - DNA, 75 bp, synthetic construct
  source 1..75: mol_type = other DNA
cgtctcgcgcggctatttgcagcttaatcccgaggtcattatcgaagcgctggacgacgcgccgccggtttcacc

SEQ ID NO: 282187 - DNA, 75 bp, synthetic construct
  source 1..75: mol_type = other DNA
ccgaacgccgccgctacgcaagtggatggtacgcaaatgtctttgctgtccgtaccagaagaaacttcgcctgcg

SEQ ID NO: 282188 - DNA, 75 bp, synthetic construct
  source 1..75: mol_type = other DNA
actgcgtgagctggaaagcatttcgccgaacgccgccgctacgcaagtggatggtacgcaaatgtctttgctgtc

SEQ ID NO: 282189 - DNA, 75 bp, synthetic construct
  source 1..75: mol_type = other DNA
gcaacagagcgcgagcgcgctggcggaactcgacgtgctggttaacctggcggaacgggcctataccctgaacta

SEQ ID NO: 282190 - DNA, 75 bp, synthetic construct
  source 1..75: mol_type = other DNA
gagcgttctttatttgcaacccgacaaactttacttgatctgaattatgcccgtcaggttaacgaaatttcttta

SEQ ID NO: 282191 - DNA, 75 bp, synthetic construct
  source 1..75: mol_type = other DNA
ggcgaataatgcattgcaactgttgctgggaagctacggcaagctgccgcaagcgcagacagtaaacagcgacag

SEQ ID NO: 282192 - DNA, 75 bp, synthetic construct
  source 1..75: mol_type = other DNA
atgttcattctctggtatagtgccagcagtacttttggcaaggattcagacatcgtgatgggcgtaagagcgaaa

SEQ ID NO: 282193 - DNA, 75 bp, synthetic construct
  source 1..75: mol_type = other DNA
tttgctgtggtgggtggtattcgcgctaacattttcaccccaacagaagcaggtgcagtagcggtgctaatcgtg

SEQ ID NO: 282194 - DNA, 75 bp, synthetic construct
  source 1..75: mol_type = other DNA
atcagcgaggcgcgccccatcgctttgacgcaactttctcatagccagtgcgaattactggcaagcgacgaaatg

SEQ ID NO: 282195 - DNA, 75 bp, synthetic construct
  source 1..75: mol_type = other DNA
aaactttacttgacctgaattatgcccgtcaggttaacgaaatttctttatataccgcacttggtggcggttggc

SEQ ID NO: 282196 - DNA, 75 bp, synthetic construct
  source 1..75: mol_type = other DNA
gatatttatagcaaagatagtggatgtctacttacactcaatgagaatgctttgctcagtcaggaagtgaagaaa

SEQ ID NO: 282197 - DNA, 75 bp, synthetic construct
  source 1..75: mol_type = other DNA
agttggtggacttgcccgaaggcctgggccggcacatccaccagaaccgcctgctcaagctggcccgcgagggtg

SEQ ID NO: 282198 - DNA, 75 bp, synthetic construct
  source 1..75: mol_type = other DNA
ggagcatctggacgcattgcagtcattcagtgtggtggaaaaagtaaattccggtcgagaaaaccccgggcagtg

SEQ ID NO: 282199 - DNA, 75 bp, synthetic construct
  source 1..75: mol_type = other DNA
cgctgttcatcctggactggctgcaaagtgttgaactgcgccgccgcgtgcatgccggcctgaacaaaggtgagg

SEQ ID NO: 282200 - DNA, 75 bp, synthetic construct
  source 1..75: mol_type = other DNA
ctattatcgcatttatcaccattaggttgggaacatatcaatctgacaggcgattatatctggaaaaacaaccgg

SEQ ID NO: 282201 - DNA, 75 bp, synthetic construct
  source 1..75: mol_type = other DNA
aggttaattcagttaaaattaaagcagtatattgatatcggacaggctttatctgaggcccatgattccggtgaa

SEQ ID NO: 282202 - DNA, 75 bp, synthetic construct
  source 1..75: mol_type = other DNA
gcgaccctggccgccgtggtgctggagagcaccgcgaccgtgatcgatgagctggtcgatctgcatgaccgcatc

SEQ ID NO: 282203 - DNA, 75 bp, synthetic construct
  source 1..75: mol_type = other DNA
ataccgtcgccgttctcaacaacggagggagagcgcgaaaaatacttaccagtggaagaagccggaacggttgca

SEQ ID NO: 282204 - DNA, 75 bp, synthetic construct
  source 1..75: mol_type = other DNA
ggtgatgcgccgtgacggtatcgagcttaacggcgttgatatgcgcgacatacgaatcagagttctggagatgtt

SEQ ID NO: 282205 - DNA, 75 bp, synthetic construct
  source 1..75: mol_type = other DNA
tgagttgctggcctaccgtcgccgcgtggagatgtatcgggagaaggagaaaataacgtaccactggaagaagcc

SEQ ID NO: 282206 - DNA, 75 bp, synthetic construct
  source 1..75: mol_type = other DNA
atgattgaggaacaagacgcggagcaggaggaaaccatgcccgggcgctttgaactaaaaccaaccctggagaaa

SEQ ID NO: 282207 - DNA, 75 bp, synthetic construct
  source 1..75: mol_type = other DNA
accattgatacggggaataatcaacaggtcctgtttacccgccagccggatggcagttttattcgtgcgcggtag

SEQ ID NO: 282208 - DNA, 75 bp, synthetic construct
  source 1..75: mol_type = other DNA
gccatctttatgatgctttaagcatagttccatcatggtgggggataaagcaagttacgcaaggtgcacggcaag

SEQ ID NO: 282209 - DNA, 75 bp, synthetic construct
  source 1..75: mol_type = other DNA
cgattatatctggaaaaacaaccggataccgacttcaggtaagtttcgtcgtttgagaccagttaagatcgacaa

SEQ ID NO: 282210 - DNA, 75 bp, synthetic construct
  source 1..75: mol_type = other DNA
ccgggttaaatgacatcgcaaaggatctggaggcgcttagccgcgctgaaaataacaaggttctgcgtgatgcca

SEQ ID NO: 282211 - DNA, 75 bp, synthetic construct
  source 1..75: mol_type = other DNA
ccgggttgcaggatattgcccgcgatctgcaaacgctcagcaaggccgaaaataacaaagttctccgggagtcga

SEQ ID NO: 282212 - DNA, 75 bp, synthetic construct
  source 1..75: mol_type = other DNA
ggagacgctcagcagggcagaaaacaataaggtgctgcgcgatgccacccgtgccggtgctgaagttatgcggga

SEQ ID NO: 282213 - DNA, 75 bp, synthetic construct
  source 1..75: mol_type = other DNA
ctgcggctcgactgccacccgaacctgcgtggcctatacgagcggctcggattcacccacgtcgacactttcaat

SEQ ID NO: 282214 - DNA, 75 bp, synthetic construct
  source 1..75: mol_type = other DNA
catccgcagactcatcttgcttgcttcagcggtgtgctgcaagcggatgcgtacgccgggttcaacgagctgtat

SEQ ID NO: 282215 - DNA, 75 bp, synthetic construct
  source 1..75: mol_type = other DNA
aatggtgggataacggaagctgcctgctgggctcatgcccgccgaaagatccacgatgtgcacgtccgcatcccg

SEQ ID NO: 282216 - DNA, 75 bp, synthetic construct
  source 1..75: mol_type = other DNA
caagggggaaatctggaggacggttctctcagattgaaatatcaggtgctttttctggaagatgaatttgctgtg

SEQ ID NO: 282217 - DNA, 75 bp, synthetic construct
  source 1..75: mol_type = other DNA
gaccggttcaataaagaaaagcgcggagctctgtttttgctgggggaaggcattcaacaggattttcgtatgaaa

SEQ ID NO: 282218 - DNA, 75 bp, synthetic construct
  source 1..75: mol_type = other DNA
gcgacatctgggtcaagggctcgcggcagttccgcgacttcgacgactacctgctgccggccgagaagttcgccg

SEQ ID NO: 282219 - DNA, 75 bp, synthetic construct
  source 1..75: mol_type = other DNA
acaccgcatgctgtcctggaaaaagaactggaaccacaggagagaattgcctttatttatgaagatatttcctag

SEQ ID NO: 282220 - DNA, 75 bp, synthetic construct
  source 1..75: mol_type = other DNA
tcgctggagaaaatggagagcgtagtgttagcaaaacgcagaaaaaaactgcagccaattcaaaccgaacgttat

SEQ ID NO: 282221 - DNA, 75 bp, synthetic construct
  source 1..75: mol_type = other DNA
gtaaattgcgagaggagccaacaagtatttatttttgtgtgactgaagggtcgttaaaaaaattcggtccattaa

SEQ ID NO: 282222 - DNA, 75 bp, synthetic construct
  source 1..75: mol_type = other DNA
ggggctgatgccttctcgccagatgaactgcgcaccgatttgttcagcgacgacgagggtggctatgtggactgc

SEQ ID NO: 282223 - DNA, 75 bp, synthetic construct
  source 1..75: mol_type = other DNA
ttcccgaccactacgaccactggaaaccattcagccaaaataatggagaattctcatttcttttatcacgaatgt

SEQ ID NO: 282224 - DNA, 75 bp, synthetic construct
  source 1..75: mol_type = other DNA
gcacgctggagtgaccgggtggcagagcatgacctggaaaccctgttctggcagtggggcgagcgttttccgtca

SEQ ID NO: 282225 - DNA, 75 bp, synthetic construct
  source 1..75: mol_type = other DNA
gaaattgatgtcagaatcaagtgtgggtatattgccgacgtggggagatacttatggatattcagtgcttgaaat

SEQ ID NO: 282226 - DNA, 75 bp, synthetic construct
  source 1..75: mol_type = other DNA
gaagcggtgctgacggaggcggaagacgaacgtctgaacgaactgatggctcgttacgactcgctggaaaaccag

SEQ ID NO: 282227 - DNA, 75 bp, synthetic construct
  source 1..75: mol_type = other DNA
agcctgccgttgctgacgaaaatgtcctcagagcgcacgctggcagtccaggcggcactcatgcagcagccggac

SEQ ID NO: 282228 - DNA, 75 bp, synthetic construct
  source 1..75: mol_type = other DNA
aaaaaagacaggtttgtatatgttatcaacaacaagtcatttcttttaactaaagagtgtgtttcagaaattaaa

SEQ ID NO: 282229 - DNA, 75 bp, synthetic construct
  source 1..75: mol_type = other DNA
cctgccgctgagattatgaatggtcagttgcgatcatcattttctcccccactgaagaaaaagaagaataaatag

SEQ ID NO: 282230 - DNA, 75 bp, synthetic construct
  source 1..75: mol_type = other DNA
tgctacaccggaaattcgtaaacttgttaagcaactgactggttatgaatatgaccagtgcttcggtaataacaa

SEQ ID NO: 282231 - DNA, 75 bp, synthetic construct
  source 1..75: mol_type = other DNA
gacatgacgacgttcctgtcgctcagccaggaggtgctgttatccctgctcagtttctgcaccgcgtgcagcatc

SEQ ID NO: 282232 - DNA, 75 bp, synthetic construct
  source 1..75: mol_type = other DNA
aaagcgtcagtggaggaaatcagtctgccactgctgacgaaaatgtcgtccgaacgcacgctggcagcccaggca

SEQ ID NO: 282233 - DNA, 75 bp, synthetic construct
  source 1..75: mol_type = other DNA
agtggcgtggtggtgtcctggcgttacggtaatgtgtgtgtccagcgtggtgtgcagttgcgcagtgaagatgac

SEQ ID NO: 282234 - DNA, 75 bp, synthetic construct
  source 1..75: mol_type = other DNA
ggctgtcgctgaacaccttcgggaagccgaaggctgggaatggtgcgccgggcgcatggagcctgtcggtgagtg

SEQ ID NO: 282235 - DNA, 75 bp, synthetic construct
  source 1..75: mol_type = other DNA
aacattattcgctgaccagcgatgcgccatcggggaaggaaggtgccgcattcatggcgctgatggcagaaaaag

SEQ ID NO: 282236 - DNA, 75 bp, synthetic construct
  source 1..75: mol_type = other DNA
tcgcagaggctggtatggcggcaagggaggccagtcatgctgtccgtgagatggagcggtggatggtgccgaaca

SEQ ID NO: 282237 - DNA, 75 bp, synthetic construct
  source 1..75: mol_type = other DNA
ataaaatgcgggcaaagtataggccgttcataaatatatgggaacatcttccttctgagttcaatgaactcatca

SEQ ID NO: 282238 - DNA, 75 bp, synthetic construct
  source 1..75: mol_type = other DNA
tactgattgaaacacagggcgaggtctgccttcttccccttcccggcgatgcagcagagcggctgttcccgtcgg

SEQ ID NO: 282239 - DNA, 75 bp, synthetic construct
  source 1..75: mol_type = other DNA
tgctgattgaaacacagggcgaggtctgcctccttccccttccaggcgatgcagcagaacgcttgttcccgtcgg

SEQ ID NO: 282240 - DNA, 75 bp, synthetic construct
  source 1..75: mol_type = other DNA
agccgcagattatcgcagccctgaatgaggcaggactatccggtgccgcacgggacgcggagaagatgaagaaag

SEQ ID NO: 282241 - DNA, 75 bp, synthetic construct
  source 1..75: mol_type = other DNA
tctagcttagagatggctttcttgaacgcatcagatataacctcacttagtgtttcagattttgaaaataaagaa

SEQ ID NO: 282242 - DNA, 75 bp, synthetic construct
  source 1..75: mol_type = other DNA
ggtggaggccggtacgaaaaaaggaagcgcaaaaacgaaaggccgtggacgtaaggccgcgcagcccgagcctca

SEQ ID NO: 282243 - DNA, 75 bp, synthetic construct
  source 1..75: mol_type = other DNA
cacgctggcagtccaggcggcactcatgcagcaaccggacaaatctctggcactgctggcatggacgctctgcct

SEQ ID NO: 282244 - DNA, 75 bp, synthetic construct
  source 1..75: mol_type = other DNA
tattcgctgaccagcgatgcgccatcggggaaggaaggtgccgcattcatggcgctgatggcagaaaaagcccgt

SEQ ID NO: 282245 - DNA, 75 bp, synthetic construct
  source 1..75: mol_type = other DNA
cgatgacggggacggttatgtcgaccgcgtggcgctcgatgccgccctgctggaaaaactccaggctgtcgcaga

SEQ ID NO: 282246 - DNA, 75 bp, synthetic construct
  source 1..75: mol_type = other DNA
aggccgtggacgtaaggctgcgcagccggagtctcagccgcaaccgccggagggtgaggattactggttttcaga

SEQ ID NO: 282247 - DNA, 75 bp, synthetic construct
  source 1..75: mol_type = other DNA
tattccttgccgatgttgatgaggtcttaaccggtcgtcgtcgtgaaggtctttatgctggtgcaatggttatgg

SEQ ID NO: 282248 - DNA, 75 bp, synthetic construct
  source 1..75: mol_type = other DNA
acacgttttcctgaactgggcgcattaattgatcatgcagtgctctttattggtgtggattctgcgccggggcat

SEQ ID NO: 282249 - DNA, 75 bp, synthetic construct
  source 1..75: mol_type = other DNA
aaaaaaagctttacacacttagcgcctatacacggtacacatattgttgagcgtaatttgtcggtccttgagcca

SEQ ID NO: 282250 - DNA, 75 bp, synthetic construct
  source 1..75: mol_type = other DNA
gtctgcggatggcttatggcgtactagcttacttgatcctgaacattttcctgagcctgaaagcagcgccagtgc

SEQ ID NO: 282251 - DNA, 75 bp, synthetic construct
  source 1..75: mol_type = other DNA
atgctttgcaacggcgtggttatcaggttgtgctgacctgtgggccttcggcagatgatctcgcctgtgtagatg

SEQ ID NO: 282252 - DNA, 75 bp, synthetic construct
  source 1..75: mol_type = other DNA
ttgctggaagaagatgcgccgggaattagatgccctgggcgtaaaagatcattatgttgtcatccaaccgacagc

SEQ ID NO: 282253 - DNA, 75 bp, synthetic construct
  source 1..75: mol_type = other DNA
gtgctttcgttgataaaaactctgcgtgcgaataattatgacctggtcattaatcttacggatcagtggatggtg

SEQ ID NO: 282254 - DNA, 75 bp, synthetic construct
  source 1..75: mol_type = other DNA
gagggaaatggaaacaaaggcggtcgcgatcaagggccacctgatttagatgatatcttccgcaaactgagcaaa

SEQ ID NO: 282255 - DNA, 75 bp, synthetic construct
  source 1..75: mol_type = other DNA
cgcgaatggaatgcgattcatcgactgcgggatgtcggcgttgatactatgtatggggtggcatttggcgaaaaa

SEQ ID NO: 282256 - DNA, 75 bp, synthetic construct
  source 1..75: mol_type = other DNA
attagtggtactacacagattacagccgcaacaattaatgcgaaagataaagaccttaatgttactttgggtggt

SEQ ID NO: 282257 - DNA, 75 bp, synthetic construct
  source 1..75: mol_type = other DNA
cgtccattcgactcaatagccgccacgtcgcctggctggaaagcgaggtggatgcctggatccaccagcgcatcc

SEQ ID NO: 282258 - DNA, 75 bp, synthetic construct
  source 1..75: mol_type = other DNA
cacgtcgtccaccagtcagggcgatattatggatcaacgccgcgccaacgcgcagcgtaacgactaccagcgtca

SEQ ID NO: 282259 - DNA, 75 bp, synthetic construct
  source 1..75: mol_type = other DNA
cttggcggtcgtgtcgttaccatcgcagcggcagcgattgtcattatctgggcggccagtggtttctataccatt

SEQ ID NO: 282260 - DNA, 75 bp, synthetic construct
  source 1..75: mol_type = other DNA
agcaggtgctggatatgctgatttcttaccagcaagaacgtggcttcccgccaaccaatcaggaggtggcaacca

SEQ ID NO: 282261 - DNA, 75 bp, synthetic construct
  source 1..75: mol_type = other DNA
atgacgacgttaactcaatgccagcagcaggtgctggatatgctgatttcttaccagcaagaacgtggctttccg

SEQ ID NO: 282262 - DNA, 75 bp, synthetic construct
  source 1..75: mol_type = other DNA
tgctgggataccgttcagtgaatgcagcggtagagcatcttcgcgcactggagaaaaaaggcgtcatcacgataa

SEQ ID NO: 282263 - DNA, 75 bp, synthetic construct
  source 1..75: mol_type = other DNA
atggcggcagcaatgctgtttgccggtaaagtggccgatcgttcaggaagaaaacctgtcgccattcccggcgcg

SEQ ID NO: 282264 - DNA, 75 bp, synthetic construct
  source 1..75: mol_type = other DNA
cttatccgcaaaatttacggtattctgcaggggtatcgcactatggcggtaactcgggatgatattgagaataaa

SEQ ID NO: 282265 - DNA, 75 bp, synthetic construct
  source 1..75: mol_type = other DNA
acgccgtaaaagcgctggcccatcaactggcagaagaaaagcgcgcgccaaaagagaaagatctcgctttgttac

SEQ ID NO: 282266 - DNA, 75 bp, synthetic construct
  source 1..75: mol_type = other DNA
tggcatcattaatcgacgaaaatcgcgagcctacagatgatgaagtcaaactcttgcgcaaagagaaacgcagcg

SEQ ID NO: 282267 - DNA, 75 bp, synthetic construct
  source 1..75: mol_type = other DNA
cattatggcgttgaccgctggcgtcagcatgaccgtttcattttccatgcggtttctctgtttggtatcacgctg

SEQ ID NO: 282268 - DNA, 75 bp, synthetic construct
  source 1..75: mol_type = other DNA
gtaaagtggccgatcgttcagggagaaagccggtcgccatacccggcgcggcgctatttattatcgcctcggtgt

SEQ ID NO: 282269 - DNA, 75 bp, synthetic construct
  source 1..75: mol_type = other DNA
atggcgacagcaatgttgtttgccggtaaagtggccgatcgctcagggagaaaacctgtcgctatacccggcgcg

SEQ ID NO: 282270 - DNA, 75 bp, synthetic construct
  source 1..75: mol_type = other DNA
gttttgagcgcggagaatacgccaccattatggcgttgaccgctggcgtcagcatgaccgtttcattctccacgc

SEQ ID NO: 282271 - DNA, 75 bp, synthetic construct
  source 1..75: mol_type = other DNA
ccggtattgctgatggagataatgggtttcaaacgcggagaatatgccacaattatggcgctgaccgcaggcgtc

SEQ ID NO: 282272 - DNA, 75 bp, synthetic construct
  source 1..75: mol_type = other DNA
tgttctggacgatggcaataatgggcgttgcagttctcatgttgtctttgtttattttaaaagaaacgcgccctg

SEQ ID NO: 282273 - DNA, 75 bp, synthetic construct
  source 1..75: mol_type = other DNA
tatctggcctgcgcagaatccggagctaatgcaaaaacttgcggaacgtaacgtcaccgtgatggcgatggactc

SEQ ID NO: 282274 - DNA, 75 bp, synthetic construct
  source 1..75: mol_type = other DNA
gcaggtctggccgccattggcgcagcaaacagtctcggcgcgattgtgcgtgcattcgacacccgcccggaagtg

SEQ ID NO: 282275 - DNA, 75 bp, synthetic construct
  source 1..75: mol_type = other DNA
ttagatgatgaaattgcgttactgaatcctgggacaacgctggtgagttttatctggcctgcgcagaatccggaa

SEQ ID NO: 282276 - DNA, 75 bp, synthetic construct
  source 1..75: mol_type = other DNA
gctgggctattcgccccgccacgttcagcgaatgctgaaactggcagaccttgcgcctgtcatcctcgatgcgct

SEQ ID NO: 282277 - DNA, 75 bp, synthetic construct
  source 1..75: mol_type = other DNA
caaacagcctcggcgcgattgtgcgtgcgtttgatactcgcccggaagtgaaagaacaagttcagagtatgggcg

SEQ ID NO: 282278 - DNA, 75 bp, synthetic construct
  source 1..75: mol_type = other DNA
tgctgcgcaggcaaaagaggtcgatatcattgtgaccaccgcgcttattccaggtaaaccggcaccgaaactgat

SEQ ID NO: 282279 - DNA, 75 bp, synthetic construct
  source 1..75: mol_type = other DNA
cgaaaaggtggtcgcggttgttcttccggttaatgctgcgatggtagttacgttgcaatattccgtgggtcgacg

SEQ ID NO: 282280 - DNA, 75 bp, synthetic construct
  source 1..75: mol_type = other DNA
ctcggcacgctgttggtgatgcaaagtatcaatctgcccttttggctggcagccatctgttctgcgtttcctgtg

SEQ ID NO: 282281 - DNA, 75 bp, synthetic construct
  source 1..75: mol_type = other DNA
tttacttgagtcgccagtacagcctgagtgtcgatctaatcggttatgcgatgacaattgcgctcactattggcg

SEQ ID NO: 282282 - DNA, 75 bp, synthetic construct
  source 1..75: mol_type = other DNA
aagggaataacgtctggcagtcagagatcattctgaaggtcaatgcgccgttagatgatgaaattgcgttactga

SEQ ID NO: 282283 - DNA, 75 bp, synthetic construct
  source 1..75: mol_type = other DNA
cgcgaaaacgaaaggccgtggacgtaaggccgcgcagcccgagcctcagcagccgtctgaacccgcgtatgactt

SEQ ID NO: 282284 - DNA, 75 bp, synthetic construct
  source 1..75: mol_type = other DNA
gcgttggtgatcattgctgcgtgggtgctgatgttaaaagggattcgtgcaagaccgtgggggcagcccgcgctt

SEQ ID NO: 282285 - DNA, 75 bp, synthetic construct
  source 1..75: mol_type = other DNA
acgtgagtgggacagataataagggatggtatttaaccagtcatcttcccacatctgatacccggcaatacagac

SEQ ID NO: 282286 - DNA, 75 bp, synthetic construct
  source 1..75: mol_type = other DNA
tgctcagactcagccggaagaggcgcaacagtccggcggtcagcctcagccggaaccacaggcggaggccggtac

SEQ ID NO: 282287 - DNA, 75 bp, synthetic construct
  source 1..75: mol_type = other DNA
cgaagtgtgaaccagaaaccacccgcaaagcaagccgtaaatctgcaaaaacgcaggaaactgccctgtctgccc

SEQ ID NO: 282288 - DNA, 75 bp, synthetic construct
  source 1..75: mol_type = other DNA
cgcgactggtggcagccgacaaaagcaaactttttcggacacctgaaaaagccgcagattatcgcagccctgaat

SEQ ID NO: 282289 - DNA, 75 bp, synthetic construct
  source 1..75: mol_type = other DNA
atgttactcaccgatctccttcacggtaatacgcaggcggagacagaaaaacgccgccatcagggtaacacgctg

SEQ ID NO: 282290 - DNA, 75 bp, synthetic construct
  source 1..75: mol_type = other DNA
attcttgttaagaccacgggcaccatgcagatgctggggagtgcaccacagcagaacgctcaggcacaaccgcag

SEQ ID NO: 282291 - DNA, 75 bp, synthetic construct
  source 1..75: mol_type = other DNA
gtcaaaaccgcggctcccgaaactcaacagatgatgggggctgaaaacatcaacagaaggagacacatcatggca

SEQ ID NO: 282292 - DNA, 75 bp, synthetic construct
  source 1..75: mol_type = other DNA
taggtgagtgccgtgaggatgccggaacataccgctgtctgccggagccggaagcggtgctgacggaggcggaag

SEQ ID NO: 282293 - DNA, 75 bp, synthetic construct
  source 1..75: mol_type = other DNA
ctgactggcctgtacgcgtgaaggttattctgcaggaactggcgactgccgcatcaatgactgaaaacggtcatc

SEQ ID NO: 282294 - DNA, 75 bp, synthetic construct
  source 1..75: mol_type = other DNA
acaaccatcctaacaatgtaaaaaaaattaatagcaaggaggaattaaatttttacatgaagatggtttttagaa

SEQ ID NO: 282295 - DNA, 75 bp, synthetic construct
  source 1..75: mol_type = other DNA
ttgaagtgaaccgcaaatatggcagcaaaaaaacgatggatatatacactggctttctgttctacaccaatcact

SEQ ID NO: 282296 - DNA, 75 bp, synthetic construct
  source 1..75: mol_type = other DNA
ggtgccgcacgggacgcggagaagatgaagaaaggcgatgcggctgaacatgcagagcaccatatgaaagacaac

SEQ ID NO: 282297 - DNA, 75 bp, synthetic construct
  source 1..75: mol_type = other DNA
ataccctgcctggtgagcgctacggtgtcgccgcaggtggtcgcagactggcagcactcaacatgctggcagagc

SEQ ID NO: 282298 - DNA, 75 bp, synthetic construct
  source 1..75: mol_type = other DNA
ccggtgaatgctgccatgtggttacgttgcaatattccgtgggccgccgacttaacccggctaacatccgcgcgc

SEQ ID NO: 282299 - DNA, 75 bp, synthetic construct
  source 1..75: mol_type = other DNA
cgacgagggtggctatgtggactgcgtggcgctcgatgccgccctgctggaaaaactccaggctgtcgcagagtt

SEQ ID NO: 282300 - DNA, 75 bp, synthetic construct
  source 1..75: mol_type = other DNA
cgcagcgaggatgatgcggctgacgacgctgaccgcacggaacaggtgcgggagaaagcggcggtggaggaaatc

SEQ ID NO: 282301 - DNA, 75 bp, synthetic construct
  source 1..75: mol_type = other DNA
cgcagcgaggatgatgcggctgacgacgctgaccgcacggaacaggtgccggaaaaagcggcagtggaggaaatc

SEQ ID NO: 282302 - DNA, 75 bp, synthetic construct
  source 1..75: mol_type = other DNA
tggtgcgcagggcgtctggatacggttcgctggcacggtgaggacgcaaaaacttatatcctgccccgtgatgtc

SEQ ID NO: 282303 - DNA, 75 bp, synthetic construct
  source 1..75: mol_type = other DNA
actccgtggggcgttcagaccaaaggtaagaagacccgcagcaacaagcgtactgataaattcatcgtacgtcgc

SEQ ID NO: 282304 - DNA, 75 bp, synthetic construct
  source 1..75: mol_type = other DNA
ctcagtcaggaggtgctgttgtccctgctcagtttctgcaccgcatgcagccttaacggtgtccagacccgtgag

SEQ ID NO: 282305 - DNA, 75 bp, synthetic construct
  source 1..75: mol_type = other DNA
tgaagcagaacaggaattacaggaaggcccgctgaccgaatattccggtgccgggctggcgctagcgaaatgggg

SEQ ID NO: 282306 - DNA, 75 bp, synthetic construct
  source 1..75: mol_type = other DNA
tgctgattgaaacacagggcgaggtctgcctccgtccccttcccggtgatgcagcagagcgcttgttcccgtcgg

SEQ ID NO: 282307 - DNA, 75 bp, synthetic construct
  source 1..75: mol_type = other DNA
gctggaagaggggcaacagttcagcggtcagcctcagccggaaccacaggcggaggccggtacgaaaaaaggtgg

SEQ ID NO: 282308 - DNA, 75 bp, synthetic construct
  source 1..75: mol_type = other DNA
cgcagcgaggatgatgcggctgacgacgctgaccgcacggaacaggtgcaggacaaagcggcagtggaggaaatc

SEQ ID NO: 282309 - DNA, 75 bp, synthetic construct
  source 1..75: mol_type = other DNA
cgcagcgaggatgatgcggctgacgacgctgaccgcacggaacaggtgcaggaaaaagcggccgtggaggaaatc

SEQ ID NO: 282310 - DNA, 75 bp, synthetic construct
  source 1..75: mol_type = other DNA
tttatccggcctgtagatgaagaaattcccgcaggcctcacaggagaaaatcatgaaaataaaatgtggttacca

SEQ ID NO: 282311 - DNA, 75 bp, synthetic construct
  source 1..75: mol_type = other DNA
tgaaagaagggaagcggcttgaagctctgttgccggaaggctggcgcagggatttcaccacctttttcaccctcg

SEQ ID NO: 282312 - DNA, 75 bp, synthetic construct
  source 1..75: mol_type = other DNA
caggaggtgctgttatccctgctcagtttctgcaccgcatgcagccttaacggtgtccagacccgcgagtgtggt

SEQ ID NO: 282313 - DNA, 75 bp, synthetic construct
  source 1..75: mol_type = other DNA
gcagaaaaagcccgtcttgctgccctgttaccggagggatggtcacgggacatgacgacgttcctgtcactcagc

SEQ ID NO: 282314 - DNA, 75 bp, synthetic construct
  source 1..75: mol_type = other DNA
tcttcgggaagccgaaggctgggggtggtgcgccggacgcatggagcctgtcggtgagtgccgtgaagatgcccg

SEQ ID NO: 282315 - DNA, 75 bp, synthetic construct
  source 1..75: mol_type = other DNA
cattggctggaccatcggtccgccgctcggcacgctgttggtgatgcagagcatcaatctgcccttttggctggc

SEQ ID NO: 282316 - DNA, 75 bp, synthetic construct
  source 1..75: mol_type = other DNA
gcagatgctgcaggacccgtgggggcgtcgctatctgatgatcgctcagcagttcgggagcctgtggggcttgtc

SEQ ID NO: 282317 - DNA, 75 bp, synthetic construct
  source 1..75: mol_type = other DNA
cgctgggtgcctggctggatgtgtgcaccacgcccacagacggatgccactgaacgtactgataacctggctgat

SEQ ID NO: 282318 - DNA, 75 bp, synthetic construct
  source 1..75: mol_type = other DNA
tggtgtcctggcgttatggcaacgtgtgtgtccagcgtggtgtgcagttgcgcagtgaggatgacgcggctgacg

SEQ ID NO: 282319 - DNA, 75 bp, synthetic construct
  source 1..75: mol_type = other DNA
taagactgatgcggtggaggaaatcagtctgccgctactgacgaaaatgtcttccgaacgcacgctggcagtcca

SEQ ID NO: 282320 - DNA, 75 bp, synthetic construct
  source 1..75: mol_type = other DNA
aacatgtacagcatcgcggtttataaccttggggcatcgtttctcatcaattacgggacagaggctgtgtttgct

SEQ ID NO: 282321 - DNA, 75 bp, synthetic construct
  source 1..75: mol_type = other DNA
gatgtgcgggttatccgcaacctgattacggaaagtgaagtggcggtggcaggtaacagtaaattccgctttgtg

SEQ ID NO: 282322 - DNA, 75 bp, synthetic construct
  source 1..75: mol_type = other DNA
cagaaatgaagctgatgcgctgcatggcgaaggtcagggcgtggacgccggagatacgtgccggaagcggtgtgg

SEQ ID NO: 282323 - DNA, 75 bp, synthetic construct
  source 1..75: mol_type = other DNA
tcgccgactggcagcactcaacatgatggcagagcgtggcatcattccggctgactggcctgtacgcgtgaaggt

SEQ ID NO: 282324 - DNA, 75 bp, synthetic construct
  source 1..75: mol_type = other DNA
tgctggcgaaagtacgcgatggggacatcattcgtgtgaatggacagacaggcgaactgacgctgttggtagacg

SEQ ID NO: 282325 - DNA, 75 bp, synthetic construct
  source 1..75: mol_type = other DNA
caggcctgctgcatgaagatgtcaatacggtggcaggctttggtctgtctcgttatacccttgaaccatggctga

SEQ ID NO: 282326 - DNA, 75 bp, synthetic construct
  source 1..75: mol_type = other DNA
ctttgaaaagcatgttgcgtaacaatatcgccatcatcacctcctataacgacatgctctccgcgcaccagcctt

SEQ ID NO: 282327 - DNA, 75 bp, synthetic construct
  source 1..75: mol_type = other DNA
tgtccgggctttcaccggtaaaccggtggagtgccggatggccatcgccggatttaacaactgctgtaaggactc

SEQ ID NO: 282328 - DNA, 75 bp, synthetic construct
  source 1..75: mol_type = other DNA
cataaggtttaagcgccatacttcgatgaaactgcgtctgcaggtgaaagtgaaaacagaaacctggaaacccgt

SEQ ID NO: 282329 - DNA, 75 bp, synthetic construct
  source 1..75: mol_type = other DNA
cagccgctgcgcgccaggttacacgcatgaccggtaatggtaatgaatggatgccgatcggtaagatgatcgatg

SEQ ID NO: 282330 - DNA, 75 bp, synthetic construct
  source 1..75: mol_type = other DNA
cagccgcgtgcgaacggtcaggcgcaacgtatcctcgaagaggcgcgtgcgtacaaggcccagaccatcctggaa

SEQ ID NO: 282331 - DNA, 75 bp, synthetic construct
  source 1..75: mol_type = other DNA
atggcgtggaatcagcccggtaataacggacaagaccgcgacccgtggggaagcagcaaacctggcggcaactct

SEQ ID NO: 282332 - DNA, 75 bp, synthetic construct
  source 1..75: mol_type = other DNA
gaatgcgaagaaaggcagcggcatttccaacagcctgcacacacagcgtctggccgtggattttaatctgttcgt

SEQ ID NO: 282333 - DNA, 75 bp, synthetic construct
  source 1..75: mol_type = other DNA
tatcgcctgacgtttggcgaagcgtaccgcacgccggaacaggccgcgcttaacgcaaaaaaagggagcggcatt

SEQ ID NO: 282334 - DNA, 75 bp, synthetic construct
  source 1..75: mol_type = other DNA
cacgtcgtccaccagtcagggcgatattatggaccaacgccgcgctaacgcgcagcgtaacgactaccagcgtca

SEQ ID NO: 282335 - DNA, 75 bp, synthetic construct
  source 1..75: mol_type = other DNA
acgtcggacgaaaacgtggtgcgcgttgagatgaacgtacagtaccgcgtcaccaatccggaaaaatatctgtat

SEQ ID NO: 282336 - DNA, 75 bp, synthetic construct
  source 1..75: mol_type = other DNA
atcacggtggaagagctgcagtcgctgcggtttgaccggatggatttcagtaacttctacagtgacctgaatgcc

SEQ ID NO: 282337 - DNA, 75 bp, synthetic construct
  source 1..75: mol_type = other DNA
aactggaggcgaagggcttttaccggagagcggcggcgcgatgggctgaagtgatgatgctggtggagactgaca

SEQ ID NO: 282338 - DNA, 75 bp, synthetic construct
  source 1..75: mol_type = other DNA
ttcgaaaatattagttctgatgatacagataagataacaggaaggaaattttcagagttaggtgagtatctttat

SEQ ID NO: 282339 - DNA, 75 bp, synthetic construct
  source 1..75: mol_type = other DNA
gagcccaatactatgccataaacagtgatgataaacgctcccgaatagacattgactctttatttttaaaaaagt

SEQ ID NO: 282340 - DNA, 75 bp, synthetic construct
  source 1..75: mol_type = other DNA
gtggtgaatcaggacggcacgctggacgtcagcggcggtgctcacggaattgatatcaccggcgacagcgccacg

SEQ ID NO: 282341 - DNA, 75 bp, synthetic construct
  source 1..75: mol_type = other DNA
acagcgccacggtggacaacaagggcggtatgacggttaccgatccggattccattggtattctgatcgacggcg

SEQ ID NO: 282342 - DNA, 75 bp, synthetic construct
  source 1..75: mol_type = other DNA
acttgccaggcattctcaccgctgctgctttaatgtttgtggcggcactttatgcgcgacgtaaccattatccgg

SEQ ID NO: 282343 - DNA, 75 bp, synthetic construct
  source 1..75: mol_type = other DNA
tttactgtcaacgtcgtttcttgtgataatttgcaaaccacacaatcgcagattaaattcgattttcaaccacaa

SEQ ID NO: 282344 - DNA, 75 bp, synthetic construct
  source 1..75: mol_type = other DNA
tcagtttgattcgaagctggcgcagatagtccagcagcaggggcgcaacggtcagctgcgtatcagttttggcag

SEQ ID NO: 282345 - DNA, 75 bp, synthetic construct
  source 1..75: mol_type = other DNA
gtttgtgcaaacggtgaatgtgatgccattaaaaacaatacgtccgatggtttcggtaaggcagtctctgcgctg

SEQ ID NO: 282346 - DNA, 75 bp, synthetic construct
  source 1..75: mol_type = other DNA
cgtggtgcaccgcgtccgttacccgatacgctggcgacgatgacgccgcaggcttataacagcattcagtatgac

SEQ ID NO: 282347 - DNA, 75 bp, synthetic construct
  source 1..75: mol_type = other DNA
attgtccattagcgcgagttatggcgacgcgtaccggcatgggtggttttccggaaggctgggcaccaggtgaac

SEQ ID NO: 282348 - DNA, 75 bp, synthetic construct
  source 1..75: mol_type = other DNA
ttattcccgaatgcaaagagtcaataacactctcgcaccagtagctggtatggtgagaagtcaggttattgttaa

SEQ ID NO: 282349 - DNA, 75 bp, synthetic construct
  source 1..75: mol_type = other DNA
tctaacagtctgcacactctgcgtctggctgtggattttaatctgttcgtgaagggcgaatataaaacccgcacg

SEQ ID NO: 282350 - DNA, 75 bp, synthetic construct
  source 1..75: mol_type = other DNA
gctaaacgaattcccggagctgaaaggcgtgcgcgatctcaccgaacaccagcgcggcgaacactcctactacta

SEQ ID NO: 282351 - DNA, 75 bp, synthetic construct
  source 1..75: mol_type = other DNA
gtggcagacgatgcaccgctgatggagcgcgtggagtatatgctacagtcgcagatcaacccacagcttgctggt

SEQ ID NO: 282352 - DNA, 75 bp, synthetic construct
  source 1..75: mol_type = other DNA
atgagccgcgaccgcagcgccatgttcgggttgatgttctctgtaagtctgggcgtgtcaaaagagctgtgggat

SEQ ID NO: 282353 - DNA, 75 bp, synthetic construct
  source 1..75: mol_type = other DNA
ccggcgaatgattttgtgcgccagttttttggtcacagcgagctgggcgtgcgcctgttatcgttacgcagtgtg

SEQ ID NO: 282354 - DNA, 75 bp, synthetic construct
  source 1..75: mol_type = other DNA
atgattgaatttagccatgtcagcaaactgttcggcgcacaaaaagccgttaacgatctcaatctcaattttcag

SEQ ID NO: 282355 - DNA, 75 bp, synthetic construct
  source 1..75: mol_type = other DNA
gctgaacgaattcccggaactgaaaggtgtacgtgacctcaccgaacaccagcgcggcgaacactcttactacta

SEQ ID NO: 282356 - DNA, 75 bp, synthetic construct
  source 1..75: mol_type = other DNA
gcgtgggtgctgatgttaaaaggaattcgtgcaagaccgtggggcagcccgcgctttgttgatttaagtcgaaca

SEQ ID NO: 282357 - DNA, 75 bp, synthetic construct
  source 1..75: mol_type = other DNA
tgtatttctgtacggctgtgtgtgcactgtatctggttagtggcggttataaaatcatccgaaactacatctgta

SEQ ID NO: 282358 - DNA, 75 bp, synthetic construct
  source 1..75: mol_type = other DNA
agtggctaaacacttatcagggtgaggtatacggagatccgtcatggggcaatgttttaccgcagtttaaacacg

SEQ ID NO: 282359 - DNA, 75 bp, synthetic construct
  source 1..75: mol_type = other DNA
agccgccccgaagggagcggctggagctggaaggatttggcctgggatgtcgccggtgcaagcaccggctatacc

SEQ ID NO: 282360 - DNA, 75 bp, synthetic construct
  source 1..75: mol_type = other DNA
cagttaatgctgtacttctgtacggtggtctgtgtgctgtatctcctttcgggtggataccgggccatgcgtgac

SEQ ID NO: 282361 - DNA, 75 bp, synthetic construct
  source 1..75: mol_type = other DNA
tgtacttctgtacggtggtctgtgtgctgtatctcctttcgggtgggtacagggccatgcgtgacttctggcgca

SEQ ID NO: 282362 - DNA, 75 bp, synthetic construct
  source 1..75: mol_type = other DNA
agagatgacgctacgtgatgcactctcattgtttgtcgcccgtggctgtgaagtgctgccggtggttaacgctca

SEQ ID NO: 282363 - DNA, 75 bp, synthetic construct
  source 1..75: mol_type = other DNA
atggcgcgggcgctgcggtgctggctgcctctgaagagccgggaatcatttccacccatctgcatgccgacggta

SEQ ID NO: 282364 - DNA, 75 bp, synthetic construct
  source 1..75: mol_type = other DNA
gacaaacgccgatttggaaaaaatggtggacacctctgacgagtggattgtcactcgtaccggtatccgcgaacg

SEQ ID NO: 282365 - DNA, 75 bp, synthetic construct
  source 1..75: mol_type = other DNA
acgggaactcatacagtcaacctgaatattaaggatggctcagtaattggggcggctaataataaacaaacaatt

SEQ ID NO: 282366 - DNA, 75 bp, synthetic construct
  source 1..75: mol_type = other DNA
actgggaatcgctgggtggttcatggggcggtcgcttcaaatcccgccctgatggtaatcatttcagcctggaac

SEQ ID NO: 282367 - DNA, 75 bp, synthetic construct
  source 1..75: mol_type = other DNA
cgtggcgagcgataacccagcgcactatgcggatgccattcgttataatgctcgaacgcctctgcaaggttcttt

SEQ ID NO: 282368 - DNA, 75 bp, synthetic construct
  source 1..75: mol_type = other DNA
gtctagtgatagtaaaggtgaaaaagcagaagtttgggcactgtcaacaaaatatgatcccaacaacgtctatgc

SEQ ID NO: 282369 - DNA, 75 bp, synthetic construct
  source 1..75: mol_type = other DNA
aggtgctgccggtggtgaacacgcagggccagccttgcggcacgctgcattttcaggatctgctggaggaggcgt

SEQ ID NO: 282370 - DNA, 75 bp, synthetic construct
  source 1..75: mol_type = other DNA
agctttccggcggtcagcagcaacgtgtgggagtggcccgcgcgctggctgccgatccgcaagtcttgctgatgg

SEQ ID NO: 282371 - DNA, 75 bp, synthetic construct
  source 1..75: mol_type = other DNA
ctggcagaacatctggtattgatggatcacggtgaagtggtgcagcaggggaatccgctgacgatgctgactcgt

SEQ ID NO: 282372 - DNA, 75 bp, synthetic construct
  source 1..75: mol_type = other DNA
gagtagtaatctgaatataaatctttccgatggctcagtctggaaaggaaatgttgcgggtaatacgactactgg

SEQ ID NO: 282373 - DNA, 75 bp, synthetic construct
  source 1..75: mol_type = other DNA
gcagcgcattagcgacagctattgttatggctctttctgcaccagcattcgctactgatagcacggtatcaacta

SEQ ID NO: 282374 - DNA, 75 bp, synthetic construct
  source 1..75: mol_type = other DNA
atgaaccgtttggcgcgctggatccggtgacgcgcggcgcgttgcaacaagagatgacgcgcattcaccgtttgc

SEQ ID NO: 282375 - DNA, 75 bp, synthetic construct
  source 1..75: mol_type = other DNA
gcattacctgcatcattccggtgttagcgccagtgctcggacacctgattatgcttaaattcccgtggcagagtc

SEQ ID NO: 282376 - DNA, 75 bp, synthetic construct
  source 1..75: mol_type = other DNA
atcaaaagcattcaaattacctggctgccaatccaggggccagagcaaaaagccgctaaagcgaaagcccaggaa

SEQ ID NO: 282377 - DNA, 75 bp, synthetic construct
  source 1..75: mol_type = other DNA
ttctcatatgttctgcattaaccgtgacaacaacggcgtatgcacaaacacaaagtacggcgactacagcgcctt

SEQ ID NO: 282378 - DNA, 75 bp, synthetic construct
  source 1..75: mol_type = other DNA
ctttgcagaagttaaaaaactgaatggcgaggtcttccgtgaactggagacgcgtcgcacattacgctttgaact

SEQ ID NO: 282379 - DNA, 75 bp, synthetic construct
  source 1..75: mol_type = other DNA
agcctgttgctgattatgttcgtcgcgcctggacgccccgttgccgctcatgaagaaatccatcaccacgcttga

SEQ ID NO: 282380 - DNA, 75 bp, synthetic construct
  source 1..75: mol_type = other DNA
gttatttcttgcagggcgatttctacaggggctgggcgcgggctgttgttacgtggtggcgttcgccattttacg

SEQ ID NO: 282381 - DNA, 75 bp, synthetic construct
  source 1..75: mol_type = other DNA
taatctcaccatcaaacgtggcgagctgctgtttctgattggcggcaacggtagcggaaaatcgacgctggcgat

SEQ ID NO: 282382 - DNA, 75 bp, synthetic construct
  source 1..75: mol_type = other DNA
tgggcggcggatcaggatccacacttccgccgtgagttttatcaggtgttgctgccgctgatgcaggagatgggt

SEQ ID NO: 282383 - DNA, 75 bp, synthetic construct
  source 1..75: mol_type = other DNA
atattgccggaatcacatctgaaacacctgttattttcctttactatcctttgtatggtatgcagttttattatt

SEQ ID NO: 282384 - DNA, 75 bp, synthetic construct
  source 1..75: mol_type = other DNA
gcaggtagcgtttaacaagctgaataaattcgcgctcgcacctttcaaagctgagtttccgcgtccgcagacgtt

SEQ ID NO: 282385 - DNA, 75 bp, synthetic construct
  source 1..75: mol_type = other DNA
tgaatgggcggcggatcaggatccacacttccgtcgtgagttttatcaggtgctgctgccgctgatgcaggagat

SEQ ID NO: 282386 - DNA, 75 bp, synthetic construct
  source 1..75: mol_type = other DNA
ggatactcacgtcgagcgcattgaacaactcggtagcgcctcgttgctggcggggttaaccagcgatgtgcgcaa

SEQ ID NO: 282387 - DNA, 75 bp, synthetic construct
  source 1..75: mol_type = other DNA
cggttatcgatctgcaccgggcacagatacgtgcaaaagtaccacgtcgttggcgggataaagatttgattggtt

SEQ ID NO: 282388 - DNA, 75 bp, synthetic construct
  source 1..75: mol_type = other DNA
atatctctggaagggccccaaggaaataatgtcacgctcaatggcacaaccataaatgctcaaggtaaaaatgat

SEQ ID NO: 282389 - DNA, 75 bp, synthetic construct
  source 1..75: mol_type = other DNA
ctttctgcaaaagacagcaatcttgttgttgatgcaggtacaaccaatgctctgaatgtcacagggaaagctacc

SEQ ID NO: 282390 - DNA, 75 bp, synthetic construct
  source 1..75: mol_type = other DNA
tagccggtcagacagttgcacttgccggctccacctggaatgttaccggtgattcttctgttcttggcgtcactg

SEQ ID NO: 282391 - DNA, 75 bp, synthetic construct
  source 1..75: mol_type = other DNA
atgaaaaaaaaagagtcattttacagcaactcattagcaacagctattgttatggcactttctgccccagcattc

SEQ ID NO: 282392 - DNA, 75 bp, synthetic construct
  source 1..75: mol_type = other DNA
taatgagcatggcgcatggcaattaacctgtaatacttctggcgcaccacgtttacgcgtccgaaatattcagga

SEQ ID NO: 282393 - DNA, 75 bp, synthetic construct
  source 1..75: mol_type = other DNA
gcggtcatcgctccattcgccatttcactgatgaaccagtttctgctgcgcagcgggaggcgattattaacagcg

SEQ ID NO: 282394 - DNA, 75 bp, synthetic construct
  source 1..75: mol_type = other DNA
attaccgataccgtattgcgtgaagccctggtgccgctgaccggtgggcaaaaacacgttgcgcaagcggcggag

SEQ ID NO: 282395 - DNA, 75 bp, synthetic construct
  source 1..75: mol_type = other DNA
ggtgtacatccattcacgggcggtattgatagcgaggcattagcaggaaaccgcttcgtaacctacaaaggaacg

SEQ ID NO: 282396 - DNA, 75 bp, synthetic construct
  source 1..75: mol_type = other DNA
cccgtggtagtgataacaaagctgtaacactggaatttaaacttgaaccagatggcgggattctagcaaggggta

SEQ ID NO: 282397 - DNA, 75 bp, synthetic construct
  source 1..75: mol_type = other DNA
atgaattccatgagccttgatgaaatatgtcttcggggtcttcttcgttgggtaggtacggggtctccttcaccc

SEQ ID NO: 282398 - DNA, 75 bp, synthetic construct
  source 1..75: mol_type = other DNA
accacaaaatgaaacagggatgaccctgtttgctgataactcggttagtggcgaatataataatggtggggctat

SEQ ID NO: 282399 - DNA, 75 bp, synthetic construct
  source 1..75: mol_type = other DNA
caccgtctcccattgttttactggctactaacggagggagcgccactaatgcaggtacgatcacaggtaaagtga

SEQ ID NO: 282400 - DNA, 75 bp, synthetic construct
  source 1..75: mol_type = other DNA
gctaacaatgcaggatattgacagttttgaacatcatgggacaagaaccccagaacttacttatgctgattccgg

SEQ ID NO: 282401 - DNA, 75 bp, synthetic construct
  source 1..75: mol_type = other DNA
gaatctattcgttatgggatacctacaattgcagtgttaggtaacgggatttttgtagaatatcccaagggatct

SEQ ID NO: 282402 - DNA, 75 bp, synthetic construct
  source 1..75: mol_type = other DNA
tatgtatatcggtcatagtgtggctgaatttaacattgccgccgataaaacgctggtaataggcaacaccagcaa

SEQ ID NO: 282403 - DNA, 75 bp, synthetic construct
  source 1..75: mol_type = other DNA
taactatgcagaaggttatggcggagcaatttataccagcagcaccacatccccgtatcttattgatatttctgt

SEQ ID NO: 282404 - DNA, 75 bp, synthetic construct
  source 1..75: mol_type = other DNA
tagcatgaatgttggtgacttttcaacaggcatggcgctcagtggtaataacaacagtgtgacgttggcggcgaa

SEQ ID NO: 282405 - DNA, 75 bp, synthetic construct
  source 1..75: mol_type = other DNA
ggccaacaacagcggcaataccaccgtagacggtcagggttcgaccggaactgaaatcgcgggtaacaacgcggt

SEQ ID NO: 282406 - DNA, 75 bp, synthetic construct
  source 1..75: mol_type = other DNA
gtcagggttcgaccggaactgaaatcgcgggtaacaacgcggtggtgaatcgaggacggtacactggatgtcagc

SEQ ID NO: 282407 - DNA, 75 bp, synthetic construct
  source 1..75: mol_type = other DNA
gtgaacaacgacggtgacaacgccatcagcaacggtagcaccggcacgcaggttaacggcgatgaagccactgtg

SEQ ID NO: 282408 - DNA, 75 bp, synthetic construct
  source 1..75: mol_type = other DNA
gaaacaacgacggtgacagtgccatcagtaacggcggcaccggcacgcaggttaacggcgacgaagccaccgtga

SEQ ID NO: 282409 - DNA, 75 bp, synthetic construct
  source 1..75: mol_type = other DNA
gcgattcagttttcagttataccgagaatgctgatgggactatttctctgcaagatagcaatgggcgtaaggcga

SEQ ID NO: 282410 - DNA, 75 bp, synthetic construct
  source 1..75: mol_type = other DNA
tattgtttatcagttgctcaatatttattcttactggctgtgataatgtatccgcttcagataatcaggaaatta

SEQ ID NO: 282411 - DNA, 75 bp, synthetic construct
  source 1..75: mol_type = other DNA
cggaattgaacccaaaattctgatcgaagggccgccgcgccgcgaggtaccgattttactacgccagaccagttt

SEQ ID NO: 282412 - DNA, 75 bp, synthetic construct
  source 1..75: mol_type = other DNA
caggcgggcgtgccggtacattccacagcatttcgtcctatcgatgatgcctcgctggcgcgtaatcctttccgg

SEQ ID NO: 282413 - DNA, 75 bp, synthetic construct
  source 1..75: mol_type = other DNA
atggcgaacagcatcacggcggatgagattcgggaacagttttcgcaggcaatgtcagccatgtaccagcaagaa

SEQ ID NO: 282414 - DNA, 75 bp, synthetic construct
  source 1..75: mol_type = other DNA
ggctcttgctcacaggggccctgctgaaatgcgttttggagcccctgtttgctgcattggtttttctgatttcgg

SEQ ID NO: 282415 - DNA, 75 bp, synthetic construct
  source 1..75: mol_type = other DNA
caccgagcgtgagccattgaatgttgatgaaagtctggttcagcggttgaacattctgcatgaaaatggttttgt

SEQ ID NO: 282416 - DNA, 75 bp, synthetic construct
  source 1..75: mol_type = other DNA
atgaggggatctctcaggacattgcggggagttgaggtgttagcccgctggaaacaacctcacggtggatatata

SEQ ID NO: 282417 - DNA, 75 bp, synthetic construct
  source 1..75: mol_type = other DNA
tgcaacaatatttctcgctttttctggcgaagccacttccctgcgacgacgttcacgttcatcacatccatgtcc

SEQ ID NO: 282418 - DNA, 75 bp, synthetic construct
  source 1..75: mol_type = other DNA
cttgcccatgttgtggcaccatgcaggtgatgaaatggtcgcaagtcagatgggataagagcgattcaggtgagg

SEQ ID NO: 282419 - DNA, 75 bp, synthetic construct
  source 1..75: mol_type = other DNA
atctcctcagttgatgatttatccaacggtagaggcggctgaggctttttcaaaagagcgtattgatccgacgtt

SEQ ID NO: 282420 - DNA, 75 bp, synthetic construct
  source 1..75: mol_type = other DNA
agaaaaatttattgctgcatatccataaaatcagcaatatttttcctgagctaaccagcactgaactggtaacgc

SEQ ID NO: 282421 - DNA, 75 bp, synthetic construct
  source 1..75: mol_type = other DNA
agcgatgaactttaccagtgcatgatcctggtatgtatgggatttacaattgaagaaattgttaacagggaaaaa

SEQ ID NO: 282422 - DNA, 75 bp, synthetic construct
  source 1..75: mol_type = other DNA
aatatttctcgctttttctggcgaagccacttccctgcgacgacgttcacgttcatcacatccatgtccggactg

SEQ ID NO: 282423 - DNA, 75 bp, synthetic construct
  source 1..75: mol_type = other DNA
tgaagtttgatggtgatatcaccgtgcaactacaaggcgacggcccgatgaatctggcggtcatcaacggaaaca

SEQ ID NO: 282424 - DNA, 75 bp, synthetic construct
  source 1..75: mol_type = other DNA
agcatcctggctgaagaaggcgaaattgacatgcattgtgattactgcggtaaccactatctgttcaacgccatg

SEQ ID NO: 282425 - DNA, 75 bp, synthetic construct
  source 1..75: mol_type = other DNA
tgtggcgtctgtatcacgaagaagaagtaacggtttacgacccgcaggatgtcgagttcaaatgcacctgttctc

SEQ ID NO: 282426 - DNA, 75 bp, synthetic construct
  source 1..75: mol_type = other DNA
taaccactatctgttcaatgcgatggatattgccgagatccgcaacaacgcgtctccggcagatccgcaagttca

SEQ ID NO: 282427 - DNA, 75 bp, synthetic construct
  source 1..75: mol_type = other DNA
ccgacgcgcctgtttattcgcaccggcgaagtagatggtaagcctgccgctggcggcatgctgttgcaggtgatg

SEQ ID NO: 282428 - DNA, 75 bp, synthetic construct
  source 1..75: mol_type = other DNA
acgcgtgcagggcgaaattccagaaaatgccgatctgaaaacgctggtcggtaacggttatgtggtaattaccat

SEQ ID NO: 282429 - DNA, 75 bp, synthetic construct
  source 1..75: mol_type = other DNA
cgccgccgccggcagtgtctggtgtgtaatgaacgtttcaccacctttgaagtggcggagctggttatgccgcgt

SEQ ID NO: 282430 - DNA, 75 bp, synthetic construct
  source 1..75: mol_type = other DNA
aaccgtttaatgaagagaaattacgtagcggaatgctgcgggcgctggaaaaacgtccggtgagttccgatgacg

SEQ ID NO: 282431 - DNA, 75 bp, synthetic construct
  source 1..75: mol_type = other DNA
attttctttcctgaaaaaaagattgtttttacattaggagtagtgaacaaattaaagatagaggacggttggata

SEQ ID NO: 282432 - DNA, 75 bp, synthetic construct
  source 1..75: mol_type = other DNA
gcgaccagcctgttaaccgctacgctgaagtttgatggtgatatcaccgtacagctgcaaggcgacggcccgatg

SEQ ID NO: 282433 - DNA, 75 bp, synthetic construct
  source 1..75: mol_type = other DNA
gagagtctactaatcttacactccgacttaagtttgaaaatcctatacccgctggtatttataatttttctggaa

SEQ ID NO: 282434 - DNA, 75 bp, synthetic construct
  source 1..75: mol_type = other DNA
tatgttctggcggagcaggtgacacgtttggtgcacggtgaagaaggtttgcaggcagcaaaacgtattaccgaa

SEQ ID NO: 282435 - DNA, 75 bp, synthetic construct
  source 1..75: mol_type = other DNA
gccagtatatgccgttgtggacgatggcttgaaccaacgtattttggccttgttcggtgccgatggttctgacgg

SEQ ID NO: 282436 - DNA, 75 bp, synthetic construct
  source 1..75: mol_type = other DNA
tcagctttcgacctgaataaacgacttacgggctggaaaaaactccctgagctggcctttctttctgagggttac

SEQ ID NO: 282437 - DNA, 75 bp, synthetic construct
  source 1..75: mol_type = other DNA
gggcagaaatgcgccgccagctcgaatataagcaggcatggcgcggcggtgatgtgctggcgattaatccggcgt

SEQ ID NO: 282438 - DNA, 75 bp, synthetic construct
  source 1..75: mol_type = other DNA
ttaccttcggctttcgagttgaaccggatgattacagtgtggaaaaaaatgccggaatatatcttcttacaggat

SEQ ID NO: 282439 - DNA, 75 bp, synthetic construct
  source 1..75: mol_type = other DNA
ccgggatttaccttaagcggacttggcgcgctggcggaagcctcgctgacctgtgacagggtggtacagttctga

SEQ ID NO: 282440 - DNA, 75 bp, synthetic construct
  source 1..75: mol_type = other DNA
attttactttcaagctattgatagctatacatggtataatgatgcaaaattgaaatcaaaatacaatagtcttat

SEQ ID NO: 282441 - DNA, 75 bp, synthetic construct
  source 1..75: mol_type = other DNA
taaaggccgctgcgactcaaaatatagcccgtattggcgtaagcgcgacctgcgggggtacatccgtgaggttgc

SEQ ID NO: 282442 - DNA, 75 bp, synthetic construct
  source 1..75: mol_type = other DNA
tgatgatttctttctggaagcgcggcacatgacgcaggaagacgccgacgcattagctgatgataacgtttacta

SEQ ID NO: 282443 - DNA, 75 bp, synthetic construct
  source 1..75: mol_type = other DNA
taagggcgtacgacaaagcattaaaggcttttgatgatctgcgacacaataaacgccagcgccgcaaatgggcgc

SEQ ID NO: 282444 - DNA, 75 bp, synthetic construct
  source 1..75: mol_type = other DNA
acaacacagtttctttcaggaaaaccaccgagaaatggggtggtctttccaacatggccaaaggatatccgctct

SEQ ID NO: 282445 - DNA, 75 bp, synthetic construct
  source 1..75: mol_type = other DNA
agagggatataacagccctgcgttttcacagcgccatcgccgtgatgtccggtaagtatcacatccctgcggtac

SEQ ID NO: 282446 - DNA, 75 bp, synthetic construct
  source 1..75: mol_type = other DNA
gcaaaagaatcccaatatgttcgaaagcggtcagctgccgattgcaacgtatggttgggtagttgatcaggtgta

SEQ ID NO: 282447 - DNA, 75 bp, synthetic construct
  source 1..75: mol_type = other DNA
cccgaataaagcggtcgcgggcgcgttatattcccaggataaaggccagacgctggagatgatcaagcgcacgcc

SEQ ID NO: 282448 - DNA, 75 bp, synthetic construct
  source 1..75: mol_type = other DNA
gtgcatagtcaaagtgaagtggttacgaacatgccggttaatgagcccctatggcccgattgtacgtggcaactt

SEQ ID NO: 282449 - DNA, 75 bp, synthetic construct
  source 1..75: mol_type = other DNA
atgaccagtgatgagacgctgcgaattgtggatgagtactgtcatacccacaaactttcgcgctctaaggtaatc

SEQ ID NO: 282450 - DNA, 75 bp, synthetic construct
  source 1..75: mol_type = other DNA
cagtgcgtcaaaacaggggttcagcgattcacgctggttgacctataaacaggcacaggcagccggtggacaggt

SEQ ID NO: 282451 - DNA, 75 bp, synthetic construct
  source 1..75: mol_type = other DNA
cggccatcttttacaagacgctggagaaagaggacgaggacggggaaatcgaaaaaatcccgatgctgaaagcct

SEQ ID NO: 282452 - DNA, 75 bp, synthetic construct
  source 1..75: mol_type = other DNA
cgcttcccgttccgctttcaccgcctgaatgtcgggctattggcaagagcattgcgaaatacacgcacaggaact

SEQ ID NO: 282453 - DNA, 75 bp, synthetic construct
  source 1..75: mol_type = other DNA
acagaattcgatccactgccacaggttgaagcgcttatgacccgcagcggcgcaaacatcaccgaatgtggagta

SEQ ID NO: 282454 - DNA, 75 bp, synthetic construct
  source 1..75: mol_type = other DNA
agacactcgaaaaagaagatgcggatagcggcgagatcgaaaaaatccctatgctcaaaagctttactgtgttca

SEQ ID NO: 282455 - DNA, 75 bp, synthetic construct
  source 1..75: mol_type = other DNA
gaccgttaccaacaacatcattgcagcacttgaaggcggtgtaaaaccgtggtcctgcccgtggcaacgcgtatc

SEQ ID NO: 282456 - DNA, 75 bp, synthetic construct
  source 1..75: mol_type = other DNA
tgttacggaagagtggcgcaaacatcatcgagaaaggacaaaacgcctttttcagcccatcaacagatgaagtct

SEQ ID NO: 282457 - DNA, 75 bp, synthetic construct
  source 1..75: mol_type = other DNA
tcgacggtttgcccctgacaactgaaacggtcagtccggaagcaatctttgacccgttgccgcaggctgaaaacc

SEQ ID NO: 282458 - DNA, 75 bp, synthetic construct
  source 1..75: mol_type = other DNA
gctattttctacaccacccttgaaaaggaaaaccacgccggagaagttgaacaaatcccgatgctgaaaaccttc

SEQ ID NO: 282459 - DNA, 75 bp, synthetic construct
  source 1..75: mol_type = other DNA
ggacaagcgcccctaacaccgcagcggcgaccagcgtatcctcgctggagcagtcaggctcctcaaaaacgaaat

SEQ ID NO: 282460 - DNA, 75 bp, synthetic construct
  source 1..75: mol_type = other DNA
ccagactgttactgacaacatcattgcagcgctggaagccggagtaaaaccgtggtcctgcccgtggcagcgtgt

SEQ ID NO: 282461 - DNA, 75 bp, synthetic construct
  source 1..75: mol_type = other DNA
aactcatcgggcgcaggaatgaaatcccattcagactccggatagattcaagcaagcccacttatcgtcaaaatc

SEQ ID NO: 282462 - DNA, 75 bp, synthetic construct
  source 1..75: mol_type = other DNA
ttggagcggttggaagggattgatattgacgcgaagcgaaaagaggcgacaaacagcatagaccctcaaacaggc

SEQ ID NO: 282463 - DNA, 75 bp, synthetic construct
  source 1..75: mol_type = other DNA
agcaaaaagacctatgaggatatggacctcatcgcaggtggctttggggattgttctgccgaaacaaccatcaat

SEQ ID NO: 282464 - DNA, 75 bp, synthetic construct
  source 1..75: mol_type = other DNA
acaattacgcttaaggtatggtgcaccaacggcgatataaccctggttgctggccaaaacctgactcctgttgat

SEQ ID NO: 282465 - DNA, 75 bp, synthetic construct
  source 1..75: mol_type = other DNA
ggcgtgactcagctttcttcgacccaaaccgcgttggtaagtacatcctgattaagaaaaaagacgtttgggcgt

SEQ ID NO: 282466 - DNA, 75 bp, synthetic construct
  source 1..75: mol_type = other DNA
gaagaaatgatcctggctgcctttaagaaggtgccgaatgagttgaacaagaaattctcgtataaagaggtcaga

SEQ ID NO: 282467 - DNA, 75 bp, synthetic construct
  source 1..75: mol_type = other DNA
gctttatatcgaccgcgacgcggcgttcctctatcctggcagcggcagaaacgaatagttacgttggtaccaagc

SEQ ID NO: 282468 - DNA, 75 bp, synthetic construct
  source 1..75: mol_type = other DNA
ggatgctcataaatccatcaatggtacaattgttgagtggagtgtgccactaccaactgaaggagaagcggcatg

SEQ ID NO: 282469 - DNA, 75 bp, synthetic construct
  source 1..75: mol_type = other DNA
gaccgctgttgcttctttcgctgcggtgtctggtctgttcattctgccgacctacccgacgctggttgctgcggt

SEQ ID NO: 282470 - DNA, 75 bp, synthetic construct
  source 1..75: mol_type = other DNA
agcaagcccacttatcgtcaaaatcggtgttgcaaaaacgggagtgaccatagatccgttttccaagcggaccca

SEQ ID NO: 282471 - DNA, 75 bp, synthetic construct
  source 1..75: mol_type = other DNA
aaccgcaggtaccgatgctgaaacaacggagatcacacgtaaccgtgcacaatattaccttgcctatgatgatca

SEQ ID NO: 282472 - DNA, 75 bp, synthetic construct
  source 1..75: mol_type = other DNA
aaccgcaggtaccgatgccgaaacaacggagatcacacgtaatcgtgcacaatattaccttgcctatgatgatca

SEQ ID NO: 282473 - DNA, 75 bp, synthetic construct
  source 1..75: mol_type = other DNA
taacacttgaaaaatctgacggcagttacttcgggaaaaagagttatcagatcacattcagtaaagagaattatc

SEQ ID NO: 282474 - DNA, 75 bp, synthetic construct
  source 1..75: mol_type = other DNA
cacaacagaagaatctctggaagcggcaaaggcaaaaatctttgagaagtttcctgggttacaggagtgtaagga

SEQ ID NO: 282475 - DNA, 75 bp, synthetic construct
  source 1..75: mol_type = other DNA
atttgggtttatgaacgttatcctgctgcagacggcgcgcaaccgccgtacaccatcgacccaaatacaggggaa

SEQ ID NO: 282476 - DNA, 75 bp, synthetic construct
  source 1..75: mol_type = other DNA
catcgttattcccaggcggggaaaaacggcgatcgtgaactcccggatgttgtgcgcaaagtttttgccgagtat

SEQ ID NO: 282477 - DNA, 75 bp, synthetic construct
  source 1..75: mol_type = other DNA
agacgctggcgtcgcttggcctgccgaaaccggaaaaagggccggaaaccattaatacggttaccgagcataaga

SEQ ID NO: 282478 - DNA, 75 bp, synthetic construct
  source 1..75: mol_type = other DNA
ggtgttgataaaaacggtcagtgtatgcgtaacggtgattcaaatgacatgaagcactttatgcagaacgtgttg

SEQ ID NO: 282479 - DNA, 75 bp, synthetic construct
  source 1..75: mol_type = other DNA
caagaactggcggagtccgacgataagaaaagcaatgcgctctcgctggtaacctccatgaacagttgtccggcg

SEQ ID NO: 282480 - DNA, 75 bp, synthetic construct
  source 1..75: mol_type = other DNA
gatctgaacgcttccttcgtgtcggctaacgcggaacagttttatcagtatcaacctactgaaatcattctctcc

SEQ ID NO: 282481 - DNA, 75 bp, synthetic construct
  source 1..75: mol_type = other DNA
tttgaaaaactgtataagcaaattgatctggcaacagacaatttcagcaagctggtcaatgaagaggtggaaaac

SEQ ID NO: 282482 - DNA, 75 bp, synthetic construct
  source 1..75: mol_type = other DNA
ttgacgggccacaagcatcgtttcaccaacgatgtgcagatctccatcggtgatgcgcactctggttatccggta

SEQ ID NO: 282483 - DNA, 75 bp, synthetic construct
  source 1..75: mol_type = other DNA
ctggtgacgtccagcgacagttgccccgcagatgcagaacagctttgtcttactttctcgtcagtggttgatcgc

SEQ ID NO: 282484 - DNA, 75 bp, synthetic construct
  source 1..75: mol_type = other DNA
gttatgcctttattgatgaggcggaatacacaacaaaagaatctttggatgctgcgaagaagaaaattctggaaa

SEQ ID NO: 282485 - DNA, 75 bp, synthetic construct
  source 1..75: mol_type = other DNA
cctctgcgcgcagataccagcaaaccgaagctgacccagcaggatgtgaccgatttgatcgcctatatgaacaaa

SEQ ID NO: 282486 - DNA, 75 bp, synthetic construct
  source 1..75: mol_type = other DNA
gatctggatacctttgccagctcgatgaatgacttctacggtcgtaatgatgaagacggtaagcaccggatgttt

SEQ ID NO: 282487 - DNA, 75 bp, synthetic construct
  source 1..75: mol_type = other DNA
tgactaaaacgtatactctggaggctaatggtacggtgaagtttacggttccttacggtggtctgatttatatca

SEQ ID NO: 282488 - DNA, 75 bp, synthetic construct
  source 1..75: mol_type = other DNA
aggggctttgccggaagcgaaacccgatctagcgccaaacccggagccgacaccagtaccggagccgacaccagt

SEQ ID NO: 282489 - DNA, 75 bp, synthetic construct
  source 1..75: mol_type = other DNA
gcgatggcaagctgatggttatcggtaacccacactacaacagcattttgcgttgcccgaacggttacagctgga

SEQ ID NO: 282490 - DNA, 75 bp, synthetic construct
  source 1..75: mol_type = other DNA
cagcctgtactcgaatccgaccaaatggtttgcaggtaacatgcagtctactggcctgtgggctccggctcagaa

SEQ ID NO: 282491 - DNA, 75 bp, synthetic construct
  source 1..75: mol_type = other DNA
cattctgcgctgtccgaacggttacagctgggaaggcggtgttgataaaaacggtcagtgtacgcgtaacagtga

SEQ ID NO: 282492 - DNA, 75 bp, synthetic construct
  source 1..75: mol_type = other DNA
ggctttgtgcgcctgttggatgccgcaggcctgtcgatggcactgaacaaatcggtggtgaataccgatccgcag

SEQ ID NO: 282493 - DNA, 75 bp, synthetic construct
  source 1..75: mol_type = other DNA
gatcatggaaaacgtgatgagcaatcttaaggaagagagcgcgtctggttttgtgcgtctgttggatgccgcagg

SEQ ID NO: 282494 - DNA, 75 bp, synthetic construct
  source 1..75: mol_type = other DNA
gggcgaactggagtctgcgtcgttcgtctataccacaccgaagaagaacctgaatgccagcaattacacgggcgg

SEQ ID NO: 282495 - DNA, 75 bp, synthetic construct
  source 1..75: mol_type = other DNA
gcaatagttctaccaatgaatctgccagcttcacctttaccggtgtggtaaaagcgccgttctataaagacggcg

SEQ ID NO: 282496 - DNA, 75 bp, synthetic construct
  source 1..75: mol_type = other DNA
gatctggatacctttgccagctcgatgaatgacttctacggtcgcaatgaaacgagcggtaaccaccggatgttt

SEQ ID NO: 282497 - DNA, 75 bp, synthetic construct
  source 1..75: mol_type = other DNA
tgaaggctgcgaaggcaaaaatctttgagaagtttcctggattaaaggagtgtaaggacccaacttaccactacg

SEQ ID NO: 282498 - DNA, 75 bp, synthetic construct
  source 1..75: mol_type = other DNA
cggtaatgaacagcagcttctcgacgaacagcaccacgctgccgacgacgccgctgaacgactggctgatctggc

SEQ ID NO: 282499 - DNA, 75 bp, synthetic construct
  source 1..75: mol_type = other DNA
gtacgaccattgcaacattcaacacccagtcagaagctgcgcgtagcctgcgtgcggttgacaaagtgtcgttta

SEQ ID NO: 282500 - DNA, 75 bp, synthetic construct
  source 1..75: mol_type = other DNA
ctaaatataaaaacacggggattagcataggaatagaaccattaaatccgatgataagacaagatctgactcttg

SEQ ID NO: 282501 - DNA, 75 bp, synthetic construct
  source 1..75: mol_type = other DNA
cctcgatccggacgtgtttcgcggttcgggcgcgccgttcctgatggatgccggccagataaccacgggtcacac

SEQ ID NO: 282502 - DNA, 75 bp, synthetic construct
  source 1..75: mol_type = other DNA
tttctgaaaaagcaatatcactcggaagccttcgctgccagaagcaacgcggaaaatcaattccagcttattacg

SEQ ID NO: 282503 - DNA, 75 bp, synthetic construct
  source 1..75: mol_type = other DNA
ctgtacaaccgtaacgtttatgacgatgcggaagaggcaggtcgttctatctttgaaatgactggcgctgaacgc

SEQ ID NO: 282504 - DNA, 75 bp, synthetic construct
  source 1..75: mol_type = other DNA
gatcaggtgacgagcaggacaaagtagccgtggatctggcggcgtccggcgtggcgtataaagaacgcctgaaca

SEQ ID NO: 282505 - DNA, 75 bp, synthetic construct
  source 1..75: mol_type = other DNA
catagttcagttgggtatccggttgctaaatacaaaaacacggggattagcataggtatagaaccattgaatcca

SEQ ID NO: 282506 - DNA, 75 bp, synthetic construct
  source 1..75: mol_type = other DNA
acacgggcctgtatccgccaatgtttcattcccgattccatttacacagacaccgggcattgtaattgtgtgcga

SEQ ID NO: 282507 - DNA, 75 bp, synthetic construct
  source 1..75: mol_type = other DNA
ggcaccaaaaccaactccaacacaaagtactacagactttgctacacgtcgtgtttttgttggagattctgccga

SEQ ID NO: 282508 - DNA, 75 bp, synthetic construct
  source 1..75: mol_type = other DNA
accatctccagcatcggcggcctgggtactacccacttcgcgccgattgtgaacgcgccggaagtggctatcctc

SEQ ID NO: 282509 - DNA, 75 bp, synthetic construct
  source 1..75: mol_type = other DNA
cgccgggacgcctgattcgtgatcccgacacaatgcgcccgctggcacaggagggggaggaaaaaaccttcacgc

SEQ ID NO: 282510 - DNA, 75 bp, synthetic construct
  source 1..75: mol_type = other DNA
tatcggcctgatagcctggtggggtctgccgatgggcttaaacagcgccttcgggccgtctggtctggtggcgct

SEQ ID NO: 282511 - DNA, 75 bp, synthetic construct
  source 1..75: mol_type = other DNA
ggggggggcgcggcgggcggtttgtttatcgggctgatagcctggtggggtctgccgatgggcttaaatagcgcc

SEQ ID NO: 282512 - DNA, 75 bp, synthetic construct
  source 1..75: mol_type = other DNA
taaacgataaagtgaaggtccgcgcggtcatgaaccagtgcccggctttgccatcacaagtgtctcgcattctgg

SEQ ID NO: 282513 - DNA, 75 bp, synthetic construct
  source 1..75: mol_type = other DNA
gatatgtcgatgatataactattagtttcgaatcagagattaataatgaagatatttcaaaaataaaaacaatga

SEQ ID NO: 282514 - DNA, 75 bp, synthetic construct
  source 1..75: mol_type = other DNA
aaaatcaatcaggaaaatgaggaaagttaaagatatcaggaaattaagatcgttatattcaaagttaaaaccatt

SEQ ID NO: 282515 - DNA, 75 bp, synthetic construct
  source 1..75: mol_type = other DNA
gcagccatccggctctacccgtcgtgctgtcagcacagcatcttcccaaccgcagtgatacactggtgatcaaaa

SEQ ID NO: 282516 - DNA, 75 bp, synthetic construct
  source 1..75: mol_type = other DNA
ttcctgaactgctataccaacgatgcctataccgatggcacacagtgctccgcagatctgaaaaaatcgctggtc

SEQ ID NO: 282517 - DNA, 75 bp, synthetic construct
  source 1..75: mol_type = other DNA
agcgtctgagcagcgtcgatctggaacgtctgtaccagaacatgtcggtctggctgtggaacgatacgagctatc

SEQ ID NO: 282518 - DNA, 75 bp, synthetic construct
  source 1..75: mol_type = other DNA
gctggatgccgcaggcctgtcaatggcactgaacaagtcggtggtgaataacgatccgcagggttatccggatcg

SEQ ID NO: 282519 - DNA, 75 bp, synthetic construct
  source 1..75: mol_type = other DNA
acatgaccacgtactactcacgacaccccagcctgaaccttaagggcgactggctgaaagaggccggatttgata

SEQ ID NO: 282520 - DNA, 75 bp, synthetic construct
  source 1..75: mol_type = other DNA
atcaaactgaaatggataaagttaatgtcgatctggcggctgccggggtggcatttaaagaacgttacaatatgc

SEQ ID NO: 282521 - DNA, 75 bp, synthetic construct
  source 1..75: mol_type = other DNA
ccccagcctgcaccttaagggcgactggctgaaagaggcgggatttgataccgggacaggcgtgactgtaaagat

SEQ ID NO: 282522 - DNA, 75 bp, synthetic construct
  source 1..75: mol_type = other DNA
gaactgcgcagggaactttatctggttaaacaggcggttaagggaatgcgtgacgggatgtttagtgtgctgaac

SEQ ID NO: 282523 - DNA, 75 bp, synthetic construct
  source 1..75: mol_type = other DNA
gcgaataacaacgaagtacaggaactgcgcagggagctttatcaggttaaacaggcagttaaggggatgcgtgac

SEQ ID NO: 282524 - DNA, 75 bp, synthetic construct
  source 1..75: mol_type = other DNA
ggtacgcctggcggcagccatccggccctgcctgtcgtgctgtcagcacagcatcttcccaaccgcagtgacaca

SEQ ID NO: 282525 - DNA, 75 bp, synthetic construct
  source 1..75: mol_type = other DNA
actcagtacattattctctcaaaataaaatccttgtaggaaaaaaggggaaaaccacattaatagctatcgctgg

SEQ ID NO: 282526 - DNA, 75 bp, synthetic construct
  source 1..75: mol_type = other DNA
gatcgcagaaaatacggcaagagtggccgctcttctgcatttttttaatggcaatgatggagatatacctctttc

SEQ ID NO: 282527 - DNA, 75 bp, synthetic construct
  source 1..75: mol_type = other DNA
ggcaatgtggacacatataaaaaatatattgatagtttaagcgaaggtcgtcaatttttcgaaaaatgcgagtcc

SEQ ID NO: 282528 - DNA, 75 bp, synthetic construct
  source 1..75: mol_type = other DNA
actttattcacagaacagaatcctggtcgataaaagaggaaagacattatatattaaacctgttgatgcattcag

SEQ ID NO: 282529 - DNA, 75 bp, synthetic construct
  source 1..75: mol_type = other DNA
ggctgagtctggggagcggaaaagtacagttgataagatgctgatggcaccattataccagctggataagcaatt

SEQ ID NO: 282530 - DNA, 75 bp, synthetic construct
  source 1..75: mol_type = other DNA
cagaaaaatttccaacccaattttttcaaatgaacatttgccggtatttcaccaacgtcttatggaaattgttaa

SEQ ID NO: 282531 - DNA, 75 bp, synthetic construct
  source 1..75: mol_type = other DNA
tgaaagaactgatgcccgatgtggaactgatgcagaagacgctgggggaaatgaacggtgacgcggaactgcgcg

SEQ ID NO: 282532 - DNA, 75 bp, synthetic construct
  source 1..75: mol_type = other DNA
aggacaacctgaaaaaaccgctcgctaacgaactgctgtttggctcgctggtggacggcggtcaggtcaccgttg

SEQ ID NO: 282533 - DNA, 75 bp, synthetic construct
  source 1..75: mol_type = other DNA
ttgatgagatccacaccatcatcggcgcaggtgcagcctctggcggtcaggtggatgcagctaacctgatcaaac

SEQ ID NO: 282534 - DNA, 75 bp, synthetic construct
  source 1..75: mol_type = other DNA
aaacaatgaaagaattgttcaaagattatctggtctttttgaacacgctgactcccagcacaaactttgaatcaa

SEQ ID NO: 282535 - DNA, 75 bp, synthetic construct
  source 1..75: mol_type = other DNA
cagattatgcaaatagaactcagaaagagcctttgtcagttcattcagagttatagcgactattcctcagagata

SEQ ID NO: 282536 - DNA, 75 bp, synthetic construct
  source 1..75: mol_type = other DNA
gataaatcatatatcgttacgaactcagattatgcaaatagaactcagaaagagcctttgtcagttcattcagag

SEQ ID NO: 282537 - DNA, 75 bp, synthetic construct
  source 1..75: mol_type = other DNA
tgtgggcattagcggcctgcaccacgcttatcctgcccgcgcagaccattttgccgatctatagcgcggcgacct

SEQ ID NO: 282538 - DNA, 75 bp, synthetic construct
  source 1..75: mol_type = other DNA
cggcaaagtgactgcactgtttgttgatggcaaagctgttgatgcaatcaatacaggccaggaagcggttgtcgt

SEQ ID NO: 282539 - DNA, 75 bp, synthetic construct
  source 1..75: mol_type = other DNA
agaaaggttcactggttaacgacaaagtgctgcgcttcgacttctcacacaacgaagcgatgaaaccagaagaga

SEQ ID NO: 282540 - DNA, 75 bp, synthetic construct
  source 1..75: mol_type = other DNA
tatcgctgccgcctgctacaggattatatcagcggtatgacagacctctatgcgtgggatgaataccggcgtctg

SEQ ID NO: 282541 - DNA, 75 bp, synthetic construct
  source 1..75: mol_type = other DNA
caagccggtggtacgggatgctgcggccttacctgcagcgttagccagtgtgaaaggctgggtcagcgcgaaatt

SEQ ID NO: 282542 - DNA, 75 bp, synthetic construct
  source 1..75: mol_type = other DNA
gctggatcaaacgccattctatgcggaatccggcggtcaggttggcgataaaggcgaactgaaaggcgctaactt

SEQ ID NO: 282543 - DNA, 75 bp, synthetic construct
  source 1..75: mol_type = other DNA
gactatttcaaacacgatgctattcagtttgcatgggaactgctgaccagcgaaaaatggtttgccctgccgaaa

SEQ ID NO: 282544 - DNA, 75 bp, synthetic construct
  source 1..75: mol_type = other DNA
agattgccaggatgcgattgcctttattcaaccagatcgtgtgttaaccgttaatatcaaaggtgcggtattggc

SEQ ID NO: 282545 - DNA, 75 bp, synthetic construct
  source 1..75: mol_type = other DNA
agattgccaggatgccattgcctttattcaaccggatcgcgtattaaccgttaatatcaagggcgcggtattggc

SEQ ID NO: 282546 - DNA, 75 bp, synthetic construct
  source 1..75: mol_type = other DNA
cacccaccgccgatctggaagatgaccgcccttctctgccggatgaagtggcgcttggcgtcacttatgacaaca

SEQ ID NO: 282547 - DNA, 75 bp, synthetic construct
  source 1..75: mol_type = other DNA
cgatatcggcaatccgccgtttggccattttggtgaagcggcgataaatgactggtttcgccagcgtttgtttcc

SEQ ID NO: 282548 - DNA, 75 bp, synthetic construct
  source 1..75: mol_type = other DNA
aatcgttttggtctggtgagaggagagggattaagcaaagactcgcgttccaggcgtactttttcgcgctgtcgc

SEQ ID NO: 282549 - DNA, 75 bp, synthetic construct
  source 1..75: mol_type = other DNA
actggtacttggtattagtggcggtcaggactccacacttgccgggaaactgtgtcagatggcgattaacgaact

SEQ ID NO: 282550 - DNA, 75 bp, synthetic construct
  source 1..75: mol_type = other DNA
gttatcgacgaagcgggcgctcgcgcacgtctgatgccggtaagcaaacgcaagaaaaccgttaatgtggcggat

SEQ ID NO: 282551 - DNA, 75 bp, synthetic construct
  source 1..75: mol_type = other DNA
cggagcaggcaggagcttcccacttccgaatcacttctctgggaggaaacaataaactttatggaactgccatta

SEQ ID NO: 282552 - DNA, 75 bp, synthetic construct
  source 1..75: mol_type = other DNA
cgagctgatttacggacaattgttaaagaaggattcgcgcaagagaaaagaattaataaccagcaagccgtgtac

SEQ ID NO: 282553 - DNA, 75 bp, synthetic construct
  source 1..75: mol_type = other DNA
tcgccaggtaacgctcctgaatgtgatgctcgccaatccggggaaagagtacacagttgctgaaattagcgcgag

SEQ ID NO: 282554 - DNA, 75 bp, synthetic construct
  source 1..75: mol_type = other DNA
agagtatgaccgggaaagataatgttctggcgacaaatattgatggacttggaattgaactttatcagggggggg

SEQ ID NO: 282555 - DNA, 75 bp, synthetic construct
  source 1..75: mol_type = other DNA
caaccaatattaatgggctgggaatagctctttaccaaggtgatggtgaagtaaaccatctcaaattaggtgacg

SEQ ID NO: 282556 - DNA, 75 bp, synthetic construct
  source 1..75: mol_type = other DNA
ttgtcgacgcttgaaaattacgtgtttcctcaactgggagcaaaaacgctggatacgattacggctgcggacgtg

SEQ ID NO: 282557 - DNA, 75 bp, synthetic construct
  source 1..75: mol_type = other DNA
gtgtttccttctccccgaaagcagcagatcctttcagatatggtgttgacgagttttctgcgtaaaaagaatgcc

SEQ ID NO: 282558 - DNA, 75 bp, synthetic construct
  source 1..75: mol_type = other DNA
caaggcatatcaaacctgatgacaaaccattgccccatgggggaattaccggactgacccttcatccttcttcag

SEQ ID NO: 282559 - DNA, 75 bp, synthetic construct
  source 1..75: mol_type = other DNA
atatgtttaaaaaaatccaagcagaagccgcaactactgacctcaaaacacttgaacagcttttgaaaaagttca

SEQ ID NO: 282560 - DNA, 75 bp, synthetic construct
  source 1..75: mol_type = other DNA
ttaacgtctggctgtgtgtcgccattgtgttcgggttgttcgtgtaccgccgtaaaggggctgttcataaacctg

SEQ ID NO: 282561 - DNA, 75 bp, synthetic construct
  source 1..75: mol_type = other DNA
tagcaacgggctggctggaagtgttttttaatctgctgttctgcgtgctggtgatacgcgcgcgcgggaacgtca

SEQ ID NO: 282562 - DNA, 75 bp, synthetic construct
  source 1..75: mol_type = other DNA
ccacggcacatggttttcgctcaacattcagggactggtgtagtgaacaggggtattcgcgggatctggcggaaa

SEQ ID NO: 282563 - DNA, 75 bp, synthetic construct
  source 1..75: mol_type = other DNA
agtcagccatcattcactggcagggggaaaaactggtggtgaatgcctttgccggtacaggcaaaaccagcacac

SEQ ID NO: 282564 - DNA, 75 bp, synthetic construct
  source 1..75: mol_type = other DNA
cagctttctcagcctgacctgtcaaaacgctgggacaccatcctcttcgatgaggcgcaggacgccaatccggtg

SEQ ID NO: 282565 - DNA, 75 bp, synthetic construct
  source 1..75: mol_type = other DNA
ctctgcaaaactggcagcagcatatcgatgaaattacacaacgaagcgcaaaactcgatagtgtgctgtttagct

SEQ ID NO: 282566 - DNA, 75 bp, synthetic construct
  source 1..75: mol_type = other DNA
gaaccgctgacacctgcgcttattcgccagttacatgccattggtatgggtggaatcaatgacgcgaaatatcgt

SEQ ID NO: 282567 - DNA, 75 bp, synthetic construct
  source 1..75: mol_type = other DNA
gaaagcgcatccggacgtgttcaatattctgttgcaggtgatggacaacggtacgctgaccgataacaacggacg

SEQ ID NO: 282568 - DNA, 75 bp, synthetic construct
  source 1..75: mol_type = other DNA
acatcgacctgatagaagctgtcggaaatcaccctgacattattgccgggagcaacaacggtgatggatacgact

SEQ ID NO: 282569 - DNA, 75 bp, synthetic construct
  source 1..75: mol_type = other DNA
gtaggaaccatcaagaaatacttcaaaggcgtggatgacgtgactttttacagcgccacacgcgaagaactaatc

SEQ ID NO: 282570 - DNA, 75 bp, synthetic construct
  source 1..75: mol_type = other DNA
tgtcaacggctcaccgcagtaagggactggaatggccggtggtgatactggatgaggattttgcggatatcaccg

SEQ ID NO: 282571 - DNA, 75 bp, synthetic construct
  source 1..75: mol_type = other DNA
acccctctgcagataaaattctgtgggctgtaaaggttctctggtatgaagtgagtcgtaccgaatctgatttcc

SEQ ID NO: 282572 - DNA, 75 bp, synthetic construct
  source 1..75: mol_type = other DNA
caatgaactcatgcagcaactggcggaggaaaagagcaggacgaaggagaagacgacgtccccgcatcagcgtgg

SEQ ID NO: 282573 - DNA, 75 bp, synthetic construct
  source 1..75: mol_type = other DNA
ggtggtgatgatgaggtattgctgaaatgccatgcgcgtgaacatctgcaggggcattacacggtactcagtcgt

SEQ ID NO: 282574 - DNA, 75 bp, synthetic construct
  source 1..75: mol_type = other DNA
aaagcagcagaggcatccccgtcagaaggcggggaaaacgatgccgtatacgggcaggagagtgaaaatgcttaa

SEQ ID NO: 282575 - DNA, 75 bp, synthetic construct
  source 1..75: mol_type = other DNA
gcgtatcacggatgtggccagaaagctgaacacccgtcactggctgctggttcgtcttgcactcagcagtctgaa

SEQ ID NO: 282576 - DNA, 75 bp, synthetic construct
  source 1..75: mol_type = other DNA
tgtggtgacgaaactggcagcagaagtgctgcactgcccaccgcaggacgtgcatgttatctccggtgataccga

SEQ ID NO: 282577 - DNA, 75 bp, synthetic construct
  source 1..75: mol_type = other DNA
gtaacttcgctatcaccatggcattagcggaactggctgaacagttacagatcgaccaactggaaattatcgaac

SEQ ID NO: 282578 - DNA, 75 bp, synthetic construct
  source 1..75: mol_type = other DNA
tttaacggcaacatcgttaatgcctccttgctgattgcagcacagttagaaaaagcaaacattcgcaccgcagaa

SEQ ID NO: 282579 - DNA, 75 bp, synthetic construct
  source 1..75: mol_type = other DNA
ctttttgcggcgtgaagtttcccaacccgttctgcctctcttcttcgccggtaggcaactgctatgagatgtgtg

SEQ ID NO: 282580 - DNA, 75 bp, synthetic construct
  source 1..75: mol_type = other DNA
ccttcccgtatggcgcaaacttcgctgaagttgccgtcaatacacgtacaggtgaaatccgcctggataaattct

SEQ ID NO: 282581 - DNA, 75 bp, synthetic construct
  source 1..75: mol_type = other DNA
tttaacggtaatatcgtcaacgcttccttacttatcgccgcacagttagaaaaagcagacattcgcaccgctgaa

SEQ ID NO: 282582 - DNA, 75 bp, synthetic construct
  source 1..75: mol_type = other DNA
gttccgctacacccgtgaagaagagtttattgctaacacctctcgtcacgtcgcgaaagtcaccgtcaaactggg

SEQ ID NO: 282583 - DNA, 75 bp, synthetic construct
  source 1..75: mol_type = other DNA
tacgcaacagcgatgatggattcggttttgccggttctgacgcaattatctttaacggtaatatcgtcaacgcgt

SEQ ID NO: 282584 - DNA, 75 bp, synthetic construct
  source 1..75: mol_type = other DNA
atgatcatccactttacattaaatggcacgccccaggagctaaccgttaatcctggtgaaaacgtgcaaaagctg

SEQ ID NO: 282585 - DNA, 75 bp, synthetic construct
  source 1..75: mol_type = other DNA
ggagaaaattctgttccacggcgcgcaaatgttgggtgagccagtggcagatgttcaactagcaacgccgggcgt

SEQ ID NO: 282586 - DNA, 75 bp, synthetic construct
  source 1..75: mol_type = other DNA
cgcgtttggcagcggaaaatctgcgggagaaaattctgttccacggcgcgcaaatgttgggtgagccagtggcag

SEQ ID NO: 282587 - DNA, 75 bp, synthetic construct
  source 1..75: mol_type = other DNA
gtgagccagtggcagatgttcaactagcaacgccgggcgtcgtgcgcggcaagaaaggcgaagttagtttcgggg

SEQ ID NO: 282588 - DNA, 75 bp, synthetic construct
  source 1..75: mol_type = other DNA
catccagaactgcgcgatttcccaatcagcggtatcggcggcattgaaacctgggaggatgcggcggagttttta

SEQ ID NO: 282589 - DNA, 75 bp, synthetic construct
  source 1..75: mol_type = other DNA
cggtttgaagtgaaaactggcaccacgagcgaaacaaactacgcctttagccaggcacgttttacgcccaaaggc

SEQ ID NO: 282590 - DNA, 75 bp, synthetic construct
  source 1..75: mol_type = other DNA
atgaacagtcagcaactggaatacgtacgtcagcagctcattgtggcgaccgcagacctcagcggggcgacgaaa

SEQ ID NO: 282591 - DNA, 75 bp, synthetic construct
  source 1..75: mol_type = other DNA
gatgaagtgactggaaaaatgataacgcgggataatccaccaatcccgggaaagcaatcgctggcgaaggggatg

SEQ ID NO: 282592 - DNA, 75 bp, synthetic construct
  source 1..75: mol_type = other DNA
gtcgtcagtgcagagaagtattgtctggaaatctgggaaaacaaacttttcaccaaaagaatcctggagtttgac

SEQ ID NO: 282593 - DNA, 75 bp, synthetic construct
  source 1..75: mol_type = other DNA
aaggtattccggagacacagacatatccggacgtttattgctggatccctcttttttccataaattccggcgtgc

SEQ ID NO: 282594 - DNA, 75 bp, synthetic construct
  source 1..75: mol_type = other DNA
cacgcttattaaatggagtgtatcaacgggatcttccccacaaacgcaatgtcgtcagtgcagagaagtattgtc

SEQ ID NO: 282595 - DNA, 75 bp, synthetic construct
  source 1..75: mol_type = other DNA
tctggcgaatcacaatattgtcccggcggaagatttagaccgcagttatattgtctatccccatatcaatcttga

SEQ ID NO: 282596 - DNA, 75 bp, synthetic construct
  source 1..75: mol_type = other DNA
accaggcgatggaatgggatgagaaaacacgcacgccacattgtaataccgagaaatgcgtcggttgtttgcttt

SEQ ID NO: 282597 - DNA, 75 bp, synthetic construct
  source 1..75: mol_type = other DNA
tgaatatcaggaactggcattactggcgggagtaacaacaaaaaactggtccaaaacatttactggtcactgggt

SEQ ID NO: 282598 - DNA, 75 bp, synthetic construct
  source 1..75: mol_type = other DNA
atgggggttgctaaatccacatggacagagacataccgacctcgctgggagattatgcgtgactgtgttacaggc

SEQ ID NO: 282599 - DNA, 75 bp, synthetic construct
  source 1..75: mol_type = other DNA
gatgaagtgaccggaaaaatgatcacgcgggataatccaccaatcccggggaaacaatcgctggcaaaggggacg

SEQ ID NO: 282600 - DNA, 75 bp, synthetic construct
  source 1..75: mol_type = other DNA
gtcacgtcgcgaaagtcaccgtcaaactgggagcgaaaaaagatggtcgcctgacggcagtgaagatggatttcc

SEQ ID NO: 282601 - DNA, 75 bp, synthetic construct
  source 1..75: mol_type = other DNA
agaaatttcacttgatccctctttgcgccaaagtggcagtgttgttgaagtggaacaaccgttgcgtggaaaata

SEQ ID NO: 282602 - DNA, 75 bp, synthetic construct
  source 1..75: mol_type = other DNA
ccaagacatttactggtcactgggttacaatgaaacacatttttcatcggctggatagtgaaactttattgttag

SEQ ID NO: 282603 - DNA, 75 bp, synthetic construct
  source 1..75: mol_type = other DNA
tatgattggcggcattccagaaacgcaggagatgctcgatttttgcgccgaacatggcatcgtggctgatataga

SEQ ID NO: 282604 - DNA, 75 bp, synthetic construct
  source 1..75: mol_type = other DNA
atgccatgttcgatacagggcgttacaggcgtaaaaaaatccggtaccgagatgaagtgaccggaaaaatgatta

SEQ ID NO: 282605 - DNA, 75 bp, synthetic construct
  source 1..75: mol_type = other DNA
gggatatcgagcgggtgctggagcagggcggggacgccccggtgtacgggccgaacctgcgcgcctcctgccggc

SEQ ID NO: 282606 - DNA, 75 bp, synthetic construct
  source 1..75: mol_type = other DNA
ttttgataaaaatcattaggggattcatcagtgctttgctgcatcgcgaaaaaacggggcgtgggcaacgagtca

SEQ ID NO: 282607 - DNA, 75 bp, synthetic construct
  source 1..75: mol_type = other DNA
gcagccgcgtgagcatccgttgaaatcattactggcaggatttcgttttctactcgccagcccgctggtgggagg

SEQ ID NO: 282608 - DNA, 75 bp, synthetic construct
  source 1..75: mol_type = other DNA
aaaaaatatcaagtaggcgatcatgttgccgttggctgtatggtcgatagctgtatgcattgcgaccagtgtgaa

SEQ ID NO: 282609 - DNA, 75 bp, synthetic construct
  source 1..75: mol_type = other DNA
acctacggcttcccggttgacctgacggctgatgtttgtcgtgagcgcaacatcaaagttgacgaagctggtttt

SEQ ID NO: 282610 - DNA, 75 bp, synthetic construct
  source 1..75: mol_type = other DNA
aaatataacatcaggaaaaaacattcctgacacatcacaaacggtaagggtaacgggcgacgcgtcagcgtggcc

SEQ ID NO: 282611 - DNA, 75 bp, synthetic construct
  source 1..75: mol_type = other DNA
cctgccagggttttcgcgcgggctgacaggcggcttccaccgcctgcctctgtatcacctgtgtctgctgccctg

SEQ ID NO: 282612 - DNA, 75 bp, synthetic construct
  source 1..75: mol_type = other DNA
tttgccgggatgccgggagcgcaggtcacggcgcgacagaggcggcgcgaccggaacggtcgctgcaagccaggg

SEQ ID NO: 282613 - DNA, 75 bp, synthetic construct
  source 1..75: mol_type = other DNA
ttattgcttgtaacgagaacacgttcaaaacaaaaggcgacattttcacagcaaagtattgcaaaactggattaa

SEQ ID NO: 282614 - DNA, 75 bp, synthetic construct
  source 1..75: mol_type = other DNA
ttgccgcagctttttgaagttcgcgcctcgcatgtgctgggaacacttccccgcgacaggtcagcgaatttctct

SEQ ID NO: 282615 - DNA, 75 bp, synthetic construct
  source 1..75: mol_type = other DNA
gtttttcgtctattggcgaacaattaacgtcggttggcgacaatatctggattattcccggattatgcgtctctc

SEQ ID NO: 282616 - DNA, 75 bp, synthetic construct
  source 1..75: mol_type = other DNA
gctaaatcagtcattgattggggctggtttgccgccgcaggaaaactctgccgatgccttcgcggccggtcttga

SEQ ID NO: 282617 - DNA, 75 bp, synthetic construct
  source 1..75: mol_type = other DNA
ggcggcgattatgatttcgccccattcgtctgcgttattaaatgaaacggcagtctcagcgacttctgtcagtct

SEQ ID NO: 282618 - DNA, 75 bp, synthetic construct
  source 1..75: mol_type = other DNA
gatgaggtaacgggcaagacgattacgctggataatccgccgatcccgggaaaacaatcgctggcgaaaggctca

SEQ ID NO: 282619 - DNA, 75 bp, synthetic construct
  source 1..75: mol_type = other DNA
cttgatagcgattctcttttgcaggtaacgcgatcacgttcacaacaaaaggcgacaaatttagactcaagtctt

SEQ ID NO: 282620 - DNA, 75 bp, synthetic construct
  source 1..75: mol_type = other DNA
ggaggattactgggcgtgacgtctaccagcgacaggaacttgccagactgtgtggagttaagcctgacaactgga

SEQ ID NO: 282621 - DNA, 75 bp, synthetic construct
  source 1..75: mol_type = other DNA
gaaaaagcgcaatccctggcgtcacgttatccgaaacatttaattatcggttcagatcaagtgtgtgtactggat

SEQ ID NO: 282622 - DNA, 75 bp, synthetic construct
  source 1..75: mol_type = other DNA
acgggaacgcctgaaaaaattaatctggctggcggcgcaggatgtgaagagcgagctggctgggagtgagactta

SEQ ID NO: 282623 - DNA, 75 bp, synthetic construct
  source 1..75: mol_type = other DNA
atgacgataaccacaatgtgatgcgcggcgaagaaacacaattgatcggcgcgcgcactctggctccttcctctc

SEQ ID NO: 282624 - DNA, 75 bp, synthetic construct
  source 1..75: mol_type = other DNA
aacctgtccggaaggctggtgataaagattattgcagagccaccggataagcgccgtcgtgacctggacaatatc

SEQ ID NO: 282625 - DNA, 75 bp, synthetic construct
  source 1..75: mol_type = other DNA
cttgatagccaagctttattgcttttaacgaaaacacgttcaaaacaaaaggcgacattttcacagcaaagtatt

SEQ ID NO: 282626 - DNA, 75 bp, synthetic construct
  source 1..75: mol_type = other DNA
cactgagctggcactggagcgcaggcgttttggctaccgtcgtatttggcagttgctgcgccgtgaagggcttca

SEQ ID NO: 282627 - DNA, 75 bp, synthetic construct
  source 1..75: mol_type = other DNA
tactccggcgatgcgtgaaggttccggcatggtcgagttttctcgtaaattcccggatcgctacttcgacgtggc

SEQ ID NO: 282628 - DNA, 75 bp, synthetic construct
  source 1..75: mol_type = other DNA
tttgctgcgggtctggcgattggggggtacaaaccaatcgtggcgatctactccaccttcctgcaacgcgcctat

SEQ ID NO: 282629 - DNA, 75 bp, synthetic construct
  source 1..75: mol_type = other DNA
ttaggcgaacggattttctgggatccggcgaccgataccctgaccattaagggcacgccgccgaacttgcgcgat

SEQ ID NO: 282630 - DNA, 75 bp, synthetic construct
  source 1..75: mol_type = other DNA
cagaacggatttattgagagttttaacggacgctttcgtgatgaatgcctgaatgagcactggttcagcgatatt

SEQ ID NO: 282631 - DNA, 75 bp, synthetic construct
  source 1..75: mol_type = other DNA
gcatctgtcccggatacagcagggggattaatgcgttccgggtgcgtctgctgtcggtcggagtttgtctgttgt

SEQ ID NO: 282632 - DNA, 75 bp, synthetic construct
  source 1..75: mol_type = other DNA
cggttgctgccgaaaaagaaggcaaaaatcgccgcaccgtttgtgtgattggcgacggtgcgattaccgctggca

SEQ ID NO: 282633 - DNA, 75 bp, synthetic construct
  source 1..75: mol_type = other DNA
agcggcgaaagtcgccgaatcgctgaacgccacgctggtcgatatgcgttttgtgaaaccgcttgatgaagcgtt

SEQ ID NO: 282634 - DNA, 75 bp, synthetic construct
  source 1..75: mol_type = other DNA
catcgaccgcgcgggcattgttggtgctgacggtcaaacccatcaggcgcttttgacctctcttacctgcgctgc

SEQ ID NO: 282635 - DNA, 75 bp, synthetic construct
  source 1..75: mol_type = other DNA
aaatcgccgcaccgtctgtgtcattggcgacggcgcgattactgctggcatggcgtttgaagcaatgaaccatgc

SEQ ID NO: 282636 - DNA, 75 bp, synthetic construct
  source 1..75: mol_type = other DNA
acgccattatgggcggtgcaggcagcggagtgaacgaagtgctgatggcccatcgtaaaccagtacccgtgctga

SEQ ID NO: 282637 - DNA, 75 bp, synthetic construct
  source 1..75: mol_type = other DNA
catcgaccgcgcgggcattgttggtgctgacggtcaaacccaccagggcgcttttgatctctcttacctgcgctg

SEQ ID NO: 282638 - DNA, 75 bp, synthetic construct
  source 1..75: mol_type = other DNA
gaatgagcactggttcagcgatattgttcacgccaggaagatcattaatgactggcgactggattataacgagtg

SEQ ID NO: 282639 - DNA, 75 bp, synthetic construct
  source 1..75: mol_type = other DNA
gaaaaaataccgtgtgctactgaatcgcattcagccggaagatgctccggatatagaatggcctgaaatgccaca

SEQ ID NO: 282640 - DNA, 75 bp, synthetic construct
  source 1..75: mol_type = other DNA
gaaaaaataccgggtattacttaaccgagttcagccggaagatgctccgaatatagaatggcctgaaatgccgca

SEQ ID NO: 282641 - DNA, 75 bp, synthetic construct
  source 1..75: mol_type = other DNA
gtcgatttagatatggctaccgaagaagaaaaatcaagtctgacaaaatggaaaaaataccgggtattacttaac

SEQ ID NO: 282642 - DNA, 75 bp, synthetic construct
  source 1..75: mol_type = other DNA
aatgtaaagaacagctacggcgaagcggtggatatcactctactcgaccagatcccagtcagtgctaacagtgat

SEQ ID NO: 282643 - DNA, 75 bp, synthetic construct
  source 1..75: mol_type = other DNA
gaaaccctgtatgtggatgttccggagtatggtggtgtaagcggctcgctttcagcatcacccgtgatggaacag

SEQ ID NO: 282644 - DNA, 75 bp, synthetic construct
  source 1..75: mol_type = other DNA
tctttgctattccgaagatcagtaatgacgcttatctccaggtgcaaattaaagagtgggaacagttaaatttaa

SEQ ID NO: 282645 - DNA, 75 bp, synthetic construct
  source 1..75: mol_type = other DNA
ccgtcctcattcatcgctgaattaccagactccagctgaatttgcagctggctggcgaaacgggaaatatgaaga

SEQ ID NO: 282646 - DNA, 75 bp, synthetic construct
  source 1..75: mol_type = other DNA
tttcggtatttcaggcgttcaggtcacgcgtattctggacagcatcgcgctctttcgtggctatccggcgacaat

SEQ ID NO: 282647 - DNA, 75 bp, synthetic construct
  source 1..75: mol_type = other DNA
gtacaggagggggtgcagaatgttactgatgcggtaaaaaaggcgcagcaggcagcaaaggattctgctgacagt

SEQ ID NO: 282648 - DNA, 75 bp, synthetic construct
  source 1..75: mol_type = other DNA
aatcactccccggaacttatatttcactgtctggagcacccacaacatacagcgaccaggcttttgtggcgctat

SEQ ID NO: 282649 - DNA, 75 bp, synthetic construct
  source 1..75: mol_type = other DNA
ttaccggcgtatctggcagcttctgcgacgtgaaggtctttgcgttaaccacaagcgggtttaccgcatctatca

SEQ ID NO: 282650 - DNA, 75 bp, synthetic construct
  source 1..75: mol_type = other DNA
ggcgatggcgcgattaccgctggcatggcgtttgaagcgatgaatcacgcgggcgatatccgtcctgatatgctg

SEQ ID NO: 282651 - DNA, 75 bp, synthetic construct
  source 1..75: mol_type = other DNA
gttctggtcagtggactatctgggaaggttatgccgcgtccaagctgttcaaagcgggcttccgttcgaacaaca

SEQ ID NO: 282652 - DNA, 75 bp, synthetic construct
  source 1..75: mol_type = other DNA
ccgggcagccttccgcgtgtggtactgcgcgtgaagtgggcacctttgctcaccgtctgcctgcggacatggtgg

SEQ ID NO: 282653 - DNA, 75 bp, synthetic construct
  source 1..75: mol_type = other DNA
cgctatctgtttccgctctgcctggcgcaatggcatgaaaccgttttagctggcggttatggtgatcacttcgaa

SEQ ID NO: 282654 - DNA, 75 bp, synthetic construct
  source 1..75: mol_type = other DNA
accaggttgcttcgttaaaagcagaaattaatgaactgagtgttgagtataaatacctgcagcaatggcagagtc

SEQ ID NO: 282655 - DNA, 75 bp, synthetic construct
  source 1..75: mol_type = other DNA
gagcaggttaccaccgttcacagttagtgaaagactgggcggaagtggtaaatatcaggctgcattaccttcccc

SEQ ID NO: 282656 - DNA, 75 bp, synthetic construct
  source 1..75: mol_type = other DNA
aaccgtggcctgaactgcattaagggctatttcctgcccaaaatcatgtacggtaaagaccgtttgacgcagccg

SEQ ID NO: 282657 - DNA, 75 bp, synthetic construct
  source 1..75: mol_type = other DNA
tcgatgcccaggagcctgaaccttttgcttacgatcgtgagcatgtgatcatgttgtctgactggaccgatgaaa

SEQ ID NO: 282658 - DNA, 75 bp, synthetic construct
  source 1..75: mol_type = other DNA
catgatatggcaagaatggaccacagccagatgggaggcatggataacagcggagagatgatgtctatggacggt

SEQ ID NO: 282659 - DNA, 75 bp, synthetic construct
  source 1..75: mol_type = other DNA
agggacactggccacgagagaggggttaagtgctgccgttccccccctcgatccccgtcctctgttgaccatgga

SEQ ID NO: 282660 - DNA, 75 bp, synthetic construct
  source 1..75: mol_type = other DNA
cgctcgacgatttcactctggaaaatgtactcagcgataaagtcaccgcccaggacatgcgcataaccccggaaa

SEQ ID NO: 282661 - DNA, 75 bp, synthetic construct
  source 1..75: mol_type = other DNA
atggggctgggagacgatctaatccgtccaagcattggtattaagccaaaaatcatggtcattctggacaacgcg

SEQ ID NO: 282662 - DNA, 75 bp, synthetic construct
  source 1..75: mol_type = other DNA
gggcccgcaggatgtgcggatctcccgccagacccttgagtaccaggcgcagattgctgagcagatgcagcgcca

SEQ ID NO: 282663 - DNA, 75 bp, synthetic construct
  source 1..75: mol_type = other DNA
ctgattcgttacatcaaatactacgctgatgacggagagattttcgagagcccggtcatatcagcatttgatttg

SEQ ID NO: 282664 - DNA, 75 bp, synthetic construct
  source 1..75: mol_type = other DNA
tttcacaggcagatgttggcgtggttgatgactggaaagcggtgctggaggcactggtgacaaacattcacgcag

SEQ ID NO: 282665 - DNA, 75 bp, synthetic construct
  source 1..75: mol_type = other DNA
ttgttctctttccgccgggaacgtttggcgatgaactggctacccgcctgtcctggcgtttacatggtgccagta

SEQ ID NO: 282666 - DNA, 75 bp, synthetic construct
  source 1..75: mol_type = other DNA
tcgctggcacgtcaggcgggagcagataaaaacgccacgttgccctctgggatgcagcaactgaacattgtcccc

SEQ ID NO: 282667 - DNA, 75 bp, synthetic construct
  source 1..75: mol_type = other DNA
gtcggcgctggacgtgtcaattcaggcgcaggtggtcaacctgctccagcagttgcaacgtgagatgggattgtc

SEQ ID NO: 282668 - DNA, 75 bp, synthetic construct
  source 1..75: mol_type = other DNA
catccgaaaatgtcacgccaggaagttcgcgagcgcgtgaaggcgatgatgctgaaagtcgggttattgcctaac

SEQ ID NO: 282669 - DNA, 75 bp, synthetic construct
  source 1..75: mol_type = other DNA
ctgaatgtgccaaaacgcgtccggtgctggagggaagcttcagacatgccgtctcgtgtctgaaagttgacccgt

SEQ ID NO: 282670 - DNA, 75 bp, synthetic construct
  source 1..75: mol_type = other DNA
atgcctttccctggcgcgtcaggcgggagcagcgaaaaacgccacgttgccctctggaatgcaacaactgaacat

SEQ ID NO: 282671 - DNA, 75 bp, synthetic construct
  source 1..75: mol_type = other DNA
gatgatttttaccgtggtcttgctgatgcggatctactgggcttttgtcggcaatcgctactcacgcgagctttt

SEQ ID NO: 282672 - DNA, 75 bp, synthetic construct
  source 1..75: mol_type = other DNA
atggcgctgcgtgaagacatcatgtccgacgacacggtgatctccaccatggtcaacggctaccgtagccacaaa

SEQ ID NO: 282673 - DNA, 75 bp, synthetic construct
  source 1..75: mol_type = other DNA
atgaatatcgccattgtgacaataaatcaggaccatgccgcaatagcgggctggctggcggagcaggatttcagc

SEQ ID NO: 282674 - DNA, 75 bp, synthetic construct
  source 1..75: mol_type = other DNA
accgtaagcgtgcgcaaatcccactggggaaatgcgctaacggcgacgctgcaaacagaaaaacgcccgctatgc

SEQ ID NO: 282675 - DNA, 75 bp, synthetic construct
  source 1..75: mol_type = other DNA
cagggcggagaggcagataaccaggaaatcgctatgctggcagaaaagctgggagccgaagtgggctacagtcgg

SEQ ID NO: 282676 - DNA, 75 bp, synthetic construct
  source 1..75: mol_type = other DNA
agaacggcagaacgttcgccagcaggtttatagctactgtaatgagcaattgcaggcgggtgaagagatcgagct

SEQ ID NO: 282677 - DNA, 75 bp, synthetic construct
  source 1..75: mol_type = other DNA
cgtagcacactgcgtcagttgacgaagtttgccggtagcggcggtggcttgactattaactttgatgcgatgctg

SEQ ID NO: 282678 - DNA, 75 bp, synthetic construct
  source 1..75: mol_type = other DNA
gctcgctgaaactgccctcctggatggacaggggggaacccgacaaactgctgcgggccgcgcaggctttctggt

SEQ ID NO: 282679 - DNA, 75 bp, synthetic construct
  source 1..75: mol_type = other DNA
ttactatcgctgtggaacattaccccggctggtttactgcggatttcccaggccattttcagcgctttgatggtc

SEQ ID NO: 282680 - DNA, 75 bp, synthetic construct
  source 1..75: mol_type = other DNA
atgactgccctgatcgctgtggaacatcaccccgccgggcttaccacgggtttcccatgccatttcccgcgcttt

SEQ ID NO: 282681 - DNA, 75 bp, synthetic construct
  source 1..75: mol_type = other DNA
agtatgcgcgttaacgaaaatctcgacatcaacccaacccattatcttgatatcaatcatgcggatattgttgcg

SEQ ID NO: 282682 - DNA, 75 bp, synthetic construct
  source 1..75: mol_type = other DNA
aaaatgcctacctttcagccacccgctcggggctggaatcgaacgagatcgctacccttcagcgctccttgcctt

SEQ ID NO: 282683 - DNA, 75 bp, synthetic construct
  source 1..75: mol_type = other DNA
cggactggattatccgctgccggtcaccgcaagactcagttcacctttcaacccggcccgtcttaatcctgtgtc

SEQ ID NO: 282684 - DNA, 75 bp, synthetic construct
  source 1..75: mol_type = other DNA
catcaccaaagccagcatcgatacactgacccgctacgctcacgcctgcggcatcaagaaacctgtcattgccct

SEQ ID NO: 282685 - DNA, 75 bp, synthetic construct
  source 1..75: mol_type = other DNA
ccgggatggtgcttccttcctggatgaacaaaggcgagccggcgaagctgctgaaaacggcgcggcggttctgga

SEQ ID NO: 282686 - DNA, 75 bp, synthetic construct
  source 1..75: mol_type = other DNA
cagtctcgattatccgttaccggccacagcaagactcagttcgcctttcaatcctgcaagacttaacccggtatc

SEQ ID NO: 282687 - DNA, 75 bp, synthetic construct
  source 1..75: mol_type = other DNA
agtaccatgggatattttgttgaagtaacgggaaaagccggtgttggtaatgactccaacttattgatagtgttt

SEQ ID NO: 282688 - DNA, 75 bp, synthetic construct
  source 1..75: mol_type = other DNA
tccaccctggtgtttggctttttggctcgcttgctggcactgcgtcttaaactgggattacccgttttttactac

SEQ ID NO: 282689 - DNA, 75 bp, synthetic construct
  source 1..75: mol_type = other DNA
gtggcaaaagcatatacacccgaacagcgggaagcgctgaaggcacgaattatcgggttggtacgcaaaaatgaa

SEQ ID NO: 282690 - DNA, 75 bp, synthetic construct
  source 1..75: mol_type = other DNA
ggcgttgttgctgggtgatttgcgcgtgaaagcgacacaacatctggcagagagtatcaatgcggcaccgaccac

SEQ ID NO: 282691 - DNA, 75 bp, synthetic construct
  source 1..75: mol_type = other DNA
ccggtcgcgtgctggagtcggttcattcccgctttttagtggatctggcgcagggcgatgatgcccgccatccac

SEQ ID NO: 282692 - DNA, 75 bp, synthetic construct
  source 1..75: mol_type = other DNA
aatcgccaatatacatgcctgatgggttgatatcagtaagtgtatctgttgaccaaatgtttgatattgctaacg

SEQ ID NO: 282693 - DNA, 75 bp, synthetic construct
  source 1..75: mol_type = other DNA
taagagagcagtttattgaatttaatgagattttactctttgaagatctggcgctatttaaccagaagctggcgg

SEQ ID NO: 282694 - DNA, 75 bp, synthetic construct
  source 1..75: mol_type = other DNA
ctgagtatggcccacagttgggcagaccctttgcggatacggttaatgattcacagttttcaaatatgaaagaat

SEQ ID NO: 282695 - DNA, 75 bp, synthetic construct
  source 1..75: mol_type = other DNA
gggagcatgctgattttttaagttggctgggaaagtggaccacggcagataaacaacccgtttgctggtcagtga

SEQ ID NO: 282696 - DNA, 75 bp, synthetic construct
  source 1..75: mol_type = other DNA
tagcctgcgtctgacattggtggaaaaactggcgtcgatgctggatcccggtcatctggcgctgacgcagatcgc

SEQ ID NO: 282697 - DNA, 75 bp, synthetic construct
  source 1..75: mol_type = other DNA
agacattgattcgaaagttaccagacggagaaatacgccgctacgacagacaacagaacataatctgtggcgagt

SEQ ID NO: 282698 - DNA, 75 bp, synthetic construct
  source 1..75: mol_type = other DNA
ataacgcctggtcgttgcctgggcgctgttttatcgttctggaggagttgcgctggggggcatttggcgatgcct

SEQ ID NO: 282699 - DNA, 75 bp, synthetic construct
  source 1..75: mol_type = other DNA
tttacccgctggtgtgctggtgcgtacaacgcctggtcgctgccgggacgttgttttattgctctggaagagctg

SEQ ID NO: 282700 - DNA, 75 bp, synthetic construct
  source 1..75: mol_type = other DNA
ttgaccaagacgttactggacggccccggtcgcgtgctggagtcggtttatccccgctttttagtggatctggcg

SEQ ID NO: 282701 - DNA, 75 bp, synthetic construct
  source 1..75: mol_type = other DNA
cgcatcacggatgagcattgatacactggtacgctatgccagagcctgtggtgtgaactttaaaattcagcaagt

SEQ ID NO: 282702 - DNA, 75 bp, synthetic construct
  source 1..75: mol_type = other DNA
tagcgcacagcggctggcaaacaacagcgatagcattacgtatcgtgtgcgcaaaggcgattcgctttcaagcat

SEQ ID NO: 282703 - DNA, 75 bp, synthetic construct
  source 1..75: mol_type = other DNA
ccgttgccgcaggaaacgaagcagtacgtgcctaaaatgctggcattgagtgatattctcaaaaacagcaagcgt

SEQ ID NO: 282704 - DNA, 75 bp, synthetic construct
  source 1..75: mol_type = other DNA
tggcgacgagcgaaagatgggaattccggaaaacgaccggattcgcgaacagaaacagaaatatttacgcaataa

SEQ ID NO: 282705 - DNA, 75 bp, synthetic construct
  source 1..75: mol_type = other DNA
gtgcaaatattccgctaccacctgacctgcttgctcaaaaaacggcagaagaactgcaacgcaagcagattgaaa

SEQ ID NO: 282706 - DNA, 75 bp, synthetic construct
  source 1..75: mol_type = other DNA
ccgggataatccggacagtggcgtggtggttcgccttgccggcgacgaccgtccatggaaccctggcgccatcac

SEQ ID NO: 282707 - DNA, 75 bp, synthetic construct
  source 1..75: mol_type = other DNA
tctggagcctcttaacgatcgcgctgttaaaagcgcagagcagatgtttggtcgcgccattcccctgacggagag

SEQ ID NO: 282708 - DNA, 75 bp, synthetic construct
  source 1..75: mol_type = other DNA
acttattctatccaatagaaatatcatttaaagtaataagttttattgctgttaatatgcttggtggatattatt

SEQ ID NO: 282709 - DNA, 75 bp, synthetic construct
  source 1..75: mol_type = other DNA
gtgcttgtcattaaaatttattcattatctccgcttgctttcatcatattatcttctatgccagtattcgcttta

SEQ ID NO: 282710 - DNA, 75 bp, synthetic construct
  source 1..75: mol_type = other DNA
ggtacgcaacttcagttacaccctcaatgtaaagaacagctacggcgaagcggtagatatcactctgctcgacca

SEQ ID NO: 282711 - DNA, 75 bp, synthetic construct
  source 1..75: mol_type = other DNA
aagcttctttgcccttggttacgccaactggttcggtctgcctgcgccaatctggctcaccgtcgcgtgtctgat

SEQ ID NO: 282712 - DNA, 75 bp, synthetic construct
  source 1..75: mol_type = other DNA
tccgacgatataaagggacaggagaacagaatacgtccggaaacgcgcggtcaaaaaaaatgctaaaaaatatct

SEQ ID NO: 282713 - DNA, 75 bp, synthetic construct
  source 1..75: mol_type = other DNA
acaatatgcagaaaataaaaatataatgagttttgtgatgttgattttcctcgcatctacatttcatataactgc

SEQ ID NO: 282714 - DNA, 75 bp, synthetic construct
  source 1..75: mol_type = other DNA
tctcccggccccagctgctggcgacggcgctggaaaccgggggcgggaaggttccgatggcggacatcgacacga

SEQ ID NO: 282715 - DNA, 75 bp, synthetic construct
  source 1..75: mol_type = other DNA
tgtcagttacatcgaagtgctggatgcagaacgttccctcttcgctacccagcaaaccattctcgatcttaccta

SEQ ID NO: 282716 - DNA, 75 bp, synthetic construct
  source 1..75: mol_type = other DNA
aatgcgctttattgtattaatcgtgaaaagctgcatacggtgaaagtcctctcggcaagcagttatagccccgat

SEQ ID NO: 282717 - DNA, 75 bp, synthetic construct
  source 1..75: mol_type = other DNA
atgagaattacaccaccccatctgcagccagttttatccagggttaaacgttttgttgaacgaatgccggaaggc

SEQ ID NO: 282718 - DNA, 75 bp, synthetic construct
  source 1..75: mol_type = other DNA
cgcatcacggatgagtattgatacactggttcgctatgccagagcatgtggtgtgaactttaaaattcagcaagt

SEQ ID NO: 282719 - DNA, 75 bp, synthetic construct
  source 1..75: mol_type = other DNA
cgctgcgcgaatgagtattcagacgctgattcggtacgccagagcctgcggtgttaactttaaaattcagcaggt

SEQ ID NO: 282720 - DNA, 75 bp, synthetic construct
  source 1..75: mol_type = other DNA
tgatcgctcgtctggaaaaagcattccaggaactgaacgcgatcgacgttctgtaagatattcctttctgcttat

SEQ ID NO: 282721 - DNA, 75 bp, synthetic construct
  source 1..75: mol_type = other DNA
aattactggagggatgcaggccctggattgttatttttgatgacgttcttactgccggtagccattttaaagcga

SEQ ID NO: 282722 - DNA, 75 bp, synthetic construct
  source 1..75: mol_type = other DNA
caccgcgccctgaccaccattgagcaggtcacgccggaacaggtgccgagaaaagaaggcgtctgggcgccgggc

SEQ ID NO: 282723 - DNA, 75 bp, synthetic construct
  source 1..75: mol_type = other DNA
cggtggacgggcggtgtccagtggggataacgaccagctgcagcccatcgcgccgggccagccgttcaggctgat

SEQ ID NO: 282724 - DNA, 75 bp, synthetic construct
  source 1..75: mol_type = other DNA
gagaaacagcagatgcaacgggctacagcactttgcagctttgtcgtattcaggcactttatcgagaatcagcga

SEQ ID NO: 282725 - DNA, 75 bp, synthetic construct
  source 1..75: mol_type = other DNA
accacttgaaatctataaagagaaaatgattttctattcagttggtaatttttattttccagacattaaatactc

SEQ ID NO: 282726 - DNA, 75 bp, synthetic construct
  source 1..75: mol_type = other DNA
ctcaacctgggtaacagccagcgcattatgttagttgcggcaaactttcgcaaagaagtgaccagcaccgcgctg

SEQ ID NO: 282727 - DNA, 75 bp, synthetic construct
  source 1..75: mol_type = other DNA
atgagtatggttgccagaactgaacccagacccgcagaggacgacatcaccgataccgatgatggtgatacccgt

SEQ ID NO: 282728 - DNA, 75 bp, synthetic construct
  source 1..75: mol_type = other DNA
caaaagttgcattcgaaaaaacagctgcaatggtaattcaatatagtcttgaagctataggcatggagcaacgtt

SEQ ID NO: 282729 - DNA, 75 bp, synthetic construct
  source 1..75: mol_type = other DNA
agcatgttgcaaataagataacccaagatatttttaaaattttcaaatggcaacgagctactagtcaagatatga

SEQ ID NO: 282730 - DNA, 75 bp, synthetic construct
  source 1..75: mol_type = other DNA
gctcagggcacgctacccgatgcgctgaattttatgaaggtgttcagcaaaggcctgttcaccttcctggtaatt

SEQ ID NO: 282731 - DNA, 75 bp, synthetic construct
  source 1..75: mol_type = other DNA
tgctggggatagcgacgttaattgccacggtgatgcacgttccggcagatgctcagggcacgctacccgatgcgc

SEQ ID NO: 282732 - DNA, 75 bp, synthetic construct
  source 1..75: mol_type = other DNA
gacaagggcgagcgccgggcagacgcactggacgcacaggccgcagacctgtggcgcgatgtgagctgggccatc

SEQ ID NO: 282733 - DNA, 75 bp, synthetic construct
  source 1..75: mol_type = other DNA
gtttaaatatggctttcgccagagcgcgcgagcaccgtcatgagttgatgaccgtcgagcacttgttactggcgc

SEQ ID NO: 282734 - DNA, 75 bp, synthetic construct
  source 1..75: mol_type = other DNA
ataaagacctgattaaccacgtcactcacggcatggtgatcaaatcacgagccacacagcaacttagcccgtttg

SEQ ID NO: 282735 - DNA, 75 bp, synthetic construct
  source 1..75: mol_type = other DNA
gcagcgatgaaaaacagacccgcagcccgctgtcgctgtactcagaataccagcggatggagatagagtttcgtg

SEQ ID NO: 282736 - DNA, 75 bp, synthetic construct
  source 1..75: mol_type = other DNA
tctgaaccaggaaaccagccgagcagtgaagaacaagctggtggggaggaccgtatggagaatttcacgactaac

SEQ ID NO: 282737 - DNA, 75 bp, synthetic construct
  source 1..75: mol_type = other DNA
tcatctgccggataaagccattgacgttatcgacgaagcgggcgctcgcgcacgcctgatgccggtaagcaaacg

SEQ ID NO: 282738 - DNA, 75 bp, synthetic construct
  source 1..75: mol_type = other DNA
cgctggataaagagaaaaatgagctgacttacggattccagagtgcgcaaaagcacaaaccggaagcagcgcatt

SEQ ID NO: 282739 - DNA, 75 bp, synthetic construct
  source 1..75: mol_type = other DNA
gtttactacagggcaatgtctgggagaacccgacctgctggcgtcggcccgtcgcttacaatttttttcacatca

SEQ ID NO: 282740 - DNA, 75 bp, synthetic construct
  source 1..75: mol_type = other DNA
cgctggtgccctattaccgaccgggcgataaacgcatcgcacaggatctggcggaactggcagcagacaatcagg

SEQ ID NO: 282741 - DNA, 75 bp, synthetic construct
  source 1..75: mol_type = other DNA
tttatttatcgtctgttctgataccgtcccggacgtcatcagtgccggagcgaattgccgttgatgtgggttaca

SEQ ID NO: 282742 - DNA, 75 bp, synthetic construct
  source 1..75: mol_type = other DNA
atcttcggtcagactggcccgaaagtcggttccttcgacggcggctggggcgcttcctacatggctcgtatcgtc

SEQ ID NO: 282743 - DNA, 75 bp, synthetic construct
  source 1..75: mol_type = other DNA
tatgaccatcggcgagatcatcgctgaaccactgcgtacttatcatccgaaaaagtcacgccaggaagttcgcga

SEQ ID NO: 282744 - DNA, 75 bp, synthetic construct
  source 1..75: mol_type = other DNA
cgcgagcgttcccaggacgtgaagaaggcggtcgagttcctcaagcagaaccagcgcagcgagtacaagcgtcac

SEQ ID NO: 282745 - DNA, 75 bp, synthetic construct
  source 1..75: mol_type = other DNA
aaggacgccgtgctggtgatgaaccgcgagcgttcccaggacgtgaagaaggcggtcgagttcctcaagcagaac

SEQ ID NO: 282746 - DNA, 75 bp, synthetic construct
  source 1..75: mol_type = other DNA
ctgcctctttctgttcctgtggagtcacttccccgcacggcagccccttcaggtcataacgggcgccgccagcca

SEQ ID NO: 282747 - DNA, 75 bp, synthetic construct
  source 1..75: mol_type = other DNA
gcagctggctgaacgcctgaaccgtctggatgaacagcggggaaaatacatgacggtcagtgaactgagaacgga

SEQ ID NO: 282748 - DNA, 75 bp, synthetic construct
  source 1..75: mol_type = other DNA
atgttcaggaaatggtggataactggcagaagagcgtaaggagtcgtgcgctcccggaagaggcgatgacgggct

SEQ ID NO: 282749 - DNA, 75 bp, synthetic construct
  source 1..75: mol_type = other DNA
tgtcagttgcgacaaccttgaaggggatttcgaaccggatcgcgtggcatttcaacggcgggtccatgcacaggt

SEQ ID NO: 282750 - DNA, 75 bp, synthetic construct
  source 1..75: mol_type = other DNA
tctcgacgcctgtaaagcggctattcagggttgcaaagaaagcgacgaatttatcaaagtcgatcgcgatctgtt

SEQ ID NO: 282751 - DNA, 75 bp, synthetic construct
  source 1..75: mol_type = other DNA
tttagcggcgctgagtgcaattgaaaatggcgatgatcctatactgcttgtacttgcggccgatcatattatcaa

SEQ ID NO: 282752 - DNA, 75 bp, synthetic construct
  source 1..75: mol_type = other DNA
agcacgttcggcaaatatgtcggcatgtcgccgcaacaataccgcaaacttagccaacagcgccgccagacgttt

SEQ ID NO: 282753 - DNA, 75 bp, synthetic construct
  source 1..75: mol_type = other DNA
gctctccacgctgggatcgttcctcgccattgggctgtttggcctgatgccgatgtggattttaggcgtggtttg

SEQ ID NO: 282754 - DNA, 75 bp, synthetic construct
  source 1..75: mol_type = other DNA
gctcgcgtcactcaagctgccgaaaccggaacagggaccggaaaccattaacaaggttaccgagcataagatgtc

SEQ ID NO: 282755 - DNA, 75 bp, synthetic construct
  source 1..75: mol_type = other DNA
ctcaagctgccgaaaccggaacaggggccggaaaccattaacaaggttaccgagcataagatgtctgccgagtaa

SEQ ID NO: 282756 - DNA, 75 bp, synthetic construct
  source 1..75: mol_type = other DNA
ataccaaattaaccgctaataccatacgccgtgaaacatacaacggtcgcgagcatatcgttgtcccgtcatata

SEQ ID NO: 282757 - DNA, 75 bp, synthetic construct
  source 1..75: mol_type = other DNA
caaacgcaaataaagaagaagcagaaaaacgcgccgcagtagcaaaagtacacggcgaaattgttgctaacgcat

SEQ ID NO: 282758 - DNA, 75 bp, synthetic construct
  source 1..75: mol_type = other DNA
cactattggcaatctatttactcggtttatgggatggtttttttgcctcgctgggcgttacggcgctgctggcgg

SEQ ID NO: 282759 - DNA, 75 bp, synthetic construct
  source 1..75: mol_type = other DNA
ttcctgaactgctatgccaacaatgcctataccgagggcacgcagtgttctacagatctgaaaaaatcgcttgtc

SEQ ID NO: 282760 - DNA, 75 bp, synthetic construct
  source 1..75: mol_type = other DNA
gaccggacgtgaaaagcatgaagttgctctgaaccgtccgccaagagtcaccaaaacatatactctggaggctaa

SEQ ID NO: 282761 - DNA, 75 bp, synthetic construct
  source 1..75: mol_type = other DNA
tctggctttgtacgtctgcttgatgccgcaggtctgtcgatggcactgaacaagtcggtagtaaataacgatccg

SEQ ID NO: 282762 - DNA, 75 bp, synthetic construct
  source 1..75: mol_type = other DNA
gcggtgtgagccagtcggcttacaacacgctcgcgtcgctcaagctgccgaaaccggaacaggggccggaaacca

SEQ ID NO: 282763 - DNA, 75 bp, synthetic construct
  source 1..75: mol_type = other DNA
tgactgtcaccgtggcgctggccgacgatctgaccggacgcgagaagcatgaagtcgcgctgaaccgtccgccaa

SEQ ID NO: 282764 - DNA, 75 bp, synthetic construct
  source 1..75: mol_type = other DNA
tgtgggctccggctcagaaagaggtcaccattaagtccaatgcgaacgttcctgtgactgtcaccgtggcgctgg

SEQ ID NO: 282765 - DNA, 75 bp, synthetic construct
  source 1..75: mol_type = other DNA
gtgccgaccatgtggtgaaaatcatgtctatcgaccatgacgctattttgctgcatgagccgccagccgcttcac

SEQ ID NO: 282766 - DNA, 75 bp, synthetic construct
  source 1..75: mol_type = other DNA
atgacaatattatctatgttgaaaagaaaactaatgcattgggcgttgttgtgacgtatgcacagactgcacgag

SEQ ID NO: 282767 - DNA, 75 bp, synthetic construct
  source 1..75: mol_type = other DNA
gctatcgctttgccggttattgcctgaatgtgtcggggatggcgagccgattaaactggcccgcgcagagtatga

SEQ ID NO: 282768 - DNA, 75 bp, synthetic construct
  source 1..75: mol_type = other DNA
atcctcagccgcgaacggctgctgcgtatgctctctgcccggcgggtagagaatcccgatttgcgcacagtggac

SEQ ID NO: 282769 - DNA, 75 bp, synthetic construct
  source 1..75: mol_type = other DNA
gatgcgcatcaaccacgttcgcgcgttactgagcgataccgataaaagtattctcgatattgccctgacggcagg

SEQ ID NO: 282770 - DNA, 75 bp, synthetic construct
  source 1..75: mol_type = other DNA
aaaacttcgcgcacgcacaaaaatagcgtctcgcgccatgcgcagttttatgtcagccagatgctgggctttatt

SEQ ID NO: 282771 - DNA, 75 bp, synthetic construct
  source 1..75: mol_type = other DNA
caccgcatatcatgcccaccagccactggcatggtcaggtcgaagtgaatgtgcctttcgatggcgatgtggaat

SEQ ID NO: 282772 - DNA, 75 bp, synthetic construct
  source 1..75: mol_type = other DNA
acacgggtttttgtggagcgtggaacagaaacgttgagttacgcggcaaccgtgtttatgtggaaaaatgggtgg

SEQ ID NO: 282773 - DNA, 75 bp, synthetic construct
  source 1..75: mol_type = other DNA
gaacacattgtagtcccgtcatatacgttgcccttcaatatcgttatgaatcgggaatattacccggaagctgaa

SEQ ID NO: 282774 - DNA, 75 bp, synthetic construct
  source 1..75: mol_type = other DNA
agccgtataccgtcaacgtatgccagctactgaagagatgaaagcccagggtgctgacagcgttgtcaaaatcat

SEQ ID NO: 282775 - DNA, 75 bp, synthetic construct
  source 1..75: mol_type = other DNA
ttgctggatatcaacctgcccgatgaaaacggcttaatgctcacccgagccctgcgcgaacgctctacggtgggg

SEQ ID NO: 282776 - DNA, 75 bp, synthetic construct
  source 1..75: mol_type = other DNA
gctatcgcacacttgaaaaacagttaaccgctgccgcgcgggaaatgttccctgacgctgattacgtatacgtgg

SEQ ID NO: 282777 - DNA, 75 bp, synthetic construct
  source 1..75: mol_type = other DNA
ctggaagcgctggagaagggagagagcaaagatcctatctggtcgtccgtcgctgtatatcgccagcgtatgcca

SEQ ID NO: 282778 - DNA, 75 bp, synthetic construct
  source 1..75: mol_type = other DNA
tgatttggggcgtttatagcgccgaaaaccagctactggcctgtttccgggtagcggaagataacagctacagca

SEQ ID NO: 282779 - DNA, 75 bp, synthetic construct
  source 1..75: mol_type = other DNA
cattattataaaaatctgactttcgattacagctcatgctctgatgaatgggctgatgcgattagccaggcaatc

SEQ ID NO: 282780 - DNA, 75 bp, synthetic construct
  source 1..75: mol_type = other DNA
gaccgtaacagttacgccctgacagaagccgagcgcaacgccagcgaactgacccgctgggcaggcagaaaatgc

SEQ ID NO: 282781 - DNA, 75 bp, synthetic construct
  source 1..75: mol_type = other DNA
ataaaccaacagaaagtattggtggtattttttatctaaaatctgatgacgatgttgattggtacgaggcacaaa

SEQ ID NO: 282782 - DNA, 75 bp, synthetic construct
  source 1..75: mol_type = other DNA
gctttgacgctaactcctgtgcggttctgagcgccatcggcaaacagtctcctgacatcaaccagggcgttgacc

SEQ ID NO: 282783 - DNA, 75 bp, synthetic construct
  source 1..75: mol_type = other DNA
aggatccgaaagcacgcgttgcttgcgaaacctacgtaaaaaccggcatggttttagttggcggcgaaatcacca

SEQ ID NO: 282784 - DNA, 75 bp, synthetic construct
  source 1..75: mol_type = other DNA
gtacggcattgctggcggtctgcgtggccattccgggatggcagtttctgacacagccatcaccggcggagcagc

SEQ ID NO: 282785 - DNA, 75 bp, synthetic construct
  source 1..75: mol_type = other DNA
gttatcaggtaatggatccagaacgttttggagttgtcgagtttgataaaaacttcaaggcattaagtatagaag

SEQ ID NO: 282786 - DNA, 75 bp, synthetic construct
  source 1..75: mol_type = other DNA
aagtcctccggcgccacggtgtttggttaccaggtgctggatccggagcgctttggcgtggtggagtttgacgag

SEQ ID NO: 282787 - DNA, 75 bp, synthetic construct
  source 1..75: mol_type = other DNA
gcatacacggtgcaggttcctggttggtgaacaaccaggcgctgttgctgagttatgctgtaaacatcgtggcgg

SEQ ID NO: 282788 - DNA, 75 bp, synthetic construct
  source 1..75: mol_type = other DNA
gcgagtttgatgccgctggtatcagcttcccgtatccgcaaatggatgtgaattttaagcgggtgaaagaggaca

SEQ ID NO: 282789 - DNA, 75 bp, synthetic construct
  source 1..75: mol_type = other DNA
agatcgcgaaatgaccgtgcgtctgaacgagcttggcgcatcctcgattaatttcgtggtccgcgtctggagtaa

SEQ ID NO: 282790 - DNA, 75 bp, synthetic construct
  source 1..75: mol_type = other DNA
atttgcattgcggatactgatgcctcagcgatttggccaataaatttatctatcagtgagatctcatctgagaat

SEQ ID NO: 282791 - DNA, 75 bp, synthetic construct
  source 1..75: mol_type = other DNA
caatctggctgatcaggttggcattaaggctgttatggtacatgcaattgatgatgacgccagagcattttatga

SEQ ID NO: 282792 - DNA, 75 bp, synthetic construct
  source 1..75: mol_type = other DNA
tggtagatctctaattttctttgaaagcggagcaggtgaaaatatagatcgttcaggagggtgcatttctcacgc

SEQ ID NO: 282793 - DNA, 75 bp, synthetic construct
  source 1..75: mol_type = other DNA
gtggaatatgcgatgaaataaatggcattagccttatcaaaggatacgatgaaatcgtaaatgacaagaaaaata

SEQ ID NO: 282794 - DNA, 75 bp, synthetic construct
  source 1..75: mol_type = other DNA
atgaaaatattaatcatattcgcactatatatcttatcgtcttcactatatgccaatactgcggatatacaggga

SEQ ID NO: 282795 - DNA, 75 bp, synthetic construct
  source 1..75: mol_type = other DNA
cggggaagactacgaaagcccgctctcctgcgaccacttttatcataggagtgtggaagtgcttttccatcaatc

SEQ ID NO: 282796 - DNA, 75 bp, synthetic construct
  source 1..75: mol_type = other DNA
cattgctgacagatgagcatatacttcagccatttgactgtgggaatgaggtgttaagtaactggttgcgtggtc

SEQ ID NO: 282797 - DNA, 75 bp, synthetic construct
  source 1..75: mol_type = other DNA
caccatatcgcggcggtggaagcactggacgatattcaggcggtgctcgactacgattattcaacaggctggcaa

SEQ ID NO: 282798 - DNA, 75 bp, synthetic construct
  source 1..75: mol_type = other DNA
cggtaacctttgaggttattgactggatagatgcagcctcttttactgtggaattacctgattcagtaattcctg

SEQ ID NO: 282799 - DNA, 75 bp, synthetic construct
  source 1..75: mol_type = other DNA
aggcaaagcaaatccccaaaggcttaatgtggcagaccaaaaacctcggacttcttgagctgaccaatgaaatcg

SEQ ID NO: 282800 - DNA, 75 bp, synthetic construct
  source 1..75: mol_type = other DNA
tggagcagttgcgcgccattcaggatgcaaccggcgttgggatggtattgattggtaacccaagccagttagcca

SEQ ID NO: 282801 - DNA, 75 bp, synthetic construct
  source 1..75: mol_type = other DNA
agaccattgatgaacttattgatggcggcgtactgacgcagtatgccatcgccagagaggcgggaatttccgatg

SEQ ID NO: 282802 - DNA, 75 bp, synthetic construct
  source 1..75: mol_type = other DNA
gctggaaagctcgtaacaacgccgccaccgggcgaatattatcgcctggacggtgataaatggatttatgacgcg

SEQ ID NO: 282803 - DNA, 75 bp, synthetic construct
  source 1..75: mol_type = other DNA
atatctactttggccagagctttggtaaaaaactggaggcggcagcggcgaagacctccggtgccacggtgtttg

SEQ ID NO: 282804 - DNA, 75 bp, synthetic construct
  source 1..75: mol_type = other DNA
atttcgaccagcagacgcccgacagccagcttgccgactttatcagcctcgctaaaacggccggtatggtgtcgc

SEQ ID NO: 282805 - DNA, 75 bp, synthetic construct
  source 1..75: mol_type = other DNA
ccccgccagcgcctgtctgaatcgctataccgcgcagattgccgccttgtgcagcgcagaacggattctggaggt

SEQ ID NO: 282806 - DNA, 75 bp, synthetic construct
  source 1..75: mol_type = other DNA
ctgtaaagctgtcgtgcatttgcacagtacgtggtcgacggcactttcctgccttcaagggctggacagcagtaa

SEQ ID NO: 282807 - DNA, 75 bp, synthetic construct
  source 1..75: mol_type = other DNA
caacaggctctgtttaacatcagcgccacagaaaaagccgcaacgccggtcattcctcctgctgatgacaacgcc

SEQ ID NO: 282808 - DNA, 75 bp, synthetic construct
  source 1..75: mol_type = other DNA
cgtgtttaccggcgatagccgctggcatctggtgaccggagcgtttggtggattaggccgccttgccgtgaactg

SEQ ID NO: 282809 - DNA, 75 bp, synthetic construct
  source 1..75: mol_type = other DNA
gcatgactatcgatcaggcgatgagccatctgttcggcgaaccctgctatgtattcacgcaaacgccgcaggtct

SEQ ID NO: 282810 - DNA, 75 bp, synthetic construct
  source 1..75: mol_type = other DNA
ccaccgctctatgcattatcacagcagaccaccacgccggcagagacactgaacacggtggtgaaaaatattcct

SEQ ID NO: 282811 - DNA, 75 bp, synthetic construct
  source 1..75: mol_type = other DNA
gcttggctggctaaacctgccactggcgcgctcaccgctggcccattctcagcctctgccagctatgtaatcgca

SEQ ID NO: 282812 - DNA, 75 bp, synthetic construct
  source 1..75: mol_type = other DNA
agctgcaacgtgagatgggattgtcattaatttttatcgctcatgacctggccgtggtaaaacacatttccgatc

SEQ ID NO: 282813 - DNA, 75 bp, synthetic construct
  source 1..75: mol_type = other DNA
tttgaaggtgatcagacctacaccgaaaaacccggacatctttttagattaactgcatcatttgatgacataagg

SEQ ID NO: 282814 - DNA, 75 bp, synthetic construct
  source 1..75: mol_type = other DNA
aaggatgagtatgtcgagttgccctttgaaattttggatggtgacttgatgttcagtctgttcggtgagcttaac

SEQ ID NO: 282815 - DNA, 75 bp, synthetic construct
  source 1..75: mol_type = other DNA
attaaatttatgggccgacaaatacaaagcatacggttacacatggaatagaggtcttgatggtgcgattttaag

SEQ ID NO: 282816 - DNA, 75 bp, synthetic construct
  source 1..75: mol_type = other DNA
gtgtacgcatcaatgcggaacgggcgtggcaggatctgtctcctcatggactcacgcagcttatctgttctaagc

SEQ ID NO: 282817 - DNA, 75 bp, synthetic construct
  source 1..75: mol_type = other DNA
ggtgctgacagaccggggggcgcaacttgaagccgctgcgctggcatcgggtgtacccgtggtgctgaataaatt

SEQ ID NO: 282818 - DNA, 75 bp, synthetic construct
  source 1..75: mol_type = other DNA
ctgccagcggcaaaactcaccctgaatttatgcgcggagatatttaccgcgataaatacggtggcacggtaacga

SEQ ID NO: 282819 - DNA, 75 bp, synthetic construct
  source 1..75: mol_type = other DNA
ctgccagcggtctctctcggcctgaaatcagacacggagatatttaccgcgacaccatacgtgggggacgagcgg

SEQ ID NO: 282820 - DNA, 75 bp, synthetic construct
  source 1..75: mol_type = other DNA
aaccgctgaagccgaaatcggactgggcggtgaccgggctctacttctacgacaacaatgtggtggagatggcga

SEQ ID NO: 282821 - DNA, 75 bp, synthetic construct
  source 1..75: mol_type = other DNA
aggcctggggaccttgaaagacgtccctgatttcctctacgtcattacagacgtaaatgccaacatggctgacaa

SEQ ID NO: 282822 - DNA, 75 bp, synthetic construct
  source 1..75: mol_type = other DNA
ggtgctgacagaccgtggcgcgcaattagaagctgcggcgctggcgtcaggcgtgccggtagtgctaaataaatt

SEQ ID NO: 282823 - DNA, 75 bp, synthetic construct
  source 1..75: mol_type = other DNA
tatgactgcgtgatgcctgtttgtcagttccggcgtgatttttccctggtgcaggccgtaccacgtcgtagccca

SEQ ID NO: 282824 - DNA, 75 bp, synthetic construct
  source 1..75: mol_type = other DNA
tgctatgtattcacgcaaacgccgcaggtctggctggatcatcaggtcatggagagcgacggcgagttgatgttt

SEQ ID NO: 282825 - DNA, 75 bp, synthetic construct
  source 1..75: mol_type = other DNA
ggataaacaacgccgacgacgctgtgattgaagccagccactggcaaatcatgatggaagccccccacgttcagg

SEQ ID NO: 282826 - DNA, 75 bp, synthetic construct
  source 1..75: mol_type = other DNA
cgctgtcagtaccgattctggcggtggtgttcatcctgtcgtttatcgctgccattactgaagttccggtcgcgt

SEQ ID NO: 282827 - DNA, 75 bp, synthetic construct
  source 1..75: mol_type = other DNA
ggcgctggatggtgcgacaccgtggcaggccttccgccttgtcctgttgccgctgtcagtaccgattctggcggt

SEQ ID NO: 282828 - DNA, 75 bp, synthetic construct
  source 1..75: mol_type = other DNA
agttccggcgtgatttttccctggtacagaccgcgccgcgcaatcagcccaccagcaaagagaaggcacgggcaa

SEQ ID NO: 282829 - DNA, 75 bp, synthetic construct
  source 1..75: mol_type = other DNA
aaaagcccgcctgccaacgtatggcattgtgaaatattcgtttggcgaaaaaggggccatcgccattaacatttt

SEQ ID NO: 282830 - DNA, 75 bp, synthetic construct
  source 1..75: mol_type = other DNA
ctgggccgcagcagccgctggtacagaagcgaagtggagcagtggatgcagcagcgtatcgaagcatcacggaga

SEQ ID NO: 282831 - DNA, 75 bp, synthetic construct
  source 1..75: mol_type = other DNA
cccgagccaaaagataaggatcgaacctcgctggcctggcaggcgtatggtttgcaacaaacccgaacagctgaa

SEQ ID NO: 282832 - DNA, 75 bp, synthetic construct
  source 1..75: mol_type = other DNA
gagctgcaacctgaccatattgtcacccctggtgccgttatcgaccacatcatcgtttcacaggagagcaaataa

SEQ ID NO: 282833 - DNA, 75 bp, synthetic construct
  source 1..75: mol_type = other DNA
tcacatatcggcaccaacccggaaacaggtcggcgcatgatatctggtgaaatggacgtcgttctggtgccacaa

SEQ ID NO: 282834 - DNA, 75 bp, synthetic construct
  source 1..75: mol_type = other DNA
gccacactgcctgatttcggtagttttgtgcataaccgcaaacatgcgctgattgccgcaggcgtgacgtttctg

SEQ ID NO: 282835 - DNA, 75 bp, synthetic construct
  source 1..75: mol_type = other DNA
atgtcaaatattcagaaaaccattaacactgaaaaatataacgagtgggtgaaaaaattctctgagcaggttttt

SEQ ID NO: 282836 - DNA, 75 bp, synthetic construct
  source 1..75: mol_type = other DNA
caaaaaatgaattagagccgtggacacctgaaggtgtcgccccaaattattgctggtggatgttgatccagttga

SEQ ID NO: 282837 - DNA, 75 bp, synthetic construct
  source 1..75: mol_type = other DNA
tagaacgcttcttcgtttttgattcttccgagtatcgttatgcgttaaatatgcgtgaagtggtatttcatcagt

SEQ ID NO: 282838 - DNA, 75 bp, synthetic construct
  source 1..75: mol_type = other DNA
aatggttttacaagctgatcagtgaaggacattttcctaaacccatcaagctgggccgcagcagccgctggtaca

SEQ ID NO: 282839 - DNA, 75 bp, synthetic construct
  source 1..75: mol_type = other DNA
ctgcgaccgttatttttgtcgcgcaaccgtcagaagggcagaaaaaacgagcagaacaagcgggggttaagctga

SEQ ID NO: 282840 - DNA, 75 bp, synthetic construct
  source 1..75: mol_type = other DNA
atgcggaaaaatataacgagtgggtaagaaaattctctgagcagattcttaaaatcactggcgacgagaatgtgg

SEQ ID NO: 282841 - DNA, 75 bp, synthetic construct
  source 1..75: mol_type = other DNA
tggtggttttctcaccccaactggtgtcggcaccgtcgtagaggaaggcaaacagacactgacactcgacggtaa

SEQ ID NO: 282842 - DNA, 75 bp, synthetic construct
  source 1..75: mol_type = other DNA
cggtggctatggtcgtggcgagctgcatccgctttcagacgtcgatttgctaattttgagccgtaagagactccc

SEQ ID NO: 282843 - DNA, 75 bp, synthetic construct
  source 1..75: mol_type = other DNA
attttgcagaactccacgggctgaactcacgcgaaacacagctggttgcctggctggttcgccagcacttgctga

SEQ ID NO: 282844 - DNA, 75 bp, synthetic construct
  source 1..75: mol_type = other DNA
ctgccgtcaactgagctgattttcatcgccgcgctgtttcacgatatcgccaaagggcgtggcggcgaccactcc

SEQ ID NO: 282845 - DNA, 75 bp, synthetic construct
  source 1..75: mol_type = other DNA
tgaagagccgattaaagctcgcgtcattgatgagttacgcccgaaaacgcgtgcgccaagcgagaaacagacggg

SEQ ID NO: 282846 - DNA, 75 bp, synthetic construct
  source 1..75: mol_type = other DNA
ggcaccggtaaaacggcggcgtatctgctgccagcgttgcagcacctgctcgatttcccgcgtaagaaatccggt

SEQ ID NO: 282847 - DNA, 75 bp, synthetic construct
  source 1..75: mol_type = other DNA
gttctacgcggcgaaagttgaggagcaaaaccagcgccaccagcgttatcacggcaccagttacaacctcgaacc

SEQ ID NO: 282848 - DNA, 75 bp, synthetic construct
  source 1..75: mol_type = other DNA
gcctacgatagtctgattaaaggttccgcgacggttatttttgttgcacaaccgtcggaaggacagaaaaaacgt

SEQ ID NO: 282849 - DNA, 75 bp, synthetic construct
  source 1..75: mol_type = other DNA
gggcgtagcagccgctggtacaaaagtgaagtagagcagtggatgcagcaacgaatcgaggaatcacgaggagca

SEQ ID NO: 282850 - DNA, 75 bp, synthetic construct
  source 1..75: mol_type = other DNA
atgttgacctcaataacaggctacgacagtgtattgctgcgtgccgacgatcccctgatcgacatgaattacatc

SEQ ID NO: 282851 - DNA, 75 bp, synthetic construct
  source 1..75: mol_type = other DNA
gtgttcacgacgcacaaattttcaccactcgcgacggtatggcgatggatacctttatcgtgctggaacccgatg

SEQ ID NO: 282852 - DNA, 75 bp, synthetic construct
  source 1..75: mol_type = other DNA
cgcatggataacatcgacgaagaggcgctgcaccaaatttggtcacgctgtcgtgctaactattttgtccgccat

SEQ ID NO: 282853 - DNA, 75 bp, synthetic construct
  source 1..75: mol_type = other DNA
gcgaaaactgtttttgagcattctgcgtcaccccggagcggtgcggcgcgggctattgccaatgcatcgccatag

SEQ ID NO: 282854 - DNA, 75 bp, synthetic construct
  source 1..75: mol_type = other DNA
gctctactgatttgaggaaaagaaattatttcaagttagatgagaaaaaagccaaagaagatatcatatcattat

SEQ ID NO: 282855 - DNA, 75 bp, synthetic construct
  source 1..75: mol_type = other DNA
ggaagaatcaggtggtaagcaacagttttattctcgtacaaataactcaatagtttccactcatgtactcagtct

SEQ ID NO: 282856 - DNA, 75 bp, synthetic construct
  source 1..75: mol_type = other DNA
gctaatgagaatgaatgggatggttatcgtttcaaagtaaaatatgttgttccgattactaccgttttgggtggt

SEQ ID NO: 282857 - DNA, 75 bp, synthetic construct
  source 1..75: mol_type = other DNA
agtaatggtctaaagtggctcgaagaaaagataaaaataaaacaattagagcttgtttctgatttagccagtgat

SEQ ID NO: 282858 - DNA, 75 bp, synthetic construct
  source 1..75: mol_type = other DNA
tttcgggtggtaaagattccggattaatgctgcatctgaccgccgaacttgcccgacaaatgggcaaaaaaattt

SEQ ID NO: 282859 - DNA, 75 bp, synthetic construct
  source 1..75: mol_type = other DNA
tttactcgcaattgaagacgaacattgcataaatattgcacacatgaataaagctaatgttgaagacggaagatg

SEQ ID NO: 282860 - DNA, 75 bp, synthetic construct
  source 1..75: mol_type = other DNA
atgcttaaacccgatttactgcgccagatgataagccagcatgtgccctggctgcgcgaaaatcccgataatctg

SEQ ID NO: 282861 - DNA, 75 bp, synthetic construct
  source 1..75: mol_type = other DNA
tggcggacaagaggtctatcacattcatatgcacctcctgggtggccgtccgttggggccaatgctggcacataa

SEQ ID NO: 282862 - DNA, 75 bp, synthetic construct
  source 1..75: mol_type = other DNA
ggcaatcaagtaccacggaacgcaacaattacgggcgcatattgtaaaaacggtaatccgttcaggattggtttg

SEQ ID NO: 282863 - DNA, 75 bp, synthetic construct
  source 1..75: mol_type = other DNA
gttgaatcgctatgccaaccgcgctggttgttacccgcagttccgggagggggatgaaatagcgattgaggtaac

SEQ ID NO: 282864 - DNA, 75 bp, synthetic construct
  source 1..75: mol_type = other DNA
gttgaaggcctcaactatccaggagtaactgatcctaaattaaaaatctccacaaaaatagaaccaattgatggc

SEQ ID NO: 282865 - DNA, 75 bp, synthetic construct
  source 1..75: mol_type = other DNA
ataagaattgatgagatcaatgcacaacgtggctttggaagcccctccgctgccgacaaagagaatagcaaatta

SEQ ID NO: 282866 - DNA, 75 bp, synthetic construct
  source 1..75: mol_type = other DNA
cgatcgataccaaaaagacatggagaaacttgaattggaaaatatggatctaagaaggaagctcggtgaagcacg

SEQ ID NO: 282867 - DNA, 75 bp, synthetic construct
  source 1..75: mol_type = other DNA
tcccgttttaccagtcaggcatgacttttgaacatttcgtgcgtgaatttgccgaatggttttcgcaaaaacgtc

SEQ ID NO: 282868 - DNA, 75 bp, synthetic construct
  source 1..75: mol_type = other DNA
cacttgttactgctgatagtgcaaacaataccagccagctaaaaaacagaatcttttacgttaaaaataagttgt

SEQ ID NO: 282869 - DNA, 75 bp, synthetic construct
  source 1..75: mol_type = other DNA
ctgctgatgatggtggggataacgctgatattcactgtatttggtattatatcgcttttgatatttattttgatg

SEQ ID NO: 282870 - DNA, 75 bp, synthetic construct
  source 1..75: mol_type = other DNA
ctgctgctgatggtggggttaactctcattttgctgtcggtctcaccggaacatcggcttatcatatcaggtggt

SEQ ID NO: 282871 - DNA, 75 bp, synthetic construct
  source 1..75: mol_type = other DNA
gatcaactcaggtgttaaaagattagaagcgatggaagtgaggcatggctcagatgctgctacctcaatgttcta

SEQ ID NO: 282872 - DNA, 75 bp, synthetic construct
  source 1..75: mol_type = other DNA
gaatggaccgttgaattaattgtacaaaagtatggcaataatcttgaaactgacaaaaacgaactttttattcct

SEQ ID NO: 282873 - DNA, 75 bp, synthetic construct
  source 1..75: mol_type = other DNA
aatgttcaggccgaaagggtcacacaacaagatgtagacaaatttaaacatgattttgaaagcatgcttgctttt

SEQ ID NO: 282874 - DNA, 75 bp, synthetic construct
  source 1..75: mol_type = other DNA
taacgattactggtgtcgggcattatcatttagcccgaccaaagcgcagaattatcagcgttataacgaacggat

SEQ ID NO: 282875 - DNA, 75 bp, synthetic construct
  source 1..75: mol_type = other DNA
ggcgcgaaagatatcccctcctggcggcgaatatgcaaagttttactcaataacgattactggtgtcgggcatta

SEQ ID NO: 282876 - DNA, 75 bp, synthetic construct
  source 1..75: mol_type = other DNA
taacgattactggtgccgggcattatcatttagtcctacgaaagcgaagaactatcagcgttataacgaacggat

SEQ ID NO: 282877 - DNA, 75 bp, synthetic construct
  source 1..75: mol_type = other DNA
tcttttatggctagccactggacaaggcagcgagcacaatgctctcacaacatcggtaaaagaactgcctaaatt

SEQ ID NO: 282878 - DNA, 75 bp, synthetic construct
  source 1..75: mol_type = other DNA
gtaattcagtgtgcaattgaaacaggggcatctatcgaatggctctcattcggaaaaggcgtaccattccctcag

SEQ ID NO: 282879 - DNA, 75 bp, synthetic construct
  source 1..75: mol_type = other DNA
tcatttagcccgaccaaagcgcagaattatcagcgttataacgaacggataaaaggaaaacgtcaggagtggggg

SEQ ID NO: 282880 - DNA, 75 bp, synthetic construct
  source 1..75: mol_type = other DNA
tgattatttttattgttaccgccgttaactacgccgatcgtgcaacgctgtctattgctggtaccgaagtggcaa

SEQ ID NO: 282881 - DNA, 75 bp, synthetic construct
  source 1..75: mol_type = other DNA
ggataaaagagttagaggcttcaaataacgaattaaccagtcgagcacatcaagagagaattgatcaaaaaattc

SEQ ID NO: 282882 - DNA, 75 bp, synthetic construct
  source 1..75: mol_type = other DNA
ttctgatcaaatggattatccgccaagtttccaaacgctatggtctaccgcgaaagaaaaaatcaaaccttctca

SEQ ID NO: 282883 - DNA, 75 bp, synthetic construct
  source 1..75: mol_type = other DNA
gtctactaacaatcttgaggtggcagctaacaaatatgcctttggtttgattggtggaaaagagactttgagaat

SEQ ID NO: 282884 - DNA, 75 bp, synthetic construct
  source 1..75: mol_type = other DNA
tggcttctctgattggtttttgccattcgttaggcattcctgttgtctacattaagaactttccaacgggtgcgg

SEQ ID NO: 282885 - DNA, 75 bp, synthetic construct
  source 1..75: mol_type = other DNA
aaaacaacgattatgttgaaaaagttaattgcgaatggaaagatctttataatattttaaatgaaaatccgcata

SEQ ID NO: 282886 - DNA, 75 bp, synthetic construct
  source 1..75: mol_type = other DNA
tgatgatgaacgttatcaggaagaggggacgtcaaaggccaaacgagttagatgcttgctgaaacaggctgatcg

SEQ ID NO: 282887 - DNA, 75 bp, synthetic construct
  source 1..75: mol_type = other DNA
gagaatgcggataacacagccgggacagtggaacagttgttcacgtctgcgttcagtagcatgagtgattggctg

SEQ ID NO: 282888 - DNA, 75 bp, synthetic construct
  source 1..75: mol_type = other DNA
cttcaggagaaaaaacgccagaaggatttgcaggatgcaaaagagcaggcagagcggaattatcaggagcaacag

SEQ ID NO: 282889 - DNA, 75 bp, synthetic construct
  source 1..75: mol_type = other DNA
cggaaaaagagatcagcctgtggcgcaatggcctaaacagcgttgaagatttacaggcgaaccagatcgacgaaa

SEQ ID NO: 282890 - DNA, 75 bp, synthetic construct
  source 1..75: mol_type = other DNA
acctcttcaccagtgatgaactttacgatcgccgtaatgacccaaatgaaatgcataacctgatcgatgatatcc

SEQ ID NO: 282891 - DNA, 75 bp, synthetic construct
  source 1..75: mol_type = other DNA
taagctgatcagtaaaggagcggcgatgtatgacgacatcacccgcattccactgatcatccgttcgccgcaagg

SEQ ID NO: 282892 - DNA, 75 bp, synthetic construct
  source 1..75: mol_type = other DNA
acttcatcggctactgtaactcactttgctatcacggtaagttgcagcctaaaagagggatggaaaaagggacga

SEQ ID NO: 282893 - DNA, 75 bp, synthetic construct
  source 1..75: mol_type = other DNA
ctggatcggttgctacatcactcaaccacgctgaatatcaaaggagagagttaccggttaaaagagaaacgtaaa

SEQ ID NO: 282894 - DNA, 75 bp, synthetic construct
  source 1..75: mol_type = other DNA
gggttgtggcggatattgggggttcaggtatggcgatgtttgccccgcagtacaacatcgagatcaataacgatg

SEQ ID NO: 282895 - DNA, 75 bp, synthetic construct
  source 1..75: mol_type = other DNA
ggagaaagtgtcgcgggcgaaaagactcccctggacggcatcatcttctcaggttgaatacgatcagcagcgtct

SEQ ID NO: 282896 - DNA, 75 bp, synthetic construct
  source 1..75: mol_type = other DNA
tgactaaagatcccttttctgggatgtatagatatatatgtcattattacgaaattccattcggtggttttggca

SEQ ID NO: 282897 - DNA, 75 bp, synthetic construct
  source 1..75: mol_type = other DNA
gagtatgctgagaagaataaaaaacagacatatgttctttgtcgtcccctgtcaaatgaggatgtaaagtatgat

SEQ ID NO: 282898 - DNA, 75 bp, synthetic construct
  source 1..75: mol_type = other DNA
gtggtgccagagttaccgcgcagggcgtccccgattggctattacgactctgcgcctggtagccaggattaccct

SEQ ID NO: 282899 - DNA, 75 bp, synthetic construct
  source 1..75: mol_type = other DNA
aacctataaagaaatgttcgaagtgctgccaccgatgaactgttgctacctgggcataacggcctcattcatgct

SEQ ID NO: 282900 - DNA, 75 bp, synthetic construct
  source 1..75: mol_type = other DNA
ctgttaagcgcccagaactctatttctatattcctggcaaaagccatccgcaggacgtggcgatcattccggctg

SEQ ID NO: 282901 - DNA, 75 bp, synthetic construct
  source 1..75: mol_type = other DNA
gaggtgagcatatcacctctgttcaggtggccaaattcagtaaaccacttcatcggctactgtaactcactttgc

SEQ ID NO: 282902 - DNA, 75 bp, synthetic construct
  source 1..75: mol_type = other DNA
gtctgcactggcagaggaaaccggtcggcgtactgcggatattgataataacctcaatgcgctgggtagtacgct

SEQ ID NO: 282903 - DNA, 75 bp, synthetic construct
  source 1..75: mol_type = other DNA
ggtggtgctgcgggtgctttgggcggcggttctggtggtggcgctggcagtggactggccgacagcatcaatgcc

SEQ ID NO: 282904 - DNA, 75 bp, synthetic construct
  source 1..75: mol_type = other DNA
atggcgtatctggtggcaccgccgctggaagcgacctacggcattgatgcagcgttgaaatctgccgacgtgcag

SEQ ID NO: 282905 - DNA, 75 bp, synthetic construct
  source 1..75: mol_type = other DNA
cactgaaagccggtgataaatacgccacaatacgtacgatgctgacagatatctttaacagtaattaccagtgtt

SEQ ID NO: 282906 - DNA, 75 bp, synthetic construct
  source 1..75: mol_type = other DNA
cacctcttctgtgctgtcagatatggcgaaaatcctggcgcaggcaaccatgatgaaatcgataaaagggattgg

SEQ ID NO: 282907 - DNA, 75 bp, synthetic construct
  source 1..75: mol_type = other DNA
acaattgggtattgattatcttgatgattataaaaatagacgtattgtgcatagcttacgtcacactttcgtaac

SEQ ID NO: 282908 - DNA, 75 bp, synthetic construct
  source 1..75: mol_type = other DNA
ggatgttgatatcttcctgcaactgccaaaaacacgctggacttccgcacagctcttgcgcccgcaggcattaga

SEQ ID NO: 282909 - DNA, 75 bp, synthetic construct
  source 1..75: mol_type = other DNA
catgcgggcgtttcagaatttcacggcagatgcggataatgcggcaggcactgctgagcagatgcttacagcggc

SEQ ID NO: 282910 - DNA, 75 bp, synthetic construct
  source 1..75: mol_type = other DNA
gagaaagccctggcatccggtaagaaaaaaacacgcgaaacccgtaatgatgaggccacccggttattgctgcag

SEQ ID NO: 282911 - DNA, 75 bp, synthetic construct
  source 1..75: mol_type = other DNA
ttggcaactgatcattgcataagcaaatctgctttcacttttacggtgttgaaagattacctcgaaactcaggaa

SEQ ID NO: 282912 - DNA, 75 bp, synthetic construct
  source 1..75: mol_type = other DNA
agaagagaacttcgattgccgcgcagttgaaacgctgatcctcgacgaagctgaccgtatgctggatatgggctt

SEQ ID NO: 282913 - DNA, 75 bp, synthetic construct
  source 1..75: mol_type = other DNA
gtactggttgcaaccgatgttgccgcgcgcggtatcgacattcctgacgtcagccacgtctttaacttcgatatg

SEQ ID NO: 282914 - DNA, 75 bp, synthetic construct
  source 1..75: mol_type = other DNA
aaaacgccatcgcgataccaaaaatattggtaagcgacgcaaaccaagcggaacaggcgtaccaccgcaaacgac

SEQ ID NO: 282915 - DNA, 75 bp, synthetic construct
  source 1..75: mol_type = other DNA
ccgaaaacacgctggacctccgcgcaactcttgcgtccgcaagcgttagatttggtttcccgcgacggtaaacac

SEQ ID NO: 282916 - DNA, 75 bp, synthetic construct
  source 1..75: mol_type = other DNA
tgcagtacgccgatcaggctgtcagggatgcggcgatacaacgtgaaaatgaacgttacgagaaagccctggcat

SEQ ID NO: 282917 - DNA, 75 bp, synthetic construct
  source 1..75: mol_type = other DNA
tgagcgcaaaaaaattcatcagtggtattaccgtgccgatgaccttgagcataaaaccgcgttgctggtgcatct

SEQ ID NO: 282918 - DNA, 75 bp, synthetic construct
  source 1..75: mol_type = other DNA
ggctcacaaggatgagctgattcaggcactgacgctgctggatgcaaaacagcaggagctgcagaagcagactgc

SEQ ID NO: 282919 - DNA, 75 bp, synthetic construct
  source 1..75: mol_type = other DNA
gagaatcgccgttactggcaacagcttgaagttgtacagggtaactggaaaaacggagtcctgcgtgcatttcag

SEQ ID NO: 282920 - DNA, 75 bp, synthetic construct
  source 1..75: mol_type = other DNA
ccagtgcggggctgcaggaattacagcgtattcagcagcagatccgacaggccagaaacagcggcgggattggtc

SEQ ID NO: 282921 - DNA, 75 bp, synthetic construct
  source 1..75: mol_type = other DNA
ccgccagcgcatggaggcactgagccagaaaatgcgcgaggaacaggcgcaggccatggctctggcggaggctca

SEQ ID NO: 282922 - DNA, 75 bp, synthetic construct
  source 1..75: mol_type = other DNA
gaggcagaacgcgatgcgttgcgggaggaagtcgcccgactgaatcaggaaatacgccgccggcagatggagctg

SEQ ID NO: 282923 - DNA, 75 bp, synthetic construct
  source 1..75: mol_type = other DNA
catttccgatatgaagcggcagccctgcgttttatgagcggcactgcgggggctaagcgtcgcatctaccagcta

SEQ ID NO: 282924 - DNA, 75 bp, synthetic construct
  source 1..75: mol_type = other DNA
gaaggtggtttatgacctcgggaaaaaagcggcagcggactttatgcaacagcagtcccgtgatggtggtcggtt

SEQ ID NO: 282925 - DNA, 75 bp, synthetic construct
  source 1..75: mol_type = other DNA
atgtgaaaaccaatgcagaaggtggtgtttatcagtctgctgatttgagtcgctacagtggcacggtggttaacc

SEQ ID NO: 282926 - DNA, 75 bp, synthetic construct
  source 1..75: mol_type = other DNA
gccgcccggatagccatgtctgcactggcagaggaaaccggtaaacgtacgtcggatattgataataacctcaat

SEQ ID NO: 282927 - DNA, 75 bp, synthetic construct
  source 1..75: mol_type = other DNA
atgccgaccaggcggtcagggacgcagcgatacagcgtgaaaatgaacgttacgaaaaagccattaagaaaaaaa

SEQ ID NO: 282928 - DNA, 75 bp, synthetic construct
  source 1..75: mol_type = other DNA
ctttgcaaaaggcgcgggggtgatgggagaagcgggacctgaagccattctgccactgcgtcgtggtgccgacgg

SEQ ID NO: 282929 - DNA, 75 bp, synthetic construct
  source 1..75: mol_type = other DNA
gacagtcttaaccggcaactgaacgaaaacagacgctactggcaggagcaggaactgatgcaggcagactggaaa

SEQ ID NO: 282930 - DNA, 75 bp, synthetic construct
  source 1..75: mol_type = other DNA
ggcgaagaaatttccgtggactaaggcgtccaccacgggggaatacgatcagcaacaactggatgcgctgcaaga

SEQ ID NO: 282931 - DNA, 75 bp, synthetic construct
  source 1..75: mol_type = other DNA
cgctgaacgtcgcgacgactgacgctgaggcggatatgtcggcttatgtcaccgtgctcgatgacctggcggaga

SEQ ID NO: 282932 - DNA, 75 bp, synthetic construct
  source 1..75: mol_type = other DNA
tgctggcgctgcgataccaaagttgaacgtaaagagatcccgcagtggtttatcaaaatcaccgcttacgctgac

SEQ ID NO: 282933 - DNA, 75 bp, synthetic construct
  source 1..75: mol_type = other DNA
tatgctgggcaaaaacgttcttcagccgatcggctgggatgcgtttggtctgcctgcggaaggcgcagcggtgaa

SEQ ID NO: 282934 - DNA, 75 bp, synthetic construct
  source 1..75: mol_type = other DNA
tgatcccggcgctggagctgatcgacgctcgctgccacaacatcgatccggaaacccagcgcccgcgcaaagtgt

SEQ ID NO: 282935 - DNA, 75 bp, synthetic construct
  source 1..75: mol_type = other DNA
gctgacggcgggcagcaggatgaagtgattgccacgctgatggtgtgggcgattgactgcggcgatcttccgctt

SEQ ID NO: 282936 - DNA, 75 bp, synthetic construct
  source 1..75: mol_type = other DNA
atgattactcctgcacagcaacactggcagaacgtgatggcacagcgcgcaggccggtcgactgaaggcatggac

SEQ ID NO: 282937 - DNA, 75 bp, synthetic construct
  source 1..75: mol_type = other DNA
cccaggccgtagcgccgcataatctctattacgcaccggatccctcctcgcaaatcgcctgttctattggcggca

SEQ ID NO: 282938 - DNA, 75 bp, synthetic construct
  source 1..75: mol_type = other DNA
cgtaacctggcgatctcccaggccgttgcgccgcataatctctattacgcgccggatccttcctcacaaatcgcc

SEQ ID NO: 282939 - DNA, 75 bp, synthetic construct
  source 1..75: mol_type = other DNA
tgaagaacgtgcagcagctactgaagccgttgcagaacgccgggtagagacaacaaaaggagccagggatgtaca

SEQ ID NO: 282940 - DNA, 75 bp, synthetic construct
  source 1..75: mol_type = other DNA
ccgatcggctgggacgcgtttggtctgcctgcggaaggcgcggcggtgaaaaacaacaccgctccggcaccgtgg

SEQ ID NO: 282941 - DNA, 75 bp, synthetic construct
  source 1..75: mol_type = other DNA
taaccaaggaggccagcaatgttcaccagacggttaaccatatgcctgatgacgatgtcgatcgtgagctgcgca

SEQ ID NO: 282942 - DNA, 75 bp, synthetic construct
  source 1..75: mol_type = other DNA
gcagctgcagaacgccgcgttgaagtaaccaaggaggccagcaatgttcaccagacggttaaccatatgcctgat

SEQ ID NO: 282943 - DNA, 75 bp, synthetic construct
  source 1..75: mol_type = other DNA
tcaccatcgaagacgcttacgcggtgcagcgtgaatgggttcgactgaaaatcgccgaaggccgtacgctgaaag

SEQ ID NO: 282944 - DNA, 75 bp, synthetic construct
  source 1..75: mol_type = other DNA
ctcccgcgtgaaatcgagttgcgccagaaacaatacgaatactaccgtgatttactgttcagtttcccgaaacct

SEQ ID NO: 282945 - DNA, 75 bp, synthetic construct
  source 1..75: mol_type = other DNA
atttcaactacagtgtcaccggactggctaacttcgttcgggctgggcgtctcacccaggggcaggctaatgcac

SEQ ID NO: 282946 - DNA, 75 bp, synthetic construct
  source 1..75: mol_type = other DNA
tgattatcaatggtggcaggaacggcatcgacgaccggcgcgctcggtacatcactgccagtaaggcgctagcgg

SEQ ID NO: 282947 - DNA, 75 bp, synthetic construct
  source 1..75: mol_type = other DNA
tgattatcaatggtggcaggaacggcatcgacgaccggcgcgcgcggtacatcactgccagtaaggtactgacgg

SEQ ID NO: 282948 - DNA, 75 bp, synthetic construct
  source 1..75: mol_type = other DNA
cagctggcatcagtgaggtgctggccgcgcgctggtacctgcatatcaccgcagccatgaaagagtttggcatcg

SEQ ID NO: 282949 - DNA, 75 bp, synthetic construct
  source 1..75: mol_type = other DNA
tgattatcaatggtggcaggaatggcatcgacgaccggcgcgcgcggtacgtcactgccagtaaggtgctggctg

SEQ ID NO: 282950 - DNA, 75 bp, synthetic construct
  source 1..75: mol_type = other DNA
atcgaaccactggacacactttgggaaattgtcgccaaccaggacatgccggacgaagtgcgcgccaaattatgc

SEQ ID NO: 282951 - DNA, 75 bp, synthetic construct
  source 1..75: mol_type = other DNA
aaagcccgcgctttttcccgcagggcatccactcagcctgatgacatccatcagtcactgatgctgttgcgggaa

SEQ ID NO: 282952 - DNA, 75 bp, synthetic construct
  source 1..75: mol_type = other DNA
tgcaacaggcggtggcccgtaaccgggtaaccatgagtacacgagaaacgcagcgggaaagaaccgcacatgagc

SEQ ID NO: 282953 - DNA, 75 bp, synthetic construct
  source 1..75: mol_type = other DNA
cttatccagattaccggtttgaataactatcgtgactgtggaaacggtcttaaggttgacctgctggagagtcct

SEQ ID NO: 282954 - DNA, 75 bp, synthetic construct
  source 1..75: mol_type = other DNA
actaccgggattgcggtaatggtctgaaggttgatctggtcgctcatcctgaactgctggcgcaggatgaatacg

SEQ ID NO: 282955 - DNA, 75 bp, synthetic construct
  source 1..75: mol_type = other DNA
gtccgggtttatccgtgccgggcgtatcactccagaccaggccaacgcactcggcaggaaaacatatgagaagtc

SEQ ID NO: 282956 - DNA, 75 bp, synthetic construct
  source 1..75: mol_type = other DNA
atgactggtttgaaagccgttttgtcatttatcggcaccattatattagttgcattcggcgcatttggttttggt

SEQ ID NO: 282957 - DNA, 75 bp, synthetic construct
  source 1..75: mol_type = other DNA
gtgcatcggtttacgcgtcagcatcaggtgtcagaaacagcggtacggaaggtgaaaagtggttcctgtatggag

SEQ ID NO: 282958 - DNA, 75 bp, synthetic construct
  source 1..75: mol_type = other DNA
gaccggtgatgcagagcgaatactgtccagcggtgaatactggcaacgtcagaagacgctgctgacagaaaggga

SEQ ID NO: 282959 - DNA, 75 bp, synthetic construct
  source 1..75: mol_type = other DNA
ttgagttatttgcaggcagtcagcaggtatcaacgacactggtacattttgccgctgatgctggtggacaatggc

SEQ ID NO: 282960 - DNA, 75 bp, synthetic construct
  source 1..75: mol_type = other DNA
tgagcagctattaccgcaacaccacgtcagtggacctgaacaggctgcggaagacatggaagccacccactcggt

SEQ ID NO: 282961 - DNA, 75 bp, synthetic construct
  source 1..75: mol_type = other DNA
tgaatacggatatcacttttgcgggttaccgcttctctgaacgcaattacatgacgatggaccagtacctcaatg

SEQ ID NO: 282962 - DNA, 75 bp, synthetic construct
  source 1..75: mol_type = other DNA
ggctgggacggccggacacagtgtgtggtggacatcccgaaaaatctggacccggcacagcaactgctgctgccc

SEQ ID NO: 282963 - DNA, 75 bp, synthetic construct
  source 1..75: mol_type = other DNA
tggaggcatgaacggaggaacacgactattggtagacaccgatggtattgcagacgtgccagttgataatggacg

SEQ ID NO: 282964 - DNA, 75 bp, synthetic construct
  source 1..75: mol_type = other DNA
agtcacaatagtgcattggcaagctggtctgccaatatttcaactgtcgaaaatgaatatacatcaattgggctg

SEQ ID NO: 282965 - DNA, 75 bp, synthetic construct
  source 1..75: mol_type = other DNA
catatcagcaaacctgactgcaaacagaacactatacaaatctatatatgacaatactatattttttagattatc

SEQ ID NO: 282966 - DNA, 75 bp, synthetic construct
  source 1..75: mol_type = other DNA
ctatgttgatacagcatatgtgccttacttaacaagaccaggacatattcgttataaactagtcagtggtcgctc

SEQ ID NO: 282967 - DNA, 75 bp, synthetic construct
  source 1..75: mol_type = other DNA
gtcatatggaacggaaaagtacaatgcgatgtcagcataccagaaaaaattaagcctgaacagcaattgttgtta

SEQ ID NO: 282968 - DNA, 75 bp, synthetic construct
  source 1..75: mol_type = other DNA
aaacacagtgtgtggtggatatcccgaaaaaaacggacccggcacagcaactgctgctgccctgccgtaaggcga

SEQ ID NO: 282969 - DNA, 75 bp, synthetic construct
  source 1..75: mol_type = other DNA
ctggcgctacaccggtgccagtctggaaagtgatgaccgcatgctgccgccaaaactgcgcggttatgcaccgca

SEQ ID NO: 282970 - DNA, 75 bp, synthetic construct
  source 1..75: mol_type = other DNA
cggcggccgggtctccaccaaccggtggggcattggtgtggtgacggatgtgagcagctattaccgcaacaccac

SEQ ID NO: 282971 - DNA, 75 bp, synthetic construct
  source 1..75: mol_type = other DNA
acgtcagtggacctgaacaaactgccggatgacatggaggccacccgttcagtggtggaatccgttttgacggaa

SEQ ID NO: 282972 - DNA, 75 bp, synthetic construct
  source 1..75: mol_type = other DNA
cggtggggaattggtgtggtgacggatgtgagcagctattaccgcaacaccacatcagtagacctgaacaagctg

SEQ ID NO: 282973 - DNA, 75 bp, synthetic construct
  source 1..75: mol_type = other DNA
atgagggttttcctcacgccatcagcagcgaaaatgaagaaaacacgtcattcaatgattacactctgtttaaca

SEQ ID NO: 282974 - DNA, 75 bp, synthetic construct
  source 1..75: mol_type = other DNA
gcgtgaacgagcacgtgaactctataacagatttgatgatcaccgggtgccggatgaagaatatggggccatccc

SEQ ID NO: 282975 - DNA, 75 bp, synthetic construct
  source 1..75: mol_type = other DNA
tgcgcggttatgcaccgcaggtctcagggattgcggatacgaatgcgcgcgtcgtgatttcgcagcagggacgca

SEQ ID NO: 282976 - DNA, 75 bp, synthetic construct
  source 1..75: mol_type = other DNA
gctttccctggcaggcgcaccggcttatgccgtcgactttaatacagatgttctggatgcagcagacagacagaa

SEQ ID NO: 282977 - DNA, 75 bp, synthetic construct
  source 1..75: mol_type = other DNA
gtgacaaacgcgaaaggccgtgaactggggatggtggcagacagcggtctggcctggctgagcggagtgaatccg

SEQ ID NO: 282978 - DNA, 75 bp, synthetic construct
  source 1..75: mol_type = other DNA
tttgactacaacatcaacgggacggtgaacaagccacacaagggaaagcagtcacagtcactgagctataacggg

SEQ ID NO: 282979 - DNA, 75 bp, synthetic construct
  source 1..75: mol_type = other DNA
gccggacacagtgtgtggtggatattccggcaaaactggacccggcacagcaactgctgctgccctgccgtaagg

SEQ ID NO: 282980 - DNA, 75 bp, synthetic construct
  source 1..75: mol_type = other DNA
tggtggaatcggtcctgacggaaggggccattggttacagggagtttgaagtcctgaaaggaagccgtctgtttg

SEQ ID NO: 282981 - DNA, 75 bp, synthetic construct
  source 1..75: mol_type = other DNA
cggcttatgtgccgtacctgactcgtccgggtcagattcgttacaagctggtttccggtcgttcgcgttactttg

SEQ ID NO: 282982 - DNA, 75 bp, synthetic construct
  source 1..75: mol_type = other DNA
aaaagcctaccccaccaataaattaccggatttacggggagaatttattcgcggttgggatgatgggcgcggggt

SEQ ID NO: 282983 - DNA, 75 bp, synthetic construct
  source 1..75: mol_type = other DNA
gaaaaggttgatgtgccgatgatgctgcgcgttgttgagcgcgaggctcagactctgagtcagaaaaaaacagac

SEQ ID NO: 282984 - DNA, 75 bp, synthetic construct
  source 1..75: mol_type = other DNA
gaaaaggttgatgtgccgatgatgctgcgcgttgttgagcgcgaggctcagactctgagtcagaaaaaacagaca

SEQ ID NO: 282985 - DNA, 75 bp, synthetic construct
  source 1..75: mol_type = other DNA
atcctgttctggccagagtctacccgaccctccgtcttcccgatttgcgcggtgagtttatccgtggatgggacg

SEQ ID NO: 282986 - DNA, 75 bp, synthetic construct
  source 1..75: mol_type = other DNA
gaaggttcggcgttacccgttggtgtgcctgttccgtggcctgcagccactccgccaacaggctggctgaaatgc

SEQ ID NO: 282987 - DNA, 75 bp, synthetic construct
  source 1..75: mol_type = other DNA
ctcaagtgttttctttcgaacacccccccgatgatggcaaacctgatgactgtctccaccgtatctcgaacagaa

SEQ ID NO: 282988 - DNA, 75 bp, synthetic construct
  source 1..75: mol_type = other DNA
acgtcttatctcgctgccgtgctgaagggaactttcttttcctggccgaccagctcgaccgcagcatttatgtta

SEQ ID NO: 282989 - DNA, 75 bp, synthetic construct
  source 1..75: mol_type = other DNA
gctttatgggactggtgtcccggcgaaaactacgatatgccgacgataaaccctggaccacggcgtcgcccgaag

SEQ ID NO: 282990 - DNA, 75 bp, synthetic construct
  source 1..75: mol_type = other DNA
aagctgcgttttcaaaaacagcagcatcatgcatgcctaccaatatacgccgcaagaatatgcagagagcttagc

SEQ ID NO: 282991 - DNA, 75 bp, synthetic construct
  source 1..75: mol_type = other DNA
tggaaggcgcggtacgtgaaaaagcgttgcacaccatgcgcgagcagacccagcggatggaagggctggtgaagc

SEQ ID NO: 282992 - DNA, 75 bp, synthetic construct
  source 1..75: mol_type = other DNA
ccatcgtgatgacattcttcacgatcctttcatacgaaaccgggaaacaggccacccgcacggaagagcgcgtgc

SEQ ID NO: 282993 - DNA, 75 bp, synthetic construct
  source 1..75: mol_type = other DNA
gccctgacacactggcggtgggattacccgtcttccaccgccttaccggctgtctacaaactcggactgccgttc

SEQ ID NO: 282994 - DNA, 75 bp, synthetic construct
  source 1..75: mol_type = other DNA
caaaagtgattggccttgatgcttcaagaattgttccaactgcaaacgaaaaccgtcctcgtaacattgccttta

SEQ ID NO: 282995 - DNA, 75 bp, synthetic construct
  source 1..75: mol_type = other DNA
ctggctggagaagcagccggaaggttcagtgcgtccggtagtcattgaatcggtgacaaaaataactgctacggg

SEQ ID NO: 282996 - DNA, 75 bp, synthetic construct
  source 1..75: mol_type = other DNA
cgacaaataaattgcctgatttacgtggtgagttcattcgtggctgggatgacggaagaggaatagatactaacc

SEQ ID NO: 282997 - DNA, 75 bp, synthetic construct
  source 1..75: mol_type = other DNA
cctgatttacgcggtgagtttattcgtggctgggatgacgggagaggcattgaccccggaaggattctattggct

SEQ ID NO: 282998 - DNA, 75 bp, synthetic construct
  source 1..75: mol_type = other DNA
gagttgagcgagctccttgtaaaggggataccggaggaatttttccggcggcttgacgcagcttgcagctctgat

SEQ ID NO: 282999 - DNA, 75 bp, synthetic construct
  source 1..75: mol_type = other DNA
ccgtcggtgctacttatcgttgcggggctccttaatggccctttgtggggctttgccgcattcgtctttcatatc

SEQ ID NO: 283000 - DNA, 75 bp, synthetic construct
  source 1..75: mol_type = other DNA
ttcagcagggtaaccgctggcttaactggctggagaaacaaccggaaggttcagtgcgtccggtggtgattgagt

SEQ ID NO: 283001 - DNA, 75 bp, synthetic construct
  source 1..75: mol_type = other DNA
tttccttagccttctggaatatcccgttgcgttgcagaaccagactgttgagtattacttcgcgctggaacgttg

SEQ ID NO: 283002 - DNA, 75 bp, synthetic construct
  source 1..75: mol_type = other DNA
caagattcaccgttactggatttgtatcgggtagcggaacaggttgtgctggaagcgtttccgaaacaagagatg

SEQ ID NO: 283003 - DNA, 75 bp, synthetic construct
  source 1..75: mol_type = other DNA
cgagcggaaaattacctgatttacgcggtgaatttattcgtggctgggatgacgggcgcggtgtggatacaggtc

SEQ ID NO: 283004 - DNA, 75 bp, synthetic construct
  source 1..75: mol_type = other DNA
agaaccagaaagcgaagatgcccggtattacttgtgtgcacaacgtttgtactgcggcgagggggaaagcctgct

SEQ ID NO: 283005 - DNA, 75 bp, synthetic construct
  source 1..75: mol_type = other DNA
aaccagactgttgagtattacttcgcgctggaacgttgctgccgttaccatcctgactatgtcactgcgtttttg

SEQ ID NO: 283006 - DNA, 75 bp, synthetic construct
  source 1..75: mol_type = other DNA
atgaagatgtcgatgagccaacacctgaaaaccatgaagaaaaaatgatgagggtgaaaaaccacagagcattac

SEQ ID NO: 283007 - DNA, 75 bp, synthetic construct
  source 1..75: mol_type = other DNA
atgagtatacaacaccacagatgtttggttgtattattgatgacgttttcattgatcaatgtcgcttatgcgaaa

SEQ ID NO: 283008 - DNA, 75 bp, synthetic construct
  source 1..75: mol_type = other DNA
aagaaagaaagcgtttctttgcaatttataatggcatggcaatggattatgttctggtttcaaagaagaacaata

SEQ ID NO: 283009 - DNA, 75 bp, synthetic construct
  source 1..75: mol_type = other DNA
ggtaatccgtttttctctgaagttttgcatgccatcaccgccaaagctgaagaagaaggtttcgacgtgatatta

SEQ ID NO: 283010 - DNA, 75 bp, synthetic construct
  source 1..75: mol_type = other DNA
ctggcacgcgcgctgacctcttcgggttttgatgccattatggtgatttctacccgttcgaccaaaactacggcg

SEQ ID NO: 283011 - DNA, 75 bp, synthetic construct
  source 1..75: mol_type = other DNA
tgcgcatgatgatgcagtccaggcagtttaccggaaagcgtatttcagcgacggcgggtcatccggcgagtctgt

SEQ ID NO: 283012 - DNA, 75 bp, synthetic construct
  source 1..75: mol_type = other DNA
gcaatctccgccagccgaagacatggccggagtctttctgtcttggagaagaccgccagccagccatgccatcac

SEQ ID NO: 283013 - DNA, 75 bp, synthetic construct
  source 1..75: mol_type = other DNA
cagggtgaaacggaagaagaaaccacgaccaatatcatcggcgcagtgactgctgaaggtaaaaaacaggcatga

SEQ ID NO: 283014 - DNA, 75 bp, synthetic construct
  source 1..75: mol_type = other DNA
ggcggctttacccggctgcaggagaacttcaactacagcgtgaccggtctggcaggattcgtccgcgccgggcgc

SEQ ID NO: 283015 - DNA, 75 bp, synthetic construct
  source 1..75: mol_type = other DNA
atttcaactacagcgtcaccggactggctaacttcgttcgggctgggcgtctcactcagggacaggctaatgcac

SEQ ID NO: 283016 - DNA, 75 bp, synthetic construct
  source 1..75: mol_type = other DNA
aggatgagcgtacacttcaccagccaggggcaaataaaaatggtggtttcagaaaaagcgctagtccgggcataa

SEQ ID NO: 283017 - DNA, 75 bp, synthetic construct
  source 1..75: mol_type = other DNA
tacaaaaaagccacaggatgagcgtacacttcaccagccagggacaaataaaaatggtggtttcagaaaaaacgc

SEQ ID NO: 283018 - DNA, 75 bp, synthetic construct
  source 1..75: mol_type = other DNA
gacaatcgccagtacgtttactggttgattatgttgccacaaccatcttatggacattatttgctttgttcatat

SEQ ID NO: 283019 - DNA, 75 bp, synthetic construct
  source 1..75: mol_type = other DNA
ttttgttgttgccagaaaattgacactccgaaaagttgcctcatcggtaatcatcactaaatcgcaaccagtccc

SEQ ID NO: 283020 - DNA, 75 bp, synthetic construct
  source 1..75: mol_type = other DNA
gaatgtgaaacgccggtgcgcaaggcgaagcacggtgattccagcggcgtacgcggcgccgcgtggttatggccg

SEQ ID NO: 283021 - DNA, 75 bp, synthetic construct
  source 1..75: mol_type = other DNA
gattgccacactggtcgatatggcggaacagacaacggggcaatgtggaacggtaggtatcggcatacccggatc

SEQ ID NO: 283022 - DNA, 75 bp, synthetic construct
  source 1..75: mol_type = other DNA
tggcggtttcagaagcggtagatggtgcggcatcaggagcgcaaacggtctttgccgtgattatcggcacggggt

SEQ ID NO: 283023 - DNA, 75 bp, synthetic construct
  source 1..75: mol_type = other DNA
tgagtgatattgccgatgacggaaatcaaaatgttaaatttattaataaaaagggtaactgctactatttcggac

SEQ ID NO: 283024 - DNA, 75 bp, synthetic construct
  source 1..75: mol_type = other DNA
cacaacgtgggctacggcttctggcagatggcctacatgatgcagtcaccgctgacgctggatgcactgtggcac

SEQ ID NO: 283025 - DNA, 75 bp, synthetic construct
  source 1..75: mol_type = other DNA
ggaccggcctggtatctgctcgactgctcccgtgcaataaaacccatcatctatcagagccgccgcaaggttgaa

SEQ ID NO: 283026 - DNA, 75 bp, synthetic construct
  source 1..75: mol_type = other DNA
cgcacttatacaatctccactccgtttcgattgtgtgcgccctgcggggctgacagaaaacggcaaaaaggcatt

SEQ ID NO: 283027 - DNA, 75 bp, synthetic construct
  source 1..75: mol_type = other DNA
tcggatttaatcagacctggcatgaatggaagcgggacgaacagcacaggcaacaacaacgacgccccggacact

SEQ ID NO: 283028 - DNA, 75 bp, synthetic construct
  source 1..75: mol_type = other DNA
aacgcactgactgaagaatatctgcgccaggggggcggtgaattgtctctgacaccaggcaaggactggaacaat

SEQ ID NO: 283029 - DNA, 75 bp, synthetic construct
  source 1..75: mol_type = other DNA
acggttgggcagttgattaaacaatttgtcttcggcggcgaatgtgaaacgccggtgcgtaaggcgaagcacggt

SEQ ID NO: 283030 - DNA, 75 bp, synthetic construct
  source 1..75: mol_type = other DNA
aatttcgccctacaccggcgtggtgaaaaatgccaattcaacctggctcaacggtcagccattcgataaagactt

SEQ ID NO: 283031 - DNA, 75 bp, synthetic construct
  source 1..75: mol_type = other DNA
ttatcaggatcgccgtaaggctgaactggttgcccagaccaaagtcgatgaaggtcgcgcattcaccgataacga

SEQ ID NO: 283032 - DNA, 75 bp, synthetic construct
  source 1..75: mol_type = other DNA
tcattgatagaatcgggattgtggtcgagggatgcagtagaaagacagatgagccatcaggagcatagctctgta

SEQ ID NO: 283033 - DNA, 75 bp, synthetic construct
  source 1..75: mol_type = other DNA
gatgctgcagtggtgggctgattatctggatgcgaatagaatggcggctatcactccatttgactatgcaaagat

SEQ ID NO: 283034 - DNA, 75 bp, synthetic construct
  source 1..75: mol_type = other DNA
actggagggagttaagcattctcagcgtggttcgaagatgcggactccacatcttgtacccttatctcgacaagc

SEQ ID NO: 283035 - DNA, 75 bp, synthetic construct
  source 1..75: mol_type = other DNA
atggcactcactgatatcaaagttcgaacaacaaagccctccgataaacctttcaaactcacagatgggcagggt

SEQ ID NO: 283036 - DNA, 75 bp, synthetic construct
  source 1..75: mol_type = other DNA
cgaaggatgcggttgaaaggcagatgagccatatggaacgcaattcggtgcgggcggcgtatatccataaagcgg

SEQ ID NO: 283037 - DNA, 75 bp, synthetic construct
  source 1..75: mol_type = other DNA
gctgcgtatatccataaagcggaacatctggatgagcgaaagctgatgttgcagtggtcggctgattttctggat

SEQ ID NO: 283038 - DNA, 75 bp, synthetic construct
  source 1..75: mol_type = other DNA
aggtagagcaggcctgcgaataagagaatggacttgttgtgagtgcggaaccactcatgaccgcgacgtgaacgc

SEQ ID NO: 283039 - DNA, 75 bp, synthetic construct
  source 1..75: mol_type = other DNA
gctaacggcgtcgatcctagtgagaacaagaaagctgttaaggtagagcatgagcaagaggtgataacatttgaa

SEQ ID NO: 283040 - DNA, 75 bp, synthetic construct
  source 1..75: mol_type = other DNA
agcggaatatcgctgatcttaaaactagagacctgctggccccaatcaaagcggtagaactgtcaggacggcttg

SEQ ID NO: 283041 - DNA, 75 bp, synthetic construct
  source 1..75: mol_type = other DNA
cgattcctggtgagcgtgaaccgctggaaggtgttaagcattctcaacgtggttcgaagatgaggactcctcatc

SEQ ID NO: 283042 - DNA, 75 bp, synthetic construct
  source 1..75: mol_type = other DNA
cgaacactattccggaagaccattaacccgacttgctgtcgaacttaccttgttagtctttatccgctcaagcga

SEQ ID NO: 283043 - DNA, 75 bp, synthetic construct
  source 1..75: mol_type = other DNA
catcgtgcggctctggaacttaaccgaattcctgagttacttcatcgcattgatcactattctggcagaccctta

SEQ ID NO: 283044 - DNA, 75 bp, synthetic construct
  source 1..75: mol_type = other DNA
accaatgagtgagaacactgttaacaaggcccttcgctcgatgggctatgataccaaaacggaagtttgcgggca

SEQ ID NO: 283045 - DNA, 75 bp, synthetic construct
  source 1..75: mol_type = other DNA
gagtaaagcacgaacctttaaagaggtcgcgatcgagtggcatggcaccaataaaaagtggtctgaagatcacgc

SEQ ID NO: 283046 - DNA, 75 bp, synthetic construct
  source 1..75: mol_type = other DNA
gatgagccatatggaacgcaattcggtgcgggcggcgtatatccataaagcggaacatctggacgaacgcaagct

SEQ ID NO: 283047 - DNA, 75 bp, synthetic construct
  source 1..75: mol_type = other DNA
aaagccgtggagacatctggacgtcttgaagtggcttcccgtcttcaacagcgcaccacggccatcatgcgttat

SEQ ID NO: 283048 - DNA, 75 bp, synthetic construct
  source 1..75: mol_type = other DNA
gctgtgcagagtgggttaatcgactacaaccctgcgcaagaaattgccggtgcggttgctacggctaaaagacag

SEQ ID NO: 283049 - DNA, 75 bp, synthetic construct
  source 1..75: mol_type = other DNA
ggagcaagaggctataacgtttgaagtggtagccagagagtggcacgccagcaatcagaagtggtctgcatcgca

SEQ ID NO: 283050 - DNA, 75 bp, synthetic construct
  source 1..75: mol_type = other DNA
tgataatggttctaatagttcatggaaaaaattaaaaaataaaaaaatgcttatatgtataaataataaagctgg

SEQ ID NO: 283051 - DNA, 75 bp, synthetic construct
  source 1..75: mol_type = other DNA
caaaccgatgagtgaaaacacggtgaacagtgcgctgcgggtgatgggttatgacaccaaagttgaggtttgcgg

SEQ ID NO: 283052 - DNA, 75 bp, synthetic construct
  source 1..75: mol_type = other DNA
ccatcccgcctgagcgagagcctattcccggcgtgaaacattctcagcgaggatcaaagatgcgtacaccgcatc

SEQ ID NO: 283053 - DNA, 75 bp, synthetic construct
  source 1..75: mol_type = other DNA
agcatctggatgaacgcaggttaatgctgcaatggtgggcagattttttagataaaagccaaaaagaaagaattt

SEQ ID NO: 283054 - DNA, 75 bp, synthetic construct
  source 1..75: mol_type = other DNA
aaagccgtagagacatctggacgtcttgaggtggcttcccgccttcaacagcgcacgacggctatcatgcgttat

SEQ ID NO: 283055 - DNA, 75 bp, synthetic construct
  source 1..75: mol_type = other DNA
ggaccatcccgcctgagcgagagcctattcccggcgtgaaacattctcagcgaggatcaaagatgcgtacacctc

SEQ ID NO: 283056 - DNA, 75 bp, synthetic construct
  source 1..75: mol_type = other DNA
aatcgatgaatacaccggcaggccactaacccgctgggcaactgaacttactctgcttatctttattcgatccag

SEQ ID NO: 283057 - DNA, 75 bp, synthetic construct
  source 1..75: mol_type = other DNA
atctggaagaacgtcgactgatgctacagtggtgggcagattttctggatgcaaacagagaacaatgtatcagcc

SEQ ID NO: 283058 - DNA, 75 bp, synthetic construct
  source 1..75: mol_type = other DNA
tttcctccaggcagttgataatgctgtaatggacagtaatgacgctcggcaagaatttatgttgcaatatttatc

SEQ ID NO: 283059 - DNA, 75 bp, synthetic construct
  source 1..75: mol_type = other DNA
gcactaaaaaaacgggcgatacggtgttaatcaccaatgcggaaaacagttttaaagcctgtaagcaggagaaag

SEQ ID NO: 283060 - DNA, 75 bp, synthetic construct
  source 1..75: mol_type = other DNA
tagcaaaatcagattataacttccaaggattcacttttaaccctgtaacagagggcgggtctatctggtttacct

SEQ ID NO: 283061 - DNA, 75 bp, synthetic construct
  source 1..75: mol_type = other DNA
ctgcggctgctggcgccagcggatacagcattacctccgcgaccaacaacaataaattaagcggaactgcggtta

SEQ ID NO: 283062 - DNA, 75 bp, synthetic construct
  source 1..75: mol_type = other DNA
cgatggcgcatccaccctcgatgccctggaagcgaaactggctgaaaaagcggcggcggctggtgccagtggata

SEQ ID NO: 283063 - DNA, 75 bp, synthetic construct
  source 1..75: mol_type = other DNA
tgcaatatttatcagatccagttcgggcaaagggctttgcttatctgatgtttgatatgctaacggggaaaattg

SEQ ID NO: 283064 - DNA, 75 bp, synthetic construct
  source 1..75: mol_type = other DNA
cagcggtgcgctataagctggcattcgataaatacatcgccgagcaaaaatacgacaagatcagcgcaatggtgg

SEQ ID NO: 283065 - DNA, 75 bp, synthetic construct
  source 1..75: mol_type = other DNA
atggaaagaaaaccgttttcctgccttttaaccggggaaccgcagaaggcggggcggggaacgatcaaccattag

SEQ ID NO: 283066 - DNA, 75 bp, synthetic construct
  source 1..75: mol_type = other DNA
ccaattcaatctggtttgaatactataatcatagtgaatcattatttctgaatgatcattttcatattgcttctt

SEQ ID NO: 283067 - DNA, 75 bp, synthetic construct
  source 1..75: mol_type = other DNA
aagcccggcagtgcgcgaacacaaaccgggcctctatgtcagtaaccgtactcaaggaaactaacatgaatattg

SEQ ID NO: 283068 - DNA, 75 bp, synthetic construct
  source 1..75: mol_type = other DNA
ccttcgcggtgcgcgacaagctgtcagaaaaccaggcggtgatgacccagattgcgaacaatacgcgtgagcagg

SEQ ID NO: 283069 - DNA, 75 bp, synthetic construct
  source 1..75: mol_type = other DNA
tgaccaacccaagctgtgtgccatgtatgtggataaaaagcttggcggcgtggagtgtgtacagacgctgtcacg

SEQ ID NO: 283070 - DNA, 75 bp, synthetic construct
  source 1..75: mol_type = other DNA
ggggcgagtggatacagcatcacttctgccaccaacaacaataaattaagcggtactgcggtaatttataagtaa

SEQ ID NO: 283071 - DNA, 75 bp, synthetic construct
  source 1..75: mol_type = other DNA
agcgcgccgccatgcaccccgccgagcagattgcaggtttccgcacgctggcagagcagggcaaaacacccgcgc

SEQ ID NO: 283072 - DNA, 75 bp, synthetic construct
  source 1..75: mol_type = other DNA
ctcccgcttcgtgtttatcgggcgtgagatgtatgagtctgcaggtggcgtggtgcgtgaggatttgttcagcgc

SEQ ID NO: 283073 - DNA, 75 bp, synthetic construct
  source 1..75: mol_type = other DNA
ggcgctgttaccggatggctggaagaaggatttcaccaccttctttacgctcgacggacagactttgatgagcct

SEQ ID NO: 283074 - DNA, 75 bp, synthetic construct
  source 1..75: mol_type = other DNA
tatgccgtgcttgggattgtccagcgatgttatatgaatcctgaatgtcagaatctaccattcaatgtcatttta

SEQ ID NO: 283075 - DNA, 75 bp, synthetic construct
  source 1..75: mol_type = other DNA
gctgtgctcctgcgtatttgaatactgccttaccacccgtcacccctttgtaatgcggatggatgttcatcacag

SEQ ID NO: 283076 - DNA, 75 bp, synthetic construct
  source 1..75: mol_type = other DNA
aaacatctgtcaaaaccagcaaaaaaaacgtcaaacctgccgaagcagcggctctgaaagaggcgcttgaagcag

SEQ ID NO: 283077 - DNA, 75 bp, synthetic construct
  source 1..75: mol_type = other DNA
gatatttaatccgaaaacgggtaaaaccgtgatgctggcttttgaccatggttattttcagggaccaactaccgg

SEQ ID NO: 283078 - DNA, 75 bp, synthetic construct
  source 1..75: mol_type = other DNA
atggtaaagattttcgtaccgatcaaccgcaacaaaatatcccttttaccctgaaaggttgcggtgcgctggatt

SEQ ID NO: 283079 - DNA, 75 bp, synthetic construct
  source 1..75: mol_type = other DNA
cgacctgatcgctacgcaaatcaacatgcagggcaactacatggcgcaagagcaggatcgcatccagctcgatga

SEQ ID NO: 283080 - DNA, 75 bp, synthetic construct
  source 1..75: mol_type = other DNA
gtcaggtagagatttaccagcgcgtgaaggcgcagcacagctacgcccccgctcacatgctgaaacgcgccatca

SEQ ID NO: 283081 - DNA, 75 bp, synthetic construct
  source 1..75: mol_type = other DNA
agttgccgaacaatccagcggtgagcaagaggaagagaatttaattcgtctggatactcgccatcttttcgatgc

SEQ ID NO: 283082 - DNA, 75 bp, synthetic construct
  source 1..75: mol_type = other DNA
tggatacgcggcatcttttcgatgctaatactgtctggttgggactgaagcgaggacaacttcagcgtaactatg

SEQ ID NO: 283083 - DNA, 75 bp, synthetic construct
  source 1..75: mol_type = other DNA
gttcagctggggaccgtaaccaagaacggtaaaggagaagagaagcacattaaatttaaggctacggactcttct

SEQ ID NO: 283084 - DNA, 75 bp, synthetic construct
  source 1..75: mol_type = other DNA
gtttctaataaaacaattgagccatggacacaactttggaattatgatcgattaaaatacacagaatttgaggaa

SEQ ID NO: 283085 - DNA, 75 bp, synthetic construct
  source 1..75: mol_type = other DNA
tgaaaactggcaggacgtttccgcgcgtttgctggcgtatgagaacgcagtgcgcaaaatgccggagtggcaggt

SEQ ID NO: 283086 - DNA, 75 bp, synthetic construct
  source 1..75: mol_type = other DNA
cgatggtcgagcacttccgcgccgatccgacctatgctgcggagttgcttgctgaagtccgtcgcgacggcaacc

SEQ ID NO: 283087 - DNA, 75 bp, synthetic construct
  source 1..75: mol_type = other DNA
tacgctcattttgcaccagatcatttagaagaagctgtaactcttaaccctatttctaatttaacaggattatat

SEQ ID NO: 283088 - DNA, 75 bp, synthetic construct
  source 1..75: mol_type = other DNA
ctggcgattacgccggggctgcggctgagtttccaaaatggaataaagcaggtggcaaggtgttgccggggctgg

SEQ ID NO: 283089 - DNA, 75 bp, synthetic construct
  source 1..75: mol_type = other DNA
taacgggtaaaaaaccagccgtaacagcgagagaaagcaacggtgtccactggcgctggctgggggacgggctgc

SEQ ID NO: 283090 - DNA, 75 bp, synthetic construct
  source 1..75: mol_type = other DNA
gtgctggaactgacgccattaacgccaccgcaaggcgcactggtgatttcagcgggaatacacggtaatgagacg

SEQ ID NO: 283091 - DNA, 75 bp, synthetic construct
  source 1..75: mol_type = other DNA
tgggcaaaacgatcttcgccagtttgcagtaactgccagcgcaattgctgcgctgctatctggtgagagtgtcgg

SEQ ID NO: 283092 - DNA, 75 bp, synthetic construct
  source 1..75: mol_type = other DNA
caaggttgattgtgagtttttgcagagtaacaactttgcctttggcggcattaatacatccatcatcattaaacg

SEQ ID NO: 283093 - DNA, 75 bp, synthetic construct
  source 1..75: mol_type = other DNA
tgggcaaaacgatctttgccagtttgcgccaacgtccagcgcgattgccgcgctgttatccgggatgagcgtcgg

SEQ ID NO: 283094 - DNA, 75 bp, synthetic construct
  source 1..75: mol_type = other DNA
gggatccacggtaatgaaacagcacctgttgagatgctggaggcgttgcttggggcaatttatcacggtgagatt

SEQ ID NO: 283095 - DNA, 75 bp, synthetic construct
  source 1..75: mol_type = other DNA
taggaactataggaaattatgagtctggatataaacctgcgcgaattgaggttgtagaaaaagtaatccaagtcg

SEQ ID NO: 283096 - DNA, 75 bp, synthetic construct
  source 1..75: mol_type = other DNA
ttacgtgttcactcctgagacttggtattcatttttcgtcttgcgacgtcaagaatccgtatcttcgagtgccca

SEQ ID NO: 283097 - DNA, 75 bp, synthetic construct
  source 1..75: mol_type = other DNA
ttcaatttaaaagtttgatgctcaaagaattaaacttcgtaataaattacgtgttcactcttgagacttggtatt

SEQ ID NO: 283098 - DNA, 75 bp, synthetic construct
  source 1..75: mol_type = other DNA
gataaagttattgagccttatagcggagttactgatttagatggtattttgaggatcgatgatttgcttcaccca

SEQ ID NO: 283099 - DNA, 75 bp, synthetic construct
  source 1..75: mol_type = other DNA
cagacattactcccccgtccgccactcgtcagcaaagaagcaagcttcttcctgttaccgttcgacttgcatgtg

SEQ ID NO: 283100 - DNA, 75 bp, synthetic construct
  source 1..75: mol_type = other DNA
tttgatgctcaaagaattaaacctcgtaatgaattacgtgttcactcttgagacttggtattcatttttcgtctt

SEQ ID NO: 283101 - DNA, 75 bp, synthetic construct
  source 1..75: mol_type = other DNA
tgagaagagcctgttcgtcaagttgaccaacaccatcagcgtgctgctggcgattttcatcgtgctgcgctttgg

SEQ ID NO: 283102 - DNA, 75 bp, synthetic construct
  source 1..75: mol_type = other DNA
accatccgctggtgcgtccggcgctgttggcgagtctgtttggttactcactgggtggcttgtcgatcactatcg

SEQ ID NO: 283103 - DNA, 75 bp, synthetic construct
  source 1..75: mol_type = other DNA
agcgattaagcactccctcactggccaatgaaatactaacttattgtcattcgttatattcaacctcaaaaatct

SEQ ID NO: 283104 - DNA, 75 bp, synthetic construct
  source 1..75: mol_type = other DNA
ttgaatgaagcagaagccaatgtcaccgtcgccaaagcggctgttgaacaggcgacgatcaatctgcaatacgcg

SEQ ID NO: 283105 - DNA, 75 bp, synthetic construct
  source 1..75: mol_type = other DNA
gtttgcaacgcattcatccgggtatcaaagcacgagcaatttcctccagccaggaaaacgccagcaccgaatcga

SEQ ID NO: 283106 - DNA, 75 bp, synthetic construct
  source 1..75: mol_type = other DNA
gaattgcccggtagaaccgttccttatgaagttgccgagatacgtccccaggtgggcggtattatcattaaacgc

SEQ ID NO: 283107 - DNA, 75 bp, synthetic construct
  source 1..75: mol_type = other DNA
cggtggcagagacaggttcggtatgcctggtgaccaatgaaggtaatgcgcgaatgtgtaccacgctgcctaaaa

SEQ ID NO: 283108 - DNA, 75 bp, synthetic construct
  source 1..75: mol_type = other DNA
cttattgcgctgagtgaagcggcagagcaggcgatgttcagcaaagggatggaaattcacgtaaggcagcgcacc

SEQ ID NO: 283109 - DNA, 75 bp, synthetic construct
  source 1..75: mol_type = other DNA
cattgttgacaatgggcgttcagaggttctcggctcagaattcagcgatgtattgcgctgtattcgctgcggtgc

SEQ ID NO: 283110 - DNA, 75 bp, synthetic construct
  source 1..75: mol_type = other DNA
acagccagtctgttcatcaggaaaggaaaaacgccgattagtgttggagcgataaaagaatggactgaagccaga

SEQ ID NO: 283111 - DNA, 75 bp, synthetic construct
  source 1..75: mol_type = other DNA
catttaaatataacaacattggaaatgaaatattatacatgacaggtaaaaaattgcctcaaagttgtcaagcgt

SEQ ID NO: 283112 - DNA, 75 bp, synthetic construct
  source 1..75: mol_type = other DNA
aaaaggcgatgtttcagaaagggatggaaatccacattcgccagcgcacgatgaagaaagagctggaaaagctga

SEQ ID NO: 283113 - DNA, 75 bp, synthetic construct
  source 1..75: mol_type = other DNA
tcttgagccgtcggtggcagcagcaaaagcgggaatactgccggagggatttttctggacagatgcagaaaataa

SEQ ID NO: 283114 - DNA, 75 bp, synthetic construct
  source 1..75: mol_type = other DNA
atctggatgagcgcaagctgatgttgcggtggtgggcggattttctggatgcgaaccgggagaaagggattacgc

SEQ ID NO: 283115 - DNA, 75 bp, synthetic construct
  source 1..75: mol_type = other DNA
gcagtggtgggtcgattttctggatgccaatcgggaaagagcgattacgccgtttgactatgcgaagatcaatcg

SEQ ID NO: 283116 - DNA, 75 bp, synthetic construct
  source 1..75: mol_type = other DNA
gctgtacagagtggattaatcgactacaaccccgctcaagagattgctggtgcggttgctacggcgaaaagacag

SEQ ID NO: 283117 - DNA, 75 bp, synthetic construct
  source 1..75: mol_type = other DNA
atggcactcagtgaggcggcggagaaggcgatgttcaccaaagggatggaaattcacgtacggcagcggaacatg

SEQ ID NO: 283118 - DNA, 75 bp, synthetic construct
  source 1..75: mol_type = other DNA
agtgttaaacgaacatctggggtatgagggaccagaaactcctgaagcaatgacattgttcatccgtgagaaaat

SEQ ID NO: 283119 - DNA, 75 bp, synthetic construct
  source 1..75: mol_type = other DNA
tacgccgccgcgcgaaggcatcatcaagcgctggacctggcctgccggggaaaacgacggttctgtggcattgct

SEQ ID NO: 283120 - DNA, 75 bp, synthetic construct
  source 1..75: mol_type = other DNA
aatccacgttcgccagcgcaccatgaagaaagagctggaaaagctgaccagtgcggatgagatactggcatacag

SEQ ID NO: 283121 - DNA, 75 bp, synthetic construct
  source 1..75: mol_type = other DNA
gaatgggcggcgtgactgcctttggtgaaaactggcaggacgtttccgcgcgtctgctggcgtatgagaatgcag

SEQ ID NO: 283122 - DNA, 75 bp, synthetic construct
  source 1..75: mol_type = other DNA
ttcggtggttaccgcatcattaatgccctgattgcgcaggctgagaaagaggaaaaggaccgtgaaaatcatcct

SEQ ID NO: 283123 - DNA, 75 bp, synthetic construct
  source 1..75: mol_type = other DNA
tggatatcacgggaacatgggtggtggccgtcggcgtgtttttccatctcattgcccgtctggtgcgtaaacaac

SEQ ID NO: 283124 - DNA, 75 bp, synthetic construct
  source 1..75: mol_type = other DNA
ttgtgacaacgtgtgtccggtgcgtattccgctgtcaaaactgattttgcgtcatcgtcgggtgatggctgaaaa

SEQ ID NO: 283125 - DNA, 75 bp, synthetic construct
  source 1..75: mol_type = other DNA
cgcttatctgtaccagctctcagaaaaagtgacgcaaaacggcggtcacgtctattttgcaaaaaccaaagaaga

SEQ ID NO: 283126 - DNA, 75 bp, synthetic construct
  source 1..75: mol_type = other DNA
gcggtatttgatacgctttttgccaccagccagcacaatgatgcgccgaaaaccacaccttcaccgttcgatgaa

SEQ ID NO: 283127 - DNA, 75 bp, synthetic construct
  source 1..75: mol_type = other DNA
ttttcttgcgatattgttgctttttgttcctccggctctggagttttcggtaattcatcagcactttgtgccaga

SEQ ID NO: 283128 - DNA, 75 bp, synthetic construct
  source 1..75: mol_type = other DNA
ggtcaggaagaagacttattttagtcaaatgtttttctgaggtatcttttattcgtcatcacttgattgagtgta

SEQ ID NO: 283129 - DNA, 75 bp, synthetic construct
  source 1..75: mol_type = other DNA
ggtctggctacagacttgtctcagttaaatgtatttctgagatttcctttattcgccatcaccggattgagtgca

SEQ ID NO: 283130 - DNA, 75 bp, synthetic construct
  source 1..75: mol_type = other DNA
tttacaatgatttcaatttagagaataatgactctcattttaattcacttgattcatttaagaatttaatcagca

SEQ ID NO: 283131 - DNA, 75 bp, synthetic construct
  source 1..75: mol_type = other DNA
actattcactttttgttgcttatatgggctgtcttgagtggggaagtgcttacttctatggcttgggaacttcct

SEQ ID NO: 283132 - DNA, 75 bp, synthetic construct
  source 1..75: mol_type = other DNA
ctgggcattctctcttattgccggttggtacaaaccacagttagactggccccctgaatctccagacaaccagta

SEQ ID NO: 283133 - DNA, 75 bp, synthetic construct
  source 1..75: mol_type = other DNA
gcgaaccgccagaactggttaaagagaaaatcgaacaagtgcgggcaaaagctgccgcgcatggacgcaaaattc

SEQ ID NO: 283134 - DNA, 75 bp, synthetic construct
  source 1..75: mol_type = other DNA
acgaggtgttttgtcgcgagtttcttgtcgatctgaatgctacacaagcagctattcgcgcaggctacgcctcca

SEQ ID NO: 283135 - DNA, 75 bp, synthetic construct
  source 1..75: mol_type = other DNA
caaagagcagaactgtgggcgggtatcaggcacgatattggtctgtcgggagattcgccgctgctttcgcgtcac

SEQ ID NO: 283136 - DNA, 75 bp, synthetic construct
  source 1..75: mol_type = other DNA
gccagttatccgtttaaaaccgggcgtcgtatgtggcgctggatgcggaaccgcaaacgtgggcaggcaggtctg

SEQ ID NO: 283137 - DNA, 75 bp, synthetic construct
  source 1..75: mol_type = other DNA
ccggtcgtcccggtaacaccgcgccctgcgccacgccctttgcccgctaaatccggtcttccgggcaggctggca

SEQ ID NO: 283138 - DNA, 75 bp, synthetic construct
  source 1..75: mol_type = other DNA
tggtgggggctgcaatctcgactgcaattctcctgatctggcggcgtcacgcggttaagcatggcaactatctga

SEQ ID NO: 283139 - DNA, 75 bp, synthetic construct
  source 1..75: mol_type = other DNA
ttctgaccagagtttcctgtccgaaaataaagaggaaacatcaaagtataggggggggatggccataacacggta

SEQ ID NO: 283140 - DNA, 75 bp, synthetic construct
  source 1..75: mol_type = other DNA
aagcaggtacttcagcagtatctctttctgaccagagtttcctgtccgaaaataaagaggaaacatcaaagtata

SEQ ID NO: 283141 - DNA, 75 bp, synthetic construct
  source 1..75: mol_type = other DNA
tggctttaatgccagcattaagcctgtcattattttctgctggagcgtatgccagtggttattccgttacacctg

SEQ ID NO: 283142 - DNA, 75 bp, synthetic construct
  source 1..75: mol_type = other DNA
gggaacccagtaaacagatctggcaatcgatgctggaactttcaggggtgaaagatggcgagttgattccggcga

SEQ ID NO: 283143 - DNA, 75 bp, synthetic construct
  source 1..75: mol_type = other DNA
ctgcccggttccgattgttatcgccggtggtaaaaaattaccggaacgcgaagcgcttgagatgtgctggcaggc

SEQ ID NO: 283144 - DNA, 75 bp, synthetic construct
  source 1..75: mol_type = other DNA
ttgatatggaaccgcgcggcatgggcttaccggcagcaaaagccgatgttcaccttgaagcggatatccacgctg

SEQ ID NO: 283145 - DNA, 75 bp, synthetic construct
  source 1..75: mol_type = other DNA
tggcatgacggatgaacagacgaagcagttcatcaccatgttgcaggatcagggggcattacacggttgggattt

SEQ ID NO: 283146 - DNA, 75 bp, synthetic construct
  source 1..75: mol_type = other DNA
aaccgccaacaatgatcactgacttcgaaccgggtactatcaatatactggaaccggggcaagacgttaaaacgg

SEQ ID NO: 283147 - DNA, 75 bp, synthetic construct
  source 1..75: mol_type = other DNA
gaccgcattgaaggaagtatggcgcgtaatgtcatcactggcagcattaacagcgcgattaaggggtccgcatca

SEQ ID NO: 283148 - DNA, 75 bp, synthetic construct
  source 1..75: mol_type = other DNA
atccccattcctcatggcccattatcgtggcgaatactatttttctttccgtgctggtggccgtcagaggcaacg

SEQ ID NO: 283149 - DNA, 75 bp, synthetic construct
  source 1..75: mol_type = other DNA
ttgccaattttcgaagcatatctacgccattattccgcgcgtggtattgttccgattcgtattactgcaattccg

SEQ ID NO: 283150 - DNA, 75 bp, synthetic construct
  source 1..75: mol_type = other DNA
ttccgattcgtattactgcaattccgcatattatcgagaacactactattattcgtccgcgttttgaatccgtcg

SEQ ID NO: 283151 - DNA, 75 bp, synthetic construct
  source 1..75: mol_type = other DNA
cggatcatgttgattgggcggaccagcgtactctagataacggtaatgtcgtttatgctggtatcgagtacgaag

SEQ ID NO: 283152 - DNA, 75 bp, synthetic construct
  source 1..75: mol_type = other DNA
tcgccgcattacctctctccatttcaccttcctggggcgcagatttttattaccgccagcaggagaaaggcacgg

SEQ ID NO: 283153 - DNA, 75 bp, synthetic construct
  source 1..75: mol_type = other DNA
aactgtttattggtgcagccgcccagcgtgagcagcagattatcgccatgaactcgctctatcacggcgataagg

SEQ ID NO: 283154 - DNA, 75 bp, synthetic construct
  source 1..75: mol_type = other DNA
aatgcggaagcctcgctgcgcgtcgaacttggcgaggggttacgtctgaccagttcccgcgtcaccgaggatggt

SEQ ID NO: 283155 - DNA, 75 bp, synthetic construct
  source 1..75: mol_type = other DNA
cggggccaacattattttcctctctgtgctggtagccgtcagaggcaacgtggcacgtctggttgatcatctgag

SEQ ID NO: 283156 - DNA, 75 bp, synthetic construct
  source 1..75: mol_type = other DNA
ttgcagtacaccacagtagcgaaccaacttaccgcgttgaagtataacgcgggctttgacgcgccagaaattcag

SEQ ID NO: 283157 - DNA, 75 bp, synthetic construct
  source 1..75: mol_type = other DNA
ccgggcgttaatttttcccgcctctggcgtattgccaatttagccaataaccaagaaacccgcttactgtccgat

SEQ ID NO: 283158 - DNA, 75 bp, synthetic construct
  source 1..75: mol_type = other DNA
aaaactccaattgatttttggagagacctcggcttctcaggaaaagggtatctggatggagttgtggtaaatgca

SEQ ID NO: 283159 - DNA, 75 bp, synthetic construct
  source 1..75: mol_type = other DNA
atgaatcagggtaagtccgttgctgtacaacctgccaggcctgtccttaatttttccgcgctgcagcgcgatgtc

SEQ ID NO: 283160 - DNA, 75 bp, synthetic construct
  source 1..75: mol_type = other DNA
acgtctgctggccggacggtggtttgggcctgcgtatgccattcatctgctttttattggctttctggtcagagt

SEQ ID NO: 283161 - DNA, 75 bp, synthetic construct
  source 1..75: mol_type = other DNA
tgcttaatgcccgacacggtgatgtgatgatgctgtcaggtgtgtttctgacgctgacggtgctgttctgcgtgt

SEQ ID NO: 283162 - DNA, 75 bp, synthetic construct
  source 1..75: mol_type = other DNA
ttaacgttccggatatcggtggtgacgaagttgaagtgaccgaagtgatggtgaaagtgggcgacaaagttgacc

SEQ ID NO: 283163 - DNA, 75 bp, synthetic construct
  source 1..75: mol_type = other DNA
gcaggtggcccgtttcctgcagtcggtcacggtgcttaatggtgctgccgcctttgtctccctggtggggtatct

SEQ ID NO: 283164 - DNA, 75 bp, synthetic construct
  source 1..75: mol_type = other DNA
cgtcagcacagcctgaaccgcctgtggctgatggcactcctggcacagccgggttactggctggccttccgggat

SEQ ID NO: 283165 - DNA, 75 bp, synthetic construct
  source 1..75: mol_type = other DNA
tttgtgcctgcttcagcttatacgggtgacaaacccggctctgtatgactggacagagcattacctgacagagcg

SEQ ID NO: 283166 - DNA, 75 bp, synthetic construct
  source 1..75: mol_type = other DNA
cctggacacaggtacagaaggtgctagggtgcagccgcggcacaatcagtagcgcaataaaacgtaaatccctgc

SEQ ID NO: 283167 - DNA, 75 bp, synthetic construct
  source 1..75: mol_type = other DNA
agaaaccggtgcttcggtggttgaaagagactgagtgggattcttgtggatataaatataataaggttggggata

SEQ ID NO: 283168 - DNA, 75 bp, synthetic construct
  source 1..75: mol_type = other DNA
caatctggcgggtaaaaccttacgtcagcacagcctgaaccgcctgtggctgatagcactcctggcgcaaccggg

SEQ ID NO: 283169 - DNA, 75 bp, synthetic construct
  source 1..75: mol_type = other DNA
tggcccctgtttgcagaaccgatcaggcaggatctggcggatgcaaaaacaaccgaacgggatagagccatcaaa

SEQ ID NO: 283170 - DNA, 75 bp, synthetic construct
  source 1..75: mol_type = other DNA
tggcgttcacaaggcggttatccaagcttggcccatggtggactgagcttgttagaagtggccgtaccctttatc

SEQ ID NO: 283171 - DNA, 75 bp, synthetic construct
  source 1..75: mol_type = other DNA
cattgctgacaattacccaacaggcgcaggcttcagcagttattgtggcatctgccgctgcgaccacggctgctg

SEQ ID NO: 283172 - DNA, 75 bp, synthetic construct
  source 1..75: mol_type = other DNA
ctgaaggtggtttatgacctcgggaaaaaagcggcagcggactttatgcaacagcaggcccgtgatggtggtcgg

SEQ ID NO: 283173 - DNA, 75 bp, synthetic construct
  source 1..75: mol_type = other DNA
gaggactaccggagggctgaggaggtgctgaaggggagcctgaagcgacaactgaatgaaaacaaacgctactgg

SEQ ID NO: 283174 - DNA, 75 bp, synthetic construct
  source 1..75: mol_type = other DNA
atctacacttactaaacatgatatcataatacctcatccaagagataaatgtatgtgggatgctgaagcgaatta

SEQ ID NO: 283175 - DNA, 75 bp, synthetic construct
  source 1..75: mol_type = other DNA
gcggcaattttggtgcgctgaggggatccgggataacgctggctaaccgtgccggatggacaggcgcactgatgt

SEQ ID NO: 283176 - DNA, 75 bp, synthetic construct
  source 1..75: mol_type = other DNA
gcgggatagtgagcagaaagggacatataacacggatgactacagaaaggccgagcaggcgctgacggagagtct

SEQ ID NO: 283177 - DNA, 75 bp, synthetic construct
  source 1..75: mol_type = other DNA
agcagcgtatcagtgacctggcgggtaaaaagctgacagcagatgaaaaaagcgtgctggcgcataaggatgagc

SEQ ID NO: 283178 - DNA, 75 bp, synthetic construct
  source 1..75: mol_type = other DNA
tgcggtactggcgctctcttcgtcttttactgtcaacgcagcttttagaaacgcaatttgcgcctttttcactcc

SEQ ID NO: 283179 - DNA, 75 bp, synthetic construct
  source 1..75: mol_type = other DNA
actctatcgcttccagccatattctggctctgaactacgatcactggcactactctgtcgtagctcgttactggc

SEQ ID NO: 283180 - DNA, 75 bp, synthetic construct
  source 1..75: mol_type = other DNA
cagtgagagcagagaaattccatggaaaacgtggcccggatacgttcttggctcgaagctaccggccagttatga

SEQ ID NO: 283181 - DNA, 75 bp, synthetic construct
  source 1..75: mol_type = other DNA
tatttttgataacaacagacaaagtattagtaatggtataaagagtacaagttatgcccttacaccattggtaga

SEQ ID NO: 283182 - DNA, 75 bp, synthetic construct
  source 1..75: mol_type = other DNA
gctcagtcgatgggttagcactggctatttttgataacaacagacaaagtattagtaatggtataaagagtacaa

SEQ ID NO: 283183 - DNA, 75 bp, synthetic construct
  source 1..75: mol_type = other DNA
cgtcgggggaaacgatttctcggtatgactgcgccggggaaggcattattagttattgcagaacgaatattaaac

SEQ ID NO: 283184 - DNA, 75 bp, synthetic construct
  source 1..75: mol_type = other DNA
acggtgatgatatgcagtgctatcccatgccggaaacgcttcatgatctgtccgtcacagtttatgtcaaaaatc

SEQ ID NO: 283185 - DNA, 75 bp, synthetic construct
  source 1..75: mol_type = other DNA
cctgtggccgtggatggtatcagccatgtggccagcgaggaaaactggctgacggtgccgggtgccgatgaagaa

SEQ ID NO: 283186 - DNA, 75 bp, synthetic construct
  source 1..75: mol_type = other DNA
catgccggagacgcgtcaccgtctggacgtcaccgtatacatcagaagttcaaccaccctgccaccggacggcgc

SEQ ID NO: 283187 - DNA, 75 bp, synthetic construct
  source 1..75: mol_type = other DNA
gagcgcgttaaaaaccggtattaccgacctgattcgttgcgcgtttcgcgagaacgccaattacgacgttaaaaa

SEQ ID NO: 283188 - DNA, 75 bp, synthetic construct
  source 1..75: mol_type = other DNA
tggatggtctgttctggcttggtattcaacgtattgccgcagatgtgcagcggctgcgtcagtccggaatgacaa

SEQ ID NO: 283189 - DNA, 75 bp, synthetic construct
  source 1..75: mol_type = other DNA
gggccaggcataagtctccgcaactgatgcgccagtgggaagatgtcatgcgtgaatgccgtgataccggagcag

SEQ ID NO: 283190 - DNA, 75 bp, synthetic construct
  source 1..75: mol_type = other DNA
ttccatgcctgaaacacgccacaccctgaccgtgacactctggttatatgcaacactgaacctcagcgatgagga

SEQ ID NO: 283191 - DNA, 75 bp, synthetic construct
  source 1..75: mol_type = other DNA
cgcaacagatgctgtttgtcggcgattctcgcaatgatattcaggcagcaaaagcagccggttgcccttcagttg

SEQ ID NO: 283192 - DNA, 75 bp, synthetic construct
  source 1..75: mol_type = other DNA
atgcgctggagttgcccgtcgcaggtgaagaacgcgttattacctggattggtaacggcgcagatgttctgatgg

SEQ ID NO: 283193 - DNA, 75 bp, synthetic construct
  source 1..75: mol_type = other DNA
tgctggatactggcatcgcatccgaaccgttcgttgatgcagtaaacgcattcattaacgatgaaggtcatcacg

SEQ ID NO: 283194 - DNA, 75 bp, synthetic construct
  source 1..75: mol_type = other DNA
ctgtttctggccgatgccagcggtgtattcgttgatgtttttgcctgggcggtaaacctgcaacgcaaggccgcc

SEQ ID NO: 283195 - DNA, 75 bp, synthetic construct
  source 1..75: mol_type = other DNA
gagaaaacagcgattatgacgttcagaaaacatggccgtacagccgtttcagcatgtccagactgggcgaagaga

SEQ ID NO: 283196 - DNA, 75 bp, synthetic construct
  source 1..75: mol_type = other DNA
gctgaaaaaagtaaacccggaaaccacgctgttcctggtagcatctaaaaccttcaccactcaggaaaccatgac

SEQ ID NO: 283197 - DNA, 75 bp, synthetic construct
  source 1..75: mol_type = other DNA
ttgtgttctaagattatctccagaagataactcatcttatctcgggaaagatattgtcataattgatggcgaaaa

SEQ ID NO: 283198 - DNA, 75 bp, synthetic construct
  source 1..75: mol_type = other DNA
tgcttgatgccggtattgcctcagaaccatttattgacagcgtgaacagctttatcacggacgaggggcatcacg

SEQ ID NO: 283199 - DNA, 75 bp, synthetic construct
  source 1..75: mol_type = other DNA
ggagttttccatcaaagacatcaccagccagctggaagtgccgcgcctgacatcgcttactgtggagctgaagaa

SEQ ID NO: 283200 - DNA, 75 bp, synthetic construct
  source 1..75: mol_type = other DNA
acaacgagtaagcaaagaaattgattcgcagttatgggattacataaatgccaattcaatctggtttgaatacta

SEQ ID NO: 283201 - DNA, 75 bp, synthetic construct
  source 1..75: mol_type = other DNA
caattgagcaggtcagagaggctgcggttaatgtcctcttcagggaaggtgtgttgtcatacacacagcaaaaag

SEQ ID NO: 283202 - DNA, 75 bp, synthetic construct
  source 1..75: mol_type = other DNA
atgttttcggcgataaatcgatctctaagccttttgatgaatggcttgagatgcagcttcaagctattaaagatc

SEQ ID NO: 283203 - DNA, 75 bp, synthetic construct
  source 1..75: mol_type = other DNA
tgtgatttcattgtacccgctatcacgcataacccgcagtctgatcatcaccagaaactgttgtctaatgtcttt

SEQ ID NO: 283204 - DNA, 75 bp, synthetic construct
  source 1..75: mol_type = other DNA
ggaatatcgtgatcagggtaaagatccggcaacgcttgactacgtggtgccgttcaaagtattcgaaggtaaccg

SEQ ID NO: 283205 - DNA, 75 bp, synthetic construct
  source 1..75: mol_type = other DNA
gccgttggcgagtttggtattgatactgccaacatgttcgagttctgggactgggtcggcggtcgttactctttg

SEQ ID NO: 283206 - DNA, 75 bp, synthetic construct
  source 1..75: mol_type = other DNA
atggccttattcgcgtttctcattttcacagcttggcagggagttgcacgaattactgagcggtgtcgattcggt

SEQ ID NO: 283207 - DNA, 75 bp, synthetic construct
  source 1..75: mol_type = other DNA
ccagaaactgctgtctaacttcttcgctcagaccgaagctctggcgtttggtaaatcccgcgaagtggttgagca

SEQ ID NO: 283208 - DNA, 75 bp, synthetic construct
  source 1..75: mol_type = other DNA
ggggcggattctaccagagctaaataatgagaataagatcactagccatgacaattctaccaatggtttaattaa

SEQ ID NO: 283209 - DNA, 75 bp, synthetic construct
  source 1..75: mol_type = other DNA
tgacgggctttatcaccatccgctctattttgcctgcaatgactttgttgatgaccaaatcggacgggtcatcaa

SEQ ID NO: 283210 - DNA, 75 bp, synthetic construct
  source 1..75: mol_type = other DNA
tttgaaagccagagaattcataaaacggttgatgaactggcggcaacgatcgataaagaattgaatcaagggatt

SEQ ID NO: 283211 - DNA, 75 bp, synthetic construct
  source 1..75: mol_type = other DNA
gtgttaacgggaaaatactgcgaacacctgccactgtatcgtcagagtgaaatctttgcccgacagggtgtcgaa

SEQ ID NO: 283212 - DNA, 75 bp, synthetic construct
  source 1..75: mol_type = other DNA
ttcacactgacgacacaccggtaaatgtactggcaccgggcctgaaaaagacgaaaacagggcgcatctggacgt

SEQ ID NO: 283213 - DNA, 75 bp, synthetic construct
  source 1..75: mol_type = other DNA
caggtcaacccttgttgacgtttttcgtgaggcaatagccgaggggcatgtggctacgaatccggtaacagcaac

SEQ ID NO: 283214 - DNA, 75 bp, synthetic construct
  source 1..75: mol_type = other DNA
acaggcgtgagtcactgatagacagaattaaaggcgctgacgcaatcactcttcatgcgtggcttgaccgatatg

SEQ ID NO: 283215 - DNA, 75 bp, synthetic construct
  source 1..75: mol_type = other DNA
atttgttccagatgtttttctggcctatctggcggagcgcggcgtcgataaaacgatcctcaaaaaactctgtat

SEQ ID NO: 283216 - DNA, 75 bp, synthetic construct
  source 1..75: mol_type = other DNA
attgctttaattgataacggacttaaatcacgtactgccgttattcttgaacgtggtgatgatcctgaaaaagta

SEQ ID NO: 283217 - DNA, 75 bp, synthetic construct
  source 1..75: mol_type = other DNA
tatggtagcgtcgcgatgggcttaggcgtgtttaaacagggcttgactggtgacactagccaaataaattacagc

SEQ ID NO: 283218 - DNA, 75 bp, synthetic construct
  source 1..75: mol_type = other DNA
acttgatagcgcactgaataagcagatcgagaatgctttctggaagtgggcgcagaatgctaaacgcttctcccg

SEQ ID NO: 283219 - DNA, 75 bp, synthetic construct
  source 1..75: mol_type = other DNA
attgatggatcacttcaacaagacaccattacaggaaccttcaataaggctctcaaatcgaacggtaagcgcctt

SEQ ID NO: 283220 - DNA, 75 bp, synthetic construct
  source 1..75: mol_type = other DNA
aaacgatgaagcccgtagcattctggtttcgtaaagtcaacctactgactcagacttacacaggtgataactatc

SEQ ID NO: 283221 - DNA, 75 bp, synthetic construct
  source 1..75: mol_type = other DNA
aagcgccggaagttattcacgatttcgcgccgggtactattcaggaattgccggaaggggcaacgatcaagagta

SEQ ID NO: 283222 - DNA, 75 bp, synthetic construct
  source 1..75: mol_type = other DNA
aatatgtcgcgatataccatgcagccgaaccgctcccaatctggctgagactggcaatggatttggctgtcgtta

SEQ ID NO: 283223 - DNA, 75 bp, synthetic construct
  source 1..75: mol_type = other DNA
tcatccgctttttttacgtaaaagtattctattagtgaaaaagggtaatcctaaaaatattaaaggaattgaaga

SEQ ID NO: 283224 - DNA, 75 bp, synthetic construct
  source 1..75: mol_type = other DNA
acccgtcgatttgcagcatggctacaaacagatgaagcaacgcctgcattcaaaaaatatggctggaccaggaaa

SEQ ID NO: 283225 - DNA, 75 bp, synthetic construct
  source 1..75: mol_type = other DNA
cttgagaatcagccggaagcagatgtctggatcacatgggctgactgggcggccagtaatccaggaattggcgat

SEQ ID NO: 283226 - DNA, 75 bp, synthetic construct
  source 1..75: mol_type = other DNA
tgtttaccggtatctacgctaaccagtccggcccgtggaccaataacgtcgcgccgggcaaaaacatctccacta

SEQ ID NO: 283227 - DNA, 75 bp, synthetic construct
  source 1..75: mol_type = other DNA
gtacgcgactatgacaccggcctaccgacgcaaggagtgaaagtggaagagaaaaacagaagttctgacgataat

SEQ ID NO: 283228 - DNA, 75 bp, synthetic construct
  source 1..75: mol_type = other DNA
ggagcggcgacaggttgatacgccagtcagccatattgatttactaccgacaatgatggcgctggcagatattga

SEQ ID NO: 283229 - DNA, 75 bp, synthetic construct
  source 1..75: mol_type = other DNA
gtggtgatcgctacatggacgcgtaaccatgatgatatcgcttttcgtcgcaaggctgcggagtggcttttctct

SEQ ID NO: 283230 - DNA, 75 bp, synthetic construct
  source 1..75: mol_type = other DNA
tcaatggatttagctgtcgttacagggcagagagtgggcgatttgtgcagaatgaagtggtcagacataaacgat

SEQ ID NO: 283231 - DNA, 75 bp, synthetic construct
  source 1..75: mol_type = other DNA
cttcatgtgtggcttgaccgatatgaaacaattctcagcgagaggggcatcagaccgaaaactctactcgactac

SEQ ID NO: 283232 - DNA, 75 bp, synthetic construct
  source 1..75: mol_type = other DNA
atgctatatatctttcgtcttattattaccgtgatttacagcatcttagtctgtgtattcggctccatttactgc

SEQ ID NO: 283233 - DNA, 75 bp, synthetic construct
  source 1..75: mol_type = other DNA
gctctggctatcatcagggaccataaagacagattcagtgaaaaagatattcagcctctttatctgcgtaaaagc

SEQ ID NO: 283234 - DNA, 75 bp, synthetic construct
  source 1..75: mol_type = other DNA
gtaatacatctggcaccggtgtttgggaagatattgccgggcgtaaggggaatattgaaaccatagccggtattc

SEQ ID NO: 283235 - DNA, 75 bp, synthetic construct
  source 1..75: mol_type = other DNA
tgttactgatttcgtctggcgcaacttcgttgttgatccgcccgaaggtactctcatccgcaaaattaactacga

SEQ ID NO: 283236 - DNA, 75 bp, synthetic construct
  source 1..75: mol_type = other DNA
gttgctgacgcattcattatggccttcgcgccaattgatacatcgctggatatctgggaacagctggggagacag

SEQ ID NO: 283237 - DNA, 75 bp, synthetic construct
  source 1..75: mol_type = other DNA
ggaaggtatcagcgttctttggcttgaagaggcccacgcgctgacggaataccagtggaagatactggagcctac

SEQ ID NO: 283238 - DNA, 75 bp, synthetic construct
  source 1..75: mol_type = other DNA
ccttctggaaacggcaaaacgtaatggtctggagccgcatgcctggctgacagacgttctgacgcgtctaccgga

SEQ ID NO: 283239 - DNA, 75 bp, synthetic construct
  source 1..75: mol_type = other DNA
acatcgtggtgtacgactgccgtccggggcgtgcggggcagtatgcgtgtgagatgctgagcgggtggtcgggga

SEQ ID NO: 283240 - DNA, 75 bp, synthetic construct
  source 1..75: mol_type = other DNA
tggtgtacttattccagagcttaggtgaactgtttattagcgcccttggcctggcgatgattgctgccctggtgc

SEQ ID NO: 283241 - DNA, 75 bp, synthetic construct
  source 1..75: mol_type = other DNA
atccctgctcagtttctgcaccgcatgcagccttaacggtgtccagacccgtgagtgtggtcacacgtcacgcag

SEQ ID NO: 283242 - DNA, 75 bp, synthetic construct
  source 1..75: mol_type = other DNA
accggagggatggtcacgggacatgacgacgttcctgtcactcagtcaggaggtgctgttatccctgctcagttt

SEQ ID NO: 283243 - DNA, 75 bp, synthetic construct
  source 1..75: mol_type = other DNA
accgctatcggctttcacatgcgcgactggtggcagccgacaaaagcaaacttcttcggacacctgaaaaagccg

SEQ ID NO: 283244 - DNA, 75 bp, synthetic construct
  source 1..75: mol_type = other DNA
cgtcaaaatcgtgggatgccgctggcatagccatatttctgtcgaataaatacagcctgcgcttttgctgtgcac

SEQ ID NO: 283245 - DNA, 75 bp, synthetic construct
  source 1..75: mol_type = other DNA
atcgtcaaaatcatgggatgccgctggcattgccatatttctgtcgaataaatacaccctgcgtttttgttgtgc

SEQ ID NO: 283246 - DNA, 75 bp, synthetic construct
  source 1..75: mol_type = other DNA
gtaaggccgcgcagcccgagcctcagccgcaaccgccggagggggaggattacgggttttcagacgatatcccgt

SEQ ID NO: 283247 - DNA, 75 bp, synthetic construct
  source 1..75: mol_type = other DNA
gaagtggcacacggcgagctttcacccgttacgctgtgcgattactacggtttcttccatctgtttttgttcacc

SEQ ID NO: 283248 - DNA, 75 bp, synthetic construct
  source 1..75: mol_type = other DNA
ggtttttgatgtgtcaaccaacatcaacgcaggggacaagaataataaccggagataattattcatcacagtatc

SEQ ID NO: 283249 - DNA, 75 bp, synthetic construct
  source 1..75: mol_type = other DNA
tggctatggtggcgacatccgcattaacagcgatctcaattgcctgtcagaatcagattgacgtgtgcagacctg

SEQ ID NO: 283250 - DNA, 75 bp, synthetic construct
  source 1..75: mol_type = other DNA
tttttgtacacgaaaaaaagaacttgtgaaaacgtcaggacatcatgcaaggtttttgatgtgtcaaccaacatc

SEQ ID NO: 283251 - DNA, 75 bp, synthetic construct
  source 1..75: mol_type = other DNA
gtggtgcttgttaaagcgcctggcgcaaaagatgcaaaagtcgaaaaccagacgggggtgcgtaccgactggcgt

SEQ ID NO: 283252 - DNA, 75 bp, synthetic construct
  source 1..75: mol_type = other DNA
gcctttaagacattgccgggaatatgctgctaaaaatgcagagtatatggcaagactggcaggacttatttacca

SEQ ID NO: 283253 - DNA, 75 bp, synthetic construct
  source 1..75: mol_type = other DNA
ggtggttctcttttcatcgacaggaaatcatctcccggaattattttgaaggatccaagactgacggtatcggtg

SEQ ID NO: 283254 - DNA, 75 bp, synthetic construct
  source 1..75: mol_type = other DNA
gtacctgtgcgactcattccagaggagcttgaacttttcaactggataaaaagctattgtattgagaaggggatc

SEQ ID NO: 283255 - DNA, 75 bp, synthetic construct
  source 1..75: mol_type = other DNA
caaaaaataaattgtccgatctgcagctgtttcctgaaggagaatggctgggagaagatatttatgcgtgggcaa

SEQ ID NO: 283256 - DNA, 75 bp, synthetic construct
  source 1..75: mol_type = other DNA
cccgcgagcatgacctgtcgctgacggttatctggaacctgctgcgccagtggactcaggagaaactgctgcatg

SEQ ID NO: 283257 - DNA, 75 bp, synthetic construct
  source 1..75: mol_type = other DNA
ttcagcctgatgtttaccagaaaggtttttgtacacgaaaaaaagaacttgtgaaaacgtcaggacatcatgcaa

SEQ ID NO: 283258 - DNA, 75 bp, synthetic construct
  source 1..75: mol_type = other DNA
ccaagactgacgatgtcggcgatgattcagcctgatgtttaccacaaaggtttttgtacgcgaaaaaagaacttg

SEQ ID NO: 283259 - DNA, 75 bp, synthetic construct
  source 1..75: mol_type = other DNA
actcaaaaaaatacacaggcacctttggctatggtggcgacatccgcattaacagcgatctcaattgcctgtcag

SEQ ID NO: 283260 - DNA, 75 bp, synthetic construct
  source 1..75: mol_type = other DNA
gtcccgccagaattcgcctggcatgtgagcattatgcgctgaccagcgatgcaccgtcggggaaggaaggtgccg

SEQ ID NO: 283261 - DNA, 75 bp, synthetic construct
  source 1..75: mol_type = other DNA
cactgtcaggcgctggcgctggagaacgacaccgcgcgtcaggtgcaggtgtttgaagccgcctgtcagtcggga

SEQ ID NO: 283262 - DNA, 75 bp, synthetic construct
  source 1..75: mol_type = other DNA
actggatgtgtgcgccacgtccacaggcagagacggaagccacggaatgccgtgacaaccaggccgatgccgcct

SEQ ID NO: 283263 - DNA, 75 bp, synthetic construct
  source 1..75: mol_type = other DNA
tgctggaaaaactccaggctgtcgcagagttccttcgggaagccgaaggctgggaatggtgcgccggacgcatgg

SEQ ID NO: 283264 - DNA, 75 bp, synthetic construct
  source 1..75: mol_type = other DNA
tcgccataaatccgcgctggtcatgcaaaagtacagccgtcagcaggcacgggaggcagagcagaaagcccgtgc

SEQ ID NO: 283265 - DNA, 75 bp, synthetic construct
  source 1..75: mol_type = other DNA
aagcggggcgtaaatccagccgtaaaccgtcaaaagtgcaggagactgcactgtctgccctgctggcgcagacgg

SEQ ID NO: 283266 - DNA, 75 bp, synthetic construct
  source 1..75: mol_type = other DNA
cgttacgacgcgctggaaaaccagtgtgaggaatccgacctgctggaagcagaaatgaagctgatgcgctgcatg

SEQ ID NO: 283267 - DNA, 75 bp, synthetic construct
  source 1..75: mol_type = other DNA
aagaacgcctgaacgaactgatggctcgttacgacgcgctggaaaaccagggtgaggaatccgacctgctggaag

SEQ ID NO: 283268 - DNA, 75 bp, synthetic construct
  source 1..75: mol_type = other DNA
tcgccgactggcagcactcaacatgctggcagagcgtggcatccttccggctgactggcctgtacgcgtgaaggt

SEQ ID NO: 283269 - DNA, 75 bp, synthetic construct
  source 1..75: mol_type = other DNA
cgtgactggtggcagccaaccagagggaattattttggagcgttaaaaaaacagcagattatcgctgccctgaat

SEQ ID NO: 283270 - DNA, 75 bp, synthetic construct
  source 1..75: mol_type = other DNA
catatgaaagacaaccgctgggtgcctggctggatgtgtgcaccacgtccacagatggatgccactgaacacacc

SEQ ID NO: 283271 - DNA, 75 bp, synthetic construct
  source 1..75: mol_type = other DNA
tgaactgcgcaccgatttgttcagcgacgacgaaggtggctatgtggactgcgtggcactcgataccgccctgct

SEQ ID NO: 283272 - DNA, 75 bp, synthetic construct
  source 1..75: mol_type = other DNA
acacgctacgacgcgctggaaaatcagtgtgaggaatccgacctgctggaagctgaattgaagctgatgcgctgt

SEQ ID NO: 283273 - DNA, 75 bp, synthetic construct
  source 1..75: mol_type = other DNA
aattccgcaggagctggcgacagctgcatcaatgactgaaaacggtcatcgtcgggatatgcaccctgccgaaca

SEQ ID NO: 283274 - DNA, 75 bp, synthetic construct
  source 1..75: mol_type = other DNA
gcagttgcgcagtgaggatgatgtggctgacgacgctgaccgcacggaacaggggctggagagcgcgtcagtgga

SEQ ID NO: 283275 - DNA, 75 bp, synthetic construct
  source 1..75: mol_type = other DNA
gattccgcaggagctggcgacggctgcatcaatgactgaaaacggtcatcgtcgggatatgcaccctgccgaaca

SEQ ID NO: 283276 - DNA, 75 bp, synthetic construct
  source 1..75: mol_type = other DNA
gattccgcaggagctggcgactgcagcatcaatgactgaaaacggtcatcgtcgggatatgcaccctgccgaaca

SEQ ID NO: 283277 - DNA, 75 bp, synthetic construct
  source 1..75: mol_type = other DNA
tcgccataaatccgcactggtcatgcagaagtacagccgtcagcaggcacgggaggcagagcagaaagcccgtgc

SEQ ID NO: 283278 - DNA, 75 bp, synthetic construct
  source 1..75: mol_type = other DNA
tcgcagaggcaggtatggcagcaagggaggcgggtcacgctgtccgtgagatggagcggtggatggtgccgaaca

SEQ ID NO: 283279 - DNA, 75 bp, synthetic construct
  source 1..75: mol_type = other DNA
gctgggtgcctggctggatgtgttcaccacgtccacagacggatgccactgaacgcgccgataacctggctgatg

SEQ ID NO: 283280 - DNA, 75 bp, synthetic construct
  source 1..75: mol_type = other DNA
tattccgcaggagctggcgactgctgcatcaatgactgaaaacggtcatcgtcgggatatgcaccctgccgaaca

SEQ ID NO: 283281 - DNA, 75 bp, synthetic construct
  source 1..75: mol_type = other DNA
tattccgcaggagctggcgacagcagcatcaatgactgaaaacggtcatcgtcgggatatgcaccctgccgaaca

SEQ ID NO: 283282 - DNA, 75 bp, synthetic construct
  source 1..75: mol_type = other DNA
aattccgcaggagctggcgactgcggcatcaatgactgaaaacggtcatcgtcgggatatgcaccctgccgaaca

SEQ ID NO: 283283 - DNA, 75 bp, synthetic construct
  source 1..75: mol_type = other DNA
cattccgcaggagctggcgaccgctgcatcaatgactgaaaacggtcatcgtcgggatatgcaccctgccgaaca

SEQ ID NO: 283284 - DNA, 75 bp, synthetic construct
  source 1..75: mol_type = other DNA
tattccgcaggagctggcgacggcggcatcaatgactgaaaacggtcatcgtcgggatatgcaccctgccgaaca

SEQ ID NO: 283285 - DNA, 75 bp, synthetic construct
  source 1..75: mol_type = other DNA
tattccgcaggagctggcgaccgccgcatcaatgactgaaaacggtcatcgtcgggatatgcaccctgccgaaca

SEQ ID NO: 283286 - DNA, 75 bp, synthetic construct
  source 1..75: mol_type = other DNA
tgctgattaacgcggcaaaaaccacatccgtggtgatgttcctggtggcctctgctgcggtatctgcatggctta

SEQ ID NO: 283287 - DNA, 75 bp, synthetic construct
  source 1..75: mol_type = other DNA
cctggttttatattcattattagtcgtatttgtttttattcccgatctcatcatcctccctttgaaatggattaa

SEQ ID NO: 283288 - DNA, 75 bp, synthetic construct
  source 1..75: mol_type = other DNA
caaaccgtacatcatcggcaactcccgcactgcggatcagggtactaacattcagactcctgcgcagatggcgaa

SEQ ID NO: 283289 - DNA, 75 bp, synthetic construct
  source 1..75: mol_type = other DNA
atgtcctgttctcgttcagttgttttactgaacaatgccttaaaaatcgtcgttatgaaaaatggcgatttgtct

SEQ ID NO: 283290 - DNA, 75 bp, synthetic construct
  source 1..75: mol_type = other DNA
caggatctcactcctctgtttgcagagctgcggaatgataatccacaaaaaaatgatggggtgatggcacgaata

SEQ ID NO: 283291 - DNA, 75 bp, synthetic construct
  source 1..75: mol_type = other DNA
acgccggaagatggtgttatctcccgggagcaaatcgcccaggttcttgtaacagctctgagcaacgatgcggca

SEQ ID NO: 283292 - DNA, 75 bp, synthetic construct
  source 1..75: mol_type = other DNA
ttgagccgtttcgttcctcgcattattccgttttatttactcttgctggcggcaggcggtacagctaacgcacaa

SEQ ID NO: 283293 - DNA, 75 bp, synthetic construct
  source 1..75: mol_type = other DNA
tgctgaactttaaagaccgcattctgattaagggggaagaagataccggcaagtcaactctcctgactgaaataa

SEQ ID NO: 283294 - DNA, 75 bp, synthetic construct
  source 1..75: mol_type = other DNA
agttgtgtgtgaattactggggcgtagctacaccatcagttacccactggtggtgtttcagtccggaaaaatgtt

SEQ ID NO: 283295 - DNA, 75 bp, synthetic construct
  source 1..75: mol_type = other DNA
ttgaggtggtgcgctataacccggaagtcgataccgcaccgcatagcgcattctatgaagtgccttatgacgcaa

SEQ ID NO: 283296 - DNA, 75 bp, synthetic construct
  source 1..75: mol_type = other DNA
agccgtttgctgcatggcatgaacagacagccacgcaggaacaacggatggcgcgcgggtacgacctgacagccc

SEQ ID NO: 283297 - DNA, 75 bp, synthetic construct
  source 1..75: mol_type = other DNA
aattgatctggcagggcgatacgcagatgttaagtctgacatcgggagcaacagccaacagtgcggatggttgga

SEQ ID NO: 283298 - DNA, 75 bp, synthetic construct
  source 1..75: mol_type = other DNA
aacctcctgtctgatgtgatcaatttacttgtgaaacgcgctgtattccacaagcaaatttcctcagtggatgaa

SEQ ID NO: 283299 - DNA, 75 bp, synthetic construct
  source 1..75: mol_type = other DNA
gcgttttgccgcaggatgattcgtttatggctaagccggcgattaatctggcgaaatacaaagcggcggcgggga

SEQ ID NO: 283300 - DNA, 75 bp, synthetic construct
  source 1..75: mol_type = other DNA
ttgcccgccagttcggctgtagcgacgatgcgtttatccatcgcgccgaaatgttcctcaaagagctatggatgc

SEQ ID NO: 283301 - DNA, 75 bp, synthetic construct
  source 1..75: mol_type = other DNA
gtgctgatttcaacaggcattgacgccacgcaaaccaaccacggtcgccaacatctcgacgaaacccaggtgcgg

SEQ ID NO: 283302 - DNA, 75 bp, synthetic construct
  source 1..75: mol_type = other DNA
taccgaacatgtcaataataacgccttcaccagctatatggcgtattacaacgtccagcaggcgctgaatatcgc

SEQ ID NO: 283303 - DNA, 75 bp, synthetic construct
  source 1..75: mol_type = other DNA
ccggggaaggctacaaaggccacgttttctgggatacggaagtatttttactgccgttccatctgtttagcgaac

SEQ ID NO: 283304 - DNA, 75 bp, synthetic construct
  source 1..75: mol_type = other DNA
gcgccagacgcgcggcatgtatctggcggggttttatcatcgggcgggtaaaggtgaaatcaacgaactggtgaa

SEQ ID NO: 283305 - DNA, 75 bp, synthetic construct
  source 1..75: mol_type = other DNA
caggggaacggctatcttgggcttcgcgccagccatgaagaagattacacgcgccagacgcgagggatgtatctg

SEQ ID NO: 283306 - DNA, 75 bp, synthetic construct
  source 1..75: mol_type = other DNA
cccttgatgaaatctggctggtcgagcactatccggtattcacccaagggcaggcaggaaaagcggagcacattt

SEQ ID NO: 283307 - DNA, 75 bp, synthetic construct
  source 1..75: mol_type = other DNA
gggtgtgccgcctgtctttattgatcaggtgatggcgcttaccgatgaagccgggcttaatcaacttgaaagcat

SEQ ID NO: 283308 - DNA, 75 bp, synthetic construct
  source 1..75: mol_type = other DNA
ccagtaacggcgcgcgttacaccatcgtcagccgtcgctttgtttcggcagaccaactgccgctcattgcgctgg

SEQ ID NO: 283309 - DNA, 75 bp, synthetic construct
  source 1..75: mol_type = other DNA
gcggggctgtatcatcgggcgggtaagggtgaaatcaacgaactggtgaacctgcctgatgtcgtggggatggag

SEQ ID NO: 283310 - DNA, 75 bp, synthetic construct
  source 1..75: mol_type = other DNA
gcgtcgcttcgccagctcgaaaggtgcacgcaacagagttatgaccaacttctagcagcatcgacagaaaactgg

SEQ ID NO: 283311 - DNA, 75 bp, synthetic construct
  source 1..75: mol_type = other DNA
tcctctttcgccagcaacaatatttatgactataccaacgaaaccgcgaacgacgttttcgatgtgcgtttagcg

SEQ ID NO: 283312 - DNA, 75 bp, synthetic construct
  source 1..75: mol_type = other DNA
gcgggagctgatggacgtggcgatgaagcatggctatggccgcttaaccctcgatgatattcgggctgcgagaga

SEQ ID NO: 283313 - DNA, 75 bp, synthetic construct
  source 1..75: mol_type = other DNA
ctcacgcaaaaccctcaatgactacatccggggcaatctggggcttgccggaaccggcgaaacgttcacgctact

SEQ ID NO: 283314 - DNA, 75 bp, synthetic construct
  source 1..75: mol_type = other DNA
ccgcaggcgtcgcaggctgaacagagccatgccggtaaaggacataatcatgagcatgagcatgaagaagggggc

SEQ ID NO: 283315 - DNA, 75 bp, synthetic construct
  source 1..75: mol_type = other DNA
gctggaagcgaaaaactccaccgccatgctgaccacgttcaacgaagtcaacatgaagccgattatggatctgcg

SEQ ID NO: 283316 - DNA, 75 bp, synthetic construct
  source 1..75: mol_type = other DNA
acttcacgccgattggcatatttcatagtgtcatatattgccggaatgctctgtgctggattagttggggctaaa

SEQ ID NO: 283317 - DNA, 75 bp, synthetic construct
  source 1..75: mol_type = other DNA
aacaagcgagcaagttaccgcgcagctggtcggcaagaccctgaaggccgagcagcagaaaagcgtcgtagatat

SEQ ID NO: 283318 - DNA, 75 bp, synthetic construct
  source 1..75: mol_type = other DNA
aatcaacgctgaaggttggtgcttcagttatggccgagactctgacgcgtaaagagtggatcgactcgctgacaa

SEQ ID NO: 283319 - DNA, 75 bp, synthetic construct
  source 1..75: mol_type = other DNA
gacttgttcgcaccttccataacaaacgcgggaaattacaactcaccgttactcagcaactcgggcgcacatcaa

SEQ ID NO: 283320 - DNA, 75 bp, synthetic construct
  source 1..75: mol_type = other DNA
gatcgtgcgagcagagtttaaagcgcgcgttgggataaaactgctcatgacgctaacccacaataataagccgct

SEQ ID NO: 283321 - DNA, 75 bp, synthetic construct
  source 1..75: mol_type = other DNA
ggcgaaaaactgacccttgaggacaaaaaagggcgcacggtcgagctggacaaaagccaggcctcttatctgtcc

SEQ ID NO: 283322 - DNA, 75 bp, synthetic construct
  source 1..75: mol_type = other DNA
ccgcttcacggtgaaaacggtggaaggcgaaaaactgacccttgaggacaaaaaagggcgcacggtcgagctgga

SEQ ID NO: 283323 - DNA, 75 bp, synthetic construct
  source 1..75: mol_type = other DNA
ggtatccatgcaggcgctgatacacggcgataaaaccattatcgaggctcatgaaaaagctgttgccgctgctgt

SEQ ID NO: 283324 - DNA, 75 bp, synthetic construct
  source 1..75: mol_type = other DNA
attctgtcgttcatccaccagcaggatattgcatcactggtgtccggcctgttctcccgcctgcggggcggagga

SEQ ID NO: 283325 - DNA, 75 bp, synthetic construct
  source 1..75: mol_type = other DNA
agccggagcgccaccgtaccgcgtgtcttcattattaagccacaaacactcccgttgcgaagtgatttctggtgt

SEQ ID NO: 283326 - DNA, 75 bp, synthetic construct
  source 1..75: mol_type = other DNA
atgttctgctgttcaatcttcagtttgaagagcgcggcggtgcggagttattcgacccggcagaagactggcagg

SEQ ID NO: 283327 - DNA, 75 bp, synthetic construct
  source 1..75: mol_type = other DNA
gctggtctccgtggtatcggtaaagattctgtcgtttattcaccaacaggatattgcatcactggtatccggtct

SEQ ID NO: 283328 - DNA, 75 bp, synthetic construct
  source 1..75: mol_type = other DNA
gctcaaagtaaataccgtcttggcaacgaatgtgaaacttatgctgaattaaaattgggtcaggaagtgtggaaa

SEQ ID NO: 283329 - DNA, 75 bp, synthetic construct
  source 1..75: mol_type = other DNA
cgaactgggtgcgccggaggtgagtagtctttggcaccaacaacaaaaaaatccgcctttcgtcctcaaacataa

SEQ ID NO: 283330 - DNA, 75 bp, synthetic construct
  source 1..75: mol_type = other DNA
atttctggcgtgggttaagctctaatatgctcagccgcatgatgtgcgatgccctgcatgaagcggactctggtg

SEQ ID NO: 283331 - DNA, 75 bp, synthetic construct
  source 1..75: mol_type = other DNA
tggcgtgtggtggcgcattttttggtgtcgtttatcgtcggcgtgctgggggcgcgcgtgctgtcagcctggatt

SEQ ID NO: 283332 - DNA, 75 bp, synthetic construct
  source 1..75: mol_type = other DNA
attctgtcgtttattcaccagcaggatattgcatcactggtatccggtttgttatcccgcctgaggggcggagga

SEQ ID NO: 283333 - DNA, 75 bp, synthetic construct
  source 1..75: mol_type = other DNA
attctggcattcatccaccagcaggatattgcagcgctgatatccggtttgttctcccgcctgaggaatggaggt

SEQ ID NO: 283334 - DNA, 75 bp, synthetic construct
  source 1..75: mol_type = other DNA
cacgataccgcaagcgctttcagcctggcgggtggcagcgcattttctggtgtcgtttattgtcggcgtgctggg

SEQ ID NO: 283335 - DNA, 75 bp, synthetic construct
  source 1..75: mol_type = other DNA
cagcaggatatcgcatcactggtgtccggcctgttctcccgcctgcggggcggaggaggcggcaatgttaagtaa

SEQ ID NO: 283336 - DNA, 75 bp, synthetic construct
  source 1..75: mol_type = other DNA
catcggcggatgcactgtgtgcggtgctggtggcggtggtgtcggtgaagattgcatacacaacaatttatttaa

SEQ ID NO: 283337 - DNA, 75 bp, synthetic construct
  source 1..75: mol_type = other DNA
atggcagttcgtggcattaacaaggttgtactcattggtcgcctgggtaaagacccggaagtccgttacatcccc

SEQ ID NO: 283338 - DNA, 75 bp, synthetic construct
  source 1..75: mol_type = other DNA
atggcagttcgtggcattaacaaggtcattctcgtaggccgactgggaaaagatccggaagtccgttacatccca

SEQ ID NO: 283339 - DNA, 75 bp, synthetic construct
  source 1..75: mol_type = other DNA
caacaggccgcatggcgggcggtggcggagacggaaaaacgccgccatcagggtaacacgctggcggaatatccg

SEQ ID NO: 283340 - DNA, 75 bp, synthetic construct
  source 1..75: mol_type = other DNA
gcgtggcgctcgatgccgccctgctggaaaaactccaggctgtcgcagagttccttcgggaagccgaaggctggg

SEQ ID NO: 283341 - DNA, 75 bp, synthetic construct
  source 1..75: mol_type = other DNA
tcgcagaggctggtatggcggccagggaggccggtcacgctgtccgagagatggagcggtggatggtgccgaaca

SEQ ID NO: 283342 - DNA, 75 bp, synthetic construct
  source 1..75: mol_type = other DNA
atgactgcccgtcagtatgcgctggtacctctcagcgcagagcaacaggccgcatggcgggcggtggcggagacg

SEQ ID NO: 283343 - DNA, 75 bp, synthetic construct
  source 1..75: mol_type = other DNA
ctggtcgtgcatactctgcctggtgaccgttacggtgtcgccgcaggtggtcgccgactggcggcactcaacatg

SEQ ID NO: 283344 - DNA, 75 bp, synthetic construct
  source 1..75: mol_type = other DNA
aggtgcaggtgtttgaagctgcctgtcagtcgggatggggcggaaaaccggatgtgcgggttatccgcaatctga

SEQ ID NO: 283345 - DNA, 75 bp, synthetic construct
  source 1..75: mol_type = other DNA
gtcgccgcaggtggtcgccgactggcagcactcaacatgctggcagagcgtggcattattccggctgactggcct

SEQ ID NO: 283346 - DNA, 75 bp, synthetic construct
  source 1..75: mol_type = other DNA
gaccttgccccggttatcctcgatgcgctggcagaagaccgcatcaccaccgagcactgtcaggcgctggcgctg

SEQ ID NO: 283347 - DNA, 75 bp, synthetic construct
  source 1..75: mol_type = other DNA
ggcgtttttccgctgtctgaacggaagccgcaggatgtcgttgtctgacctgcgatttttcatgccgtccctgac

SEQ ID NO: 283348 - DNA, 75 bp, synthetic construct
  source 1..75: mol_type = other DNA
gccgtggacgtaaggccgcgcagccggagcctcagccgcagtctgaacccgaatataacttcgatgacgacatcc

SEQ ID NO: 283349 - DNA, 75 bp, synthetic construct
  source 1..75: mol_type = other DNA
agtgtgaggaatctgacctgctggaagcagaaatgaagctgatgcgctgcatggcgaaggtcagagcgtggacgc

SEQ ID NO: 283350 - DNA, 75 bp, synthetic construct
  source 1..75: mol_type = other DNA
cgctgggtgcctggctggatgtgtgctccacgttcacagacggataccactgaacgcaccgacaaccaggccaat

SEQ ID NO: 283351 - DNA, 75 bp, synthetic construct
  source 1..75: mol_type = other DNA
ctgatggcagaaaaagtccgtcttgcagccctgctgccggagggatggtcacgggacatgacgacgttcctgtca

SEQ ID NO: 283352 - DNA, 75 bp, synthetic construct
  source 1..75: mol_type = other DNA
tggaaagcgccatcggctttcacatgcgcgactggtggcagccgacaaaagcaaacttcttcggacacctgaaaa

SEQ ID NO: 283353 - DNA, 75 bp, synthetic construct
  source 1..75: mol_type = other DNA
atgtcagtaacaaagtttgaaccaaaatctacccgtaaagcaagccgtaaacctgcaaaaacgcaggaaactgtc

SEQ ID NO: 283354 - DNA, 75 bp, synthetic construct
  source 1..75: mol_type = other DNA
gtgtatccagcgtggtgtgcagttgcgcagtgaggatgatgtggctgacgacgctgaccgcacggaacaggggct

SEQ ID NO: 283355 - DNA, 75 bp, synthetic construct
  source 1..75: mol_type = other DNA
tgaagaaaggcgatgcggctgaacatgcagagcaccatatgaaagacaaccgctgggtgcctggctggatgtgtg

SEQ ID NO: 283356 - DNA, 75 bp, synthetic construct
  source 1..75: mol_type = other DNA
gtatgtgtccagcgtggtgtgcagttgcgcagtgaagatgacgcgactgatgacgctgaacgcacggaacaggtg

SEQ ID NO: 283357 - DNA, 75 bp, synthetic construct
  source 1..75: mol_type = other DNA
gagacacagtacaccactgacgagcagcagcgtctcgatgaactgtacgccacccaggaagcctctgaaacatat

SEQ ID NO: 283358 - DNA, 75 bp, synthetic construct
  source 1..75: mol_type = other DNA
ttcgctgaccagcgatgcgccatcggggaaggaaggtgccgcattcatggcgctgatggcagaaaaagcccgtct

SEQ ID NO: 283359 - DNA, 75 bp, synthetic construct
  source 1..75: mol_type = other DNA
acgaacgcctgaacgaactgatgacgcgttacgacgcgctggaaaaccagtgtgaggaatccgacctgctggaag

SEQ ID NO: 283360 - DNA, 75 bp, synthetic construct
  source 1..75: mol_type = other DNA
ccgccacgttcagcgaatgctgaaactggcggaccttgccccagtgatcctagatgcgctggcagaagaccacat

SEQ ID NO: 283361 - DNA, 75 bp, synthetic construct
  source 1..75: mol_type = other DNA
ccgccacgttcagcgaatgctgaaactggccgaccttgccccagtgatcctggatgcgctggcagaagaccgcat

SEQ ID NO: 283362 - DNA, 75 bp, synthetic construct
  source 1..75: mol_type = other DNA
agccctgaatgaggcaggactgtccggtgccgcacgggacgcggagaagatgaagaaaggtgatgcggctgaaca

SEQ ID NO: 283363 - DNA, 75 bp, synthetic construct
  source 1..75: mol_type = other DNA
gagcagactgaatggcaacgcgtggtgctgttcggcaagctcgcggaagtggcaggtgaatatctgcgcaagggg

SEQ ID NO: 283364 - DNA, 75 bp, synthetic construct
  source 1..75: mol_type = other DNA
gagcagacagaatggcaacgcgtggtgctgttcggcaagctcgcggaagtggcaggggaatatctgcgcaagggg

SEQ ID NO: 283365 - DNA, 75 bp, synthetic construct
  source 1..75: mol_type = other DNA
tgacaaacagactggggagatgcgggagcagacggaatggcaccgcgtggtgctgttcggcaagctcgcggaagt

SEQ ID NO: 283366 - DNA, 75 bp, synthetic construct
  source 1..75: mol_type = other DNA
gagcagacggaatggcaacgcgtggtgctgttcggcaagctcgcggaagtggcaggagaatatctgcgcaagggg

SEQ ID NO: 283367 - DNA, 75 bp, synthetic construct
  source 1..75: mol_type = other DNA
gagcagaccgaatggcaccgcgtggtgctgttcggcaagctcgcggaagtggcaggggaatatctgcgcaagggg

SEQ ID NO: 283368 - DNA, 75 bp, synthetic construct
  source 1..75: mol_type = other DNA
gagcagactgaatggcatcgcgtggtgctgttcggcaagctcgcggaagtggcaggggaatatctgcgcaagggg

SEQ ID NO: 283369 - DNA, 75 bp, synthetic construct
  source 1..75: mol_type = other DNA
cttcagtggttgtatgccatcgatgtgctgattgaaacacagggcgaggtctgcctccttccgcttcctggtgat

SEQ ID NO: 283370 - DNA, 75 bp, synthetic construct
  source 1..75: mol_type = other DNA
cttcagtggttgtatgccatcgatgtgctgattgaaacacagggcgaggtctgcctccttcctcttcctggagat

SEQ ID NO: 283371 - DNA, 75 bp, synthetic construct
  source 1..75: mol_type = other DNA
cttcagtggatgtatgccatcgatgtgctgattgaaacacagggcgaggtctgcctccttccacttcctggcgat

SEQ ID NO: 283372 - DNA, 75 bp, synthetic construct
  source 1..75: mol_type = other DNA
tgacaaacagactggggagatgcgggagcagaccgaatggcagcgcgtggtgctgttcggcaagctcgcggaagt

SEQ ID NO: 283373 - DNA, 75 bp, synthetic construct
  source 1..75: mol_type = other DNA
tgacaaacagacaggggagatgcgggagcagactgaatggcaccgcgtggtgctgttcggcaagctcgcggaagt

SEQ ID NO: 283374 - DNA, 75 bp, synthetic construct
  source 1..75: mol_type = other DNA
cttcagtggctgtatgccatcgatgtgctgattgaaacacagggcgaggtctgcctccttccccttcctggggat

SEQ ID NO: 283375 - DNA, 75 bp, synthetic construct
  source 1..75: mol_type = other DNA
gagcagacggaatggcatcgcgtggtgctgttcggcaagctcgcggaagtggcaggtgaatatctgcgcaagggg

SEQ ID NO: 283376 - DNA, 75 bp, synthetic construct
  source 1..75: mol_type = other DNA
ccggaagcggtgtggtggtgtcctggcgttatggcaacgtgtgtgtccagcgtggtgtgcagttgcgcagtgagg

SEQ ID NO: 283377 - DNA, 75 bp, synthetic construct
  source 1..75: mol_type = other DNA
ctgctggaagcagaaatgaagctgatgcgctgcatggcgaaggtcagagcgtggacgccggagatgcgtgccgga

SEQ ID NO: 283378 - DNA, 75 bp, synthetic construct
  source 1..75: mol_type = other DNA
aaaacagtggcactgatggtctggcgattgtgctgttgtgtttttgattactgcaataccactctccacccgttc

SEQ ID NO: 283379 - DNA, 75 bp, synthetic construct
  source 1..75: mol_type = other DNA
tcaccgctgaatgtgcgcacggtgccgtattctgcggagtccgtcagcgaactggcggagtccattaagggcgtt

SEQ ID NO: 283380 - DNA, 75 bp, synthetic construct
  source 1..75: mol_type = other DNA
ggctgttgctgaacaccttcgggaagccgaaggctggggatggtgcgccggacgcatggagccggtcggtgaatg

SEQ ID NO: 283381 - DNA, 75 bp, synthetic construct
  source 1..75: mol_type = other DNA
tgtttcaagggcccgaaataaatttacgctggtgactggtaatgatgtatttgaacaccatgctggacatattgc

SEQ ID NO: 283382 - DNA, 75 bp, synthetic construct
  source 1..75: mol_type = other DNA
gggcagccacagagtgctgacgcgacgaaaaaaggtggcgcgaaaacgaaaggccgtggacgtaaggccgcgcag

SEQ ID NO: 283383 - DNA, 75 bp, synthetic construct
  source 1..75: mol_type = other DNA
gagcagacggaatggcagcgcgtggtgctgttcggcaagctcgcggaagtggcaggggaatatctgcgcaagggg

SEQ ID NO: 283384 - DNA, 75 bp, synthetic construct
  source 1..75: mol_type = other DNA
gagcagacggaatggcaccgcgtggtgctgttcggcaagctcgcggaagtggcaggcgaatatctgcgcaagggg

SEQ ID NO: 283385 - DNA, 75 bp, synthetic construct
  source 1..75: mol_type = other DNA
atgtgtccagcgtggtgtgcagttgcgcagtgaggatgatgtggctgacgacgctgaccgcacggaacaggtgca

SEQ ID NO: 283386 - DNA, 75 bp, synthetic construct
  source 1..75: mol_type = other DNA
ctggtcatgcagaagtacagccgccagcaggcacgggaggcagagcagaaaacccgtgcgtaccaggagctggtt

SEQ ID NO: 283387 - DNA, 75 bp, synthetic construct
  source 1..75: mol_type = other DNA
aggtggcgcgaaaacgaaaggccgtggacgtaaggccgcgcagccggagcctcagcagccgtctgaacccgcgta

SEQ ID NO: 283388 - DNA, 75 bp, synthetic construct
  source 1..75: mol_type = other DNA
tcaccgaaagtgaagtggcggtggcggggaacagtaaattccgcttcgtgggggctgatgccttctcgccagacg

SEQ ID NO: 283389 - DNA, 75 bp, synthetic construct
  source 1..75: mol_type = other DNA
tcaccgaaagtgaagtggcggtggccgggaacagtaaattccgcttcgtgggggctgatgccttctcgccagagg

SEQ ID NO: 283390 - DNA, 75 bp, synthetic construct
  source 1..75: mol_type = other DNA
atgagcgcacgttcacaggcactggttcccctcagcgcagagcaacaggccgcatggcgggcggtggcggagacc

SEQ ID NO: 283391 - DNA, 75 bp, synthetic construct
  source 1..75: mol_type = other DNA
ccacatgaaagacaaccgctgggtgcctggctggatgtgtacaccacgcccacagacggatgccactgaacgtac

SEQ ID NO: 283392 - DNA, 75 bp, synthetic construct
  source 1..75: mol_type = other DNA
atggtgcgccggacgcatggagcctgtcggtgaatgccgtgaagatgcccgggcataccgcaacctgccggagcc

SEQ ID NO: 283393 - DNA, 75 bp, synthetic construct
  source 1..75: mol_type = other DNA
tgaccgaaagtgaagtggcggtggccgggaacagtaaattccgcttcgtgggggctgatgccttctcgccagacg

SEQ ID NO: 283394 - DNA, 75 bp, synthetic construct
  source 1..75: mol_type = other DNA
ccgctggataaagacgcactggcgcagtatgacgagcaactggcggaatattacctcacccgtggcagcaataat

SEQ ID NO: 283395 - DNA, 75 bp, synthetic construct
  source 1..75: mol_type = other DNA
cactgatgaacccatttccgaagcgcagcgtgaggcgattattaacagcgcccgtgcgacgtccagttccagttt

SEQ ID NO: 283396 - DNA, 75 bp, synthetic construct
  source 1..75: mol_type = other DNA
catcggttttcacatgcgtgactggtggcagccgacaaaagcaaacttcttcggacacctgaaaaagccgcagat

SEQ ID NO: 283397 - DNA, 75 bp, synthetic construct
  source 1..75: mol_type = other DNA
tcgcagaggcaggtatggcggcaagggaggccggtcatgccgtccgtgagatggagcggtggatggtgccgaaca

SEQ ID NO: 283398 - DNA, 75 bp, synthetic construct
  source 1..75: mol_type = other DNA
ttgggacttgattcgttggtgaagcagacaaccatgagttacccgcctgcaagctggaaacgtatgcgtcgcgaa

SEQ ID NO: 283399 - DNA, 75 bp, synthetic construct
  source 1..75: mol_type = other DNA
actggcgcagtatgacgagcaactggcggaatattacctcacccgtggcagcaataatcgccgggatacctggag

SEQ ID NO: 283400 - DNA, 75 bp, synthetic construct
  source 1..75: mol_type = other DNA
gctgcagaatctggtcgtgcataccctgcctggtgagcgctacggtgtcgccgcaggtggtcgcagactggcagc

SEQ ID NO: 283401 - DNA, 75 bp, synthetic construct
  source 1..75: mol_type = other DNA
cgtggttgatgaaagtggattcacgaaagagaaactggcgcgtcttatcgaaatcaaatccagccgtgatggtcg

SEQ ID NO: 283402 - DNA, 75 bp, synthetic construct
  source 1..75: mol_type = other DNA
tcggcttcgaacaaaccttcaaaaatgccctgactaccctgccgatgggcggtggtaaaggcggcagcgatttcg

SEQ ID NO: 283403 - DNA, 75 bp, synthetic construct
  source 1..75: mol_type = other DNA
gcgatggaatttggtgctcgtgtgatcactgcgtcagactccagcggcactgtagttgatgaaagcggattcacg

SEQ ID NO: 283404 - DNA, 75 bp, synthetic construct
  source 1..75: mol_type = other DNA
ctcagtcaggaggtgctgttgttcctgctcagtttctgcactgcgtgcagcatccacggtgttcagacccgtgag

SEQ ID NO: 283405 - DNA, 75 bp, synthetic construct
  source 1..75: mol_type = other DNA
tggtgaaggtgagcaaaccaactacgtacagggcgcgaacattgccggttttgtgaaggttgccgatgcgatgct

SEQ ID NO: 283406 - DNA, 75 bp, synthetic construct
  source 1..75: mol_type = other DNA
tggtgaaggtgagcaaaccaactacgtgcagggcgcgaatattgcaggctttgtgaaggttgccgatgcgatgct

SEQ ID NO: 283407 - DNA, 75 bp, synthetic construct
  source 1..75: mol_type = other DNA
tcggcttcgagcaaacctttaaaaatgccctgacacccctgccgatgggcggtggtaaaggcggcagcgatttcg

SEQ ID NO: 283408 - DNA, 75 bp, synthetic construct
  source 1..75: mol_type = other DNA
tccgtacccgtagctgggaagataacggtatcacccgttacgtcactgaaattcttgttaagaccacgggcaccg

SEQ ID NO: 283409 - DNA, 75 bp, synthetic construct
  source 1..75: mol_type = other DNA
gttttcacatgcgcgactggtggcagccgacgaaagcaaacttcttcggacacctgaaaaagccgcagattatcg

SEQ ID NO: 283410 - DNA, 75 bp, synthetic construct
  source 1..75: mol_type = other DNA
tgatatcggcgttggtggtcgtgaagtcggctttatggcggggatgatgaaaaagctctccaacaataccgcctg

SEQ ID NO: 283411 - DNA, 75 bp, synthetic construct
  source 1..75: mol_type = other DNA
ggttgacgatcgcaaccaggtacaggtcaaccgtgcatggcgtgtgcagttcagctctgccatcggcccgtacaa

SEQ ID NO: 283412 - DNA, 75 bp, synthetic construct
  source 1..75: mol_type = other DNA
gtcaaccgtgcatggcgtgtgcagttcagctctgccatcggcccgtacaaaggcggtatgcgcttccatccgtca

SEQ ID NO: 283413 - DNA, 75 bp, synthetic construct
  source 1..75: mol_type = other DNA
ttgcagaggctggtatggcggcaagggaggccggtcacgctgtccgtgagatggaacggtggatggtgccgaaca

SEQ ID NO: 283414 - DNA, 75 bp, synthetic construct
  source 1..75: mol_type = other DNA
agcagaatgggcagccacagagtgctgacgcgacgaaaaaagggagcgcgaaaacgaaaggccgtggacgtaagg

SEQ ID NO: 283415 - DNA, 75 bp, synthetic construct
  source 1..75: mol_type = other DNA
acgaaaggccgtggacgtaaggccgcgcagccggagcctcagccgcaaccgccggagggtgacgattacgggttt

SEQ ID NO: 283416 - DNA, 75 bp, synthetic construct
  source 1..75: mol_type = other DNA
cggcaagctcgcggaagtggcaggtgaatatctgcgcaagggcgcgcaggtctacatcgagggacaactccgtac

SEQ ID NO: 283417 - DNA, 75 bp, synthetic construct
  source 1..75: mol_type = other DNA
gtttctgcaccgcgtgcagcatccacggcgttcagacccgcgagtgtggtcacacgtcacgcagcccgctggaca

SEQ ID NO: 283418 - DNA, 75 bp, synthetic construct
  source 1..75: mol_type = other DNA
tggctatgtggactgcgtggcgctcgatgccgccctgctggaaaaactccaggctgtcgccgaacaccttcggga

SEQ ID NO: 283419 - DNA, 75 bp, synthetic construct
  source 1..75: mol_type = other DNA
accattcgtcgtctggtgaccgaaagtgaagtggcggtggcagggaacagtaaattccgcttcgtgggggctgat

SEQ ID NO: 283420 - DNA, 75 bp, synthetic construct
  source 1..75: mol_type = other DNA
cgtctggtgccgatcattcaattaatgaaaaattgacaaatgtcttgaaaagagaattagttgattatgtcagca

SEQ ID NO: 283421 - DNA, 75 bp, synthetic construct
  source 1..75: mol_type = other DNA
cggaaccacaggcggaggccggtacgaaaaaaggaggcgcaaaaacgaaaggccgtggacgtaaggccgcgcagc

SEQ ID NO: 283422 - DNA, 75 bp, synthetic construct
  source 1..75: mol_type = other DNA
tgtggtcacacgtcacgcagtccgctggacacgctggagagcgccatcggttttcacatgcgcgactggtggcag

SEQ ID NO: 283423 - DNA, 75 bp, synthetic construct
  source 1..75: mol_type = other DNA
tgtgaggaatccgacctgctggcagcagaaatgaagctgattgaaccgccccgggtttcctggagagtgttttat

SEQ ID NO: 283424 - DNA, 75 bp, synthetic construct
  source 1..75: mol_type = other DNA
acgggacatgacgacgttcctgtcactcagtcaggaggtgctgttatcactgctcagtttctgcaccgcgtgcag

SEQ ID NO: 283425 - DNA, 75 bp, synthetic construct
  source 1..75: mol_type = other DNA
cgctggattcgctggagagcgctatcggattccacatgcgcgactggtggcagccgacaaaagcaaacttcttcg

SEQ ID NO: 283426 - DNA, 75 bp, synthetic construct
  source 1..75: mol_type = other DNA
tcggtgagtgccgtgaggatgccggaacataccgctgtctgccggagccggacgcggtgctgacggaggcggaag

SEQ ID NO: 283427 - DNA, 75 bp, synthetic construct
  source 1..75: mol_type = other DNA
gcaagggaggccggtcatgctgtccgtgagatggagcggtggatggtgccgaacaaactccgggaggcggcgtga

SEQ ID NO: 283428 - DNA, 75 bp, synthetic construct
  source 1..75: mol_type = other DNA
ggcagagcagaaagcccgtgcgtaccaggcgctggttgctcaggctgaaatcgaactggcgttccattcaccgga

SEQ ID NO: 283429 - DNA, 75 bp, synthetic construct
  source 1..75: mol_type = other DNA
agtggctgtatgccatcgatgtgctgattgaaacacagggcgaggtctgcctccttccccttcccggtgatgcag

SEQ ID NO: 283430 - DNA, 75 bp, synthetic construct
  source 1..75: mol_type = other DNA
cgcacggtgccgtattctgcggagtccgtcagcgaactggcagggtccattcagggcgtcggactgctgcagaat

SEQ ID NO: 283431 - DNA, 75 bp, synthetic construct
  source 1..75: mol_type = other DNA
gatgcggctgaacatgcagagttccatatgaaagacaaccgctgggtgcctggctggatgtgtgcaccacgtcca

SEQ ID NO: 283432 - DNA, 75 bp, synthetic construct
  source 1..75: mol_type = other DNA
tcttaacggtgtccagacccgagagtgttgtcacacgtcacgcagtccgcttgacacgctggaaaccgccatcgg

SEQ ID NO: 283433 - DNA, 75 bp, synthetic construct
  source 1..75: mol_type = other DNA
cgcgactggtggcagccgacaaaagcaaacttcttcggacacctgaaaaagccgcagattatcgcagctctgaat

SEQ ID NO: 283434 - DNA, 75 bp, synthetic construct
  source 1..75: mol_type = other DNA
acgacgttcctgtcactcagccaggaggtgctgttatccctgctcagtttctgcactgcgtgcagcatccacggc

SEQ ID NO: 283435 - DNA, 75 bp, synthetic construct
  source 1..75: mol_type = other DNA
atgaacgcacgttcacgggcactggttcccctcagcgcagagcaacaggccgcatggcgggcggtggcggagacc

SEQ ID NO: 283436 - DNA, 75 bp, synthetic construct
  source 1..75: mol_type = other DNA
atgcagaagtacagctgtcagcaggcacgggaggcagagcagaaagcccgcgcgtaccaggcactggttgctcag

SEQ ID NO: 283437 - DNA, 75 bp, synthetic construct
  source 1..75: mol_type = other DNA
ttcccctcagcgcagaacaacaggccgccatgcaggctgtggctgtcacagaacaacgtcgtcgtcagggacgca

SEQ ID NO: 283438 - DNA, 75 bp, synthetic construct
  source 1..75: mol_type = other DNA
tccaggccgcactgatgcagcaaccggacaaatctctggcactgctggcatggacgctctgcctgaatgtgtttg

SEQ ID NO: 283439 - DNA, 75 bp, synthetic construct
  source 1..75: mol_type = other DNA
cgtcaatatttgtcgggatgattgaggaagatgtgggactgaaaattcgctacatcgctattcagattcttacgg

SEQ ID NO: 283440 - DNA, 75 bp, synthetic construct
  source 1..75: mol_type = other DNA
aagcttaccggactctggcaaacaaagtgccggagatcacgctggccggatgctgggcccatgcccgcaggggct

SEQ ID NO: 283441 - DNA, 75 bp, synthetic construct
  source 1..75: mol_type = other DNA
tctcccctggcggcgttactccatcgcgagttgataaaccgtccggtggtgcatgcagatgagactaccctgaag

SEQ ID NO: 283442 - DNA, 75 bp, synthetic construct
  source 1..75: mol_type = other DNA
atccgcatcctggaagagccgatgaagctcgcacgccagcagcgttttggtaaaaaatgcgaatcgctggccggg

SEQ ID NO: 283443 - DNA, 75 bp, synthetic construct
  source 1..75: mol_type = other DNA
gccggcacatatcctcccgaaaagtgccgttgagccatcagtcatcgcacaggtgatcatcaataaatacggtga

SEQ ID NO: 283444 - DNA, 75 bp, synthetic construct
  source 1..75: mol_type = other DNA
acgggatgttattcatgcagatgaaacgtccctgaggctccttgatacccggaaaggcggtaaatcctgctccgg

SEQ ID NO: 283445 - DNA, 75 bp, synthetic construct
  source 1..75: mol_type = other DNA
gccagatctttctcagcaagccctgaccgaaaaaggcgtgctgttcaactctggcgagttcaacggccttgatca

SEQ ID NO: 283446 - DNA, 75 bp, synthetic construct
  source 1..75: mol_type = other DNA
gtattgatggaatacggcaccggcgcagtcatggcggttccgggtcacgatcagcgcgactacgagtttgcctct

SEQ ID NO: 283447 - DNA, 75 bp, synthetic construct
  source 1..75: mol_type = other DNA
gtttaaagccaaaccggccagccagttgctgacccagccggtgaaacaaggtgcagagctggacttcccgattcc

SEQ ID NO: 283448 - DNA, 75 bp, synthetic construct
  source 1..75: mol_type = other DNA
tgatcatcaataaatacggtgaccacctgcctctgtatcgccagcaacaggtctttgcccgttcagatgtcgggc

SEQ ID NO: 283449 - DNA, 75 bp, synthetic construct
  source 1..75: mol_type = other DNA
atccttccgaaaagtgccgttgagccatcggtcatcgcacaggtggtcatcagtaaatatactgaccatcttccc

SEQ ID NO: 283450 - DNA, 72 bp, synthetic construct
  source 1..72: mol_type = other DNA
atgagtcagaaatacctcattcgcatcgcagagctggaaaggttgctctctgagcaggctgaagccctccgt

SEQ ID NO: 283451 - DNA, 75 bp, synthetic construct
  source 1..75: mol_type = other DNA
gcaggagcaaagatgccctccgggaggtgcattacacaaagcgatcgtctatgcgctggcgcggcgtgtggaact

SEQ ID NO: 283452 - DNA, 75 bp, synthetic construct
  source 1..75: mol_type = other DNA
ggaaagcctgcttgccgatctctgcgcgtaccgggaaagttacccatctacacaagccgataatttgttgttgca

SEQ ID NO: 283453 - DNA, 75 bp, synthetic construct
  source 1..75: mol_type = other DNA
ttataattgatgatgcattaattaagttgctgcattcaatatcatctgatgactcttgttatgtaaaaaaaaaat

SEQ ID NO: 283454 - DNA, 75 bp, synthetic construct
  source 1..75: mol_type = other DNA
atgcttacatctaaaaaagaaatgcagagttttaaaaacaaacaagaggagaatttaacgttattgttaactaat

SEQ ID NO: 283455 - DNA, 75 bp, synthetic construct
  source 1..75: mol_type = other DNA
gatctccacctccggtaactctgcaaacgtgatcaaagcgatcgcggcggcgcgtgagaaggggatgaaagtgat

SEQ ID NO: 283456 - DNA, 75 bp, synthetic construct
  source 1..75: mol_type = other DNA
aacgtgatcaaagcgatcgcagcggcgcgtgagaaggggatgaaagtgatcaccctgaccggtaaagacggcggc

SEQ ID NO: 283457 - DNA, 75 bp, synthetic construct
  source 1..75: mol_type = other DNA
tttccttagccttctggaatatcccgttgcgttgcagaaccagacggttgagtattacttctcgctggaacgttg

SEQ ID NO: 283458 - DNA, 75 bp, synthetic construct
  source 1..75: mol_type = other DNA
ctgacacgtctgccggagtggccggaggagcaactggcagagttgctgcctcttgagggatttaccttctccggg

SEQ ID NO: 283459 - DNA, 75 bp, synthetic construct
  source 1..75: mol_type = other DNA
aacgttgtcctgactgtgatgcccccctgcacttcattcgcgatgaagtcagcgagaagctggaatatattccgg

SEQ ID NO: 283460 - DNA, 75 bp, synthetic construct
  source 1..75: mol_type = other DNA
ctgagctgcttcctgagtgacggagccgtgcccctggacaacaatatctgcgagcgtgctatccgcccggtcgtt

SEQ ID NO: 283461 - DNA, 75 bp, synthetic construct
  source 1..75: mol_type = other DNA
gcagcatctttcttcaaacagttgccgaaggatttcttccagccagccgaagactatatccagactccgggtaat

SEQ ID NO: 283462 - DNA, 75 bp, synthetic construct
  source 1..75: mol_type = other DNA
atgctgctggtgagcaaatcactgttacctgctctctgaactacaacattggtcagattgccctgtcgttctcca

SEQ ID NO: 283463 - DNA, 75 bp, synthetic construct
  source 1..75: mol_type = other DNA
tactcccctgtatggatatctccgctctcaacaccacgaatgacatcgaaaaactgcgtgccatggcacttgcca

SEQ ID NO: 283464 - DNA, 75 bp, synthetic construct
  source 1..75: mol_type = other DNA
gaccagagtataggtttgttaataaagctcaaaaataggatgaagacagaagttgatggtgaaatcactgagaga

SEQ ID NO: 283465 - DNA, 75 bp, synthetic construct
  source 1..75: mol_type = other DNA
ggaaggtgaaaaagcagaagctggccgagaaagcggcccgggaagcagagctggcggcaaaaaaagcgcaggcca

SEQ ID NO: 283466 - DNA, 75 bp, synthetic construct
  source 1..75: mol_type = other DNA
cgcaagtgtgaacgtgtaatgccccagcatgttgatatgcgcatgcctcagtggcgaaagtctggcttcacccgg

SEQ ID NO: 283467 - DNA, 75 bp, synthetic construct
  source 1..75: mol_type = other DNA
gcgcagcggcttagtgacgatgtgcgaagtaagcgtaaaaaacagccatcggaacgggaagagagggccgggcta

SEQ ID NO: 283468 - DNA, 75 bp, synthetic construct
  source 1..75: mol_type = other DNA
actatgcttcaattctctgtgatgatggtctggaagctccggtaaaacccacgttgatatcaacagttactggct

SEQ ID NO: 283469 - DNA, 75 bp, synthetic construct
  source 1..75: mol_type = other DNA
ggcaaaaaggaatactggaactacaggcggcgggactcgtcgtctccgcccatggaggccagcgtaaatccgtcg

SEQ ID NO: 283470 - DNA, 75 bp, synthetic construct
  source 1..75: mol_type = other DNA
tgttactggaagacgtggcgcagcggaatatcccgctctcgcataaaaaactgcgcagggcgctgaaggccatca

SEQ ID NO: 283471 - DNA, 75 bp, synthetic construct
  source 1..75: mol_type = other DNA
agatcgatgatggccggtgcgtcagtggcgtgcggtgatcttgttatgaccgtgcaggacgggcggttggtatcg

SEQ ID NO: 283472 - DNA, 75 bp, synthetic construct
  source 1..75: mol_type = other DNA
actaaaggcggcgggactcgtcgtctctgcccatggaggccagcgtaaatccgtcgcacagacggttgcggcctg

SEQ ID NO: 283473 - DNA, 75 bp, synthetic construct
  source 1..75: mol_type = other DNA
caaaagggaagcgcgaatcgtaaaaaggccagaatccgtcttgcggccttacacgaacgggtggcgaatgcccgt

SEQ ID NO: 283474 - DNA, 75 bp, synthetic construct
  source 1..75: mol_type = other DNA
tatctttgcaaagtctgggcgagaacccgcgcagcgtggaagagaaaagggatccgcgtctttggtttccgcgtg

SEQ ID NO: 283475 - DNA, 75 bp, synthetic construct
  source 1..75: mol_type = other DNA
ggcgctttctggctatggccgtattgcatcgctggcagtgcatctgaaaacgccgatccccggttggacagctta

SEQ ID NO: 283476 - DNA, 75 bp, synthetic construct
  source 1..75: mol_type = other DNA
tgccgtcgcaggtcatggcagcgaagaaaaagacaagtgacctcgtgaataggatgaaggctgctttttcggggc

SEQ ID NO: 283477 - DNA, 75 bp, synthetic construct
  source 1..75: mol_type = other DNA
aaaaatttgagcgaagggagcaggaagacttaactttgtggatttgcccctatatttccagacacctgttatcac

SEQ ID NO: 283478 - DNA, 75 bp, synthetic construct
  source 1..75: mol_type = other DNA
aaaaaaatcgctgatttattaaatgtccctgtctcatatttttacacacccgaagatgacttggcagaaattatt

SEQ ID NO: 283479 - DNA, 75 bp, synthetic construct
  source 1..75: mol_type = other DNA
ctttttgcaagaaaatggatgctcttaacggtggtatgagcagagatgtaaagaatcgtacatcagatagtatag

SEQ ID NO: 283480 - DNA, 75 bp, synthetic construct
  source 1..75: mol_type = other DNA
gcgtgttcttacagattggtgttgccactgccgttatcgcagtgctgatgctgctgaccgcgccgaaactgcatc

SEQ ID NO: 283481 - DNA, 75 bp, synthetic construct
  source 1..75: mol_type = other DNA
cggcattaatgaactgattgatgacctgatggatcacatcagtctggaaaacaatgtactgttcccacgcgcgct

SEQ ID NO: 283482 - DNA, 75 bp, synthetic construct
  source 1..75: mol_type = other DNA
ctttccagccacatgatgaaagaagagcagatcctcttcccgatgatcaaacaaggcatgggcagccaggcaatg

SEQ ID NO: 283483 - DNA, 75 bp, synthetic construct
  source 1..75: mol_type = other DNA
ttcaatcaattaaaaacagcgaagctggcgttgatgttcataaggccaaagacgccgatgatttatttgataaat

SEQ ID NO: 283484 - DNA, 75 bp, synthetic construct
  source 1..75: mol_type = other DNA
cgctgattggcgcagcaaaaccaggaaaggccagtctcgagatctggcagcggcctgtttctacatggacaaagg

SEQ ID NO: 283485 - DNA, 75 bp, synthetic construct
  source 1..75: mol_type = other DNA
tatcggtgatgaacccgcaggtttactcggcaccgataccggcatgagcccgactgaatacatcatgcaggcgct

SEQ ID NO: 283486 - DNA, 75 bp, synthetic construct
  source 1..75: mol_type = other DNA
acacgttgggcagggtgttcacttgcgcacaacattgccgatcagtgctgtcccgcaggaacaggcattcagtgt

SEQ ID NO: 283487 - DNA, 75 bp, synthetic construct
  source 1..75: mol_type = other DNA
tcatcctgatgctcgaagccattatcttcttcgtgctttatagccagatgccaacgtcactgaacttctttgcga

SEQ ID NO: 283488 - DNA, 75 bp, synthetic construct
  source 1..75: mol_type = other DNA
cagaaagcgttagtttgaatgctttcaaacaaccgaaagcgttctatctcatcttctcgattgagttatgggaac

SEQ ID NO: 283489 - DNA, 75 bp, synthetic construct
  source 1..75: mol_type = other DNA
ggctgctgcacaatcaggaagttgcgcgtatggcgctgggcgttgttgccttcggtatcgtggttatcttcggta

SEQ ID NO: 283490 - DNA, 75 bp, synthetic construct
  source 1..75: mol_type = other DNA
ttttaccgtacttaccagcccggatgtggcgcaggccacgagatgtggggccatatggcggaaacggtcgaggct

SEQ ID NO: 283491 - DNA, 75 bp, synthetic construct
  source 1..75: mol_type = other DNA
catatcctgattctacaggcgagtttaacggaaccgttccttttgccgacagcgccagcgtacccgtctatcagg

SEQ ID NO: 283492 - DNA, 75 bp, synthetic construct
  source 1..75: mol_type = other DNA
ggcggacgtcaaaaaccgtaaaaccagcttcctcgacgcggtgctgagcggcgtgtttaccgtgccgggtgacgg

SEQ ID NO: 283493 - DNA, 75 bp, synthetic construct
  source 1..75: mol_type = other DNA
tggtaaatatacgtaaaatcatttccccttattttggtttttcatctgatgcctatccgtttaatgatggcacat

SEQ ID NO: 283494 - DNA, 75 bp, synthetic construct
  source 1..75: mol_type = other DNA
agcatacccgtctaccagggcagtgtctttctggatcctacaaagacgcatgaggtagcgtttaccgctaaaccg

SEQ ID NO: 283495 - DNA, 75 bp, synthetic construct
  source 1..75: mol_type = other DNA
tcgctggtggcctggccgcagattgatgcgcagcaaaccctcccactgctctacctgcttacctcgaccgggtat

SEQ ID NO: 283496 - DNA, 75 bp, synthetic construct
  source 1..75: mol_type = other DNA
aaaggcgatcgcttttacgatctgatttccgcgctgcataaatcagtacgtggcagtgcacccgatgcggcgctt

SEQ ID NO: 283497 - DNA, 75 bp, synthetic construct
  source 1..75: mol_type = other DNA
gcgcgctatcgaagccgggcatctgcattctatgatcctctgggggccaccgggtaccggcaaaacaaccctcgc

SEQ ID NO: 283498 - DNA, 75 bp, synthetic construct
  source 1..75: mol_type = other DNA
gctggtgaggtttacttcccgccagaaatagcacaaacacgctactatttcccaacaaacagagggcttgaaggc

SEQ ID NO: 283499 - DNA, 75 bp, synthetic construct
  source 1..75: mol_type = other DNA
gcgcgcctgctcggccccattttgcagcgccacgacctgcagttggtctccggctggtattccggtcgcctgttg

SEQ ID NO: 283500 - DNA, 75 bp, synthetic construct
  source 1..75: mol_type = other DNA
atcataataagataaataagatacttccttttaaaaattgttttgcgcatcctactttgatgttcaagaaagatg

SEQ ID NO: 283501 - DNA, 75 bp, synthetic construct
  source 1..75: mol_type = other DNA
agcatcaatcaagatggcagagttgctcaaacaaagaggctttatgcagttcaaagagttaggtaattcagccga

SEQ ID NO: 283502 - DNA, 75 bp, synthetic construct
  source 1..75: mol_type = other DNA
tgttcgccgctggcgctcatggtggcgttggtcagaaaagaaaatatacaggtgaagattatataaatcatccgg

SEQ ID NO: 283503 - DNA, 75 bp, synthetic construct
  source 1..75: mol_type = other DNA
aaacgccgtgggctgtgcgccaggccgttcttcagctgacctatgaatatccgtttgagcagcaggaaaaagcca

SEQ ID NO: 283504 - DNA, 75 bp, synthetic construct
  source 1..75: mol_type = other DNA
taatttcgcgccgggcgccggtgcggtagcaaccggtacggcttccccggatgtgcgcagggttcaaattgggga

SEQ ID NO: 283505 - DNA, 75 bp, synthetic construct
  source 1..75: mol_type = other DNA
cactggcatcaagtgccgaaatcgaaaaagccctgaccaaagagttcggctggagtaaggcggataaaaattatc

SEQ ID NO: 283506 - DNA, 75 bp, synthetic construct
  source 1..75: mol_type = other DNA
ctaatattgcagccaatttttcaacagtgcagaacggttatacctcatttggggtgagtgcttcaggtggtgcaa

SEQ ID NO: 283507 - DNA, 75 bp, synthetic construct
  source 1..75: mol_type = other DNA
gataatttccgcttcacatacttcaaattccctgcgaatgctgatttacccgttgtgttctatatcggtgacgat

SEQ ID NO: 283508 - DNA, 75 bp, synthetic construct
  source 1..75: mol_type = other DNA
tggttgcgcctgatgaaagctatgtgacacacgcttttggtgacagcaatagttatgcgtttacccatgttgaaa

SEQ ID NO: 283509 - DNA, 75 bp, synthetic construct
  source 1..75: mol_type = other DNA
taccattccgttggtgtggctggtgagcgaaccaagcaggataacgcgcagggtatcgacaactcttcgggggca

SEQ ID NO: 283510 - DNA, 75 bp, synthetic construct
  source 1..75: mol_type = other DNA
tccgtgaagaagtgaagaagggttccggaaatagcggtcgccgtcaggccaaagtcgttctggaggatagcggcc

SEQ ID NO: 283511 - DNA, 75 bp, synthetic construct
  source 1..75: mol_type = other DNA
cactgaggcgatgaagaaggaatttgataaagatctcttgaattttccgccaaaaaatgatctaaatactcttga

SEQ ID NO: 283512 - DNA, 75 bp, synthetic construct
  source 1..75: mol_type = other DNA
tgtccgggcaatgttgccagatgcgttccaggccatgttacctgcaccgctggcctcggtagcctctaccgttaa

SEQ ID NO: 283513 - DNA, 75 bp, synthetic construct
  source 1..75: mol_type = other DNA
ctggtggttactggatttccacgccagctaattacattgtggctaaccccagcaccctgaccggttctatcggta

SEQ ID NO: 283514 - DNA, 75 bp, synthetic construct
  source 1..75: mol_type = other DNA
accactgcggcacaaatccgcgacgctcgccttgacccgaaagtgaaagcgattgttctgcgtgttaatagccca

SEQ ID NO: 283515 - DNA, 75 bp, synthetic construct
  source 1..75: mol_type = other DNA
ttggcgttatcctcctcgatgtacataatccgtctgaaagtcagattcttcttcaagcaaaagaaaaaataagtt

SEQ ID NO: 283516 - DNA, 75 bp, synthetic construct
  source 1..75: mol_type = other DNA
cgccagctaaaccacgtcgaagcagcagaactgctgcgtgtgactgctgaagcaatccagagcgaagcgcaggag

SEQ ID NO: 283517 - DNA, 75 bp, synthetic construct
  source 1..75: mol_type = other DNA
cgccagcttaaccatgttgaggcggcagagctgctgcgtatcgcagctgaaaacatccagaacgaagcgcaggag

SEQ ID NO: 283518 - DNA, 75 bp, synthetic construct
  source 1..75: mol_type = other DNA
ggctacccggcgattgctatttctgacgttagtcatatttcctgcgtcggtaatgatttcggtttcaatgatatt

SEQ ID NO: 283519 - DNA, 75 bp, synthetic construct
  source 1..75: mol_type = other DNA
tgcaaacgctggacggcgaggcgctgacgctgggatcggacgcgctggattcgcctggttttgacctgctggcgc

SEQ ID NO: 283520 - DNA, 75 bp, synthetic construct
  source 1..75: mol_type = other DNA
cgcgaagaaaagagcgccatttcccaccgtggtcaggcattgaaactgctgctggacgctttacgtaatggttaa

SEQ ID NO: 283521 - DNA, 75 bp, synthetic construct
  source 1..75: mol_type = other DNA
cgccagctaaaccacgtcgaagcagcagaactactgcgtgtaactgctgaagcaatccagaacgaagcacaggag

SEQ ID NO: 283522 - DNA, 75 bp, synthetic construct
  source 1..75: mol_type = other DNA
gcatcgctactggtgcccagcatgatcctctttgaatcctttttaagcttcctggggctgggtacacaagagccg

SEQ ID NO: 283523 - DNA, 75 bp, synthetic construct
  source 1..75: mol_type = other DNA
agccggtggcaaagtgctttcctgtggcaacggcggctcccattgcgacgctatgcactttgccgaagagttgac

SEQ ID NO: 283524 - DNA, 75 bp, synthetic construct
  source 1..75: mol_type = other DNA
cggtcctgttagcagacagctttaaagctggtggcaaagtgctttcctgcggcaacggcggctcccattgcgacg

SEQ ID NO: 283525 - DNA, 75 bp, synthetic construct
  source 1..75: mol_type = other DNA
gtgaactggcgctctctatccctcgcgcttcggctctgtttcgtaaatatgatatggattactgctgtggcggta

SEQ ID NO: 283526 - DNA, 75 bp, synthetic construct
  source 1..75: mol_type = other DNA
cttgctggtacgcgttgctattggtggacgtatctcactcatggtcggggttgctgcggcactggtcgcagtggt

SEQ ID NO: 283527 - DNA, 75 bp, synthetic construct
  source 1..75: mol_type = other DNA
cttgtggtgacgctgttttgtttcaactttatcggcgatggcttgcgtgatgccctcgacccgaaagatcgttaa

SEQ ID NO: 283528 - DNA, 75 bp, synthetic construct
  source 1..75: mol_type = other DNA
ccctgggaaaaacattcccacgctacaccgctgtgctgaatttggtgccatgcatgtgcatcacggtcatttacc

SEQ ID NO: 283529 - DNA, 75 bp, synthetic construct
  source 1..75: mol_type = other DNA
actggcgataacgtggtgatccgtcagtcccacggtggttcaggcaaacaagcgacgtcggtaatcaatggtatt

SEQ ID NO: 283530 - DNA, 75 bp, synthetic construct
  source 1..75: mol_type = other DNA
cggaagcctacctgaaatatctctactcgccagaaggtcaggaaattgcagcgaaaaactactaccgtccgcgcg

SEQ ID NO: 283531 - DNA, 75 bp, synthetic construct
  source 1..75: mol_type = other DNA
accatcgatgaagagtttggcggctggacgaaggcgcaaaaagagcatttttctaacggtggtatgttcgaccaa

SEQ ID NO: 283532 - DNA, 75 bp, synthetic construct
  source 1..75: mol_type = other DNA
ctttcaatttattttcagtccccagttatcattaagaagatacagacatttaatggaaaagttaaattcagacag

SEQ ID NO: 283533 - DNA, 75 bp, synthetic construct
  source 1..75: mol_type = other DNA
gacaggatgtcagaatacgcacggtattaataccgatttggctatcagctcaggtctgaatgcttataaagccgc

SEQ ID NO: 283534 - DNA, 75 bp, synthetic construct
  source 1..75: mol_type = other DNA
gcccgttaatcatgcaaccgtataaactattgtccatttttgaacaatgggcatctgaagaaggcattactgacc

SEQ ID NO: 283535 - DNA, 75 bp, synthetic construct
  source 1..75: mol_type = other DNA
gatgaagcggagcgcgtgcgtttctgggccggtcgcaaaaatgcttttccggcggtaggacgtatctccccggat

SEQ ID NO: 283536 - DNA, 75 bp, synthetic construct
  source 1..75: mol_type = other DNA
tgtttaccggatcggaaggtatgctcggcgtgaccaccgaagtaacggtgaagctgttgccgaagccgcccgtgg

SEQ ID NO: 283537 - DNA, 75 bp, synthetic construct
  source 1..75: mol_type = other DNA
actacctttcatgcagtcaaggcggcgtttgatcctgatggtttgctgaaccctgggaaaaacatccccacactg

SEQ ID NO: 283538 - DNA, 75 bp, synthetic construct
  source 1..75: mol_type = other DNA
accattgatgaagagtttggcggctggacgaaagcacaaaaagagcattttgctaacggtggtacgttcgatcag

SEQ ID NO: 283539 - DNA, 75 bp, synthetic construct
  source 1..75: mol_type = other DNA
tgaacgtggtcgaattgataaaaactggatcaaacgtctgccggataactccgcgccgtacacctccaccattgt

SEQ ID NO: 283540 - DNA, 75 bp, synthetic construct
  source 1..75: mol_type = other DNA
aagcctatctgaagtatctctactcaccagagggtcaggagattgcggcccaaaaccattatcgcccgcgcgatc

SEQ ID NO: 283541 - DNA, 75 bp, synthetic construct
  source 1..75: mol_type = other DNA
gtagcccgcccggaaattcgctttctgatgcgacttgcgctccgtctggggcgcaccttatccgaactgcggcac

SEQ ID NO: 283542 - DNA, 75 bp, synthetic construct
  source 1..75: mol_type = other DNA
atgcgacttgcgctccgtctggggcgcaccttatccgaactgcggcacagcctgagtgtgagcgaggcgatgatg

SEQ ID NO: 283543 - DNA, 75 bp, synthetic construct
  source 1..75: mol_type = other DNA
ctttatgctgtgtacctcacacgccatgatgcgcgatctggctgagcagttccgcgccaccatgacgcttcccgt

SEQ ID NO: 283544 - DNA, 75 bp, synthetic construct
  source 1..75: mol_type = other DNA
actcgcggtattgtatttgatgttgcagttgatttgagaattaactcacagacctttggcaaatggtttggcatc

SEQ ID NO: 283545 - DNA, 75 bp, synthetic construct
  source 1..75: mol_type = other DNA
gctccggcgatgttgccgcgcgatccgctggagtcgttgcgagtgcgtaaaattgaggcgctggccgacggtatt

SEQ ID NO: 283546 - DNA, 75 bp, synthetic construct
  source 1..75: mol_type = other DNA
ctgctggggcgaggatgaggataagtcggaggtggatccgtttgcggcgctggaagacgcgctgagctttgcagc

SEQ ID NO: 283547 - DNA, 75 bp, synthetic construct
  source 1..75: mol_type = other DNA
gctcctggtccaatcaaaccgtcgatggtgatatcagcacctgcgtcagcgttgcggaagattctcaggcatggc

SEQ ID NO: 283548 - DNA, 75 bp, synthetic construct
  source 1..75: mol_type = other DNA
gggcaacaagaagatacgaaccttgctggtccagtgcgccagagtatttatacaaaaactggaacaccagtcagg

SEQ ID NO: 283549 - DNA, 75 bp, synthetic construct
  source 1..75: mol_type = other DNA
taaagagctggaattccagttgaaacgaaagctggacgaagatgaagtaggtcagcgtttactgagcattccctg

SEQ ID NO: 283550 - DNA, 75 bp, synthetic construct
  source 1..75: mol_type = other DNA
gagattaatcagccgggttacagctactggtacgaatgtacctcgcgccatttcactctcgcgctgacgccgctt

SEQ ID NO: 283551 - DNA, 75 bp, synthetic construct
  source 1..75: mol_type = other DNA
gggcaactgttgcagcaatttgtcagcgccggtaacgcgcttcttgtggcaaccagcagcttctgggaaggggtg

SEQ ID NO: 283552 - DNA, 75 bp, synthetic construct
  source 1..75: mol_type = other DNA
taatggcgcaaaagcccggtagctggatcttcacctcagcaacgctgtcggtgaacgacgatctgcatcatttca

SEQ ID NO: 283553 - DNA, 75 bp, synthetic construct
  source 1..75: mol_type = other DNA
tgatagaggaattatttggaatgatcagaagataggaataaaatggccaaatgttggaaatttgccattgttatc

SEQ ID NO: 283554 - DNA, 75 bp, synthetic construct
  source 1..75: mol_type = other DNA
cggtgaactcgacaacttgcaggctatcaaggtgaaagaaggcttttgcctcattgggaatcagagcggaacaaa

SEQ ID NO: 283555 - DNA, 75 bp, synthetic construct
  source 1..75: mol_type = other DNA
attttggtaatgaacgtgaaccggacacattcgaaagtccggatgactgtaagaagtgtcgtagaaaattaaata

SEQ ID NO: 283556 - DNA, 75 bp, synthetic construct
  source 1..75: mol_type = other DNA
gagcgtgagccggatacattcgaaagtccagatgattgtaaaaagtgtcgtagaaaattaaataagggaggtggt

SEQ ID NO: 283557 - DNA, 75 bp, synthetic construct
  source 1..75: mol_type = other DNA
atggaaatgcgtcgggtatcttacagttatcgctatattcaggaagtggtttatatcgataacaacgttccccag

SEQ ID NO: 283558 - DNA, 75 bp, synthetic construct
  source 1..75: mol_type = other DNA
ggaaaaatgggattacttgcggtttatacgggtactgttttcatattatctcttccgttaactctgatatatatt

SEQ ID NO: 283559 - DNA, 75 bp, synthetic construct
  source 1..75: mol_type = other DNA
tgttctggtgtatttctctctgcggaatggttttgtatccggttgccagatggtgtattgaaaatacagccctgt

SEQ ID NO: 283560 - DNA, 75 bp, synthetic construct
  source 1..75: mol_type = other DNA
gatggtcgcgaatccgtgggcttcctggtaacgatcaaagagttgctggaagatccgacgcgtctgctgctggac

SEQ ID NO: 283561 - DNA, 75 bp, synthetic construct
  source 1..75: mol_type = other DNA
gagctggcagtcaaaggccgtgacggcaagctgacggttgaagatctgaccggtggtaacttcaccatcaccaac

SEQ ID NO: 283562 - DNA, 75 bp, synthetic construct
  source 1..75: mol_type = other DNA
gcaccggagtggggggacgtctgacccgtgaagatgtggaaaaacatctggcgaaagccccggtgaaagagtctg

SEQ ID NO: 283563 - DNA, 75 bp, synthetic construct
  source 1..75: mol_type = other DNA
atttaacccgttaggaaaagtgccggtgctggtgaccgaagagggcgaatgttggtttgattcgccgatcatcgc

SEQ ID NO: 283564 - DNA, 75 bp, synthetic construct
  source 1..75: mol_type = other DNA
gacctttggcaaatggtttggaatcattttatctgaagaaaataaacgacagttatggttgccggaaggatttgc

SEQ ID NO: 283565 - DNA, 75 bp, synthetic construct
  source 1..75: mol_type = other DNA
agttcgtcacaaaacgttctgagaggtctacattttcaaaaaacaaaacctcagggaaaactcgttacggtaacc

SEQ ID NO: 283566 - DNA, 75 bp, synthetic construct
  source 1..75: mol_type = other DNA
ctgctggggcgaggatgaggataagccagagccggatccttttgcgaccctggaagacgcgctcagccttgcagc

SEQ ID NO: 283567 - DNA, 75 bp, synthetic construct
  source 1..75: mol_type = other DNA
cctctcgtggatgaaaggcgcgcagaccattgaagccaccagcgttaaacaactggcagatgccggagtacgtgt

SEQ ID NO: 283568 - DNA, 75 bp, synthetic construct
  source 1..75: mol_type = other DNA
gtgggggctatttgcgccaccggcaaaatcatccctgcgggagatccactgtctgcgtggtacgccgcgtcgttg

SEQ ID NO: 283569 - DNA, 75 bp, synthetic construct
  source 1..75: mol_type = other DNA
ttgttgatcaaccctggccttcggcatcactttacgactacccgccgcaagaacagtggaacgctttccagaaac

SEQ ID NO: 283570 - DNA, 75 bp, synthetic construct
  source 1..75: mol_type = other DNA
tacttgttaaacgcgctgtattccacaagcaaatttcctcagtggatgaactgacaaaattaacgacagaaatcg

SEQ ID NO: 283571 - DNA, 75 bp, synthetic construct
  source 1..75: mol_type = other DNA
caagcaaatttcctcagtggatgaactgacaaaattaacgacagaacttgccagttattgcgctgatgtatccag

SEQ ID NO: 283572 - DNA, 75 bp, synthetic construct
  source 1..75: mol_type = other DNA
agcgccgttgaaaattatctcgacagcctgacgcaggttttgcaggttcctggcccgacgggtgccagcgcagcc

SEQ ID NO: 283573 - DNA, 75 bp, synthetic construct
  source 1..75: mol_type = other DNA
tggctggcaggcggcgcgttactgctgctgggcgcaggtctgtgggggctattcgcgcccccggcaaaatcctcc

SEQ ID NO: 283574 - DNA, 75 bp, synthetic construct
  source 1..75: mol_type = other DNA
aaaattaactggcagggcaaaaaaggcgttgttgatctgcaatcgtgcggctatcaggtgcgcaaaaatgaaaac

SEQ ID NO: 283575 - DNA, 75 bp, synthetic construct
  source 1..75: mol_type = other DNA
acggtcgccagcatctcgacgaaacccaggtgcgggtgtttggtcagcatttgatgcaggggatctacaccaccc

SEQ ID NO: 283576 - DNA, 75 bp, synthetic construct
  source 1..75: mol_type = other DNA
aaagcaacaacgtcatgatgttgacgcacgccatcacgcgttatggcatttctaccgacgatccaaacaaatggc

SEQ ID NO: 283577 - DNA, 75 bp, synthetic construct
  source 1..75: mol_type = other DNA
tcacagatcatctggaatgacgcccgttcattgccgctaccagagtctgagctggtcaacaaggccatggcgttg

SEQ ID NO: 283578 - DNA, 75 bp, synthetic construct
  source 1..75: mol_type = other DNA
aactcattcataccaactcgcttccgctggttatttcactcaatggtcatacgctgcaagagtatatgcaggaga

SEQ ID NO: 283579 - DNA, 75 bp, synthetic construct
  source 1..75: mol_type = other DNA
gttttgcatatcctacatcaactgcacgccaagcaactcgatgcagacaactatttaaaagcactcgaaaagctc

SEQ ID NO: 283580 - DNA, 75 bp, synthetic construct
  source 1..75: mol_type = other DNA
attctcaaggccagctctatattgtacctacgccaatcggtaatctggcggacattacccaacgtgcgcttgagg

SEQ ID NO: 283581 - DNA, 75 bp, synthetic construct
  source 1..75: mol_type = other DNA
acccgccgatgccctgcgtacgctggcgctgttacaggccgagcttccgctgaaaaaagcggcggcgctggcagc

SEQ ID NO: 283582 - DNA, 75 bp, synthetic construct
  source 1..75: mol_type = other DNA
ttgtgacctgcgcactggcaaacaagctggccagagtagcttgggcgtttacgacgcgacaacagacgttcgcat

SEQ ID NO: 283583 - DNA, 75 bp, synthetic construct
  source 1..75: mol_type = other DNA
ggcgacatgcccggcaacaaccatcgcgatggaagcctgtggcggttctcactttatggcacgcaagctggaaga

SEQ ID NO: 283584 - DNA, 75 bp, synthetic construct
  source 1..75: mol_type = other DNA
gctggcttagccatctttggtggctggctggcagcttcctttggcatgaatatggaagccatgttcaccgggggg

SEQ ID NO: 283585 - DNA, 75 bp, synthetic construct
  source 1..75: mol_type = other DNA
atgaaacaacaccaatcggcggataattctcaaggtcagctctacattgtaccgacgccaatcggcaatctggcg

SEQ ID NO: 283586 - DNA, 75 bp, synthetic construct
  source 1..75: mol_type = other DNA
taataggagctggagtaatactaatggaaaatataccagcgggacattatgtaatcggctctaaaccgattgtaa

SEQ ID NO: 283587 - DNA, 75 bp, synthetic construct
  source 1..75: mol_type = other DNA
gctcagcaactaccaacccacggctaaaaaagagcactttcaagcagccagcacccaaggcaaaatcgactcact

SEQ ID NO: 283588 - DNA, 75 bp, synthetic construct
  source 1..75: mol_type = other DNA
atacctttgcccaaaacgatcagcctgataccgctcactcgcaattaaatcagcgcattgttttattactaagcg

SEQ ID NO: 283589 - DNA, 75 bp, synthetic construct
  source 1..75: mol_type = other DNA
caacgctgttggggatcagtaaacgaggcaacaaaaagatccgaacattgctggttcagtgcgccagagtgttca

SEQ ID NO: 283590 - DNA, 75 bp, synthetic construct
  source 1..75: mol_type = other DNA
caaattggccgattgggtcagggatttactgtgtcggaaaagcaactttgtcgtcacttgtgctctggcaaacaa

SEQ ID NO: 283591 - DNA, 75 bp, synthetic construct
  source 1..75: mol_type = other DNA
gaaacacgcctggcaatatcaacctgagtaatgatgtcaccgtcaatgtcaacgacgcctctggatatgcaaaag

SEQ ID NO: 283592 - DNA, 75 bp, synthetic construct
  source 1..75: mol_type = other DNA
tggaaaatatgatccgggtgggtgtgatttcagacgttgatttaaaaaactggcgtgtaagagtgaccagcggca

SEQ ID NO: 283593 - DNA, 75 bp, synthetic construct
  source 1..75: mol_type = other DNA
tacgtcaaacggcgtccaggctgacgaccatgatcatggtggtgttcagagtggtaatagcaggactaaggggac

SEQ ID NO: 283594 - DNA, 75 bp, synthetic construct
  source 1..75: mol_type = other DNA
aaattctggtgcccgccatcgctgggcgaacaagttttgttgggatgtatcggcggcaatcctgaaacagccgtt

SEQ ID NO: 283595 - DNA, 75 bp, synthetic construct
  source 1..75: mol_type = other DNA
ctatcaattctttagggtgcagttcttttaggaggtctaccctcctgggtaagaaggaagatgttctgcaatgct

SEQ ID NO: 283596 - DNA, 75 bp, synthetic construct
  source 1..75: mol_type = other DNA
ggaacgtgggtgatcacttctttcgggtggcgaatgccatctcgatcccgcttaccggctggctggcaaagcgcg

SEQ ID NO: 283597 - DNA, 75 bp, synthetic construct
  source 1..75: mol_type = other DNA
gaacgaaatcgtgatcagcgcgccggacggcgcggtgttccgctacgacgtggacgcaggcgcactgagcgccag

SEQ ID NO: 283598 - DNA, 75 bp, synthetic construct
  source 1..75: mol_type = other DNA
atatcacgcacagcggcggcgatttcacctcaaacggcatcacagtgcatacgcataaacacggtggcgttaaag

SEQ ID NO: 283599 - DNA, 75 bp, synthetic construct
  source 1..75: mol_type = other DNA
tggcggcaacccggaaaccgccatgataattggcagcctgtggagtgatgccagtccggcacccggcaaaagcct

SEQ ID NO: 283600 - DNA, 75 bp, synthetic construct
  source 1..75: mol_type = other DNA
ttcagcttctgggtgccgccgtctgttggcgagcaggtatggttcctgtgccttgggggtaacactaccgctgcg

SEQ ID NO: 283601 - DNA, 75 bp, synthetic construct
  source 1..75: mol_type = other DNA
cgcctgtcgtggaatgcacagaccttctgagaacagcgacgcttgacgtcacaaaagggggaacgatgagcggca

SEQ ID NO: 283602 - DNA, 75 bp, synthetic construct
  source 1..75: mol_type = other DNA
cggcatgaaaacggccaccctgcaggcatctgtcagcgtgacactggacacgcccgtcgtggaatgcacaaacct

SEQ ID NO: 283603 - DNA, 75 bp, synthetic construct
  source 1..75: mol_type = other DNA
gggggaaagatgagcggcaatatcacgcacagcggcggcaatttcacctcaaacggcatcacagtgcatacgcat

SEQ ID NO: 283604 - DNA, 75 bp, synthetic construct
  source 1..75: mol_type = other DNA
tcacgattagtcaatatgggaattgataagttttgcgctgaaaataataccagcattacgaataaagaacggcaa

SEQ ID NO: 283605 - DNA, 75 bp, synthetic construct
  source 1..75: mol_type = other DNA
tctgaacctgcccacactggatgaagccgtgaacaccctgaaaccctggtggccgggattatttgacggtgacac

SEQ ID NO: 283606 - DNA, 75 bp, synthetic construct
  source 1..75: mol_type = other DNA
aaaagccgctgcagcaaaagcggccgcagaggcagatgatattttcggtgagctaagctctggtaagaatgcacc

SEQ ID NO: 283607 - DNA, 75 bp, synthetic construct
  source 1..75: mol_type = other DNA
gcagagctgacagcaaaaaaagcgcaggccagacaggcgctgtccatttatctgaacctgcccacactggatgag

SEQ ID NO: 283608 - DNA, 75 bp, synthetic construct
  source 1..75: mol_type = other DNA
atcacacaggaagaagaacagtatgcgcaggcgcgcctggaaaaggtgcgcagacagaaccggatcaaggatgag

SEQ ID NO: 283609 - DNA, 75 bp, synthetic construct
  source 1..75: mol_type = other DNA
aagcgtatgcggcagagcgtctggagaaaatccgccgccagaaccggataaaggcagaacttcaggccgtactta

SEQ ID NO: 283610 - DNA, 75 bp, synthetic construct
  source 1..75: mol_type = other DNA
caaagcggaatatcccgctctcgcataaaaaactgcgccgggcgctgaaggccattacccgttcagaacgctatc

SEQ ID NO: 283611 - DNA, 75 bp, synthetic construct
  source 1..75: mol_type = other DNA
gcactaaagatattggagcatggaaaggtgatgaaaaaatagtttatccctcacgaatagtcaatatgggaattg

SEQ ID NO: 283612 - DNA, 75 bp, synthetic construct
  source 1..75: mol_type = other DNA
attctgagtacagtcacccggcagagcactaaagatattggagcatggaaaggtgatgaaaaaatagtttatccc

SEQ ID NO: 283613 - DNA, 75 bp, synthetic construct
  source 1..75: mol_type = other DNA
acaaatttttcgagaaacatattagtagtaatattgacataaataaattacagaatgatgtgggaagctatattt

SEQ ID NO: 283614 - DNA, 75 bp, synthetic construct
  source 1..75: mol_type = other DNA
actgaagaagaaagcggcaactgaagctgctgaaaaagccaaagcagaagctgagaagaaagcggctgctgaaaa

SEQ ID NO: 283615 - DNA, 75 bp, synthetic construct
  source 1..75: mol_type = other DNA
ataaccagcgtcaataatgattcagcggttgtccgttcccgtggcaaggattactgcctcgataaaagctgcata

SEQ ID NO: 283616 - DNA, 75 bp, synthetic construct
  source 1..75: mol_type = other DNA
ctgtcagttctttagggtgcagtttttttagcaggtcgtcctttctgggggggaggaaggagattctacaattct

SEQ ID NO: 283617 - DNA, 75 bp, synthetic construct
  source 1..75: mol_type = other DNA
tgttcctgtaatccttgtcttgaccaagtgcgataagtcaacgccagaatcgttggaaaacgtagaagaagaaat

SEQ ID NO: 283618 - DNA, 75 bp, synthetic construct
  source 1..75: mol_type = other DNA
cgccgcaaaagcctgtgcggaaattgaaaaaacgccggtcagtattcgtgagctgtggaacccggacacctgtcc

SEQ ID NO: 283619 - DNA, 75 bp, synthetic construct
  source 1..75: mol_type = other DNA
atgacacaaaactatgaactgattgtgaaagggatccgcaattttgagaataaagttgtggtaactgtagcatta

SEQ ID NO: 283620 - DNA, 75 bp, synthetic construct
  source 1..75: mol_type = other DNA
cacaaacaggaagaaattcaacaaaacaacagatataatgaagaaaataaacgacagaaattaatgccaacaccg

SEQ ID NO: 283621 - DNA, 75 bp, synthetic construct
  source 1..75: mol_type = other DNA
cgctagagtcgttgcgagtgcgtaagattgaggcgttggcagatggcattatggatgccgggctggcttcggtgc

SEQ ID NO: 283622 - DNA, 75 bp, synthetic construct
  source 1..75: mol_type = other DNA
gacctacccgcgcatcgaaagagcgcaggttggcatcgaaagcacaaaaatcaagcgtgaaggcgatgcgtggca

SEQ ID NO: 283623 - DNA, 75 bp, synthetic construct
  source 1..75: mol_type = other DNA
cggtgtgctggaaagcggcatcacggaggagatgtatctggaaatggaacggctgattgccgatgccaaacccgc

SEQ ID NO: 283624 - DNA, 75 bp, synthetic construct
  source 1..75: mol_type = other DNA
cgacaacacccggaacaacatatttccatcaatcttgaatccaccgtgctcgcctcggaaaaaattccgcaactg

SEQ ID NO: 283625 - DNA, 75 bp, synthetic construct
  source 1..75: mol_type = other DNA
ggaattattaccaggctacaaaaaacacccggtgagcatatcgaaaataatggaatcatttacgatatcctgccc

SEQ ID NO: 283626 - DNA, 75 bp, synthetic construct
  source 1..75: mol_type = other DNA
ctacggtcagggctggctctacagcaaggcattaccgaaagaagatttcttacgctgggccgagcaacatttgtg

SEQ ID NO: 283627 - DNA, 75 bp, synthetic construct
  source 1..75: mol_type = other DNA
gtcgatggtgttaatctcgctgaactgattaacaaggttgctgataatggttattcactccgtgtggtggatgaa

SEQ ID NO: 283628 - DNA, 75 bp, synthetic construct
  source 1..75: mol_type = other DNA
gggatcgaaacgggtaaacaggaagagtggctacgtcagcatggcgtgcattacggtcagggctggctgtacagc

SEQ ID NO: 283629 - DNA, 75 bp, synthetic construct
  source 1..75: mol_type = other DNA
gcgttggaatataaaaatgtcacaccgcatatcatcgaaatggcaaaaacgttgaaactgaaaatggtggcggaa

SEQ ID NO: 283630 - DNA, 75 bp, synthetic construct
  source 1..75: mol_type = other DNA
tattacaaagagcgtctgctcgccgccagccatcatttgatcagcagtgatggcgtgattgtcattaaggcacag

SEQ ID NO: 283631 - DNA, 75 bp, synthetic construct
  source 1..75: mol_type = other DNA
aacgtccctatgaagaaaagaaagttaccgctggcagcaggcttcggagcgcatggccgaacggctgggggagat

SEQ ID NO: 283632 - DNA, 75 bp, synthetic construct
  source 1..75: mol_type = other DNA
taccaccactaacccgaagacgcgcgggctgctggctgatagaggaataccacaaggcgtgaaaaagtggtggta

SEQ ID NO: 283633 - DNA, 75 bp, synthetic construct
  source 1..75: mol_type = other DNA
caattcaattcaattcaattcaattcaattcaattcaattcaattcaattcaattcaattcaattcagtttatta

SEQ ID NO: 283634 - DNA, 75 bp, synthetic construct
  source 1..75: mol_type = other DNA
ttggaatctttagcgcgggaaaatcatctctcctcaatctctggctggggcgagaatatattacccgttgaccag

SEQ ID NO: 283635 - DNA, 75 bp, synthetic construct
  source 1..75: mol_type = other DNA
attcccaatgatttatgctcacaattacatcaactcaagaatttttccgcctatgtgccgctaattggaatcttt

SEQ ID NO: 283636 - DNA, 75 bp, synthetic construct
  source 1..75: mol_type = other DNA
gcgggcaggatggaatgggaaagaccagtttgtttatctcgtgaaaggggaaaaattagcgtctgcgttgggtta

SEQ ID NO: 283637 - DNA, 75 bp, synthetic construct
  source 1..75: mol_type = other DNA
atgattgtgatttcccgacatgttgctattcccgatggtgagcttgagatcaccgccattcgtgcgcagggcgcg

SEQ ID NO: 283638 - DNA, 75 bp, synthetic construct
  source 1..75: mol_type = other DNA
gcaggaccagggcatcactgaaaatacctatctggaacttgagcggctgataagcgatgccaaaccatgtagccg

SEQ ID NO: 283639 - DNA, 75 bp, synthetic construct
  source 1..75: mol_type = other DNA
ctgcagaccagcggcccgcattgggtgggagccgccagctatcttggcgaagaaatcacgatctatccgtatatc

SEQ ID NO: 283640 - DNA, 75 bp, synthetic construct
  source 1..75: mol_type = other DNA
gctgggatacctcattcgtgtgtctgagtggtgggagttcggcggagaaccgggaacatttaccgttgaagtcgg

SEQ ID NO: 283641 - DNA, 75 bp, synthetic construct
  source 1..75: mol_type = other DNA
atacaccgacacaaagggaccatcagcgcactgcgccgggccattgagccgctgggatacctcattcgcgtgtct

SEQ ID NO: 283642 - DNA, 75 bp, synthetic construct
  source 1..75: mol_type = other DNA
gctggacagaaagcgtcaaacgccaggtagtgaaggatgctttttatattcatcagtataaaggaaccaccagtg

SEQ ID NO: 283643 - DNA, 75 bp, synthetic construct
  source 1..75: mol_type = other DNA
cctgactggtatttcggatgaaaacgcccaatcaatgtttgataaccatctcttcctgaacaaagttcaaaaact

SEQ ID NO: 283644 - DNA, 75 bp, synthetic construct
  source 1..75: mol_type = other DNA
tgaactggaaccgtttgacaagcgtcttggcaccacccaggaagcgtatgaaaaagcgtttgccagtgtggttaa

SEQ ID NO: 283645 - DNA, 75 bp, synthetic construct
  source 1..75: mol_type = other DNA
gccccttccagaacgccgattttaaccagcttgccaactacacctttggccgtaccaatgcgctgatcctgcggg

SEQ ID NO: 283646 - DNA, 75 bp, synthetic construct
  source 1..75: mol_type = other DNA
gccgtggcggtgaaagccgagcgcgaaaagggaatgggtatggtgaaatcggtgcttgaccgcgtgcgggagggg

SEQ ID NO: 283647 - DNA, 75 bp, synthetic construct
  source 1..75: mol_type = other DNA
ttaattataatgatggttggtattatgttcttgctcgttatgataattgtctggttttgtctacttcttttaatg

SEQ ID NO: 283648 - DNA, 75 bp, synthetic construct
  source 1..75: mol_type = other DNA
cgcgcctgcactctgccattatctcgatgaactttgccactccggcgattgccatcaactatgaacataaatccg

SEQ ID NO: 283649 - DNA, 75 bp, synthetic construct
  source 1..75: mol_type = other DNA
cgatggttgcggataccttaggccagcttccggcgctgaacgcacaacttagcgaagccgtcagtcgtgagcgtc

SEQ ID NO: 283650 - DNA, 75 bp, synthetic construct
  source 1..75: mol_type = other DNA
gccagaaacgccggaaaaacgcccatccttgaaggggggatgagctatcagcagctgggcatgagtaatcaggat

SEQ ID NO: 283651 - DNA, 75 bp, synthetic construct
  source 1..75: mol_type = other DNA
gtaccgaataccggatccggagaatatgtttctgccgggacggctgaatcattgcctgctgtgatgaacgcggtt

SEQ ID NO: 283652 - DNA, 75 bp, synthetic construct
  source 1..75: mol_type = other DNA
ggtatccggtatcaggtggagtttgacagcgcggacctgttacgggccacacctggcgaacgctttgccacctat

SEQ ID NO: 283653 - DNA, 75 bp, synthetic construct
  source 1..75: mol_type = other DNA
aaccgcccggtgatgggcgacccgctctacagccagatgaaacagcacaataacgctgcgggcgtgatgggacgc

SEQ ID NO: 283654 - DNA, 75 bp, synthetic construct
  source 1..75: mol_type = other DNA
cgatggcggcagacaccttgggtcaactctcaacgcttgtgccgcgcctcaatgacgcggtagcgcgtgagcgcg

SEQ ID NO: 283655 - DNA, 75 bp, synthetic construct
  source 1..75: mol_type = other DNA
aggagggatgtcagtgtcgaaaatatctacttctataggttaccataacacttcatattttatatcatatttcag

SEQ ID NO: 283656 - DNA, 75 bp, synthetic construct
  source 1..75: mol_type = other DNA
tgattgcttttgtggcatatttttggcttttttcatttctgacaggatattacaaaccacagtttaagaaagaat

SEQ ID NO: 283657 - DNA, 75 bp, synthetic construct
  source 1..75: mol_type = other DNA
gatgtttcgcaatatctctcctgttctctgatgtcgccgctttcgcacagtatgtcgattgaagaggggcaacgg

SEQ ID NO: 283658 - DNA, 75 bp, synthetic construct
  source 1..75: mol_type = other DNA
tcctttcgctgccagtcacgaatccggatgtaccacacgcagggcgtcgcgccctgctgtttggtcgcaggagtg

SEQ ID NO: 283659 - DNA, 75 bp, synthetic construct
  source 1..75: mol_type = other DNA
gctggcttgctggtgggctattcctgctctttaacattgccatgccgcgatgttttccaggtatgcgaccccatt

SEQ ID NO: 283660 - DNA, 75 bp, synthetic construct
  source 1..75: mol_type = other DNA
gccatttctggatctcctaaaaattggtgtatgtcagtatacgcaaaaaaaatgataaaaaaaggcttgaagtgt

SEQ ID NO: 283661 - DNA, 75 bp, synthetic construct
  source 1..75: mol_type = other DNA
atgactgaggagattgctggtttccagacctccccaaaggcgcaagtacaggcagcgtttgaagaaattgcccgg

SEQ ID NO: 283662 - DNA, 75 bp, synthetic construct
  source 1..75: mol_type = other DNA
tgttcgaaggtcagtggacggggtgtgtgatcaccccgtggatgctgagtgcagttatcttccccggcccggatc

SEQ ID NO: 283663 - DNA, 75 bp, synthetic construct
  source 1..75: mol_type = other DNA
aacgaagccgtcagtcgcgaacgtcagacgggaatgcagatggtgcaatctgtccttgaacgcatcggggaggtg

SEQ ID NO: 283664 - DNA, 75 bp, synthetic construct
  source 1..75: mol_type = other DNA
cgaactggcaccgttcgacaaacgtctcggcaccactcagcaagcgtatgaaaaagcctttgccggggtggtcaa

SEQ ID NO: 283665 - DNA, 75 bp, synthetic construct
  source 1..75: mol_type = other DNA
gccatcaactacgaacataaatccgccgggattatgcaacaactggggctaccagagatggcaattgatatccgt

SEQ ID NO: 283666 - DNA, 75 bp, synthetic construct
  source 1..75: mol_type = other DNA
gccgccagtgggaaagctacatacttgaacgcatcgccaacaatgccagatttgcggctggtgggcaatgtgtca

SEQ ID NO: 283667 - DNA, 75 bp, synthetic construct
  source 1..75: mol_type = other DNA
gaaatggcggctgagctggctgcggatatccgccgtttgtgggctgaatggtccgtgagtccggatgtgacaggg

SEQ ID NO: 283668 - DNA, 75 bp, synthetic construct
  source 1..75: mol_type = other DNA
ttaaagctaccaaatggtattgaggcatatttttctaagaattacccaaatgtgtatgatgactttgatattcca

SEQ ID NO: 283669 - DNA, 75 bp, synthetic construct
  source 1..75: mol_type = other DNA
atgagtaatcaggatgctgaatggctggcctcccgtcgctttaccattgaagacatcgcccgaatgttcaacgtc

SEQ ID NO: 283670 - DNA, 75 bp, synthetic construct
  source 1..75: mol_type = other DNA
gacttgctgaatctggatcgcacaataaacaatgtaaaaacaaaacgttacggccacacggaagaggaagcacga

SEQ ID NO: 283671 - DNA, 75 bp, synthetic construct
  source 1..75: mol_type = other DNA
gccatctccggcgataccggtgatgacaaaaccctcagcggggggcgtatgcacaattcgacgctcgttacgcca

SEQ ID NO: 283672 - DNA, 75 bp, synthetic construct
  source 1..75: mol_type = other DNA
accgatgaaaacggcgagtttgtcatggatgtggataagaaataccccactatcgattttcgctacagtggcaat

SEQ ID NO: 283673 - DNA, 75 bp, synthetic construct
  source 1..75: mol_type = other DNA
cagacagtgaccggtcagccagatgttgaccaggttgttcttgatgaagcgatcaaaaatcgttccgggatgccg

SEQ ID NO: 283674 - DNA, 75 bp, synthetic construct
  source 1..75: mol_type = other DNA
ggcattggtcagttaggcaaagacacgcctatcaactggaccaccaaagttgagcgtaagaaagcaggcccgacc

SEQ ID NO: 283675 - DNA, 75 bp, synthetic construct
  source 1..75: mol_type = other DNA
accgtcaaagcacaggaaatggcgaaacgagggatccctttctggcaagcggaaaacggggtctggctgacatca

SEQ ID NO: 283676 - DNA, 75 bp, synthetic construct
  source 1..75: mol_type = other DNA
tataccgtaccaattacaatcctatttcaggatcgtaatgctgtttcaggtaatttcaatggaagcgccattcta

SEQ ID NO: 283677 - DNA, 75 bp, synthetic construct
  source 1..75: mol_type = other DNA
cgatggggtcaataacaaaacaaaatgtggttctggtagctgttctctgaattttgataatgatagttcatctaa

SEQ ID NO: 283678 - DNA, 75 bp, synthetic construct
  source 1..75: mol_type = other DNA
gttgggaatttcaaccttatcttgctgaaagcaatgttcgccagttgttggcggagatcgctaacgtacttgagc

SEQ ID NO: 283679 - DNA, 75 bp, synthetic construct
  source 1..75: mol_type = other DNA
agcgcttttatctggctggatgatggacagctacgcatccggaaaatacagctggaagagagtgaagataacgcc

SEQ ID NO: 283680 - DNA, 75 bp, synthetic construct
  source 1..75: mol_type = other DNA
aacgttaacctgcaaaatatgctggccagtgacagctcatggagcaacatcgccagcatcagcgccactctaccg

SEQ ID NO: 283681 - DNA, 75 bp, synthetic construct
  source 1..75: mol_type = other DNA
gaggatattcgacagcaataagacagtatgaagaagatatgccgagctttacatcggtttccgggatttacagat

SEQ ID NO: 283682 - DNA, 75 bp, synthetic construct
  source 1..75: mol_type = other DNA
aaagtgagcaacgtaacctgtccattgatgattttctggcgctggccggcgtaccgaataccggatccggagaat

SEQ ID NO: 283683 - DNA, 75 bp, synthetic construct
  source 1..75: mol_type = other DNA
tgtcgccgatttttcttcaggaatacagcaacagcacctacagcaatttcagtgaggcgagccgcgcatttctga

SEQ ID NO: 283684 - DNA, 75 bp, synthetic construct
  source 1..75: mol_type = other DNA
gcaatttcagcgaagcgagccgcgcctttctcaccatgaccatgcgcccgtggctggcgaacttcgagcaacaaa

SEQ ID NO: 283685 - DNA, 75 bp, synthetic construct
  source 1..75: mol_type = other DNA
tatgttgcacacggtgtctctggcccttcacgtgccgcaatcctgacggcgcgagctcggtgtatattcaaattc

SEQ ID NO: 283686 - DNA, 75 bp, synthetic construct
  source 1..75: mol_type = other DNA
tggcggctttatggggcgctcacctgtaaccatctgccgcgaatcgctggggcttgggctggcccaacaacgcca

SEQ ID NO: 283687 - DNA, 75 bp, synthetic construct
  source 1..75: mol_type = other DNA
atgtggtggccttttagtcgtaaaaaaagcgagcaacgtaacctgtccattgatgattttctggtgctgtccggc

SEQ ID NO: 283688 - DNA, 75 bp, synthetic construct
  source 1..75: mol_type = other DNA
agtgaggcaagccgcgcgtttctgaccatgacaatgcgtccttggttggcgaacttcgaacagcaaatcaaggcc

SEQ ID NO: 283689 - DNA, 75 bp, synthetic construct
  source 1..75: mol_type = other DNA
attcaaaaaataatttgtgatagtgactactatcttcttataattggtggaagatatggaacggttgcggaagat

SEQ ID NO: 283690 - DNA, 75 bp, synthetic construct
  source 1..75: mol_type = other DNA
tctgtcatcgctgaggcggtggccacgatgccttgttatctgtatctggtacgtaatgacaagggcagggaggcg

SEQ ID NO: 283691 - DNA, 75 bp, synthetic construct
  source 1..75: mol_type = other DNA
agcgaggcaagccgcgcgtttctgaccatgacaatgcgcccgtggctggcgaacttcgaacagcaaatcaaggcc

SEQ ID NO: 283692 - DNA, 75 bp, synthetic construct
  source 1..75: mol_type = other DNA
tacagcaactttagtgaggcgagccgcgcatttctcaccatgacgatgcgtccgtggctggcgaactttgagcag

SEQ ID NO: 283693 - DNA, 75 bp, synthetic construct
  source 1..75: mol_type = other DNA
gcgtgaaggtggcgacgaatacagccaggcatggaagcaggaagtgaaggtcagtaccgattctgagactaagga

SEQ ID NO: 283694 - DNA, 75 bp, synthetic construct
  source 1..75: mol_type = other DNA
caatggatgcgctggaacgttacaaaggtgccagaaatgccgggaaaacgccgatccttgaaggtggcatggact

SEQ ID NO: 283695 - DNA, 75 bp, synthetic construct
  source 1..75: mol_type = other DNA
agaacgtggtgacggcagttgaaaccaatgtgttgaggttgcatggacggttaagccgagaatacggtagtaagt

SEQ ID NO: 283696 - DNA, 75 bp, synthetic construct
  source 1..75: mol_type = other DNA
acttcattaccgacagattttccggagaacgtggtgacggcagttgaaaccaatgtgttgaggttgcatggacgg

SEQ ID NO: 283697 - DNA, 75 bp, synthetic construct
  source 1..75: mol_type = other DNA
gtcacaccggttggcggcgtgagcttcctcgcgggctgggcgttaatgttagttggtgctatccgtttaaagcgc

SEQ ID NO: 283698 - DNA, 75 bp, synthetic construct
  source 1..75: mol_type = other DNA
ccagccgttatgccagaccgttgtcactttcgctgccattgcagagggggaatatcacctctgatgccgtattta

SEQ ID NO: 283699 - DNA, 75 bp, synthetic construct
  source 1..75: mol_type = other DNA
atgttcatcactgaccgtgatgacccggtaatgtcagggatgaatgatattcggctgaaattccggacagccgta

SEQ ID NO: 283700 - DNA, 75 bp, synthetic construct
  source 1..75: mol_type = other DNA
aacaaggtaacgatagtgagcgattattgtcccgttttctctggacctgacgggcaacatccaacacatggccaa

SEQ ID NO: 283701 - DNA, 75 bp, synthetic construct
  source 1..75: mol_type = other DNA
gtgaaaaagcaatggattgtcggcactgcactgtttgtgttgatgtctggtaatggctgggctgatggcgaaccg

SEQ ID NO: 283702 - DNA, 75 bp, synthetic construct
  source 1..75: mol_type = other DNA
actcaaacttgatgccatcagtttaaaaaaccttgatgcgaaaggtaatcaggccacctggtcagcagaaggcga

SEQ ID NO: 283703 - DNA, 75 bp, synthetic construct
  source 1..75: mol_type = other DNA
gaaataaacagtaaaaaagtcgcgattttgatgaaaattgacgatatcaaccaggctaatgaacgctggaaaaaa

SEQ ID NO: 283704 - DNA, 75 bp, synthetic construct
  source 1..75: mol_type = other DNA
gcacaaatcacgcaatatgcccgccaactggctagctcgccttctattatcgacaaccgatcgcgccagcatctg

SEQ ID NO: 283705 - DNA, 75 bp, synthetic construct
  source 1..75: mol_type = other DNA
ggctgtgtggctggataaatcgcttaaaaatcgcgtgggtgagacatattaaccttgccgcgtcagacagattcg

SEQ ID NO: 283706 - DNA, 75 bp, synthetic construct
  source 1..75: mol_type = other DNA
tgccttcatcgaaaaaacaccgccacaatttctctaccatggtacggcaagccgtttccttgaggcgataaaaaa

SEQ ID NO: 283707 - DNA, 75 bp, synthetic construct
  source 1..75: mol_type = other DNA
cattaccgacagattttccggagaacgtggtgacggcagttgaaaccaatgtgttgaggttgcacgatcggttaa

SEQ ID NO: 283708 - DNA, 75 bp, synthetic construct
  source 1..75: mol_type = other DNA
attttcaggcgtcagcaaaggtgctgaaattcccggaagtgcaaattcaggaaatcataagtaactgtgcgagag

SEQ ID NO: 283709 - DNA, 75 bp, synthetic construct
  source 1..75: mol_type = other DNA
attttcaggcgacagcaaaggtgctgaaattcccggaagtgcaaattcaggaaatcattagtaactgtgcgagaa

SEQ ID NO: 283710 - DNA, 75 bp, synthetic construct
  source 1..75: mol_type = other DNA
attttcaggcgacagcaaaggtgctgaaattcccggaagtgcaaattcaggaaatcataagtaactgtgcgagat

SEQ ID NO: 283711 - DNA, 75 bp, synthetic construct
  source 1..75: mol_type = other DNA
attttcaggcgccagcaaaggtgctgaaattcccggaagtgcaaattcaggaaatcattagtaactgtgcgagac

SEQ ID NO: 283712 - DNA, 75 bp, synthetic construct
  source 1..75: mol_type = other DNA
attttcaggcgtcagcaaaggtgctgaaattcccggaagtgcaaattcaggaaatcatgagtaactgtgcgagaa

SEQ ID NO: 283713 - DNA, 75 bp, synthetic construct
  source 1..75: mol_type = other DNA
attttcaggcgtcagcaaaggtgctgaaattcccggaagtgcaaattcaggaaatcattagtaactgtgcgagat

SEQ ID NO: 283714 - DNA, 75 bp, synthetic construct
  source 1..75: mol_type = other DNA
aaaacgaatgtgtgtggaattcatagttgttttgttactgccaaggacagaagcaacagatttatgaagatgcca

SEQ ID NO: 283715 - DNA, 75 bp, synthetic construct
  source 1..75: mol_type = other DNA
taccctgtcggacagcctgcgcgaacatccccgcgtctttgattccctgttttgttcgatggtcgctgccggaga

SEQ ID NO: 283716 - DNA, 75 bp, synthetic construct
  source 1..75: mol_type = other DNA
caatattgaacaactgcgtaaacaaggggtacggatatcgattgatgactttggcaccggtttgtcaaacctgaa

SEQ ID NO: 283717 - DNA, 75 bp, synthetic construct
  source 1..75: mol_type = other DNA
tggcgcaacagatggccatgcaaacaacttctccgtatttattcaggctggcggcagttatcggctcacaccatt

SEQ ID NO: 283718 - DNA, 75 bp, synthetic construct
  source 1..75: mol_type = other DNA
ccaacgactggattctcccttggtttatgttggtgcgcataatgtacgactcgttatgttgaaaaggccgctgcg

SEQ ID NO: 283719 - DNA, 75 bp, synthetic construct
  source 1..75: mol_type = other DNA
ggggctttttattgcaacaaaggtaaagacgatggatgaagaatatcgtaaagacctgcaactgtggtttggtct

SEQ ID NO: 283720 - DNA, 75 bp, synthetic construct
  source 1..75: mol_type = other DNA
gccacgaaatatgacaaagaggtctatcaacctgcgatagcggcatgccataaacaaagcgcagagtgttatgaa

SEQ ID NO: 283721 - DNA, 75 bp, synthetic construct
  source 1..75: mol_type = other DNA
atggaacaacgccacattaccggcaaaagccactggtatcatgaaacgcaatccagtacttcggagtatgacgtt

SEQ ID NO: 283722 - DNA, 75 bp, synthetic construct
  source 1..75: mol_type = other DNA
tgaaagattttcttcttggttgtttttataaacgtgatatttacgagcaaaaaacagaggcaatgaaggccagag

SEQ ID NO: 283723 - DNA, 75 bp, synthetic construct
  source 1..75: mol_type = other DNA
caaataacaaagtagaaacaaaggggcatgttgttaatgtgaccaaaaatggtcgcaacatatactacagaagtg

SEQ ID NO: 283724 - DNA, 75 bp, synthetic construct
  source 1..75: mol_type = other DNA
taacctgttaatcatcgttctcagagctgtggtcgccgttgcaaacgcgctgattgcaattctggaactgattcg

SEQ ID NO: 283725 - DNA, 75 bp, synthetic construct
  source 1..75: mol_type = other DNA
ccaacgaaaagtctggccgccagcttgccgcgttattaagtgcacgaattaatggcagcgtcgattgttttaaca

SEQ ID NO: 283726 - DNA, 75 bp, synthetic construct
  source 1..75: mol_type = other DNA
cgacggtcagtcccgccagcatcttaacgatgtcgggcttaccgcctgggattgtgtaattatcaaccaaatcat

SEQ ID NO: 283727 - DNA, 75 bp, synthetic construct
  source 1..75: mol_type = other DNA
ttttcgattttgcatttactgatttcgttgccatttctgatttccgattggtttggtgtccgacaatgatagcga

SEQ ID NO: 283728 - DNA, 75 bp, synthetic construct
  source 1..75: mol_type = other DNA
acacccgcaagggcgggactcgcacaacctgaataaatacatctggcgttttatcgccctgagtacggcacaacc

SEQ ID NO: 283729 - DNA, 75 bp, synthetic construct
  source 1..75: mol_type = other DNA
atggcaattatcgatgatgtgataggcgtgttttcccccggatggaaagcagccagactgcgttcaagggcatta

SEQ ID NO: 283730 - DNA, 75 bp, synthetic construct
  source 1..75: mol_type = other DNA
tgggcaatgctatcagtctggttcagttcgttgccatacctgcaatgagcgcttttccctgtactctttaaggaa

SEQ ID NO: 283731 - DNA, 75 bp, synthetic construct
  source 1..75: mol_type = other DNA
ggtttttcagacataaaaaaagcggccccgaaatggagccgcctttctgaacagataacccgctgcgccgtttgt

SEQ ID NO: 283732 - DNA, 75 bp, synthetic construct
  source 1..75: mol_type = other DNA
aaagcacaaataaaactcttgacgtgggccacacctaaaacatatagtgggccacacctaaaacatatagtgggc

SEQ ID NO: 283733 - DNA, 75 bp, synthetic construct
  source 1..75: mol_type = other DNA
caaatggccgcacttgtagagctgctgaaaaacccgcccgcgggcgaagaagaattcctgttagatctgttaacc

SEQ ID NO: 283734 - DNA, 75 bp, synthetic construct
  source 1..75: mol_type = other DNA
ctgcaacaaaaaggtttcccgctggcctacgtgggtgacgttgtggggactggttcttcgcgtaaatccgccact

SEQ ID NO: 283735 - DNA, 75 bp, synthetic construct
  source 1..75: mol_type = other DNA
aagccgcctatgtaaaagctggtttccttgctgctgtcgcgaaaggcgaagccaaatccccactgttgactccag

SEQ ID NO: 283736 - DNA, 75 bp, synthetic construct
  source 1..75: mol_type = other DNA
gaaggctactacagcgtcttcggtaagagcggtgcgcgtatcgagatacctggctgttccctgtgtatgggtaac

SEQ ID NO: 283737 - DNA, 75 bp, synthetic construct
  source 1..75: mol_type = other DNA
atgaacatactaaaaaaacttatgcagcgtctgtgcggttgcggaaagcatgatggctgtgaacacgggcagtta

SEQ ID NO: 283738 - DNA, 75 bp, synthetic construct
  source 1..75: mol_type = other DNA
gcctgtgggtggcaccgccaacgcgtatggacgctgcacagctgaccgaagaaggctactacagcgtcttcggta

SEQ ID NO: 283739 - DNA, 75 bp, synthetic construct
  source 1..75: mol_type = other DNA
tgcgcttcaaaggcaagatgcagccgggaatcaccctgcgcgatctggtacacgccattccgctgtatgcgatca

SEQ ID NO: 283740 - DNA, 75 bp, synthetic construct
  source 1..75: mol_type = other DNA
gttacggcgatcgtcgtaccctggaacgtcgtattcagggcatggaaaaatggctggcgaatcctgagctgctgg

SEQ ID NO: 283741 - DNA, 75 bp, synthetic construct
  source 1..75: mol_type = other DNA
gggctgttctctgtgtatgggtaaccaggcgcgtgtagcagacggtgcgacggtggtttccacctctacccgtaa

SEQ ID NO: 283742 - DNA, 75 bp, synthetic construct
  source 1..75: mol_type = other DNA
ctgctgaagtggatgatcgcggaaggttacggcgatcgtcgcaccctggaacgtcgtattcagggcatggaaaaa

SEQ ID NO: 283743 - DNA, 75 bp, synthetic construct
  source 1..75: mol_type = other DNA
ccgtgctgctggtaaactgctggatgcgcacaaaggtcagttgccgacccgcctgtgggtggcaccgccaacgcg

SEQ ID NO: 283744 - DNA, 75 bp, synthetic construct
  source 1..75: mol_type = other DNA
cggtaccggtggtgattcccatacccgtttcccgatcggtatctctttcccggcggggtctggtctggtggcatt

SEQ ID NO: 283745 - DNA, 75 bp, synthetic construct
  source 1..75: mol_type = other DNA
aacaaggtctgctgaccgttgagaagaaaggtaagaaaaacatcttctctggccgcattctggaaattgaaggtc

SEQ ID NO: 283746 - DNA, 75 bp, synthetic construct
  source 1..75: mol_type = other DNA
attgaactggcagctaataatagcgcgcatttttgcgtagtcgcgggcgagcaggcggccatttcccgtttgagc

SEQ ID NO: 283747 - DNA, 75 bp, synthetic construct
  source 1..75: mol_type = other DNA
gtcgacgggtaagccaaaaggtatcgcggtggcgcaccgcggtttattgcgcctgatacaaggcgacagcccgct

SEQ ID NO: 283748 - DNA, 75 bp, synthetic construct
  source 1..75: mol_type = other DNA
caaacactaatagctcactacagcaatgaacatgatgccttagccagcatacaacggttggtacataaagaaggt

SEQ ID NO: 283749 - DNA, 75 bp, synthetic construct
  source 1..75: mol_type = other DNA
gcggcggggggcgttggcttggctgcgctacatattgccaaacgctgcggagcacagattttcgccacagcaggt

SEQ ID NO: 283750 - DNA, 75 bp, synthetic construct
  source 1..75: mol_type = other DNA
gctggatgagcaccggatatccggtatcgccacgctgccgggaaccggctatctggcgctggcgtatgaagctct

SEQ ID NO: 283751 - DNA, 75 bp, synthetic construct
  source 1..75: mol_type = other DNA
agcaagctacctcgccggattactgggtgcagcaagtgcgcaacgcggtgctgtttagcgaaggtgcggcgcaac

SEQ ID NO: 283752 - DNA, 75 bp, synthetic construct
  source 1..75: mol_type = other DNA
tccaaaccagatgattgaacaaattaacatcgctcttgaccagaaaggttcagaaaatttttcagcgtgggttat

SEQ ID NO: 283753 - DNA, 75 bp, synthetic construct
  source 1..75: mol_type = other DNA
acaaacactgtgcagtgggcattgaaccgaatcgtgagcgaatcaatcaattactcaatgaatcgctgatgctgg

SEQ ID NO: 283754 - DNA, 75 bp, synthetic construct
  source 1..75: mol_type = other DNA
aaaaaagcgcataaagaagggctgaccttaaaagctgcagcccttgcgctgggctatcttagcgaagccgagttt

SEQ ID NO: 283755 - DNA, 75 bp, synthetic construct
  source 1..75: mol_type = other DNA
caatatcagggcgaaatataccaattgatggtatagaagaaacactagggctatttattaacacgttgccgctgc

SEQ ID NO: 283756 - DNA, 75 bp, synthetic construct
  source 1..75: mol_type = other DNA
gaacaacaacccgcaacatccgatttccaaaccagatgattgaacaaattaacatcgctcttgaccagaacacga

SEQ ID NO: 283757 - DNA, 75 bp, synthetic construct
  source 1..75: mol_type = other DNA
ccggtaacttttcagcgtgggttattgaagcctgcaggagaaggctggcaacagatgcaacgcatctgttgcccg

SEQ ID NO: 283758 - DNA, 75 bp, synthetic construct
  source 1..75: mol_type = other DNA
atgtcatcgaaaaaccggacccgcagaaccacaacccgcaatatccgtttccccaatcacataattgaacagatc

SEQ ID NO: 283759 - DNA, 75 bp, synthetic construct
  source 1..75: mol_type = other DNA
gcgaggaagattaccggcgcgctgggaatgaaggtccgggatgaaatcgtactggagagcggcggtaaaatcacc

SEQ ID NO: 283760 - DNA, 75 bp, synthetic construct
  source 1..75: mol_type = other DNA
aggtatcagtaactccccggcgctgtggccgggacggcggttcaccctgacggggcatccggtacagggagcgaa

SEQ ID NO: 283761 - DNA, 75 bp, synthetic construct
  source 1..75: mol_type = other DNA
tttggcctgtcaaaacgtcgcgtcacgctttccacttccggtgtggttccggcgctggataaactgggcgatatg

SEQ ID NO: 283762 - DNA, 75 bp, synthetic construct
  source 1..75: mol_type = other DNA
gggggacctggcgaggaaggtgagtggtgcgctggggataaaggtggacggggatatcgtgctggagagcagcag

SEQ ID NO: 283763 - DNA, 75 bp, synthetic construct
  source 1..75: mol_type = other DNA
gcgccattgtcaccgggcctgcgggagaggaaatcttctgcgatgaacatggccgggtacgggtgaagttccact

SEQ ID NO: 283764 - DNA, 75 bp, synthetic construct
  source 1..75: mol_type = other DNA
gcaggcgtgggcgggagcggggttcggtaatctggcgataccgcgtgtgggtcaggaagtgatagtggactttct

SEQ ID NO: 283765 - DNA, 75 bp, synthetic construct
  source 1..75: mol_type = other DNA
ccggcggaccggacgtggcgtccacggctgcaaagcaaaccgaaggtggacgggccacagagcgccattgtcacc

SEQ ID NO: 283766 - DNA, 75 bp, synthetic construct
  source 1..75: mol_type = other DNA
ggcgggagagtttccgtttaacccggacacatcggcaggagcggagacggagtgtgtcagtatgttccgttatga

SEQ ID NO: 283767 - DNA, 75 bp, synthetic construct
  source 1..75: mol_type = other DNA
tcttctgtgatgaacatggccgggtacgggtgaagtttcactgggacaggtataacccggcaacggaggcgagtt

SEQ ID NO: 283768 - DNA, 75 bp, synthetic construct
  source 1..75: mol_type = other DNA
cgctttccacttccggtgtggttccggcgctggataaactgggcgatatgattgatgttgcgctggcaatctctc

SEQ ID NO: 283769 - DNA, 75 bp, synthetic construct
  source 1..75: mol_type = other DNA
cgcctgttaactggaccaccaaagtagagcgtaagaaagcaggcccgacctggacgccaaccgccaaaatgcatg

SEQ ID NO: 283770 - DNA, 75 bp, synthetic construct
  source 1..75: mol_type = other DNA
gaacgtggacttcagccaaagatctccctggattagtggctttgagcttgaataaaaccatcaaggcatatcctg

SEQ ID NO: 283771 - DNA, 75 bp, synthetic construct
  source 1..75: mol_type = other DNA
ccacattggttatgacaaagccgccgagatcgccaaaaaagcgcataaagaagggctgaccttaaaagctgcggc

SEQ ID NO: 283772 - DNA, 75 bp, synthetic construct
  source 1..75: mol_type = other DNA
cgaatctgccgcgtctgcaaccggtaaagctcacgtcatcaaatctcaccataacgtgggcggcctgccgaaaga

SEQ ID NO: 283773 - DNA, 75 bp, synthetic construct
  source 1..75: mol_type = other DNA
ctggaagatgtgaagtggctggcgcagggtactatctaccctgatgttatcgaatctgccgcgtctgcaaccggt

SEQ ID NO: 283774 - DNA, 75 bp, synthetic construct
  source 1..75: mol_type = other DNA
gtatcggtgcgtggtcgtacccggttctgcgaattaaacggctgggcctgtcaaaaacgttccgtcgtctggttg

SEQ ID NO: 283775 - DNA, 75 bp, synthetic construct
  source 1..75: mol_type = other DNA
gtcgatggtgttaatctcgctgaactgattaacgtggcctgcgacaatggctacccccttcgtgttgttgatgaa

SEQ ID NO: 283776 - DNA, 75 bp, synthetic construct
  source 1..75: mol_type = other DNA
catacgctgcagcaccgcacatatcacggaaacagacaacgccaggctgtactcgctgtcacaccagactaatga

SEQ ID NO: 283777 - DNA, 75 bp, synthetic construct
  source 1..75: mol_type = other DNA
tccgaccaacagtcaacctgcacaccaccaccgtttacggcccttgccggcatacgctgcagtaccgcacatatc

SEQ ID NO: 283778 - DNA, 75 bp, synthetic construct
  source 1..75: mol_type = other DNA
tcactctcatccgccgttatggcgtcagtctcattcatctggatgccagtgccggatgtctgccggggttcccca

SEQ ID NO: 283779 - DNA, 75 bp, synthetic construct
  source 1..75: mol_type = other DNA
gctacaccttaaacgtctgggcctgtcaaaaaccttccgccgtctggttgtcactctcatccggcgttatggcgt

SEQ ID NO: 283780 - DNA, 75 bp, synthetic construct
  source 1..75: mol_type = other DNA
tcagaatggattcattttaccggtaccggttatctgttacgtaccgatacgtggtcatacccggttctgcggctt

SEQ ID NO: 283781 - DNA, 75 bp, synthetic construct
  source 1..75: mol_type = other DNA
atgaacctttccctgacgctggaagccgacagcattaacgtgcaggcacagaacatggggcgcattgtcgttgac

SEQ ID NO: 283782 - DNA, 75 bp, synthetic construct
  source 1..75: mol_type = other DNA
tccagaatgttccgccgtctggttgtcacactcatccggcgttatggcgtcagtctcattcatctggatgccagt

SEQ ID NO: 283783 - DNA, 75 bp, synthetic construct
  source 1..75: mol_type = other DNA
ataaaacggattcggcagcactgttgccctgtatcgaacaggcccgggaggatgtccgtactcttcgtcacctgc

SEQ ID NO: 283784 - DNA, 75 bp, synthetic construct
  source 1..75: mol_type = other DNA
tcaggccagcagtcaacctgcacaccgccaccgtttgcaccccttgccggcatacgctgcagtaccgcacatatc

SEQ ID NO: 283785 - DNA, 75 bp, synthetic construct
  source 1..75: mol_type = other DNA
gccagtttcgttacatccgctttctggacaagagaaccagaaaacgccttaacacaaagctattcaaagttcagc

SEQ ID NO: 283786 - DNA, 75 bp, synthetic construct
  source 1..75: mol_type = other DNA
ggttctgcggcttaaacgcctgggtctgtcaaaaacgttccgtcgtctggtcgtcacactcatccggcgttatgg

SEQ ID NO: 283787 - DNA, 75 bp, synthetic construct
  source 1..75: mol_type = other DNA
tcgtctggttgtcactcttagccggagttatggcgtccgtctcattcatctggttgccagcgccgaatttctgcc

SEQ ID NO: 283788 - DNA, 75 bp, synthetic construct
  source 1..75: mol_type = other DNA
acgaagatttaggcttgttgtccgaagagaaagcgagcgccattcgtcaggctgcggatgaagtgctggcggggc

SEQ ID NO: 283789 - DNA, 75 bp, synthetic construct
  source 1..75: mol_type = other DNA
tgctggctaaccgggccagtgaattactcggcggcgtgcgcgggatggaacgtaaagttcaccctaacgacgacg

SEQ ID NO: 283790 - DNA, 75 bp, synthetic construct
  source 1..75: mol_type = other DNA
cgccgttttgtgaataactcttaccttcacctgggggtattcagcggacgcgatctggttggcgttctccagtgg

SEQ ID NO: 283791 - DNA, 75 bp, synthetic construct
  source 1..75: mol_type = other DNA
tcactcttatccggcgttatggcgtcagtctcattcatctggatgccagcgctgaatgcctgcctgacctgccca

SEQ ID NO: 283792 - DNA, 75 bp, synthetic construct
  source 1..75: mol_type = other DNA
cgctgcagtaccgcgcatatcacggcaaaggacaacgccaggctgtactcgctgtcacatcagacgaatgacttc

SEQ ID NO: 283793 - DNA, 75 bp, synthetic construct
  source 1..75: mol_type = other DNA
ccgatgcgtggtcatacccggttctgcaacttaaacgtctgggcctgtcaaaaacattccgtcgtctggttgtca

SEQ ID NO: 283794 - DNA, 75 bp, synthetic construct
  source 1..75: mol_type = other DNA
tcgtctggttgtcacacttagccggcgttatggcgtccgtctcattcatctggttgccagcgccgtatttctgcc

SEQ ID NO: 283795 - DNA, 75 bp, synthetic construct
  source 1..75: mol_type = other DNA
tcgtctggttgtcacacttagccggtgttatggcgtccgtctcattcatctggttgccagcgccgcatttctgcc

SEQ ID NO: 283796 - DNA, 75 bp, synthetic construct
  source 1..75: mol_type = other DNA
tgattaacgtggcctgcggcaatggctactcccttcgtgttgttgatgaatctgaccggaccgcaactgacagca

SEQ ID NO: 283797 - DNA, 75 bp, synthetic construct
  source 1..75: mol_type = other DNA
atatcaaacttattctgataataatcttgaaaaaataaaagagttattttggtcgtatgatgatgaaaatacatt

SEQ ID NO: 283798 - DNA, 75 bp, synthetic construct
  source 1..75: mol_type = other DNA
cccaaaagagttgttaaatactaaaatattaaatttgtatcatggtgttggattaaagcaaatagagaagaaggc

SEQ ID NO: 283799 - DNA, 75 bp, synthetic construct
  source 1..75: mol_type = other DNA
gcctcactcgtttgggatgaagcacaaaaactaaccggacgtgacccggacttccaccgccgcgagttgtgggaa

SEQ ID NO: 283800 - DNA, 75 bp, synthetic construct
  source 1..75: mol_type = other DNA
tcatatctaagccagggcaacctgttacgtttataaatagccaaaacaaaacagctgatgaactacttgatttct

SEQ ID NO: 283801 - DNA, 75 bp, synthetic construct
  source 1..75: mol_type = other DNA
cagaacttgttgcactcagagagttttttagcaaatccacaaagtatcatgattatttgattgagaaggctaaag

SEQ ID NO: 283802 - DNA, 75 bp, synthetic construct
  source 1..75: mol_type = other DNA
attatttctgttacgcgcatgtctcaggttatatggttccatatgttgcttggtgtattagggatgccattgata

SEQ ID NO: 283803 - DNA, 75 bp, synthetic construct
  source 1..75: mol_type = other DNA
ggccattctcaaggccctgaaggccaaaggcgttcatgccaaactgctctactcccgaatgggtgaagtgactgc

SEQ ID NO: 283804 - DNA, 75 bp, synthetic construct
  source 1..75: mol_type = other DNA
ctgggcttccagttgattcctgaggaagatgaatttaagttcgacttcgaccttcttgatccaactaaacttatc

SEQ ID NO: 283805 - DNA, 75 bp, synthetic construct
  source 1..75: mol_type = other DNA
cctgcgggagaggaaatcttctgcgatgaacatggacgggtacgggtgaagttccactgggaccgttatcacggg

SEQ ID NO: 283806 - DNA, 75 bp, synthetic construct
  source 1..75: mol_type = other DNA
ctctaccgttcagggtggtgctggctctgccgataccgtgcgtgatatccgtggttttgccaccaagttctatac

SEQ ID NO: 283807 - DNA, 75 bp, synthetic construct
  source 1..75: mol_type = other DNA
ggtagttttatggatgaactgctaacgctgatggcagcacaccgcgtgtggtcacgcattcctaagattgacaaa

SEQ ID NO: 283808 - DNA, 75 bp, synthetic construct
  source 1..75: mol_type = other DNA
taaaccgattgcgctggcgggagacgcgcgcaagtttaaagcaacaatcaaggtcgctgaccagggtgaagaagg

SEQ ID NO: 283809 - DNA, 75 bp, synthetic construct
  source 1..75: mol_type = other DNA
aaatttaaaataggcaataaaggtatattaccttctttttatagttttgatgtgtttgatactttaatagcgaga

SEQ ID NO: 283810 - DNA, 75 bp, synthetic construct
  source 1..75: mol_type = other DNA
ggtatctcaggccagatccagaacaacctcgctctgctggtggtgaactgtatcgccgcgctgtcggctttcgtc

SEQ ID NO: 283811 - DNA, 75 bp, synthetic construct
  source 1..75: mol_type = other DNA
gcgacgaccgcaacggacagtatttcacgccgtatcacgtccagtcactgctggcgaggctgctgatgccggacg

SEQ ID NO: 283812 - DNA, 75 bp, synthetic construct
  source 1..75: mol_type = other DNA
tcggagataattttcgcgggcagtattttaccccctattccgtacagtgcctgatggcgcgcctgctgatgccgg

SEQ ID NO: 283813 - DNA, 75 bp, synthetic construct
  source 1..75: mol_type = other DNA
tagagcatgagcagctttcattgtttggtgatgttgaggctgagcaagatattacatggcgagtcatagcggagc

SEQ ID NO: 283814 - DNA, 75 bp, synthetic construct
  source 1..75: mol_type = other DNA
aagaaaccaccgcacgaagaaacagaagattttgtaaaacgagcattagattcaaagaatatctatctttgtgaa

SEQ ID NO: 283815 - DNA, 75 bp, synthetic construct
  source 1..75: mol_type = other DNA
atgtctaaaattaaattgattcgtgaaaaataccagtatgttgatcaacaaacaggagaaattaaagaccgaact

SEQ ID NO: 283816 - DNA, 75 bp, synthetic construct
  source 1..75: mol_type = other DNA
aatctgtgcgcgttatgaggctacagatatcgcgaacatgcaggagatgttctgcatgatggtgtgcgcactgga

SEQ ID NO: 283817 - DNA, 75 bp, synthetic construct
  source 1..75: mol_type = other DNA
gtctttaaatccacagcccgccatcttcggcgctgggaagttttcagtgattttctgtcactggtcgccagtgag

SEQ ID NO: 283818 - DNA, 75 bp, synthetic construct
  source 1..75: mol_type = other DNA
atctgacaaaggtgtacaaaaggtaagtcaacaattatatttaaaagtctataaagattattctccatggaaatt

SEQ ID NO: 283819 - DNA, 75 bp, synthetic construct
  source 1..75: mol_type = other DNA
agcgtgttcaggtccacaggctgccatcttcggcgctgggaagtgttcagcgattttctggcgctggcagccagt

SEQ ID NO: 283820 - DNA, 75 bp, synthetic construct
  source 1..75: mol_type = other DNA
aatgattttgaaaaaagactggcagacctgcgccggttcagagctatgcgggattttatgcgcagcatacaggag

SEQ ID NO: 283821 - DNA, 75 bp, synthetic construct
  source 1..75: mol_type = other DNA
ggctttgaaaaacggcttgcagacctgcgccggttcagggccatgcgggacttcatgaggggattatccgacgcg

SEQ ID NO: 283822 - DNA, 75 bp, synthetic construct
  source 1..75: mol_type = other DNA
ataacgccagttttgaagaatggcatgaagtgttaatggactatgccgggttacgtggtggaagtgccgccgatg

SEQ ID NO: 283823 - DNA, 75 bp, synthetic construct
  source 1..75: mol_type = other DNA
gagatgctgctggagaagaaggcaacgctgaccatctggcagggcgtcatcccgcagcgttatgtcaccggcgtg

SEQ ID NO: 283824 - DNA, 75 bp, synthetic construct
  source 1..75: mol_type = other DNA
gttcgggtagcattgatggagtggaataaggaattttcccgttatgaattttcacctgtgtctgattcgggacca

SEQ ID NO: 283825 - DNA, 75 bp, synthetic construct
  source 1..75: mol_type = other DNA
tgccgatgcgcccggtgatcctgaaagccgcagccggaagcgggacaatgtttgtggcgcactgcccgaaggagg

SEQ ID NO: 283826 - DNA, 75 bp, synthetic construct
  source 1..75: mol_type = other DNA
cgctaaccatctggcagggcgtcatcccgcagcgttatgtcacaggcgtggtggcgggctttggcatgcaggaga

SEQ ID NO: 283827 - DNA, 75 bp, synthetic construct
  source 1..75: mol_type = other DNA
aaaggaagcggctttaatgaactgcggttcgaggacgcgacggacaaggaagaaatttacctgcacgcacagaaa

SEQ ID NO: 283828 - DNA, 75 bp, synthetic construct
  source 1..75: mol_type = other DNA
gattgtagacttcctgaacggcgacccggaccagccgataatcatggggcggacgtaccatgaggacaaccgttc

SEQ ID NO: 283829 - DNA, 75 bp, synthetic construct
  source 1..75: mol_type = other DNA
ataatacgggggacggagtttctatttgaggctaccggtcctgtagatattaaaggaaaagatattcatctgaac

SEQ ID NO: 283830 - DNA, 75 bp, synthetic construct
  source 1..75: mol_type = other DNA
atgtcctcagaaggattacgtttcacgctgtcggtggccggtatcgtggagatggcgacggcggtggtgagcttc

SEQ ID NO: 283831 - DNA, 75 bp, synthetic construct
  source 1..75: mol_type = other DNA
atttgaaattcatcatattgacgaaatccaatatgggggagaagtctatgatattgataatcttagagtaaacac

SEQ ID NO: 283832 - DNA, 75 bp, synthetic construct
  source 1..75: mol_type = other DNA
ggaggcagtccgggagacgtgatcctgccgatgcgcccggtgatcctgaaagccgcagccggaagcgggacaatg

SEQ ID NO: 283833 - DNA, 75 bp, synthetic construct
  source 1..75: mol_type = other DNA
tgcggaaaaggccacagggcagagtaattcaccgaagctgtggccgggaacgcggtttacgctgacggggcatcc

SEQ ID NO: 283834 - DNA, 75 bp, synthetic construct
  source 1..75: mol_type = other DNA
cagcagggtgagaacctgaacggacagctggagcagtatgagatatttgattatccgggaaggttcaaggatgaa

SEQ ID NO: 283835 - DNA, 75 bp, synthetic construct
  source 1..75: mol_type = other DNA
tttaccttaagtgaaggtggctatctttattgcccgccaggctccttaatgacgtttgttaacgcccaggccgaa

SEQ ID NO: 283836 - DNA, 75 bp, synthetic construct
  source 1..75: mol_type = other DNA
taattcatcgtcacaaattatggataaatactatggttcgctttcaggagttcttaatgaaattaataatgaaat

SEQ ID NO: 283837 - DNA, 75 bp, synthetic construct
  source 1..75: mol_type = other DNA
agtttatcgaccaatcttgatgtgctgatattttttagagtcgttcaggggttaatggcggggccgttaattcca

SEQ ID NO: 283838 - DNA, 75 bp, synthetic construct
  source 1..75: mol_type = other DNA
gtcacggacgtaaatggcatcgagaaaggtatgttttatgtctatcgcagtaacggcagtttgttcagtacgacg

SEQ ID NO: 283839 - DNA, 75 bp, synthetic construct
  source 1..75: mol_type = other DNA
atggcggggccgttaattccactgtcacagagtttattattaaggaattatccaccagaaaaaagaacatttgct

SEQ ID NO: 283840 - DNA, 75 bp, synthetic construct
  source 1..75: mol_type = other DNA
catgcgcgtatttattttactctggagcgatcgtccttatgccgcagttactccaggaaacgatggggtataatg

SEQ ID NO: 283841 - DNA, 75 bp, synthetic construct
  source 1..75: mol_type = other DNA
tcactttctatttctgcaaatgagattttccgtatggcggctattgcttttatcttacttacggttttggtttgg

SEQ ID NO: 283842 - DNA, 75 bp, synthetic construct
  source 1..75: mol_type = other DNA
gcgacgagcatggccgggtacgggtgaagtttcactgggaccgttatcacgggatgacggaggagagttcatgct

SEQ ID NO: 283843 - DNA, 75 bp, synthetic construct
  source 1..75: mol_type = other DNA
gggacaccggtaccgacactgcaacccactgtcctgaacactttagtcactaatgatacggatagtaatactgat

SEQ ID NO: 283844 - DNA, 75 bp, synthetic construct
  source 1..75: mol_type = other DNA
gcaggtggtacagagcattctgtcaggagaccagccgcaggcgcttcacggcagccaggggagaggaaccacgct

SEQ ID NO: 283845 - DNA, 75 bp, synthetic construct
  source 1..75: mol_type = other DNA
atgaatacactgggtgccaattcttccctgatttcgaccagaatggtcttcagcctgtttcgcatgcgtcagatg

SEQ ID NO: 283846 - DNA, 75 bp, synthetic construct
  source 1..75: mol_type = other DNA
atgaatgcactgggtgccaattcttccctgatttctaccaaaatggtcttcagcctgtttcgtatgcgtcagatg

SEQ ID NO: 283847 - DNA, 75 bp, synthetic construct
  source 1..75: mol_type = other DNA
gggttgcagcagtacaatgtcgcccgcagagggtaagccacagcacgggatcctcggtttctatcagggattcga

SEQ ID NO: 283848 - DNA, 75 bp, synthetic construct
  source 1..75: mol_type = other DNA
acttattgagatgctgaatgagtaccatattcacggtctgatgtatgtggatgacgcgatggtttacgagcatcc

SEQ ID NO: 283849 - DNA, 75 bp, synthetic construct
  source 1..75: mol_type = other DNA
gcgcgcgccaacattgtgattggtgataacaccaccgacagcattgcccagttcatttatagccacctgatttaa

SEQ ID NO: 283850 - DNA, 75 bp, synthetic construct
  source 1..75: mol_type = other DNA
acttagacggcaccttattgaccccgaaaaagaccttgcttccatcatcgatagaagccctggcccgcgctcgcg

SEQ ID NO: 283851 - DNA, 75 bp, synthetic construct
  source 1..75: mol_type = other DNA
ggcgatgatccggtgcgattcagaccctggccttggatgggattcccggtcagcaccctgaaagcggtggagatc

SEQ ID NO: 283852 - DNA, 75 bp, synthetic construct
  source 1..75: mol_type = other DNA
cgtggattcgccactgccaaccgcctatctggactacattacccagcgtcatgacggacatgacgcggtgatggc

SEQ ID NO: 283853 - DNA, 75 bp, synthetic construct
  source 1..75: mol_type = other DNA
aacaacgtccgacttttacccaggtcgcctcactggccgagacggcacaagaagttaatgcggtgtggaaattcg

SEQ ID NO: 283854 - DNA, 75 bp, synthetic construct
  source 1..75: mol_type = other DNA
cgaaccagagaaagcagacaataagacgattaaagactcagagtcaaaatcggttgaagacgaagatattattcg

SEQ ID NO: 283855 - DNA, 75 bp, synthetic construct
  source 1..75: mol_type = other DNA
cgaaccagagaaagcagacaaaaagacgataaaagactaagagtcaaaatcggttgaagacgaagatattattcg

SEQ ID NO: 283856 - DNA, 75 bp, synthetic construct
  source 1..75: mol_type = other DNA
cgaacctgaaaaaacggatgcgaatactgctgagaacctaaaaacggctgaagatgaagatatcatccgcctggt

SEQ ID NO: 283857 - DNA, 75 bp, synthetic construct
  source 1..75: mol_type = other DNA
ggtactggatgagaaacgggggacgccgttcacactggtgaaatctccggcatcaggggcggcggacaaactgca

SEQ ID NO: 283858 - DNA, 75 bp, synthetic construct
  source 1..75: mol_type = other DNA
cgagcccgaaaaagcggatgaaaagatcgcggagaatcgaaaatcggttgaagatgaagatatcattcggctggt

SEQ ID NO: 283859 - DNA, 75 bp, synthetic construct
  source 1..75: mol_type = other DNA
cgaaccagagaaagcagacaataagacgatcaaagacttagagtcaaaatcggttgaagacgaagatattattcg

SEQ ID NO: 283860 - DNA, 75 bp, synthetic construct
  source 1..75: mol_type = other DNA
cctgatgatcttccagcaggcagttgaagatcttattgtcgaaaacgatcgcgtggtcggtgctgttacccaaat

SEQ ID NO: 283861 - DNA, 75 bp, synthetic construct
  source 1..75: mol_type = other DNA
agaatgtcaatagatgttgatagaataaaaaaaattaaaaatagctatcccggtaaattaattgtattctctttg

SEQ ID NO: 283862 - DNA, 75 bp, synthetic construct
  source 1..75: mol_type = other DNA
aacgcgtctggaacatcaccgaaggttctgacgacgagcgtattgatgccgcaattgccgccacccgcaacttct

SEQ ID NO: 283863 - DNA, 75 bp, synthetic construct
  source 1..75: mol_type = other DNA
aactggaagaacacggcatgacccaactgggcgaaaatcatgacattacgctggatgtcagccgccgcatttacg

SEQ ID NO: 283864 - DNA, 75 bp, synthetic construct
  source 1..75: mol_type = other DNA
tgggtaaatgaaaatggtatttcaggtgttgtagttgaacctaatgagcctcatgaactagccaaagctatcttg

SEQ ID NO: 283865 - DNA, 75 bp, synthetic construct
  source 1..75: mol_type = other DNA
gatggattttggataggtgcacttatataattgtgactagtccagtgtatggtcaatcatctccatcgctgcaac

SEQ ID NO: 283866 - DNA, 75 bp, synthetic construct
  source 1..75: mol_type = other DNA
tttacccacctgtacatggaggaattgagcaagtcgcgtttgatatcagtgaaggcatgtttgaagaacatatac

SEQ ID NO: 283867 - DNA, 75 bp, synthetic construct
  source 1..75: mol_type = other DNA
cgcgacctgaaaccgacgctggagagcaagtttatccaggggctgttctttgctggtcagattaacggcactacc

SEQ ID NO: 283868 - DNA, 75 bp, synthetic construct
  source 1..75: mol_type = other DNA
ttgatggtaagattcatatcggcctggataattacagcggtggtcgtgctggagatccgccttccattccgctct

SEQ ID NO: 283869 - DNA, 75 bp, synthetic construct
  source 1..75: mol_type = other DNA
cgagaaacttgagaatatcgagcgtgagcgtcagcgtctgaaatcgacctgggtaacccgtcggcggaagctgca

SEQ ID NO: 283870 - DNA, 75 bp, synthetic construct
  source 1..75: mol_type = other DNA
ttccgacgatgagcgtattgacgccgcgattgccgcaacccgcaatttctttgagcaattaggcgtgccgaccca

SEQ ID NO: 283871 - DNA, 75 bp, synthetic construct
  source 1..75: mol_type = other DNA
agtgatcgaaggtgtcggcccacgctactgtccgtcgatcgaagacaaagtaatgcgctttgctgacagaaacca

SEQ ID NO: 283872 - DNA, 75 bp, synthetic construct
  source 1..75: mol_type = other DNA
atcggcggtattgggaagggacatctggtaaaagaagtggatgcactcggcggtctgatggcaaaagcgatcgat

SEQ ID NO: 283873 - DNA, 75 bp, synthetic construct
  source 1..75: mol_type = other DNA
atgaacgaagttgtaaattcaggcgtgatgaacattgcgtctttggttgtatcggtggtggttcttcttatcggg

SEQ ID NO: 283874 - DNA, 75 bp, synthetic construct
  source 1..75: mol_type = other DNA
gcccttgatcacttgcgttataccattccgaaacattatttcgatgaagcgctaagcggcggtaagcctggcgaa

SEQ ID NO: 283875 - DNA, 75 bp, synthetic construct
  source 1..75: mol_type = other DNA
taccgaaacattatttcgacgaagcgctaagtggtggcaaacctggcgatgatgatgtaattgaaatgatgcaat

SEQ ID NO: 283876 - DNA, 75 bp, synthetic construct
  source 1..75: mol_type = other DNA
cttttttaagtgaggcagcagcctggacgcatcttgggaaaataaaatcaggtaaagcgcatctggaactcccaa

SEQ ID NO: 283877 - DNA, 75 bp, synthetic construct
  source 1..75: mol_type = other DNA
ctactggcgcgggcgcgtatgggtggatcagttctggtttggtctgaaagggatggagcgttacggttatcgtga

SEQ ID NO: 283878 - DNA, 75 bp, synthetic construct
  source 1..75: mol_type = other DNA
tggggctacaccagctatggacagaccacaatttgtaaagctggtggataagctggaagaaggtgattgtcttgt

SEQ ID NO: 283879 - DNA, 75 bp, synthetic construct
  source 1..75: mol_type = other DNA
tgtttttaccaggcaaatacagcatcggctacagatacagtaattcataagccttcctcagtcggagtattaccc

SEQ ID NO: 283880 - DNA, 75 bp, synthetic construct
  source 1..75: mol_type = other DNA
gatctggtgcctatgcaggatatgtcagcttctgggatcagccaatatttttaaccgatgcctttagtgttcatt

SEQ ID NO: 283881 - DNA, 75 bp, synthetic construct
  source 1..75: mol_type = other DNA
cttctattgacagtaaaaaattattttcatttaaaattccggttcctaacatcaatgaacaacaacgaattgtcg

SEQ ID NO: 283882 - DNA, 75 bp, synthetic construct
  source 1..75: mol_type = other DNA
gcacttaccgctgagcttaccgctgagcttaccgctgagcttaacatgcgtaaaaaacagtacaactactatcgc

SEQ ID NO: 283883 - DNA, 75 bp, synthetic construct
  source 1..75: mol_type = other DNA
tcttgacgccaaaagcagcaatagtgagttaactaaaacagagatctttgcagtcaagaaacagatcaaagagct

SEQ ID NO: 283884 - DNA, 75 bp, synthetic construct
  source 1..75: mol_type = other DNA
tccctcgcccctgcccggataatccggaaaaatcccttgccatccagtctgaaatcgttcggattctggataagt

SEQ ID NO: 283885 - DNA, 75 bp, synthetic construct
  source 1..75: mol_type = other DNA
atggatgacatacgtgaaaatggtagaattctagggaattcacttcaaagaatttcatcctgcgccgtaaaaggg

SEQ ID NO: 283886 - DNA, 75 bp, synthetic construct
  source 1..75: mol_type = other DNA
ggccagctatatgtacagcgataaccattatctggcggagatggcaaccatcctcggtaagccggaagaggccaa

SEQ ID NO: 283887 - DNA, 75 bp, synthetic construct
  source 1..75: mol_type = other DNA
gccctcagcgatgccatcaccgtctttaaagatgggcgttatgtcaaaacctttaccgatatgcagcaggttgac

SEQ ID NO: 283888 - DNA, 75 bp, synthetic construct
  source 1..75: mol_type = other DNA
ctggcgcgtaacgccaaaattatcgcctttgatgagccaaccagctccctctctgcccgcgaaatcgacaatctt

SEQ ID NO: 283889 - DNA, 75 bp, synthetic construct
  source 1..75: mol_type = other DNA
aaaccattttactgagtgcaacattaattcctgtgatttaaagcatcccacttcagatgggaaagttaaagccaa

SEQ ID NO: 283890 - DNA, 75 bp, synthetic construct
  source 1..75: mol_type = other DNA
aagtataaagaccaatggggaaaagtgagcattgaagacgtgaatataggtagtggaatatatacagttacgttt

SEQ ID NO: 283891 - DNA, 75 bp, synthetic construct
  source 1..75: mol_type = other DNA
tgcccgaagtcctcggcgtagccgaccggattgtggttatgcgagaaggggagattgccggtgaattgctacatg

SEQ ID NO: 283892 - DNA, 75 bp, synthetic construct
  source 1..75: mol_type = other DNA
tggcaaccgcgtagttatggcgaggagcggctgcgtcttgatgctgtgaaagcaccaggcgtgcgtacgccaata

SEQ ID NO: 283893 - DNA, 75 bp, synthetic construct
  source 1..75: mol_type = other DNA
ccatcgataatatatccggtaacgtgcgtcgtgcctttatcggactgtacgaagagaagcaactctctgataacc

SEQ ID NO: 283894 - DNA, 75 bp, synthetic construct
  source 1..75: mol_type = other DNA
ttatcatatacgaataaatccagcgaggagctaaaagccagatgtagaaaattgggagcagagttaaattctagc

SEQ ID NO: 283895 - DNA, 75 bp, synthetic construct
  source 1..75: mol_type = other DNA
ggactaactatttatcagaaataagagattctgaactaatgttacgtctcaaaataaatcgttcatacattgagc

SEQ ID NO: 283896 - DNA, 75 bp, synthetic construct
  source 1..75: mol_type = other DNA
atggaatttaaagatttaccactaccattccaggaaatggctgcgaatatagttcgttctcaactggccactctt

SEQ ID NO: 283897 - DNA, 75 bp, synthetic construct
  source 1..75: mol_type = other DNA
atggaatttaaagatttaccaataccattccaggaaatggcagcgaatatagttcgttctcaattggctactcct

SEQ ID NO: 283898 - DNA, 75 bp, synthetic construct
  source 1..75: mol_type = other DNA
tccgagggatcacgcggcgatacgctactcaacaatgcgttaattaatagtacaaaacgcggcaatatttttggt

SEQ ID NO: 283899 - DNA, 75 bp, synthetic construct
  source 1..75: mol_type = other DNA
tctggtgatgacgctgttattagtgatggtgtttatcatccctattgctttgctggttaacagtatcgtcgacgg

SEQ ID NO: 283900 - DNA, 75 bp, synthetic construct
  source 1..75: mol_type = other DNA
attttgactcggttatagaagaaggtttaccgctcagccaggcatacatccatactggtttttatttaggttggt

SEQ ID NO: 283901 - DNA, 75 bp, synthetic construct
  source 1..75: mol_type = other DNA
aacgaagctgtcagtcgcgaacgtcagacgggaatgcagatggtgcagtcagtgcttgagcgcatcggggaggct

SEQ ID NO: 283902 - DNA, 75 bp, synthetic construct
  source 1..75: mol_type = other DNA
atctcgcctggcttaataccatcccggtaattggcgcgaagctttacgctggttggcataatttgctggatatgg

SEQ ID NO: 283903 - DNA, 75 bp, synthetic construct
  source 1..75: mol_type = other DNA
gcatgtctgtggattgttcaaccctttattctcggcttcgcatgggccggtacggtggttatcgccacctggccg

SEQ ID NO: 283904 - DNA, 75 bp, synthetic construct
  source 1..75: mol_type = other DNA
ctgctgtactggcgcggtgaacaggtagcgcaaggcattcgccattttgcaactcgtctggcaggcgctcgcggt

SEQ ID NO: 283905 - DNA, 75 bp, synthetic construct
  source 1..75: mol_type = other DNA
ttgaaaaagcacatccggatgttctggagtttttttttcagatatttgatttggggattatcgaggattctgaag

SEQ ID NO: 283906 - DNA, 75 bp, synthetic construct
  source 1..75: mol_type = other DNA
tgtttattgatgaggcccattcccttatcggtgcaggaggacttcccggacaaacggatgcagcgaatttactta

SEQ ID NO: 283907 - DNA, 75 bp, synthetic construct
  source 1..75: mol_type = other DNA
ttgggaatcatcgaggattctgaaggtaagatggtatcttttagagattgtctcataattatgacatcaaatctt

SEQ ID NO: 283908 - DNA, 75 bp, synthetic construct
  source 1..75: mol_type = other DNA
gttaaaaaagtcctccgtcgccgctaccagcaccaggtattgctctcacgcgtcaccgacactggcaagctgcgt

SEQ ID NO: 283909 - DNA, 75 bp, synthetic construct
  source 1..75: mol_type = other DNA
agtgaagccgtcagtcgtgagcgtcagacaggaatgcagatggtgcagtccgtactggaacgcatcggggaggtg

SEQ ID NO: 283910 - DNA, 75 bp, synthetic construct
  source 1..75: mol_type = other DNA
ttgcacgtttatggcgaaaaagccgctgtttatgattggtcacagcgtcggcccgttccaggatgagcaatttaa

SEQ ID NO: 283911 - DNA, 75 bp, synthetic construct
  source 1..75: mol_type = other DNA
gacccgtctggcgggcgttcgcggtgatgcggctgtgttactggcggcgcaagccattcgtgccgtggcgttggg

SEQ ID NO: 283912 - DNA, 75 bp, synthetic construct
  source 1..75: mol_type = other DNA
gggcatgattttgacagtcgctggctggccctgattgcccgtctgtttgataacgcatcccgttcactgctcctg

SEQ ID NO: 283913 - DNA, 75 bp, synthetic construct
  source 1..75: mol_type = other DNA
gattctggtgctatgttacaacattactctggccagctacctgcgggaatgtattgagtccaggggactgaagtc

SEQ ID NO: 283914 - DNA, 75 bp, synthetic construct
  source 1..75: mol_type = other DNA
ccagcaactgaaggctctggctgggaatgatgaaaatgctgtggaaaggattttcccttcagcgcagacaatctg

SEQ ID NO: 283915 - DNA, 75 bp, synthetic construct
  source 1..75: mol_type = other DNA
agcggatgagtctgaagtaattccggtgctttatgtggcgtttacccgggcaacccgtgaattactggtgacctg

SEQ ID NO: 283916 - DNA, 75 bp, synthetic construct
  source 1..75: mol_type = other DNA
ggtgggacggaaaaaccgacatccggattttgtcattattgacccggataacgggctggtatttctggaggtcaa

SEQ ID NO: 283917 - DNA, 75 bp, synthetic construct
  source 1..75: mol_type = other DNA
atgacgtccggggagaggaggggggcttcacgactggagagccttctgaatgatgactgccttgtctggtacgat

SEQ ID NO: 283918 - DNA, 75 bp, synthetic construct
  source 1..75: mol_type = other DNA
tggctgtttcctggcgtctgtttgccgcgtgggtggaagaagtcccgccgccgactgaccagccggaggaaatta

SEQ ID NO: 283919 - DNA, 75 bp, synthetic construct
  source 1..75: mol_type = other DNA
aacccgtctggcaggcgttcgtggagatgccgccgtgctgctagcggcacaagctatccgcgcggtggcgctggg

SEQ ID NO: 283920 - DNA, 75 bp, synthetic construct
  source 1..75: mol_type = other DNA
cgcgtgggtggaagaagtcccaccgccgacggaccaaccggaagaaattctcgaagaacttggcgaaatcgagaa

SEQ ID NO: 283921 - DNA, 75 bp, synthetic construct
  source 1..75: mol_type = other DNA
ccgacagagcattcagcgaaacaattgcaggacgttatgacacaacgcgggatgccttttgccacctgttttgac

SEQ ID NO: 283922 - DNA, 75 bp, synthetic construct
  source 1..75: mol_type = other DNA
ggattcaggcgcagggacgcacttctgtcctgccggtcaattatcgtaatccgaaacgcattctgcactttgctt

SEQ ID NO: 283923 - DNA, 75 bp, synthetic construct
  source 1..75: mol_type = other DNA
aaaccttcccgctggtgattacgctgtaattcgttatgtgttcatcccatttaaaggaaacgaaacaagcgctga

SEQ ID NO: 283924 - DNA, 75 bp, synthetic construct
  source 1..75: mol_type = other DNA
gtgttgctgtatctcagtccacctccccggatgtcattcagggtattgaagcctcattaaccagacaccagggag

SEQ ID NO: 283925 - DNA, 75 bp, synthetic construct
  source 1..75: mol_type = other DNA
cgctcagggattctttttttactatcgatattatttattaataatgcgtccgcgggcgggtttggccttggcgta

SEQ ID NO: 283926 - DNA, 75 bp, synthetic construct
  source 1..75: mol_type = other DNA
acttgtttctgacgcagttaaatcacttgaatctgtgatggcacttagtgaagaacaacgtaaaaacttggttca

SEQ ID NO: 283927 - DNA, 75 bp, synthetic construct
  source 1..75: mol_type = other DNA
ataatcgttgggagttagctgatttcgcggtcttaacgaaagagtatttgcagctatatggttttttttatggcc

SEQ ID NO: 283928 - DNA, 75 bp, synthetic construct
  source 1..75: mol_type = other DNA
gttcgtcatgaagagcttgatggtgtgctcaaaaagcaacaacaggatgagcagttgcggcaggcacagcaggaa

SEQ ID NO: 283929 - DNA, 75 bp, synthetic construct
  source 1..75: mol_type = other DNA
tggcgacgctgtgtgaggcagaagagctggatattcacaaagacccgaaagaaacggctgaggcattccgtatcc

SEQ ID NO: 283930 - DNA, 75 bp, synthetic construct
  source 1..75: mol_type = other DNA
ttaattcaatcatgggttgatgacagtaaaacggaaaaaaagagccaggattttgttatcactcctcccctcttt

SEQ ID NO: 283931 - DNA, 75 bp, synthetic construct
  source 1..75: mol_type = other DNA
ggtgatcaaattgggagtgttggcggaggtgaaacttccccagttgatatgggcgaagtgtccgacggttatcac

SEQ ID NO: 283932 - DNA, 75 bp, synthetic construct
  source 1..75: mol_type = other DNA
aactgaaaatcattaatccttctccctattatctgacggtgacaggaatcagggtgcaaggggtaaaattaccca

SEQ ID NO: 283933 - DNA, 75 bp, synthetic construct
  source 1..75: mol_type = other DNA
ataattcgagcttcattactatttacactattatctaccccagtatcgattagctatatactaatctggagtaga

SEQ ID NO: 283934 - DNA, 75 bp, synthetic construct
  source 1..75: mol_type = other DNA
caacaaagggttttgacgtggctcacagagacgatattgatactgcaaataaatatataacattaggtattgggt

SEQ ID NO: 283935 - DNA, 75 bp, synthetic construct
  source 1..75: mol_type = other DNA
ctactaacgacaacctgatggaattagtcgttatggttgatgccctacgtcgtgcttccgcaggtcgtatcaccg

SEQ ID NO: 283936 - DNA, 75 bp, synthetic construct
  source 1..75: mol_type = other DNA
ccgctgagcgatgaaatcaaatcactgccgaacgtgcgtactctgactctgtcaggtatgctggccgaagcgatt

SEQ ID NO: 283937 - DNA, 75 bp, synthetic construct
  source 1..75: mol_type = other DNA
ggcgaatggttggagatcctgactgaaaatggcattgcgaacatcggcgtcgatctcgatgatggcatgctggcg

SEQ ID NO: 283938 - DNA, 75 bp, synthetic construct
  source 1..75: mol_type = other DNA
gtaagtctgttagatacagcttgttctcgggttgctgtatctcagtctacatcaccagatgccattcaggatgtc

SEQ ID NO: 283939 - DNA, 75 bp, synthetic construct
  source 1..75: mol_type = other DNA
tcagacgaagcagagcattctgcttctcatcgtcccaccgataggtcttcacatgaatatctcagtaaatatact

SEQ ID NO: 283940 - DNA, 75 bp, synthetic construct
  source 1..75: mol_type = other DNA
atcgccggttatccagcaattgacgaaagcggtggtgcaaaacgcgccgcaacgcccgacgcagcagcaggaact

SEQ ID NO: 283941 - DNA, 75 bp, synthetic construct
  source 1..75: mol_type = other DNA
aaagcaccataatgtctccatcagggaagaagcaataactgcaacgatacatttatccgaccgttatctgcatgg

SEQ ID NO: 283942 - DNA, 75 bp, synthetic construct
  source 1..75: mol_type = other DNA
ttgggtcaacgatatgctatgtctgctatagcatcacaaatacttatttgccgggcggatcttaaagatccggta

SEQ ID NO: 283943 - DNA, 75 bp, synthetic construct
  source 1..75: mol_type = other DNA
ctagtgtaagaggggaatttgaaaatcgcttaaaattgctgttaaccgaacttaattctttatctggtacagcta

SEQ ID NO: 283944 - DNA, 75 bp, synthetic construct
  source 1..75: mol_type = other DNA
acttatcggagctggagggcttccagggcaaacagatgcagctaatttacttaaaccagctctcgctcgtggaga

SEQ ID NO: 283945 - DNA, 75 bp, synthetic construct
  source 1..75: mol_type = other DNA
atgtgaatatattaataaatacactgaagacttttctttactagcagaaacagggaaactcgatcctgtttcagg

SEQ ID NO: 283946 - DNA, 75 bp, synthetic construct
  source 1..75: mol_type = other DNA
attaaaaataaaaatacggagaaataacgatgcgtattgtcatagatttacaaggcgcacagacggaaagccgct

SEQ ID NO: 283947 - DNA, 75 bp, synthetic construct
  source 1..75: mol_type = other DNA
gtgttgcaggttaagacgccggagctgctcagcgagcatcaggagattgtcgccaaaccagccacgctttcgatg

SEQ ID NO: 283948 - DNA, 75 bp, synthetic construct
  source 1..75: mol_type = other DNA
caattgacgaaagcggtggtgcaaaacgcgccgcaacgccagacgcaacagcaggaactcacgccgttgccgccg

SEQ ID NO: 283949 - DNA, 75 bp, synthetic construct
  source 1..75: mol_type = other DNA
cgcaggtcgagcgtaaaacggaaaaagtgccggacagcgaaccggttattgcgcgtgcggtgttgcaggttaaga

SEQ ID NO: 283950 - DNA, 75 bp, synthetic construct
  source 1..75: mol_type = other DNA
gttccactggtctcctttaccgtggttgcgcctgggccgattaaagacagcgaggtcacacgccgaatttttaat

SEQ ID NO: 283951 - DNA, 75 bp, synthetic construct
  source 1..75: mol_type = other DNA
aggtctggctcagcgtattatcaatggcgaagtaccggaagggctgaaaggccgccgcgtactggcgctggatat

SEQ ID NO: 283952 - DNA, 75 bp, synthetic construct
  source 1..75: mol_type = other DNA
gggggaatgttgcagcgtcggcggcacgcacatcgtcgcgtggcggcggcagatctggcgctgttcactcgccaa

SEQ ID NO: 283953 - DNA, 75 bp, synthetic construct
  source 1..75: mol_type = other DNA
tacagcgtaatggtcgcaaaaccaaaggtatgattgaggcggattccgcgcgtcacgcccgtcagttgttacgtg

SEQ ID NO: 283954 - DNA, 75 bp, synthetic construct
  source 1..75: mol_type = other DNA
cggcgaacagagcggcgagctggaaaccatgcttgaacaggccgcagtcaaccaggaacgggaatttgataccca

SEQ ID NO: 283955 - DNA, 75 bp, synthetic construct
  source 1..75: mol_type = other DNA
agaaagtgtttgttgccgagccaacagtggaagacaccatcgcgattctgcgtgggctgaaagaacgttacgaac

SEQ ID NO: 283956 - DNA, 75 bp, synthetic construct
  source 1..75: mol_type = other DNA
atgaattaaaaattagaacaagaaagatggaaaccctgcgggatgggaaaatcaatatatatgattatattaatg

SEQ ID NO: 283957 - DNA, 75 bp, synthetic construct
  source 1..75: mol_type = other DNA
aatgagttaggatatgtttatggtaatgaagaaaaaacaatccgggttatgtcgttaagatttttgaagaaaaga

SEQ ID NO: 283958 - DNA, 75 bp, synthetic construct
  source 1..75: mol_type = other DNA
cgactcgatcgtcgtatcatccagctcaaactggaacaacaggcgttaatgaaagagtctgatgaagccagtaaa

SEQ ID NO: 283959 - DNA, 75 bp, synthetic construct
  source 1..75: mol_type = other DNA
aaactcgatccggtaattggtcgtgatgaagaaattcgtcgtaccattcaggtactgcaacgccgtactaaaaat

SEQ ID NO: 283960 - DNA, 75 bp, synthetic construct
  source 1..75: mol_type = other DNA
aaaattgaaaatttgcctaaaaaatataacacaggaaaagctcaaagtaatttacataaagcgactattgtccat

SEQ ID NO: 283961 - DNA, 75 bp, synthetic construct
  source 1..75: mol_type = other DNA
tggtattgaaagatactctgatgctggcaggtgctgtcatgataatggcagattcggcgcgggaaattcttaaac

SEQ ID NO: 283962 - DNA, 75 bp, synthetic construct
  source 1..75: mol_type = other DNA
ggcaggtgctgtcatgataatggcagattcggcgcgggacattcttaaacaacgcagtaatgaatccagttcaac

SEQ ID NO: 283963 - DNA, 75 bp, synthetic construct
  source 1..75: mol_type = other DNA
ccgtagccagtttgaaccacccagccccgccagagaaagacatcgttactgaatttaaagtaccaatatctttcg

SEQ ID NO: 283964 - DNA, 75 bp, synthetic construct
  source 1..75: mol_type = other DNA
aaacccatcaactgaccgatttactcaaccgcatggaggcactgctgaacgatgtcgatgcctgcaacgtcaact

SEQ ID NO: 283965 - DNA, 75 bp, synthetic construct
  source 1..75: mol_type = other DNA
gaatttttaatcatggcgtgacagccttgcgtgccttagccgcaaaacagggctggcaaattcaggagcaggctg

SEQ ID NO: 283966 - DNA, 75 bp, synthetic construct
  source 1..75: mol_type = other DNA
ggcactggctgaggcctgcccggcacttgttgaagcggcactggcagaagaagcagccgctgtttttgagactgc

SEQ ID NO: 283967 - DNA, 75 bp, synthetic construct
  source 1..75: mol_type = other DNA
gccgtttcagaagacctggcgttcgtctcggacgtttttgccgccttcgcggaatttcctgccgctgctgccgag

SEQ ID NO: 283968 - DNA, 75 bp, synthetic construct
  source 1..75: mol_type = other DNA
gctgtttcagaagacttagcgttcgtctcggacgtttttgccgccttcgcggaatttcctgccgccgttgccgag

SEQ ID NO: 283969 - DNA, 75 bp, synthetic construct
  source 1..75: mol_type = other DNA
ggaaataaatggactttcgattattcaggcagtcggcgatatcttattttcaatcaagattatatctcaaataaa

SEQ ID NO: 283970 - DNA, 75 bp, synthetic construct
  source 1..75: mol_type = other DNA
tcagaggtttttgctgcagaagcagacctcgctgctgcagtggcttgctcagtggctttgccagccttcgttgtg

SEQ ID NO: 283971 - DNA, 75 bp, synthetic construct
  source 1..75: mol_type = other DNA
ctggtctctgtcgtcacagactcatgccgataaatacgagctcatcaataaaacgtcccgtgtatctcctgacag

SEQ ID NO: 283972 - DNA, 75 bp, synthetic construct
  source 1..75: mol_type = other DNA
tagtctccaggattcccggggcggttcactgtgaaaacggacggtcacttacagcacaattgcgactgggaccgg

SEQ ID NO: 283973 - DNA, 75 bp, synthetic construct
  source 1..75: mol_type = other DNA
catcatcgctgtactgacgtatctgacgaatctctatttcaaaatccgcgaagacaaccgccgcagcaggagccg

SEQ ID NO: 283974 - DNA, 75 bp, synthetic construct
  source 1..75: mol_type = other DNA
cttacagcacaactgcgactggggccggcagacatcctggagtcagatgagaatggcattattccggagcaggac

SEQ ID NO: 283975 - DNA, 75 bp, synthetic construct
  source 1..75: mol_type = other DNA
atgaacgtactaaaaaaacttatgcagcgtctgtgcggttgcggaaagcatgatgaccgtgaacatggggagtta

SEQ ID NO: 283976 - DNA, 75 bp, synthetic construct
  source 1..75: mol_type = other DNA
atgaatatactaaaaaaacttatgcagcgtctgtgcggttgcggaaagcatgatggccgtgaacacgtgcagtcg

SEQ ID NO: 283977 - DNA, 75 bp, synthetic construct
  source 1..75: mol_type = other DNA
atctacagcgatgacgctgctgaaaaatggattcgcaaggcttacccggagcttaagcagtaccagattgaacgc

SEQ ID NO: 283978 - DNA, 75 bp, synthetic construct
  source 1..75: mol_type = other DNA
attttcaggcggcagcaaaggtgctgaaattcccggaagtgcaaattcaggaaatcatgagtaactgtgcgagat

SEQ ID NO: 283979 - DNA, 75 bp, synthetic construct
  source 1..75: mol_type = other DNA
attttcaggcggcagcaaaggtgctgaaattcccggaagtgcaaattcaggaaatcattagtaactgtgcgagag

SEQ ID NO: 283980 - DNA, 75 bp, synthetic construct
  source 1..75: mol_type = other DNA
attttcaggcgccagcaaaggtgctgaaattcccggaagtgcaaattcaggaaatcatcagtaactgtgcgagat

SEQ ID NO: 283981 - DNA, 75 bp, synthetic construct
  source 1..75: mol_type = other DNA
tttcaggcgccagcaaaggtgctgaaattaccggaagtgcagattcatgagatcgttagtcactttgcgagaatg

SEQ ID NO: 283982 - DNA, 75 bp, synthetic construct
  source 1..75: mol_type = other DNA
tttcaggcgccagcaaaggtgctgaaattaccggaagtgcatattcatgagatcgttagtcactatgcgagaatg

SEQ ID NO: 283983 - DNA, 75 bp, synthetic construct
  source 1..75: mol_type = other DNA
tttcaggcgccagcaaaggtgctgaaattaccggaagtgcaaattcatgatatcgttagtcactctgcgagaatg

SEQ ID NO: 283984 - DNA, 75 bp, synthetic construct
  source 1..75: mol_type = other DNA
tggtgatactggatgcggataaaaagcagatacagtgcgtggtaagaccgctgcaaatcctgcgtgctgacggga

SEQ ID NO: 283985 - DNA, 75 bp, synthetic construct
  source 1..75: mol_type = other DNA
gtggtgatactggatacagataaaaagctgatacagtgtgtggtaagaccgctgcaaatcctgcgtgctgacggg

SEQ ID NO: 283986 - DNA, 75 bp, synthetic construct
  source 1..75: mol_type = other DNA
cagatacagtgcgtggtaagaccactgcaaatcctgcgtgctgacggggcatgggaaaatattggtgggatgaag

SEQ ID NO: 283987 - DNA, 75 bp, synthetic construct
  source 1..75: mol_type = other DNA
tacgggaatacacatcagcgatctcaaactggcaatggggcttaacgcatccaaaggcaaaaaaaacggcaatcg

SEQ ID NO: 283988 - DNA, 75 bp, synthetic construct
  source 1..75: mol_type = other DNA
aaaaagctgatacagtgtgtggtaagaccgctgcaaatcctgcgtgctgacgggacgtgggaaaatattggcggg

SEQ ID NO: 283989 - DNA, 75 bp, synthetic construct
  source 1..75: mol_type = other DNA
ggttgcggaaagcatgatggccgtgaacacgtgcagtcgcttacagcacaactgcgactgggaccggcagacatt

SEQ ID NO: 283990 - DNA, 75 bp, synthetic construct
  source 1..75: mol_type = other DNA
agcgtctgtgtggttgcggaaagcatgatgacagtgaaaacggggagttacttacagcacagctgcgactgggac

SEQ ID NO: 283991 - DNA, 75 bp, synthetic construct
  source 1..75: mol_type = other DNA
aaaaaacttatgcagcgtctgtgtggttgcggaaagcatgatggccgtgaacacgggcagtcgcttacagcacaa

SEQ ID NO: 283992 - DNA, 75 bp, synthetic construct
  source 1..75: mol_type = other DNA
ggtattattccggagcaggacagggtaatcacgcaggtggtgatactggatgcggataaaaagcagatacagtgc

SEQ ID NO: 283993 - DNA, 75 bp, synthetic construct
  source 1..75: mol_type = other DNA
gtgaaatatgaatcagatggaggcccaggcatcgcgcggatcatggcttttttgatggggtccagcgaggcgctg

SEQ ID NO: 283994 - DNA, 75 bp, synthetic construct
  source 1..75: mol_type = other DNA
tgcgcgctgatgtatgcgagtaatgcgcaggatgcgatcccgacactgattgatcagggcgataatgatcagttt

SEQ ID NO: 283995 - DNA, 75 bp, synthetic construct
  source 1..75: mol_type = other DNA
ctggcaaatacaccagcgtttctgcctttgcgccgattgtgaatccgtgctgcgtcccgtggggaatcaaagcgt

SEQ ID NO: 283996 - DNA, 75 bp, synthetic construct
  source 1..75: mol_type = other DNA
accgccagcggtacaacgcagtcggcggtacgtgtcgaagaaggcaccctgaaaggtgatgttgctgatatcctt

SEQ ID NO: 283997 - DNA, 75 bp, synthetic construct
  source 1..75: mol_type = other DNA
caaccttgaaactgacagcctgacttatctttccgacgtgacggttaatggcaatctgaccaatacgtccggtgc

SEQ ID NO: 283998 - DNA, 75 bp, synthetic construct
  source 1..75: mol_type = other DNA
gatggtactgtgttgcgattgacgcagcaggatacgaaccaggcgctggatgcctcgctgtttagcggcgacggt

SEQ ID NO: 283999 - DNA, 75 bp, synthetic construct
  source 1..75: mol_type = other DNA
attggtgatgaacggtaatactgctggcaacacaactgtggtggttaactccattacagggattggtgagccgac

SEQ ID NO: 284000 - DNA, 75 bp, synthetic construct
  source 1..75: mol_type = other DNA
atggctgacagcagcgggcagcatcaggacgagggtagcacattgacgaaaacgggtgctggtaccctggaactg

SEQ ID NO: 284001 - DNA, 75 bp, synthetic construct
  source 1..75: mol_type = other DNA
cgcggatcaggatattcagtcaattgatgctatttccagcggcactatcgacatcagcgatggtacggttttgcg

SEQ ID NO: 284002 - DNA, 75 bp, synthetic construct
  source 1..75: mol_type = other DNA
cacagaccattcaggcactgacggaactgcagttcagcgtcacccagaaaagcgccactgagcgcccgtttaccg

SEQ ID NO: 284003 - DNA, 75 bp, synthetic construct
  source 1..75: mol_type = other DNA
catcagcagccctgtgagttcaaactctacccaggtacgctgcatgcctttttgcattattcacgaatgatgaaa

SEQ ID NO: 284004 - DNA, 75 bp, synthetic construct
  source 1..75: mol_type = other DNA
tattcaagcatcactcctatcatggaattactgatcttgaaagggatgttgatgagttacaaagaaaatctaatc

SEQ ID NO: 284005 - DNA, 75 bp, synthetic construct
  source 1..75: mol_type = other DNA
caaatgcagaaagccagacaccgacggaattctcatttaaacccgttaatccaacacagtgtggtaacctgactg

SEQ ID NO: 284006 - DNA, 75 bp, synthetic construct
  source 1..75: mol_type = other DNA
atgttgtcaagggtaaatcacccatggtattcaacagaacattccttggcgaaagctcctctatttctgtttggt

SEQ ID NO: 284007 - DNA, 75 bp, synthetic construct
  source 1..75: mol_type = other DNA
ccaacaaaagaggctattcgttttgccagtgcggttgccgcgatgaaatgtacccagcctggcggtcgggccggc

SEQ ID NO: 284008 - DNA, 75 bp, synthetic construct
  source 1..75: mol_type = other DNA
aacgagtgcagctctgctcatcgtatgagcctgtgctgtggtttaccaatgatgcgagtaaggttcgttcaaaca

SEQ ID NO: 284009 - DNA, 75 bp, synthetic construct
  source 1..75: mol_type = other DNA
gacggataacaataccggtaagctgaccggtacccgtattcacacgccgtttctgtttaccaaggaaattgattc

SEQ ID NO: 284010 - DNA, 75 bp, synthetic construct
  source 1..75: mol_type = other DNA
atcgtggcccaggcgcaggcggaaattgaagctgagcgtaaacgtgcccgtgaagagctgcgtaagcaagttgct

SEQ ID NO: 284011 - DNA, 75 bp, synthetic construct
  source 1..75: mol_type = other DNA
gcggcctatttaatcgataaacttccaggccaagcaatcgttacaagccactcaccccaaattgcagtgaatttt

SEQ ID NO: 284012 - DNA, 75 bp, synthetic construct
  source 1..75: mol_type = other DNA
accgctgagcttaacatgcgtaaaaaacagtacaactattatcgcgaccagttgttgagttttaaagagggtgag

SEQ ID NO: 284013 - DNA, 75 bp, synthetic construct
  source 1..75: mol_type = other DNA
ggccgcagccaacgggtgaacgttattgtgttaactcagcctctttacgctttaccgatggcgaaaacggcgaag

SEQ ID NO: 284014 - DNA, 75 bp, synthetic construct
  source 1..75: mol_type = other DNA
taacgatgcgggtcaggaggtcgagtacttcaacaccaaacttgagaacgtgaaagtggtgaaggtgaaccctgt

SEQ ID NO: 284015 - DNA, 75 bp, synthetic construct
  source 1..75: mol_type = other DNA
tatccgatgccgtcgatgggcgctttcctgcaactgctgccgaaagggtttgcctcacgcgttgcgcgtaccact

SEQ ID NO: 284016 - DNA, 75 bp, synthetic construct
  source 1..75: mol_type = other DNA
gtgaaaccaggttcagtgaagacgcgtgcatcagaaaactgggtatatctgccagcatttaacgaaggcatgcgc

SEQ ID NO: 284017 - DNA, 75 bp, synthetic construct
  source 1..75: mol_type = other DNA
aaagatatcttcgtggtgccgtcctggcacggtgtgtcgttccagaccacgcaagataccgttttatttagtttt

SEQ ID NO: 284018 - DNA, 75 bp, synthetic construct
  source 1..75: mol_type = other DNA
aacccggaaagcctgggcgctcgtgctgaaaactggatctacattcctgagttcaaccgcgcgatgcgtgatgcg

SEQ ID NO: 284019 - DNA, 75 bp, synthetic construct
  source 1..75: mol_type = other DNA
gttcaaccgcgcaatgcgtgacgcctattacaaccgtccgagagaacagcgcgacgcgtggttgttgtggatcgg

SEQ ID NO: 284020 - DNA, 75 bp, synthetic construct
  source 1..75: mol_type = other DNA
aataaccatgcagttattgctgatgattctactatcgatttttcaaagtatcatcactttatcgccatgccagat

SEQ ID NO: 284021 - DNA, 75 bp, synthetic construct
  source 1..75: mol_type = other DNA
atcgtgcagccgtggctatttctgcaattgttttttctattattacaggagttcctatggggattgttggttttg

SEQ ID NO: 284022 - DNA, 75 bp, synthetic construct
  source 1..75: mol_type = other DNA
cactggctgaggcctgcccggcacttgttgacgcggcactggcagatgatgcagccgctgtttttgagcctgccg

SEQ ID NO: 284023 - DNA, 75 bp, synthetic construct
  source 1..75: mol_type = other DNA
ggcgcagacacttcgctatcaaagcaacaggcacttgagcggtatggcattaattataaaggcgagaaaaaactt

SEQ ID NO: 284024 - DNA, 75 bp, synthetic construct
  source 1..75: mol_type = other DNA
ctctgccttaatggacgcctcacgggccgatgatgcagctgctgtctcagagtctgccgcagctgaggcgctctg

SEQ ID NO: 284025 - DNA, 75 bp, synthetic construct
  source 1..75: mol_type = other DNA
cgttaacttttcggttagatggcaccctgctattcgcattgtcattggctgattttactgcctttggcgttgccg

SEQ ID NO: 284026 - DNA, 75 bp, synthetic construct
  source 1..75: mol_type = other DNA
atgcggcgctttctgccgattttccggcggcggtggcactggctgaggcctgcccggcacttgttgacgcggcac

SEQ ID NO: 284027 - DNA, 75 bp, synthetic construct
  source 1..75: mol_type = other DNA
atgcgttcgtttctgatgattttgccgcctcttttgaagccgccgcatcccgggctgaggtggcagcttctgacg

SEQ ID NO: 284028 - DNA, 75 bp, synthetic construct
  source 1..75: mol_type = other DNA
ccacggcggatgcaatatcctctgcccgttttgctgctgtctcggcgcgcgttgccgcggattccgccgtacttt

SEQ ID NO: 284029 - DNA, 75 bp, synthetic construct
  source 1..75: mol_type = other DNA
gaggctgcactactggcgctcgaggctgcgctcgtttctgatgattttgccgcctcttttgaagccgacgcatcc

SEQ ID NO: 284030 - DNA, 75 bp, synthetic construct
  source 1..75: mol_type = other DNA
cgcctgtctggtcgcctcatcttttgaagcagacgcagatgatgccgatgacgccgccgaactggcggacgatgc

SEQ ID NO: 284031 - DNA, 75 bp, synthetic construct
  source 1..75: mol_type = other DNA
tcccctttttcgtcgtgctcgcatcctcaagcgccacggcggatgcaatatcctctgcccgttttgccgctgtct

SEQ ID NO: 284032 - DNA, 75 bp, synthetic construct
  source 1..75: mol_type = other DNA
ggcactggctgaggcctgcccggcacttgttgacgcggcgctggcagatgatgcagccgctgtttttgagcctgc

SEQ ID NO: 284033 - DNA, 75 bp, synthetic construct
  source 1..75: mol_type = other DNA
ccgttttgctgctgtctcggcgcgcgttgccgcggattccgccgtacttttgctctgtgctgccgctgccgcact

SEQ ID NO: 284034 - DNA, 75 bp, synthetic construct
  source 1..75: mol_type = other DNA
tgttgttgagttaagcgtaccaatatctttcggcgtcagtgctatatcctccgaaagcgccttaccattcacctt

SEQ ID NO: 284035 - DNA, 75 bp, synthetic construct
  source 1..75: mol_type = other DNA
gacgcctgtctggtcgcctcatcttttgaagcagacgcagatgatgccgatgacgccgccgaactggcggacgat

SEQ ID NO: 284036 - DNA, 75 bp, synthetic construct
  source 1..75: mol_type = other DNA
gtttccgacgctttcgcgttcgtttcggatgtcttcgctgcggaagcagacctcgctgctgcgctggcctgttca

SEQ ID NO: 284037 - DNA, 75 bp, synthetic construct
  source 1..75: mol_type = other DNA
atgccgatgacgccgccgaactggcggacgatgccgcggccgtttttgaggattctgcacgggttttccgacgct

SEQ ID NO: 284038 - DNA, 75 bp, synthetic construct
  source 1..75: mol_type = other DNA
accgacagaattgatgctgagctgcttgcgcagcttgcttctgttattcatgcccgacctgaccgtgagcgtttt

SEQ ID NO: 284039 - DNA, 75 bp, synthetic construct
  source 1..75: mol_type = other DNA
tctgatgtcttcgctgcggaagcagatctctctgctgcactggcctgttcagcggcttcaccagccttcgttgtg

SEQ ID NO: 284040 - DNA, 75 bp, synthetic construct
  source 1..75: mol_type = other DNA
tcggatgtcttcgctgcggaagcagacctcgctgctgcgctggcctgtacagcggcttcgccagccttcgttgtg

SEQ ID NO: 284041 - DNA, 75 bp, synthetic construct
  source 1..75: mol_type = other DNA
agcgccacggcggatgcaatatcctctgcccgttttgccgctgtctcggcgcgcgttgccgcggattccgccgta

SEQ ID NO: 284042 - DNA, 75 bp, synthetic construct
  source 1..75: mol_type = other DNA
cggcactggcgctggtagctgccgcgctttttgatgactctgcagcagcagcacttttcgctgcttcactggcct

SEQ ID NO: 284043 - DNA, 75 bp, synthetic construct
  source 1..75: mol_type = other DNA
tctcggatgtcttcgctgcggaagcagacctcgctgctgcgctggcctgtacagcggcttcgccagcattcgttg

SEQ ID NO: 284044 - DNA, 75 bp, synthetic construct
  source 1..75: mol_type = other DNA
cggcggcggtaccggctcaggcccgtccggcccctgctgacgcggcactggccgatgacgcagccgctgtttttg

SEQ ID NO: 284045 - DNA, 75 bp, synthetic construct
  source 1..75: mol_type = other DNA
ggtgcctggcgaacgattggtgcgcctgacggaagttacagcaatttgggttctcacaggggaacatttaacggg

SEQ ID NO: 284046 - DNA, 75 bp, synthetic construct
  source 1..75: mol_type = other DNA
tttctgatgattttgccgcctctttggaggccgccgcatctctggctgaagtggcggcttctgacgctttcgtcg

SEQ ID NO: 284047 - DNA, 75 bp, synthetic construct
  source 1..75: mol_type = other DNA
tatcgtcgttgcgccaaacaacgaactgttggaaaaactgaaatccaacattgaagaagttcgcgcgcgtggcgg

SEQ ID NO: 284048 - DNA, 75 bp, synthetic construct
  source 1..75: mol_type = other DNA
gcgtgaggccgttctgcgtgctatcccgcaactgcgtggcgcgtacggtacggtgattatggacacccgcaaccc

SEQ ID NO: 284049 - DNA, 75 bp, synthetic construct
  source 1..75: mol_type = other DNA
tcagttgtacgtctttgccgatcaggatgcaggatttgtgagcagcgataacatgcacatcatcgagatgccgca

SEQ ID NO: 284050 - DNA, 75 bp, synthetic construct
  source 1..75: mol_type = other DNA
tacctataataagcatgacctggacgactattctccactaaccagtcagcacattgcagatggaatgacggtttc

SEQ ID NO: 284051 - DNA, 75 bp, synthetic construct
  source 1..75: mol_type = other DNA
gcggtggttggcgggctgttatgcgttctgttactggcaatggtcggctggaaaagtctctatgcgctgatcatg

SEQ ID NO: 284052 - DNA, 75 bp, synthetic construct
  source 1..75: mol_type = other DNA
ggttcggccaggcgatgtttggctggcatagctggcaactgttgttggcagaactcggtacgctggcgttggtgt

SEQ ID NO: 284053 - DNA, 75 bp, synthetic construct
  source 1..75: mol_type = other DNA
tgctggctggctgtaaattattaaagggacgttatcggctactggcggtgattggcggactgctatgcatcctgt

SEQ ID NO: 284054 - DNA, 75 bp, synthetic construct
  source 1..75: mol_type = other DNA
tatgacccgtctgcgtcgtctcggtaaagtgcaaatgctggcccaggcagcggaagaacatcctctgcatggcgg

SEQ ID NO: 284055 - DNA, 75 bp, synthetic construct
  source 1..75: mol_type = other DNA
tggtttcccgctactggtttgaatcgctagcaggtattccgtgcgacgtcgaaatcgcctctgaattccgctatc

SEQ ID NO: 284056 - DNA, 75 bp, synthetic construct
  source 1..75: mol_type = other DNA
agcaggaaaaacaacaatatcaaaatattgttgctaaatacgcctgaagattacccgtaccgcgacattgaaaac

SEQ ID NO: 284057 - DNA, 75 bp, synthetic construct
  source 1..75: mol_type = other DNA
gtaaagctatcggtagcggcggcgggagcgaatgcaaaagcgccgaaaaggacttctttaatatcatcaaaaaga

SEQ ID NO: 284058 - DNA, 75 bp, synthetic construct
  source 1..75: mol_type = other DNA
gaaagcggttaaaccgccgaaagagttaccggatgaaccaacagatgcacagatagcgaaatacaacgagcaaat

SEQ ID NO: 284059 - DNA, 75 bp, synthetic construct
  source 1..75: mol_type = other DNA
gcagccaaagccaacaatggcgtaacgacctcggtcaatgaagacggcgtgattgagcacgagaaagcccgtccg

SEQ ID NO: 284060 - DNA, 75 bp, synthetic construct
  source 1..75: mol_type = other DNA
aaacaggcgagatccgctacgagtgggaccgtaaatcaggtgaaaacgcgaccgggttcccggcacagctggaaa

SEQ ID NO: 284061 - DNA, 75 bp, synthetic construct
  source 1..75: mol_type = other DNA
gtaacagcaatcagggaggccgccaccacagggaaaatcacacctgcaattgcggatgtcgtaaacgacggctct

SEQ ID NO: 284062 - DNA, 75 bp, synthetic construct
  source 1..75: mol_type = other DNA
ggctgctgaaaattcctcgcttaagcaatctgagaaggaatttaatgacttttgtcgtgaggagtttagcgaatg

SEQ ID NO: 284063 - DNA, 75 bp, synthetic construct
  source 1..75: mol_type = other DNA
gcggggctgaaggctgcgcaccctcaaccattcggacctgagatgatgaaggctcttgatgcgtatgagaagcat

SEQ ID NO: 284064 - DNA, 75 bp, synthetic construct
  source 1..75: mol_type = other DNA
tggttcataccatcttcaacgaaagaatattattttgcctctctcgtcgcctttgctttatggaaagaggcaccc

SEQ ID NO: 284065 - DNA, 75 bp, synthetic construct
  source 1..75: mol_type = other DNA
ggagcgctggatcaactggcgtcgtcgccgtactgcggcggtggctgtgatcaccggtgtgaactacggcagtgc

SEQ ID NO: 284066 - DNA, 75 bp, synthetic construct
  source 1..75: mol_type = other DNA
gaggtcagactttcagagatcaaagaatgggatctgaaagaaatgttgtggacagtgccaaaagagcacagcaaa

SEQ ID NO: 284067 - DNA, 75 bp, synthetic construct
  source 1..75: mol_type = other DNA
taatggcgtatggcaaaaatatgctggtggtcgctggattgaagctgatgccgggaaggagctgaagattgatgt

SEQ ID NO: 284068 - DNA, 75 bp, synthetic construct
  source 1..75: mol_type = other DNA
caaatgtgctttggccaacgtttatttctggcaagtggttcgaaaaggacggccgccggtttgttcatggcaccc

SEQ ID NO: 284069 - DNA, 75 bp, synthetic construct
  source 1..75: mol_type = other DNA
atataagaagcaatgtgaaagaaatgcttgatgagctcagaactgtttacggtctgagaacaggagagttttttg

SEQ ID NO: 284070 - DNA, 75 bp, synthetic construct
  source 1..75: mol_type = other DNA
actcaaaatggtgctacaaaccgtttgaagatctgattcaaccggcgcgtgctaccgacgaccacaacaaacgcg

SEQ ID NO: 284071 - DNA, 75 bp, synthetic construct
  source 1..75: mol_type = other DNA
caccgcggcatttggtacggcaactcgtgcagtaggccatggcaaaaaagtgggtatcgtgcagtttattaaagg

SEQ ID NO: 284072 - DNA, 75 bp, synthetic construct
  source 1..75: mol_type = other DNA
atgagtgatgaacgctaccaacagcgtcagcagcgagtgaaagaaaaagtagatgctcgtgtggcccaggcccag

SEQ ID NO: 284073 - DNA, 75 bp, synthetic construct
  source 1..75: mol_type = other DNA
gtgcagtttattaaaggcacctggcctaatggcgaacgcaatctgctggagccacatggcgttgagtttcaggtg

SEQ ID NO: 284074 - DNA, 75 bp, synthetic construct
  source 1..75: mol_type = other DNA
tgcgcagctcggaattgtgcgcgttgcgctggacagatatagacttcatcagcaacactgcacatgtccagactg

SEQ ID NO: 284075 - DNA, 75 bp, synthetic construct
  source 1..75: mol_type = other DNA
tatctctccctagaggagtaactattcggcagcataaaactggtagcactctgattatcacttttacatataaag

SEQ ID NO: 284076 - DNA, 75 bp, synthetic construct
  source 1..75: mol_type = other DNA
ctgctggagccgcacggcgttgagtttcaggtaatggcaactggcttcacctgggatacgcaaaaccgtgagtct

SEQ ID NO: 284077 - DNA, 75 bp, synthetic construct
  source 1..75: mol_type = other DNA
ctgactgaagaagcaatgttggcgctgataaatcagaagccatttacattcatgaaggatgctactgtctttgaa

SEQ ID NO: 284078 - DNA, 75 bp, synthetic construct
  source 1..75: mol_type = other DNA
gcccacgttcagaacgccagtgtagttggcgtaatcaaggggacaaaaacaaaagccggtacacgaaaagttgaa

SEQ ID NO: 284079 - DNA, 75 bp, synthetic construct
  source 1..75: mol_type = other DNA
atctggcggatgagtttgttgccataaaggattacgacggtgccaaggaagtcatggagcaacatgtcctgccgg

SEQ ID NO: 284080 - DNA, 75 bp, synthetic construct
  source 1..75: mol_type = other DNA
gtcagcagcgagtgaaagaaaaagtagatgcccgtgtggcccagtcccaggatgaacgcggtattatcatcgtct

SEQ ID NO: 284081 - DNA, 75 bp, synthetic construct
  source 1..75: mol_type = other DNA
cactgcggcatttggtacggcaacacgcgcggtaggtcacggaaaaaaagtgggcgtcgtgcagtttattaaagg

SEQ ID NO: 284082 - DNA, 75 bp, synthetic construct
  source 1..75: mol_type = other DNA
catgaaggacgcgactgtctttgaagatccaaaaaccaataaaccttgggccagcgcagacgccataagaaagaa

SEQ ID NO: 284083 - DNA, 75 bp, synthetic construct
  source 1..75: mol_type = other DNA
tggcctatcacgttgctctgattaagggcactgacgttgaccagccacgtaatctggcaaaatcggtaacggttg

SEQ ID NO: 284084 - DNA, 75 bp, synthetic construct
  source 1..75: mol_type = other DNA
ctattgactctggttaaaaacacgctggatacacatactgttcccgggcttgggctgatatcacgccattcttta

SEQ ID NO: 284085 - DNA, 75 bp, synthetic construct
  source 1..75: mol_type = other DNA
ctacattgcgctgtttacctccatcaatgtggagttatcgctgaaaaaactgctgcaaaaaccggtgttttatca

SEQ ID NO: 284086 - DNA, 75 bp, synthetic construct
  source 1..75: mol_type = other DNA
cctggtatctttactgtgggccgatggtttttatctgcgcaatcgcgctattgactctggttaaaaacacgctgg

SEQ ID NO: 284087 - DNA, 75 bp, synthetic construct
  source 1..75: mol_type = other DNA
tatgatatttatgagggcgcgttttttgaacgtgtagtagctgtgcagacacaatggtttaaacaatatctttaa

SEQ ID NO: 284088 - DNA, 75 bp, synthetic construct
  source 1..75: mol_type = other DNA
cgcgaatattctaaattctgcctctcgtgtcagcgtaccgctatttttcatgatttccggctatctcttttttgg

SEQ ID NO: 284089 - DNA, 75 bp, synthetic construct
  source 1..75: mol_type = other DNA
ttttttatagcgcaatcgcgctgctctacattgcactgtttacctccattaatgtggagttagcgctgaaaaacc

SEQ ID NO: 284090 - DNA, 75 bp, synthetic construct
  source 1..75: mol_type = other DNA
tttctgtccacgctgaataaaatggcagagaagaagaaaaacaccgggaaagagatgtttgtgggggttacacgg

SEQ ID NO: 284091 - DNA, 75 bp, synthetic construct
  source 1..75: mol_type = other DNA
agttattaatgatgcacaggcggctgcatgggctgaatacagtgttgttcatgaaaaaataaaaagcatggttta

SEQ ID NO: 284092 - DNA, 75 bp, synthetic construct
  source 1..75: mol_type = other DNA
ggataccctgctggcagcacgttctggtagcccgctggtgattggcctggggatgggcgaaaactttatcgcttc

SEQ ID NO: 284093 - DNA, 75 bp, synthetic construct
  source 1..75: mol_type = other DNA
tgtggaattaaaacaatggcctctcctggatattctttggatatttaatgcaacgctgataatcagtttattgtt

SEQ ID NO: 284094 - DNA, 75 bp, synthetic construct
  source 1..75: mol_type = other DNA
gtgttagccccgtcacctgggatatcgccaatgttctgaattctgcctctcgtgtcagcgtgccgctatttttca

SEQ ID NO: 284095 - DNA, 75 bp, synthetic construct
  source 1..75: mol_type = other DNA
tttctgtccacactgaataaaatggcagagaagaagaaaaacaccgggaaagagatgtttgtgggggttacgcgg

SEQ ID NO: 284096 - DNA, 75 bp, synthetic construct
  source 1..75: mol_type = other DNA
ttcgattgaccaaacttagtctttcaacaataaacctttgtataactaactctattccagtcaaaaaatattcac

SEQ ID NO: 284097 - DNA, 75 bp, synthetic construct
  source 1..75: mol_type = other DNA
gaccggatatttgacacagcggagagcgtctgtattgcctctgttgcacgcacggttctgcgtgccgtccgtgac

SEQ ID NO: 284098 - DNA, 75 bp, synthetic construct
  source 1..75: mol_type = other DNA
gagcaatgggtggaaccgttatggaaaagtatcttgagcaacaaagggttaatgccgctgctttggcgcttcttt

SEQ ID NO: 284099 - DNA, 75 bp, synthetic construct
  source 1..75: mol_type = other DNA
ttgcacgcacggttctgcgtgccgtccgtgacacagtggtctctgttgcccgcgcggtatggaactggatcttct

SEQ ID NO: 284100 - DNA, 75 bp, synthetic construct
  source 1..75: mol_type = other DNA
gccctgtctgtggatgagtatttctggcgacacatcctgcaccggggacatcagcaggtgctgtttgtggtgatg

SEQ ID NO: 284101 - DNA, 75 bp, synthetic construct
  source 1..75: mol_type = other DNA
tcactgacctgcccggggtgggcgagagccgggacagggatgcagagtatgaggccctgtaccgtgacattctgc

SEQ ID NO: 284102 - DNA, 75 bp, synthetic construct
  source 1..75: mol_type = other DNA
tgtgccttgaggtggtggatcgcgcggttaaagacgaagagatcctgacgcaactggcgatcccgccgttgtact

SEQ ID NO: 284103 - DNA, 75 bp, synthetic construct
  source 1..75: mol_type = other DNA
gaggtacggatctacaattcacgcacgaagaaatttatggacatacttggtccaggtgcgcgtggcgtttcaggt

SEQ ID NO: 284104 - DNA, 75 bp, synthetic construct
  source 1..75: mol_type = other DNA
atgaaagtaagaaacccagaacagattagtatccctgcaagtaataccactaaagatccaggccttactcattct

SEQ ID NO: 284105 - DNA, 75 bp, synthetic construct
  source 1..75: mol_type = other DNA
ggcgggatctggaccagatcgccgctgacaacggtttcgactttcatatcatcgacaatgaaatctattgggatg

SEQ ID NO: 284106 - DNA, 75 bp, synthetic construct
  source 1..75: mol_type = other DNA
ttgaccacgctgatggtgattacgccgatgaaccgatgatctaccaggcgtttcaacctctgccgcgatttggcg

SEQ ID NO: 284107 - DNA, 75 bp, synthetic construct
  source 1..75: mol_type = other DNA
aaaccaactgcggaactgcatcagatgtgccttgaggtggtggatcgtgcggttcaagacgaagaaatcctgacg

SEQ ID NO: 284108 - DNA, 75 bp, synthetic construct
  source 1..75: mol_type = other DNA
ccgcctgcaggacgagttgtgcacggaatctgtccgggggcaggcccgtgaacagtttaccggtgcggtggaccg

SEQ ID NO: 284109 - DNA, 75 bp, synthetic construct
  source 1..75: mol_type = other DNA
tggcattatgggaaaaagcggggccggtaaatcctcactctgtaatgcactgtttcagggggaggtcaccccggt

SEQ ID NO: 284110 - DNA, 75 bp, synthetic construct
  source 1..75: mol_type = other DNA
tcactctgtaatgcactgtttcagggggaggtcaccccggtcattgaaccgccccgggtttcctggagagtgttt

SEQ ID NO: 284111 - DNA, 75 bp, synthetic construct
  source 1..75: mol_type = other DNA
gacccgtgaacagtttaccggtgcggtggaccggatatttgacacggcggagagtgtctgtgttgcctctgttgt

SEQ ID NO: 284112 - DNA, 75 bp, synthetic construct
  source 1..75: mol_type = other DNA
caacaaagcatgttcgagtacaccggcaactacagttcgtttgaagtacagcgcgccacccgtctggcgcagcaa

SEQ ID NO: 284113 - DNA, 75 bp, synthetic construct
  source 1..75: mol_type = other DNA
gggaaaaagcccgcctggtgctggcattaatcgtctggcagcgtccgaatctgctgctgctcgacgaaccgacta

SEQ ID NO: 284114 - DNA, 75 bp, synthetic construct
  source 1..75: mol_type = other DNA
gcagaattacgtgcgcaaactcagcccctgcgtaaagagattgctcgtctggaaaaagagatggagacgctaaac

SEQ ID NO: 284115 - DNA, 75 bp, synthetic construct
  source 1..75: mol_type = other DNA
gtgacattctgcctgaacttgacctggtgctgtggctgattaaagccgatgaccgggccctgtctgtggatgagt

SEQ ID NO: 284116 - DNA, 75 bp, synthetic construct
  source 1..75: mol_type = other DNA
ctgcaccggggacatcagcaggtgctgtttgtggtgacgcaggccgacaaaacggagccctgccatgaatgggat

SEQ ID NO: 284117 - DNA, 75 bp, synthetic construct
  source 1..75: mol_type = other DNA
cactctgtaatgcgctgtttcagggagaggtcaccccggtcagtgatgttcacgccggcacccgggaagtgcggc

SEQ ID NO: 284118 - DNA, 75 bp, synthetic construct
  source 1..75: mol_type = other DNA
cggtattccggctgttccggcccgtacatccggttgtggccgtatcggcctgcaccggctgggaactggatacgc

SEQ ID NO: 284119 - DNA, 75 bp, synthetic construct
  source 1..75: mol_type = other DNA
caattgaaaaaccactttcttccctgccttactcgctttcccgccatatcctggaacatctgcgtaaactcacca

SEQ ID NO: 284120 - DNA, 75 bp, synthetic construct
  source 1..75: mol_type = other DNA
cctgcccggggtgggcgagagccgggacagggatgcagagtatgaagccctgtaccgtgacattctgcctgaact

SEQ ID NO: 284121 - DNA, 75 bp, synthetic construct
  source 1..75: mol_type = other DNA
gtgacattctgcctgaactggacctggtgctgtggctgattaaagccgatgaccgtgccctgtctgtggatgagt

SEQ ID NO: 284122 - DNA, 75 bp, synthetic construct
  source 1..75: mol_type = other DNA
cgatgtaatcgcgtcatacggagatacgctatcccctgaagcacttcaggagaaaatagcggattcgatcgccaa

SEQ ID NO: 284123 - DNA, 75 bp, synthetic construct
  source 1..75: mol_type = other DNA
gttacgcccaaatacgcgaagctgattgccacgctgaaggagtttttcccggaaggtaagcaaatcatcttcacc

SEQ ID NO: 284124 - DNA, 75 bp, synthetic construct
  source 1..75: mol_type = other DNA
gattgagcacgagaaggcccgtccgatcttctcaataatcagggatatggaccgcgtatgtactgacatggacct

SEQ ID NO: 284125 - DNA, 75 bp, synthetic construct
  source 1..75: mol_type = other DNA
tggcttatcacgtcgcgctgatcaaaggtaccgacgttgaccagccgcgtaacctggcaaaatcggttacggttg

SEQ ID NO: 284126 - DNA, 75 bp, synthetic construct
  source 1..75: mol_type = other DNA
aacgttccgggttcttctctggtgcgcgaatccgatctggcgctgatgaccaacgccggtacagaaatcggcgtg

SEQ ID NO: 284127 - DNA, 75 bp, synthetic construct
  source 1..75: mol_type = other DNA
ttcagaactacatcaaggcgcagcacgcagctggcgaggatgtggaggtacttaccgctgaattagagcgaagca

SEQ ID NO: 284128 - DNA, 75 bp, synthetic construct
  source 1..75: mol_type = other DNA
atgtcattaaaaggtcttcgctttacgctggaggttgacggccaggagccggacacctttgcagtggtgaatttc

SEQ ID NO: 284129 - DNA, 75 bp, synthetic construct
  source 1..75: mol_type = other DNA
aagttaaataatctaatcgagggatatacaaatggtgaagagagaaagttatatgattctgctttaagtaagatt

SEQ ID NO: 284130 - DNA, 75 bp, synthetic construct
  source 1..75: mol_type = other DNA
caacccgccctttaaaaaagtgccggcttactggtttcatcccggactgacttatctgaaagggcggtttgggga

SEQ ID NO: 284131 - DNA, 75 bp, synthetic construct
  source 1..75: mol_type = other DNA
gaacgggaagccaatctgaatcatgcagtcgccgcgctgactcaatcgtgggtaacagcaatcagggaggccgcc

SEQ ID NO: 284132 - DNA, 75 bp, synthetic construct
  source 1..75: mol_type = other DNA
ataaattagattttcagcacgaagccaggatattaaacggcatatggctcattacctctttgggtttggtgacaa

SEQ ID NO: 284133 - DNA, 75 bp, synthetic construct
  source 1..75: mol_type = other DNA
gaagtaacgaaagaaacacacttgattgtttatccttccaccatcataattatgcgcatgcatctgcgcacagga

SEQ ID NO: 284134 - DNA, 75 bp, synthetic construct
  source 1..75: mol_type = other DNA
cgcaacgtgatgtagcagaaatccttcttgaaggtttacgtcgtctggaataccgcggatatgactctgccggcc

SEQ ID NO: 284135 - DNA, 75 bp, synthetic construct
  source 1..75: mol_type = other DNA
tcatcggaatattaacgctgacagggatcgcggtaggactggttatccgtttcagccagggtcatgccgggccag

SEQ ID NO: 284136 - DNA, 75 bp, synthetic construct
  source 1..75: mol_type = other DNA
cgttccgactgtcccggcggcgattacagtatcctgcgctattctcggtattgttttggtcgtcacccgcgatgg

SEQ ID NO: 284137 - DNA, 75 bp, synthetic construct
  source 1..75: mol_type = other DNA
tcatactggggcttggcggttttttgctgggtatcctaggcgttattggtgggcctgtttcgctgttcaaaggcc

SEQ ID NO: 284138 - DNA, 75 bp, synthetic construct
  source 1..75: mol_type = other DNA
gcgtctgcattgcctctgttgcacgcacggttctgcgcgccgtccgtgacaccgtggtctctgttgcccgcgcgg

SEQ ID NO: 284139 - DNA, 75 bp, synthetic construct
  source 1..75: mol_type = other DNA
accgtttcctgcgctattctcggcatagtactggtggtgacgcgcgatggctggttaagtctgtttatggcggcg

SEQ ID NO: 284140 - DNA, 75 bp, synthetic construct
  source 1..75: mol_type = other DNA
tcatcggtgtattaacgctaacaggtattgcggtggggttggttatccgtttcagccagggtcatgccggaccag

SEQ ID NO: 284141 - DNA, 75 bp, synthetic construct
  source 1..75: mol_type = other DNA
atcatcgaaaaccatgaaccactgcgtgaagagttaaaagcgcgtggttataccttcgtttctgaaaccgacacc

SEQ ID NO: 284142 - DNA, 75 bp, synthetic construct
  source 1..75: mol_type = other DNA
actcgtcgttttatcttccttgaagagggcgatattgcggaaatcactcgccgttcggtaaacatcttcgataaa

SEQ ID NO: 284143 - DNA, 75 bp, synthetic construct
  source 1..75: mol_type = other DNA
gaagtgattgcacatttggtgaactgggagctgaaacaaggcggtactctgcgtgaggcagttctgcgtgctatc

SEQ ID NO: 284144 - DNA, 75 bp, synthetic construct
  source 1..75: mol_type = other DNA
atacccctggattcaccgctgttgatcatcggaatattaacgctgacaggtggcgcggtggggttggttatccgt

SEQ ID NO: 284145 - DNA, 75 bp, synthetic construct
  source 1..75: mol_type = other DNA
tcggtcttgctggcggcgtcagcctggggccggaacatccgatcatgaccgtcaatatcgcccttgcggttgcca

SEQ ID NO: 284146 - DNA, 75 bp, synthetic construct
  source 1..75: mol_type = other DNA
tggtttcccgctactggtttgaatcgctggcaggtattccatgcgacgtcgaaatcgcctctgaattccgctatc

SEQ ID NO: 284147 - DNA, 75 bp, synthetic construct
  source 1..75: mol_type = other DNA
agccaatgcaggaaaaagcggtatccaggttgtctgatcctgaactacggggacactactttaattcaggagtag

SEQ ID NO: 284148 - DNA, 75 bp, synthetic construct
  source 1..75: mol_type = other DNA
taacgcaaaactaaccgaaaaagcgttgtctattcttatgagtaaagataatgtttataaataccctgatcagga

SEQ ID NO: 284149 - DNA, 75 bp, synthetic construct
  source 1..75: mol_type = other DNA
ttaaaatagctttagataattcgccatggaaaaatgattcacccagagaagcaaaatcagttattgaatttaaga

SEQ ID NO: 284150 - DNA, 75 bp, synthetic construct
  source 1..75: mol_type = other DNA
caatcatgttagagctgatgttgttggcgacaacacatacggcactggcggttgtgaaaccggtaataccggacg

SEQ ID NO: 284151 - DNA, 75 bp, synthetic construct
  source 1..75: mol_type = other DNA
gtcgacagggtacttcctgcttttgataaacagcaaaaagcagatcaggtatatgcagaaatcaaatttcaacct

SEQ ID NO: 284152 - DNA, 75 bp, synthetic construct
  source 1..75: mol_type = other DNA
cctggcctgtgagctgttgccggagtggagtgagttttttgatgaattgctggaacacggaggcatacgtcaatg

SEQ ID NO: 284153 - DNA, 75 bp, synthetic construct
  source 1..75: mol_type = other DNA
cgaagcctctgccgcacggtgggaagaaatcaaccttgaggcggcaacctggacgataccagccggacgcatgaa

SEQ ID NO: 284154 - DNA, 75 bp, synthetic construct
  source 1..75: mol_type = other DNA
gcagcgcccggtaaagatggaaatatccttgaggtaataaatctgtggtcaaaaacaacaatattttccattaaa

SEQ ID NO: 284155 - DNA, 75 bp, synthetic construct
  source 1..75: mol_type = other DNA
tacagcgcgtttcatcgttccccgctggagcaaatgctcaaagagagtggacgtaaccagctgattattaccggg

SEQ ID NO: 284156 - DNA, 75 bp, synthetic construct
  source 1..75: mol_type = other DNA
gtgacaactatagtaagcgtacgccgtaatggccacgtggtaatcgccggtgatggtcaggccacactgggtaac

SEQ ID NO: 284157 - DNA, 75 bp, synthetic construct
  source 1..75: mol_type = other DNA
gacaagagcgattatctagaagaacagcgtaaagcctaccaggcatggtgggagagagttgaatcgatcgttact

SEQ ID NO: 284158 - DNA, 75 bp, synthetic construct
  source 1..75: mol_type = other DNA
ctggtatctcacggactacgcgccatattcagcacagcggcgaacgaagaaggatttgagccggacgtaatcgag

SEQ ID NO: 284159 - DNA, 75 bp, synthetic construct
  source 1..75: mol_type = other DNA
cagccgctcagactatgcacgatctggcctgcgaattatttcccgaatggcgcgaccgttttgatgccgtactgc

SEQ ID NO: 284160 - DNA, 75 bp, synthetic construct
  source 1..75: mol_type = other DNA
ctgggatactggcctacgctataactccggcatctattcgtctcagttaattgctaactatcaacgactcaagaa

SEQ ID NO: 284161 - DNA, 75 bp, synthetic construct
  source 1..75: mol_type = other DNA
aaatttaacgatcaatttgatggttacttccgtggctacggttatgccagtaatgccgattacgaccaagggaac

SEQ ID NO: 284162 - DNA, 75 bp, synthetic construct
  source 1..75: mol_type = other DNA
tgcggagcctgacagtaaaggtcggggcggaaatgatgccggtggcgtggatgcctttatccatcagcagatgaa

SEQ ID NO: 284163 - DNA, 75 bp, synthetic construct
  source 1..75: mol_type = other DNA
ggcagagccgggaaacagcggaagcggaaatgcgggtgacgtggacgccttcgtgcgggcacagatgaaaaaaca

SEQ ID NO: 284164 - DNA, 75 bp, synthetic construct
  source 1..75: mol_type = other DNA
gctgacggtcagcgtccgtcgctcgctggagcatctggccgggtcgtttgaactggggctgatgctgcccggtga

SEQ ID NO: 284165 - DNA, 75 bp, synthetic construct
  source 1..75: mol_type = other DNA
ggtgtgagcttgtgggatcttgcggttgcgtatccggtcacctctaacctgacagttcgtggtaaaatagccaac

SEQ ID NO: 284166 - DNA, 75 bp, synthetic construct
  source 1..75: mol_type = other DNA
agtgcttccggaaggcgcggtcaccctgctttcaacacagatttatgacctgaatatttacaaacagggacacgc

SEQ ID NO: 284167 - DNA, 75 bp, synthetic construct
  source 1..75: mol_type = other DNA
caacaaaaggcggagctggaaagtcaaccaaagccggtaatatcgcgggtttttgtgctgatgccgggttgaaaa

SEQ ID NO: 284168 - DNA, 75 bp, synthetic construct
  source 1..75: mol_type = other DNA
ctgtcatgctggaaatgattgtgctgtccgccacggagtctgtggtggggatggtgaatccggttctgccggatg

SEQ ID NO: 284169 - DNA, 75 bp, synthetic construct
  source 1..75: mol_type = other DNA
gtgaaattgaaggtgtgctggcgagagccagccatcgcaaagcagtgcctgatgcggatgcaggcgctctcattg

SEQ ID NO: 284170 - DNA, 75 bp, synthetic construct
  source 1..75: mol_type = other DNA
gcgtcgcctcatcttaacggaaaggttgaacgttcccaaaagacagacaaagctgagttttacgctaccgtagat

SEQ ID NO: 284171 - DNA, 75 bp, synthetic construct
  source 1..75: mol_type = other DNA
ctgacgtatgaagcgccggccggtctttttgaattactgatgcgtacggctgacctcagtcatcccgacaacatc

SEQ ID NO: 284172 - DNA, 75 bp, synthetic construct
  source 1..75: mol_type = other DNA
tattatgtgtggcgtgataatcaagatatgattcgcttagaagtacataaaaaatattcaagaacatacattgac

SEQ ID NO: 284173 - DNA, 75 bp, synthetic construct
  source 1..75: mol_type = other DNA
cgggggctaatcttgaacctagaccactcaagaatagccgcgaaacgttgtcattacaacacaggcggctatatg

SEQ ID NO: 284174 - DNA, 75 bp, synthetic construct
  source 1..75: mol_type = other DNA
atgggcgattttggcccgacaatgggggaacgcttacctttcagtccagagatagatgatgaccatctgcacgag

SEQ ID NO: 284175 - DNA, 75 bp, synthetic construct
  source 1..75: mol_type = other DNA
caaaacacacgcctcgctggcgcatctggcgcaggcgggcgatatctgcttcgaatggattgtagtcgatggcgg

SEQ ID NO: 284176 - DNA, 75 bp, synthetic construct
  source 1..75: mol_type = other DNA
tgggcatggccttctggcatgatttagcggctccggtcattgctggcattcttgccagtatgatcgtgaactggc

SEQ ID NO: 284177 - DNA, 75 bp, synthetic construct
  source 1..75: mol_type = other DNA
accgtataaactgaaaattggtgcgccagccgcagtacagatccagtatcaagggaaacctgtcgatctgagtcg

SEQ ID NO: 284178 - DNA, 75 bp, synthetic construct
  source 1..75: mol_type = other DNA
ggggctaagatcgctgaaagtgaaatgcaaaaatattggatacttcagatacactgccatcggtattcccattga

SEQ ID NO: 284179 - DNA, 75 bp, synthetic construct
  source 1..75: mol_type = other DNA
gctgacgctgctactggccggtgtctggtgggggctgcaccactggctgaacgtgctggtggatgaactgctgcc

SEQ ID NO: 284180 - DNA, 75 bp, synthetic construct
  source 1..75: mol_type = other DNA
aaataaaggattaaataaacctagctcaaagtttgttgattcatttaaagagcttccttatccactgcaatggtt

SEQ ID NO: 284181 - DNA, 75 bp, synthetic construct
  source 1..75: mol_type = other DNA
caaagaaattagttgggaagatctcaatggttttcgttttataactggtgagaacgtaagattacacgtcagtcc

SEQ ID NO: 284182 - DNA, 75 bp, synthetic construct
  source 1..75: mol_type = other DNA
gcagatattacatgtacctggcttctgggcagaattatcctggcatttacgccaacgtacgacaggtaagactaa

SEQ ID NO: 284183 - DNA, 72 bp, synthetic construct
  source 1..72: mol_type = other DNA
atgacgctcgcagagctgggcatggccttctggcatgatttagcggctccggtcattgctggcattcttgcc

SEQ ID NO: 284184 - DNA, 75 bp, synthetic construct
  source 1..75: mol_type = other DNA
ccgttatcaggctctattacctctactgattatgtagaagctaatgccggtatcgccgccagaacgatttatatg

SEQ ID NO: 284185 - DNA, 75 bp, synthetic construct
  source 1..75: mol_type = other DNA
gagttgaccaaagctcgccgccagattggtatgattttccagcattttaacctgctctcttcgcgtactgttttt

SEQ ID NO: 284186 - DNA, 75 bp, synthetic construct
  source 1..75: mol_type = other DNA
gatccgaatgcgctggtgatgaactttactgccgattgctggctggaggttactgatgctaccggtaaaaaattg

SEQ ID NO: 284187 - DNA, 75 bp, synthetic construct
  source 1..75: mol_type = other DNA
acaaaatctgtaagcgcggcgaatcttccggtccggatgtttctcgtgaaggcgttcagcgcgacctgctaccac

SEQ ID NO: 284188 - DNA, 75 bp, synthetic construct
  source 1..75: mol_type = other DNA
ctgccaatccgcgttgaactgcaggcactgaccaccagcgacttcgagcgtattctgaccgagccgaatgcctct

SEQ ID NO: 284189 - DNA, 75 bp, synthetic construct
  source 1..75: mol_type = other DNA
caactggaataaaactgttcgtgatacaatgatcaatatcgggcagattcagccactggaggctgtatacaacgc

SEQ ID NO: 284190 - DNA, 75 bp, synthetic construct
  source 1..75: mol_type = other DNA
ctttttactaaggaaggaagcagggagccagtcggtaggacatcattacagtcgctgccttacaatttaatgcag

SEQ ID NO: 284191 - DNA, 75 bp, synthetic construct
  source 1..75: mol_type = other DNA
cggcaactggattaaaagaggccagagaagaagttatccgtcttcgtggtgaactcgagtcaaaccgtaatccac

SEQ ID NO: 284192 - DNA, 75 bp, synthetic construct
  source 1..75: mol_type = other DNA
aagacatcaaccgccgtctgggtttgacgattctgttgatcacccacgaaatggacgttgtgaagcgtatttgtg

SEQ ID NO: 284193 - DNA, 75 bp, synthetic construct
  source 1..75: mol_type = other DNA
atgatagctacccgtcgaatctttccggtgggcagaaacagcgtgtggcgattgctcgcgcattagccagcaatc

SEQ ID NO: 284194 - DNA, 75 bp, synthetic construct
  source 1..75: mol_type = other DNA
atgataaaactttcgaatatcaccaaagtgttccaccagggcacccgcactatccaggcgttaaataacgtcagt

SEQ ID NO: 284195 - DNA, 75 bp, synthetic construct
  source 1..75: mol_type = other DNA
cgttctggaagtgactctgcgtaccgagtgtgcagttgacgctatccgtgctatcgccaaagaagtgccggaagc

SEQ ID NO: 284196 - DNA, 75 bp, synthetic construct
  source 1..75: mol_type = other DNA
catggctggttccggcggatgcgctggaagcaggcgattacgaccgcatcactaagctggcacgtgaagcagtag

SEQ ID NO: 284197 - DNA, 75 bp, synthetic construct
  source 1..75: mol_type = other DNA
tagcccgggtctgaccgagccgctgctgaaggctgctaccgaagggactattcctctgattccggggatcagcac

SEQ ID NO: 284198 - DNA, 75 bp, synthetic construct
  source 1..75: mol_type = other DNA
ggcaccgtgaaagagatcaaagtgaacgtgggtgacaaagtgtctaccggctcgctgattatggtcttcgaagtc

SEQ ID NO: 284199 - DNA, 75 bp, synthetic construct
  source 1..75: mol_type = other DNA
tctaagaaagcgcgtgacggtaagctgactgcgggcgaaatgcagggcggttgcttcactatctccagcatcggc

SEQ ID NO: 284200 - DNA, 75 bp, synthetic construct
  source 1..75: mol_type = other DNA
gcgcaacctacattctgccggaccccggcgaactgaataaacgcgtcctgatccgccagcgggtggatatgcctg

SEQ ID NO: 284201 - DNA, 75 bp, synthetic construct
  source 1..75: mol_type = other DNA
cgcgaagacgttcaggcttacgtgaaagaagctatcaaacgtgcagaagcggctccggcggcgactggcggcggt

SEQ ID NO: 284202 - DNA, 75 bp, synthetic construct
  source 1..75: mol_type = other DNA
agatcaaagtgaatgttggcgacaaagtgtctactggctcgctgatcatggtcttcgaagtggcgggcgcggcag

SEQ ID NO: 284203 - DNA, 75 bp, synthetic construct
  source 1..75: mol_type = other DNA
agtcgaagtgaccgaaatcctggtgaaagtgggcgataaagttgaagctgaacagtcgctgatcactgtagaagg

SEQ ID NO: 284204 - DNA, 75 bp, synthetic construct
  source 1..75: mol_type = other DNA
acagcaatcagccgctggcgcacacggttgtgctgcttaatagcggtggcgacgctacccaggcggccgctattt

SEQ ID NO: 284205 - DNA, 75 bp, synthetic construct
  source 1..75: mol_type = other DNA
gataacccggcgagcctgggcaccgaaatgatgaagttttgcacccagaacgccagcgccaacccactggccgcg

SEQ ID NO: 284206 - DNA, 75 bp, synthetic construct
  source 1..75: mol_type = other DNA
ctaccttatggggctggcctgtaccgataacccggcgagcctgggcaccgaaatgatgaagttttgcacccagaa

SEQ ID NO: 284207 - DNA, 75 bp, synthetic construct
  source 1..75: mol_type = other DNA
gcgggcgcatgggctaaacataagttaactggagggggcgaatactggcgttgggttggtcagggtgtgccggac

SEQ ID NO: 284208 - DNA, 75 bp, synthetic construct
  source 1..75: mol_type = other DNA
gacagcgatgcgctgtatctcgatgaaatcactctcaccagtgagcaggatgcgccgctgcgctacggtcaggtg

SEQ ID NO: 284209 - DNA, 75 bp, synthetic construct
  source 1..75: mol_type = other DNA
gagatgaatctgccgtgcaaaacgttgttgaaagggttggatgaagctatcgcccggcgcggaactaaagatgaa

SEQ ID NO: 284210 - DNA, 75 bp, synthetic construct
  source 1..75: mol_type = other DNA
atgttctggatattccagcaaagcccagggcaaaaaaaagactccgataactcagagcagcggaataataattat

SEQ ID NO: 284211 - DNA, 75 bp, synthetic construct
  source 1..75: mol_type = other DNA
cgacactgaaaaagagttcgttaaaaggcttaagttatgccgccgggatatttgtagattactcaacagtgttga

SEQ ID NO: 284212 - DNA, 75 bp, synthetic construct
  source 1..75: mol_type = other DNA
gcgaagtgcgtcgccgcatcgacgagtctggtttcgatatccgcctggaagtggatggcggagtgaaggttaata

SEQ ID NO: 284213 - DNA, 75 bp, synthetic construct
  source 1..75: mol_type = other DNA
ctggattacgtaatggacaagctggatgtgatcctgctgatgtctgttaacccaggctttggtggtcaatctttc

SEQ ID NO: 284214 - DNA, 75 bp, synthetic construct
  source 1..75: mol_type = other DNA
cagggttggttcagcttgccgccaccggaggcgataccaatggacaacatacgtttttcacggaggaacttactg

SEQ ID NO: 284215 - DNA, 75 bp, synthetic construct
  source 1..75: mol_type = other DNA
gaattgcccgcaccatatccgaaagagttacagatctacgccgctcaccactgagtgagcaaccaatgaaacgtc

SEQ ID NO: 284216 - DNA, 75 bp, synthetic construct
  source 1..75: mol_type = other DNA
cgatgaagaagagcgctttgtcagtcggttgaaattgattaaatcggatatacacgcccagctacgtgcctgtaa

SEQ ID NO: 284217 - DNA, 75 bp, synthetic construct
  source 1..75: mol_type = other DNA
taggggaagcttcaggaagtctctttgaggccattatgaagattgtaaactggtttaatcgtaatgatgataaga

SEQ ID NO: 284218 - DNA, 75 bp, synthetic construct
  source 1..75: mol_type = other DNA
tacaggcgagtcactaccgaaagaccgagaatctcttttctatctaaatgttctggatattccagcaaagcccgg

SEQ ID NO: 284219 - DNA, 75 bp, synthetic construct
  source 1..75: mol_type = other DNA
gtccagtcctggttagacgatggagatgcagcagctccccctgagtcagtccacgttccttttatcattactccg

SEQ ID NO: 284220 - DNA, 75 bp, synthetic construct
  source 1..75: mol_type = other DNA
atgtgatcctgctgatgtccgtcaatcctggtttcggcggtcagtctttcattccgcaaacactggataaactgc

SEQ ID NO: 284221 - DNA, 75 bp, synthetic construct
  source 1..75: mol_type = other DNA
cgttgactctatgatgggtgatcaaggggctaggaaatacctggatcagatgaaagatgtgcgtgaacgtgccgc

SEQ ID NO: 284222 - DNA, 75 bp, synthetic construct
  source 1..75: mol_type = other DNA
tgcacgtatgaatagccagatgaaacgcctacaacagcaacaacgtaagattaatggcaacagaaaagctcaatt

SEQ ID NO: 284223 - DNA, 75 bp, synthetic construct
  source 1..75: mol_type = other DNA
gctggacagtacaacccagctttctgctgcggtgaaaggtaaggctgacgccaccgagctggaaagcctgcgtaa

SEQ ID NO: 284224 - DNA, 75 bp, synthetic construct
  source 1..75: mol_type = other DNA
cgtgccagggggaaacaccagataacgtcaatgtctgaaattgtcagggacctttcccggctgggctggaccgat

SEQ ID NO: 284225 - DNA, 75 bp, synthetic construct
  source 1..75: mol_type = other DNA
cgtgccagggggaaacaccagataacgtcaatgtctgaaattgtcagggacctttcccgcctgggctggacggat

SEQ ID NO: 284226 - DNA, 75 bp, synthetic construct
  source 1..75: mol_type = other DNA
cgagccagggggaaacaccagataacgtcaatgtctgaaattgtcagggacctttcccgcctgggctggactgat

SEQ ID NO: 284227 - DNA, 75 bp, synthetic construct
  source 1..75: mol_type = other DNA
cttcaatgtctgaaattgtcagggacctgtcacgactgggctggacagatgatcgaattggaacagaggctgggc

SEQ ID NO: 284228 - DNA, 75 bp, synthetic construct
  source 1..75: mol_type = other DNA
cttcaatgtctgaaattgtcagggacctctcacgtctgggctggacagatgaccgaattggaacagaggctgggc

SEQ ID NO: 284229 - DNA, 75 bp, synthetic construct
  source 1..75: mol_type = other DNA
cttcaatgtctgaaattgtcagggacctttcacgactgggctggacagatgagcgaattggaacagaggctgggc

SEQ ID NO: 284230 - DNA, 75 bp, synthetic construct
  source 1..75: mol_type = other DNA
aggatgaagtactgaggttgaaacagattagtgggttgacagaactctttcaggaagaggatttcagtccggcat

SEQ ID NO: 284231 - DNA, 75 bp, synthetic construct
  source 1..75: mol_type = other DNA
aggtttctgacatactcatccggtatctttgctcatgtggtacggatgaagagaaaattaaggttctgaatcacc

SEQ ID NO: 284232 - DNA, 75 bp, synthetic construct
  source 1..75: mol_type = other DNA
cgatccagcccctttcgataatgacgccagtgtcatttataaatatgaaacaaatgattcaacgaaaacacaaga

SEQ ID NO: 284233 - DNA, 75 bp, synthetic construct
  source 1..75: mol_type = other DNA
cgagccagggggaaacaccagataacgtcaatgtctgaaattgtcagggacctttcccgtctgggctggaccgat

SEQ ID NO: 284234 - DNA, 75 bp, synthetic construct
  source 1..75: mol_type = other DNA
atcccgacgaagtactccgtctgaagcaaatcagtggattgacggaattgtttcaggaagaggagttcagtccgg

SEQ ID NO: 284235 - DNA, 75 bp, synthetic construct
  source 1..75: mol_type = other DNA
aaactgctgaaacagtccctggagaaggatggtttcactcagccagtggttgtgtcagaggagaagaaccattat

SEQ ID NO: 284236 - DNA, 75 bp, synthetic construct
  source 1..75: mol_type = other DNA
agtcggcgattttacgtttgaaggcgcagcccgcagcgacgataactcacagtttggtcgtcatggaacctggca

SEQ ID NO: 284237 - DNA, 75 bp, synthetic construct
  source 1..75: mol_type = other DNA
caacggggctggtgggcggtcacctgctgcggatgttgattaacgaaccgaaagttaacgccattgctgcgccga

SEQ ID NO: 284238 - DNA, 75 bp, synthetic construct
  source 1..75: mol_type = other DNA
caacggggctggtgggcggtcatctgctgcgtatgttgattaacgaaccgaaagttaatgccattgccgcgccaa

SEQ ID NO: 284239 - DNA, 75 bp, synthetic construct
  source 1..75: mol_type = other DNA
ggttgtgaccatcatgggtcacgttgaccacggtaagacctctctgctggactacattcgttcaacgaaagtggc

SEQ ID NO: 284240 - DNA, 75 bp, synthetic construct
  source 1..75: mol_type = other DNA
aggatgaggtgttgagactgaaacagattagcgggctgacggagctgtttcaggaagaagatttcagtccggcat

SEQ ID NO: 284241 - DNA, 75 bp, synthetic construct
  source 1..75: mol_type = other DNA
aaactgctgaaacattcactggagcaggatgggttcacgcagcctgtggtggtttcggaagagaaggagcattat

SEQ ID NO: 284242 - DNA, 75 bp, synthetic construct
  source 1..75: mol_type = other DNA
atgggggattctgtgacaccggagatacttggcaacatgattcatcagtacttcagccgggcacgaacggaagaa

SEQ ID NO: 284243 - DNA, 75 bp, synthetic construct
  source 1..75: mol_type = other DNA
cgccttgcagcggaagagcaagcgcagcgtgaagcggaagagcaagcgcagcgtgaagcggaagagcaagcccgt

SEQ ID NO: 284244 - DNA, 75 bp, synthetic construct
  source 1..75: mol_type = other DNA
taatgtcatggcgccgggtgagaagaaactgctgaagcagtcactggagaaagatggtttcacacaaccggtggt

SEQ ID NO: 284245 - DNA, 75 bp, synthetic construct
  source 1..75: mol_type = other DNA
cagagagaaaagggcaagccgcacgcattgccgcaaccattcgacataaccgggctagggggaaacaccagatag

SEQ ID NO: 284246 - DNA, 75 bp, synthetic construct
  source 1..75: mol_type = other DNA
gtggaaatccttggcttgtccggtgttccggctgcaggtgatgaagtgaccgttgttcgtgacgagaagaaagca

SEQ ID NO: 284247 - DNA, 75 bp, synthetic construct
  source 1..75: mol_type = other DNA
gctggaagcaggtccgtccattccagtagaaatccttggcttgtccggtgttccggctgcgggtgacgaagttac

SEQ ID NO: 284248 - DNA, 75 bp, synthetic construct
  source 1..75: mol_type = other DNA
aactacaacgatgtccgcactggcgatgtgatcgaagtattcgagatcatcgaaatccaacgtaccatcgcttaa

SEQ ID NO: 284249 - DNA, 75 bp, synthetic construct
  source 1..75: mol_type = other DNA
tcgccagctggcgaaatagtgaagaagcccgcgagaatcgcccttcccgccagttgcgcagtctgaatggcaaat

SEQ ID NO: 284250 - DNA, 75 bp, synthetic construct
  source 1..75: mol_type = other DNA
tgaagtgcctctggatgtcgctccacaaggtaaacagttgattgaactgcctggactaccgcagccggagagcgc

SEQ ID NO: 284251 - DNA, 75 bp, synthetic construct
  source 1..75: mol_type = other DNA
atgatttcagccgcgctgttctggaaacagaaattcagatgtgcggtgaactgcgcgatgcgctgagggtgacgg

SEQ ID NO: 284252 - DNA, 75 bp, synthetic construct
  source 1..75: mol_type = other DNA
atgatttcagccgcgcggtactggaagcaaacgttcagatgtgcggtgaactgcgcgatgcgctgagggtgacgg

SEQ ID NO: 284253 - DNA, 75 bp, synthetic construct
  source 1..75: mol_type = other DNA
ttgcgcagcctgaatggcgaatggcgctttgcctggtttccggcaccagaagcggtgccggaaagctggctggag

SEQ ID NO: 284254 - DNA, 75 bp, synthetic construct
  source 1..75: mol_type = other DNA
gcgaaaacggtctgcgctgcgggacgcgcgaattgaattatggcccacaccagtggcgcggcgacttccagttca

SEQ ID NO: 284255 - DNA, 75 bp, synthetic construct
  source 1..75: mol_type = other DNA
cagccggaaattgcaggcgagctgctgaaaatcagcggagcgcgtctggaaaacaaaggccagtttgacggtaaa

SEQ ID NO: 284256 - DNA, 75 bp, synthetic construct
  source 1..75: mol_type = other DNA
ctgccgatcctctggtcgctgtttccgcaccaccgctatctgttggatactgatttcaccgtgaatgatgaactg

SEQ ID NO: 284257 - DNA, 75 bp, synthetic construct
  source 1..75: mol_type = other DNA
cggtgggacgtgtttgcgcggtgatgaatcactggtcatcaaaaaagagagtgatattgaaccgttaattgtggt

SEQ ID NO: 284258 - DNA, 75 bp, synthetic construct
  source 1..75: mol_type = other DNA
gatacaccgcatccggcgcggattggcctgacctgccagctggcgcaggtcgcagagcgggtaaactggctcgga

SEQ ID NO: 284259 - DNA, 75 bp, synthetic construct
  source 1..75: mol_type = other DNA
acacagctgatattgtgatgtgttcccttaacaagcccagcgcagcccaaaatcgctggaagaatcacactaacg

SEQ ID NO: 284260 - DNA, 75 bp, synthetic construct
  source 1..75: mol_type = other DNA
acacggctgatatcgtgatgtgttctcttaacaagcccagcgcggcgcaaaaccgctggaaaaaccacttgcgta

SEQ ID NO: 284261 - DNA, 75 bp, synthetic construct
  source 1..75: mol_type = other DNA
gcgcgaattgaattatggctcacaccagtggcgcggcgacttccagttcaacatcagccgctacagccaacaaca

SEQ ID NO: 284262 - DNA, 75 bp, synthetic construct
  source 1..75: mol_type = other DNA
attacgtgcggggtatcgcttgttgaagaatgccggttgcttaccgccagaacttgagcaacggagggaagcaat

SEQ ID NO: 284263 - DNA, 75 bp, synthetic construct
  source 1..75: mol_type = other DNA
aagggcaagcccgccagtggtcgtgccgtattgtctcaggaacaggacggcattaaatcgcacacccacagcgcc

SEQ ID NO: 284264 - DNA, 75 bp, synthetic construct
  source 1..75: mol_type = other DNA
tgttagctcgcagaaacggtgttggggtctggcgatgggtgaggattagtaacagacggttgaggttgacggggt

SEQ ID NO: 284265 - DNA, 75 bp, synthetic construct
  source 1..75: mol_type = other DNA
gatgcgtcaagcatatcggatcaatcacttagcttgttacccagaatggaaactgacatcaccattcgctcatca

SEQ ID NO: 284266 - DNA, 75 bp, synthetic construct
  source 1..75: mol_type = other DNA
ccggggcactgaaggggaacgccgataccgcgacgaaacttgcggcagtcccaaaaattaacggtgttaagtttg

SEQ ID NO: 284267 - DNA, 75 bp, synthetic construct
  source 1..75: mol_type = other DNA
atagttttcgtgaggacagggagagaagcaggcgttctgataattgcagagttgttttcggtggtggttacagtg

SEQ ID NO: 284268 - DNA, 75 bp, synthetic construct
  source 1..75: mol_type = other DNA
agaagcggtaccggaaagctggctcgagcgcgatcttcctgatgccgattgcgtatcagtgccatcaaactggca

SEQ ID NO: 284269 - DNA, 75 bp, synthetic construct
  source 1..75: mol_type = other DNA
ggtgatccgggcattgagcagtcattgaaaattatcgatacgctaattgaagccggtgctgacgcgctggagtta

SEQ ID NO: 284270 - DNA, 75 bp, synthetic construct
  source 1..75: mol_type = other DNA
cccagttgaaggagcgcaaagaaggcgcattcgttcctttcgtcacgctcggtgatccgggcattgagcagtcat

SEQ ID NO: 284271 - DNA, 75 bp, synthetic construct
  source 1..75: mol_type = other DNA
tgcccgatgtacgcgcgcgtggatgaagatcaacccttcccggcagtaccgaaatggtcaatcaaaaaatggctt

SEQ ID NO: 284272 - DNA, 75 bp, synthetic construct
  source 1..75: mol_type = other DNA
gtcgattaaaaaatggctttcgatgcccggcgagttgcgtccgctgatcctttgtgaatacgcccacgcgatggg

SEQ ID NO: 284273 - DNA, 75 bp, synthetic construct
  source 1..75: mol_type = other DNA
atgcagctggcacgacaggtttcccgacttaatcgccttgcagcacatccccctttcgccagctggcgtaatagc

SEQ ID NO: 284274 - DNA, 75 bp, synthetic construct
  source 1..75: mol_type = other DNA
gaggtgctggacaaaaccagcggtaaatttgccgagcagaaaaacatctatcagcaactgtggtgtttgccgaaa

SEQ ID NO: 284275 - DNA, 75 bp, synthetic construct
  source 1..75: mol_type = other DNA
tcaacaacgcgctgacccatttttcaatgctagcggtgctggtgtttggcttttactggctgattcgcctgtgcg

SEQ ID NO: 284276 - DNA, 75 bp, synthetic construct
  source 1..75: mol_type = other DNA
agcaataccgcgtttacactgcgtgtttcgttcaccacgctgccactcaaacagtggacagtacgctttgccctc

SEQ ID NO: 284277 - DNA, 75 bp, synthetic construct
  source 1..75: mol_type = other DNA
tttctcaacgcctttgccctgattgaatttttcaaagccgtactacgcctgattttttgcccaaacgtggcggag

SEQ ID NO: 284278 - DNA, 75 bp, synthetic construct
  source 1..75: mol_type = other DNA
tgacccgtactggttttggcgcgcatctgtttaacgactggcgttttctggatgaaaaaggccaacagccaaacc

SEQ ID NO: 284279 - DNA, 75 bp, synthetic construct
  source 1..75: mol_type = other DNA
caagaggtgaaagcgggagagaaaacctatcgctttaccattgatgccttccgccgccactgcatgatgaacggt

SEQ ID NO: 284280 - DNA, 75 bp, synthetic construct
  source 1..75: mol_type = other DNA
caaagccctggaaaacgaactggatggcttcacctttgaagacaataaagacgaccagtttgctgtcggtgccca

SEQ ID NO: 284281 - DNA, 75 bp, synthetic construct
  source 1..75: mol_type = other DNA
ttgctcagttacaaagcgcattacaattagtcactgcactggctcagagtgccggagcttcgggggcactggacg

SEQ ID NO: 284282 - DNA, 75 bp, synthetic construct
  source 1..75: mol_type = other DNA
cccggaaaaattgatttgaaaagtggaaatattctgtggggtgggagtgcgtcgctggagcaggcacttaagcca

SEQ ID NO: 284283 - DNA, 75 bp, synthetic construct
  source 1..75: mol_type = other DNA
gaagccggattactgatgactgcgccggctggtattgcagccaccacgcctgagaatattcagctatctgcaggt

SEQ ID NO: 284284 - DNA, 75 bp, synthetic construct
  source 1..75: mol_type = other DNA
gacagccaagtgaaaaaacatttcgaccaggctggtgttcgtgcgccggtgcaaacttatcaggtgctgccggga

SEQ ID NO: 284285 - DNA, 75 bp, synthetic construct
  source 1..75: mol_type = other DNA
gacctggttttgcgcccgctatgcctggtattgccagcggatgatacagtcaaaagaactggaattagaacattg

SEQ ID NO: 284286 - DNA, 75 bp, synthetic construct
  source 1..75: mol_type = other DNA
cctgggtctttgaactatacgcccgctattttgaagaactggcaccaggtgaagaagcattaagcattgacgaat

SEQ ID NO: 284287 - DNA, 75 bp, synthetic construct
  source 1..75: mol_type = other DNA
gtgattgcgccgagtttcgccgatatcttttacggtaacagctttaataaccagttgctgccggtgaaattaagc

SEQ ID NO: 284288 - DNA, 75 bp, synthetic construct
  source 1..75: mol_type = other DNA
atagagtctcgagtcatctatctcagaaaataatcgaagacgcattaaatggaaggggatttttcgcccgaaatg

SEQ ID NO: 284289 - DNA, 75 bp, synthetic construct
  source 1..75: mol_type = other DNA
cttgtttttcttttatacaatcaacattcatcccactaaaaataaaagaattatttaaagagaaaagacaactta

SEQ ID NO: 284290 - DNA, 75 bp, synthetic construct
  source 1..75: mol_type = other DNA
attacgggatgatggattgtggtttttgcaaaaagcccagcgcggcgcaaaaaccgctggaaaaaccactgtcgc

SEQ ID NO: 284291 - DNA, 75 bp, synthetic construct
  source 1..75: mol_type = other DNA
cagccggaaattgcaggtgatttgttgaaaatcagcggggcgcggctggaaaacaaaggccagtttgacggcaaa

SEQ ID NO: 284292 - DNA, 75 bp, synthetic construct
  source 1..75: mol_type = other DNA
atccgcaggaatacgaagatgacgccgtattccgtagctatatcgacgacgaatatatgggccacaagtggcaat

SEQ ID NO: 284293 - DNA, 75 bp, synthetic construct
  source 1..75: mol_type = other DNA
tctggcgggcggcatcaatgaggatttttaccttgcacagcttgctgccctgggcagaccagacgccactatcac

SEQ ID NO: 284294 - DNA, 75 bp, synthetic construct
  source 1..75: mol_type = other DNA
aaggactgcgctttatcgccgctaacgtgaacgagcgtggcggcgagattgatctgataatgcatgaaggccaga

SEQ ID NO: 284295 - DNA, 75 bp, synthetic construct
  source 1..75: mol_type = other DNA
ccgcttgtggctcgcgcgtcataatgggaggtttgatactgtggattgccgggtcgatgtggtagccttcaccgg

SEQ ID NO: 284296 - DNA, 75 bp, synthetic construct
  source 1..75: mol_type = other DNA
ttcagcttatcataggactttagaaagtttcattaataatattgttaatgctgattatgatttcgagtctccact

SEQ ID NO: 284297 - DNA, 75 bp, synthetic construct
  source 1..75: mol_type = other DNA
caccgatccggacgtggggcgatacggttgcggagtgcgtgattaataaattatgtccgtcgcataccgttgttt

SEQ ID NO: 284298 - DNA, 75 bp, synthetic construct
  source 1..75: mol_type = other DNA
ggttgcggagtgcgtgattaataaattatgtccgtcacacaccgtcgttttattttcctatccagatgaggatga

SEQ ID NO: 284299 - DNA, 75 bp, synthetic construct
  source 1..75: mol_type = other DNA
ttatgtccgtcgcatactgttgtcctttttgcatatccggatgagtctggtgaagggcaacaagccgccctgact

SEQ ID NO: 284300 - DNA, 75 bp, synthetic construct
  source 1..75: mol_type = other DNA
ggatgcggcagcgattgcggccacgctgattatgctgtatctcttctttcgcagagttattccggcaacgtatta

SEQ ID NO: 284301 - DNA, 75 bp, synthetic construct
  source 1..75: mol_type = other DNA
atcagaatggattcattttacaggcagcggatatctgttacgtaccgatgcgaggtcatacccggttctgcggct

SEQ ID NO: 284302 - DNA, 75 bp, synthetic construct
  source 1..75: mol_type = other DNA
atccagagatgttgcggtggtcctgcaaaaaatagtagatgtagacgaaaaattatcaaaaaaaccgagtaagag

SEQ ID NO: 284303 - DNA, 75 bp, synthetic construct
  source 1..75: mol_type = other DNA
cggctactcccttcgtgttgttgatgaatctgaccggacctcagcagactgcacgccaccatttgttgcccttac

SEQ ID NO: 284304 - DNA, 75 bp, synthetic construct
  source 1..75: mol_type = other DNA
tatttcacaccttatgccctgattgtcggccagttaggttcgacctttaaagacgggagagggggcgttagtacc

SEQ ID NO: 284305 - DNA, 75 bp, synthetic construct
  source 1..75: mol_type = other DNA
gtcgatggtgttaatttcactgaactgattaacaaggtcgctgaaaacggttattcactccgcgtggtggaggaa

SEQ ID NO: 284306 - DNA, 75 bp, synthetic construct
  source 1..75: mol_type = other DNA
gtctggttgtcacactaatccgacgttatggcgtcagtctcattcatctggatgccagcgctgaatgcctgccgg

SEQ ID NO: 284307 - DNA, 75 bp, synthetic construct
  source 1..75: mol_type = other DNA
gtctggttctcacactaatcccacgttatggcgtcagtctcattcatctggatgccagcgctgaatgcctgccgg

SEQ ID NO: 284308 - DNA, 75 bp, synthetic construct
  source 1..75: mol_type = other DNA
gtctggttttcacactaatcctacgttatggcgtcagtctcattcatctggatgccagcgctgaatgcctgccgg

SEQ ID NO: 284309 - DNA, 75 bp, synthetic construct
  source 1..75: mol_type = other DNA
cgcaagccattgtcatcgctggcggagtggagcaaattcctaaaatcaaacaatactggggcgaacagctcaaaa

SEQ ID NO: 284310 - DNA, 75 bp, synthetic construct
  source 1..75: mol_type = other DNA
gcggagaaaacatctttaaagacagccgggttccctggccgcaagttagccgcgaacaggtgttagcacgctcgc

SEQ ID NO: 284311 - DNA, 75 bp, synthetic construct
  source 1..75: mol_type = other DNA
ccgggttccctggccgcaggttagccgcgaacaggtattagcacgcgccccacaggctattgtcatcacgggcgg

SEQ ID NO: 284312 - DNA, 75 bp, synthetic construct
  source 1..75: mol_type = other DNA
gaatggattcattttacaggtaccggttatctgttacgtactgatgcgtggtcgtacccggttctgcggcttaag

SEQ ID NO: 284313 - DNA, 75 bp, synthetic construct
  source 1..75: mol_type = other DNA
caacccttccctgcatacgatgcagtaccgcacatatcacggaaacggacaacgcctggttgtactcgctgtcac

SEQ ID NO: 284314 - DNA, 75 bp, synthetic construct
  source 1..75: mol_type = other DNA
caacccttcccagcatacgttgcagtaccgcacatatcacggaaacggacaacgcctggttgtactcgctgtcac

SEQ ID NO: 284315 - DNA, 75 bp, synthetic construct
  source 1..75: mol_type = other DNA
caacccttacccgcatacgttgcagtaccgcacatatcacggaaacggacaacgcctggttgtactcgctgtcac

SEQ ID NO: 284316 - DNA, 75 bp, synthetic construct
  source 1..75: mol_type = other DNA
tcacactcatccggcgttatggcgtcagtctcattcatctggatgccagtgccggatgtctgccgggtttaccca

SEQ ID NO: 284317 - DNA, 75 bp, synthetic construct
  source 1..75: mol_type = other DNA
cgccaccatttgctgccctgaccggcatacgctgcagtaccgcacatatcacggcaaaggacaacgcctggctgt

SEQ ID NO: 284318 - DNA, 75 bp, synthetic construct
  source 1..75: mol_type = other DNA
cggcttaaacgcctggggctgtcaaaaacgttccgtcgtctggtcgtcacactcatccggcgttatggcgtcagt

SEQ ID NO: 284319 - DNA, 75 bp, synthetic construct
  source 1..75: mol_type = other DNA
tgacgtcgatggtgttaatctcactgaactgattaacaaagtcgctgaaaacggttattcactccgggtggtgga

SEQ ID NO: 284320 - DNA, 75 bp, synthetic construct
  source 1..75: mol_type = other DNA
tgacgtcgatggtgttaatctcattgaactgattaacaaagtcactgaaaacggttattcactccgggtggttga

SEQ ID NO: 284321 - DNA, 75 bp, synthetic construct
  source 1..75: mol_type = other DNA
tgacgtcgatggtgttaatctcaatgaactgattaacaaagtctctgaaaacggttattcactccgggtggttga

SEQ ID NO: 284322 - DNA, 75 bp, synthetic construct
  source 1..75: mol_type = other DNA
caacccttacctgcatacgctgcagtaccgcacatatcacggaaacggacaacgcctggttgtactcgctgtcac

SEQ ID NO: 284323 - DNA, 75 bp, synthetic construct
  source 1..75: mol_type = other DNA
tgacgtcgatggtgttaatctcagtgaactgattaacaaagtcgctgaaaacggttattcactccgggtggtcga

SEQ ID NO: 284324 - DNA, 75 bp, synthetic construct
  source 1..75: mol_type = other DNA
tgacgtcgatggtgttaatctcagtgaactgattaacaaagtccctgaaaacggttattcactccgggtggtgga

SEQ ID NO: 284325 - DNA, 75 bp, synthetic construct
  source 1..75: mol_type = other DNA
gtctggttatcacactaatccaacgttatggcgtcagtctcattcatctggatgccagcgctgaatgcctgccgg

SEQ ID NO: 284326 - DNA, 75 bp, synthetic construct
  source 1..75: mol_type = other DNA
atcaatgaagtgaacggtatttcccgcgtggtgtatgacatcagcggcaagccgcctgcgactattgagtgggaa

SEQ ID NO: 284327 - DNA, 75 bp, synthetic construct
  source 1..75: mol_type = other DNA
cctcggtcgtgtttccaatcgcattatcaatgaagtgaacggtatttcccgcgtggtgtatgacatcagcggcaa

SEQ ID NO: 284328 - DNA, 75 bp, synthetic construct
  source 1..75: mol_type = other DNA
ccacggtgataaggtaactgcgattcctcaagatttcgtcaccgtagccagcaccgaaagctgcccgtttgccat

SEQ ID NO: 284329 - DNA, 75 bp, synthetic construct
  source 1..75: mol_type = other DNA
ctggtagcgctcatctaccgggatggggcgggccgcgcatttacccagaccttttttgtcgccctcgcgattggc

SEQ ID NO: 284330 - DNA, 75 bp, synthetic construct
  source 1..75: mol_type = other DNA
tgtaactacggtctgcacttttcgctgttaagtgggcgtagtctgaaggtttattggcgcgatccggaatttcgc

SEQ ID NO: 284331 - DNA, 75 bp, synthetic construct
  source 1..75: mol_type = other DNA
tgaatccgccgcttctgcgacgggtaaagcgcacgttatcaaatctcaccacaacgtaggcggcctgccgaaaga

SEQ ID NO: 284332 - DNA, 75 bp, synthetic construct
  source 1..75: mol_type = other DNA
gtggcgctggcaaaagttggcggcggtgttgacagcctcagcacgccaatcggtaaagtcgctggcgtactgctg

SEQ ID NO: 284333 - DNA, 75 bp, synthetic construct
  source 1..75: mol_type = other DNA
cgttataccgtctgggctggcctgatggcgggtgttggtctgactctgctgtacctggcgctgttccgtctgggg

SEQ ID NO: 284334 - DNA, 75 bp, synthetic construct
  source 1..75: mol_type = other DNA
cggtagtggcgctggcaaaagttggcggcggtgttgacagtctcagcacgccaatcggtaaagtcgctggcgtac

SEQ ID NO: 284335 - DNA, 75 bp, synthetic construct
  source 1..75: mol_type = other DNA
tgatgaatggattgttgacggcggttatacccatgaaacagcactgcaagccgcgagagaattattaagccagtc

SEQ ID NO: 284336 - DNA, 75 bp, synthetic construct
  source 1..75: mol_type = other DNA
cgcgttaatggctataagcaaagtctggaagatcataatattgcagtgcgcagtgagtggatcgttgacggcggt

SEQ ID NO: 284337 - DNA, 75 bp, synthetic construct
  source 1..75: mol_type = other DNA
acgtaccactctcttaccgtacgctggtgtttatcctcggcggcttctcgatggtggtgtctaacctcggtttga

SEQ ID NO: 284338 - DNA, 75 bp, synthetic construct
  source 1..75: mol_type = other DNA
cctatcctcggcgtgggtgggatgcagctctatcgcgcggaaatgcccggcccgctgaaagataacaaaatgcgc

SEQ ID NO: 284339 - DNA, 75 bp, synthetic construct
  source 1..75: mol_type = other DNA
tctgcggcttaaacgcctggggctgtcaaaaacgttccgtcgtctggttatcacacttaaccgacgttatggcgt

SEQ ID NO: 284340 - DNA, 75 bp, synthetic construct
  source 1..75: mol_type = other DNA
atatatgtaatagagactttgctgcctgttttgttcttttttgctctgagtggtaccgcagggattatgaacggc

SEQ ID NO: 284341 - DNA, 75 bp, synthetic construct
  source 1..75: mol_type = other DNA
gctcaggcctgcaatgaaggaaatgtggccaacagcgaagagagctgggcaacggatgtgctggtggaggtgagc

SEQ ID NO: 284342 - DNA, 75 bp, synthetic construct
  source 1..75: mol_type = other DNA
tctgcggcttaaacgcctggggctgtcaaaaacgttccgtcgtctggttgtcacacttaaccaacgttatggcgt

SEQ ID NO: 284343 - DNA, 75 bp, synthetic construct
  source 1..75: mol_type = other DNA
tctgcggcttaaacgcctggggctgtcaaaaacgttccgtcgtctggttttcacactgaaccaacgttatggcgt

SEQ ID NO: 284344 - DNA, 75 bp, synthetic construct
  source 1..75: mol_type = other DNA
tctgcggcttaaacgcctggggctgtcaaaaacgttccgtcgtctggttttcacactaaaccgacgttatggcgt

SEQ ID NO: 284345 - DNA, 75 bp, synthetic construct
  source 1..75: mol_type = other DNA
attgcccgctggccgctctttttgccggtactgcttttatgttcagcatttattggcggttgcgccgggtctacg

SEQ ID NO: 284346 - DNA, 75 bp, synthetic construct
  source 1..75: mol_type = other DNA
cttttttgtcgccctcgccattggctctatgctgtggtggccgaaccgcaaagagaaaggcgaacttaaatcccg

SEQ ID NO: 284347 - DNA, 75 bp, synthetic construct
  source 1..75: mol_type = other DNA
ccgtgagctgaaacgactggtgcatccgaacgccgtctacagcattaagttggggaaccgtgcactgccggaacg

SEQ ID NO: 284348 - DNA, 75 bp, synthetic construct
  source 1..75: mol_type = other DNA
gtctgttctaccgttcttcaagagacggttatggttttgaggaagactgggcagaagtttatacctcgaaaaatc

SEQ ID NO: 284349 - DNA, 75 bp, synthetic construct
  source 1..75: mol_type = other DNA
ttattcactccgcgtggcggaggaatccgaccaacagtcaacctgcacaccaccaccgtttacaatccttgccgg

SEQ ID NO: 284350 - DNA, 75 bp, synthetic construct
  source 1..75: mol_type = other DNA
cacaaggaaactggttttaatattaaatcctcagataataactatcatgtgctagtgaaaacggggaaggaaggt

SEQ ID NO: 284351 - DNA, 75 bp, synthetic construct
  source 1..75: mol_type = other DNA
tgaaatgcttaagaacattgctgagcaagataacgtgttagcgaaactttatggaattgcagagttaaataatgg

SEQ ID NO: 284352 - DNA, 75 bp, synthetic construct
  source 1..75: mol_type = other DNA
tatgatgccctatcgtcaaatacgccagaaatcagtgttaacccaaaattagtcagggcgctattagccagaacc

SEQ ID NO: 284353 - DNA, 75 bp, synthetic construct
  source 1..75: mol_type = other DNA
tgcaccggggacatcagcgggtactgtttgtggtgacgcaggccgacaaaacggagccctgccatgaatgggata

SEQ ID NO: 284354 - DNA, 75 bp, synthetic construct
  source 1..75: mol_type = other DNA
attcaggtaccagaatcacccgacgccccggaggcgctgccggggtgtcgttccatttctgatgatgacctgtgc

SEQ ID NO: 284355 - DNA, 75 bp, synthetic construct
  source 1..75: mol_type = other DNA
ggaaaccaaagacaaccgaatcgctgaactggaaaaaatcgccactgactatgcacttaaattccagaaagcaca

SEQ ID NO: 284356 - DNA, 75 bp, synthetic construct
  source 1..75: mol_type = other DNA
ttttattgaagcatgattttcgcttaaataacagcagattaaagctattgttaaaatgcatagtaagaaggacat

SEQ ID NO: 284357 - DNA, 75 bp, synthetic construct
  source 1..75: mol_type = other DNA
gtgcgctacacactggccgaactactggccgacgcggaagcatccggggcttacccgctgccgccggaggaacgc

SEQ ID NO: 284358 - DNA, 75 bp, synthetic construct
  source 1..75: mol_type = other DNA
ttagataggacaattgtagctgtaaaagagatcataaacaaatgtaatatattaaagaggaatcaaaataatgaa

SEQ ID NO: 284359 - DNA, 75 bp, synthetic construct
  source 1..75: mol_type = other DNA
aaattcatggtagcagtcatgaagttgaaagtattgttattacaaatgaagattatgttgatttctataaacgta

SEQ ID NO: 284360 - DNA, 75 bp, synthetic construct
  source 1..75: mol_type = other DNA
ttttctgggatatctaacaatcatgctgatcaattaaaggattttctttttttaatggtggataccaaggatgtt

SEQ ID NO: 284361 - DNA, 75 bp, synthetic construct
  source 1..75: mol_type = other DNA
gcagcaaattaccatggttatgtccatttacatgatgatgtcgtaagtctgatcgcccattctttggggaatgtg

SEQ ID NO: 284362 - DNA, 75 bp, synthetic construct
  source 1..75: mol_type = other DNA
gttccggcccgtacatccggttgttgccgtatcggcccgcaccggctgggaactggatacgctggtcagtgcgct

SEQ ID NO: 284363 - DNA, 75 bp, synthetic construct
  source 1..75: mol_type = other DNA
atgatctctccgacgcttaatgtgcctcaggcgcgatttctttcaatgccccataaatttaaagcctatattgct

SEQ ID NO: 284364 - DNA, 75 bp, synthetic construct
  source 1..75: mol_type = other DNA
acaaggctttaactctgcctggattgaaatgcagttagctcatgtggataaaaattccatcaggggtacctataa

SEQ ID NO: 284365 - DNA, 75 bp, synthetic construct
  source 1..75: mol_type = other DNA
tatggacaattcctgagagccgtatgaaaatgcggcgtaaacatgtcgtaccactatcacgacaggccactgaaa

SEQ ID NO: 284366 - DNA, 75 bp, synthetic construct
  source 1..75: mol_type = other DNA
gaccgtctggccttttccaccgacagttacgtcattgacccgctgttctttcctggtggcaatattggcaagctg

SEQ ID NO: 284367 - DNA, 75 bp, synthetic construct
  source 1..75: mol_type = other DNA
tggggattgaacgtaaaaattaatgagggaaataaagaggttcacttttattacggacgtcagtatcggggaacc

SEQ ID NO: 284368 - DNA, 75 bp, synthetic construct
  source 1..75: mol_type = other DNA
ccataaatttaaagcctatattgctggttttggctcgggcaaaacatgggttgggtgtggcggcatatgcaaggg

SEQ ID NO: 284369 - DNA, 75 bp, synthetic construct
  source 1..75: mol_type = other DNA
ggggcaacattttattgctattattgcccctatattcaggctgcctccaggccgcatacacacttgttgtcggag

SEQ ID NO: 284370 - DNA, 75 bp, synthetic construct
  source 1..75: mol_type = other DNA
tgaacagtttaccggtgcggtggaccggatatttgacacggcggagagcgtctgtattgcctctgttgcacgcac

SEQ ID NO: 284371 - DNA, 75 bp, synthetic construct
  source 1..75: mol_type = other DNA
gaccgtgccctgtctgtggatgagtatttctggcgacacatcctgcagtgcggacatcagcaggtgctgtttgtg

SEQ ID NO: 284372 - DNA, 75 bp, synthetic construct
  source 1..75: mol_type = other DNA
ataaaaccgccgttgatacttaccgttatctgaacttcaaccagctttctcagtataccgagaaagcggataggg

SEQ ID NO: 284373 - DNA, 75 bp, synthetic construct
  source 1..75: mol_type = other DNA
gatatcaaagagccaatcctctgtgctccgaacgacccggatgacgcgcgtccgctgtctgcggtacagggcgag

SEQ ID NO: 284374 - DNA, 75 bp, synthetic construct
  source 1..75: mol_type = other DNA
gggccacgttgcggtatcggtgaaatttcaattccggaaaatgagccagggagttcaattatgccgggaaaagta

SEQ ID NO: 284375 - DNA, 75 bp, synthetic construct
  source 1..75: mol_type = other DNA
cggggacatcagcaggtgctgtttgtggtgacgcaggccgacaaaacggagccctgccatgaatgggatatggcc

SEQ ID NO: 284376 - DNA, 75 bp, synthetic construct
  source 1..75: mol_type = other DNA
gacacggcggagagcgtctgcattgcctctgttgcacgcacggttctgcgcgccgtccgtgactctgtggtctct

SEQ ID NO: 284377 - DNA, 75 bp, synthetic construct
  source 1..75: mol_type = other DNA
tggcgttggtgaaagtggtgaacgtgatgccgaatatgccgccctgtatcgcgcacagctttctcgcctcgacct

SEQ ID NO: 284378 - DNA, 75 bp, synthetic construct
  source 1..75: mol_type = other DNA
gcacggaatctgtccggtctcaggcccgtgaacagtttaccggtgcggtggaccggatatttgacacagcggaga

SEQ ID NO: 284379 - DNA, 75 bp, synthetic construct
  source 1..75: mol_type = other DNA
atgataaagcacctggtagcacccctgattttcacctcgctaatactgactggctgccagtcccctcagggaaag

SEQ ID NO: 284380 - DNA, 75 bp, synthetic construct
  source 1..75: mol_type = other DNA
cgacaactatggtgaagacagttacaacgaaggcttatcattgaaacgggcgaatgtcgtggccgatgcatgggc

SEQ ID NO: 284381 - DNA, 75 bp, synthetic construct
  source 1..75: mol_type = other DNA
cgaatgtcgtcgcagatgcctgggctgaaggtgggcaaattcctcgcagcaatctctctactcaaggcttaggga

SEQ ID NO: 284382 - DNA, 75 bp, synthetic construct
  source 1..75: mol_type = other DNA
tcctcactctgtaatgcactgtttcagggggaggtcaccccggtcagtgatgttcacgccggcacccgggaagta

SEQ ID NO: 284383 - DNA, 75 bp, synthetic construct
  source 1..75: mol_type = other DNA
ttaatcgagtttgaaggcgcgctggttgtcgtttcgcacgaccgtcatttgctgcgttccaccactgacgatctc

SEQ ID NO: 284384 - DNA, 75 bp, synthetic construct
  source 1..75: mol_type = other DNA
gcattaagatgctcgagcgtatggagctgattgcccccgcgcacgtcgacaacccgttccgctttagcttccgcg

SEQ ID NO: 284385 - DNA, 75 bp, synthetic construct
  source 1..75: mol_type = other DNA
tcactctgtaatgcactgtttcagggagaagtcaccccggtcagcgatgttcacgccggcacccgggaagtacgg

SEQ ID NO: 284386 - DNA, 75 bp, synthetic construct
  source 1..75: mol_type = other DNA
gaaaaaacggaggcggtattccgtctgttccggcccgtacatccggttgtggccgtatcggcccgcaccggctgg

SEQ ID NO: 284387 - DNA, 75 bp, synthetic construct
  source 1..75: mol_type = other DNA
tacgaatcaatgaaagaagaagcgcgtttgatccttagcgaaacaaagcgtttccaaaccatttcagagaaaaac

SEQ ID NO: 284388 - DNA, 75 bp, synthetic construct
  source 1..75: mol_type = other DNA
gtggaccctgtattctctatcggtatctcatcattatgggatgagctgcgacatatgccagcaggcggcgtctgg

SEQ ID NO: 284389 - DNA, 75 bp, synthetic construct
  source 1..75: mol_type = other DNA
tcctggaacatctgcgcaaactcaccagtcacgaacccgtgattggcattatgggtaaaagcggggccggtaaat

SEQ ID NO: 284390 - DNA, 75 bp, synthetic construct
  source 1..75: mol_type = other DNA
gcgtctgtattgcctctgtggctcgtacggttctgcgtgccgtccgtgactcggtggtctctgttgcccgcgcgg

SEQ ID NO: 284391 - DNA, 75 bp, synthetic construct
  source 1..75: mol_type = other DNA
cgtatcggcccgcaccggctgggagctggatacgctggtcagtgcgctcatgacagcgcttcccgaccatgccgc

SEQ ID NO: 284392 - DNA, 75 bp, synthetic construct
  source 1..75: mol_type = other DNA
acggctttgagattgaaggaactggcaagaagtacgcattgcgaaacggtgaatatattgatgtgtattatatgg

SEQ ID NO: 284393 - DNA, 75 bp, synthetic construct
  source 1..75: mol_type = other DNA
atcaaacagttagttgcctgtattgatggaaccgtcgtgggtcacctcaccattgacgtgcaacagcgcccacgc

SEQ ID NO: 284394 - DNA, 75 bp, synthetic construct
  source 1..75: mol_type = other DNA
gggacatcagcaggtgctgtttgtggtgacgcaggccgacaaaacggagccctgccatgaatgggatatggcagg

SEQ ID NO: 284395 - DNA, 75 bp, synthetic construct
  source 1..75: mol_type = other DNA
tgctggcctgcggcgctaacatggtgatcccgtggaacgccccactctctcgttgcctgacaatgattgaaagcg

SEQ ID NO: 284396 - DNA, 75 bp, synthetic construct
  source 1..75: mol_type = other DNA
aacaaaatggtatctggacattagttcaaagcgaagaggcggagatccaaccacgcagcgacgaaaaacgcattc

SEQ ID NO: 284397 - DNA, 75 bp, synthetic construct
  source 1..75: mol_type = other DNA
taatgccgaacacgatggtcgcaactggcgacgcatacctgaaccactgagattgctggatgatgctgtggagcg

SEQ ID NO: 284398 - DNA, 75 bp, synthetic construct
  source 1..75: mol_type = other DNA
gggtaaaagcggggccggtaaatcctcactctgtaatgcgctgtttcagggggaggtcacaccggtcagtgatgt

SEQ ID NO: 284399 - DNA, 75 bp, synthetic construct
  source 1..75: mol_type = other DNA
ggacgagctgcgcacggaatctgtccgcgctcaggcccgtgaacagtttaccggtgcggtggaccggatatttga

SEQ ID NO: 284400 - DNA, 75 bp, synthetic construct
  source 1..75: mol_type = other DNA
cattgcctctgttgcccgtacggttctgcgcgccgtccgtgacacggtggtctctgttgcccgcgctgtatggaa

SEQ ID NO: 284401 - DNA, 75 bp, synthetic construct
  source 1..75: mol_type = other DNA
gttaacgggattagtaccgacatataactttgcattaccttccgtaactggtgtcgtactggcaaatagtacagt

SEQ ID NO: 284402 - DNA, 75 bp, synthetic construct
  source 1..75: mol_type = other DNA
atgtcagctaaagctactaaagcagaagttaacgcctcatatagtcttagtgtcaatgctaacggtactgtagct

SEQ ID NO: 284403 - DNA, 75 bp, synthetic construct
  source 1..75: mol_type = other DNA
accaaatatcactgatggagattacttcgttaagattggtttatttgataagttcggtatggataatatccagta

SEQ ID NO: 284404 - DNA, 75 bp, synthetic construct
  source 1..75: mol_type = other DNA
ttatagtacaggtatccgttcgcaaccagtttctattatcgtagaaaacaagcaatgtcgtatgcctcttaatgt

SEQ ID NO: 284405 - DNA, 75 bp, synthetic construct
  source 1..75: mol_type = other DNA
cacagattgctacggttgacaaggcgttatcacagaagataactgccgtcgaaagtacaaccaatgagaacaagg

SEQ ID NO: 284406 - DNA, 75 bp, synthetic construct
  source 1..75: mol_type = other DNA
agcaacttattcgcctcatggactccatcgactgagagggattatgccggggcagtagtgagtattgttaatggt

SEQ ID NO: 284407 - DNA, 75 bp, synthetic construct
  source 1..75: mol_type = other DNA
tctgtaaacgctacgtatacattatccgtcaatgctaacggtactgtagctggttttaaactaattgccgatggt

SEQ ID NO: 284408 - DNA, 75 bp, synthetic construct
  source 1..75: mol_type = other DNA
gcaagaacactgggtgccgggcgctggcgcgttttctttactatcacgttaccgctgaccttaccgggaattatt

SEQ ID NO: 284409 - DNA, 75 bp, synthetic construct
  source 1..75: mol_type = other DNA
aattacctttgtttcaaacattcctggtgaaacgcgtaccattccttctgctatgtatacccttatccagacccc

SEQ ID NO: 284410 - DNA, 75 bp, synthetic construct
  source 1..75: mol_type = other DNA
tgctcaggggtggatgtctggcacattctcacaggaagttaagattactccagaaaacttacagtgtggattagt

SEQ ID NO: 284411 - DNA, 75 bp, synthetic construct
  source 1..75: mol_type = other DNA
ctggcgttaaattgaaaaatgctacttctggtttattaattaccaatgagactgactttaatattatttgggata

SEQ ID NO: 284412 - DNA, 75 bp, synthetic construct
  source 1..75: mol_type = other DNA
cagcttcattctaactggcgtgatcaataactggtataacgtaaaagatgatagctcacagtatttctttagcga

SEQ ID NO: 284413 - DNA, 75 bp, synthetic construct
  source 1..75: mol_type = other DNA
acaagcatcagacggcgataactgggccgatgactctccgctttgccatgaaattctggcgaaaaaattattacc

SEQ ID NO: 284414 - DNA, 75 bp, synthetic construct
  source 1..75: mol_type = other DNA
tacgaacacccgctaccgctggtgattgtcggctctgcggggagtggtaagacggcgctggtactggaaaaaatg

SEQ ID NO: 284415 - DNA, 75 bp, synthetic construct
  source 1..75: mol_type = other DNA
gccagtgtgacccgcagcaaacaacacaaattattacagactgcccgcttgtggctcgcgcgtcataatgggagt

SEQ ID NO: 284416 - DNA, 75 bp, synthetic construct
  source 1..75: mol_type = other DNA
aatcgttgggggcagagttggctgtgtggggagtcccgcataactacgctttggcatttgcagagaaaagcacca

SEQ ID NO: 284417 - DNA, 75 bp, synthetic construct
  source 1..75: mol_type = other DNA
tgggtcagcgtgcggggagggaaggggatattactgaccgcagatactcagcctgatgtcggaagtaaaatgctg

SEQ ID NO: 284418 - DNA, 75 bp, synthetic construct
  source 1..75: mol_type = other DNA
gccatacagaaaggggcgataaaattgaccctgcgccggagacggctaacttctgggcccggctcgatcacgagc

SEQ ID NO: 284419 - DNA, 75 bp, synthetic construct
  source 1..75: mol_type = other DNA
gagttcagcctcaaaaggacatatccgaagcgcgaacagattaaccagtatcaggaaagcgatctgagatttatc

SEQ ID NO: 284420 - DNA, 75 bp, synthetic construct
  source 1..75: mol_type = other DNA
gcggtgcagcgcctgggaaaagctatcgtagctacggacaactggaagccgagtaccgcatcggacgcaatatgc

SEQ ID NO: 284421 - DNA, 75 bp, synthetic construct
  source 1..75: mol_type = other DNA
atacgcaaagtaatgcctttaatttcactcttgaaatgaaccgtctgaaagtacgtaagcctaccattggtatta

SEQ ID NO: 284422 - DNA, 75 bp, synthetic construct
  source 1..75: mol_type = other DNA
tttgatgagcgtaacatggtaggggcggtacaggtttctacttctggcggtactgactacttcaacgtagtcgat

SEQ ID NO: 284423 - DNA, 75 bp, synthetic construct
  source 1..75: mol_type = other DNA
ggcggcggcggtagcttcctgctggcggcgttaatcttcatcgcctgcctggtcacggcggttggcctgacctgt

SEQ ID NO: 284424 - DNA, 75 bp, synthetic construct
  source 1..75: mol_type = other DNA
cggcggtgttgacagcctcagcacgccaatcggtaaagtcgctggcgtactgctggcaacggtttgttacctggc

SEQ ID NO: 284425 - DNA, 75 bp, synthetic construct
  source 1..75: mol_type = other DNA
tgtgaagttatcctgcccggtggtacgtggcgaacgcgttattgactacgtggagattggcgaggaaatccgtca

SEQ ID NO: 284426 - DNA, 75 bp, synthetic construct
  source 1..75: mol_type = other DNA
ccatgtataccctgatccagaccctggcggggaaagtggcgcggcgagactgtgtattatttctattgcgctggc

SEQ ID NO: 284427 - DNA, 75 bp, synthetic construct
  source 1..75: mol_type = other DNA
aatcaggaatcaccggacggccagaaatggccgggacgtaaaacgaagcgcaaagggaagatgctgcgcaacctg

SEQ ID NO: 284428 - DNA, 75 bp, synthetic construct
  source 1..75: mol_type = other DNA
ccgggaaaatggcgacgcctgcccaggccaaaaaattacgggcgctggggtaccgggtgaaaaccggtaagcgat

SEQ ID NO: 284429 - DNA, 75 bp, synthetic construct
  source 1..75: mol_type = other DNA
aatcaggaagcaccggatggccagaagtggccggggcgtaaaacgaagcgcaaagggaagatgctgcggaacctg

SEQ ID NO: 284430 - DNA, 75 bp, synthetic construct
  source 1..75: mol_type = other DNA
atgaaccccctgaccagcaaggctgacagtgttgtactgcagctttcggggcaatcacggtaccgggttcatgtg

SEQ ID NO: 284431 - DNA, 75 bp, synthetic construct
  source 1..75: mol_type = other DNA
tatctggtgcctggttctggcgcaaatctccccaacgaagcacctggtttcagcctgacggatatcacacaggaa

SEQ ID NO: 284432 - DNA, 75 bp, synthetic construct
  source 1..75: mol_type = other DNA
gctctgtgatatcaatacccagattaggtttgtaaccgacaaaatcagggaacttcagtcagcggtcctgctggg

SEQ ID NO: 284433 - DNA, 75 bp, synthetic construct
  source 1..75: mol_type = other DNA
cgctgattggtgaagtggtggaacgtaaaggtgttcgtcttgccggtctgtatggcgtgaaacgaaccctcgatt

SEQ ID NO: 284434 - DNA, 75 bp, synthetic construct
  source 1..75: mol_type = other DNA
gtaaaggtgttcgtcttgccggtctgtatggcgtaaaacggacattgaacttacctgttgcagaaccattaccaa

SEQ ID NO: 284435 - DNA, 75 bp, synthetic construct
  source 1..75: mol_type = other DNA
tggtgcagcgtggggcggcagataaactgtttatcaacaccgcaggcatgggcgcgatcccggcaaatattcact

SEQ ID NO: 284436 - DNA, 75 bp, synthetic construct
  source 1..75: mol_type = other DNA
ttgtggtgctggagctggatctggagtactaccaggggccggaggatttcttcccgtctgagattgtcccgctgc

SEQ ID NO: 284437 - DNA, 75 bp, synthetic construct
  source 1..75: mol_type = other DNA
aaaagaagactgctgcgctgtttgtcgtcacgtttatcttcagtggctatgcaagtcataatacaaggtgggaca

SEQ ID NO: 284438 - DNA, 75 bp, synthetic construct
  source 1..75: mol_type = other DNA
ctgaagtccgcattgaaggtcatacaagtactgactggacaggaacaacaaatcctgatattgcttattttaata

SEQ ID NO: 284439 - DNA, 75 bp, synthetic construct
  source 1..75: mol_type = other DNA
atagtgattttccaggacagccagcagcagtatgaatttggcatcacgctgccattgcgcaatcaagccgggatg

SEQ ID NO: 284440 - DNA, 75 bp, synthetic construct
  source 1..75: mol_type = other DNA
gcagataccgtgcgtgatatccgtggtttcgccaccaagttctataccgaagaaggtatttttgatctcgttggc

SEQ ID NO: 284441 - DNA, 75 bp, synthetic construct
  source 1..75: mol_type = other DNA
cgatgacggtacggtgctgccaatagccgctacctttgccggggcaccatcgctgacggtcgatgcggtgattgt

SEQ ID NO: 284442 - DNA, 75 bp, synthetic construct
  source 1..75: mol_type = other DNA
agatgacggtacagtattgccaatagccgctacctttgctggagccccctcactgacggttgatgcggttattgt

SEQ ID NO: 284443 - DNA, 75 bp, synthetic construct
  source 1..75: mol_type = other DNA
cggcggggaaagtggcgcggcgagactgtgcattatttctattgcgctggcgatgatctccctgttgatttcaga

SEQ ID NO: 284444 - DNA, 75 bp, synthetic construct
  source 1..75: mol_type = other DNA
attctttttaacgatgacacgattaagaaatacacaatgtcagaaacccaaataaactcgaaatcaggttgggct

SEQ ID NO: 284445 - DNA, 75 bp, synthetic construct
  source 1..75: mol_type = other DNA
tgatggcatctctattggctgggtgtgcttcttcaggcaaccagcaactcaaaaatgaaactgaaattagtgtcc

SEQ ID NO: 284446 - DNA, 75 bp, synthetic construct
  source 1..75: mol_type = other DNA
cactgggcgatcccacagggaggcagcgcccacgacactttctgggattatgtttccctgcaacctgaaaccctg

SEQ ID NO: 284447 - DNA, 75 bp, synthetic construct
  source 1..75: mol_type = other DNA
aaacagctgacggtgaccagtagtgaagatgaaattattatcagcaccccggaaaccctgacgctgaacggtggc

SEQ ID NO: 284448 - DNA, 75 bp, synthetic construct
  source 1..75: mol_type = other DNA
ccttggtctgtttgtgcataaagacggggcgaaactggtagccaaccagggagatattgagattcaggctcagca

SEQ ID NO: 284449 - DNA, 75 bp, synthetic construct
  source 1..75: mol_type = other DNA
tcctggacacattgtccccggtctggatttcaccaacgatccgctgttgcaggggcgtttgttctcctacaccga

SEQ ID NO: 284450 - DNA, 75 bp, synthetic construct
  source 1..75: mol_type = other DNA
taccgttcagggtggcgcaggttcggcagatacggtgcgtgatatccgtggtttcgccaccaagttctataccga

SEQ ID NO: 284451 - DNA, 75 bp, synthetic construct
  source 1..75: mol_type = other DNA
tctggaagacgtacgcaaaggcagtgaaaattatgcgctgaccactaatcagggcgtgcgcatcgccgacgatca

SEQ ID NO: 284452 - DNA, 75 bp, synthetic construct
  source 1..75: mol_type = other DNA
accgtgatctggcaaaaatgtcatttatccccggtattttcaatatcaatgaaccgataatgtttggccttccta

SEQ ID NO: 284453 - DNA, 75 bp, synthetic construct
  source 1..75: mol_type = other DNA
ctacctgggcgcgccatatccgattacctggacttctattaatgatgcattcgccaactgcggcggttcaggtat

SEQ ID NO: 284454 - DNA, 75 bp, synthetic construct
  source 1..75: mol_type = other DNA
cattggttacttctttgtttcgggtaatgactccaacttattgatagtgttttatgttcagataatgcccgatga

SEQ ID NO: 284455 - DNA, 75 bp, synthetic construct
  source 1..75: mol_type = other DNA
gctatgatctgcaggggaatgccgttgcgaccgtcactgcagaggaagcgcagtacgccagtgagcgcatgatga

SEQ ID NO: 284456 - DNA, 75 bp, synthetic construct
  source 1..75: mol_type = other DNA
tgggtgctggggatccacggacctaataccacatcggcaattcgagaaaccgttttttctgaggctaatctggag

SEQ ID NO: 284457 - DNA, 75 bp, synthetic construct
  source 1..75: mol_type = other DNA
gtggaatggaacgttttcttgttccagtcgccatcaagttaaattcacagaaacatgttgcagcggtgagagatg

SEQ ID NO: 284458 - DNA, 75 bp, synthetic construct
  source 1..75: mol_type = other DNA
gattaccggacgttatcgagcaacctgactctgatactcaaagtgtgctcgcagattttattatcgcgacgccta

SEQ ID NO: 284459 - DNA, 75 bp, synthetic construct
  source 1..75: mol_type = other DNA
gacgataacggtattctgtttatcgaaaacgttggcaacctcgtatgcccggccagcttcgatctcggtgaaaaa

SEQ ID NO: 284460 - DNA, 75 bp, synthetic construct
  source 1..75: mol_type = other DNA
gcccgcaagcaactggtgctcaacctggtttccagccctggttccggtaaaaccaccctgctgacggaaacctta

SEQ ID NO: 284461 - DNA, 75 bp, synthetic construct
  source 1..75: mol_type = other DNA
ctacctggggcgcgccatatccgattacctggacttctattaatgatgcattcgccaactgtctattctcatggc

SEQ ID NO: 284462 - DNA, 75 bp, synthetic construct
  source 1..75: mol_type = other DNA
aaattattccaccggttgcttatgccgtgccctggactacgcccggacctttaattgctttcctcggaaccgggg

SEQ ID NO: 284463 - DNA, 75 bp, synthetic construct
  source 1..75: mol_type = other DNA
tgaaccggtaatgttcggacttccgattgtccttaacccaatcatgatggtgccttttattttagtccctattgt

SEQ ID NO: 284464 - DNA, 75 bp, synthetic construct
  source 1..75: mol_type = other DNA
cctgaaggtgtggtggcctgggctgttcaagggggaagcgcctcacctgctggccatcggcatccgggaggcctt

SEQ ID NO: 284465 - DNA, 75 bp, synthetic construct
  source 1..75: mol_type = other DNA
agggacaaaaatggtctgctggaagcaaccatgcgcgacatcaccagtcagttacgtgacgcggttttgaatcga

SEQ ID NO: 284466 - DNA, 75 bp, synthetic construct
  source 1..75: mol_type = other DNA
cagagcagcgattacaggcgattgttgacgggaatttcgatgagactcaggtcagtaatgctgcgatgaaagcct

SEQ ID NO: 284467 - DNA, 75 bp, synthetic construct
  source 1..75: mol_type = other DNA
aatgttgctgaatgtttgggaataaacccgattatattaaatcaggttggcccaagaaagttaaaattaacacac

SEQ ID NO: 284468 - DNA, 75 bp, synthetic construct
  source 1..75: mol_type = other DNA
attaatgtcacgacatataagaaagatgcaaaaaaaactaaaacagacgtctgtgcctgattttatttattattc

SEQ ID NO: 284469 - DNA, 75 bp, synthetic construct
  source 1..75: mol_type = other DNA
tgcgatagctgtacgcagaccatcgagcctgatgaagtgatcctgacgcgtaagcgtatgaagatcgaactgcca

SEQ ID NO: 284470 - DNA, 75 bp, synthetic construct
  source 1..75: mol_type = other DNA
gtgcgggcggtgatccagctcgcgcacgggctgggcatggatgtcattttcagaagacgactgcaccagttgatt

SEQ ID NO: 284471 - DNA, 75 bp, synthetic construct
  source 1..75: mol_type = other DNA
cgcgcgttgagcagtattcgattgacgagatgtttctcgacgtgcgaggtattgacagctgcatcgatttcgagg

SEQ ID NO: 284472 - DNA, 75 bp, synthetic construct
  source 1..75: mol_type = other DNA
tgatttgattaagaaattcaaccctgatgtgttgacgctggacgttgaaatgccgcggatggatgggctggattt

SEQ ID NO: 284473 - DNA, 75 bp, synthetic construct
  source 1..75: mol_type = other DNA
tatatcgcaccgggcgatcgacatatggaactggcgcgcagcggcgcgaactatcaaatcaaaattcacgatggc

SEQ ID NO: 284474 - DNA, 75 bp, synthetic construct
  source 1..75: mol_type = other DNA
cagggaaacaatgctgggtaatgtagccattgcattacttataagcatctcatcaagttatatgacaaccagaga

SEQ ID NO: 284475 - DNA, 75 bp, synthetic construct
  source 1..75: mol_type = other DNA
ataagaagagcaaaactcgcacttataatatttattctctggatgtgtcttattctcgcattaactattcgttat

SEQ ID NO: 284476 - DNA, 75 bp, synthetic construct
  source 1..75: mol_type = other DNA
atgggtattaaagctgatattcagagcttgtcgccctccgcgctcattgaactgttcgaacttgatatgtcgaac

SEQ ID NO: 284477 - DNA, 75 bp, synthetic construct
  source 1..75: mol_type = other DNA
attacggtcatggtgaagcaggcacacacgcgccgggcatgagccagcgccggatgctggaagtcgaaattgacg

SEQ ID NO: 284478 - DNA, 75 bp, synthetic construct
  source 1..75: mol_type = other DNA
catcctgtttacctctttctcagggagtttagtctccaggatttccggggcggttcagttccaatagttaatact

SEQ ID NO: 284479 - DNA, 75 bp, synthetic construct
  source 1..75: mol_type = other DNA
gttgtcttttatgcacaaaaaagtagatgctcatccatattatgatggattaggaaaaggaattaagaaatattt

SEQ ID NO: 284480 - DNA, 75 bp, synthetic construct
  source 1..75: mol_type = other DNA
aggtaaggactctttgattgagtcatatgcagaaaaagagaacatacttggtttgattttttcaggaatttggcc

SEQ ID NO: 284481 - DNA, 75 bp, synthetic construct
  source 1..75: mol_type = other DNA
aatatgtcggtcgtggtgttgccatgtgtttttgcccgttctgtggtgaaagtctgaaaacatggaaaaaggagg

SEQ ID NO: 284482 - DNA, 75 bp, synthetic construct
  source 1..75: mol_type = other DNA
gatattgctcaaattcactcggggaaatatatcggtcgtggcgttgcaatgtgcttttgcccgttctgtggtgaa

SEQ ID NO: 284483 - DNA, 75 bp, synthetic construct
  source 1..75: mol_type = other DNA
aggtgcacatataatacaaagaatcacggtatttcattcggggaggggtgtatctatcttgatatggatatgata

SEQ ID NO: 284484 - DNA, 75 bp, synthetic construct
  source 1..75: mol_type = other DNA
aaagcgagagtgccgcagctggttctgcaagtgcggcagctaatagccaaaaagctgcaaaaaccagtgaaacta

SEQ ID NO: 284485 - DNA, 75 bp, synthetic construct
  source 1..75: mol_type = other DNA
gatccaggtagtggatggatatattttcaggcaacactgaaatgtctgccagaatggggaatggttggtacgcag

SEQ ID NO: 284486 - DNA, 75 bp, synthetic construct
  source 1..75: mol_type = other DNA
gcaaagcgtaacagcaccacggtactggtgaacacggtggcatctgaaaatcctgatgaagccgggcgttacagt

SEQ ID NO: 284487 - DNA, 75 bp, synthetic construct
  source 1..75: mol_type = other DNA
tgcgggagctggggatcgtactgttcctctcggtcgttggcctgaaatccggcggcgattttatccatacactgg

SEQ ID NO: 284488 - DNA, 75 bp, synthetic construct
  source 1..75: mol_type = other DNA
acaactggttggtttcggaaccttcaaagtgaaccaccgcgctgagcgtactggccgcaacccgcagaccggtaa

SEQ ID NO: 284489 - DNA, 75 bp, synthetic construct
  source 1..75: mol_type = other DNA
ccactgccgtggtgctcggtttcctgctttactggggcggtattcgcctcaatcttggcgcatttttcaaatgga

SEQ ID NO: 284490 - DNA, 75 bp, synthetic construct
  source 1..75: mol_type = other DNA
tcgtttattcatcttcatgacgactggtgtgctcttattaaatatggtcactcgtctcctaagctggcggacctg

SEQ ID NO: 284491 - DNA, 75 bp, synthetic construct
  source 1..75: mol_type = other DNA
gttgctgttggcgttgggggctggggcgttaattgcgctgctgcgtacgccgattatcgatctggcgctgcatat

SEQ ID NO: 284492 - DNA, 75 bp, synthetic construct
  source 1..75: mol_type = other DNA
acattgctgattggtctgctaatggtgcgtaaaatcctcaaactacgcggaatctccggcgaaatgctgaaaact

SEQ ID NO: 284493 - DNA, 75 bp, synthetic construct
  source 1..75: mol_type = other DNA
agcgcattctggtcaggcatacggtgcgcgtgacggcagtcagctattggatgtctggcgggcagcgtgtcgtca

SEQ ID NO: 284494 - DNA, 75 bp, synthetic construct
  source 1..75: mol_type = other DNA
aggtctggcgcgcagcgtgccgccagtcggggatcgttgcactgctgttttcggtgatttatttactggcagggg

SEQ ID NO: 284495 - DNA, 75 bp, synthetic construct
  source 1..75: mol_type = other DNA
cgcggtaaacgcggttctgatgactctactcacctttaccgcctatgcgcttgatggttttgcctacgcggttga

SEQ ID NO: 284496 - DNA, 75 bp, synthetic construct
  source 1..75: mol_type = other DNA
ggcgttgcgcgggctttctctggcggcgtcactggcgcaacggtacctggtttgccgcaacgtgacggttaaaaa

SEQ ID NO: 284497 - DNA, 75 bp, synthetic construct
  source 1..75: mol_type = other DNA
atcaatgcaaaccagatattcaaatggcgcaagcaaggcactgttgcaaagttagcgatgaggcagccttttgtc

SEQ ID NO: 284498 - DNA, 75 bp, synthetic construct
  source 1..75: mol_type = other DNA
gaaaaacgggcagacgttttctcaaatcgccactaactggcatggcgagcataaacgctggtctgagcattacgc

SEQ ID NO: 284499 - DNA, 75 bp, synthetic construct
  source 1..75: mol_type = other DNA
atcacgccgcagaaacgaccatttatgactatatcgccaggcggcatccacaaagcgcacaatgtgtgactgatt

SEQ ID NO: 284500 - DNA, 75 bp, synthetic construct
  source 1..75: mol_type = other DNA
ctactcacctttaccgcctatgcgctggatggttttgcctacgcggttgaagcacattccggtcaggcatacggt

SEQ ID NO: 284501 - DNA, 75 bp, synthetic construct
  source 1..75: mol_type = other DNA
atgtatggcgggcagcgtgccgccagtcggggattgtagagttactgttttcggtggtttatttgctggcagggg

SEQ ID NO: 284502 - DNA, 75 bp, synthetic construct
  source 1..75: mol_type = other DNA
gagcaccaccgggctgactgcgcaggcttatggtgccaaaaatcctcaggcattagcccgtgcgctggtgcaacc

SEQ ID NO: 284503 - DNA, 75 bp, synthetic construct
  source 1..75: mol_type = other DNA
cctttaaacgtagtaaatgatgggaatggcgcttctgttcatatagaactaagaccttatatgtctgaacctgcg

SEQ ID NO: 284504 - DNA, 75 bp, synthetic construct
  source 1..75: mol_type = other DNA
tagaatgttatttacacgcaacacaaaatgaaatagatatcgataagtctttatcaaaaagcattacaaaaaaaa

SEQ ID NO: 284505 - DNA, 75 bp, synthetic construct
  source 1..75: mol_type = other DNA
gtatcgcgcttggcagtcggattccggcgctgcgtgaagactataaacttgggcgtttatgcggtcgttatttcc

SEQ ID NO: 284506 - DNA, 75 bp, synthetic construct
  source 1..75: mol_type = other DNA
attggcatcgggcttggcgtattgttaggttctattcccgtctttgtgccgggattcccggccgcgttgaaactg

SEQ ID NO: 284507 - DNA, 75 bp, synthetic construct
  source 1..75: mol_type = other DNA
tggaacgttcgccggaacagtatttccggcgttataacgccaagaatcccgaacggggaggcgcaaaaaaagatt

SEQ ID NO: 284508 - DNA, 75 bp, synthetic construct
  source 1..75: mol_type = other DNA
tcctggcggcagtgttgttggttggttttgttgtgacctggctatgggcaccagaaaccaaagcactcccgctgg

SEQ ID NO: 284509 - DNA, 75 bp, synthetic construct
  source 1..75: mol_type = other DNA
gacttcgcgtataaggtctgtaaggacgcggcgaaactgtggagtgaagaagttcctggctatatcatcaggcaa

SEQ ID NO: 284510 - DNA, 75 bp, synthetic construct
  source 1..75: mol_type = other DNA
tctcagggaatatccaaaacaattaaatggatatgaatcaaaaaaagaggttttaattaatgaaagaaataatga

SEQ ID NO: 284511 - DNA, 75 bp, synthetic construct
  source 1..75: mol_type = other DNA
cgatctatgcaggaacactggatacagttgataacgaacatacagaaatggcaggagcagtcattgttatggcta

SEQ ID NO: 284512 - DNA, 75 bp, synthetic construct
  source 1..75: mol_type = other DNA
gtcggtaagttattgactgaaaaagcgccgctgagccgccatctggtgccggtggtgacgccggagtcgatcgtt

SEQ ID NO: 284513 - DNA, 75 bp, synthetic construct
  source 1..75: mol_type = other DNA
tttaatcctttcgatctttatctcggcacatctgccggggcgcagaacctctcggcgtttatctgcaatcagccc

SEQ ID NO: 284514 - DNA, 75 bp, synthetic construct
  source 1..75: mol_type = other DNA
aaaacgctggtggtgatccgcaccgtgccgtcgcaaatgtactatacgccgcagtggtttaaacgtatggaacgt

SEQ ID NO: 284515 - DNA, 75 bp, synthetic construct
  source 1..75: mol_type = other DNA
tggtggtcaccaatgaaaacgtgctcggaaaacgtattcgcgacctgcactttaaagaacgctatgacgttgtta

SEQ ID NO: 284516 - DNA, 75 bp, synthetic construct
  source 1..75: mol_type = other DNA
agtgctataacttgaagaatactggtcttagaaaaataagtagagaaagtctcatcgaacagatgtttttttatt

SEQ ID NO: 284517 - DNA, 75 bp, synthetic construct
  source 1..75: mol_type = other DNA
aatcggcattatgcgaattatccacgaactgaaggatatcgaattattttttactggcgacaaacgccgtaaata

SEQ ID NO: 284518 - DNA, 75 bp, synthetic construct
  source 1..75: mol_type = other DNA
acctgcatgattaccgccttcattctggggttaacgtggtctgccccactccgggcacaggatcaacgttacatc

SEQ ID NO: 284519 - DNA, 75 bp, synthetic construct
  source 1..75: mol_type = other DNA
aagcgaaaaaattattaatcacaataccgcagcaggaatgtttatgggaaccgccgcactggctggtggtatttt

SEQ ID NO: 284520 - DNA, 75 bp, synthetic construct
  source 1..75: mol_type = other DNA
tttcgcctggggcgggattgcactggtgattcagttactcgtttttgctggcgtcagactttatatgcccgcatt

SEQ ID NO: 284521 - DNA, 75 bp, synthetic construct
  source 1..75: mol_type = other DNA
catctcatcccacatgaaggtaatgacaatttaaagtacagttgggataatttattttattcatgcagtagatgc

SEQ ID NO: 284522 - DNA, 75 bp, synthetic construct
  source 1..75: mol_type = other DNA
cttgcgcgacctggggacaccgatggcgatggtcgatcaaatggggatgagctatgcgatggcgtatccatttgg

SEQ ID NO: 284523 - DNA, 75 bp, synthetic construct
  source 1..75: mol_type = other DNA
cctcaacttgtttgctgttctgatagtcattatcggcggtctggttaccgcaatcttgcataaacttttcgatat

SEQ ID NO: 284524 - DNA, 75 bp, synthetic construct
  source 1..75: mol_type = other DNA
cctaaaagtaccttcgccagagaccattattcagttgggagatttactgcatctggtggggcagcctgcggattt

SEQ ID NO: 284525 - DNA, 75 bp, synthetic construct
  source 1..75: mol_type = other DNA
ttaacgtggtctgccccactccgggcacaggatcaacgttacatcagtatacgcaatgaaccgccccggttttcc

SEQ ID NO: 284526 - DNA, 75 bp, synthetic construct
  source 1..75: mol_type = other DNA
ttgcgcgtctccggattacgcctcaacctgtttgctgttctgatcgtcatcatcggtggtctggttaccgccatc

SEQ ID NO: 284527 - DNA, 75 bp, synthetic construct
  source 1..75: mol_type = other DNA
tcccggccgcgttgaaactggggctggcgggcggtccgctgattatggcgttgatcctcgggcgtatcggcagta

SEQ ID NO: 284528 - DNA, 75 bp, synthetic construct
  source 1..75: mol_type = other DNA
actcattatcatttattcaagtgccccaccatggaagcaggagaaacatcggtccagcggtgctaaataagctcg

SEQ ID NO: 284529 - DNA, 75 bp, synthetic construct
  source 1..75: mol_type = other DNA
cacctaagctctctatagcgcttaatggcattgtactcacatcgaatgatgagacttcttttgtcttaattaatg

SEQ ID NO: 284530 - DNA, 75 bp, synthetic construct
  source 1..75: mol_type = other DNA
agttaaaaatggacagatcattaatcaaccaacaaacgcatttcagtctgatttcagccttgccgctttatggcg

SEQ ID NO: 284531 - DNA, 75 bp, synthetic construct
  source 1..75: mol_type = other DNA
cgcacagttactctctctggaagacgatctggaggtcattggtcagtacagtagtgccgcacaggcatggtcggc

SEQ ID NO: 284532 - DNA, 75 bp, synthetic construct
  source 1..75: mol_type = other DNA
ccagggctacctgacatcatcaagcagcctgattcggaaaatcaaaatgtactcgccgattatattatcgccaca

SEQ ID NO: 284533 - DNA, 75 bp, synthetic construct
  source 1..75: mol_type = other DNA
tgaaactcacgggcattacgaaaaagtaactctccatccagggctacctgacatcatcaagcagcctgattcgga

SEQ ID NO: 284534 - DNA, 75 bp, synthetic construct
  source 1..75: mol_type = other DNA
tcaagcagcctgattcagaaagtcaaaatgtactcgctgattatattatcgccacgcctatacgtgatggagaac

SEQ ID NO: 284535 - DNA, 75 bp, synthetic construct
  source 1..75: mol_type = other DNA
tgttttcccggctcggcaatgttcgaggcaggttcagggcggttcatgctctccagtaataccacggctcttaca

SEQ ID NO: 284536 - DNA, 75 bp, synthetic construct
  source 1..75: mol_type = other DNA
ttgatgtcggtgccttcaatattccatctgctttcggtaatgggtctacactaggttatattggccttaatttct

SEQ ID NO: 284537 - DNA, 75 bp, synthetic construct
  source 1..75: mol_type = other DNA
cacaacccccattaatcgccacaataaaagatgatgtattttgcactcttcatgattactataaccacaataatg

SEQ ID NO: 284538 - DNA, 75 bp, synthetic construct
  source 1..75: mol_type = other DNA
aaggtgccacgctcgatatgttgacgcctaatgtactcagttggctgacggaagaagacgacccgacgcgctatc

SEQ ID NO: 284539 - DNA, 75 bp, synthetic construct
  source 1..75: mol_type = other DNA
ataccttcgtatctcaccagcaggaagtgggtacaggttacttcgataaagtgacgactattattcagggcggca

SEQ ID NO: 284540 - DNA, 75 bp, synthetic construct
  source 1..75: mol_type = other DNA
gacgcttacgacgagttttgccgatccgtggatatgcattagtcagtgtccgggcaacatatccgatgatggcgg

SEQ ID NO: 284541 - DNA, 75 bp, synthetic construct
  source 1..75: mol_type = other DNA
aggaaacacccaagctctctatagcgcttaatggcattgtactcacatcgaatgatgagacttcttttgtcttaa

SEQ ID NO: 284542 - DNA, 75 bp, synthetic construct
  source 1..75: mol_type = other DNA
gacgctgtatattggtggttgtacactttttttccctgcctcgcatatggcaacctacactatgttccttgcggc

SEQ ID NO: 284543 - DNA, 75 bp, synthetic construct
  source 1..75: mol_type = other DNA
ttccactcactacagctttcattcctggtttctatgctctgttttgtctatgtcggagtctacttctggcgtgaa

SEQ ID NO: 284544 - DNA, 75 bp, synthetic construct
  source 1..75: mol_type = other DNA
tgccgcaaagcatgttgtttttacagcactatttacaaaatgcagacgcattttcactgcctggcgagcgcgtgc

SEQ ID NO: 284545 - DNA, 75 bp, synthetic construct
  source 1..75: mol_type = other DNA
aaaagtattgattctctattccgttatagggcgctgttcctggcatatgttgcactggctccaagtttcagcgcg

SEQ ID NO: 284546 - DNA, 75 bp, synthetic construct
  source 1..75: mol_type = other DNA
tgaagataccacctcggcacaaaataactcaagtgtcattttgaaacttgagattgatggaagaacgttagtgtt

SEQ ID NO: 284547 - DNA, 75 bp, synthetic construct
  source 1..75: mol_type = other DNA
gaaagccttgagaagcagatgtccggaatgaacgccgagcaaattcacaactttaaggtgctgatgttagagaac

SEQ ID NO: 284548 - DNA, 75 bp, synthetic construct
  source 1..75: mol_type = other DNA
gttttatcacccacaactgcctgcagaaatgccgacctggccgtacgccgtcgcgctgatgattgaatctggcga

SEQ ID NO: 284549 - DNA, 75 bp, synthetic construct
  source 1..75: mol_type = other DNA
accctgccgcgccgttggcaaaattaagtgaactgccaatgatgaccgcccgccgcctcagctccgggagcaaac

SEQ ID NO: 284550 - DNA, 75 bp, synthetic construct
  source 1..75: mol_type = other DNA
agctggcacgcaagccgctgaacgacggtgtgctgaccttcccgttcttcaccatcgagaacgtggatgtggttg

SEQ ID NO: 284551 - DNA, 75 bp, synthetic construct
  source 1..75: mol_type = other DNA
gtgtgaagtgcttagcctgttacaagcgggataccagcgcgtgctgatggtcgattttgacggtttcctgcccga

SEQ ID NO: 284552 - DNA, 75 bp, synthetic construct
  source 1..75: mol_type = other DNA
atggttacgttttggggaaattatgaggggatctctcagcgctttgccacgccggaagcgaaagccgcgaacgat

SEQ ID NO: 284553 - DNA, 75 bp, synthetic construct
  source 1..75: mol_type = other DNA
cgcggtgcccatcgaaggttttgacgccgccatcctcgatgaagaatttggtctgaaagagaaaggctacaccag

SEQ ID NO: 284554 - DNA, 75 bp, synthetic construct
  source 1..75: mol_type = other DNA
aagactatgctttttgcccaagtggtaccctccattgcgatgttagcgattacgcttttcctacccgaatcaccg

SEQ ID NO: 284555 - DNA, 75 bp, synthetic construct
  source 1..75: mol_type = other DNA
tatttcaaacaataatcaataattcgccttttgtgaatcactgggaacggattatgtgtttggctctaatgtcag

SEQ ID NO: 284556 - DNA, 75 bp, synthetic construct
  source 1..75: mol_type = other DNA
atacatatgccgatatgctgactagctgccgcgaaggcataactggtaatccgggcttgttgctgaaagtgaatg

SEQ ID NO: 284557 - DNA, 75 bp, synthetic construct
  source 1..75: mol_type = other DNA
atccatcatcccataacgaacgaataaaagtaatcatttcatattttgactcctgccattctttaattaataaaa

SEQ ID NO: 284558 - DNA, 75 bp, synthetic construct
  source 1..75: mol_type = other DNA
tacccggatctacagtggattaacggccacagatgtggccgctatttttgacagcatgaaagaaaccgtacgtcc

SEQ ID NO: 284559 - DNA, 75 bp, synthetic construct
  source 1..75: mol_type = other DNA
aaaggggtgccgctaacagaaattgaacggctggccgagaacaagctgcgtgaaattcaggggaaacgtcgcgat

SEQ ID NO: 284560 - DNA, 75 bp, synthetic construct
  source 1..75: mol_type = other DNA
ctgggtatcagacagcctaccgttgcaggaatggaaaaaccgggccgcgacctgaaactttccacgcttaaacgc

SEQ ID NO: 284561 - DNA, 75 bp, synthetic construct
  source 1..75: mol_type = other DNA
gtattttgtggggcacgatgctggcggtaatgcgcctgtccagctttgcacccgtggcgtggtttgccaaagcct

SEQ ID NO: 284562 - DNA, 75 bp, synthetic construct
  source 1..75: mol_type = other DNA
cccgtagcgtggtttgccaaagcctacgttaacgtattccgctcgattcctttagttatggttttgctgtggttt

SEQ ID NO: 284563 - DNA, 75 bp, synthetic construct
  source 1..75: mol_type = other DNA
gtggttcgcggcttaatcctgctggcagcggtgatcttcgaccgttacaagcaaaaagcgaaacgcactgtctga

SEQ ID NO: 284564 - DNA, 75 bp, synthetic construct
  source 1..75: mol_type = other DNA
aatatgattcagttttatcatttcaatttatttgtgataatggcaaagaaataaatgtgaatttaacaaattgga

SEQ ID NO: 284565 - DNA, 75 bp, synthetic construct
  source 1..75: mol_type = other DNA
ggtcaagagcttattatttattttgtggaaaactcaaagaaaaataaaaaaaataccatacatgataaaaaacaa

SEQ ID NO: 284566 - DNA, 75 bp, synthetic construct
  source 1..75: mol_type = other DNA
ggttaccgcaggggatactcccgcagaaatcagcgccgcctatgcacgtgttaccggtacgccgccaatgatgcc

SEQ ID NO: 284567 - DNA, 75 bp, synthetic construct
  source 1..75: mol_type = other DNA
aatgccgacccgttcatgggcaagatcaccgtcatgctggtcgaacagcttgtcggccaggtagtcagtaccgga

SEQ ID NO: 284568 - DNA, 75 bp, synthetic construct
  source 1..75: mol_type = other DNA
gcaatgaaggttacgcggtggaagtgccggagctgtatgcggccattgatgaatccgctgtgacaatcggcaaag

SEQ ID NO: 284569 - DNA, 75 bp, synthetic construct
  source 1..75: mol_type = other DNA
cataccggccgcagtgaaaatggccgctttgttcgtcaggttggcgtggacggcaatgactattcactggttgaa

SEQ ID NO: 284570 - DNA, 75 bp, synthetic construct
  source 1..75: mol_type = other DNA
gacgatcgcaagcagtttgaaaacaactatttgcgtatggaaggttacgccgtcgagcatgacgaactgtatgca

SEQ ID NO: 284571 - DNA, 75 bp, synthetic construct
  source 1..75: mol_type = other DNA
agtttctgcttcagtatcacaccgggctgcgtgaatcctacggggcgaccgacagcgaacgctggtttgcactca

SEQ ID NO: 284572 - DNA, 75 bp, synthetic construct
  source 1..75: mol_type = other DNA
attgttaaagcgcgcacaccaaaacagatcattactgacaaggtcgtattgaaccgtacaggaaccggggctgat

SEQ ID NO: 284573 - DNA, 75 bp, synthetic construct
  source 1..75: mol_type = other DNA
gatcactgcgggcgatactccggctgagatcagtgaagcctatgcacgagtaaccggtacgccaccgatgatgcc

SEQ ID NO: 284574 - DNA, 75 bp, synthetic construct
  source 1..75: mol_type = other DNA
cgattaaggcacgatttgaagccaacgatggcgagaaactctttggcatgggtcagtatcagcaaccaaacctgg

SEQ ID NO: 284575 - DNA, 75 bp, synthetic construct
  source 1..75: mol_type = other DNA
cctgctgcaagagttctggcgtcaacgtggcgaaattggtgaagatgagtcagcacacggccaatatgtgagcgc

SEQ ID NO: 284576 - DNA, 75 bp, synthetic construct
  source 1..75: mol_type = other DNA
gtaatgaaggttacgcgattgaagtgccggagctgtacgcggcgattgatgaagatgccgtgaccatcggcaagc

SEQ ID NO: 284577 - DNA, 75 bp, synthetic construct
  source 1..75: mol_type = other DNA
cgaagaacatcgcaggccgcaaggccatcattccgccgtttatgccgggtaagcgtatggtggtgaccatgctgc

SEQ ID NO: 284578 - DNA, 75 bp, synthetic construct
  source 1..75: mol_type = other DNA
atgaacatgacaccagaagcacaaaagctggttaatcagtacatcagcgaactgcaaaaaacattcagtgactgc

SEQ ID NO: 284579 - DNA, 75 bp, synthetic construct
  source 1..75: mol_type = other DNA
ccgatcgtctggccgatctcgcggttcaggtctggcaagcgcctgctcttcctgaagaggttttagctgtttatc

SEQ ID NO: 284580 - DNA, 75 bp, synthetic construct
  source 1..75: mol_type = other DNA
atctacagcgacctggagcagttgagccgggtaattatggaagggcatcagggcgatgagtacgacgaggcgctc

SEQ ID NO: 284581 - DNA, 75 bp, synthetic construct
  source 1..75: mol_type = other DNA
tgagtggctgaaagataacccgaaactggcggcggtgggcgacaaagtgaccgataaagattacttcggcactgg

SEQ ID NO: 284582 - DNA, 75 bp, synthetic construct
  source 1..75: mol_type = other DNA
agcaaaaaacgctgctggtgactgcggatgtctctaaaaataaacgagagcatttgataccgttgactgaatcag

SEQ ID NO: 284583 - DNA, 75 bp, synthetic construct
  source 1..75: mol_type = other DNA
tctcggtggtatccgtcgtattcctgccgccaacgctcgttgcctccagctacggcatgaactttgagtttatgc

SEQ ID NO: 284584 - DNA, 75 bp, synthetic construct
  source 1..75: mol_type = other DNA
tgcccgcttttcgtctgtatcgtatgcgcgcccgtagccagtcaatggtggacggtaacgcctacgagctgctgc

SEQ ID NO: 284585 - DNA, 75 bp, synthetic construct
  source 1..75: mol_type = other DNA
ctgctgccgcataacgaatctctgttccagaaggtgaacttcctgatgcaagcggcgatgggctttatcaacatc

SEQ ID NO: 284586 - DNA, 75 bp, synthetic construct
  source 1..75: mol_type = other DNA
gtaatcgcctgactgcaggttacatgaccagctactttattggcggtgccgccggttcgctaatttcagcctcag

SEQ ID NO: 284587 - DNA, 75 bp, synthetic construct
  source 1..75: mol_type = other DNA
ggttccgttttcagcatgtttatcagcgataaaattctgcgcacccgcgcgttgctgggctgcctgacctttgcc

SEQ ID NO: 284588 - DNA, 75 bp, synthetic construct
  source 1..75: mol_type = other DNA
ctgatggcgctggcattatggcgtggtctgccacaaatgaaatcagaaacccacctcaactacccacagttgtta

SEQ ID NO: 284589 - DNA, 75 bp, synthetic construct
  source 1..75: mol_type = other DNA
ccttacatttttccactttcgactaatggtaagcgtccggttcgtacggacagtctggctcgcgctatcatgtat

SEQ ID NO: 284590 - DNA, 75 bp, synthetic construct
  source 1..75: mol_type = other DNA
cacttgaagagttgcgttttctaatggaacattttgctgaagcaaccaacgttggattattgatgcaacatttga

SEQ ID NO: 284591 - DNA, 75 bp, synthetic construct
  source 1..75: mol_type = other DNA
cgtttgtctggctggcgcgacgattgctctggttaacttattggtctggtggcgaggttttcatcatcagaaagc

SEQ ID NO: 284592 - DNA, 75 bp, synthetic construct
  source 1..75: mol_type = other DNA
acagttggcagatgaaattgaaaatatctatagcgacctggagcagttgagccgggtgattatggaagggcatca

SEQ ID NO: 284593 - DNA, 75 bp, synthetic construct
  source 1..75: mol_type = other DNA
caacttcaaagtcagtaatgtgaatcaatcagtacgtgcacttgcattaggtggatttcttaaagatgctcagat

SEQ ID NO: 284594 - DNA, 75 bp, synthetic construct
  source 1..75: mol_type = other DNA
tttcactggacagactcacttatagatatcaatttagatggttatcaatatattagtttccccgatattatcagt

SEQ ID NO: 284595 - DNA, 75 bp, synthetic construct
  source 1..75: mol_type = other DNA
taatgagtatggggcaacacgtaacatgctttgatgtattcccaaaaaatgcaaatggtattcactggactgatg

SEQ ID NO: 284596 - DNA, 75 bp, synthetic construct
  source 1..75: mol_type = other DNA
cgtttaattgaatcttatgttttccgccgtgcagtatgtgcaattccgacgaattctttgaacaagacgtttgcc

SEQ ID NO: 284597 - DNA, 75 bp, synthetic construct
  source 1..75: mol_type = other DNA
caggatttgcgcgagttaaaggttgatgtggcgtatcctttcttactggcgctttatcatgactataaaaatgac

SEQ ID NO: 284598 - DNA, 75 bp, synthetic construct
  source 1..75: mol_type = other DNA
aaaaactggcggcctgcgcgaccttgattcctggcgctacctctctctattactgggaaggtaaactggaacagg

SEQ ID NO: 284599 - DNA, 75 bp, synthetic construct
  source 1..75: mol_type = other DNA
gcaacccgcccggaactggaagacattgaagcatcggcacgtttctttgaagacgaagacggcttgcatattcac

SEQ ID NO: 284600 - DNA, 75 bp, synthetic construct
  source 1..75: mol_type = other DNA
cggacgacgacgagcgactgcgcgtacaatctgaacttggccagagcttggcaacccgcccggaactggaagaca

SEQ ID NO: 284601 - DNA, 75 bp, synthetic construct
  source 1..75: mol_type = other DNA
ccaggcgcgattatctttatgatcctcgcgggcctggcaccgtatctgtactttaagcggaagaactggttgtaa

SEQ ID NO: 284602 - DNA, 75 bp, synthetic construct
  source 1..75: mol_type = other DNA
agagggtaactatgcgccgtctggacaagagtctatgtgtgccggtgctgcggcctacttgatgaaaataggcag

SEQ ID NO: 284603 - DNA, 75 bp, synthetic construct
  source 1..75: mol_type = other DNA
ggcgtaaatgagtcggcgagcatggaatccattgaatttatcgaacctataactgaggaaaaaaatggacgagaa

SEQ ID NO: 284604 - DNA, 75 bp, synthetic construct
  source 1..75: mol_type = other DNA
gcggttcccccggcaccagcgcgggagagctgacgcgcattaccggactgagtgcctctgcgacatcacagcatc

SEQ ID NO: 284605 - DNA, 75 bp, synthetic construct
  source 1..75: mol_type = other DNA
ccggaagcgaaagcggtggggtcggtggcgatgtcgatgctgggaagtgatgctgatcttggtgtggtgctgttc

SEQ ID NO: 284606 - DNA, 75 bp, synthetic construct
  source 1..75: mol_type = other DNA
cgccgtcgaaccacactcatctggcattaagccgtcagtctttcgaaccgctgcgtattcagcgtctggggcagg

SEQ ID NO: 284607 - DNA, 75 bp, synthetic construct
  source 1..75: mol_type = other DNA
atgatgatctgtacggcatcattcgtgcagctaaaaaaggcaaaaaaatcttcattctgcatgatggccctcctt

SEQ ID NO: 284608 - DNA, 75 bp, synthetic construct
  source 1..75: mol_type = other DNA
atggccggtattgtctgcagatattcatgggcggagcttcgtgtattggacggtgataccatcgaggtaatggac

SEQ ID NO: 284609 - DNA, 75 bp, synthetic construct
  source 1..75: mol_type = other DNA
atttaatctgaaaccaaagatatattattcacatcacgataaaccccaaaagaaaaagggaaagaaaaaaacgca

SEQ ID NO: 284610 - DNA, 75 bp, synthetic construct
  source 1..75: mol_type = other DNA
tgacaagtggggatgtaataatataactttttctgattcaattcagctaagtttggatggtgcccctactgcatt

SEQ ID NO: 284611 - DNA, 75 bp, synthetic construct
  source 1..75: mol_type = other DNA
agttcggtaagccgggtgagaaattcaccgcagccgagtttcgcgccaagtgtcgcgaatatgcagcgacccagg

SEQ ID NO: 284612 - DNA, 75 bp, synthetic construct
  source 1..75: mol_type = other DNA
agcgaagcgatgaacgatgcgttctgggacgagctgttaaaagtgcgtggcgaagtgaacaaagttattgagcaa

SEQ ID NO: 284613 - DNA, 75 bp, synthetic construct
  source 1..75: mol_type = other DNA
gagtattacgacaaaacttctccgtccatcgacgttgctttccaggcggtcgatcaggatgcactgaaagcaaaa

SEQ ID NO: 284614 - DNA, 75 bp, synthetic construct
  source 1..75: mol_type = other DNA
ttactcgacgttagacggtgtgaacgtcttcaaagcgaacgatattgtcgttgcactgttgcaggaaaaaggcgc

SEQ ID NO: 284615 - DNA, 75 bp, synthetic construct
  source 1..75: mol_type = other DNA
ctgttcgtgcacaaagacactgaagagctgcatccgcgtactctcgaactgatggaagaagtggcaaaacgcgtt

SEQ ID NO: 284616 - DNA, 75 bp, synthetic construct
  source 1..75: mol_type = other DNA
caccgcagccgagtttcgcgccaagtgtcgcgaatatgcagcgacccaggttgatggtcagcgcaaagactttat

SEQ ID NO: 284617 - DNA, 75 bp, synthetic construct
  source 1..75: mol_type = other DNA
tgctctggatgcgagtgagcggagggtggctgaactggaacaggtctgtactgccgcgggtattcgtatcaaagg

SEQ ID NO: 284618 - DNA, 75 bp, synthetic construct
  source 1..75: mol_type = other DNA
gcaaggacattagtcttggttattgctcatgccatactattgcctttgctgcaattcaaatcgcatattcactta

SEQ ID NO: 284619 - DNA, 75 bp, synthetic construct
  source 1..75: mol_type = other DNA
tttattcaaaatcttgccatttttccgttttatgcgtgataatgtagaagatattaatatctataatttatcaga

SEQ ID NO: 284620 - DNA, 75 bp, synthetic construct
  source 1..75: mol_type = other DNA
aagtaaaacgtctgatgatgttattatttttctttccggccccacatcgcaaaaaacaccattgtcagtgctgca

SEQ ID NO: 284621 - DNA, 75 bp, synthetic construct
  source 1..75: mol_type = other DNA
tcctccagaactgcctcgtattacggtccttttaccgccgggaaaaaggtggttttataaagaagattaaattta

SEQ ID NO: 284622 - DNA, 75 bp, synthetic construct
  source 1..75: mol_type = other DNA
agtatgcacggattatttgttctggtctggatttaactggtagctgctcgcgattctatgatgaaaataataatc

SEQ ID NO: 284623 - DNA, 75 bp, synthetic construct
  source 1..75: mol_type = other DNA
aagagaggccggctggttggattttgtaaagacattagccttggttattgttcatgccatactattgcctttgct

SEQ ID NO: 284624 - DNA, 75 bp, synthetic construct
  source 1..75: mol_type = other DNA
tgagcaatgtttcacaacgttgcacagggctgaccgggcacaatggattctggaagccgacattcgcagttgttt

SEQ ID NO: 284625 - DNA, 75 bp, synthetic construct
  source 1..75: mol_type = other DNA
gattttgtgatcacggggataagccacgacacgctgtcagaaaaggttcttcccttgttagaaaactttctggca

SEQ ID NO: 284626 - DNA, 75 bp, synthetic construct
  source 1..75: mol_type = other DNA
aaggaaatactttcgttcagttaacttccgacactgggtattcggcacagagacagggaagatcctgccatcagg

SEQ ID NO: 284627 - DNA, 75 bp, synthetic construct
  source 1..75: mol_type = other DNA
aggagatttacatgtgggaagcaaagctacgtacgcatctttttattcgcaagatgactagcaacattacaaaac

SEQ ID NO: 284628 - DNA, 75 bp, synthetic construct
  source 1..75: mol_type = other DNA
aaactattagctcatacataagggcatcaagaccagattacaaaggtccggtattcgtagatttatctcgccttg

SEQ ID NO: 284629 - DNA, 75 bp, synthetic construct
  source 1..75: mol_type = other DNA
tttcaaaaaagatctttcacaaagtcagtcatgaaatatggaaagcactatggcgctgggcatgtcgccgccacc

SEQ ID NO: 284630 - DNA, 75 bp, synthetic construct
  source 1..75: mol_type = other DNA
ccgatcgagctgaaagtagagcaagaatacggtaagccaggtgagaaattcaccgctgctgagttccgcgctaag

SEQ ID NO: 284631 - DNA, 75 bp, synthetic construct
  source 1..75: mol_type = other DNA
ctacaacaaagaggacaagcccaccgaaaaagtggccgcacagttgctgacgaagaacattgcgggccgcaaggc

SEQ ID NO: 284632 - DNA, 75 bp, synthetic construct
  source 1..75: mol_type = other DNA
ggcgaatgccggcagcccgcaggaatttttcaacctgatgaacgccgccgccgtcaccaactttgcgctggatat

SEQ ID NO: 284633 - DNA, 75 bp, synthetic construct
  source 1..75: mol_type = other DNA
cgctgaccgaaccgcgcagcattgccctgcgtaaagccctgctggaaagcacagaatttctgggtttcaccacct

SEQ ID NO: 284634 - DNA, 75 bp, synthetic construct
  source 1..75: mol_type = other DNA
tcgcgcattatgcgaagagtggaatatcgcgcaaaaaccgtatctgcgcactgttaccgccgcagaactccgtga

SEQ ID NO: 284635 - DNA, 75 bp, synthetic construct
  source 1..75: mol_type = other DNA
ttttgagctggggggattttgtggagcggtatgtagcgcagtctgccagccatgaggtgacggataatgttgttc

SEQ ID NO: 284636 - DNA, 75 bp, synthetic construct
  source 1..75: mol_type = other DNA
taaagaaactgatttagtcactatcggcaacgacgcatgggccaccggtaacccggtgtttaaaggttcttcgct

SEQ ID NO: 284637 - DNA, 75 bp, synthetic construct
  source 1..75: mol_type = other DNA
ttgaatctataggtgctaataatgagattgtcggctttgatatcgatctggcaaaagccttgtgcaaacaaatgc

SEQ ID NO: 284638 - DNA, 75 bp, synthetic construct
  source 1..75: mol_type = other DNA
catttatcgacctgaaaaatggccgtatcgatggtgtatttggtgacacagcggtagttaatgaatggctgaaaa

SEQ ID NO: 284639 - DNA, 75 bp, synthetic construct
  source 1..75: mol_type = other DNA
agatcgcaggcaaacaggtgtacaccccgccatttatgccagagggtcgcctcatcattaccaccctgagcaacc

SEQ ID NO: 284640 - DNA, 75 bp, synthetic construct
  source 1..75: mol_type = other DNA
atgattattcactttaatacaccaggtgaactccttctgccatgcaggcaggttggacagaaaacacgcgaagga

SEQ ID NO: 284641 - DNA, 75 bp, synthetic construct
  source 1..75: mol_type = other DNA
ggagaaactgaataacgcactggcagccgttaaagcagacggtacatatcagaaaatcagtgatcagtggtttcc

SEQ ID NO: 284642 - DNA, 75 bp, synthetic construct
  source 1..75: mol_type = other DNA
cgcgttcgacagcctgatcccgtcactgaaattcagaaaatatgacgccgtaatctccggtatggatatcacgcc

SEQ ID NO: 284643 - DNA, 75 bp, synthetic construct
  source 1..75: mol_type = other DNA
agaacgtgtcttgccggggcatgcctatattgcgccgggcgatcggcatatggagctggcgcgtagtggcgcaaa

SEQ ID NO: 284644 - DNA, 75 bp, synthetic construct
  source 1..75: mol_type = other DNA
cgcgcaatctctattgcacctgatttcgactatgcgctggtgcagatcgacggtcaggccgtgattctggcgaaa

SEQ ID NO: 284645 - DNA, 75 bp, synthetic construct
  source 1..75: mol_type = other DNA
cacgccgtggaccctgcctgccaaccgtgcaatctctctggcgccggatttcgactacgcgctggtacagatcga

SEQ ID NO: 284646 - DNA, 75 bp, synthetic construct
  source 1..75: mol_type = other DNA
gatctcgcggatgagattgcctacgccgcgcatgacctggaagatgcccttagcaggaacatggtcacgattgaa

SEQ ID NO: 284647 - DNA, 75 bp, synthetic construct
  source 1..75: mol_type = other DNA
gttgagtaaagccgaaggtgagaagtgcccacgctgctggcactacacccaggatgtcggcaaggtggcggaaca

SEQ ID NO: 284648 - DNA, 75 bp, synthetic construct
  source 1..75: mol_type = other DNA
cggtcaggccgtgatcctcgcgaaagatctggttgaaagcgtaatgcagcgtatcggcgttagcgattacaccat

SEQ ID NO: 284649 - DNA, 75 bp, synthetic construct
  source 1..75: mol_type = other DNA
gtatcggcgtgaccgattacaccattctcggcacggtaaaaggtgcggagcttgagttgctgcgctttacccatc

SEQ ID NO: 284650 - DNA, 75 bp, synthetic construct
  source 1..75: mol_type = other DNA
attccaccacgagtgaataatgcaggtgaaggtgtctcagaggggagtggacgtgcgtcagaatgctgtaattga

SEQ ID NO: 284651 - DNA, 75 bp, synthetic construct
  source 1..75: mol_type = other DNA
tacagaaagataaaagaaatttcaccacgattgtgtaatacagatgaaggagtctcagaggggagtggacgtgcg

SEQ ID NO: 284652 - DNA, 75 bp, synthetic construct
  source 1..75: mol_type = other DNA
cgcagggctggctgctggtgctattcgcgcgtttcatgaagccgggctgtggaaccactttcaggaaatcgcctt

SEQ ID NO: 284653 - DNA, 75 bp, synthetic construct
  source 1..75: mol_type = other DNA
ttatcgcgtttgtggaagatcctgacggttacaaaattgaattgattgaagagaaagacgctggtcgcggtctgg

SEQ ID NO: 284654 - DNA, 75 bp, synthetic construct
  source 1..75: mol_type = other DNA
gggcaaaaggccgccgctatactaaaacaacattttgaatctgttagccattttgaggatataaagatgcgtctt

SEQ ID NO: 284655 - DNA, 75 bp, synthetic construct
  source 1..75: mol_type = other DNA
gtgtttgttcgctttgtcagcaggcaggggcaaaatcttctggtgaatataaaagacatcagtttcgccgttcgg

SEQ ID NO: 284656 - DNA, 75 bp, synthetic construct
  source 1..75: mol_type = other DNA
tccttacaatgctgttccttaagtacatttcggatgtctggcaggaccactatgacgattacaaaaaacaatacg

SEQ ID NO: 284657 - DNA, 75 bp, synthetic construct
  source 1..75: mol_type = other DNA
aagccggggaattctataccccgccggaagtttcggacctgattgcagaactgctcgatccgcaaccgggtgata

SEQ ID NO: 284658 - DNA, 75 bp, synthetic construct
  source 1..75: mol_type = other DNA
acggcgaagacaaccataaaatcgagtggggcgataccattcgtaacccgaaactgctcgataaaaatggcgacc

SEQ ID NO: 284659 - DNA, 75 bp, synthetic construct
  source 1..75: mol_type = other DNA
ggccattgtggcgcaactgcgcattgccattgcgccagacgatatcgctattacgctgcatcataaattgtgcca

SEQ ID NO: 284660 - DNA, 75 bp, synthetic construct
  source 1..75: mol_type = other DNA
gtgctgttccgtggcgccagcgaaggtaaaatccgccagaaactcattgatgaaaacctgctggatgcggtgatt

SEQ ID NO: 284661 - DNA, 75 bp, synthetic construct
  source 1..75: mol_type = other DNA
ctgcttgacccgcaacccggtgacaccatctgtgacccagcctgtggttctggctcattgttaatgaagtgcggg

SEQ ID NO: 284662 - DNA, 75 bp, synthetic construct
  source 1..75: mol_type = other DNA
ccatctgtgacccagcctgtggttctggttcgttgttaatgaagtgcgggcgtaaaatcgtctccgggcataaca

SEQ ID NO: 284663 - DNA, 75 bp, synthetic construct
  source 1..75: mol_type = other DNA
atgaacgacaaaattagtcaggatactatcaacaaagccctgtgggccgcgtgcgataccttccgtggcactatt

SEQ ID NO: 284664 - DNA, 75 bp, synthetic construct
  source 1..75: mol_type = other DNA
ggtttgcctgaaaaactgttctacggtacggggattccggccgcgattctgatttttaagaagcagaaagtggat

SEQ ID NO: 284665 - DNA, 75 bp, synthetic construct
  source 1..75: mol_type = other DNA
gtggggcgataccattcgtaacccgaaactgctcgataaaaacggcgacctgatgctgtttgatatcgtgaccgc

SEQ ID NO: 284666 - DNA, 75 bp, synthetic construct
  source 1..75: mol_type = other DNA
gtgctattccgtggctccagcgaaggtaaaatccgccagaaactgattgatgaaaatctgctggatgcggtgatt

SEQ ID NO: 284667 - DNA, 75 bp, synthetic construct
  source 1..75: mol_type = other DNA
ggaagcgattggctccacctggtcgctggctaaaatgaacatgttcctgcatggcgaagacaaccacaaaattga

SEQ ID NO: 284668 - DNA, 75 bp, synthetic construct
  source 1..75: mol_type = other DNA
gtgaatggctttattggcaaccatctgacagaacgcctgctgcgcgaagatcattatgaagtttacggtctggat

SEQ ID NO: 284669 - DNA, 75 bp, synthetic construct
  source 1..75: mol_type = other DNA
gcggcgttggtgatgggctgtgttggtgtcactgaaggggcgattcctttcgccgccgccgatccgttgcgtgtg

SEQ ID NO: 284670 - DNA, 75 bp, synthetic construct
  source 1..75: mol_type = other DNA
ctgattgtgctgccggtggttgaaggcaagctgggttatatcgcagcagtggctgtcggagcagtggtgacggct

SEQ ID NO: 284671 - DNA, 75 bp, synthetic construct
  source 1..75: mol_type = other DNA
tgaaaagtctggcgcgtaaaaatgggtcttcgattgatgaaaaagaagacgacctggatttggattttgaaatta

SEQ ID NO: 284672 - DNA, 75 bp, synthetic construct
  source 1..75: mol_type = other DNA
cgtcccgtcagggccagcatgactacttgtgtggcatctacagcctgattaacaccctcagttatctttatgacg

SEQ ID NO: 284673 - DNA, 75 bp, synthetic construct
  source 1..75: mol_type = other DNA
gcgcgtttgtgggcctgcactgcgaggacatcagcggcgacggctgctacgcggacttcgactacttcacctacg

SEQ ID NO: 284674 - DNA, 75 bp, synthetic construct
  source 1..75: mol_type = other DNA
cacactgattaccgctggcgtcatgatgtgggggctgggcgagccggtgggggcgttgaccaacagcctgaccca

SEQ ID NO: 284675 - DNA, 75 bp, synthetic construct
  source 1..75: mol_type = other DNA
atcgaaaacgcgggtaatcgctgcgacggcgaaattattaatatcggcaatcctgataacgaagccagcattgaa

SEQ ID NO: 284676 - DNA, 75 bp, synthetic construct
  source 1..75: mol_type = other DNA
gcctatggcgaaaaagagggtttacagttcaccctcttccgcccgtttaactggatgggaccacgactggataac

SEQ ID NO: 284677 - DNA, 75 bp, synthetic construct
  source 1..75: mol_type = other DNA
tttgcaactggctcccgtgggggcatttaatttgcacggttcattgttaccgaaataccgcggacgtgcgccgct

SEQ ID NO: 284678 - DNA, 75 bp, synthetic construct
  source 1..75: mol_type = other DNA
cagatgtgaaacctgcaattggtcagcgtaccggaaagaacgacaaaactcactggattatctttgttaaaagcg

SEQ ID NO: 284679 - DNA, 75 bp, synthetic construct
  source 1..75: mol_type = other DNA
cgctgggcctggtgcaaggttcacgcttgaatagccagcctgcctgcaccgcccgacgccgtacccgggtactca

SEQ ID NO: 284680 - DNA, 75 bp, synthetic construct
  source 1..75: mol_type = other DNA
agccctgctggctgccggttacgaaattagcgccatttttacccatactgataatcccggtgaaaaagcctttta

SEQ ID NO: 284681 - DNA, 75 bp, synthetic construct
  source 1..75: mol_type = other DNA
attcaggacaacgactataacctcaatatccctcgctatgtcgatacctttgaggaagaggatgagattgacctg

SEQ ID NO: 284682 - DNA, 75 bp, synthetic construct
  source 1..75: mol_type = other DNA
tctgctgttcttgcgcgacacgccggttgctatctcttttaccatgatcataattttcctgctgacgtgcctgtt

SEQ ID NO: 284683 - DNA, 75 bp, synthetic construct
  source 1..75: mol_type = other DNA
gattgagcggctggctaagtttgtagttgaaaaccagcttgtagaaaacgttgtacaagattgggtcaatccaat

SEQ ID NO: 284684 - DNA, 75 bp, synthetic construct
  source 1..75: mol_type = other DNA
tttgccaacgctccaatggatggaagagacatattcacaacatcggtatttgccatgctgatgtcagcaccctca

SEQ ID NO: 284685 - DNA, 75 bp, synthetic construct
  source 1..75: mol_type = other DNA
gattagctggtgcattaaccgcctgattttgcatccgttacgcaatattgctcgcgaacttaacgccatcccagc

SEQ ID NO: 284686 - DNA, 75 bp, synthetic construct
  source 1..75: mol_type = other DNA
gctacagctgatgcacccaaatatggtgccggatatgctggggttattaactcgttatcgtattcagcctggaac

SEQ ID NO: 284687 - DNA, 75 bp, synthetic construct
  source 1..75: mol_type = other DNA
tgccgttgtcggtgaacctctcggcgctacagcttatgcacccgaatatggtgccggatatgctggagttgttaa

SEQ ID NO: 284688 - DNA, 75 bp, synthetic construct
  source 1..75: mol_type = other DNA
ggtgtgcacacgctaaatagtttgtggcagcatactttggcgcgtttgcctgatagttttccgtggttcgataaa

SEQ ID NO: 284689 - DNA, 75 bp, synthetic construct
  source 1..75: mol_type = other DNA
gtcctgatgttgctgatgataagccattaacgatggaggagtcttgtatagctctcggtcttgcttgtgaatcca

SEQ ID NO: 284690 - DNA, 75 bp, synthetic construct
  source 1..75: mol_type = other DNA
gcgaggtggcaaagcatctgcccgtgactatgcaggagttcaataccttagagcatgccgcagtccatgtgacgg

SEQ ID NO: 284691 - DNA, 75 bp, synthetic construct
  source 1..75: mol_type = other DNA
cgtttggtgaagtcggaacgaatgttttgtattgctgatgcagcggtagaacgcggcgagatgggggctgatcgc

SEQ ID NO: 284692 - DNA, 75 bp, synthetic construct
  source 1..75: mol_type = other DNA
tgatcgtgaaggtatagagcgctatggttggcgtttttttgcggggaaaggctatgagggtgatatcaaatggat

SEQ ID NO: 284693 - DNA, 75 bp, synthetic construct
  source 1..75: mol_type = other DNA
aagcggcgagatgggggctgaccgctggtatcagtaccataagaagaccgttaccaggcttcgggaactagtcgc

SEQ ID NO: 284694 - DNA, 75 bp, synthetic construct
  source 1..75: mol_type = other DNA
ggcgaaatgacttatatattgagggtgattggtgattcaatgattgatgagtaccgtccgggggacatgattttt

SEQ ID NO: 284695 - DNA, 75 bp, synthetic construct
  source 1..75: mol_type = other DNA
aaagcattaaacccaaactggcctgaaccttacattaagatcaacggtaattgctctataattggtacagtaatt

SEQ ID NO: 284696 - DNA, 75 bp, synthetic construct
  source 1..75: mol_type = other DNA
aaactggcctgaaccttacattaagatcaacggtaattgctctataattggcacagtaattttctcaggaaaacc

SEQ ID NO: 284697 - DNA, 75 bp, synthetic construct
  source 1..75: mol_type = other DNA
cggcagtcaagaactggcatgagcggatccgttcgcgccctgccaccgggcaggcactgctaaaagcacaacacg

SEQ ID NO: 284698 - DNA, 75 bp, synthetic construct
  source 1..75: mol_type = other DNA
gtgatggcgataatgtcgagaaatacgcctatctcgccagcctgaaggagattcaggacaacgactataacctca

SEQ ID NO: 284699 - DNA, 75 bp, synthetic construct
  source 1..75: mol_type = other DNA
ggaagcgattggctccacgtggtcgctggcgaaaatgaacatgttcctgcatggcgaagacaaccacaaaatcga

SEQ ID NO: 284700 - DNA, 75 bp, synthetic construct
  source 1..75: mol_type = other DNA
tccttaccatgctgttcctcaagtacatttcagatgtctggcaggatcactatgatgaatataaagaacagtatg

SEQ ID NO: 284701 - DNA, 75 bp, synthetic construct
  source 1..75: mol_type = other DNA
gcaggtttaatcggtatgttcacgttgtatctgctgaacatgatcgtgattattcctggtgtggtgccgcacttc

SEQ ID NO: 284702 - DNA, 75 bp, synthetic construct
  source 1..75: mol_type = other DNA
tcccttacgcacctaacgctgtactggttggtttcctgagtagctttgctgcaggtttaatcggtatgttcacgt

SEQ ID NO: 284703 - DNA, 75 bp, synthetic construct
  source 1..75: mol_type = other DNA
catgaccggcattacgcttatagccgttggctctttggttgttggcgtggcaatggtctttttcccggctattgc

SEQ ID NO: 284704 - DNA, 75 bp, synthetic construct
  source 1..75: mol_type = other DNA
atggtcacaaaattacgctgtttctcgaagaaacagagcttgattaaggtagacctggggaaaggcggtcagttt

SEQ ID NO: 284705 - DNA, 75 bp, synthetic construct
  source 1..75: mol_type = other DNA
aagcctctttgagtctggtgccattttgttgtatctggctgagaaaacgggactctttttgagtcatgaaacgcg

SEQ ID NO: 284706 - DNA, 75 bp, synthetic construct
  source 1..75: mol_type = other DNA
atgatggtagcggtaattctggcaacagcaggcatgaccggcattacgcttatagccgttggctctttggttgtt

SEQ ID NO: 284707 - DNA, 75 bp, synthetic construct
  source 1..75: mol_type = other DNA
gaatgccctggcggatattaaggcaaaagcaggctggctgattgtagtcagtggtcacacggacaataccggtga

SEQ ID NO: 284708 - DNA, 75 bp, synthetic construct
  source 1..75: mol_type = other DNA
ggctgattgtggtcagtggccacacggacaatacaggtgacccgcaacgcaaccaggctctgtccctgaagcgtg

SEQ ID NO: 284709 - DNA, 75 bp, synthetic construct
  source 1..75: mol_type = other DNA
ccaatggtgaaaggctgcttcaccaatgccgggcaatttcaggtggtcattggcaccaacgttggcgattactat

SEQ ID NO: 284710 - DNA, 75 bp, synthetic construct
  source 1..75: mol_type = other DNA
ccgtttgtcggttcagatgttctggcttctgccgcttgcatggataaagacgtcaccaaacgtctactgcgcgac

SEQ ID NO: 284711 - DNA, 75 bp, synthetic construct
  source 1..75: mol_type = other DNA
tgggcaacgacaatccgcaagccagcacctgtggcgagatcgtactgaccagtgatttctacgcctacgacacca

SEQ ID NO: 284712 - DNA, 75 bp, synthetic construct
  source 1..75: mol_type = other DNA
caacatcagttttgccgaagtgaagtctaaactgggtttaccgctgtttgtaaaaccggctaaccagggttcctc

SEQ ID NO: 284713 - DNA, 75 bp, synthetic construct
  source 1..75: mol_type = other DNA
tgtggttgatcggtgaagcgatcttcttctacctgccggtcgggatttgctggtcagcggtgaaaaaaatgggcg

SEQ ID NO: 284714 - DNA, 75 bp, synthetic construct
  source 1..75: mol_type = other DNA
tgaacgcgagatctccgtgcctgccgctatctccgcctggcttggggtcactgagcctgcaatgtacggcatcaa

SEQ ID NO: 284715 - DNA, 75 bp, synthetic construct
  source 1..75: mol_type = other DNA
tgcgctggccatggctatcgccatcatcatcccgattgtgctcacctcgtttatctaccagcggaaacaccgcct

SEQ ID NO: 284716 - DNA, 75 bp, synthetic construct
  source 1..75: mol_type = other DNA
tgattggcgatggcgttgcctttgcggtacgtcacctgatgaccggcagctttgctccgattggtgcggcattgt

SEQ ID NO: 284717 - DNA, 75 bp, synthetic construct
  source 1..75: mol_type = other DNA
atgaacgcttatctgctcgggcagcagctgccggaagtgtgggactttggcatgttcagcatcgccaaagtgggc

SEQ ID NO: 284718 - DNA, 75 bp, synthetic construct
  source 1..75: mol_type = other DNA
ctccccatggtgaaaggctgtttcaccaatgcaggacaatttcaggtggtgattggcaccaacgttggcgattac

SEQ ID NO: 284719 - DNA, 75 bp, synthetic construct
  source 1..75: mol_type = other DNA
agtgatcgttgagcaagggatcaaaggtcgtgagatcgaatgcgcggttctgggcaacgacaatccgcaagccag

SEQ ID NO: 284720 - DNA, 75 bp, synthetic construct
  source 1..75: mol_type = other DNA
aatatctggcaaatcatcgccagagtgaataccactaccgcaattacttctataaagaactctctgttgttttgg

SEQ ID NO: 284721 - DNA, 75 bp, synthetic construct
  source 1..75: mol_type = other DNA
cagcaactggcgaatagcacaattctgcataatggccgggagtatgggtttgcgacagtttggccaattgacgac

SEQ ID NO: 284722 - DNA, 75 bp, synthetic construct
  source 1..75: mol_type = other DNA
ttctcggtgcatttgaaggcatttctgaaatccgtggctattcagaaatcgggacatcccgcatcactcataccg

SEQ ID NO: 284723 - DNA, 75 bp, synthetic construct
  source 1..75: mol_type = other DNA
aattcacgcaaaatctaattagctctcaggtaactctgcaaaaattttcccaaagctgtgaggaggctagtaaag

SEQ ID NO: 284724 - DNA, 75 bp, synthetic construct
  source 1..75: mol_type = other DNA
tggctaactggctggcgtttcttgatccggctaaacagctggaaagcatccaggcgcagcagcaactgctggaag

SEQ ID NO: 284725 - DNA, 75 bp, synthetic construct
  source 1..75: mol_type = other DNA
cagcgtaatggagatgatgttgaccgcacactgtttatttgtgatgcgcccgactccctgatgggcgcgccgttt

SEQ ID NO: 284726 - DNA, 75 bp, synthetic construct
  source 1..75: mol_type = other DNA
accggaagagatttactaccgtccggccaaccgctttgtggccgactttatcggcgcggccaatatcgacaccgc

SEQ ID NO: 284727 - DNA, 75 bp, synthetic construct
  source 1..75: mol_type = other DNA
tgaccaaaaccttcggcgaattctatgccgccagagaaatctcgttctgcgccgaagagggggagttcgtgaccc

SEQ ID NO: 284728 - DNA, 75 bp, synthetic construct
  source 1..75: mol_type = other DNA
taggcgcgttttatgtgcgttcacctcaaccgccgcgagctgaacactgtttcatctgctggcgaccagaagatg

SEQ ID NO: 284729 - DNA, 75 bp, synthetic construct
  source 1..75: mol_type = other DNA
gttggatatgctatatcatttttactttttgttaaagcatttgttattaatcagaaattgaagttttctagtatt

SEQ ID NO: 284730 - DNA, 75 bp, synthetic construct
  source 1..75: mol_type = other DNA
ctttaaaagactttggacaaaataggcataccacacttaaacctgttaattacgtttctaacataaaattagcat

SEQ ID NO: 284731 - DNA, 75 bp, synthetic construct
  source 1..75: mol_type = other DNA
catctcgcgacgcaggcatgggaatggtatttactggcgtcacttattacgacggcattggtttcctgacacatg

SEQ ID NO: 284732 - DNA, 75 bp, synthetic construct
  source 1..75: mol_type = other DNA
tctggccgaagctaaaaccttttctcagagagtatcccgaaatcaatgtcgaactggtggtggataacggttttg

SEQ ID NO: 284733 - DNA, 75 bp, synthetic construct
  source 1..75: mol_type = other DNA
ttttggttcccatgttttactgggcgatgaagtcgctacggcgacccataaacacatcagaactttgttctcttc

SEQ ID NO: 284734 - DNA, 75 bp, synthetic construct
  source 1..75: mol_type = other DNA
gtaggccacacgttgctggcagaattttccccgcgccgccatcgcggtattttgctgggggcgttcagcgtggta

SEQ ID NO: 284735 - DNA, 75 bp, synthetic construct
  source 1..75: mol_type = other DNA
atgaacacttcaccggtgcgaatggatgatattccacttaaccgttttcactgccgtattgccgcgctcactttc

SEQ ID NO: 284736 - DNA, 75 bp, synthetic construct
  source 1..75: mol_type = other DNA
gttttcggaaaaacaggcaatggagatttcgcagcattctgctgggacaatggcttcaccactacgctcgcaaaa

SEQ ID NO: 284737 - DNA, 75 bp, synthetic construct
  source 1..75: mol_type = other DNA
aaaaatcaaatggcgcaagttcgcctttgagttatgttgtcctggtatcactccacaagaatacggtctaaatga

SEQ ID NO: 284738 - DNA, 75 bp, synthetic construct
  source 1..75: mol_type = other DNA
cggaaagttttcctactgacattcgctcgctgggcgtcggttttgccaccgccatgagtcggttgggggcggcgg

SEQ ID NO: 284739 - DNA, 75 bp, synthetic construct
  source 1..75: mol_type = other DNA
gccattaccgccatccagaaattcctcgaaaccgatattccggtattcggcatctgcctcggtcatcagctgctg

SEQ ID NO: 284740 - DNA, 75 bp, synthetic construct
  source 1..75: mol_type = other DNA
accatcgttccggcgcaaacttctgcggaagatgtgctgaaaatgaatccagacggcatcttcctctccaacggt

SEQ ID NO: 284741 - DNA, 75 bp, synthetic construct
  source 1..75: mol_type = other DNA
tggaagatggaacccagtttcacggtcgggccataggggcaacaggttcggcggttggggaagtcgttttcaata

SEQ ID NO: 284742 - DNA, 75 bp, synthetic construct
  source 1..75: mol_type = other DNA
catgggctgcgctgttgtcggattcgcttgcctgcggtgattgccgtgcgtcagtgcggtgaagtggccttgcca

SEQ ID NO: 284743 - DNA, 75 bp, synthetic construct
  source 1..75: mol_type = other DNA
cctcactgatccttcttattctcgccaaatcgtcactcttacttatcctcatatcggtaatgtcggcaccaatga

SEQ ID NO: 284744 - DNA, 75 bp, synthetic construct
  source 1..75: mol_type = other DNA
acctgccgctgattgccagcaactttcgtaataccgaagacctctcttcttacctgaagcgccataacatcgtgg

SEQ ID NO: 284745 - DNA, 75 bp, synthetic construct
  source 1..75: mol_type = other DNA
taggtctgaaagataatgtttacttctgtaaaatagattcaagccaaatgttatttccaaatcaagtcggtgtcg

SEQ ID NO: 284746 - DNA, 75 bp, synthetic construct
  source 1..75: mol_type = other DNA
tggcgtcaacttacggcgtgctggcatcggtatcgcggcgttacgcgcatcgcattccattcctcgtcaaactca

SEQ ID NO: 284747 - DNA, 75 bp, synthetic construct
  source 1..75: mol_type = other DNA
ttactttgtcgtatccacttggctatgcaaaggataaaaatatttgcctacttgatgacttattaaaaaatacta

SEQ ID NO: 284748 - DNA, 75 bp, synthetic construct
  source 1..75: mol_type = other DNA
tatgctgatttggataagactgaatggggttataaaaaattaccctatgatgaatggaaatttctctttatttat

SEQ ID NO: 284749 - DNA, 75 bp, synthetic construct
  source 1..75: mol_type = other DNA
aattacggttacaccgacgatcgtgtttacagcaaattgaccagcgaaaacccgattgatctggtgcgttatcag

SEQ ID NO: 284750 - DNA, 75 bp, synthetic construct
  source 1..75: mol_type = other DNA
tgtacagcaagttaaccagcgaaaacccgattgatctggtgcgttatcagttagctaactgctatatggggcgcg

SEQ ID NO: 284751 - DNA, 75 bp, synthetic construct
  source 1..75: mol_type = other DNA
tggcgtcgacctacggcgtgctggcatcagtatcgcggcgttacgcgcaccgtattcctttcctcgtcaaactca

SEQ ID NO: 284752 - DNA, 75 bp, synthetic construct
  source 1..75: mol_type = other DNA
acggccgactggcgtgaagaaaatacgccagtggtgatggcaggaatggtcggcagcaatgtcggctggaaagtt

SEQ ID NO: 284753 - DNA, 75 bp, synthetic construct
  source 1..75: mol_type = other DNA
tcctctggcgaagaaatcactccctgtgctgcgggaaaagtacaaagaaaacaaagagattataaaaatactctc

SEQ ID NO: 284754 - DNA, 75 bp, synthetic construct
  source 1..75: mol_type = other DNA
ttaccacaggatgtgcagcattttctgagtaatgcggaaatgtgccagcatcttgctggtgaatgggacagctct

SEQ ID NO: 284755 - DNA, 75 bp, synthetic construct
  source 1..75: mol_type = other DNA
tcggctggtcgatagcctttctggcggcgaacgtcagcgggcgtggatcgccatgctggtggcgcaggatagccg

SEQ ID NO: 284756 - DNA, 75 bp, synthetic construct
  source 1..75: mol_type = other DNA
tccaggtggcttttataatagtatttattatcttcttaataaaacaagtaaaaagcatcaagaatctgttaaatc

SEQ ID NO: 284757 - DNA, 75 bp, synthetic construct
  source 1..75: mol_type = other DNA
ccgcgaacaggtcagcgaatttctctctggtttgttgattggcgcagaggttgccagtatgcgcgactatgtgac

SEQ ID NO: 284758 - DNA, 75 bp, synthetic construct
  source 1..75: mol_type = other DNA
aaaaacaagattggcttggagggtaggacagttttaaaagcaatggttctgagtcgtgatgcaggggataaaaaa

SEQ ID NO: 284759 - DNA, 75 bp, synthetic construct
  source 1..75: mol_type = other DNA
acaaaattagtggacacagtcggtgaaaaatcacttgtgttgctcgatgaacccgaagggcatcttcatccaccg

SEQ ID NO: 284760 - DNA, 75 bp, synthetic construct
  source 1..75: mol_type = other DNA
gatatagtcgatgagtatcgtaaccagcttggtgttgaagcccgagctctattaaaagcgcttgtcacacacaga

SEQ ID NO: 284761 - DNA, 75 bp, synthetic construct
  source 1..75: mol_type = other DNA
atgtggctatggtccttatttgacattaaattcttatctattcttgccgctgccttcactatatattttggcgtg

SEQ ID NO: 284762 - DNA, 75 bp, synthetic construct
  source 1..75: mol_type = other DNA
gtctgggggcagcgatcaatacggcggtaggtctggggctatacccggattacgcaacggctgtcgataaaatgg

SEQ ID NO: 284763 - DNA, 75 bp, synthetic construct
  source 1..75: mol_type = other DNA
gatgtgcaaatgccgggcactgttcttgggcatatcactcctcaagccgcgctggcgacacatttcccggctggg

SEQ ID NO: 284764 - DNA, 75 bp, synthetic construct
  source 1..75: mol_type = other DNA
ccctcccatttctggcaagcggctgatcagtttgaacgtgcgaatggttcgacttatcgggagatcgaaatcgcc

SEQ ID NO: 284765 - DNA, 75 bp, synthetic construct
  source 1..75: mol_type = other DNA
atccaggggtccggtgccgtggcgatgattaccgcggccagcatcaccgcgccgatgatcggtacactgggtgtt

SEQ ID NO: 284766 - DNA, 75 bp, synthetic construct
  source 1..75: mol_type = other DNA
tttgtgccgattattttgatcctgctggcgacattcttccgggaaagcggcattgcagatacatgggctggtcac

SEQ ID NO: 284767 - DNA, 75 bp, synthetic construct
  source 1..75: mol_type = other DNA
ccacgcccgctgtttaccgctgcccgggaagtgaaaacggttgttccggtcagttcagttacgccggtaacgcct

SEQ ID NO: 284768 - DNA, 75 bp, synthetic construct
  source 1..75: mol_type = other DNA
ctcttgtcggcattgttgcagtacttctgtttttagcagtcttagtactcgttaaggttctattcgctggtagca

SEQ ID NO: 284769 - DNA, 75 bp, synthetic construct
  source 1..75: mol_type = other DNA
gtgaaagttaacaaaaagaaacttgctgaaattttcaacgtggatccgcgaacgattgaacgctggcagtctcag

SEQ ID NO: 284770 - DNA, 75 bp, synthetic construct
  source 1..75: mol_type = other DNA
ataagaaaatttaatggcattgtcttaacaaacagaatgtcttatatttttttctatgcaaatgacaacagagag

SEQ ID NO: 284771 - DNA, 75 bp, synthetic construct
  source 1..75: mol_type = other DNA
cagtatcgttattgataatcaaaaggccgttgcggatacgttgcggatggaaggcgctaccgttatctatgtggc

SEQ ID NO: 284772 - DNA, 75 bp, synthetic construct
  source 1..75: mol_type = other DNA
tttttgcatttatctacaacgcacttggtgtgccggtggctgcaggcctgctttatcctgtgtatggaatactgc

SEQ ID NO: 284773 - DNA, 75 bp, synthetic construct
  source 1..75: mol_type = other DNA
ggggaaaggtgtctcaggcgatgtcgaaggtcaacgggttgttattggtaatgaactggctatgcaggaaaacag

SEQ ID NO: 284774 - DNA, 75 bp, synthetic construct
  source 1..75: mol_type = other DNA
ctatcaatatataatacaggcagatctaacaaatgatgtatggagttacgcggacacaagatttgtcataaaaaa

SEQ ID NO: 284775 - DNA, 75 bp, synthetic construct
  source 1..75: mol_type = other DNA
aaccacgccggatgcgcttaaagctttgcatcaggcggggatccgcatcgttatgctcaccggggataaccagct

SEQ ID NO: 284776 - DNA, 75 bp, synthetic construct
  source 1..75: mol_type = other DNA
ataaaacagcctcaccaccaggcggagaacgatatttctgaaggtgtgtggacatgcccgatgcacccggagata

SEQ ID NO: 284777 - DNA, 75 bp, synthetic construct
  source 1..75: mol_type = other DNA
taaagcgtttccggcaaaagcattatggctgacggggacgatggtggcggtgtcaggcgtgattgtcggtagtct

SEQ ID NO: 284778 - DNA, 75 bp, synthetic construct
  source 1..75: mol_type = other DNA
tcatgaaggcagcaggaatcagccgagcgacttattatcggatcaaaagtgagctcttgtttgtaagtaagaact

SEQ ID NO: 284779 - DNA, 75 bp, synthetic construct
  source 1..75: mol_type = other DNA
aaatactgcataatagatgtttcattgttcataaatggtgacaacccatttcattttaattttttaaaagaagat

SEQ ID NO: 284780 - DNA, 75 bp, synthetic construct
  source 1..75: mol_type = other DNA
aaggcgctaccgttatctatgtggccacggacggggaccttgcaggcctgatagctatttcggatcccgtgaaag

SEQ ID NO: 284781 - DNA, 75 bp, synthetic construct
  source 1..75: mol_type = other DNA
gttgcaatggggaccggcgtagcctgggtttacagcgtcattgcaaccatcttcccctcctggtttcctgcatcg

SEQ ID NO: 284782 - DNA, 75 bp, synthetic construct
  source 1..75: mol_type = other DNA
gcagaaattccgattgtacaaacgatgatgctggcaggtatgggaaccgctccggcgctggcattgttgatgacg

SEQ ID NO: 284783 - DNA, 75 bp, synthetic construct
  source 1..75: mol_type = other DNA
aatttatggcagcagaaaaagaaaaaagagcaacatattctaaaattgcttttatattttactcagcaatatcta

SEQ ID NO: 284784 - DNA, 75 bp, synthetic construct
  source 1..75: mol_type = other DNA
atgcaaatattatgaagttgactcaaacttttttgttaaggactatacccgcattgaaagtgccactcttataaa

SEQ ID NO: 284785 - DNA, 75 bp, synthetic construct
  source 1..75: mol_type = other DNA
catttttgctcccaatctttgcgcatgcgcaaatcaatacaactcccgacacgaccaaaattaaccaaagtaaag

SEQ ID NO: 284786 - DNA, 75 bp, synthetic construct
  source 1..75: mol_type = other DNA
tggaaaaagtgggcatgaaagtgaccgacagcacccgttcgcagggcaacatggccgtaacttataagccgctgt

SEQ ID NO: 284787 - DNA, 75 bp, synthetic construct
  source 1..75: mol_type = other DNA
attgatatgtatctgcctgcgctaccggtaatttcagcgcagtttggcgtaccggcgggcagtacgcagatgacc

SEQ ID NO: 284788 - DNA, 75 bp, synthetic construct
  source 1..75: mol_type = other DNA
aacgaccatcgcgccgctgatggcaccgattgttggcggttgggtgctggtgtggctgagctggcattacatttt

SEQ ID NO: 284789 - DNA, 75 bp, synthetic construct
  source 1..75: mol_type = other DNA
accactattggtaactttgcggcgctgttccgtcataagcgtgtcctgagttatatgctggccagcggtttcagc

SEQ ID NO: 284790 - DNA, 75 bp, synthetic construct
  source 1..75: mol_type = other DNA
aaaacacatgtactactgactggagtcattaccagggcctcttttgctgtttttttaccaatgaatgataatgag

SEQ ID NO: 284791 - DNA, 75 bp, synthetic construct
  source 1..75: mol_type = other DNA
cttatccagtgcggcaatcaatgcggtgagtattccagactatttcgcctggggcgggattgcactggtgattca

SEQ ID NO: 284792 - DNA, 75 bp, synthetic construct
  source 1..75: mol_type = other DNA
ggacccggaagtgaattcgcgcttttatatctacgaagcctataaagatgaagacgcagtggcgttccataaaac

SEQ ID NO: 284793 - DNA, 75 bp, synthetic construct
  source 1..75: mol_type = other DNA
ggagactataaactgcaggtcggcgatttagataaccgcagtagcttacagtttattgatccgaaaggtcataca

SEQ ID NO: 284794 - DNA, 75 bp, synthetic construct
  source 1..75: mol_type = other DNA
catgccccggctggaatgattttgccggtgacctccggtgattatgcaatcccggtgaccaacggtagtggtgct

SEQ ID NO: 284795 - DNA, 75 bp, synthetic construct
  source 1..75: mol_type = other DNA
gatgaacaatggagttttgtcgaaaacaaagctcgtcagcagtggcactggtacgcgtataagaccaaagctgac

SEQ ID NO: 284796 - DNA, 75 bp, synthetic construct
  source 1..75: mol_type = other DNA
ctgagtacttatattctggggtttgcgttggggcagttaatctacgggccgatggcggatagcttcgggcgcaag

SEQ ID NO: 284797 - DNA, 75 bp, synthetic construct
  source 1..75: mol_type = other DNA
ttcgctatcgataaccaacgtctcgccgtgattactggtgatgcgaaggtaacggtaacgctcgaatgtcagcgt

SEQ ID NO: 284798 - DNA, 75 bp, synthetic construct
  source 1..75: mol_type = other DNA
gaacgttgaccaccgcactgtcatttaacacaaaatcattcaccagcaacctcattagcgacattctggataaag

SEQ ID NO: 284799 - DNA, 75 bp, synthetic construct
  source 1..75: mol_type = other DNA
gtcacgccgcaaaacgacggttcggtgattatcgatggcaccgccaacgtgcgggaaatcaacaaagcctttaac

SEQ ID NO: 284800 - DNA, 75 bp, synthetic construct
  source 1..75: mol_type = other DNA
gcaatggaacaacggcgataacgccgggtttactaccgccgaaccgtggattgccgtgtgtgataactatcggga

SEQ ID NO: 284801 - DNA, 75 bp, synthetic construct
  source 1..75: mol_type = other DNA
aaaacattgttccgccactggcaacaaggaatgcacaacgtagcatggaatgccttgttctggtgtaaccacgat

SEQ ID NO: 284802 - DNA, 75 bp, synthetic construct
  source 1..75: mol_type = other DNA
ccagcggtacgcgcagagctgaaaaaagtctgtgagttctgggccgatcgtggggtcgacgggttgcgcctggat

SEQ ID NO: 284803 - DNA, 75 bp, synthetic construct
  source 1..75: mol_type = other DNA
acccacgtgattttaaaaatattatttatcactatcccctttcgcgtgcactaaaagacggatacgtcaaaattc

SEQ ID NO: 284804 - DNA, 75 bp, synthetic construct
  source 1..75: mol_type = other DNA
ggcgatgtgtgcaaagagacgttgggaacgcggaaacggacgcctctggcctcaaatcttgcggaattccttaac

SEQ ID NO: 284805 - DNA, 75 bp, synthetic construct
  source 1..75: mol_type = other DNA
aacaaaatgtaaacgcggttgaacgggcgtttgatattgtgatacaacccacaattcataccttctatacaaccc

SEQ ID NO: 284806 - DNA, 75 bp, synthetic construct
  source 1..75: mol_type = other DNA
cggtgacctccggtgattatgcaatcccggtgaccaacggtagtggtgctgtcggtaaggcgctggatattcgtc

SEQ ID NO: 284807 - DNA, 75 bp, synthetic construct
  source 1..75: mol_type = other DNA
ttcaatatttccaaaatcaatgcactggaaaatgccaaaggtgctgctaaatccaaggtcgctaaaattcgacgt

SEQ ID NO: 284808 - DNA, 75 bp, synthetic construct
  source 1..75: mol_type = other DNA
gcttgattgaaccgaaaaaagcgacagaaatcgacgcgccagaagttcaggccaaaacgcgagcggctatccgtt

SEQ ID NO: 284809 - DNA, 75 bp, synthetic construct
  source 1..75: mol_type = other DNA
tcaatacatctttagtttctctttcacgttgtggcttgtacggaacaggtgggggaacgataaaacagtatgaca

SEQ ID NO: 284810 - DNA, 75 bp, synthetic construct
  source 1..75: mol_type = other DNA
tccatgcgttgaaagggatggtttttgagcaacagcgtttaagttttgacgaattgttgtcggtattaaaagcca

SEQ ID NO: 284811 - DNA, 75 bp, synthetic construct
  source 1..75: mol_type = other DNA
gcatatgatgatgaggagattgcaaaatgtgctagtaggttattaaaagcatatggcccccaattaggtataagt

SEQ ID NO: 284812 - DNA, 75 bp, synthetic construct
  source 1..75: mol_type = other DNA
ctggtgaatgttacggtatccgttatgaagaggctctgattctggaatctgcgatgatgagacgcagggttaaaa

SEQ ID NO: 284813 - DNA, 75 bp, synthetic construct
  source 1..75: mol_type = other DNA
tttaaccttgctaaccagacgcttgtttctgcagataaattcagaatgcttgctgaaggcgatgtatctctggct

SEQ ID NO: 284814 - DNA, 75 bp, synthetic construct
  source 1..75: mol_type = other DNA
tttgagaaatacggtaacgatatcgacgaggtggataacatcagcgccgaactgttacgccactactgcaaagaa

SEQ ID NO: 284815 - DNA, 75 bp, synthetic construct
  source 1..75: mol_type = other DNA
gcagattttcagcatcaaccagacggataaaggccaggggcacattattattgattacccacgcctgctgaatca

SEQ ID NO: 284816 - DNA, 75 bp, synthetic construct
  source 1..75: mol_type = other DNA
caaggcaagaccccgcaaggagtaactcttgccaagtcagatggtagttattttggcaaaaagagctaccagatc

SEQ ID NO: 284817 - DNA, 75 bp, synthetic construct
  source 1..75: mol_type = other DNA
gaccggctataccgcactgctcggcgggttaaccgagaacggacgtagcgcggtgaacgtgctttcgttcctttg

SEQ ID NO: 284818 - DNA, 75 bp, synthetic construct
  source 1..75: mol_type = other DNA
agtccgcgctcgcttaattaaccgctttgagaaatacggtaacgatatcgacgaggtggataacattagcgccga

SEQ ID NO: 284819 - DNA, 75 bp, synthetic construct
  source 1..75: mol_type = other DNA
ggcagacggtggcttgtcacccatgctgggtcaggatgcacaagggccaacggcggtactgaaatcagtcagtaa

SEQ ID NO: 284820 - DNA, 75 bp, synthetic construct
  source 1..75: mol_type = other DNA
ggagctttatgtcttgcggttgataatccttttgcgattaatcgagttgctgttaataatctagttgagtctttt

SEQ ID NO: 284821 - DNA, 75 bp, synthetic construct
  source 1..75: mol_type = other DNA
ttgaaagccgatggcacgccagctgcgccgttgattagctggcaggatgcacgcgttacacgcccttacgaacat

SEQ ID NO: 284822 - DNA, 75 bp, synthetic construct
  source 1..75: mol_type = other DNA
cgtaacgccattaacggttgtgcaagtctgggggcagcgattaatacagcggtaggtctggggctatacccggat

SEQ ID NO: 284823 - DNA, 75 bp, synthetic construct
  source 1..75: mol_type = other DNA
caactattttggtcagtggccggtggattataagacctgggcatggagtgaagatgctgcggtaatggataagtt

SEQ ID NO: 284824 - DNA, 75 bp, synthetic construct
  source 1..75: mol_type = other DNA
aagtaaagccctccgtgcggttgaggcggctttgcttcaagtaaatggaaacgcaaatattgatggcctgtcgat

SEQ ID NO: 284825 - DNA, 75 bp, synthetic construct
  source 1..75: mol_type = other DNA
tgacctggtttgagtttctgcacggtttctgttttcgccctttcctgcaggagcaactgtcatcgcgtggtctga

SEQ ID NO: 284826 - DNA, 75 bp, synthetic construct
  source 1..75: mol_type = other DNA
cgtggcctgctcacgggcacggggcaacatctattttattccggaaagccatcttcggagattcaagaaactaag

SEQ ID NO: 284827 - DNA, 75 bp, synthetic construct
  source 1..75: mol_type = other DNA
ttgagagcaatgccaaacgctacgacgcgatgaataaaggcattttcaaagacctaaccaaacatactgatgtga

SEQ ID NO: 284828 - DNA, 75 bp, synthetic construct
  source 1..75: mol_type = other DNA
cattttcaaagacctaaccaaacatactgatgtgatcctgaaaaaatcgtatgaagtgatgcatggggaattggg

SEQ ID NO: 284829 - DNA, 75 bp, synthetic construct
  source 1..75: mol_type = other DNA
tcgggttatctgacgcatcgcttaaccggcgagtttaaagacaatatcgccaactattttggtcagtggccggtg

SEQ ID NO: 284830 - DNA, 75 bp, synthetic construct
  source 1..75: mol_type = other DNA
attagctggcaggatgcccgtgtcacccgcccttacgaacacactaattctgacgtggcctatgtcacctctttt

SEQ ID NO: 284831 - DNA, 75 bp, synthetic construct
  source 1..75: mol_type = other DNA
gatgatttatgggcatcattatgttttgccggtcacgatttgatgagccagtttgccggaaataaagaagatatt

SEQ ID NO: 284832 - DNA, 75 bp, synthetic construct
  source 1..75: mol_type = other DNA
cattgctgtatgaaggttacggtattcgcaaaggcatgtggacggtgagctggctgcgcgacatgttaggcgagt

SEQ ID NO: 284833 - DNA, 75 bp, synthetic construct
  source 1..75: mol_type = other DNA
atgaagaggattatcggcgtcgttgctggcgttatcatgttatctgggtgcgcaactattgttggtgacgaaaca

SEQ ID NO: 284834 - DNA, 75 bp, synthetic construct
  source 1..75: mol_type = other DNA
gtggcgaatccggcggcgcgcatcagcataccggtaacaatcatcggtttggcaccaaagcggtcggcaattgcg

SEQ ID NO: 284835 - DNA, 75 bp, synthetic construct
  source 1..75: mol_type = other DNA
cacgttgttgtggacggattagtttcaccaccagcgccgaacgcggcggatcaaacaacgtgccgccgagtcccg

SEQ ID NO: 284836 - DNA, 75 bp, synthetic construct
  source 1..75: mol_type = other DNA
tgtcattaagcatgatgccagtgggtatggtcagcggcctgcaacaacttttcactctgatttgtctgttttata

SEQ ID NO: 284837 - DNA, 75 bp, synthetic construct
  source 1..75: mol_type = other DNA
ttatcctttctacttttctattaacagcctgtaattcagaaccttctgacaaagatatattcaatatttttaaaa

SEQ ID NO: 284838 - DNA, 75 bp, synthetic construct
  source 1..75: mol_type = other DNA
ttaacaaatgatgtatggagttacgcggatacccgatttgccgtaaaaaacacaaataacaggtccgtggggttt

SEQ ID NO: 284839 - DNA, 75 bp, synthetic construct
  source 1..75: mol_type = other DNA
attggcatcttcactttccttgcgctgggttggcagtttagccagaaacgcgccgcgcgtcgtttgctggaacgc

SEQ ID NO: 284840 - DNA, 75 bp, synthetic construct
  source 1..75: mol_type = other DNA
agaaaaactcaatagccgcatcgaagctctttacgatcgtgagcatacactaggacatgcattctttatgccggt

SEQ ID NO: 284841 - DNA, 75 bp, synthetic construct
  source 1..75: mol_type = other DNA
agagctcgagtcgttgttagagaaactcaatagccgcatcgaggctctttacgatcgtgaacatacgctggggca

SEQ ID NO: 284842 - DNA, 75 bp, synthetic construct
  source 1..75: mol_type = other DNA
atgaaacgtttcttcttaaaaaacaaatataaaggaattgatgatgagttttctgatggggacctcatttttggt

SEQ ID NO: 284843 - DNA, 75 bp, synthetic construct
  source 1..75: mol_type = other DNA
atgaataactccccccgctacccgcagcgcgttcgcaatgatctgcgcttccgtgaattgactgtgctacgcgtt

SEQ ID NO: 284844 - DNA, 75 bp, synthetic construct
  source 1..75: mol_type = other DNA
ggcgcaaccgggcgataaactcacggtggcaggtccgcgcggttcgctggtggtgccggaagattacgcgtatca

SEQ ID NO: 284845 - DNA, 75 bp, synthetic construct
  source 1..75: mol_type = other DNA
tcaagagatctggaatattccacaggcttatcgttcaatttatcagccccagcagactccccttgatgagcaggc

SEQ ID NO: 284846 - DNA, 75 bp, synthetic construct
  source 1..75: mol_type = other DNA
aactcaccccggcctttacgcctttgctggcgatcaaagaagcctcccgttgtttattatgtcacgatgccccct

SEQ ID NO: 284847 - DNA, 75 bp, synthetic construct
  source 1..75: mol_type = other DNA
aagtctttgatactaacgactttattattatcacccaacgtttccactgtgagcgcgcattatttatcgccttgc

SEQ ID NO: 284848 - DNA, 75 bp, synthetic construct
  source 1..75: mol_type = other DNA
ctggcgtaattaatcagtattatcgctaccgtattcagggagcgattaatgcttataatagcggcaaggtaaatt

SEQ ID NO: 284849 - DNA, 75 bp, synthetic construct
  source 1..75: mol_type = other DNA
gcaatggagcaacggcgataacgcagggtttactaccggcgagccgtggattggtctgagtgataactatcgcga

SEQ ID NO: 284850 - DNA, 75 bp, synthetic construct
  source 1..75: mol_type = other DNA
aatgattcaatggtcattgaaatatctcgattgtatgatttagtaaattctatcttcgagttatcgtttgatctt

SEQ ID NO: 284851 - DNA, 75 bp, synthetic construct
  source 1..75: mol_type = other DNA
tcgatacggccctaaataccggtctggcacttctcggttggctttacatcatgtcccgtacatggcgatggctgg

SEQ ID NO: 284852 - DNA, 75 bp, synthetic construct
  source 1..75: mol_type = other DNA
cagaaagtgttagatgagttctgcgatgcatttgaccttagcagcatagagcctggtacaacagccagggtagca

SEQ ID NO: 284853 - DNA, 75 bp, synthetic construct
  source 1..75: mol_type = other DNA
actggcgattaaagaagcctctcgctgtttattatgccatgacgccccctgtagtcaggcttgtccggcgcaaac

SEQ ID NO: 284854 - DNA, 75 bp, synthetic construct
  source 1..75: mol_type = other DNA
tcagcccggtactaaaacgctcggcaaagtcgccattattggcgcaggtcctgccggattgcaggccagtgtgac

SEQ ID NO: 284855 - DNA, 75 bp, synthetic construct
  source 1..75: mol_type = other DNA
atttatttccgtaattttaaaggcgcagccgagacaattcgcgaaaataatgcgctcggcgccgtttgcgccaga

SEQ ID NO: 284856 - DNA, 75 bp, synthetic construct
  source 1..75: mol_type = other DNA
atatctaccagggtgaggagattggcatgactaatccgcatttcacgcgcattaccgattaccgcgacgtggaga

SEQ ID NO: 284857 - DNA, 75 bp, synthetic construct
  source 1..75: mol_type = other DNA
ttacagcgttttgttactgattttgaacaacaaaccgggatggaaatttatcagcccggtactaaaacgctcggc

SEQ ID NO: 284858 - DNA, 75 bp, synthetic construct
  source 1..75: mol_type = other DNA
gtgcaataacgaaatcggtaaaacactcaccctggagcagctgaaagcggaaaaccgcgcggtactggtcaccgt

SEQ ID NO: 284859 - DNA, 75 bp, synthetic construct
  source 1..75: mol_type = other DNA
gagggaacgggacagctttatatggctgataccactctgcttgatggggatgcgcggcaattatatgcaggggca

SEQ ID NO: 284860 - DNA, 75 bp, synthetic construct
  source 1..75: mol_type = other DNA
gttgggaccatatgggcattttcggctatgagcgtaataccacgccgaaactggcccaggagaaaaatctggcgg

SEQ ID NO: 284861 - DNA, 75 bp, synthetic construct
  source 1..75: mol_type = other DNA
aacattgcttatcgtgagcagattggtgcggagccacgtaaccgtggcaaaccggtagatgatatgttgctggta

SEQ ID NO: 284862 - DNA, 75 bp, synthetic construct
  source 1..75: mol_type = other DNA
cgttacagaccttgagtggtcacaggtcgatctggataagaaaatggcatggatacaccctgatgaaacaaaagc

SEQ ID NO: 284863 - DNA, 75 bp, synthetic construct
  source 1..75: mol_type = other DNA
aacgatagagcgccttatgaattccggtgtgattggagggtatgctgcattgcagtacacccatccccagaacgg

SEQ ID NO: 284864 - DNA, 75 bp, synthetic construct
  source 1..75: mol_type = other DNA
gagggaacagggcagctttatatggccgataccactctgcttgatggggatgtacggcaattatatgcaggggca

SEQ ID NO: 284865 - DNA, 75 bp, synthetic construct
  source 1..75: mol_type = other DNA
agattggtgccacctggtactttgcccgcgaagcactgttacgggcgctggaaactggcaacaaccagatctttc

SEQ ID NO: 284866 - DNA, 75 bp, synthetic construct
  source 1..75: mol_type = other DNA
aaaccactttacggaagagcagatcggggatctgcgcgctctggtgctggattcgctctacgagcatcaaaaacg

SEQ ID NO: 284867 - DNA, 75 bp, synthetic construct
  source 1..75: mol_type = other DNA
cccgccagacgggtttacatccctaaaagcaacggcaaactgcgaccactgggtatccccgcgttgcgggatcgt

SEQ ID NO: 284868 - DNA, 75 bp, synthetic construct
  source 1..75: mol_type = other DNA
gctgaaggtgctgaaatctgacaaaaaggccctgttccgcgcttgccggcatgcccgggaagcgtcggaatatct

SEQ ID NO: 284869 - DNA, 75 bp, synthetic construct
  source 1..75: mol_type = other DNA
ggaatcggcatttaacctgaatatcctgattggctgcggtgttgacggatacgacgactggaaagactggaaacc

SEQ ID NO: 284870 - DNA, 75 bp, synthetic construct
  source 1..75: mol_type = other DNA
ggatacaccctgatgaaacaaaagctggcaatgcgatcggagttcctcttaacgaaaccgcatgccagatatggt

SEQ ID NO: 284871 - DNA, 75 bp, synthetic construct
  source 1..75: mol_type = other DNA
acctgatcctgatccgcgaatacgcagtgggaactgaatcctacgaattaggtttttcgaaaggattaattgatc

SEQ ID NO: 284872 - DNA, 75 bp, synthetic construct
  source 1..75: mol_type = other DNA
gcgtgcggcgtgtttatgaacgaatgcgtccaaccaaccgggaagcagtgatgattgtgccgattgtggacgatc

SEQ ID NO: 284873 - DNA, 75 bp, synthetic construct
  source 1..75: mol_type = other DNA
tcagagcggaagcgccggataaacgagcatcgtcgtcgggcgattaatgctgtgatcgctgcgattttgcaccat

SEQ ID NO: 284874 - DNA, 75 bp, synthetic construct
  source 1..75: mol_type = other DNA
cgccggcaccaaattcgccggacgcattgtcagtgacgacaaaacggcaagaacggtgaaaaatgccgccggtga

SEQ ID NO: 284875 - DNA, 75 bp, synthetic construct
  source 1..75: mol_type = other DNA
gtcgtctgccgaaattcggcttcacttctcgtaaagcagcgattacagccgaaattcgtctgtctgacctggcta

SEQ ID NO: 284876 - DNA, 75 bp, synthetic construct
  source 1..75: mol_type = other DNA
ctgaatcgctggaaggcgacgaaccagagccactaccgcaggtgcgctggccgctgacgcatatgatggatttgc

SEQ ID NO: 284877 - DNA, 75 bp, synthetic construct
  source 1..75: mol_type = other DNA
accaccttggttacatgtatcttaagggattgggcgtcaaacaggattatcggaaagcatcagagctttaccaag

SEQ ID NO: 284878 - DNA, 75 bp, synthetic construct
  source 1..75: mol_type = other DNA
tgctggcattagctttgcttttcggccctggatacgttaacgcagataataaacaaacgctgatcgacgccgcca

SEQ ID NO: 284879 - DNA, 75 bp, synthetic construct
  source 1..75: mol_type = other DNA
ccgctaatgatggcaaagttgactgcaccttcctgaaggatttttcagagaaaggaggcaatctggctacctcgt

SEQ ID NO: 284880 - DNA, 75 bp, synthetic construct
  source 1..75: mol_type = other DNA
aagccgccgtcaccgaaagctataccgtgttctacagtggggacgccgagaaaatcagcccccacagtaaaggtc

SEQ ID NO: 284881 - DNA, 75 bp, synthetic construct
  source 1..75: mol_type = other DNA
cggatatctgccttatcgaagcggacagcagcagactctttatgcaccattgttatgccgactggcaacatcgta

SEQ ID NO: 284882 - DNA, 75 bp, synthetic construct
  source 1..75: mol_type = other DNA
atgggggttgttatgtacgggacttgtgtagttgacaaaacttacgcttttacattgtttgacgactatgagatc

SEQ ID NO: 284883 - DNA, 75 bp, synthetic construct
  source 1..75: mol_type = other DNA
cagcgggtcacccagtccattgatgcacgcctgatacagctcaccgccaaaccggataaaagcggcggtgacttt

SEQ ID NO: 284884 - DNA, 75 bp, synthetic construct
  source 1..75: mol_type = other DNA
gtcaggggcggcaaattccgcacggtggagaccttgcaggtgcaggggctggaatttgaagagcaggcccgtgtg

SEQ ID NO: 284885 - DNA, 75 bp, synthetic construct
  source 1..75: mol_type = other DNA
gggctgcgcggaaaaaagcccgcgaaaacgaaagctgaaaaaccatttttccgaatcgcaggttgccgcactgcg

SEQ ID NO: 284886 - DNA, 75 bp, synthetic construct
  source 1..75: mol_type = other DNA
agggagattgatgtgtcccatcacgccctgaagagtggagtgctgtgccccgacagtgcgtggcggcaaatcgtg

SEQ ID NO: 284887 - DNA, 75 bp, synthetic construct
  source 1..75: mol_type = other DNA
catggtgatgattggcggcagtatcctggcagttatcttgttgattattgtgatgattggcgaaaaacgccgcca

SEQ ID NO: 284888 - DNA, 75 bp, synthetic construct
  source 1..75: mol_type = other DNA
ctggcggttatcttgttgattgttgtgatgattggcgaaaaacgtcgccatcaggaattactgcaaaaacgcaac

SEQ ID NO: 284889 - DNA, 75 bp, synthetic construct
  source 1..75: mol_type = other DNA
ccgaacaaactgctgtggtatatcgccatcgccaacgtgttcgtttatctgctgcgttacggcatcctcgactgg

SEQ ID NO: 284890 - DNA, 75 bp, synthetic construct
  source 1..75: mol_type = other DNA
accttcgcgaactaacgcgccggttcaatcagttggctgactgcacggacgaagatattgatttacttgctcagg

SEQ ID NO: 284891 - DNA, 75 bp, synthetic construct
  source 1..75: mol_type = other DNA
caatgactacggataaaccgggcaactttgacgagtctgcccggtacgcctatccgtggaatgaaccaaaacagg

SEQ ID NO: 284892 - DNA, 75 bp, synthetic construct
  source 1..75: mol_type = other DNA
accggcgaactgatcctgatcgacacgttccagccgtggcggcgtgtgctggcgaaaaaacaaactgtggagctg

SEQ ID NO: 284893 - DNA, 75 bp, synthetic construct
  source 1..75: mol_type = other DNA
gtgctgagcttgcccgccgtgaaattccggtctttggcctgcgggtggctgagtcacaccacgatggtacgccgc

SEQ ID NO: 284894 - DNA, 75 bp, synthetic construct
  source 1..75: mol_type = other DNA
ttttactctgacagcaccatccaaataccacgcctataccgtattcggtcatcgtaatgccaaatggaacggtgc

SEQ ID NO: 284895 - DNA, 75 bp, synthetic construct
  source 1..75: mol_type = other DNA
gcgctccaacgccgccccatccgtatccgggtagcgcaccagacgccacccggtacgcttacgaatggcagaagc

SEQ ID NO: 284896 - DNA, 75 bp, synthetic construct
  source 1..75: mol_type = other DNA
ctgggcctacttcctttatgaatatgcaggtattccgggcaccctgctgtgcggctggatgtcggataaagtctt

SEQ ID NO: 284897 - DNA, 75 bp, synthetic construct
  source 1..75: mol_type = other DNA
agcggtctggcaactggtcaagaaattcttcccggcggcggtctgtttcatcatgtcgctgtcatcaaagcgcac

SEQ ID NO: 284898 - DNA, 75 bp, synthetic construct
  source 1..75: mol_type = other DNA
actgcgctcagtggccgcaggcatggcgacacaaaaaggactgcgccgcacctacttttcgacgccttccagtga

SEQ ID NO: 284899 - DNA, 75 bp, synthetic construct
  source 1..75: mol_type = other DNA
acgaaaactcccccgacgaatacgccaacctgtacggctgcatgttcgttaaagccggggaacgcgccttcgact

SEQ ID NO: 284900 - DNA, 75 bp, synthetic construct
  source 1..75: mol_type = other DNA
tgaaaacaccgaaagcgaatttcgtaacctgtacatgtgcgagttcatgcgtgatggcgaggcggctttcagtct

SEQ ID NO: 284901 - DNA, 75 bp, synthetic construct
  source 1..75: mol_type = other DNA
cgcaaccagatatttttgtccgcctcccgtcgtcaggcgtatcagttcaagcattttattcagcaggcggcgctg

SEQ ID NO: 284902 - DNA, 75 bp, synthetic construct
  source 1..75: mol_type = other DNA
atgattcaggatgcatttgtccgcataagggcaagacaactttactggcaagggtacacacctgcggaaatctcg

SEQ ID NO: 284903 - DNA, 75 bp, synthetic construct
  source 1..75: mol_type = other DNA
ggcatgggcaacgatgcagggcatttacaacgaaccgatcggcgcggaagtgaccggcgataacggcagttttgt

SEQ ID NO: 284904 - DNA, 75 bp, synthetic construct
  source 1..75: mol_type = other DNA
taccgtacaacttcaatatcgcctccaagcgggcactggtcatgaaaatgcttcaggtggtgcgtgccggacgct

SEQ ID NO: 284905 - DNA, 75 bp, synthetic construct
  source 1..75: mol_type = other DNA
aatcctgtggcttgccgccgatcgaagagtacaaaaatgattatccggacgactataacgaaaaagcggaacagg

SEQ ID NO: 284906 - DNA, 75 bp, synthetic construct
  source 1..75: mol_type = other DNA
aaggaaatagacctgctgacccggcagcttaaaaaaatgcatgatggccagccggatgcgacggccacaggaaag

SEQ ID NO: 284907 - DNA, 75 bp, synthetic construct
  source 1..75: mol_type = other DNA
cctacttttcgacaccttccagtgaagaacatgaagcctatcccttctggactggcgatcagttcaataagcacc

SEQ ID NO: 284908 - DNA, 75 bp, synthetic construct
  source 1..75: mol_type = other DNA
acgacgcgaccaggagaaagagaagaaggcgaagaccccgaaaaaccatttcaccgaagaacagataacccagct

SEQ ID NO: 284909 - DNA, 75 bp, synthetic construct
  source 1..75: mol_type = other DNA
tggcctgttgatccgtgatgaggttgccgcgcgttcccttgcggtcgctttgcgtgaagggttagcgcataaatt

SEQ ID NO: 284910 - DNA, 75 bp, synthetic construct
  source 1..75: mol_type = other DNA
gatttgtaactaatgatggttctgttcattttgatggtgtggcatctatagcacatttgcatggaatagatgctg

SEQ ID NO: 284911 - DNA, 75 bp, synthetic construct
  source 1..75: mol_type = other DNA
gcggaaaagtatatcgttcctcgggcattatgcttggcaaggtgcttgccagcgggcaggagctgtcaggcgatc

SEQ ID NO: 284912 - DNA, 75 bp, synthetic construct
  source 1..75: mol_type = other DNA
tttgagatattaaaccgtgcagcggcctcgcgcgtggtaagttcttcactcagagacttcaggacaaccgtcagt

SEQ ID NO: 284913 - DNA, 75 bp, synthetic construct
  source 1..75: mol_type = other DNA
caggcatttacccgccacaaagagataacgcatgttgagtacagcgatcgttatcttaatagcccattcacggcg

SEQ ID NO: 284914 - DNA, 75 bp, synthetic construct
  source 1..75: mol_type = other DNA
attactaaatgctctatgcgaagcagacccagaacagcgcaaaaaaaattttaatgagctaatttttgaaataga

SEQ ID NO: 284915 - DNA, 75 bp, synthetic construct
  source 1..75: mol_type = other DNA
gtataaaaaagtgcgtgatgccggtttccgctgggcacccaaacaggcgctgtttgtggcgccagcctggacacc

SEQ ID NO: 284916 - DNA, 75 bp, synthetic construct
  source 1..75: mol_type = other DNA
gatgacaacaaactgcgcctgtatgccgcgtcacgtcttgacccggagacgtataaaaaagtgcatgatgccggt

SEQ ID NO: 284917 - DNA, 75 bp, synthetic construct
  source 1..75: mol_type = other DNA
cgctaccgtcgcacaatggacaacaatttccgtctggtgaatgtgtatatcaccgacatgaaaatcacggaaatc

SEQ ID NO: 284918 - DNA, 75 bp, synthetic construct
  source 1..75: mol_type = other DNA
gagagagtgcatctgctgccattacgttatgtaaaaacacggcgcatggaatggaggtattcaaagaccccctct

SEQ ID NO: 284919 - DNA, 75 bp, synthetic construct
  source 1..75: mol_type = other DNA
gcaatcaccatgaccgccccggaagccgccagccctgtgcagatgtaccgcgcgacctactcaccggatgacaac

SEQ ID NO: 284920 - DNA, 75 bp, synthetic construct
  source 1..75: mol_type = other DNA
agaccacggggcataccgctaccgccgcacaatggacaataatttccgcctggtgaatgtgtatatcaccgacat

SEQ ID NO: 284921 - DNA, 75 bp, synthetic construct
  source 1..75: mol_type = other DNA
tcttctgggagtaaggaaaacggaagagtggatagtttcgcaaatgtctttttctggggcaattttatggattaa

SEQ ID NO: 284922 - DNA, 75 bp, synthetic construct
  source 1..75: mol_type = other DNA
gtgcctgctggcgcagttaagcggctgcacgaatacgcgaacggtctacgtgccggttccggtagttccattacc

SEQ ID NO: 284923 - DNA, 75 bp, synthetic construct
  source 1..75: mol_type = other DNA
atgacgatgtgtcgggtactgaatgtcgcccgggccgggttctatgcgtggctgcacaacccggtctcggcgcgt

SEQ ID NO: 284924 - DNA, 75 bp, synthetic construct
  source 1..75: mol_type = other DNA
actttcgtacatttttgatggtatttctggtatcgttagttcttattagtgcaaaaataaagtcgaatggcctgt

SEQ ID NO: 284925 - DNA, 75 bp, synthetic construct
  source 1..75: mol_type = other DNA
gtggtcatggtgcgtgacaccccagagttccccggcggcccgctgcgtgcagatgttcatcctgatgaagtggat

SEQ ID NO: 284926 - DNA, 75 bp, synthetic construct
  source 1..75: mol_type = other DNA
ggtaatggtcagctccaatggtggacagcagcacattgccaaacaagatctggtaacgggaggcgtacaagttct

SEQ ID NO: 284927 - DNA, 75 bp, synthetic construct
  source 1..75: mol_type = other DNA
ggaggcgtacaagttctgtcgtccacgttcctggatgaaacgccaagtctggcacctaacggcactatggtaatc

SEQ ID NO: 284928 - DNA, 75 bp, synthetic construct
  source 1..75: mol_type = other DNA
actttcatacatttttgatgctctttctggtatcgttagttcttattagtgcaaaaataaagtcgaatggcctgt

SEQ ID NO: 284929 - DNA, 75 bp, synthetic construct
  source 1..75: mol_type = other DNA
actttcatacatttttgatgatatttctggtatcgttagttcttattagtgcaaaaataaagtcgaatggcctgt

SEQ ID NO: 284930 - DNA, 75 bp, synthetic construct
  source 1..75: mol_type = other DNA
ttctgtatttcttgttcctgtatatgaagagattgtatttcgagggtgtctttttaactcttttaaaatctggtt

SEQ ID NO: 284931 - DNA, 75 bp, synthetic construct
  source 1..75: mol_type = other DNA
actttcctacatttttgatgctatttctggtatcgttagttcttattagtgcaaaaataaagtcgaatggcctgt

SEQ ID NO: 284932 - DNA, 75 bp, synthetic construct
  source 1..75: mol_type = other DNA
actttcttacatttttgatggtttttctggtatcgttagttcttattagtgcaaaaataaagtcgaatggcctgt

SEQ ID NO: 284933 - DNA, 75 bp, synthetic construct
  source 1..75: mol_type = other DNA
actttcatacatttttgatggtgtttctggtatcgttagttcttattagtgcaaaaataaagtcgaatggcctgt

SEQ ID NO: 284934 - DNA, 75 bp, synthetic construct
  source 1..75: mol_type = other DNA
gacgtataaaaaagtgcatgatgccggtttccgctgggcaccaaaacaggcgctgtttgtcgcgccagcctggac

SEQ ID NO: 284935 - DNA, 75 bp, synthetic construct
  source 1..75: mol_type = other DNA
ggatggtttgcggtgtacctatttttccacgccatcaagtgaaacacatgaggcgtatgcatactggaacggcga

SEQ ID NO: 284936 - DNA, 75 bp, synthetic construct
  source 1..75: mol_type = other DNA
tccggcctgagcgcagtgtccaccacgcgatccgcacggtgaaattacagctcaccgactgcggtgaaacccggg

SEQ ID NO: 284937 - DNA, 75 bp, synthetic construct
  source 1..75: mol_type = other DNA
tcaggctgaacatggataagactaaaatcacccatgttaatgacggctttatctttctggggcacaggatcattc

SEQ ID NO: 284938 - DNA, 75 bp, synthetic construct
  source 1..75: mol_type = other DNA
gtttgcaccgcgtccgatggggaaccgccctgtgtggattgggtacgacgccaacggcagtagcgggaacggtga

SEQ ID NO: 284939 - DNA, 75 bp, synthetic construct
  source 1..75: mol_type = other DNA
gctggaatgcgcttcataacggccttatctgtcctgactatatctggcggcaaattgtgacgctggaagatgtgg

SEQ ID NO: 284940 - DNA, 75 bp, synthetic construct
  source 1..75: mol_type = other DNA
atgggaataaacccgaacacgatttatgcgtggaaaaaacgcgaccagtgggatgaaacgccacccgtgcagcgt

SEQ ID NO: 284941 - DNA, 75 bp, synthetic construct
  source 1..75: mol_type = other DNA
atgaaaaatattaaattacttggttcagctatgttggtgagcctggcattattctcgcaaagttcattggcaaaa

SEQ ID NO: 284942 - DNA, 75 bp, synthetic construct
  source 1..75: mol_type = other DNA
aggaatggcaatgctgagtgtggtgcttctggcgtgggtcgtctggcgtctgctacgcatcattagccatcgtcg

SEQ ID NO: 284943 - DNA, 75 bp, synthetic construct
  source 1..75: mol_type = other DNA
atggctacatacggcggtcagtttacgcttacaagaaaaaccatgtccctgcagatgttacgggagcatatgacg

SEQ ID NO: 284944 - DNA, 75 bp, synthetic construct
  source 1..75: mol_type = other DNA
cgaaatggcaaggcaagcgcgtggtcggcataatcggtgatcagttgcatgatgggattggcggttgcaccagag

SEQ ID NO: 284945 - DNA, 75 bp, synthetic construct
  source 1..75: mol_type = other DNA
ccgctatgatggtgagcctggcattgttctcgcaaagttcattggcaaaagagtataaaattggagcttcattat

SEQ ID NO: 284946 - DNA, 75 bp, synthetic construct
  source 1..75: mol_type = other DNA
gcgttgaagctggtaagttaatgggcaaacttttgaatggtaaaggtactgtagccattatttcttatcctgcac

SEQ ID NO: 284947 - DNA, 75 bp, synthetic construct
  source 1..75: mol_type = other DNA
gccggtagatgatatgttgctggtagacgaaatgcagcaatcgctggggcgcaacccggatggcaagcatctgat

SEQ ID NO: 284948 - DNA, 75 bp, synthetic construct
  source 1..75: mol_type = other DNA
ctgtgctgcaggccagactgactgctgaactgcaaagactcagggttgaactactctctggtcactaccagccgt

SEQ ID NO: 284949 - DNA, 75 bp, synthetic construct
  source 1..75: mol_type = other DNA
cgtgttctggaagctggctcactggctggcccgcaaataccgtacaggtatcgcttccctgatgaggtggtggtg

SEQ ID NO: 284950 - DNA, 75 bp, synthetic construct
  source 1..75: mol_type = other DNA
caccggctgctgatgaaagcggtccgccgcaggatcagtgacgcacgctttattagccggttgtggaaaaccatc

SEQ ID NO: 284951 - DNA, 75 bp, synthetic construct
  source 1..75: mol_type = other DNA
taaacgagtaattcaagctgtaaatacacattcagaaaaacaaagaaaagtaaataatgaatttttcctgtttgg

SEQ ID NO: 284952 - DNA, 75 bp, synthetic construct
  source 1..75: mol_type = other DNA
atgaaacgctttccgctatttcttttattcacgctgtccaccgttccggcccaggccgatattatcgatgacacc

SEQ ID NO: 284953 - DNA, 75 bp, synthetic construct
  source 1..75: mol_type = other DNA
gtccgccggtagtcaactatccgggggacggtttccgggaaatgacaaaggcgcagtgggccgccctgccccggg

SEQ ID NO: 284954 - DNA, 75 bp, synthetic construct
  source 1..75: mol_type = other DNA
gtcgctacaaagtctttatgggcgatgcgggcagtacattgattggttttaccgtaatctggatcctgctggaaa

SEQ ID NO: 284955 - DNA, 75 bp, synthetic construct
  source 1..75: mol_type = other DNA
gtgtttatcatcggtgaaaccacgcgttgggaccatatgggcattttcggctatgagcgtaataccacgccgaaa

SEQ ID NO: 284956 - DNA, 75 bp, synthetic construct
  source 1..75: mol_type = other DNA
gctgggatcatatgggcattttcggctatgaacgcaataccacaccgaaactggctcaggagaaaaatctggcgg

SEQ ID NO: 284957 - DNA, 75 bp, synthetic construct
  source 1..75: mol_type = other DNA
acatgatcagtaaaggcttgtttgaaatggctgcggcgattcggcatggcaaaaactacagtctgaacaccatgc

SEQ ID NO: 284958 - DNA, 75 bp, synthetic construct
  source 1..75: mol_type = other DNA
ttatctcagtagcctgggctatatcttcggttcctgggaaatggtgctcgggccgtttggctacttcctgacgct

SEQ ID NO: 284959 - DNA, 75 bp, synthetic construct
  source 1..75: mol_type = other DNA
atggctattgcattaagcgcgcctggaaggttgctcgctttattaagcgtgtgaaacgccgactgcgcagaaatc

SEQ ID NO: 284960 - DNA, 75 bp, synthetic construct
  source 1..75: mol_type = other DNA
gcggggaataaaaccagccaaaggtgaagttctggtcgttgtatctggttttactggttgcggaaaaagcgccat

SEQ ID NO: 284961 - DNA, 75 bp, synthetic construct
  source 1..75: mol_type = other DNA
atgacaaacaaaattgactatcaaaagcttcgtgaaattgctgaaaaaacaaaaattgctggtgaagcgcctgta

SEQ ID NO: 284962 - DNA, 75 bp, synthetic construct
  source 1..75: mol_type = other DNA
gcagccaatccggctaccgtgctggcactgctgaatgaacgggaaagaaaccagcaatacatcaaacgccgcgac

SEQ ID NO: 284963 - DNA, 75 bp, synthetic construct
  source 1..75: mol_type = other DNA
gccagatagcccggcgacgctattttatttgcatggaggcggttttattctcggcaatctcgatacccacgatcg

SEQ ID NO: 284964 - DNA, 75 bp, synthetic construct
  source 1..75: mol_type = other DNA
atgaagccggaaaacaaattacccgttctggaccttatttctgctgaaatgaagaccgttgtgaatactcttcag

SEQ ID NO: 284965 - DNA, 75 bp, synthetic construct
  source 1..75: mol_type = other DNA
ttgtggttgcgtgataaacagatcgattgcggtaaaattgcgggtgttttgctgtggtatgggctttacggatta

SEQ ID NO: 284966 - DNA, 75 bp, synthetic construct
  source 1..75: mol_type = other DNA
ttcaaatttctggccggaccagaaaccgtgctggcactactggatgaaagggaaagaaaccagcaatacatcaaa

SEQ ID NO: 284967 - DNA, 75 bp, synthetic construct
  source 1..75: mol_type = other DNA
ttcgtgaaatcgctgaaaaaacaaaaattgccggtgaagcacctgtaatgccttgcgatcagcgaattaatgcgc

SEQ ID NO: 284968 - DNA, 75 bp, synthetic construct
  source 1..75: mol_type = other DNA
tgctggagctaatctctgccgaaatgaaggcggttgttaatactcttcagcccgatttaccgccctggcccgcaa

SEQ ID NO: 284969 - DNA, 75 bp, synthetic construct
  source 1..75: mol_type = other DNA
ggaagcacgggaaataaaaccagccaaaggcgaagttcttgtcgttgtttctggttttactggttgcggaaaaag

SEQ ID NO: 284970 - DNA, 75 bp, synthetic construct
  source 1..75: mol_type = other DNA
cccagctttctaccccatgcactgacagcatcataaacagcattgcaacaggcattcgcatcaaaggaggtgagt

SEQ ID NO: 284971 - DNA, 75 bp, synthetic construct
  source 1..75: mol_type = other DNA
gcgacgccatgcttcatggtgccgaaactgtaagccaaacttacaagttgccagttaatacaccttgccaagatg

SEQ ID NO: 284972 - DNA, 75 bp, synthetic construct
  source 1..75: mol_type = other DNA
attgcagaatgtcatgttaactgcctggttgaaacagatgctcaggcttatgcaaacgcagaattcatagcagag

SEQ ID NO: 284973 - DNA, 75 bp, synthetic construct
  source 1..75: mol_type = other DNA
cattacgcgcagccgctaatcaatgaagccgatgcactggcgaaagtgatgccgtcggacatcccgctgaaacat

SEQ ID NO: 284974 - DNA, 75 bp, synthetic construct
  source 1..75: mol_type = other DNA
gcggaatgtcatgttaactgcctggttgaaacagatgttcaggcttatgcaaacgctgaatttattgcagctttt

SEQ ID NO: 284975 - DNA, 75 bp, synthetic construct
  source 1..75: mol_type = other DNA
tttgacggccagaaaaatgcagagaacaacgcagaatttatcgcagctttaaaccctaaagtagtgcaggcactg

SEQ ID NO: 284976 - DNA, 75 bp, synthetic construct
  source 1..75: mol_type = other DNA
agttaccagaaagtaatgcagtggtatttgccactaataatagacgaccagactttctacgtgatcatccgttgg

SEQ ID NO: 284977 - DNA, 75 bp, synthetic construct
  source 1..75: mol_type = other DNA
ttcaatggactaatggcgatgcagaaaagcatatgaccggcgctgactggctgacagcgattgagatgtacaaac

SEQ ID NO: 284978 - DNA, 75 bp, synthetic construct
  source 1..75: mol_type = other DNA
aaaagcttatggcgcttcacaagtggttttgggaacaaagtgaagccgagcgcgccgctggcattcgcatcaaag

SEQ ID NO: 284979 - DNA, 75 bp, synthetic construct
  source 1..75: mol_type = other DNA
agcagcctgtggcttgatattgggcgcaacagcgaactggaactgacgtttcagagactcaatctgaaaaatgat

SEQ ID NO: 284980 - DNA, 75 bp, synthetic construct
  source 1..75: mol_type = other DNA
gaaggagcgcatcctgaaagcggtttcgatgaagatttccaaatggagcagcaggccaatgctgaattcatcgcc

SEQ ID NO: 284981 - DNA, 75 bp, synthetic construct
  source 1..75: mol_type = other DNA
gcaacaggatttacagatgtatgaagaggcgtatttaagccacgacgctgaccgcgagtcgccgtattactgcct

SEQ ID NO: 284982 - DNA, 75 bp, synthetic construct
  source 1..75: mol_type = other DNA
gcgggaatgcattgaggccagagggctgaggtcacgggttgcggtatctcattttcacagctggtgtgcctcaat

SEQ ID NO: 284983 - DNA, 75 bp, synthetic construct
  source 1..75: mol_type = other DNA
ttgcctttacctggctgaaaccacgcccggaaagattctggtgctgtgctacaacattactttggccagttatct

SEQ ID NO: 284984 - DNA, 75 bp, synthetic construct
  source 1..75: mol_type = other DNA
ctggagtgatatggctgtgctgtgtccgacagagcgttcagcgaaacaattgcaagacgttatgacactacgcgg

SEQ ID NO: 284985 - DNA, 75 bp, synthetic construct
  source 1..75: mol_type = other DNA
aggcacaggagagcgaacgaaaacaggcggtccaaaaacgaatcgagggaaaaaaacaacgacgggaacgcaatc

SEQ ID NO: 284986 - DNA, 75 bp, synthetic construct
  source 1..75: mol_type = other DNA
agaggcaaatcattgacctgctcgataacgaagccggactaacagaacaggagcgcaaactactccacgtcctgg

SEQ ID NO: 284987 - DNA, 75 bp, synthetic construct
  source 1..75: mol_type = other DNA
tgctcctgatgtacgatgatgcccagtccatttaccggcgggagcgggccctgaacttttcactggccagtgtgg

SEQ ID NO: 284988 - DNA, 75 bp, synthetic construct
  source 1..75: mol_type = other DNA
atcgttttgtcaccttcacgcgagattttgtgaatagcggtaaaccggtcttcgctatctgccacggcccgcaac

SEQ ID NO: 284989 - DNA, 75 bp, synthetic construct
  source 1..75: mol_type = other DNA
gaaaaaccatgattcttttattccgttgcctttacctggctgaaaccacgcccggaaagattctggtgctgtgct

SEQ ID NO: 284990 - DNA, 75 bp, synthetic construct
  source 1..75: mol_type = other DNA
atcaggagcaggtcacgctggaaaccgacggtcttctgaaatcagaaatcaatccgctggtacaggttcgtcgtt

SEQ ID NO: 284991 - DNA, 75 bp, synthetic construct
  source 1..75: mol_type = other DNA
ttgtctggaatcatattccctggggagccgaagattttaccggagcactgcctctccaggagcgagtggatttat

SEQ ID NO: 284992 - DNA, 75 bp, synthetic construct
  source 1..75: mol_type = other DNA
tatgaaggtaagccttatgcaacgtacagaattggtctattttttaatggcgatacggataaccagcctgtggat

SEQ ID NO: 284993 - DNA, 75 bp, synthetic construct
  source 1..75: mol_type = other DNA
accgttttgtcacctttacccgtgattttgtgaatagcggcaaaccggtgtttgccatttgccacggtccgcagc

SEQ ID NO: 284994 - DNA, 75 bp, synthetic construct
  source 1..75: mol_type = other DNA
gtgaaagatattcatttcgaaggccttcagcgtgtcgccgttggtgcggccctcctcagtatgccggtgcgcaca

SEQ ID NO: 284995 - DNA, 75 bp, synthetic construct
  source 1..75: mol_type = other DNA
aagctgcgcgttgagcttgaagcagcaaaatcaaaactcaacgagcagcgtgaatattacgagggagtaatcgcg

SEQ ID NO: 284996 - DNA, 75 bp, synthetic construct
  source 1..75: mol_type = other DNA
aacgaatactacaaagtatcgttagataccgcgacttatgtaccgatcgatgacgatcataagtgggttgttctg

SEQ ID NO: 284997 - DNA, 75 bp, synthetic construct
  source 1..75: mol_type = other DNA
ccgtatagccctaatagctatgatccgaataatgattatgcgtgtgcgacacaggacggagcgaaagacctgtgt

SEQ ID NO: 284998 - DNA, 75 bp, synthetic construct
  source 1..75: mol_type = other DNA
aaatgctgatgagcgacatgtgatgatacctaaagaaaatggcaactggattcatcggactgacttagagcactc

SEQ ID NO: 284999 - DNA, 75 bp, synthetic construct
  source 1..75: mol_type = other DNA
tgcccagctttctaccccatgcactgacagcatcataaacagcattgcaacaggcattcgcatcaaaggagagtg

SEQ ID NO: 285000 - DNA, 75 bp, synthetic construct
  source 1..75: mol_type = other DNA
ggtagggaagctgcgtgttgagcttgaagcagaaaaacagcgggcaaaagttctatttatggaaaatgctcggct

SEQ ID NO: 285001 - DNA, 75 bp, synthetic construct
  source 1..75: mol_type = other DNA
tgctgaagcaaaacctcgaggcttctggtgtgcgtgtgggcgaatccctcgatcgcaccaccattgccgatatcg

SEQ ID NO: 285002 - DNA, 75 bp, synthetic construct
  source 1..75: mol_type = other DNA
ccgtgcgtggcttccagtccaacaccatcggtccaaaagcggtttacttcccgcatcaggccagtaattatgacc

SEQ ID NO: 285003 - DNA, 75 bp, synthetic construct
  source 1..75: mol_type = other DNA
tggggaccgtttgggatacaaattggcaagatacggaatcgatgcgagctgcgggagttccggactatagtgatc

SEQ ID NO: 285004 - DNA, 75 bp, synthetic construct
  source 1..75: mol_type = other DNA
cgtcaacctgacgggtaaagtgaccattccgggctcggataacgaatactataaagtgacgttagatacggcgac

SEQ ID NO: 285005 - DNA, 75 bp, synthetic construct
  source 1..75: mol_type = other DNA
ccgtgcgtggcttccagtccaacaccattggtccgaaagcggtttacttcccatatagccctaatggctatgacc

SEQ ID NO: 285006 - DNA, 75 bp, synthetic construct
  source 1..75: mol_type = other DNA
ctgcgcagttactatctggatcgcggttatgcccgtttcaacattgactcgactcaggtcagtctgacgccggat

SEQ ID NO: 285007 - DNA, 75 bp, synthetic construct
  source 1..75: mol_type = other DNA
ggctggacgcagcgaattaatgaaaggcatgtttggtggtacgcaaatcaccgccggtcaggtttatatcgacca

SEQ ID NO: 285008 - DNA, 75 bp, synthetic construct
  source 1..75: mol_type = other DNA
tggcaaccgcgtagttatggtgaggagcgattgcgcctggatgcagttaaggcgccaggcgtgcgtacgccaata

SEQ ID NO: 285009 - DNA, 75 bp, synthetic construct
  source 1..75: mol_type = other DNA
caccgtatggaagaaatatttgctctcagcgatgccatcaccgtctttaaagatggacgttacgtcaaaactttc

SEQ ID NO: 285010 - DNA, 75 bp, synthetic construct
  source 1..75: mol_type = other DNA
cctggcttgccgtgcctgcagatgaaatcgaagatctcaaaaaagcacatcccccgatgaacgggcacacgcccg

SEQ ID NO: 285011 - DNA, 75 bp, synthetic construct
  source 1..75: mol_type = other DNA
ggctatgcccgctcctatattaacgggttgccacaggcaacagcacatgaatacctgacgcgcaagggcatccgg

SEQ ID NO: 285012 - DNA, 75 bp, synthetic construct
  source 1..75: mol_type = other DNA
ttgctgtcccgcctgaggagacagaagccgtaaaaaatgcagttcccccgttaaatggccgcaaagctgtcgcat

SEQ ID NO: 285013 - DNA, 75 bp, synthetic construct
  source 1..75: mol_type = other DNA
aattattacaaatatccgctgaagtacaggatgctttaaaaaataaaaaaccggttgttgcgctggaatcgacca

SEQ ID NO: 285014 - DNA, 75 bp, synthetic construct
  source 1..75: mol_type = other DNA
cccggccggtcgcgcactgggcgacggtatctcgtttgtcctcagcaccctgattagccacgccggctggctcgc

SEQ ID NO: 285015 - DNA, 75 bp, synthetic construct
  source 1..75: mol_type = other DNA
atggattttgaacagatttcctgctcgctgcttccgcttcttggaggcaaagaaaatatcgccagcgccgcgcac

SEQ ID NO: 285016 - DNA, 75 bp, synthetic construct
  source 1..75: mol_type = other DNA
atatctctccattggtcagtggcagatggttgaaattgccaaagctctggcgcgtaacgccaaaattatcgcctt

SEQ ID NO: 285017 - DNA, 75 bp, synthetic construct
  source 1..75: mol_type = other DNA
atatctctccatcggccagtggcagatggttgaaatagccaaagcgctggcgcgtaacgccaaaattatcgcctt

SEQ ID NO: 285018 - DNA, 75 bp, synthetic construct
  source 1..75: mol_type = other DNA
gtagaagaaacaattcgtaaacagggcgcagtaccagccactatcgccattattggcggtgtgatgaaagtgggc

SEQ ID NO: 285019 - DNA, 75 bp, synthetic construct
  source 1..75: mol_type = other DNA
tgaagtcgtgaccagtggggtatcgattattgacggtaagctcaccggttcaaaagcgtttctgaaagcgctttc

SEQ ID NO: 285020 - DNA, 75 bp, synthetic construct
  source 1..75: mol_type = other DNA
gctgaattgttggaagtgatgaaggactacgccacccgcgaggatgaggacgaattgcagggtaagcatggcatt

SEQ ID NO: 285021 - DNA, 75 bp, synthetic construct
  source 1..75: mol_type = other DNA
cgagtaacaatcgccgccagttagttggcggcaggggtatgtctaattctgctgctgatatcaattacgattacg

SEQ ID NO: 285022 - DNA, 75 bp, synthetic construct
  source 1..75: mol_type = other DNA
gagttgattgtgaccggtgcggatatgaactggcgtaaaacgctggcaaggcatagagttgatgagttgctcagt

SEQ ID NO: 285023 - DNA, 75 bp, synthetic construct
  source 1..75: mol_type = other DNA
gatggctgttcatcttttgaccttcagggcgcgtctgcgcccgctaggactcgtgtcaataactgtacggagcat

SEQ ID NO: 285024 - DNA, 75 bp, synthetic construct
  source 1..75: mol_type = other DNA
ggcccagcggatctcggaaaactgtcatattcctgtaaggatcacccctgatgtacaggcgtatctgagcgtaac

SEQ ID NO: 285025 - DNA, 75 bp, synthetic construct
  source 1..75: mol_type = other DNA
cggttatgtggtgaagtatatcagcaagaatattgatggttacgcgctcgacggtgaaacagatgacgagaacgg

SEQ ID NO: 285026 - DNA, 75 bp, synthetic construct
  source 1..75: mol_type = other DNA
gcaggtaaagcaatcagcgccgccctgcccgattgtgattaatactcgttcagatattgagctacgccagatcgc

SEQ ID NO: 285027 - DNA, 75 bp, synthetic construct
  source 1..75: mol_type = other DNA
ggatggtgaaagcgacgacgaaagcggacgtccactgaaggaaacagcaaaacacgctaccgcctgggcttcatg

SEQ ID NO: 285028 - DNA, 75 bp, synthetic construct
  source 1..75: mol_type = other DNA
gcgcgatatcgttaagcgcgagcttccacacgtccgtaacgtcacgaatcaatacgcagtaccagaagacaatga

SEQ ID NO: 285029 - DNA, 75 bp, synthetic construct
  source 1..75: mol_type = other DNA
ggctcaattccggcaccagatacaaatggaatggtccctctggcttcagttggcaatcagccagtatcggtaaac

SEQ ID NO: 285030 - DNA, 75 bp, synthetic construct
  source 1..75: mol_type = other DNA
taacagcgaagacggcgacacgattctggtcgttttgattacacccaatgtgcttaattccgcctccaactctgt

SEQ ID NO: 285031 - DNA, 75 bp, synthetic construct
  source 1..75: mol_type = other DNA
ccgccaatgtgggatcatccacgtcactgaatgcggcaacaataacgaccggattcaatatgactctgcttccat

SEQ ID NO: 285032 - DNA, 75 bp, synthetic construct
  source 1..75: mol_type = other DNA
tgccatgctcggcatcaccgaagcggcgatttttggtattaacttacgctttgtaaaaccgtttatcgcagccct

SEQ ID NO: 285033 - DNA, 75 bp, synthetic construct
  source 1..75: mol_type = other DNA
atggctccatttatgtcctgcggcgcacgtctggcaatcttcgcggtatttgcggctgcgttctttgggcagaac

SEQ ID NO: 285034 - DNA, 75 bp, synthetic construct
  source 1..75: mol_type = other DNA
gcgtcgcgcacgtagccgggtcgatatcgaactgctggcaacacgcaaatcggtaagcagttgctgtgcagccag

SEQ ID NO: 285035 - DNA, 75 bp, synthetic construct
  source 1..75: mol_type = other DNA
attatccagacctggcagcgtttgaaaggcttcgttctgcgcgccggtaaagtgattatcatcgtcagcattttc

SEQ ID NO: 285036 - DNA, 75 bp, synthetic construct
  source 1..75: mol_type = other DNA
caaccctgaagtagtgcaggcgttgctggatgaacgggaaagaaaccagcaatacatgaaacgccgagaccagga

SEQ ID NO: 285037 - DNA, 75 bp, synthetic construct
  source 1..75: mol_type = other DNA
caaccctgaagtagtgcaggcgttgctggatgaacgggaaagaaaccagcaatacataaaacgccgggaccagga

SEQ ID NO: 285038 - DNA, 75 bp, synthetic construct
  source 1..75: mol_type = other DNA
cgttgagcttgaagcagaagagaaaacatcagcagccagacttgaggcgctcgaccgcacccacaaaatgttcca

SEQ ID NO: 285039 - DNA, 75 bp, synthetic construct
  source 1..75: mol_type = other DNA
gcgccgcgcgcgtagccgggtggatatcgaactgctggcaacgcgcaaatcggtaagcagttgctgcgcagccag

SEQ ID NO: 285040 - DNA, 75 bp, synthetic construct
  source 1..75: mol_type = other DNA
agatgaaacctggcagagcctgaaagacaccttcagtcttagcgtactgatgaaccccattgaagcgagcaaagg

SEQ ID NO: 285041 - DNA, 75 bp, synthetic construct
  source 1..75: mol_type = other DNA
tgcaggcgttaggcttgccgggtaaatcctttgtgccgttgatcgtcggttttggttgtaacgtaccgtcggtaa

SEQ ID NO: 285042 - DNA, 75 bp, synthetic construct
  source 1..75: mol_type = other DNA
cattacgcccagccgctcatcaatgaagccgacgcgctggcaaaagtaatgccctctgacatcccgctgaaacat

SEQ ID NO: 285043 - DNA, 75 bp, synthetic construct
  source 1..75: mol_type = other DNA
agccgggtgatcaccccggtcttcaagccgattggcgtgcatgaagataactggcaggcaacggttggcctgttt

SEQ ID NO: 285044 - DNA, 75 bp, synthetic construct
  source 1..75: mol_type = other DNA
gctgactggcctgatgctcaagtacaccatcatgcgcggtgaagcgacgccgtttgtcatggagctgccggtcta

SEQ ID NO: 285045 - DNA, 75 bp, synthetic construct
  source 1..75: mol_type = other DNA
tgactggctgacagcgattgagatgtacaaaccaactgtgcgcatcgcggaagttaatgtgccacgcgccgctgg

SEQ ID NO: 285046 - DNA, 75 bp, synthetic construct
  source 1..75: mol_type = other DNA
aatatggctacgttatcgaacgcggtaataagtttgtcggcgctgtgtctatcgattcgcttaaaaccgcgttaa

SEQ ID NO: 285047 - DNA, 75 bp, synthetic construct
  source 1..75: mol_type = other DNA
gaaattcttaataatccggcgaatgattatgtccgtaccttcttccgtggcgtcgatattagccaggtgttcagt

SEQ ID NO: 285048 - DNA, 75 bp, synthetic construct
  source 1..75: mol_type = other DNA
ggaaaatatcgccagcgccgcgcactgtgccacacgcctgcgcctggtgctggtcgatgactcactggccgatca

SEQ ID NO: 285049 - DNA, 75 bp, synthetic construct
  source 1..75: mol_type = other DNA
acgcaatgatattttgtttttacttgatggtgataaaaacaaaaaaataaaaccagtaagaattagtgaaattgc

SEQ ID NO: 285050 - DNA, 75 bp, synthetic construct
  source 1..75: mol_type = other DNA
gcggaaaaagcgccattgccggggaaatagaaatcgcgatgaaggctattggtgtaccggttaagtggactaatg

SEQ ID NO: 285051 - DNA, 75 bp, synthetic construct
  source 1..75: mol_type = other DNA
ttttgctatcacctcaacgaatgagaacggtactgaaattgatcatgagatggctattaccgattacgcactgca

SEQ ID NO: 285052 - DNA, 75 bp, synthetic construct
  source 1..75: mol_type = other DNA
ggcactgaaattattgcaggatgaagatcgcgaatatggctacgttatcgaacgcggtaataagtttgtcggcgc

SEQ ID NO: 285053 - DNA, 75 bp, synthetic construct
  source 1..75: mol_type = other DNA
ccaaacggtaatggcatacaaagtttctgaagtcatcgctgcaatccgcgccgctggcattcgcatcaaaggaga

SEQ ID NO: 285054 - DNA, 75 bp, synthetic construct
  source 1..75: mol_type = other DNA
aaaccgccagagtggtgtttaatgagttaagcgtcaccgaaccggcgacagtcggggagattgcacagaatactt

SEQ ID NO: 285055 - DNA, 75 bp, synthetic construct
  source 1..75: mol_type = other DNA
aaacggcaaaggctgttttcaatgaattaagcgataaaccagcaacggctggggagattgcacagaatacccacc

SEQ ID NO: 285056 - DNA, 75 bp, synthetic construct
  source 1..75: mol_type = other DNA
acctttcacgcgaacgttgccagttaatactgacccagcttgttatagcgggtctggcagattatcagttcggtt

SEQ ID NO: 285057 - DNA, 75 bp, synthetic construct
  source 1..75: mol_type = other DNA
agaatctcagaaaggggctttcaccaaagaagatggtgaaaaagtcgttaatgatgcaggtaaaagactgaaata

SEQ ID NO: 285058 - DNA, 75 bp, synthetic construct
  source 1..75: mol_type = other DNA
ccgaagtcgtgctggatattcttcccgatgcacagaaaagcgcgttcacgaaagaggacggtgagaaggtggttg

SEQ ID NO: 285059 - DNA, 75 bp, synthetic construct
  source 1..75: mol_type = other DNA
taaacgcgctggcggttgcgaataccggttttcagctcgctggctttttcgacaagattattggtatgtcacgtt

SEQ ID NO: 285060 - DNA, 75 bp, synthetic construct
  source 1..75: mol_type = other DNA
aaaccgccagagtggtgtttaatgaattaagcgtcaccgaaccggcgaccgccggggaaattgcgcagaacactt

SEQ ID NO: 285061 - DNA, 75 bp, synthetic construct
  source 1..75: mol_type = other DNA
atgaaccaatcacaatttcaacaggcggctggtgtaagcgccgggttagcttcgcgctggtttccgcacattgat

SEQ ID NO: 285062 - DNA, 75 bp, synthetic construct
  source 1..75: mol_type = other DNA
atctttcacgtgaacgctgccagttaatactgacccagcttgttatggcgggtctggcagactatcagttcggtt

SEQ ID NO: 285063 - DNA, 75 bp, synthetic construct
  source 1..75: mol_type = other DNA
gttgcgtttgtgctggttggggaatcattcttgcgctcacctgcgtttaatgtgccggagtcggctcagcgttgg

SEQ ID NO: 285064 - DNA, 75 bp, synthetic construct
  source 1..75: mol_type = other DNA
gagtcattcttgcgctcaccggcatttagcgtgccggagtccgcccagcgctgggcgaaccagatacggcaggaa

SEQ ID NO: 285065 - DNA, 75 bp, synthetic construct
  source 1..75: mol_type = other DNA
cgaagcacgtcgtgccgcaacatcggtgaaagacgccaacttcgtcgaagaagttgaagaagttgaagaagttga

SEQ ID NO: 285066 - DNA, 75 bp, synthetic construct
  source 1..75: mol_type = other DNA
agaggctcagaaagcggctttcaccaaggaagacggtgaaaaagtcgttgatgaggcaggtaatcgactgaaata

SEQ ID NO: 285067 - DNA, 75 bp, synthetic construct
  source 1..75: mol_type = other DNA
ctgtttttacatcccactgacagcagccaccacagttgaagaacagcgccagtcacggcgctacgcgccatgccc

SEQ ID NO: 285068 - DNA, 75 bp, synthetic construct
  source 1..75: mol_type = other DNA
cagttatctacggcacaacgtcagggccgttataaaacgacgcttcagcgtggagtaagtaagcgctccgtctgt

SEQ ID NO: 285069 - DNA, 75 bp, synthetic construct
  source 1..75: mol_type = other DNA
agattattaacggcgggcagaatggcattaaagaccgccgtgaacgttacgccaaagcaaaagccgcactggtct

SEQ ID NO: 285070 - DNA, 75 bp, synthetic construct
  source 1..75: mol_type = other DNA
cagaaatagtgctggatattctacctgaaggtcagaaaggagcgtttaccaaagaggacggcgaaaaggtcattg

SEQ ID NO: 285071 - DNA, 75 bp, synthetic construct
  source 1..75: mol_type = other DNA
gcctccggagaaaaaagagtatgacgtgcatcctggtgaaaatctggtgagcttcgacaaccccgttactttatt

SEQ ID NO: 285072 - DNA, 75 bp, synthetic construct
  source 1..75: mol_type = other DNA
gctgaaacagcaggatatgaccgaaaccgccagagtggtgtttaatgaattaagtgccaccgaaccggcgacagt

SEQ ID NO: 285073 - DNA, 75 bp, synthetic construct
  source 1..75: mol_type = other DNA
tgctgcattgcctggtgatcccgcgtatcccgttagcccctggtctggctccggcagttgcggcggggctgctgg

SEQ ID NO: 285074 - DNA, 75 bp, synthetic construct
  source 1..75: mol_type = other DNA
tacctgatggactacgaaaatggttcctggtggcaggagctggatgcggacaataaggtcaccaccaaagtctgg

SEQ ID NO: 285075 - DNA, 75 bp, synthetic construct
  source 1..75: mol_type = other DNA
cggaggtactccgggccactggatcgaatggggccgtttaatgctgcacattcacgcggccctggaagcccgttg

SEQ ID NO: 285076 - DNA, 75 bp, synthetic construct
  source 1..75: mol_type = other DNA
ctccaggaggctgttggcttaccgaatctggcaccgcgttatgccattgatgctcctgctgacgcgcctgatggc

SEQ ID NO: 285077 - DNA, 75 bp, synthetic construct
  source 1..75: mol_type = other DNA
ttctggtcgctgacggcgaaaggctgcatgttcggcaagaacatcaccagtcccgcaaatccgcgtgagacgcag

SEQ ID NO: 285078 - DNA, 75 bp, synthetic construct
  source 1..75: mol_type = other DNA
atctgtctaactcttcagtgcttggtgcctgtcagaaactccaggaggctgttggcttaccgaatctggcaccgc

SEQ ID NO: 285079 - DNA, 75 bp, synthetic construct
  source 1..75: mol_type = other DNA
gcgcaggtctacatcgagggccagctgcgcacccgcaactggcaggacgatgccggagtcacgcgctacgtcacc

SEQ ID NO: 285080 - DNA, 75 bp, synthetic construct
  source 1..75: mol_type = other DNA
tgacggcggtcagccccagagcacggctccgcagcaacccgcacaaccgcagagttctgccgctccggcacaacc

SEQ ID NO: 285081 - DNA, 75 bp, synthetic construct
  source 1..75: mol_type = other DNA
agagtaccgcgccgtctcagcaggcgctgcagccgttaccggacgattatccgccgatggatgatgatgctccgt

SEQ ID NO: 285082 - DNA, 75 bp, synthetic construct
  source 1..75: mol_type = other DNA
gacggtaaacaggatatctaccacctgctgcactgcctggtgatcccacgtatcccgttagcgccaggtctggct

SEQ ID NO: 285083 - DNA, 75 bp, synthetic construct
  source 1..75: mol_type = other DNA
cggctggtatgcctgcgtgaatgatgaaggcgtagtggatgcttccaaacagggttatcaacacttttttgctct

SEQ ID NO: 285084 - DNA, 75 bp, synthetic construct
  source 1..75: mol_type = other DNA
ccctgcagatgctcggcggccgccgtgaatccggagtgcctgagagcgccgcgcagccgcaaaatcctgccaccc

SEQ ID NO: 285085 - DNA, 75 bp, synthetic construct
  source 1..75: mol_type = other DNA
tcaagtcgccctacgctgtcgctgagtgcactgctgaaacagtatggtatccgccttacggctaatcaggcatat

SEQ ID NO: 285086 - DNA, 75 bp, synthetic construct
  source 1..75: mol_type = other DNA
gactatcacttccatggcggcagaaaataaaaataaaaacatgacctcgtatgcgtcatctaaagctgcggccag

SEQ ID NO: 285087 - DNA, 75 bp, synthetic construct
  source 1..75: mol_type = other DNA
tattaacgccgatgcagctaatcatgttgtagatgaaattcaacaactgggtggcctggcatttgcgtggcgctg

SEQ ID NO: 285088 - DNA, 75 bp, synthetic construct
  source 1..75: mol_type = other DNA
aggtgcgggtgcaggtattggtaaagaaattgccattacattcgcgacagctggcgcatctgtggtggtcagtga

SEQ ID NO: 285089 - DNA, 75 bp, synthetic construct
  source 1..75: mol_type = other DNA
acctttcacgcgaacgctgtcagttaatactgacccagcttgttatggcggggctggcggactatcagttcggtt

SEQ ID NO: 285090 - DNA, 75 bp, synthetic construct
  source 1..75: mol_type = other DNA
ttattggtgtgtcacgttaaccggaaaagggaaaaagacatgctaaaacagcaggatatgacagaaaccgccaga

SEQ ID NO: 285091 - DNA, 75 bp, synthetic construct
  source 1..75: mol_type = other DNA
aaaccgccagagtggtgtttaatgaattaagcgtcaccgaaccggcgaccgtcggggaggttgcgcagaatactt

SEQ ID NO: 285092 - DNA, 75 bp, synthetic construct
  source 1..75: mol_type = other DNA
gcagagatcttataaagagagcgggagttaatcatcttttgactttattctcagcccaactggatgaagttatac

SEQ ID NO: 285093 - DNA, 75 bp, synthetic construct
  source 1..75: mol_type = other DNA
acggaaactggcgttacattgcaccgaatggtgaaacgtgccgatgccggggccattgtggcgcaactgcgcatt

SEQ ID NO: 285094 - DNA, 75 bp, synthetic construct
  source 1..75: mol_type = other DNA
acctttcacgcgaacgctgccagctaatactgacccagcttgttatggcgggtctggcagattatcagttcggtt

SEQ ID NO: 285095 - DNA, 75 bp, synthetic construct
  source 1..75: mol_type = other DNA
tgaatggcattgcgccgggggcaatattaaccaatgccctgaaatccgttattaccccagaaattggtgatgctg

SEQ ID NO: 285096 - DNA, 75 bp, synthetic construct
  source 1..75: mol_type = other DNA
ctttcacgcgaacgctgccagttaatactgacccagcttgttatggcgggtctggcagactatcagtgcggttgt

SEQ ID NO: 285097 - DNA, 75 bp, synthetic construct
  source 1..75: mol_type = other DNA
cgacaagagttattggtatgtcacgttaaccggaaaagggaaaaagacatgctaaaacagcaggatatgacagaa

SEQ ID NO: 285098 - DNA, 75 bp, synthetic construct
  source 1..75: mol_type = other DNA
aattcaccgggcgcggctaccaatggactttcggcggcatgaacacgggccataaatattacgtttatgtgcgca

SEQ ID NO: 285099 - DNA, 75 bp, synthetic construct
  source 1..75: mol_type = other DNA
aacaccgatggtattggacaacatgaggtaagaattgactcgctagaggtatccagcgaaagaatcgacagcgaa

SEQ ID NO: 285100 - DNA, 75 bp, synthetic construct
  source 1..75: mol_type = other DNA
tagaggcttttggttgcacgtcacgcgggcaggcgtaccgcgctggcaaatggctgatagaaacagcaaaacgcg

SEQ ID NO: 285101 - DNA, 75 bp, synthetic construct
  source 1..75: mol_type = other DNA
cagtagtaagggctgcatcaacgcctcaattcggatttacggtatcccattgtgtcgcagggatcacggcgcaaa

SEQ ID NO: 285102 - DNA, 75 bp, synthetic construct
  source 1..75: mol_type = other DNA
gttgatgacggcgcactgtatacgctttctcaatactgcgaccagttggttgatgatggctacggcggccttgag

SEQ ID NO: 285103 - DNA, 75 bp, synthetic construct
  source 1..75: mol_type = other DNA
cacagcaaatacagtcaaccaactataaagccggttcggctggctggatgattaataaaaacggtagcgcggagc

SEQ ID NO: 285104 - DNA, 75 bp, synthetic construct
  source 1..75: mol_type = other DNA
acagaaaattttgatgaaattagcgattacgtcaccaaagacgtgatgaattcagaacaatttaagggaatggta

SEQ ID NO: 285105 - DNA, 75 bp, synthetic construct
  source 1..75: mol_type = other DNA
ttaccctcataccgctgtagctggcgcggtaattgaccatgaccagtatactgatactcctacccgcacctatca

SEQ ID NO: 285106 - DNA, 75 bp, synthetic construct
  source 1..75: mol_type = other DNA
aacgcgccggatgaaaagccgtttgatattcgcgttcgtcgcgtaacgccagacagcaaaagcgatcttcttcgt

SEQ ID NO: 285107 - DNA, 75 bp, synthetic construct
  source 1..75: mol_type = other DNA
ttcatacattcaatcaaacaactatgtttccaatagcacaggctggaagctggataaatcaggcacatttgaaaa

SEQ ID NO: 285108 - DNA, 75 bp, synthetic construct
  source 1..75: mol_type = other DNA
caaggccatcgctgacgaaaccagcgcacgcagcgaggcggtaagcgacgttaacgcaagcatttcagcgctcga

SEQ ID NO: 285109 - DNA, 75 bp, synthetic construct
  source 1..75: mol_type = other DNA
tgtcaacgcaaaagtaacgcatgacaccccactggtcaggacggtatcagatccgaacgtgacccgcgtcagatt

SEQ ID NO: 285110 - DNA, 75 bp, synthetic construct
  source 1..75: mol_type = other DNA
ctggttcagacttcaggatatggctgagggttacctggtgatgaagtctcttgatcaggagatctgctcaagaga

SEQ ID NO: 285111 - DNA, 75 bp, synthetic construct
  source 1..75: mol_type = other DNA
tgcgcttactgatgcggaattacggcgcaaggctgccgatggactgacttgtatgaccgcgcgaattaaccgtgg

SEQ ID NO: 285112 - DNA, 75 bp, synthetic construct
  source 1..75: mol_type = other DNA
gtttaaatcattcacaacggcttcatacaaccgtgcgctacttggtgggttacaggaaggaactgcgcaatttta

SEQ ID NO: 285113 - DNA, 75 bp, synthetic construct
  source 1..75: mol_type = other DNA
aggtaattgatggatggcacattggtaactttgataaatgggacgatcagtacgttgccggagtattccagtcag

SEQ ID NO: 285114 - DNA, 75 bp, synthetic construct
  source 1..75: mol_type = other DNA
gatattaccgcgaagggaatatataaaacattgttttgatgaggttttttcacattatgagcaatgtctgaatct

SEQ ID NO: 285115 - DNA, 75 bp, synthetic construct
  source 1..75: mol_type = other DNA
cagtctggctcgcgctatcatgtatttccgggcttttaatcctgactttaaaatttttacagcacgtgacttacg

SEQ ID NO: 285116 - DNA, 75 bp, synthetic construct
  source 1..75: mol_type = other DNA
accagaacgaactgaatgaaattcgccgccagtgggttctggctttccgggaaaacgggatcaccacaatggaac

SEQ ID NO: 285117 - DNA, 75 bp, synthetic construct
  source 1..75: mol_type = other DNA
atcgcgcagagtgcgtctcgttaatgaagcgttacccgttaagcatcggtattcttgccggccagtggctcaaac

SEQ ID NO: 285118 - DNA, 75 bp, synthetic construct
  source 1..75: mol_type = other DNA
tattaatgccagagaatgaatttagtaagtttatagaagaaaaatcaaatcaagtggctgatatagcagcacatt

SEQ ID NO: 285119 - DNA, 75 bp, synthetic construct
  source 1..75: mol_type = other DNA
tataaaacagtttactactcgattcataacatcagggtaagccataagcacttctataacgatataaaaccaaaa

SEQ ID NO: 285120 - DNA, 75 bp, synthetic construct
  source 1..75: mol_type = other DNA
agaaagtgtaaaggccggagctcactgtatcacgttacaggtggaacggaatcctcatctgtaccatatgctcca

SEQ ID NO: 285121 - DNA, 75 bp, synthetic construct
  source 1..75: mol_type = other DNA
accggactgagtgtgtttcattaatgaaatgttacccgttaagcatcggtattctcgcggggcagtggcttaagt

SEQ ID NO: 285122 - DNA, 75 bp, synthetic construct
  source 1..75: mol_type = other DNA
ggcaagcgtaaaggcgggcgcgcactgcgttacgttgcaggtagaaaactcgccgcatctgcaccatatgctcca

SEQ ID NO: 285123 - DNA, 75 bp, synthetic construct
  source 1..75: mol_type = other DNA
ccgattagcaaaacaaccctgaccactgatacagcatacgaattttacttcgcaggtgaaaaccagatcacagat

SEQ ID NO: 285124 - DNA, 75 bp, synthetic construct
  source 1..75: mol_type = other DNA
cagaagtggtgctggaaattctgccagatgcgcaaaaaggcgcattcaccaaggaagatggcgagaaagtggttg

SEQ ID NO: 285125 - DNA, 75 bp, synthetic construct
  source 1..75: mol_type = other DNA
atggggatttccgtacgcgcgctgctgcgtaaaaacgtcgaaccgtatgaggagctgggccttgcggaagataaa

SEQ ID NO: 285126 - DNA, 75 bp, synthetic construct
  source 1..75: mol_type = other DNA
ttatgcttcagcacccgattctgattaatcgcccgattgtggtgacgccgctgggaactcgcctgtgccgccctt

SEQ ID NO: 285127 - DNA, 75 bp, synthetic construct
  source 1..75: mol_type = other DNA
agcggatggtgcagtacacccgaaacaggttctatatcccgttaatgacgcgcctgcgtccgatggggatcaccg

SEQ ID NO: 285128 - DNA, 75 bp, synthetic construct
  source 1..75: mol_type = other DNA
tgaactggtcaaactcattgccgatatggggatttccgtacgcgcgctgttgcgtaaaaacgtcgagccgtatga

SEQ ID NO: 285129 - DNA, 75 bp, synthetic construct
  source 1..75: mol_type = other DNA
atgagcaacattaccatttatcacaacccggcctgcggcacgtcgcgaaatacgctggagatgatccgcaacagc

SEQ ID NO: 285130 - DNA, 75 bp, synthetic construct
  source 1..75: mol_type = other DNA
gaccgattcgtgttaatgactgccgcaaacggcacatatcagacacctttctatgtcactaacggcgcaatgtat

SEQ ID NO: 285131 - DNA, 75 bp, synthetic construct
  source 1..75: mol_type = other DNA
agacgaggcattgtcaaccagaatcgaccagttgaaagtaactattaacggaaacacaacggcgatagaaacgac

SEQ ID NO: 285132 - DNA, 75 bp, synthetic construct
  source 1..75: mol_type = other DNA
agcctgttacaatccacttttgaacaatcaaataagataattgaactccgaagagaggctatgtggttagcaacg

SEQ ID NO: 285133 - DNA, 75 bp, synthetic construct
  source 1..75: mol_type = other DNA
acgaatcaagcgcccgcgcccaggctatcagcggagtgaacgcatcaatttccacgcttgatagtaaggtgacaa

SEQ ID NO: 285134 - DNA, 75 bp, synthetic construct
  source 1..75: mol_type = other DNA
aaagcgccggatgaaaagccgtttgatattcgcgttcgtcgcgtaacagcagacagcaaaagcgatcttcttcgt

SEQ ID NO: 285135 - DNA, 75 bp, synthetic construct
  source 1..75: mol_type = other DNA
tatcgactgaatctgcaaaacctgttctgtgtcgaattatcagcgtggcagaaacagaaaataatagcgtgtaca

SEQ ID NO: 285136 - DNA, 75 bp, synthetic construct
  source 1..75: mol_type = other DNA
gcttcaactactcggtagacgggctaaagaaaacctttggtaaacgcctgacaccgtatcagtgtgaaatgctgg

SEQ ID NO: 285137 - DNA, 75 bp, synthetic construct
  source 1..75: mol_type = other DNA
ctgccacacctattactccagaccagcaacgtatccgcgaactggaaaagcaggttcgccgcctggaggaacaaa

SEQ ID NO: 285138 - DNA, 75 bp, synthetic construct
  source 1..75: mol_type = other DNA
acaatatgaagcaaaaacaggtattaaagagactttttacgtttgtaaaccatcacaaggagcaggacagtgctg

SEQ ID NO: 285139 - DNA, 75 bp, synthetic construct
  source 1..75: mol_type = other DNA
gtcgttatgggtggcgtgttcaatgttcctggctacctgaaagatacaaattttggtctggaccctgaggcggct

SEQ ID NO: 285140 - DNA, 75 bp, synthetic construct
  source 1..75: mol_type = other DNA
cagcaaagcgtacagcgcggacagcatcgtagattataacgatgcacattataaaacttctgtcgatcaagacgc

SEQ ID NO: 285141 - DNA, 75 bp, synthetic construct
  source 1..75: mol_type = other DNA
ccggttacgccaccagccgacaatcgctgcggtaataattcccgccaggatcgatgctgccaggtcgtgccagaa

SEQ ID NO: 285142 - DNA, 75 bp, synthetic construct
  source 1..75: mol_type = other DNA
cctcctccaccgtaatcgccgaaggcgaaaccgcttacctgaccaccggccagatagcgataagcgacccggacg

SEQ ID NO: 285143 - DNA, 75 bp, synthetic construct
  source 1..75: mol_type = other DNA
tctggagccggaaacctgggccaggatgtgtgaacgggtgtcaggtgctgccagcggggcgctttatgccaatga

SEQ ID NO: 285144 - DNA, 75 bp, synthetic construct
  source 1..75: mol_type = other DNA
acccaataacccccgatttccttcatgttaatatgcaatctgaatgcataaacagaattattcggcataaagtca

SEQ ID NO: 285145 - DNA, 75 bp, synthetic construct
  source 1..75: mol_type = other DNA
acaattgcacacattctgaagatgagggagatgtatcgggatgtgacggagactttttactgggtggcactcccc

SEQ ID NO: 285146 - DNA, 75 bp, synthetic construct
  source 1..75: mol_type = other DNA
gacctgactcagatccctaaagtgattgaatattgtaagaaaaatccgcagaaaaatttgtatacctttaaagat

SEQ ID NO: 285147 - DNA, 75 bp, synthetic construct
  source 1..75: mol_type = other DNA
ctctccgtaaagcgtttatttttatgggcgctgtagcggctttgtcactggtgaacgcacaatctgcgctggcag

SEQ ID NO: 285148 - DNA, 75 bp, synthetic construct
  source 1..75: mol_type = other DNA
tcaacgaccgtccgacgattagcgcgacgccgctgaccatgcaggaagatacgccagttggcaaaacgctgacct

SEQ ID NO: 285149 - DNA, 75 bp, synthetic construct
  source 1..75: mol_type = other DNA
tcagcccgaacaaaccccggcattatgagcggtatatggagcgaatgcagcaaaggaggaaagaatggggcattc

SEQ ID NO: 285150 - DNA, 75 bp, synthetic construct
  source 1..75: mol_type = other DNA
cggatggcgatgtcgccgccagcgtgctgacctgctggcaggataatccttacgacgtgatgtacaccatcggcg

SEQ ID NO: 285151 - DNA, 75 bp, synthetic construct
  source 1..75: mol_type = other DNA
gtgtgcggccgttcaccgtattgagtggttgtttgagacattttcttctgtctgtttgtctttttccggaggaaa

SEQ ID NO: 285152 - DNA, 75 bp, synthetic construct
  source 1..75: mol_type = other DNA
tatcgtggtgcaggacaccgaatccgccgccttcggcacgccggtgaccgtcaccatcaccgcgccgtccggcac

SEQ ID NO: 285153 - DNA, 75 bp, synthetic construct
  source 1..75: mol_type = other DNA
caccattgtgccggtgaacgacgcgccggttgtctctgcaacgggcggtacggtttacctcaacagcgatccggc

SEQ ID NO: 285154 - DNA, 75 bp, synthetic construct
  source 1..75: mol_type = other DNA
ggaccggtggtgatgtactgtgtgaatcaaggcatcgtatagactggatatttgatacgtttccatcagtttgtg

SEQ ID NO: 285155 - DNA, 75 bp, synthetic construct
  source 1..75: mol_type = other DNA
gcgtaacgtggcgcgggcgttaggtaaaccgctggacaagctgcgcatggttacgctggataaaccgcgcctgag

SEQ ID NO: 285156 - DNA, 75 bp, synthetic construct
  source 1..75: mol_type = other DNA
aagcaacacagctgggcgtgaaggtttttgccctgccggatggcgatgtcgccgccagcgtgctgacctgctggc

SEQ ID NO: 285157 - DNA, 75 bp, synthetic construct
  source 1..75: mol_type = other DNA
gtggcgcttattgttcgccagcagcggctgaaattaagcctgtccggaaggctggcgataaaggtgattgcagag

SEQ ID NO: 285158 - DNA, 75 bp, synthetic construct
  source 1..75: mol_type = other DNA
ggtgtggcgcaggacgtccctccttatgtcattgcgcagggtaaccacgcaacgccgttcggtgtcaatatcgaa

SEQ ID NO: 285159 - DNA, 75 bp, synthetic construct
  source 1..75: mol_type = other DNA
tctgctggatgtgatgccggaaagaacagcagaacattaccgcaacaagatagctgtctatctgcgctggtatca

SEQ ID NO: 285160 - DNA, 75 bp, synthetic construct
  source 1..75: mol_type = other DNA
gtatatgaaaaagctggtcgttaatcggcttgcggcgggcgcgattgatctggcgttacccctggcggacaactt

SEQ ID NO: 285161 - DNA, 75 bp, synthetic construct
  source 1..75: mol_type = other DNA
tgatgaatcgctcaatcgctttatgggactggtatctcagcgcaaactgagatatgcagatgataaaccctggac

SEQ ID NO: 285162 - DNA, 75 bp, synthetic construct
  source 1..75: mol_type = other DNA
attgttctgcttatttagatgaaacaaattttgaattggtattcgtcgaatccaacgtactaaaaattccagtaa

SEQ ID NO: 285163 - DNA, 75 bp, synthetic construct
  source 1..75: mol_type = other DNA
cgggagtgtcacgttttctgctgttcccgcaagccttactggcgctcgccccgctccaggatcatttaccgcgac

SEQ ID NO: 285164 - DNA, 75 bp, synthetic construct
  source 1..75: mol_type = other DNA
gaagggttttattacaccatgtatccgttgtatgactggaaagcccgtgatatctggatatataacgccagaacc

SEQ ID NO: 285165 - DNA, 75 bp, synthetic construct
  source 1..75: mol_type = other DNA
gtgcttttccatcttgtggcagaggtggcccgccggagaaaacgtcatttctctgtactgttcattgactgggag

SEQ ID NO: 285166 - DNA, 75 bp, synthetic construct
  source 1..75: mol_type = other DNA
atgccaatgaaagcggtgcttattttgccctgcgtaagcgcatatcaaaaccagcccatcatacctggcgcagct

SEQ ID NO: 285167 - DNA, 75 bp, synthetic construct
  source 1..75: mol_type = other DNA
aaaccgctggacaagctgcgcatggttacgctggataaaccgcgcctgagtgccgcgattgaggaagcaacacag

SEQ ID NO: 285168 - DNA, 75 bp, synthetic construct
  source 1..75: mol_type = other DNA
aagcgtccgccggtagtcaactatccgggggacggtttccgggaaatgacaaaggcgcagtgggccgccctgccc

SEQ ID NO: 285169 - DNA, 75 bp, synthetic construct
  source 1..75: mol_type = other DNA
atgaaaaaaatgttaatggtcagtgtcctttttctctctgcctgttcctctccgccagaaccgccacaggttgac

SEQ ID NO: 285170 - DNA, 75 bp, synthetic construct
  source 1..75: mol_type = other DNA
tggtcggccctggatgatgacatcatcaccacggagcaggcccgcgaaattgcgatccgctgtcatgaacggcag

SEQ ID NO: 285171 - DNA, 75 bp, synthetic construct
  source 1..75: mol_type = other DNA
tgtggtgcgggggcaaccagtactacccatcctgtcgaatgtagtcactgcaaagcggatatacagcaacttgat

SEQ ID NO: 285172 - DNA, 75 bp, synthetic construct
  source 1..75: mol_type = other DNA
ctgagccctcaggatctttaccaacagctttgtcattaccgtgtggcccagcaattgcgtcaggcgttaactcat

SEQ ID NO: 285173 - DNA, 75 bp, synthetic construct
  source 1..75: mol_type = other DNA
tatccgggggaaggtttccgggaaatgacaaaggcacagtgggccgccctgccccgggactgtaaggccgtgcgc

SEQ ID NO: 285174 - DNA, 75 bp, synthetic construct
  source 1..75: mol_type = other DNA
gctggaaggccgtgaagaaaacattgttttcgaagtgccgaaagagctgcgtgtcgatattcgtgaagtcgatta

SEQ ID NO: 285175 - DNA, 75 bp, synthetic construct
  source 1..75: mol_type = other DNA
taacaccacgcggattgcgaccactgcgtttgtacaggccgctattaccgctctgattaacggtgcccctgacac

SEQ ID NO: 285176 - DNA, 75 bp, synthetic construct
  source 1..75: mol_type = other DNA
ggcatcacagcgaacgccgcgcccgtcgtgatgcgcagcgtattgaaaacggcatgaaacgtgccgtgatgctct

SEQ ID NO: 285177 - DNA, 75 bp, synthetic construct
  source 1..75: mol_type = other DNA
ggcagaaaaaagccagtatgaaggaagtcggtcgttatggtcggccctggatgatgacatcatcaccacggagca

SEQ ID NO: 285178 - DNA, 75 bp, synthetic construct
  source 1..75: mol_type = other DNA
tgaactgcgttggcgtgactgcgggcgcatcggctccggatattctggtgcagaatgtggtggcacgtttgcaac

SEQ ID NO: 285179 - DNA, 75 bp, synthetic construct
  source 1..75: mol_type = other DNA
atccaggaagagtgggtaaaagaggttaaatgcgtcggcgtcactgcgggtgcctcggctccggatattctggtg

SEQ ID NO: 285180 - DNA, 75 bp, synthetic construct
  source 1..75: mol_type = other DNA
aataaacctgttaagaccggaatctcgaggtgagggacgtaataattcctttgcttgtgtttgctgtggtgacac

SEQ ID NO: 285181 - DNA, 75 bp, synthetic construct
  source 1..75: mol_type = other DNA
atggaaaatctcgctcactatttatccgccacgctaaaacatcttcgtcagcagcgaggctggagtctttcgcga

SEQ ID NO: 285182 - DNA, 75 bp, synthetic construct
  source 1..75: mol_type = other DNA
tttgccgccgatgtcgctcatgcctattgcaaccgtgacgagcaaagcgtgcattttcattccctcattcattac

SEQ ID NO: 285183 - DNA, 75 bp, synthetic construct
  source 1..75: mol_type = other DNA
gtcctgagggtgattgaagaacagggaaaacttgaagcactgcgtaaaacacgccagctctgtgcgcaggttttt

SEQ ID NO: 285184 - DNA, 75 bp, synthetic construct
  source 1..75: mol_type = other DNA
gtgcacagccaggcatttcataccgaacgggcctgtcgcgatgcattgcacgccattaaaaaggagaatgttggc

SEQ ID NO: 285185 - DNA, 75 bp, synthetic construct
  source 1..75: mol_type = other DNA
gacgccgctgaccatgcaggaagatacgccagttggcaaaacgctgacctctattcttggcagctacagcgacgc

SEQ ID NO: 285186 - DNA, 75 bp, synthetic construct
  source 1..75: mol_type = other DNA
ctggcaggctatggcgatttgacgatccgcgccgacggcagcttcacctttgtgccagtggccgactggaacggc

SEQ ID NO: 285187 - DNA, 75 bp, synthetic construct
  source 1..75: mol_type = other DNA
gcaacctttccagccttactttctgagtcaactcgatacgctggcatggcgcagcggggtgccggaaatgacctg

SEQ ID NO: 285188 - DNA, 75 bp, synthetic construct
  source 1..75: mol_type = other DNA
ttagcggaatggcgtaatttattgaagattactcttgatttctttatccgtgaaaacagtgccgttttttacgaa

SEQ ID NO: 285189 - DNA, 75 bp, synthetic construct
  source 1..75: mol_type = other DNA
acgtccggaaaaaccttctcgggtcagaccttaagtgcagaagatttactgcccgccttacccaccggggcggtg

SEQ ID NO: 285190 - DNA, 75 bp, synthetic construct
  source 1..75: mol_type = other DNA
tcgacagggtttatacggagaaggatttcggcattaatgtcgccatatttgtcgcgggacttgccggaatgagct

SEQ ID NO: 285191 - DNA, 75 bp, synthetic construct
  source 1..75: mol_type = other DNA
gcactggatgtattgagccaattactgaatctcggttcggtttatccgttccagcgcgagggagggggcaatgga

SEQ ID NO: 285192 - DNA, 75 bp, synthetic construct
  source 1..75: mol_type = other DNA
ccgctgaccgcctcatcccgcgccggctactggccgccctccccggttatcgaaggcgacaacgataaccatcgc

SEQ ID NO: 285193 - DNA, 75 bp, synthetic construct
  source 1..75: mol_type = other DNA
tatttacacgccgcttggcgagcaggggaataatctctcagtcgggcaaaagcaactgctggcactggcgcgcgt

SEQ ID NO: 285194 - DNA, 75 bp, synthetic construct
  source 1..75: mol_type = other DNA
tgtatgcgtttatcagctatcttgggcgacttaacgaaccattaatcgaactgaccacgcaacaggcgatgctgc

SEQ ID NO: 285195 - DNA, 75 bp, synthetic construct
  source 1..75: mol_type = other DNA
ggagacaccgcaaatactgatcctcgatgaagccaccgccagcattgactccgggactgaacaggcgattcaaca

SEQ ID NO: 285196 - DNA, 75 bp, synthetic construct
  source 1..75: mol_type = other DNA
cacggcgatttgatcgcggttggcaatacagccgaaagttacaagccaaccgttgccgaagggtcaggacgtgca

SEQ ID NO: 285197 - DNA, 75 bp, synthetic construct
  source 1..75: mol_type = other DNA
agcacggctttcgttatggctgcgattgccgcccttgtagattcgtcacctgacgcactgaatacgctgaacgag

SEQ ID NO: 285198 - DNA, 75 bp, synthetic construct
  source 1..75: mol_type = other DNA
ggcggcggcgtatgttgggctgcaactgtttgccgccgggctacattacgcgcagtcgctgctgtttaatcgggc

SEQ ID NO: 285199 - DNA, 75 bp, synthetic construct
  source 1..75: mol_type = other DNA
taatactgcttatcctgatccttcccggaagaacgaagaaatataccggaaatcagaaatacattgaccggcttt

SEQ ID NO: 285200 - DNA, 75 bp, synthetic construct
  source 1..75: mol_type = other DNA
gtacgcagaaccggaactggcggcgaaactgaccgcgctgggcgatgaattacgatttgtcctgttgacctccgg

SEQ ID NO: 285201 - DNA, 75 bp, synthetic construct
  source 1..75: mol_type = other DNA
acaccgtttcgccgcaggatgtgatgaacaaactgggcgcggatattctgcgtctgtgggtggcatcaaccgact

SEQ ID NO: 285202 - DNA, 75 bp, synthetic construct
  source 1..75: mol_type = other DNA
gtgctggcggataccttcctcgccaacgtgacgctgggacgtgatatctccgaagaacgcgtctggcaggcgctg

SEQ ID NO: 285203 - DNA, 75 bp, synthetic construct
  source 1..75: mol_type = other DNA
tcccgcgtcactaatgacactgaagtgatccgcgacctctacgttaccgtagtggcaactgtcctgcgtagcgcc

SEQ ID NO: 285204 - DNA, 75 bp, synthetic construct
  source 1..75: mol_type = other DNA
gctggcggaatatgcgccaaaaggtaagcgcggaattatctcctcatttgtggctatgggaactaactgcggaac

SEQ ID NO: 285205 - DNA, 75 bp, synthetic construct
  source 1..75: mol_type = other DNA
ggctaaatcgaccgttgccgccgttatcgaatatctcggtttacaggaaacggtaaaccgagccgggaacgccgt

SEQ ID NO: 285206 - DNA, 75 bp, synthetic construct
  source 1..75: mol_type = other DNA
gactggcaaaagaccggaacggagcagatattcccaataagccgttgtttatccaaaacctcggtttacgagaac

SEQ ID NO: 285207 - DNA, 75 bp, synthetic construct
  source 1..75: mol_type = other DNA
aatggaagaagtggcaaaacgcgttgaagttgacggcatccaggcgtggtgggatcttgatgcgaaagagatcct

SEQ ID NO: 285208 - DNA, 75 bp, synthetic construct
  source 1..75: mol_type = other DNA
caccgctgccgagttccgcgccaagtgccgcgaatacgctgcgacccaggttgacggtcaacgcaaagactttat

SEQ ID NO: 285209 - DNA, 75 bp, synthetic construct
  source 1..75: mol_type = other DNA
atcgtcaccggacaggcgggcgacggcattactatgcagggctcgcaattagcgcagacgctgggcctggtgtaa

SEQ ID NO: 285210 - DNA, 75 bp, synthetic construct
  source 1..75: mol_type = other DNA
agagcgaggtgaaatgctctctgcatcaggggattcattttataacgaaaaaactgataactcctgtttgcgtga

SEQ ID NO: 285211 - DNA, 75 bp, synthetic construct
  source 1..75: mol_type = other DNA
ctgaaccgcatgaaagtgaaaaggtagataatcccggtattattgataaagagttcttcaataaaatcggtgagg

SEQ ID NO: 285212 - DNA, 75 bp, synthetic construct
  source 1..75: mol_type = other DNA
agcgcctttaaacagtcctgcgctgaccggaacgccaacaacgccaactgcgccaaaagggactaataatactca

SEQ ID NO: 285213 - DNA, 75 bp, synthetic construct
  source 1..75: mol_type = other DNA
agcacgtctgaaacattggccgcgacatcgaaagcggttaaggcggtaatggatgaaacaaataagaaagcccca

SEQ ID NO: 285214 - DNA, 75 bp, synthetic construct
  source 1..75: mol_type = other DNA
gaccgttgccgccgttatcgaatacctcggtttacgagaactcggcacaagcggggagaaaataccgttactcag

SEQ ID NO: 285215 - DNA, 75 bp, synthetic construct
  source 1..75: mol_type = other DNA
actaatcgacaaacattcagcggtggcctttctggtgaactatccggcaatgcttctacagctgcaaaattaaaa

SEQ ID NO: 285216 - DNA, 75 bp, synthetic construct
  source 1..75: mol_type = other DNA
agaactcggcacaagcggggagaaaataccgttactcagtacagcgaatacctggaccaatcgacaaacattcag

SEQ ID NO: 285217 - DNA, 75 bp, synthetic construct
  source 1..75: mol_type = other DNA
ggcggtattttttatcgttcagcccgtgatggttatggttttgaagccgactggtcagagttttacaccacgacc

SEQ ID NO: 285218 - DNA, 75 bp, synthetic construct
  source 1..75: mol_type = other DNA
atctggaaggttctgaccaacaccgtggctggttcatgtcttctctgatgatctccaccgcgatgaagggcaaag

SEQ ID NO: 285219 - DNA, 75 bp, synthetic construct
  source 1..75: mol_type = other DNA
tcaaagtcacctatacgtggcttggtatcgcggtggcgatggcctttaccagtattccgtttgtggtgcgtaccg

SEQ ID NO: 285220 - DNA, 75 bp, synthetic construct
  source 1..75: mol_type = other DNA
tgcagccggtgctggaagagttaggcccggaatatgaagaagcggcagaaacgctcggcgcaacgcgctggcaga

SEQ ID NO: 285221 - DNA, 75 bp, synthetic construct
  source 1..75: mol_type = other DNA
tcgctcaatcgctttatgggactggtatctcagcgcaaactgagatatgcagatgataaaccctggaccacagcg

SEQ ID NO: 285222 - DNA, 75 bp, synthetic construct
  source 1..75: mol_type = other DNA
atgtggcccgcaggaaaaaacgtcgattctctgtactgttcattgactgggaagcccagtaccagtgtaccgttg

SEQ ID NO: 285223 - DNA, 75 bp, synthetic construct
  source 1..75: mol_type = other DNA
gatgtggcccgcaggaaaaaacgtcgtttctctgttctgttcattgactgggaggcccagtaccagtgcactatt

SEQ ID NO: 285224 - DNA, 75 bp, synthetic construct
  source 1..75: mol_type = other DNA
gcaaactgagatatgcagatgataaaccctggaccacagcgtcacctgaagggttttattacaccttgtatccgt

SEQ ID NO: 285225 - DNA, 75 bp, synthetic construct
  source 1..75: mol_type = other DNA
gacgtttgaagaatttgttccggcattttcttcctggtttgccggtaaccggtgtggagtggcaatactgactgg

SEQ ID NO: 285226 - DNA, 75 bp, synthetic construct
  source 1..75: mol_type = other DNA
tgctgccgggctttaccttaagcctcggcaccagtctgctgtttgtgtgcctgattttgctgctgccgctctccg

SEQ ID NO: 285227 - DNA, 75 bp, synthetic construct
  source 1..75: mol_type = other DNA
tctggctttatcacattcttgagcctgacacctgggccagaatgtgtgcccgggtttccggtgctgccagtgggg

SEQ ID NO: 285228 - DNA, 75 bp, synthetic construct
  source 1..75: mol_type = other DNA
tgggtggctcttcccttgaccacagtaaacggtgtctcgcagtttcagccagagtggatatgctgggaacccggt

SEQ ID NO: 285229 - DNA, 75 bp, synthetic construct
  source 1..75: mol_type = other DNA
gatgtggtgcggccatactgaccggcgttcgtgcagatgagtcccttaaccgttttatggcactcacatcacaga

SEQ ID NO: 285230 - DNA, 75 bp, synthetic construct
  source 1..75: mol_type = other DNA
accattgaacatattcagaaaatgcgggaaatgtaccgggatgtgacggataccttttactgggtggcacttccc

SEQ ID NO: 285231 - DNA, 75 bp, synthetic construct
  source 1..75: mol_type = other DNA
gtccgaacaaaccccggcactatgagcgttatctgcaacgaatgaaggaaaggaggaaagaatgggggattctgt

SEQ ID NO: 285232 - DNA, 75 bp, synthetic construct
  source 1..75: mol_type = other DNA
gcacaggggaaaatgttctgtcagcagcaatccatcgcattgaatggttgttcgaaacgtttaatgaggtctgct

SEQ ID NO: 285233 - DNA, 75 bp, synthetic construct
  source 1..75: mol_type = other DNA
gatggaagaagtggcaaaacgcgttgaagttgacggcattcaggcgtggtgggatctcgatgcgaaagagatcct

SEQ ID NO: 285234 - DNA, 75 bp, synthetic construct
  source 1..75: mol_type = other DNA
gctgctgcacgttgagaaaatgcagcacagctatccgtgctgctggcgtcacaaaacgccgatcatcttccgcgc

SEQ ID NO: 285235 - DNA, 75 bp, synthetic construct
  source 1..75: mol_type = other DNA
cgtttatgggcttcgacgttccggcaattcttggcgatcacgttacgctggatgccggtaccggtgccgttcaca

SEQ ID NO: 285236 - DNA, 75 bp, synthetic construct
  source 1..75: mol_type = other DNA
gccggaaaaaacggcggaacattaccggaacaaaatagccgtatatttgcactggtaccagacacatggatatcc

SEQ ID NO: 285237 - DNA, 75 bp, synthetic construct
  source 1..75: mol_type = other DNA
tgtatgacctgatgttcagagcaggcatttcattacggaacatgcgtgtctgtgaaccctttggccctgaacagc

SEQ ID NO: 285238 - DNA, 75 bp, synthetic construct
  source 1..75: mol_type = other DNA
cttcgcagcataagctacgctatgcggatgataaaccatggacgactgcatcacaggacggtttttactacacga

SEQ ID NO: 285239 - DNA, 75 bp, synthetic construct
  source 1..75: mol_type = other DNA
gtctacctgcgctggtatcagacgcggggcttcccggatgacatcccggatgaacaggagaatgacctggggagc

SEQ ID NO: 285240 - DNA, 75 bp, synthetic construct
  source 1..75: mol_type = other DNA
tatgcctgtctttttcaggtggaaaggattccactgtgcttttccatcttgtggcagaggtggcccgcaggagaa

SEQ ID NO: 285241 - DNA, 75 bp, synthetic construct
  source 1..75: mol_type = other DNA
cctgcgttggtatcagacgcggggcttcccggatgacattccggatgaacaggagaatgacctggggagccggga

SEQ ID NO: 285242 - DNA, 75 bp, synthetic construct
  source 1..75: mol_type = other DNA
aaagacagccgaaccgtcaggcgctgggttgggggggatacacccattcctttttcggcctgggctattctggtt

SEQ ID NO: 285243 - DNA, 75 bp, synthetic construct
  source 1..75: mol_type = other DNA
aaccgtctgggcaatttcgcggtggaaaacggtaaggctgacggcgttgttctggagtccggcggtcgcctggat

SEQ ID NO: 285244 - DNA, 75 bp, synthetic construct
  source 1..75: mol_type = other DNA
gacggtaaggacaacgccggttatgtgaagttcgggcatggcagtgcacaacatgtgcgtgccggtttccgtctg

SEQ ID NO: 285245 - DNA, 75 bp, synthetic construct
  source 1..75: mol_type = other DNA
aaccaccattatcttatggaagactataacttgtggcttcgttgttatgcggcaggtttcgctatggataatgtt

SEQ ID NO: 285246 - DNA, 75 bp, synthetic construct
  source 1..75: mol_type = other DNA
ggtgataccgggcagaacgtctacggagatgccgtacgcaccaccatcaataaaaatggtcgtcagattgtggct

SEQ ID NO: 285247 - DNA, 75 bp, synthetic construct
  source 1..75: mol_type = other DNA
gggtggatgacggcggtaccctggcagtgtctgccggtggtaaggcaacagatgtcaccatgacatccggtggtg

SEQ ID NO: 285248 - DNA, 75 bp, synthetic construct
  source 1..75: mol_type = other DNA
attgttaacgcaggggagattcgctttgataatcagacgacacaggatgccgcgctgagccgtgctgttgcaaaa

SEQ ID NO: 285249 - DNA, 75 bp, synthetic construct
  source 1..75: mol_type = other DNA
cgttctggaaaatggcggtcgcctggatgtactggagggccattcagcgcagaaaacacgggtggatgacggcgg

SEQ ID NO: 285250 - DNA, 75 bp, synthetic construct
  source 1..75: mol_type = other DNA
cgcgtcgggccgatgatctccaccgtgacttataacgacaatggcaccaaacgcaaagtcatgtacgaaggttct

SEQ ID NO: 285251 - DNA, 75 bp, synthetic construct
  source 1..75: mol_type = other DNA
gggcaaccggaaaaaccatcctgaatctggtgaacgccggcaacagtggtacggggctggcgaccaccggtaagg

SEQ ID NO: 285252 - DNA, 75 bp, synthetic construct
  source 1..75: mol_type = other DNA
tcaccagtacggcggcaaccgtcaccggcagcaaccgtctgggcaatttcactgtggaaaacggtaatgctgacg

SEQ ID NO: 285253 - DNA, 75 bp, synthetic construct
  source 1..75: mol_type = other DNA
atggcaccatcagcctgcgtgtacgcccggatatggcacagaacaatgctgacagactggtcattgacggcggca

SEQ ID NO: 285254 - DNA, 75 bp, synthetic construct
  source 1..75: mol_type = other DNA
gcggcacggccctgaagctgaccggcagcacagtgctgaacggtgccattgaccccacgaatgtcaccctgacat

SEQ ID NO: 285255 - DNA, 75 bp, synthetic construct
  source 1..75: mol_type = other DNA
gaattagtcatggatacgcctgtccatggcaagcgtacaggtataatgctcaaccgccgtcgctatcgctgccag

SEQ ID NO: 285256 - DNA, 75 bp, synthetic construct
  source 1..75: mol_type = other DNA
aaccgtgacagcgatgaagactggtacctgcgcagtgaaaatgcttatcgttctgaagtcccccagtatgcctcc

SEQ ID NO: 285257 - DNA, 75 bp, synthetic construct
  source 1..75: mol_type = other DNA
aaccgtgacagcgatgaagactggtacctgcgcagtgaaaatgcatatcgttctgaagtccccctgtatgcctcc

SEQ ID NO: 285258 - DNA, 75 bp, synthetic construct
  source 1..75: mol_type = other DNA
tcatcagaaaaaatatatgattacatcgatataatcattgaagattatgaaaatatcaaagaaaatgcttatctg

SEQ ID NO: 285259 - DNA, 75 bp, synthetic construct
  source 1..75: mol_type = other DNA
atgagggggcgatagccacaggaaccgtcattaatgataagggctggcaggtcgtcaaacccggcgcagtggcaa

SEQ ID NO: 285260 - DNA, 75 bp, synthetic construct
  source 1..75: mol_type = other DNA
aaccgtgacagcgatgaagactggtacctgcgcagtgaatatgcgtatcgttctgaagtccccccgtatgcctcc

SEQ ID NO: 285261 - DNA, 75 bp, synthetic construct
  source 1..75: mol_type = other DNA
aaccgtgacagcgatgaagactggtacctgcgcagtgaatatgcctatcgttctgaagtcccccggtatgcctcc

SEQ ID NO: 285262 - DNA, 75 bp, synthetic construct
  source 1..75: mol_type = other DNA
atggaaaaatccgtcgagctggtaaaggcatatgttcgtgccggcttcagtaaaattcatcttgatgcgtcaatg

SEQ ID NO: 285263 - DNA, 75 bp, synthetic construct
  source 1..75: mol_type = other DNA
gttcagtaaaattcaccttgatgcgtcaatgtcatgtgcgggggatccaataccattagcgccagaaacggttgc

SEQ ID NO: 285264 - DNA, 75 bp, synthetic construct
  source 1..75: mol_type = other DNA
accctgaaccgtgacagcgatgaagactggtacctgcgcagtgaaaatgcttatcgtgctgaagtccccctgtat

SEQ ID NO: 285265 - DNA, 75 bp, synthetic construct
  source 1..75: mol_type = other DNA
gccggataacgaggccaataccggcggacaatggatacaaaatggcggtaccgccaacaacactactgtcaccgg

SEQ ID NO: 285266 - DNA, 75 bp, synthetic construct
  source 1..75: mol_type = other DNA
tgaggatctccaggaatgccaggccgttccggtggcaatcactgagactcctgaccccgtcaaaccggtgacaaa

SEQ ID NO: 285267 - DNA, 75 bp, synthetic construct
  source 1..75: mol_type = other DNA
ccgattaccagacccgggcggcgtatcgggaattagtacgcgatcactttgcaattttgaaagtagggccagcat

SEQ ID NO: 285268 - DNA, 75 bp, synthetic construct
  source 1..75: mol_type = other DNA
gaagtccccctgtatgcctccatgctgacacaggcaatggactatgaccggattgtggcaggctcccgcagccat

SEQ ID NO: 285269 - DNA, 75 bp, synthetic construct
  source 1..75: mol_type = other DNA
tcgcggcctgcaaagtccggtggatgtgctgaccttcgaaggtcgcgaacaactgagtaccccgttccgctacga

SEQ ID NO: 285270 - DNA, 75 bp, synthetic construct
  source 1..75: mol_type = other DNA
gcgagcggcaccagatgcgcggtcaggacttcgtgtttaacctcaaaagcgaatacccgtcccgtgaacaggtga

SEQ ID NO: 285271 - DNA, 75 bp, synthetic construct
  source 1..75: mol_type = other DNA
cggtcaggacttcgtgtttaacctcaaaagcgaatacccggcccgcgaacaggtgatgcagtacggtgaggacga

SEQ ID NO: 285272 - DNA, 75 bp, synthetic construct
  source 1..75: mol_type = other DNA
ttgtgcacaccgtaatggcgggctacgtgaccggggccatgtttattatggcgatcagcgcctggtatttactgc

SEQ ID NO: 285273 - DNA, 75 bp, synthetic construct
  source 1..75: mol_type = other DNA
ccacaaatcgtcgaaaaaatcctgcgcgagcggcaccagatgcgcggtcaggacttcgtgtttaacctcaaaagc

SEQ ID NO: 285274 - DNA, 75 bp, synthetic construct
  source 1..75: mol_type = other DNA
cagagcggctatgagcgcggactgacgctgccgcttcgccatccttcagggctgtttgatggtgaaacggaagcc

SEQ ID NO: 285275 - DNA, 75 bp, synthetic construct
  source 1..75: mol_type = other DNA
aacgttggcgcttattgtcggtgctgttgtcggcgtcattgcgggtgtactttgcgcccgttatgtcggttctcc

SEQ ID NO: 285276 - DNA, 75 bp, synthetic construct
  source 1..75: mol_type = other DNA
ctgcaaatcgttggcgatcacgccagccagtccacctatgatcaggtgcgccaccagttagggttagatcaaccg

SEQ ID NO: 285277 - DNA, 75 bp, synthetic construct
  source 1..75: mol_type = other DNA
cggcctccggtttgggtatagaaatattggacgcaaatatgggtaatgactccaacttattgatagtgttttatg

SEQ ID NO: 285278 - DNA, 75 bp, synthetic construct
  source 1..75: mol_type = other DNA
ggctacgagcgcgggctgacgctgccgcttcgccatccttctgggctgtttgatggtgaaacggaagccgtatgg

SEQ ID NO: 285279 - DNA, 75 bp, synthetic construct
  source 1..75: mol_type = other DNA
cctgacatttatttcacgcctgctgtcggaagtgggtatctggttccgcttcgccactgacgcgcggctgaaaat

SEQ ID NO: 285280 - DNA, 75 bp, synthetic construct
  source 1..75: mol_type = other DNA
gctggatttcgccgtgcggacactgactctgctgggaaattccgtccccattttttggcttggtctgctgatgct

SEQ ID NO: 285281 - DNA, 75 bp, synthetic construct
  source 1..75: mol_type = other DNA
gtcatctcggtcacgataacaacggcggtattgcccgtggagccacgccggaaagcagcggcagctatggcttcg

SEQ ID NO: 285282 - DNA, 75 bp, synthetic construct
  source 1..75: mol_type = other DNA
gctgggttcgctggaaaccggtctgcccttcagtatcactgacaacctgatgctggagccacaactgcagtatac

SEQ ID NO: 285283 - DNA, 75 bp, synthetic construct
  source 1..75: mol_type = other DNA
gcggtgtactgctggccgattccggtgccgctgtcagtggtacccggagcgacggaacggcattccgtatcgggg

SEQ ID NO: 285284 - DNA, 75 bp, synthetic construct
  source 1..75: mol_type = other DNA
ttgcccgtggggccacgccggaaagcagcggcagctatggcttcgtccgtctggagagtgacctgctcagaacag

SEQ ID NO: 285285 - DNA, 75 bp, synthetic construct
  source 1..75: mol_type = other DNA
acactgttgtgaacagtgacggctggcagattgtcaaaaacgggggtgtggccgggaataccaccgttaatcaga

SEQ ID NO: 285286 - DNA, 75 bp, synthetic construct
  source 1..75: mol_type = other DNA
gggcatcgaagcggtgaaaggtgttaaagcgaaaaccatgcacgatgagacggcgaaagatgacacgcgctacgg

SEQ ID NO: 285287 - DNA, 75 bp, synthetic construct
  source 1..75: mol_type = other DNA
cgataccctgaccatccgtgaaggtgatgcactcctgcagggaggcgctcttaccggtaacggcagggtggaaaa

SEQ ID NO: 285288 - DNA, 75 bp, synthetic construct
  source 1..75: mol_type = other DNA
ccagaaaggcaaactgcaggtgaacgccggtggtacagccacgaatgtcaccctgaagcagggcggcgcactggt

SEQ ID NO: 285289 - DNA, 75 bp, synthetic construct
  source 1..75: mol_type = other DNA
taccgccagataaagaagctgtctgggcgtttgcgctggaaaacaaaccggttgaccagccacgcaaagccgacg

SEQ ID NO: 285290 - DNA, 75 bp, synthetic construct
  source 1..75: mol_type = other DNA
agttagaagtaaattctgcccaaaaattaattaatgcagggaatcaacgcttaaagattttaacgatcgcttatt

SEQ ID NO: 285291 - DNA, 75 bp, synthetic construct
  source 1..75: mol_type = other DNA
ctgccggtggcccacgcaccagtaccatgcaagttaatcagtacaacatcggcaatgaacaggatgccgcgcaga

SEQ ID NO: 285292 - DNA, 75 bp, synthetic construct
  source 1..75: mol_type = other DNA
tgcgtgaactgccggtgaactggtgggtacagccttctgttatccgcaccttcagctcccggggagacatgagca

SEQ ID NO: 285293 - DNA, 75 bp, synthetic construct
  source 1..75: mol_type = other DNA
gccggacagtgaagaaaacaccggtgggcaatggatacagaatagcgggatagccggaaataccactgtcaccac

SEQ ID NO: 285294 - DNA, 75 bp, synthetic construct
  source 1..75: mol_type = other DNA
ccggtgtggcgattgcgctgtctcttgctgctgtcacatcagttccggcactggctgctgacacggttgtacagg

SEQ ID NO: 285295 - DNA, 75 bp, synthetic construct
  source 1..75: mol_type = other DNA
aacgacttccgcgcccggggctggggctggctgggttcactggaaaccggtctgcccttcagtatcactgacaac

SEQ ID NO: 285296 - DNA, 75 bp, synthetic construct
  source 1..75: mol_type = other DNA
tcaggccggttatgccaacagtgtcagcggcaacagcgctgaaggctataacggtcaggccacgctgaatgtgac

SEQ ID NO: 285297 - DNA, 75 bp, synthetic construct
  source 1..75: mol_type = other DNA
cgtgcccccctgcgtgacagagcaaaacacagtgtgcgtgaactgccggtgaactggtgggtacagccttccgtt

SEQ ID NO: 285298 - DNA, 75 bp, synthetic construct
  source 1..75: mol_type = other DNA
cagtgcacaacatgtgcgtgccggtttccgtctgggcagccaccacgatatgacctttggtgaaggcacctcatc

SEQ ID NO: 285299 - DNA, 75 bp, synthetic construct
  source 1..75: mol_type = other DNA
ggatgaatgaaactgcaaggagtagttttcgacctggatggtgtaatcaccgataccgcgcatctgatttccagg

SEQ ID NO: 285300 - DNA, 75 bp, synthetic construct
  source 1..75: mol_type = other DNA
tgatgctggagccacggctgcagtacacctggcaggggctttcgctggatgacggtaaggacaacgccggttatg

SEQ ID NO: 285301 - DNA, 75 bp, synthetic construct
  source 1..75: mol_type = other DNA
gtgccacctggaatattcccgataacgccacggtgcagtcggtggtggatgacctcagccatgccggacagattc

SEQ ID NO: 285302 - DNA, 75 bp, synthetic construct
  source 1..75: mol_type = other DNA
ccacaacgatatgacctttggtgaaggcacctcatcccgtgacaccctgcgcgacagtacaaaacacggtgtgag

SEQ ID NO: 285303 - DNA, 75 bp, synthetic construct
  source 1..75: mol_type = other DNA
ggccggttatgcccacagcgtcagcggcagcagcgctgaagggtataacggtcaggccacactgaatgtgacctt

SEQ ID NO: 285304 - DNA, 75 bp, synthetic construct
  source 1..75: mol_type = other DNA
taacgccagcggtatgcgctcggtggggatcggcgcgggcttaaccggggcgcaattactgttgccttcaacgga

SEQ ID NO: 285305 - DNA, 75 bp, synthetic construct
  source 1..75: mol_type = other DNA
aatacaactaagagacattactgaatcaaaaatttattcagcaatgcagaaaatgacgaaccggcgtcatgagga

SEQ ID NO: 285306 - DNA, 75 bp, synthetic construct
  source 1..75: mol_type = other DNA
gccggtgaactggtgggtacagccttctgttatccgcactttcagctctcggggtgacatgagcatgggtacagc

SEQ ID NO: 285307 - DNA, 75 bp, synthetic construct
  source 1..75: mol_type = other DNA
tgcacaacggcggtacagcgtctgacactgttgtgaacagtgacggctggcagattgtcaaaaacgggggtgtgg

SEQ ID NO: 285308 - DNA, 75 bp, synthetic construct
  source 1..75: mol_type = other DNA
gccggataacgaggccaataccggcgggcaatgggtacaggatggcggaacagccaacaaaacaactgtcaccag

SEQ ID NO: 285309 - DNA, 75 bp, synthetic construct
  source 1..75: mol_type = other DNA
ctgttgtggagggtaaagctgataatgtcgtactggaaaatggcggacgtctggatgtgctgagcggacacacag

SEQ ID NO: 285310 - DNA, 75 bp, synthetic construct
  source 1..75: mol_type = other DNA
gtaaaggcgccagtatggtactgaatggtgatgtggtcagtaccggcgatattgttaacgcaggggagattcgct

SEQ ID NO: 285311 - DNA, 75 bp, synthetic construct
  source 1..75: mol_type = other DNA
gcccgtggagccacgccggaaagcagcggcagctatggcttcgtccgtctggagggtgacctgctcagaacagag

SEQ ID NO: 285312 - DNA, 75 bp, synthetic construct
  source 1..75: mol_type = other DNA
gaaggcgatgcactcctgcagggaggctctctcaccggtaacggcagcgtggaaaaatcaggaagtggcacactc

SEQ ID NO: 285313 - DNA, 75 bp, synthetic construct
  source 1..75: mol_type = other DNA
cgtatccatggggaatggcggtgtactgctggccgattccggtgccgctgtcagtggtacccggagcgacggaac

SEQ ID NO: 285314 - DNA, 75 bp, synthetic construct
  source 1..75: mol_type = other DNA
aaaatataaaaaattcagttatcttaatgcatcgtggaatggaacgtatggaacatttggtgcgaactacaacta

SEQ ID NO: 285315 - DNA, 75 bp, synthetic construct
  source 1..75: mol_type = other DNA
agcagacagtggtgccactgttgaggggaccaatgccagcggtaagttcagtattgatggtatctccggtcaggc

SEQ ID NO: 285316 - DNA, 75 bp, synthetic construct
  source 1..75: mol_type = other DNA
ctgccagaaacaccaccgtcaccacaaatggttgtcaggtcgtgggggtggggggaacagccagtgatacggtta

SEQ ID NO: 285317 - DNA, 75 bp, synthetic construct
  source 1..75: mol_type = other DNA
cacgctgacgctgaacgacagtaccgtcaccacggatgtcatcgctcagcgcggtacagccctgaagctgaccgg

SEQ ID NO: 285318 - DNA, 75 bp, synthetic construct
  source 1..75: mol_type = other DNA
aaaatcaggaagtggcacactcactgtcagcaacaccacactcacccagaaagccgtcaacctgaatgaaggcac

SEQ ID NO: 285319 - DNA, 75 bp, synthetic construct
  source 1..75: mol_type = other DNA
tcgtccgtctggagggtgacctgctgagaacagaggttgccggtatgtcactgacgacaggagtgtatggtgccg

SEQ ID NO: 285320 - DNA, 75 bp, synthetic construct
  source 1..75: mol_type = other DNA
atgctgacacaggcaatggactatgaccggactctggcaaactcccgcagccatcagaccggtataaatagtgaa

SEQ ID NO: 285321 - DNA, 75 bp, synthetic construct
  source 1..75: mol_type = other DNA
tccatgttgacacaggcaatggactatgaccggattctggcaggctcccgcagccatcagaccggtgtaaacggt

SEQ ID NO: 285322 - DNA, 75 bp, synthetic construct
  source 1..75: mol_type = other DNA
agcgacggaacggcattccgtatcggaggcggtcaggcggatgccctgatgctggaaaaaggcagttcattcacg

SEQ ID NO: 285323 - DNA, 75 bp, synthetic construct
  source 1..75: mol_type = other DNA
gcggggtactgctggccgattccggggccgctgtcagtggtacccggagcgacggaacggcattccgtatcgggg

SEQ ID NO: 285324 - DNA, 75 bp, synthetic construct
  source 1..75: mol_type = other DNA
ctgacgacaggagtgtatggtgccgcaggccattcttccgttgatgttaaggatgatgacggctcccgcgccggc

SEQ ID NO: 285325 - DNA, 75 bp, synthetic construct
  source 1..75: mol_type = other DNA
cacctggaatatccccgataacgccacggttcagtcggtggtggatgacctcagccatgccggacagattcattt

SEQ ID NO: 285326 - DNA, 75 bp, synthetic construct
  source 1..75: mol_type = other DNA
gtcctcggtacggccaacggaatgaccatcagtaccgggctggagtatgggccggataacgaggccaataccggc

SEQ ID NO: 285327 - DNA, 75 bp, synthetic construct
  source 1..75: mol_type = other DNA
ggttatgcccacagtgtcagcggcagcagcgctgaaggctataacggtcaggccacgctgaatgtgaccttctga

SEQ ID NO: 285328 - DNA, 75 bp, synthetic construct
  source 1..75: mol_type = other DNA
ccgacacggttgtgaataccggcgcggaagggggaccggatgcagaaaatggtgataccgggcagtttgttcgcg

SEQ ID NO: 285329 - DNA, 75 bp, synthetic construct
  source 1..75: mol_type = other DNA
actactgtcaccggtggtggtcttcagagagtgaatgccggaggaagcgtttcagacacggttatcagtgccgga

SEQ ID NO: 285330 - DNA, 75 bp, synthetic construct
  source 1..75: mol_type = other DNA
ctgccggcaacaccaccataaatcagaacggcgagctgaaggttcatgccggcggagaagcgtctgatgtcaccc

SEQ ID NO: 285331 - DNA, 75 bp, synthetic construct
  source 1..75: mol_type = other DNA
gctcagcgcggtacagccctgaagctgaccggcagcacagtgctgaacggtgccattgaccccacgaatgtcacc

SEQ ID NO: 285332 - DNA, 75 bp, synthetic construct
  source 1..75: mol_type = other DNA
taacggcggagggaaaagccagtgcagagaaactgttcgcgatggcagaacatttgttagcactgggtcagccga

SEQ ID NO: 285333 - DNA, 75 bp, synthetic construct
  source 1..75: mol_type = other DNA
tgtggcccagggaacccgccacagcatgaaagcctcatcggacaataacgacttccgcgtccggggctggggctg

SEQ ID NO: 285334 - DNA, 75 bp, synthetic construct
  source 1..75: mol_type = other DNA
gccagataacgaggccaataccggcgggcaatgggtacaggatggcggaacagccaacaaaacgactgtcaccag

SEQ ID NO: 285335 - DNA, 75 bp, synthetic construct
  source 1..75: mol_type = other DNA
tgttgtaaacagtgacggctggcagattgtcaaaaacgggggtgtggccgggaataccaccgttaatcagaaggg

SEQ ID NO: 285336 - DNA, 75 bp, synthetic construct
  source 1..75: mol_type = other DNA
ggtacagccacgaatgtcaccctgaagcagggcggcgcactggtcaccagtactgctgcaactgtcaccggcagc

SEQ ID NO: 285337 - DNA, 75 bp, synthetic construct
  source 1..75: mol_type = other DNA
cgtgaaggcgatgcactcctgcagggaggcgctcttaccggtaacggcagcgtggaaaaatcaggaagtggcaca

SEQ ID NO: 285338 - DNA, 75 bp, synthetic construct
  source 1..75: mol_type = other DNA
cggattctggcaggctcccgcagccatcagaccggtgtaaacgttaaaaataacagcgtccgtctcagcattcag

SEQ ID NO: 285339 - DNA, 75 bp, synthetic construct
  source 1..75: mol_type = other DNA
actacaccctgaaccgtgacagcgatgaagactggtacctgcgcagtgaaaatgcttatcgtgctgaagtccccc

SEQ ID NO: 285340 - DNA, 75 bp, synthetic construct
  source 1..75: mol_type = other DNA
ggtaagttcagtattgatggcatatccggtcaggccagcggcctgctgctggaaaatggcggcagctttacggtt

SEQ ID NO: 285341 - DNA, 75 bp, synthetic construct
  source 1..75: mol_type = other DNA
ggtggtcttcagagagtgaatgccggaggaagcgtttcagacacggttatcagtgccggaggcggacagagcctt

SEQ ID NO: 285342 - DNA, 75 bp, synthetic construct
  source 1..75: mol_type = other DNA
gcgaactggcggtacaggttgctgaggcaatgacggatttctctaaacacatgcgcggtgtaaacgtggttgccc

SEQ ID NO: 285343 - DNA, 75 bp, synthetic construct
  source 1..75: mol_type = other DNA
tttaacatgattgatgactccaggttaaattcacctcaaaacgaagtgaccgtacatctgacaatatctaataaa

SEQ ID NO: 285344 - DNA, 75 bp, synthetic construct
  source 1..75: mol_type = other DNA
agaactggcagccacaccaaaggctgttaaaaccgtcatggacgagacgaaaacaaaagcgccgctggacagccc

SEQ ID NO: 285345 - DNA, 75 bp, synthetic construct
  source 1..75: mol_type = other DNA
atgatgagttatgtagactggccgccattaattttgaggcacacgtactacatggctgaattcgaaaccactttt

SEQ ID NO: 285346 - DNA, 75 bp, synthetic construct
  source 1..75: mol_type = other DNA
tacgaaaaaccatctccaattcaggcagagtgtattccacatctgctgaatggccgcgacgtactgggtatggcc

SEQ ID NO: 285347 - DNA, 75 bp, synthetic construct
  source 1..75: mol_type = other DNA
cgcgcgatcgtaacgaccgtggcccgcgtggtgaccgtgaagatcgtccgcgtcgtgaacgtcgtgatgttggcg

SEQ ID NO: 285348 - DNA, 75 bp, synthetic construct
  source 1..75: mol_type = other DNA
ttatttacgacggcgattcgctggcgttcctgctgtcccggacggcgggcaacggcccgtcctcatattacaaat

SEQ ID NO: 285349 - DNA, 75 bp, synthetic construct
  source 1..75: mol_type = other DNA
gctaaagccagtcaggatgcgagcgcaggcaatgcgcaggaagcgaaacagcacagggacgaggcgcaacggata

SEQ ID NO: 285350 - DNA, 75 bp, synthetic construct
  source 1..75: mol_type = other DNA
catcgccggaagttctggacaccctgaacgagctggcagcggcgctgggcaatgacccgaactttgcgacgacaa

SEQ ID NO: 285351 - DNA, 75 bp, synthetic construct
  source 1..75: mol_type = other DNA
gcgcaggaagcgaaacagcacagggacgaggcgcaacggatagttgatgacctgaagggaagcaatgcatccacg

SEQ ID NO: 285352 - DNA, 75 bp, synthetic construct
  source 1..75: mol_type = other DNA
aggaagcagcatcttcggctgcgaccagtgcagaaaatgcggcaaatgttgcgctgggccatgaaaataacgctg

SEQ ID NO: 285353 - DNA, 75 bp, synthetic construct
  source 1..75: mol_type = other DNA
ccaccacaccaaccccaccggacgatgcagccggtctggaaacagcgaacgcggcatttgtccgcaaactgctcg

SEQ ID NO: 285354 - DNA, 75 bp, synthetic construct
  source 1..75: mol_type = other DNA
cactctggacctctctaaactgagcggtctggttctggatgaagctgacgaaatgctgcgcatgggcttcatcga

SEQ ID NO: 285355 - DNA, 75 bp, synthetic construct
  source 1..75: mol_type = other DNA
tcacaaattagaatccttgccgaatggctgacagtcttacgcgaagagcatcctgacttgctgattatggtcgat

SEQ ID NO: 285356 - DNA, 75 bp, synthetic construct
  source 1..75: mol_type = other DNA
cgttgagaacataagcggcggtaggtttggtcttggcgcgatgtttggtgcgcctccggtatcaaggtttcagag

SEQ ID NO: 285357 - DNA, 75 bp, synthetic construct
  source 1..75: mol_type = other DNA
acgaaataagcttatatctcaggagactgacacacaggcgcgtcttacaagaatagaaaaagagttggccgagac

SEQ ID NO: 285358 - DNA, 75 bp, synthetic construct
  source 1..75: mol_type = other DNA
tcgccgtgcctgcgattaaacagaacggcctgaatgtctttgccgtgccgaccgtgttgctgagcaatacgccgc

SEQ ID NO: 285359 - DNA, 75 bp, synthetic construct
  source 1..75: mol_type = other DNA
gcgtgctggaggtgatgcgctatacccagcagtatggtagcgatgaattgattttgccgccgctgactgaagcat

SEQ ID NO: 285360 - DNA, 75 bp, synthetic construct
  source 1..75: mol_type = other DNA
gcgtactggaagtgatgcgctacacccagcagcatgagagcgatgaattgattttgccgccgctacgtgactgtc

SEQ ID NO: 285361 - DNA, 75 bp, synthetic construct
  source 1..75: mol_type = other DNA
gcgtaacattgcactaccgtcacggctggctgcactgcgaagttaacgatgatggaccggggatcgcacccgaca

SEQ ID NO: 285362 - DNA, 75 bp, synthetic construct
  source 1..75: mol_type = other DNA
aaacagtgaaagccagctgccagacagcggcagtgaggaccaggtcgcgacgctgattaccacgttgggaaatct

SEQ ID NO: 285363 - DNA, 75 bp, synthetic construct
  source 1..75: mol_type = other DNA
catggtcggaaaattgtcatggttatcactattggattgatgggcatgtcgaccatgctaataggattaatcccc

SEQ ID NO: 285364 - DNA, 75 bp, synthetic construct
  source 1..75: mol_type = other DNA
ctcaccgatggagagcgtatcgaacgttgttgttgatgctctcgttggtgggatccttggtgctggtgcacagct

SEQ ID NO: 285365 - DNA, 75 bp, synthetic construct
  source 1..75: mol_type = other DNA
tctcttctgtagcaatgagattagcagatccattcaatgcgatttctatgtttattccgttcggcgctgtcgttc

SEQ ID NO: 285366 - DNA, 75 bp, synthetic construct
  source 1..75: mol_type = other DNA
gctgaacgtcgtgagcgtgtcgcgtcgttatttggtaactacagcgtcaaaaagcgtatgcgcgacattagcgct

SEQ ID NO: 285367 - DNA, 75 bp, synthetic construct
  source 1..75: mol_type = other DNA
cggattcggtcaggcatttaccagcaccgacgctctggcgtttgacggacaggctgattttgctgaatggctgaa

SEQ ID NO: 285368 - DNA, 75 bp, synthetic construct
  source 1..75: mol_type = other DNA
tatagaatttataccatacttagttcttttgtattttctgaccgtcgaatattctttttttggagcggcgtttgc

SEQ ID NO: 285369 - DNA, 75 bp, synthetic construct
  source 1..75: mol_type = other DNA
agctgagcgcgtctgcgacgatggaaccccagagtgatatccgtgaccgcacaccgggcaggctggccctgtccg

SEQ ID NO: 285370 - DNA, 75 bp, synthetic construct
  source 1..75: mol_type = other DNA
gccttctttgaggatggcacgcagacccgcggagaaacggatgaagaggggtatacagagcgtttttttgtatct

SEQ ID NO: 285371 - DNA, 75 bp, synthetic construct
  source 1..75: mol_type = other DNA
tatggcgactgtagccagaaccgctcacaacctgcacccgggacggtattacaccttttccacacaaacggaaga

SEQ ID NO: 285372 - DNA, 75 bp, synthetic construct
  source 1..75: mol_type = other DNA
aagatagtccagaaagcggtcgataaactcggtgaagccgcaacgctgaccggcgaggcaaaagccagcgcagaa

SEQ ID NO: 285373 - DNA, 75 bp, synthetic construct
  source 1..75: mol_type = other DNA
agaggggatgcagcgctagtattccgcatattgttaatagggtttattttcaattcaatagcacaaatatgtttt

SEQ ID NO: 285374 - DNA, 75 bp, synthetic construct
  source 1..75: mol_type = other DNA
cccgttgtcagtcagctcaggtttaccgccacggtcagaaccctaaaggccatgacagatttcgctgccgtgact

SEQ ID NO: 285375 - DNA, 75 bp, synthetic construct
  source 1..75: mol_type = other DNA
gttaaagaccaaatcgctgaaatggctttcaacggtgccggggttcgctatactgcccgtacgctgaaaatcggc

SEQ ID NO: 285376 - DNA, 75 bp, synthetic construct
  source 1..75: mol_type = other DNA
cccgttgccagtccgttcaggtttaccgtcacgggcagaaccccaaaagacatgatcgattccgcggccgtgact

SEQ ID NO: 285377 - DNA, 75 bp, synthetic construct
  source 1..75: mol_type = other DNA
tgaacgcgaaaacccatcgcggcttgttgttcatgtatgcatgtttgctgggggcgatgatgtgttttatggata

SEQ ID NO: 285378 - DNA, 75 bp, synthetic construct
  source 1..75: mol_type = other DNA
ttcgaggacgcgacggacaaggaagaaatttacctgcacgcacagaaaaatatgcaagtcgttgtgctgaacagc

SEQ ID NO: 285379 - DNA, 75 bp, synthetic construct
  source 1..75: mol_type = other DNA
cctttaatggcgccggggttcgcgataccgccaggacactgaaaattggtattaacaccgttatccggactttaa

SEQ ID NO: 285380 - DNA, 75 bp, synthetic construct
  source 1..75: mol_type = other DNA
aaagcgttttccagcatcgacaggaccgagtttaaaacaggagctgattttctccgctgggtaaaaatggcaaaa

SEQ ID NO: 285381 - DNA, 75 bp, synthetic construct
  source 1..75: mol_type = other DNA
gaatgacggacgccggagcacgttcagttattgccagcaatatagcggatatagccagaaccgctcacaacctgc

SEQ ID NO: 285382 - DNA, 75 bp, synthetic construct
  source 1..75: mol_type = other DNA
gcagaaagcgaacgacaggccgggcaacatgtcgctgatgcgcagaagattaagggggattgccagacgctggcg

SEQ ID NO: 285383 - DNA, 75 bp, synthetic construct
  source 1..75: mol_type = other DNA
aatgacccgaactttgcgacaaccgtcactaaagcactggcaggtaaacagccgcttaatgacgtgttaacggct

SEQ ID NO: 285384 - DNA, 75 bp, synthetic construct
  source 1..75: mol_type = other DNA
taatctggccctatgactctacaggaagcgccgttgaaaatgttagcaaaacactgatttacaatgctggtcgca

SEQ ID NO: 285385 - DNA, 75 bp, synthetic construct
  source 1..75: mol_type = other DNA
tggcactggacacacctgaagccatgcgcacggagcttgagctgaaagcggctgcgacgatggaaccccagaccg

SEQ ID NO: 285386 - DNA, 75 bp, synthetic construct
  source 1..75: mol_type = other DNA
tgatgcagcaggtaatgaaatagccaatgcggcgtttgtccgcaaactgctcgccacgctggttggctcatcacc

SEQ ID NO: 285387 - DNA, 75 bp, synthetic construct
  source 1..75: mol_type = other DNA
acaggtcacagtggaaaccatgcgcaatgagcttgagctgaaaagcgcagcggtaagggacattcagacagacct

SEQ ID NO: 285388 - DNA, 75 bp, synthetic construct
  source 1..75: mol_type = other DNA
aactgcttgctgcgctggttgactcgtccccggaagccctggacacgctgaatgagctggcagcggcgctgggta

SEQ ID NO: 285389 - DNA, 75 bp, synthetic construct
  source 1..75: mol_type = other DNA
tcccgggtaaacacctcagaagtggtgatgcgcacagttgccgacgtggtgacaggaaactgtggcgagtactgt

SEQ ID NO: 285390 - DNA, 75 bp, synthetic construct
  source 1..75: mol_type = other DNA
gactgatgcaccggggacactgaatgcgtttctggatgcaccaaaggatagtgatttacgtccggaggtgatgaa

SEQ ID NO: 285391 - DNA, 75 bp, synthetic construct
  source 1..75: mol_type = other DNA
agatggtggttttctggttggctgggaaaacctgaaggttgatgaggcttcacttattgcgctgattgaagcccg

SEQ ID NO: 285392 - DNA, 75 bp, synthetic construct
  source 1..75: mol_type = other DNA
cagaaaaagcccgctcactgctggcacagaccacagtggaagccatgcgcaatgaacttgaactgaaaagcgcag

SEQ ID NO: 285393 - DNA, 75 bp, synthetic construct
  source 1..75: mol_type = other DNA
aatagccagaaaaagagctgccgaagctcgcaaaatggctgtagctgcgtctagcaaaagaattccaactgctac

SEQ ID NO: 285394 - DNA, 75 bp, synthetic construct
  source 1..75: mol_type = other DNA
agcagacatttacaagggcatttactcgccgctttggtatagctcctattgcataccgaaaactcgctaaggaag

SEQ ID NO: 285395 - DNA, 75 bp, synthetic construct
  source 1..75: mol_type = other DNA
ggttgatatcaatggtgttagtttagaattaaaaacccggaggcatctagctgatattattcatgtaaaatgcat

SEQ ID NO: 285396 - DNA, 75 bp, synthetic construct
  source 1..75: mol_type = other DNA
gttaaacgtcgcttgtgaacaattgcggcaaaatatccatcaggtcgaagaaagtttgcagctattgcaactcaa

SEQ ID NO: 285397 - DNA, 75 bp, synthetic construct
  source 1..75: mol_type = other DNA
tatttattgccgacggcgcaggtaagctggaatttgaggatttaacactacagttgtacatgggcggtactttga

SEQ ID NO: 285398 - DNA, 75 bp, synthetic construct
  source 1..75: mol_type = other DNA
catctgtgaaacaggtgaattcacttgataccgagcatgagcgcaaacaactcaacaacaaagattttgaagcag

SEQ ID NO: 285399 - DNA, 75 bp, synthetic construct
  source 1..75: mol_type = other DNA
atgacgcaatccattcatccaatgatgaacgcgatgaaaggagtcacgccaccagcgccagtggactccagccac

SEQ ID NO: 285400 - DNA, 75 bp, synthetic construct
  source 1..75: mol_type = other DNA
ccgcaacgacgcttgatgatgacattactcttggtccgatgattcgtttcgttaaattcttacaatggggtggtg

SEQ ID NO: 285401 - DNA, 75 bp, synthetic construct
  source 1..75: mol_type = other DNA
caacaatggcgcgagggaaagctgctattaccttcttcagagagcccccagctacttcctgtgactctcgatgca

SEQ ID NO: 285402 - DNA, 75 bp, synthetic construct
  source 1..75: mol_type = other DNA
tgaataatcagggtgtagagaaagtcgtcaattcgggtcaggatgtcagaaatgcagaaggcacatttaacgatc

SEQ ID NO: 285403 - DNA, 75 bp, synthetic construct
  source 1..75: mol_type = other DNA
ttggtgcctctgtagcagaaggtattgcaacgaaacatggggtgagtgcgtctcagatggccagcattgcttcaa

SEQ ID NO: 285404 - DNA, 75 bp, synthetic construct
  source 1..75: mol_type = other DNA
atgtgctctcgtcattggataagaatacccctgttgtgacgaatgaaactgtgggaagagttcagggggctgggg

SEQ ID NO: 285405 - DNA, 75 bp, synthetic construct
  source 1..75: mol_type = other DNA
cctccgccaaccactttctgcgtcaacaacaagatgcgctgaatgcgcagttagccgccttgtttcaggatgatt

SEQ ID NO: 285406 - DNA, 75 bp, synthetic construct
  source 1..75: mol_type = other DNA
acccgcagccgccagaacgccatctaccagaaccagacggtgccgcaaatcgtcgaaaaaatcctgcgcgagcgc

SEQ ID NO: 285407 - DNA, 75 bp, synthetic construct
  source 1..75: mol_type = other DNA
ctgattgattttcaacaacagaaagggaaaacatcacaaaaagcacctgtatctcctgacaaaacccctgtatct

SEQ ID NO: 285408 - DNA, 75 bp, synthetic construct
  source 1..75: mol_type = other DNA
cgacaacaaacagcataacttcatctggtgagataaaaacagcagccaaaggagcaactaaacagcattctgaac

SEQ ID NO: 285409 - DNA, 75 bp, synthetic construct
  source 1..75: mol_type = other DNA
ttgtctggagattcagggggccagtctattttcctcggtttatgtctggggttaaccacctattctgctttatcc

SEQ ID NO: 285410 - DNA, 75 bp, synthetic construct
  source 1..75: mol_type = other DNA
ttccaacgaccggtagcacaagtccagccgtcccttttcagattacgttaagtgaatgcagcaaagggacaacgg

SEQ ID NO: 285411 - DNA, 75 bp, synthetic construct
  source 1..75: mol_type = other DNA
ccttcattgagcttggttttgcccaaacctcaaccacagaaattgctcgtcgggcaaaagtatcaaaaagaacaa

SEQ ID NO: 285412 - DNA, 75 bp, synthetic construct
  source 1..75: mol_type = other DNA
tacaaatagcagaccacagcaagtatatatatatttttctgctgttgatgcctttggtggaagggtcaatcttgc

SEQ ID NO: 285413 - DNA, 75 bp, synthetic construct
  source 1..75: mol_type = other DNA
gacaaggtggacgaccattgcttggcatacgaattggtaatgatgcatttttcactgcacacgccatagctacgc

SEQ ID NO: 285414 - DNA, 75 bp, synthetic construct
  source 1..75: mol_type = other DNA
gcgcagaacaccatcagtcgcgactttacgctgcgttttgccgagctggaatctaccctttgccgggtgttaacc

SEQ ID NO: 285415 - DNA, 75 bp, synthetic construct
  source 1..75: mol_type = other DNA
ccacattattgctgaatgcgtgttcccatgcccctgaacccgcacaggcaaaaggaggttggtatgaactgaata

SEQ ID NO: 285416 - DNA, 75 bp, synthetic construct
  source 1..75: mol_type = other DNA
aggctggcattggtgataatgcaatttcttctgtggctgaattgctacatgatgggagtatagcaactggaaaat

SEQ ID NO: 285417 - DNA, 75 bp, synthetic construct
  source 1..75: mol_type = other DNA
actggaatcttattggaaaatgagccttctttgtgggttaatgaaataattaatcttgtacagtctttgcaaaaa

SEQ ID NO: 285418 - DNA, 75 bp, synthetic construct
  source 1..75: mol_type = other DNA
ttctggcgtcgaaatcacgccgcgcagaaaatggcgaagagcctattaaagagcacctgctgttaacgcgctata

SEQ ID NO: 285419 - DNA, 75 bp, synthetic construct
  source 1..75: mol_type = other DNA
acggctacccatcattaaaacgcgtggtaggggaaacggtagacgttgttcattctgatgatgtgacctgcgtca

SEQ ID NO: 285420 - DNA, 75 bp, synthetic construct
  source 1..75: mol_type = other DNA
ccggcgtggtcgtacacgttcagcttgggcgacttcgtgggcgacaaggggcgtgggctgcaagtagtcgagggt

SEQ ID NO: 285421 - DNA, 75 bp, synthetic construct
  source 1..75: mol_type = other DNA
cctgtatgtcgtactgggtgtactggctcttggtattctggccagtgtcatctttccggaaaagccggaagctga

SEQ ID NO: 285422 - DNA, 75 bp, synthetic construct
  source 1..75: mol_type = other DNA
tatctgggagtggtcaatgtcgccacatatgtcggcataagagaccccggaacgaatgctaccgcacgtcatttg

SEQ ID NO: 285423 - DNA, 75 bp, synthetic construct
  source 1..75: mol_type = other DNA
ctggctcgaaaaggaacgaatccgtcgagaggaagaagcacacaaagccagcgctactgagctgaaatcgattat

SEQ ID NO: 285424 - DNA, 75 bp, synthetic construct
  source 1..75: mol_type = other DNA
ccggcgtggtcgtatacgttcagtcttggcgacttcgttggcgacaaggggcgcgggctgcaagtggtcgagggt

SEQ ID NO: 285425 - DNA, 75 bp, synthetic construct
  source 1..75: mol_type = other DNA
atgaaccaattaccactaatgccaggatatcaccatctggtgattcctgtcccaaccatccctgtatgggcgttt

SEQ ID NO: 285426 - DNA, 75 bp, synthetic construct
  source 1..75: mol_type = other DNA
accgacctgaaagggactggcgacctgttttgtgctcagcttatcagtggtttgctgaaagggaaggcgttaacc

SEQ ID NO: 285427 - DNA, 75 bp, synthetic construct
  source 1..75: mol_type = other DNA
cggcctgaatgtctttgccgtacctaccgtgttgctgagtaatacgccgcattatgactcgttctacggtggtgc

SEQ ID NO: 285428 - DNA, 75 bp, synthetic construct
  source 1..75: mol_type = other DNA
cggctgaaacagtgacggtctttgttgctctgtcggtcggcgccatctttattgacctgttcatgcaccgacatg

SEQ ID NO: 285429 - DNA, 75 bp, synthetic construct
  source 1..75: mol_type = other DNA
aggctgttatcgtgttgttgttcttcattgcggtaaaactgggcctgaacgcgaccgatcacatctggcatcatg

SEQ ID NO: 285430 - DNA, 75 bp, synthetic construct
  source 1..75: mol_type = other DNA
caatggcttttacgccccactcgctgcacctccggttcaatacttgccacagcaagcgcctaagctgattaattc

SEQ ID NO: 285431 - DNA, 75 bp, synthetic construct
  source 1..75: mol_type = other DNA
gtgaatttcttctcaaaaccgaagaaatcgattggaagatcgcccagattggcaagatgaaattcgaattagtgg

SEQ ID NO: 285432 - DNA, 75 bp, synthetic construct
  source 1..75: mol_type = other DNA
atgagataatgcagcactgttttatgggggcactgacgctgcttatgaaacacagctgcagctgtgacatcatgc

SEQ ID NO: 285433 - DNA, 75 bp, synthetic construct
  source 1..75: mol_type = other DNA
cgaaatgcttggctttgaaaaagtcgagaaactgattgagcgcaacgttattgaagtcgcgccgctggcctatat

SEQ ID NO: 285434 - DNA, 75 bp, synthetic construct
  source 1..75: mol_type = other DNA
cgggtaaaacctacctggcagtggctgcggcggttgatgcgctggaacgtcaggaaatccgtcgtattctgctga

SEQ ID NO: 285435 - DNA, 75 bp, synthetic construct
  source 1..75: mol_type = other DNA
ggatgactgggaatcggtattcagtgaattccacgatgccgatgccgatgcgcagaactctcacagctattgctt

SEQ ID NO: 285436 - DNA, 75 bp, synthetic construct
  source 1..75: mol_type = other DNA
tgcggcgttagcggtagatcgcgttatcggcatggaaaacgctatgccgtggaacctgcctgccgatctcgcctg

SEQ ID NO: 285437 - DNA, 75 bp, synthetic construct
  source 1..75: mol_type = other DNA
tttgcgcgtggcaagcttgaagctaaactcgaaggcagaatggaagggcgactagaaggacaactggaaggcaaa

SEQ ID NO: 285438 - DNA, 75 bp, synthetic construct
  source 1..75: mol_type = other DNA
gatatttgcagcatgaaggtaatatacctttttctcaccttaatcggtttaaagtgagattccgtaaagaagata

SEQ ID NO: 285439 - DNA, 75 bp, synthetic construct
  source 1..75: mol_type = other DNA
ttgtagcaaaacacctttttggtcgtcctttcaaagttccactgtctcacttttccaaatacacaggggacgtta

SEQ ID NO: 285440 - DNA, 75 bp, synthetic construct
  source 1..75: mol_type = other DNA
tactccaaatacacaggggacgttaagcagatggtaacggctgctactcgtaccgaccgtggtgggcgtaaggta

SEQ ID NO: 285441 - DNA, 75 bp, synthetic construct
  source 1..75: mol_type = other DNA
caggaaattcgccgtattctgctgactcgtccggcggtagaagccggtgagaaactgggcttcctgcctggcgat

SEQ ID NO: 285442 - DNA, 75 bp, synthetic construct
  source 1..75: mol_type = other DNA
ttgcgttaccgccgcggcagacattctgcgcagcctgtatgtcgatacagccccgatgcgtggtcagattcagga

SEQ ID NO: 285443 - DNA, 75 bp, synthetic construct
  source 1..75: mol_type = other DNA
tcccggcagaccgctacaaagcaaaagaggtggcagaactttactattcacgatgggaaatcgaagtcgggtcca

SEQ ID NO: 285444 - DNA, 75 bp, synthetic construct
  source 1..75: mol_type = other DNA
ctgttcctggcacaggcggacaataatcagctgatacctgacagggttcggtttgacctcagagcagaagtcatg

SEQ ID NO: 285445 - DNA, 75 bp, synthetic construct
  source 1..75: mol_type = other DNA
ttcagggcctggatccaggcgaaaagcggtcgggatgtgacgatcggtgaatttaccgcctctttaactgcgaca

SEQ ID NO: 285446 - DNA, 75 bp, synthetic construct
  source 1..75: mol_type = other DNA
gtagtctttaagctgaaagattgcaaagggccggcgggatacaacgtaaaagtcacgctcacgggggtagaagac

SEQ ID NO: 285447 - DNA, 75 bp, synthetic construct
  source 1..75: mol_type = other DNA
ggttttctggcgctggatgcctcctcggcggcgcagggcgtcgggattggcatggaaaaaaacgacggaacggcg

SEQ ID NO: 285448 - DNA, 75 bp, synthetic construct
  source 1..75: mol_type = other DNA
ctccaggcgaaaagcggccgggaagtgacgatgggtgagtttaccgcctccttaaccgcaacgtttgagtacata

SEQ ID NO: 285449 - DNA, 75 bp, synthetic construct
  source 1..75: mol_type = other DNA
cccggttttctggcgctggatgcctcctccggggcgcagggcgtggggattgggatggaaaaaaccgacggaacg

SEQ ID NO: 285450 - DNA, 75 bp, synthetic construct
  source 1..75: mol_type = other DNA
tttctggcgcttgacccggcatccagcgcgcaaggggtagggattggtatggaaaagtcagatggaacttgggtg

SEQ ID NO: 285451 - DNA, 75 bp, synthetic construct
  source 1..75: mol_type = other DNA
gctggaaattgaacagcaagaagcgtttatgacacttgagcaggagcagcaggttaaaacccgcaccgcagagca

SEQ ID NO: 285452 - DNA, 75 bp, synthetic construct
  source 1..75: mol_type = other DNA
tgaatcgtggcggcgctgcgggtgatgcgagcgcaggtagcgttagtggaggaaaccttgcagagcaggcattgt

SEQ ID NO: 285453 - DNA, 75 bp, synthetic construct
  source 1..75: mol_type = other DNA
cggtcagtcgtcaggatttgaacgttgcaggccagtccgctcgtgtacccgtagtctttaagctgaaagattgta

SEQ ID NO: 285454 - DNA, 75 bp, synthetic construct
  source 1..75: mol_type = other DNA
tttccggcaacttgttaagccgttcctgcacgctggtggttgatggcggaaatctggcagaagtgcattttcctg

SEQ ID NO: 285455 - DNA, 75 bp, synthetic construct
  source 1..75: mol_type = other DNA
tggataccacctcaatcgctcagggcgtcgggattgggatggaaacgaccgacggtgtgcgggtgtcgattaaca

SEQ ID NO: 285456 - DNA, 75 bp, synthetic construct
  source 1..75: mol_type = other DNA
tcttacttccatgatttctttaactatgccgggatccatcgcagcgtaatgctctacaccacgccgaacacctag

SEQ ID NO: 285457 - DNA, 75 bp, synthetic construct
  source 1..75: mol_type = other DNA
aaattgattaaccactacttcccggaagccagtcatcaggttgtattactgtctaccgatactgaagtagatgag

SEQ ID NO: 285458 - DNA, 75 bp, synthetic construct
  source 1..75: mol_type = other DNA
gcagatttatgcgattgccattcttgaggcgctggcaaaaacctctgggcgtgatttcccggtgattattgatac

SEQ ID NO: 285459 - DNA, 75 bp, synthetic construct
  source 1..75: mol_type = other DNA
atcttatccgtgcccagactggagaaaatgggtaatgactccaacttattgatagtgttttatgttcagataatg

SEQ ID NO: 285460 - DNA, 75 bp, synthetic construct
  source 1..75: mol_type = other DNA
ccctcatcgtcaaagccgttttctggcgtccagaggtttactcgcagaactgatgttcatgctgtatggcattgg

SEQ ID NO: 285461 - DNA, 75 bp, synthetic construct
  source 1..75: mol_type = other DNA
atcgtcaaagccgttttctggcgtccagaggtttactcgcagaactgatgttcatgctgtatggcattagcgaat

SEQ ID NO: 285462 - DNA, 75 bp, synthetic construct
  source 1..75: mol_type = other DNA
gcagacaaaagcgcaggagaagcagaaagttgaaacgctgctaaaagataaggagcgcctggaaaaagcactgcg

SEQ ID NO: 285463 - DNA, 75 bp, synthetic construct
  source 1..75: mol_type = other DNA
atcggacgtacgttcaactcgttttatcctatccgtgcccagactggagaaaatgattccggaaacccagtactg

SEQ ID NO: 285464 - DNA, 75 bp, synthetic construct
  source 1..75: mol_type = other DNA
gacgaaaacggcaagaaaaagcagtcttacttccatgatttctttaactacgccgggatccatcgcagcgtaatg

SEQ ID NO: 285465 - DNA, 75 bp, synthetic construct
  source 1..75: mol_type = other DNA
tcccaggggtgaagtgctctttagctcagctcagggggcggcactacgcccggcagtgaattcagcagattttag

SEQ ID NO: 285466 - DNA, 75 bp, synthetic construct
  source 1..75: mol_type = other DNA
tttttacccgacaggccaatttttctgccgatattgcacacgagatcagaacgccgattactaatctcgtgacgc

SEQ ID NO: 285467 - DNA, 75 bp, synthetic construct
  source 1..75: mol_type = other DNA
ctgcaacaaatcaacacgacaatgcacggcatactccagtctccggccgatcctgatgaaaaaaagataagcaaa

SEQ ID NO: 285468 - DNA, 75 bp, synthetic construct
  source 1..75: mol_type = other DNA
ggcaccgctgattgactccttgctcaatgaaattggcgtttcaggcggctcactggcggcattgacttcaccctt

SEQ ID NO: 285469 - DNA, 75 bp, synthetic construct
  source 1..75: mol_type = other DNA
ggtgccagtgtgtcagcagggcaccatggcattcgacgatatcgacctgtttgtaatgctgcagttggtggcgcg

SEQ ID NO: 285470 - DNA, 75 bp, synthetic construct
  source 1..75: mol_type = other DNA
atggaattcgaaatcaaaggcgtgaaatatcgcgtggcaaaactcagcgtttttgaccagttgaaagtgacccgc

SEQ ID NO: 285471 - DNA, 75 bp, synthetic construct
  source 1..75: mol_type = other DNA
tgctgatggcaaaatcgacaccgtgaaattcgagcagttaaaaccggtgtttgaaaccatgctcccgcgtatcgc

SEQ ID NO: 285472 - DNA, 75 bp, synthetic construct
  source 1..75: mol_type = other DNA
aaacttctgccggtgctggcgggaatgatgtcagatttcgggagcattcgctcccgtttgcctgctgatggtaaa

SEQ ID NO: 285473 - DNA, 75 bp, synthetic construct
  source 1..75: mol_type = other DNA
gctggtcatgctgcagctggtggcgcgggtggtcgccaattcgctgggaaattttttgcctacatcccttaccag

SEQ ID NO: 285474 - DNA, 75 bp, synthetic construct
  source 1..75: mol_type = other DNA
ggtggtcgccgactcgctgggaaattttttgcaaggactccctaccagcgagacgcccaccccgccagcggaata

SEQ ID NO: 285475 - DNA, 75 bp, synthetic construct
  source 1..75: mol_type = other DNA
gcgtaaagcaccgattctgtttcactacaccaatcttgccgaagggatgacagagcagcgactggaaacggatgt

SEQ ID NO: 285476 - DNA, 75 bp, synthetic construct
  source 1..75: mol_type = other DNA
gggatgggcaaaaaaaatggaatctggcgaacgcgtggtgattaaaaatccagaatacttctcgtcctatatgca

SEQ ID NO: 285477 - DNA, 75 bp, synthetic construct
  source 1..75: mol_type = other DNA
atgaaaaaacctcttttataaatggtagcgcttatggcataaaatatactaaaaatttcaatactacaaatactg

SEQ ID NO: 285478 - DNA, 75 bp, synthetic construct
  source 1..75: mol_type = other DNA
atggaattcgaaatcaaaggcgtgaaatatcgcgcggcaaaactcagcgtttttgatcagctgaaagtgatccgc

SEQ ID NO: 285479 - DNA, 75 bp, synthetic construct
  source 1..75: mol_type = other DNA
atgacaaacctgacactggatgtaaatattatcgatttcccatcaatacctgtggcgatgttgccgcaccgctgt

SEQ ID NO: 285480 - DNA, 75 bp, synthetic construct
  source 1..75: mol_type = other DNA
cgattctgtttcactacaccaatcttgccgaaggggtgacggagcagcgactggaaacggatgtttatgtgccgt

SEQ ID NO: 285481 - DNA, 75 bp, synthetic construct
  source 1..75: mol_type = other DNA
gtgaagtcaccagcggtacgccaggctgctatcgtcaggctgtgtgcatcggttcagcgcttaacattacggcga

SEQ ID NO: 285482 - DNA, 75 bp, synthetic construct
  source 1..75: mol_type = other DNA
tttgacgccgaaggtttaaccaaactgactcaggagacggagcgccgtcgtcgcgaacgtaacgaagttgaacag

SEQ ID NO: 285483 - DNA, 75 bp, synthetic construct
  source 1..75: mol_type = other DNA
ggaattattttcgccaggctctatcgtcgcgcttcggcagagcaagcatttgttcgtactggtttaagtgggcaa

SEQ ID NO: 285484 - DNA, 75 bp, synthetic construct
  source 1..75: mol_type = other DNA
caggcggcgtaaaggttgccgatgttatagaaagtcaggccccggacaaactggtttatgaaccgggtaatccgc

SEQ ID NO: 285485 - DNA, 75 bp, synthetic construct
  source 1..75: mol_type = other DNA
atggatgatattgtcaacttagttccgtcatggatgtttaccgcgattgttgccgtatgcattctatttattatc

SEQ ID NO: 285486 - DNA, 75 bp, synthetic construct
  source 1..75: mol_type = other DNA
atcaagattattcaggtcgatggtctgaatcgtggcagcgctgcgggtgatgcaaacacgggtaatgtagggggc

SEQ ID NO: 285487 - DNA, 75 bp, synthetic construct
  source 1..75: mol_type = other DNA
gccgagcgtcgtcgggaagcagagcagacgcgaattctggctgaacgacagattcaggaaacggaaatcgaccgc

SEQ ID NO: 285488 - DNA, 75 bp, synthetic construct
  source 1..75: mol_type = other DNA
gcgcgaaacccatctgccgccgattgtcgctctgcgggccgcaggtgtgccgattgctatctccacggaccataa

SEQ ID NO: 285489 - DNA, 75 bp, synthetic construct
  source 1..75: mol_type = other DNA
cgctggctggatatggcgcgcgagcgcattgccttccagggacttccttcacgtatttgctggctggggcttggt

SEQ ID NO: 285490 - DNA, 75 bp, synthetic construct
  source 1..75: mol_type = other DNA
ttcgtccaatgttttgtgaaggcaaaggtccattccgttgggtggcgctgtctggcgacccggaagacatctata

SEQ ID NO: 285491 - DNA, 75 bp, synthetic construct
  source 1..75: mol_type = other DNA
gcgcatttgcaggggctgtattctacatagcaacagcagcagatctgagtgcatcgcgccgactggcatatttta

SEQ ID NO: 285492 - DNA, 75 bp, synthetic construct
  source 1..75: mol_type = other DNA
aaaatcctgacattcctgaataatcaggatgtcggctcgctggtggcgctgataacgcgccggggaggttcaggt

SEQ ID NO: 285493 - DNA, 75 bp, synthetic construct
  source 1..75: mol_type = other DNA
gacattacagaggaacacgacctgcagggtaagttgctgacacccggtctggtggattgtcatacacatctggtg

SEQ ID NO: 285494 - DNA, 75 bp, synthetic construct
  source 1..75: mol_type = other DNA
actactgtcagtgccagctcctgcaaggtggagttccgttacggtaacatgacgctggaaaatccttcaccagag

SEQ ID NO: 285495 - DNA, 75 bp, synthetic construct
  source 1..75: mol_type = other DNA
ctcaggctctggcagaacgaagggcgtgtttcgcggcgtcttccggtaacgacctcttctgacactggtgttgaa

SEQ ID NO: 285496 - DNA, 75 bp, synthetic construct
  source 1..75: mol_type = other DNA
cttatacacgcagtaccaatgaagattaatttaggcgaaattggtaaagttgctgtaccaatcccctgcccggac

SEQ ID NO: 285497 - DNA, 75 bp, synthetic construct
  source 1..75: mol_type = other DNA
atgacaaacatgatctcatatcagggacttgttcgcaccttcccttgtgttgcacagattgcacgtgaaaatggc

SEQ ID NO: 285498 - DNA, 75 bp, synthetic construct
  source 1..75: mol_type = other DNA
atgagcagaaaaaaactgtggcggccattgcgccgtctttatccacttccactcagaccagagtcagtgccagtt

SEQ ID NO: 285499 - DNA, 75 bp, synthetic construct
  source 1..75: mol_type = other DNA
taaaatgacgctggaaaatccttcaccagagctgctcacggtgttgatccgtgaactgaccgggaggggaagatg

SEQ ID NO: 285500 - DNA, 75 bp, synthetic construct
  source 1..75: mol_type = other DNA
gtgggcgaggcgatgacgatcatcggtctggtttccgccggtcttggtgtttcgattttgcccgcctcttttaaa

SEQ ID NO: 285501 - DNA, 75 bp, synthetic construct
  source 1..75: mol_type = other DNA
tggctcagactctggcaaaacgaagggcgtatatcacggcgtcttccggtgacaagcacttctgacgcagggtaa

SEQ ID NO: 285502 - DNA, 75 bp, synthetic construct
  source 1..75: mol_type = other DNA
ctcagactctggcaaaacgaagggcgtatatcacggcgtattccggtgacaaccacttctgacgcaggcgttgaa

SEQ ID NO: 285503 - DNA, 75 bp, synthetic construct
  source 1..75: mol_type = other DNA
gccaatgacggccattgctccgtctttatccacttccactcagactacagtctgtgccagctcctgcaaggtgga

SEQ ID NO: 285504 - DNA, 75 bp, synthetic construct
  source 1..75: mol_type = other DNA
gacacagccggcagagcgctttccgtcacacttccgtcagtgatccccgatcacgtcatcctctggatgaattag

SEQ ID NO: 285505 - DNA, 75 bp, synthetic construct
  source 1..75: mol_type = other DNA
cgtgttcagctcaacgaaatgcgctgggtgccgattgctgaagaggatgcggtttctgaaatgtggttggtctgg

SEQ ID NO: 285506 - DNA, 75 bp, synthetic construct
  source 1..75: mol_type = other DNA
cgatggctgctcttactccgtctttatccacccagactactgtcagtgccagctcctgcaaggtggagttccgtc

SEQ ID NO: 285507 - DNA, 75 bp, synthetic construct
  source 1..75: mol_type = other DNA
gaacgcgcaaatatcccaagcgattgtccatatgacactaacgtctcagggatatttgcattactatgataaaag

SEQ ID NO: 285508 - DNA, 75 bp, synthetic construct
  source 1..75: mol_type = other DNA
tcatttatcaggttgatgatactccggctaatcacgagattaaaaccttagattttgccgaaggtaaatatacca

SEQ ID NO: 285509 - DNA, 75 bp, synthetic construct
  source 1..75: mol_type = other DNA
ccaaaaaagaatatctgcgggaaactatcgccattttggaacaagtcatcttttctcgtttatctggggacgaag

SEQ ID NO: 285510 - DNA, 75 bp, synthetic construct
  source 1..75: mol_type = other DNA
tttcgccttgaagcgggtgagcttaaggacgctggcgaatggcatccagacccctcgatgataccctctgactca

SEQ ID NO: 285511 - DNA, 75 bp, synthetic construct
  source 1..75: mol_type = other DNA
ttctgttgctggtgccttcagtggttttgcgcaggttggtactgaaacaacgtcagttgcccgttggaacagctt

SEQ ID NO: 285512 - DNA, 75 bp, synthetic construct
  source 1..75: mol_type = other DNA
tcattgctttgaacaatccattcattgaagtttcaggcgctatcgccgcgttgacagccatgattagcccggaac

SEQ ID NO: 285513 - DNA, 75 bp, synthetic construct
  source 1..75: mol_type = other DNA
tcgaaaagccgattacagcggataccgtttgtatatcaccccagaaatggagggttacccgactgatgaatgtca

SEQ ID NO: 285514 - DNA, 75 bp, synthetic construct
  source 1..75: mol_type = other DNA
actactgtcagtgccagctcctgcagggtggagttccgtcacggcaacatgacgctggaaaatccttcaccagag

SEQ ID NO: 285515 - DNA, 75 bp, synthetic construct
  source 1..75: mol_type = other DNA
attttcaaatggctcagactttggcaaaacgaagggcgtatatcgcggcgtctttcggtaacaacctcttctgac

SEQ ID NO: 285516 - DNA, 75 bp, synthetic construct
  source 1..75: mol_type = other DNA
caatgggaataaatctatatatgaattgtgaagataaggagtttaatcccgttgatattgtcaatgaagatggga

SEQ ID NO: 285517 - DNA, 75 bp, synthetic construct
  source 1..75: mol_type = other DNA
ggaaattagaagaactaaaattagaaatatgtagatcaatagattcgttaattgatgaatatcatatcgaatatg

SEQ ID NO: 285518 - DNA, 75 bp, synthetic construct
  source 1..75: mol_type = other DNA
ccgccatgttgactgtgacgatggtacgaaaagccgattacagcggataccgtttgtatatcaccccagaaatgg

SEQ ID NO: 285519 - DNA, 75 bp, synthetic construct
  source 1..75: mol_type = other DNA
atctgcggagtgaagtcagtaacgcccgtcaggcgttgtttgtgaaaggcagctgtccggcctgcgagcgcaagc

SEQ ID NO: 285520 - DNA, 75 bp, synthetic construct
  source 1..75: mol_type = other DNA
ctgccagatggtatggacgatcgcgcggtgaactacctgttcaaaacgcctggcggttccctttatcacagcggc

SEQ ID NO: 285521 - DNA, 75 bp, synthetic construct
  source 1..75: mol_type = other DNA
aaatcggaaggtggcaccaacgtttgcgttgatttctggtgcggcactggcaaacaaagtcacggtaacccgtta

SEQ ID NO: 285522 - DNA, 75 bp, synthetic construct
  source 1..75: mol_type = other DNA
aggtcgacgcggtactggcgactcacgatcacaacgatcatatcgacgttaacgtcgctgctgccgtgatgcaga

SEQ ID NO: 285523 - DNA, 75 bp, synthetic construct
  source 1..75: mol_type = other DNA
caaaacatggtaacgagcatcagatcgacgtggctttaggatcgtacggagagaacccacgtggtatcaccgaca

SEQ ID NO: 285524 - DNA, 75 bp, synthetic construct
  source 1..75: mol_type = other DNA
gctcggctgtaccgggatctggttgaaatcagaaggcggtgccaacgtttgtgttgatttttggtgcggtactgg

SEQ ID NO: 285525 - DNA, 75 bp, synthetic construct
  source 1..75: mol_type = other DNA
gcaagagatccgcgtgctgtgggagatgaaaaaagatcgcctgaagtatggcttcaagccgtttatctggcaggt

SEQ ID NO: 285526 - DNA, 75 bp, synthetic construct
  source 1..75: mol_type = other DNA
aaagcagagaaagaagccgcagagatgcaggcggcggcaatcgttgagttagccgaagctacgcgtaaaaagggt

SEQ ID NO: 285527 - DNA, 75 bp, synthetic construct
  source 1..75: mol_type = other DNA
ttctgacaagcaaaccagccttaaattcaaactggcgctattacaatcattacctgcggtaatagagaaatccgt

SEQ ID NO: 285528 - DNA, 75 bp, synthetic construct
  source 1..75: mol_type = other DNA
aagcgttatgcgacgcagaggacgtgctggtgtggtccgtggcggtcactccagcgattgagaagctcagtgtct

SEQ ID NO: 285529 - DNA, 75 bp, synthetic construct
  source 1..75: mol_type = other DNA
atgaaaaaatggctattcagactgctgctgtggttcccggccctgcctgtgtatgcagatctaccagagatggaa

SEQ ID NO: 285530 - DNA, 75 bp, synthetic construct
  source 1..75: mol_type = other DNA
ataaatggttgagaacgccgaatggttattcaactgaccagcgggttgaagattataagcatgtgatgataaaca

SEQ ID NO: 285531 - DNA, 75 bp, synthetic construct
  source 1..75: mol_type = other DNA
gtgttggtatggacaaaagggaagatgatgattttgtttgcgacaccgcgctaagactgaagaagaaatttccgg

SEQ ID NO: 285532 - DNA, 75 bp, synthetic construct
  source 1..75: mol_type = other DNA
gcaggcttcctctatctgtatcgatcagcttccgctgatattaaatggcgaagtgcagtatctgatgatgtacgg

SEQ ID NO: 285533 - DNA, 75 bp, synthetic construct
  source 1..75: mol_type = other DNA
tctgcatgattcgccgcgccagcgaagagctgctgtcggtaaacgaggagataacccatcactatgagcagttgc

SEQ ID NO: 285534 - DNA, 75 bp, synthetic construct
  source 1..75: mol_type = other DNA
cggcgagctgttaattcgccagtatgaatttattcaggcttttttaggcagcgaagcggattttctctatcaggg

SEQ ID NO: 285535 - DNA, 75 bp, synthetic construct
  source 1..75: mol_type = other DNA
aattttgcatttactcagatgattctagggctgggacattgaacttcatcaactcgattgaatcgattggagtaa

SEQ ID NO: 285536 - DNA, 75 bp, synthetic construct
  source 1..75: mol_type = other DNA
ctgccatcctgctgagtccactggccctggccgcgaccatatcaggacagacggatgtcagccgactggaatcaa

SEQ ID NO: 285537 - DNA, 75 bp, synthetic construct
  source 1..75: mol_type = other DNA
ggaacagggaacagcgcagcgccggcaggcactgtttgtgcaggcggaaaattgtagcgcgtgtgatgcccgtct

SEQ ID NO: 285538 - DNA, 75 bp, synthetic construct
  source 1..75: mol_type = other DNA
gtgatatccgcctgagtaaggtgctggcatccggtaagccggtggatatttacctggtggacagtcaggggaaag

SEQ ID NO: 285539 - DNA, 75 bp, synthetic construct
  source 1..75: mol_type = other DNA
gccgtcaccgaaacggcagccgctctgggctttatctcagccattggcgcagtgggcggcttttttattccgcag

SEQ ID NO: 285540 - DNA, 75 bp, synthetic construct
  source 1..75: mol_type = other DNA
caggccggacaggcagaatcacttaacaatccggtactggctgcagcggtgactcaggggacagcggctgcgatg

SEQ ID NO: 285541 - DNA, 75 bp, synthetic construct
  source 1..75: mol_type = other DNA
acgtttcccggtgagtatccggccgtccggatgcgtatgtcttatgaaaagataaaggactgcgcagaagagctg

SEQ ID NO: 285542 - DNA, 75 bp, synthetic construct
  source 1..75: mol_type = other DNA
tacgatctgttggcggggaagtgatcgagcaaccgcgtaacgaaagggaacgttggctggtcaatactgtagcaa

SEQ ID NO: 285543 - DNA, 75 bp, synthetic construct
  source 1..75: mol_type = other DNA
atctccgaattgaaagcgcaacgcaatgactctgttggaataaatgcagaatatgtacttaatcgccttattgaa

SEQ ID NO: 285544 - DNA, 75 bp, synthetic construct
  source 1..75: mol_type = other DNA
atgactagtctaaaaactagtattaagactatcacttatttaagtgatactggttgtctggagattctgggggcc

SEQ ID NO: 285545 - DNA, 75 bp, synthetic construct
  source 1..75: mol_type = other DNA
ccgtatccatgggaaatggcggggtactgctggccgattccggcgccgctgtcagtggtacccggagcgacggaa

SEQ ID NO: 285546 - DNA, 75 bp, synthetic construct
  source 1..75: mol_type = other DNA
ctggcacgctcacggggaaaaggcgccggtgtggcggttgctctgtctcttgctgctgtcacgtcagtcccggca

SEQ ID NO: 285547 - DNA, 75 bp, synthetic construct
  source 1..75: mol_type = other DNA
gtgtccagcggtcagatggtcggagggacggctgaatccaccaccatcaacaaaaatggccggcaggttatctgg

SEQ ID NO: 285548 - DNA, 75 bp, synthetic construct
  source 1..75: mol_type = other DNA
atgctgacacagacaatggactatgaccggatactggctggctcccgcagccatcagaccagtgtaagcggtgaa

SEQ ID NO: 285549 - DNA, 75 bp, synthetic construct
  source 1..75: mol_type = other DNA
cctgggcgttcaggccggttatgcccacagtgtcagcggcaacagcgctgaaggctataacggtcaggccacgct

SEQ ID NO: 285550 - DNA, 75 bp, synthetic construct
  source 1..75: mol_type = other DNA
gccatcaaatccggcgcagtggcaaccgacacggttgtgaataccggcgcggaagggggaccagatgcagaaaat

SEQ ID NO: 285551 - DNA, 75 bp, synthetic construct
  source 1..75: mol_type = other DNA
cggtacacgggcatgcgctggataccacactgaatggcggttaccagtatgtgcacaacggaggcacagcctctg

SEQ ID NO: 285552 - DNA, 75 bp, synthetic construct
  source 1..75: mol_type = other DNA
tgctcagaacagaggttgccggtatgtctctgacgacaggggtgcatggtgccgcaggccattcttccgttgatg

SEQ ID NO: 285553 - DNA, 75 bp, synthetic construct
  source 1..75: mol_type = other DNA
atgagacattcactgccctaccgtatgttacacaaacgcccgatgaaactcagcaccacggctatcttaatggtc

SEQ ID NO: 285554 - DNA, 75 bp, synthetic construct
  source 1..75: mol_type = other DNA
tcagctctttaaaggggacgacatcctgaaggcgctcaacggcgaggaaaatgtcgctattaatcgcggttttct

SEQ ID NO: 285555 - DNA, 75 bp, synthetic construct
  source 1..75: mol_type = other DNA
accgatatgcaaagtcttcgctactcgcatcctgaagcccagcgtattggtcagccatttaaaggtgatgacatc

SEQ ID NO: 285556 - DNA, 75 bp, synthetic construct
  source 1..75: mol_type = other DNA
gcagattatcaaggaaggtggtctggcggatttcaccaccgttaaccagaaaggcaaactgcaggtgaacgccgg

SEQ ID NO: 285557 - DNA, 75 bp, synthetic construct
  source 1..75: mol_type = other DNA
cctgcgtgacagtgcaaaacacagtgtgcgtgaactgccggtgaactggtgggtacagccttccgttacccgcac

SEQ ID NO: 285558 - DNA, 75 bp, synthetic construct
  source 1..75: mol_type = other DNA
tgcaaaacacagtgtgcgtgaactgccggtgaactggtgggtacagccttccgttatccgcaccttcagctcccg

SEQ ID NO: 285559 - DNA, 75 bp, synthetic construct
  source 1..75: mol_type = other DNA
tcaccctgggcgttcaggccggttatgtccacagcgtcagcggcagcagcgctgaagggtataacggtcaggcca

SEQ ID NO: 285560 - DNA, 75 bp, synthetic construct
  source 1..75: mol_type = other DNA
cgacctcatttgattctatgattgaaaatatcgatcagtactttaatgagaataaaaagtacaatgttaattttc

SEQ ID NO: 285561 - DNA, 75 bp, synthetic construct
  source 1..75: mol_type = other DNA
gtggtcaggcggatgccctgatgctgggaaaaggcagtgcattcacgctgaacgccggtgatacagccacggata

SEQ ID NO: 285562 - DNA, 75 bp, synthetic construct
  source 1..75: mol_type = other DNA
tgccacctggaatatccccgataacgccacggttcagtcggtggtggatgacctcagccatgccggacagattca

SEQ ID NO: 285563 - DNA, 75 bp, synthetic construct
  source 1..75: mol_type = other DNA
tcccagaatggcacgtcactggacctgcaggccggactggaagcccgtgtccgggaaaatatcaccctgggcgtt

SEQ ID NO: 285564 - DNA, 75 bp, synthetic construct
  source 1..75: mol_type = other DNA
tgccggcttccgtctgggcagccacaacgatatgacctttggtgaaggcacctcatcccgtgacaccctgcgcga

SEQ ID NO: 285565 - DNA, 75 bp, synthetic construct
  source 1..75: mol_type = other DNA
tcaccctgggcgttcaggccggttatgaccacagcgtcagcggcagcagcgctgaaggttataacggtcaggcca

SEQ ID NO: 285566 - DNA, 75 bp, synthetic construct
  source 1..75: mol_type = other DNA
tcaccctgggcgttcaggctggttatgcccacagcgtcagcggcagcagcgctgaagggtataacggtcaggcca

SEQ ID NO: 285567 - DNA, 75 bp, synthetic construct
  source 1..75: mol_type = other DNA
tcaccctgggcgttcaggcaggttatgcccacagcgtcagcggcagcagcgctgaaggttataacggtcaggcca

SEQ ID NO: 285568 - DNA, 75 bp, synthetic construct
  source 1..75: mol_type = other DNA
tacctgcgcagtgaaaatgcttatcgtgctgaagtccccctgtatacatccatgctgacacaggcaatggactat

SEQ ID NO: 285569 - DNA, 75 bp, synthetic construct
  source 1..75: mol_type = other DNA
cgggagaaaccgtgagcggcggaacactgacaaatcatgacaaccagattgttctcggtacggccaacggaatga

SEQ ID NO: 285570 - DNA, 75 bp, synthetic construct
  source 1..75: mol_type = other DNA
gggggaaaggctacagacacaataatcaatgaaggaggtggacaaagtctgaagggactggcactgaacaccacg

SEQ ID NO: 285571 - DNA, 75 bp, synthetic construct
  source 1..75: mol_type = other DNA
agggcggtcatctcggtcacgataacaacggcggtattgcccgtggggccacgccggaaagcagcggcagctatg

SEQ ID NO: 285572 - DNA, 75 bp, synthetic construct
  source 1..75: mol_type = other DNA
accagctggtaattaatggtggtcaggcaaccggcaaaacctggcttgcgttcacaaatgtcggaaacagtaacc

SEQ ID NO: 285573 - DNA, 75 bp, synthetic construct
  source 1..75: mol_type = other DNA
gtcagccttgatggcagcaatgcctctgaccagctggtgattaatggtggtcaggcaaccggcaaaacctggctt

SEQ ID NO: 285574 - DNA, 75 bp, synthetic construct
  source 1..75: mol_type = other DNA
agaacacgggcggtgcactggtcaccagtactgctgcaactgtcaccggcacaaaccgcctggggcatttctccg

SEQ ID NO: 285575 - DNA, 75 bp, synthetic construct
  source 1..75: mol_type = other DNA
cagccagtaataccaccatcagcagcggcgggctccagtttgtaggtgccgggggaaaggctacagacacaataa

SEQ ID NO: 285576 - DNA, 75 bp, synthetic construct
  source 1..75: mol_type = other DNA
atgcgtgttcgccttgatggcagcaatacctctgaccagctggtgattaatggtggtcaggcaaccggcaaaacc

SEQ ID NO: 285577 - DNA, 75 bp, synthetic construct
  source 1..75: mol_type = other DNA
gccgccgccggcagtaacatgacgttctcaccgtcccggaatggcacgtcactggacctgcaggccggactggaa

SEQ ID NO: 285578 - DNA, 75 bp, synthetic construct
  source 1..75: mol_type = other DNA
tggtgccattgttgaggggaccaatgccagcggtaagttcagtattgatggcacatccggtcaggccagcggcct

SEQ ID NO: 285579 - DNA, 75 bp, synthetic construct
  source 1..75: mol_type = other DNA
aaccgtcagggcaatttcgcggtggaaaacggtaaggctgaaggtgttgttctggagtccggtggtcgtctggat

SEQ ID NO: 285580 - DNA, 75 bp, synthetic construct
  source 1..75: mol_type = other DNA
ttgttctggagtccggcggtcgcctggatgtactggaaggccattcagcgcagaaaacacgggtggatgacggcg

SEQ ID NO: 285581 - DNA, 75 bp, synthetic construct
  source 1..75: mol_type = other DNA
ggtggatgacggcggtaccctggcagtgtctgccggtggtaaggcaacaggtgtcaccatgacatccggtggtgc

SEQ ID NO: 285582 - DNA, 75 bp, synthetic construct
  source 1..75: mol_type = other DNA
gccacagcatgaaagcatcatcggacaataacgacttccgcgcccggggctggggctggctgggctcactggaaa

SEQ ID NO: 285583 - DNA, 75 bp, synthetic construct
  source 1..75: mol_type = other DNA
aacagcgtccgtctcagcattcagggcggccatctcggtcacgataacaacggcggtattgcccgtggggccacg

SEQ ID NO: 285584 - DNA, 75 bp, synthetic construct
  source 1..75: mol_type = other DNA
aggccggcgcctttaactacaccctgaaccgtgacagcgatgaagactggtacctgcgcagtgaaaatgcttatc

SEQ ID NO: 285585 - DNA, 75 bp, synthetic construct
  source 1..75: mol_type = other DNA
cgctgtcagtggtacccggagcgacggaaaggcattcagtatcggaggcggtcaggcggatgccctgatgctgga

SEQ ID NO: 285586 - DNA, 75 bp, synthetic construct
  source 1..75: mol_type = other DNA
cctttgtcaatttccgcatccagcatcttggctatagctggttatatggcacctttaaagatttcgacggtactt

SEQ ID NO: 285587 - DNA, 75 bp, synthetic construct
  source 1..75: mol_type = other DNA
tatgtgaagttcgggcatggcagtgcacaacatgtgcgtgccggtttccgtctgggcagccacaacgatatgagc

SEQ ID NO: 285588 - DNA, 75 bp, synthetic construct
  source 1..75: mol_type = other DNA
accaccacgctgaataacggtgccacgcttaccctttccgggaaaacggtgaacaacgataccctgaccatccgt

SEQ ID NO: 285589 - DNA, 75 bp, synthetic construct
  source 1..75: mol_type = other DNA
acgtaatcgtcgcggtgaagtcatatccctggattgctgtatgccgtgggaaacgacgctgatgaatactggtgg

SEQ ID NO: 285590 - DNA, 75 bp, synthetic construct
  source 1..75: mol_type = other DNA
tttatgtcagtcctgaaactgcgatgaaactggctgcggtgtattcctgtatctatgtcctgtcttccagccttg

SEQ ID NO: 285591 - DNA, 75 bp, synthetic construct
  source 1..75: mol_type = other DNA
agacgataggcatggggatgagcgggcaggcttataccagttcattcttcaacggtaatgcgcgacccgctggca

SEQ ID NO: 285592 - DNA, 75 bp, synthetic construct
  source 1..75: mol_type = other DNA
aaatgctggtcagcgtaaatgcagcaaatccgttgaataactttaaagatacgaaaggcaaagaggaaaagaacg

SEQ ID NO: 285593 - DNA, 75 bp, synthetic construct
  source 1..75: mol_type = other DNA
tgattaatgacctggaaaaagccacattttcgaatattacacagcaggcgattcagtttgttcgctacacgatga

SEQ ID NO: 285594 - DNA, 75 bp, synthetic construct
  source 1..75: mol_type = other DNA
aaacgacgctgatgaatactggtggccgatacacctacggtttgtacaacgaatatggggcgtttgcgatcagcc

SEQ ID NO: 285595 - DNA, 75 bp, synthetic construct
  source 1..75: mol_type = other DNA
acggcaaattgtgggaaggctggacggaaatgtccatcagccgttccctgaaggcgattgccggtgagtttgatc

SEQ ID NO: 285596 - DNA, 75 bp, synthetic construct
  source 1..75: mol_type = other DNA
gaaaagctttcattgcccacacaggacagccgggacattattgccgccgcatgcagagccttaaaccatgtctgg

SEQ ID NO: 285597 - DNA, 75 bp, synthetic construct
  source 1..75: mol_type = other DNA
cgggactggttgcaatcgcgttattactgacgtggcgattaaaaaaacggcccccggtggaaatacctgaggccg

SEQ ID NO: 285598 - DNA, 75 bp, synthetic construct
  source 1..75: mol_type = other DNA
agcatgaccaggccgggcgaaactttctatcgtctggtgcctgacgcgtcgaaacgcgcacagtctgcggggcaa

SEQ ID NO: 285599 - DNA, 75 bp, synthetic construct
  source 1..75: mol_type = other DNA
acagccttttattcatcaggaacaacagcaacagtcacgcgaagcatcgctgatgccgaaaacgccggatatacg

SEQ ID NO: 285600 - DNA, 75 bp, synthetic construct
  source 1..75: mol_type = other DNA
atacgcatgtgttgggtcagcattttgccggcaccaccagtcctgcggatggactgatgctacttatcaatcagt

SEQ ID NO: 285601 - DNA, 75 bp, synthetic construct
  source 1..75: mol_type = other DNA
cggcgcgccgctggcgatggaagctctaatggccttcttcctcgaatccacctttgttggcttgtttttcttcgg

SEQ ID NO: 285602 - DNA, 75 bp, synthetic construct
  source 1..75: mol_type = other DNA
agcctccgcttccgtcttgccctgctggatgcattacctgccgtcatagagaagtccacagaaccaatgaaatcc

SEQ ID NO: 285603 - DNA, 75 bp, synthetic construct
  source 1..75: mol_type = other DNA
aacgacctcttctgacactggcattgaattattacctgtagagataacgccgggtgaacagaaagaacctgtggc

SEQ ID NO: 285604 - DNA, 75 bp, synthetic construct
  source 1..75: mol_type = other DNA
aacgacctcttctgacactggcgttgaattattacctgtagaaataacgccggatgagcagaaagaacctgtggc

SEQ ID NO: 285605 - DNA, 75 bp, synthetic construct
  source 1..75: mol_type = other DNA
ttattacctgtggagataacgccggatgagccgaaagaaccggtggctgctcttactccgtctttatctactcag

SEQ ID NO: 285606 - DNA, 75 bp, synthetic construct
  source 1..75: mol_type = other DNA
ttattcaaaagactatcgcacactctccgaaacaatagatagttacaatgatcatgtatattatagcaagaaatc

SEQ ID NO: 285607 - DNA, 75 bp, synthetic construct
  source 1..75: mol_type = other DNA
cagccgaactccaggcagcagcaattattgaactggcggaggccacccgtcagaaaggtctggcagaagcagaag

SEQ ID NO: 285608 - DNA, 75 bp, synthetic construct
  source 1..75: mol_type = other DNA
tcattctcagagtttccgatgggatggatatagtatgagttttgtttctgacagcaaaaaactactggaatacat

SEQ ID NO: 285609 - DNA, 75 bp, synthetic construct
  source 1..75: mol_type = other DNA
ggttgcattatataagataatgaaggaactaaaactcgagaaaaaaaccagcttcgataagacattattagaaga

SEQ ID NO: 285610 - DNA, 75 bp, synthetic construct
  source 1..75: mol_type = other DNA
ccgagcgcgatgcagagtgaacaaccgacgcagcaacagggggaaaggagaaaatcatgtttgattatgaaacat

SEQ ID NO: 285611 - DNA, 75 bp, synthetic construct
  source 1..75: mol_type = other DNA
aaaaaaaggcgctaaagattttgcgttggtggaaccgttatgtcagccctttgaaatccgcgcttgagtcattgc

SEQ ID NO: 285612 - DNA, 75 bp, synthetic construct
  source 1..75: mol_type = other DNA
tctgtatgctcgatcacgatggggtagtggcaacgggcacactttcactgccggactggcatggtttcacgatga

SEQ ID NO: 285613 - DNA, 75 bp, synthetic construct
  source 1..75: mol_type = other DNA
gtgagtactgaaaaggattatccagtgaagatcccgagatgggtttatgatcgtattactgaaataacgggctgt

SEQ ID NO: 285614 - DNA, 75 bp, synthetic construct
  source 1..75: mol_type = other DNA
acagtgaccttcagctctgtttccggcttcagcctgaaggccctcatcactggtatcaccggtactgtcgtcgct

SEQ ID NO: 285615 - DNA, 75 bp, synthetic construct
  source 1..75: mol_type = other DNA
gcaggtcaggctgggccatgtcgttctcgccggacagcaggcttaccatgaaagcactggaaatggcatgggaaa

SEQ ID NO: 285616 - DNA, 75 bp, synthetic construct
  source 1..75: mol_type = other DNA
ccggggtgatcaccagcggcttccagcgcggcttgatgaaggccgtgggtgcatcggccggcaccttgcgcaggt

SEQ ID NO: 285617 - DNA, 75 bp, synthetic construct
  source 1..75: mol_type = other DNA
cagggcctgctcgcgcttgagtgcggcgaacttctcggccggcagcaggtagtcgtcgaagtcgcggaactgccg

SEQ ID NO: 285618 - DNA, 75 bp, synthetic construct
  source 1..75: mol_type = other DNA
cgattctgtttcactacaccaatctggccgaagggataatagagcagcgactggaaacggatgtttatgtgccgt

SEQ ID NO: 285619 - DNA, 75 bp, synthetic construct
  source 1..75: mol_type = other DNA
ggcgaacccggctggtaccaggttgcgctaagcgtgaggcctcattttaaatttatgggggcaaattttgagctt

SEQ ID NO: 285620 - DNA, 75 bp, synthetic construct
  source 1..75: mol_type = other DNA
caactggggtcatggaaagaaaggagcgacttagagagggagcttaatacctggatccgtcagtatgttgccgac

SEQ ID NO: 285621 - DNA, 75 bp, synthetic construct
  source 1..75: mol_type = other DNA
tacagatatgctgattaaagccctttaccgtgatggtggggcttttgtttcatttgccagaccagagcagatgaa

SEQ ID NO: 285622 - DNA, 75 bp, synthetic construct
  source 1..75: mol_type = other DNA
cagcagccgccgcgctcactacgctgatgcatgcgcttattgatattgaatgcacagcagggcttgcacaaaagg

SEQ ID NO: 285623 - DNA, 75 bp, synthetic construct
  source 1..75: mol_type = other DNA
ttttacttttcttgattatgttcgctccatggcgcacgccagtagctggcaaacttatgtatctgaacttgttaa

SEQ ID NO: 285624 - DNA, 75 bp, synthetic construct
  source 1..75: mol_type = other DNA
ctgcacggctgccagcacgccttgcgcggccggcccgtgctgttccccaacttttcgctcggcgaagagtatgaa

SEQ ID NO: 285625 - DNA, 75 bp, synthetic construct
  source 1..75: mol_type = other DNA
atgtcgcgtcttggtgcggcgctgggtgccgaccctgccacctttatgggcatggcggggcttggcgatctggtg

SEQ ID NO: 285626 - DNA, 75 bp, synthetic construct
  source 1..75: mol_type = other DNA
gataaagacgaaacattgaagatctggaggacgaacgccagatatgtaaagacattgcgtaaggtaaacataacg

SEQ ID NO: 285627 - DNA, 75 bp, synthetic construct
  source 1..75: mol_type = other DNA
agcggcgagaaaatgcgtaaagcaccgattctgtttcactacaccaatcttgccgaagggatgacagagcagcga

SEQ ID NO: 285628 - DNA, 75 bp, synthetic construct
  source 1..75: mol_type = other DNA
aactgcgccgacaactcaatgatgatccggactggcttccggttccccgccagcgtatctatatgcgtactgcgc

SEQ ID NO: 285629 - DNA, 75 bp, synthetic construct
  source 1..75: mol_type = other DNA
gattgtcctgaataagtgttcaactaacccgtcagacagtgaagcgtctgaactgcgccgacaactcaatgatga

SEQ ID NO: 285630 - DNA, 75 bp, synthetic construct
  source 1..75: mol_type = other DNA
tgtttgttgatacgccaggaatgaaatctccggccttcgttaaggcactgagttgtgctgacattctgttcacat

SEQ ID NO: 285631 - DNA, 75 bp, synthetic construct
  source 1..75: mol_type = other DNA
gccgccttatattgcctttgcctgtccggtaaaaatggctgcccttctggagcagcgactgcggcaggatgctga

SEQ ID NO: 285632 - DNA, 75 bp, synthetic construct
  source 1..75: mol_type = other DNA
ttattcaaaagactatcgcacattttccgaagcaataaatagttactataattatgggtattacaacaaaaaatc

SEQ ID NO: 285633 - DNA, 75 bp, synthetic construct
  source 1..75: mol_type = other DNA
caccgtgctttgctccttatgtgtgtgtgtcatcaaaaaagggaaaacagcctgtttcctggaaacagattcaca

SEQ ID NO: 285634 - DNA, 75 bp, synthetic construct
  source 1..75: mol_type = other DNA
tcaatgctaaataagctttctgaggagtggcaaaacgagacggttgcatatataaatgctcaaatggcgatattt

SEQ ID NO: 285635 - DNA, 75 bp, synthetic construct
  source 1..75: mol_type = other DNA
ttctaactaagttagtttttacgaccaaatccagacttcgtctctatgacaaaatttgtcgctatatcaataatg

SEQ ID NO: 285636 - DNA, 75 bp, synthetic construct
  source 1..75: mol_type = other DNA
aacagtttttgggtgtggttttctgttatccctttctgcattaatgcaatcaggcgtaccagcaccagaagccat

SEQ ID NO: 285637 - DNA, 75 bp, synthetic construct
  source 1..75: mol_type = other DNA
acaagcgcgacccgctcaccattgacgcttttaatggccgtgctgatggggacgaaggagaaagcaacgatgata

SEQ ID NO: 285638 - DNA, 75 bp, synthetic construct
  source 1..75: mol_type = other DNA
ccaggtttctctgaggaatccattaaggagctggctgacaccatcaaagcgcggggtgtaaaaatgccaatttcc

SEQ ID NO: 285639 - DNA, 75 bp, synthetic construct
  source 1..75: mol_type = other DNA
atgttcaagggcgatattgatctgttcaatcatgtgattggggaaacggatgttgcgggttgttgttctgcgggg

SEQ ID NO: 285640 - DNA, 75 bp, synthetic construct
  source 1..75: mol_type = other DNA
aaaacgccgccgtggcgaattgggttttgatgacatgttaagtcggctcgattccgcgctgcgtagcgaaagcgg

SEQ ID NO: 285641 - DNA, 75 bp, synthetic construct
  source 1..75: mol_type = other DNA
ggcacaggcaaaacctttacgattgcggcgctctatttgcgcctgttacttgggctaggcggttccgccgccttt

SEQ ID NO: 285642 - DNA, 75 bp, synthetic construct
  source 1..75: mol_type = other DNA
gatatcttcacttatatgaaggcgcgtagcgaagttcacgcccactacactttagacaccaactggcgctccgca

SEQ ID NO: 285643 - DNA, 75 bp, synthetic construct
  source 1..75: mol_type = other DNA
atgctcaacctgaatgcctttgaatccggcatgctgtttgagcagcagctgattgaagatgagtctctgctacgc

SEQ ID NO: 285644 - DNA, 75 bp, synthetic construct
  source 1..75: mol_type = other DNA
ttgaagacctcgattttacccagccggttgacccgaactgggtgcgggaaaaactggaactcggcggctttgaat

SEQ ID NO: 285645 - DNA, 75 bp, synthetic construct
  source 1..75: mol_type = other DNA
ttgaagacctcgattttacccagccggttgacccgaactgggtacaggaaaaactggaactcggcggctttgaat

SEQ ID NO: 285646 - DNA, 75 bp, synthetic construct
  source 1..75: mol_type = other DNA
caagtgccattggtttttttagtttgaaatatttaataaccgcagaaaagaaaaagtattttatttgggtgttca

SEQ ID NO: 285647 - DNA, 75 bp, synthetic construct
  source 1..75: mol_type = other DNA
aacatgccgttcatgatgaaaaactgattaaccatactgtctgtattctgaatgaattacgaagcatagcgataa

SEQ ID NO: 285648 - DNA, 75 bp, synthetic construct
  source 1..75: mol_type = other DNA
caatggtcgagcgcaacgaaaaaggacgccagatccgccgatacttcatcgagtgcgagaagaagctgcgcgaag

SEQ ID NO: 285649 - DNA, 75 bp, synthetic construct
  source 1..75: mol_type = other DNA
gattgtcagccgggagctatttacctgcaataaaactttaccaccacgcgaggtagagccgaattttggtgcgat

SEQ ID NO: 285650 - DNA, 75 bp, synthetic construct
  source 1..75: mol_type = other DNA
ctgaatattgataaagaaagtttaattggtcagaacatacgaaaaggattcgtatttccgccgattttgaatgag

SEQ ID NO: 285651 - DNA, 75 bp, synthetic construct
  source 1..75: mol_type = other DNA
aataaattcaaaatatgatttgtatcgagagcaaggggaaaataatgataccagtgtgaatatttattctgcaat

SEQ ID NO: 285652 - DNA, 75 bp, synthetic construct
  source 1..75: mol_type = other DNA
gccagacagtaacgcgtccagccagcaaatgcgcctcgaaagtgacaaacatctggtgcagattgttacgatcca

SEQ ID NO: 285653 - DNA, 75 bp, synthetic construct
  source 1..75: mol_type = other DNA
cttgctgcgagacattaaccgttatctgcaaggggaagcgccggttatcaaagcgccgccgccggacgatgaaac

SEQ ID NO: 285654 - DNA, 75 bp, synthetic construct
  source 1..75: mol_type = other DNA
caactgatagaagatgaatcgctgttacgttaccaggcctgcgcggatttctggcgtcgtcactgctatccgttg

SEQ ID NO: 285655 - DNA, 75 bp, synthetic construct
  source 1..75: mol_type = other DNA
ccccgcccgctgaccgttgaagaactgctggtggtgacctttaccgaggctgccaccgcagaattgcgcggtcgt

SEQ ID NO: 285656 - DNA, 75 bp, synthetic construct
  source 1..75: mol_type = other DNA
tgtttggctacgatctgggccgccgttttgagtcactgccagaaattgcgcagcaagatatcgttctgccggata

SEQ ID NO: 285657 - DNA, 75 bp, synthetic construct
  source 1..75: mol_type = other DNA
tagcattggctatttgagcttttgcggcaatatggataccagcattaccatccgcactctgaccgcagttaacgg

SEQ ID NO: 285658 - DNA, 75 bp, synthetic construct
  source 1..75: mol_type = other DNA
attttgacattaaacggttctatcgagtagatggaggccagatctatagattgcagtggaagccgatcagagaag

SEQ ID NO: 285659 - DNA, 75 bp, synthetic construct
  source 1..75: mol_type = other DNA
agaacaccctgcgcagtgcgctggcaacgtcaatgatggggctgaacgcgctggatatcgaaacgctgaataatg

SEQ ID NO: 285660 - DNA, 75 bp, synthetic construct
  source 1..75: mol_type = other DNA
ccgctatgatctgcaatatcagctttataccctggcgctgcatcgttatctgcgccatcgcattgctgattacga

SEQ ID NO: 285661 - DNA, 75 bp, synthetic construct
  source 1..75: mol_type = other DNA
gcacagtttgtttgaagacctcgattttacccagccggttgacccgaactgggtacaggaaaaactggaactcgg

SEQ ID NO: 285662 - DNA, 75 bp, synthetic construct
  source 1..75: mol_type = other DNA
gcgtggtgttgataaagaacatccgcaacaagggatttacacaacccgacccaacgccgggttgattgacctgat

SEQ ID NO: 285663 - DNA, 75 bp, synthetic construct
  source 1..75: mol_type = other DNA
cagctgattgaagacgagtctctactgcgctaccaggcctgcgccgatttctggcgtcgccattgctacccgtta

SEQ ID NO: 285664 - DNA, 75 bp, synthetic construct
  source 1..75: mol_type = other DNA
tgccactgcagaattgcgcggtcgtatccgtagcaatattcatgaattacgcatcgcctgtctgcgtgaaaccac

SEQ ID NO: 285665 - DNA, 75 bp, synthetic construct
  source 1..75: mol_type = other DNA
tctgaatgttgacatcatcatgcgcgtcagaaacggatcggttacccacattgagcaccacaaatcaggctcagt

SEQ ID NO: 285666 - DNA, 75 bp, synthetic construct
  source 1..75: mol_type = other DNA
ggcggcagcacaaaaactggaaactttaacctggcaatttcgaattcagggctggaatgttgcaatgggcgcttc

SEQ ID NO: 285667 - DNA, 75 bp, synthetic construct
  source 1..75: mol_type = other DNA
atctgccgcgctttaccttgtttaagaagaaacagttcctgccactgatacagctattgcgccttggcgtattac

SEQ ID NO: 285668 - DNA, 75 bp, synthetic construct
  source 1..75: mol_type = other DNA
actccgcttatattctgcaaaacagtgacttgccgggttttaatcaggaacagcagctgatgatggcgacactgg

SEQ ID NO: 285669 - DNA, 75 bp, synthetic construct
  source 1..75: mol_type = other DNA
tcagccatatcagcgaagggcaccgggtgacggtgcactatggttatgacagtaaaggccgcctcgccagtgaac

SEQ ID NO: 285670 - DNA, 75 bp, synthetic construct
  source 1..75: mol_type = other DNA
tatcacatcgacagtgaacaggcccgacgggtactggataccaccatgcagatgtacgaacagtggcgggaacag

SEQ ID NO: 285671 - DNA, 75 bp, synthetic construct
  source 1..75: mol_type = other DNA
gcccgcaggagtttgctgcggtcgatcttggttcaaacagtttccacatggtcattgcccgtgtggtggatggcg

SEQ ID NO: 285672 - DNA, 75 bp, synthetic construct
  source 1..75: mol_type = other DNA
attggcggcgtggtgctggcggttaacattccagggttgaagtctggcgagctggtgctggatggtaaaaccctc

SEQ ID NO: 285673 - DNA, 75 bp, synthetic construct
  source 1..75: mol_type = other DNA
gccggaattaccgctgcatctggcaggcgaaacccagcgtcaggatttacgctggcagattaataccgaacgcca

SEQ ID NO: 285674 - DNA, 75 bp, synthetic construct
  source 1..75: mol_type = other DNA
tttccgcacacctgggtgacggatatcgatgccgaagcccgtgtggtgaaaagccagaataatcagtggcaatac

SEQ ID NO: 285675 - DNA, 75 bp, synthetic construct
  source 1..75: mol_type = other DNA
caaccgaagctggcgcatccgcaactggaggcgctactgcgatgggccgccatgctgcatgaggtcgggttgaat

SEQ ID NO: 285676 - DNA, 75 bp, synthetic construct
  source 1..75: mol_type = other DNA
gttctgtatgagatggaaggccgtttccgtcatcaggatgtacgtagccgcaccgccagtagcctcgctaaccaa

SEQ ID NO: 285677 - DNA, 75 bp, synthetic construct
  source 1..75: mol_type = other DNA
gccgtgcagatggctccgggacatccttcgtcttcaccagctacctggcgaaagtgaacgaagagtggaaaaaca

SEQ ID NO: 285678 - DNA, 75 bp, synthetic construct
  source 1..75: mol_type = other DNA
gcgcatacgacagccgtggacagttaattgcggtgaaagacacgcagggccatgaaacgcggtatgaatacaacg

SEQ ID NO: 285679 - DNA, 75 bp, synthetic construct
  source 1..75: mol_type = other DNA
agtcaaaagaaaggctgtattgacgccattatacctgcgtataacgaaggcccgtgtctggcgcagtcactggat

SEQ ID NO: 285680 - DNA, 75 bp, synthetic construct
  source 1..75: mol_type = other DNA
tgatctccgctgatggtaaaccggttagtccgaccgaagaaaacttcgctaatgcagcaaaaggtgcagactgga

SEQ ID NO: 285681 - DNA, 75 bp, synthetic construct
  source 1..75: mol_type = other DNA
accgaagaagaaattgctcaggccgctgaacgcttcgccactatgagcgacgaagacaaagcgcgtctgacccgt

SEQ ID NO: 285682 - DNA, 75 bp, synthetic construct
  source 1..75: mol_type = other DNA
gaaaatcaggactatgtgattgcttcccaaattcgggaagcaaaaggccggggaggccacaaccgcaaggactac

SEQ ID NO: 285683 - DNA, 75 bp, synthetic construct
  source 1..75: mol_type = other DNA
gccttgtttagagcagtcattagaaaatcttttacgaaataattattttaacaaggtgatttgtgttaatgatgg

SEQ ID NO: 285684 - DNA, 75 bp, synthetic construct
  source 1..75: mol_type = other DNA
gcgaccgctttgttgccgtcacgcaaaaaaataccggtaaaggtggtgaaccgccccgattttcctggagagtgt

SEQ ID NO: 285685 - DNA, 75 bp, synthetic construct
  source 1..75: mol_type = other DNA
ggtggcaaaacgggtgtggcgacgtgaacgggacctgacgggctggatgtcgctgtcacggaaaccgcaagtgac

SEQ ID NO: 285686 - DNA, 75 bp, synthetic construct
  source 1..75: mol_type = other DNA
ggaacacgcggacggcagcgtcacgcagagtcagtttgacgcggtgggcaggcttaaggcacagacggatgccgc

SEQ ID NO: 285687 - DNA, 75 bp, synthetic construct
  source 1..75: mol_type = other DNA
tgccggaagcggatgaggtgctgcctgcgccgctgccgccgtaccgggtactgaccgggctggtggaccgcttcg

SEQ ID NO: 285688 - DNA, 75 bp, synthetic construct
  source 1..75: mol_type = other DNA
acatgcgtacaacgcgcagggactggcgaaccgctgtataccggacagcctgcccgccgtggaatggctgaccta

SEQ ID NO: 285689 - DNA, 75 bp, synthetic construct
  source 1..75: mol_type = other DNA
accaccgcagcgaatctggatatccgcatcccgtatgccacagacccggcaggtaaccgcctgcccgacccggag

SEQ ID NO: 285690 - DNA, 75 bp, synthetic construct
  source 1..75: mol_type = other DNA
tatccgctgagcccggtgaatggcatggatccattaggattatatgaatttaaatcaaaaaatatagatgatatt

SEQ ID NO: 285691 - DNA, 75 bp, synthetic construct
  source 1..75: mol_type = other DNA
catacagtaagcgtggaagtaacgcgcttattaaatttgattacaccgacacattacagatcaaatatgccaatc

SEQ ID NO: 285692 - DNA, 75 bp, synthetic construct
  source 1..75: mol_type = other DNA
cgcctgttgttgccaacaatagtcaacaagtattatctgatttgattactgcgcttgagcagaccaatctatatt

SEQ ID NO: 285693 - DNA, 75 bp, synthetic construct
  source 1..75: mol_type = other DNA
ttattctattgacgaaacacaagacccaaatttccaaagtgtgatccaacatgtttttagtacaagtgtaactga

SEQ ID NO: 285694 - DNA, 75 bp, synthetic construct
  source 1..75: mol_type = other DNA
gtttaagctgccaggcgcgcgttaccgacgaagatttagtggtcgaaatcccgcgttacactatcaaccatgcgc

SEQ ID NO: 285695 - DNA, 75 bp, synthetic construct
  source 1..75: mol_type = other DNA
accattctcgacgttgcgctgcgtaacggcatcgagattgaacacgcctgtgaaaaatcctgtgcttgcaccacc

SEQ ID NO: 285696 - DNA, 75 bp, synthetic construct
  source 1..75: mol_type = other DNA
gtttaagctgccaggcgcgtgtcactgacgaagatttagtggtcgaaattccgcgttacactatcaaccatgcgc

SEQ ID NO: 285697 - DNA, 75 bp, synthetic construct
  source 1..75: mol_type = other DNA
attattgttggtaaaaaagagatgatcgcccgcctgcaaagccacccgctgaagcgtgcattacgcgcggataaa

SEQ ID NO: 285698 - DNA, 75 bp, synthetic construct
  source 1..75: mol_type = other DNA
ggcttcgccgcatattgaagatgtcgattttactgagccgggaagacacaacgcatgtagctttattattaacga

SEQ ID NO: 285699 - DNA, 75 bp, synthetic construct
  source 1..75: mol_type = other DNA
ctgaactgctacgtgatccgtgatgcattgctgaatgatgaggccgatatcggtgtcttttatcgcgtagggaat

SEQ ID NO: 285700 - DNA, 75 bp, synthetic construct
  source 1..75: mol_type = other DNA
tggctaaatggatcctgattgccaacatgctgtttggtcgtctcgaggtctttacattgctggtgctctttaccc

SEQ ID NO: 285701 - DNA, 75 bp, synthetic construct
  source 1..75: mol_type = other DNA
tatgctggcgattatcgccacgggcgtggatgacttttctgcctttgcctcggttgttgcaacattgaataacct

SEQ ID NO: 285702 - DNA, 75 bp, synthetic construct
  source 1..75: mol_type = other DNA
gcccgcctgcaaagccacccgctgaagcgtgcattacgcgcggataaaatgaccctcgcggcgctggaagccacg

SEQ ID NO: 285703 - DNA, 75 bp, synthetic construct
  source 1..75: mol_type = other DNA
atgggtcaaccatgacattaaacacacagggaaccgctcattctggcgctactactagtttgtggggtaactcta

SEQ ID NO: 285704 - DNA, 75 bp, synthetic construct
  source 1..75: mol_type = other DNA
atggctacatcgacagtaattcctgatgatatcaaaacgctaaaatccgacgttagcaaattaaaaaacgatcaa

SEQ ID NO: 285705 - DNA, 75 bp, synthetic construct
  source 1..75: mol_type = other DNA
gtatgccctatgctggtgtcattgcacaggaagctctggaagcaatcccggaagttgtaggttccgcaatgaaat

SEQ ID NO: 285706 - DNA, 75 bp, synthetic construct
  source 1..75: mol_type = other DNA
tagccagagagtcagacgacagaataacagcactggaagaagaaaatgcagaattaaaacaaagattatctgcaa

SEQ ID NO: 285707 - DNA, 75 bp, synthetic construct
  source 1..75: mol_type = other DNA
atcagatcgtcactgtgattaagtcagttgaagccggacgaaccgttaaagatatctgccggggggctggtatct

SEQ ID NO: 285708 - DNA, 75 bp, synthetic construct
  source 1..75: mol_type = other DNA
gaccagtacgctctggatatcaccgagtggactgaacgtgaatgccgcaagtacaagatgctctactccaccctc

SEQ ID NO: 285709 - DNA, 75 bp, synthetic construct
  source 1..75: mol_type = other DNA
agttgaagccggacgaaccgttaaagatgtctgccgggaggccggtatctctgaagccattgaaccgccccgggg

SEQ ID NO: 285710 - DNA, 75 bp, synthetic construct
  source 1..75: mol_type = other DNA
acgggggatgtgaagcagtcgaacctgattcgccagcctgacggtactatcgcctttgtggtcgattttaccggc

SEQ ID NO: 285711 - DNA, 75 bp, synthetic construct
  source 1..75: mol_type = other DNA
cgttttaaggagttctggatcgagcgtccaaaaccgaccgataagcgtttaacgatttatgcgttgcttgattcg

SEQ ID NO: 285712 - DNA, 75 bp, synthetic construct
  source 1..75: mol_type = other DNA
ggttgtggatgtgcagtcgaaaatctatctgcgcgataaagtcggcaaactgggggttgcaccgttaaccagtat

SEQ ID NO: 285713 - DNA, 75 bp, synthetic construct
  source 1..75: mol_type = other DNA
accgttgattactcaggcgtaacaggtttgcttgttcaggtagccagagagtcagacgacaggataacagcactg

SEQ ID NO: 285714 - DNA, 75 bp, synthetic construct
  source 1..75: mol_type = other DNA
tacacatacacgcttaaagaaaacggtatgccctatgctggtgtcattgcacaggaagctctggaagcaattcca

SEQ ID NO: 285715 - DNA, 75 bp, synthetic construct
  source 1..75: mol_type = other DNA
agcaacttgccctccgtcttccgtgatatgaaatacgcggactatcagcagatccagtttaaccatgataaagct

SEQ ID NO: 285716 - DNA, 75 bp, synthetic construct
  source 1..75: mol_type = other DNA
tggcgtcttttatcgtgtagggaatgatgatgctctgaatcgacgagagttgggtgaacaatcgctggtgctggt

SEQ ID NO: 285717 - DNA, 75 bp, synthetic construct
  source 1..75: mol_type = other DNA
aaaaggctccttacgccctggtgggatggactctctgtttcatggcaaccattggtgtgtcgctgggactggatc

SEQ ID NO: 285718 - DNA, 75 bp, synthetic construct
  source 1..75: mol_type = other DNA
ctgtgggttaaaaacagccaacttatgcctaatgattacaacccaaacaacgtggcaccacccgaaaaaaaaact

SEQ ID NO: 285719 - DNA, 75 bp, synthetic construct
  source 1..75: mol_type = other DNA
tgtctgatgaaaaactggctcaggaaggcctgttccagttcccgaccgtgattggcggcgtggtgctggcggtta

SEQ ID NO: 285720 - DNA, 75 bp, synthetic construct
  source 1..75: mol_type = other DNA
attgccccggactgcgacaacgacacgttactggtgctggcgaatcccatcgggccaacctgccacaaaggcacc

SEQ ID NO: 285721 - DNA, 75 bp, synthetic construct
  source 1..75: mol_type = other DNA
agacaaaaccatcgaaagcggtaaagtcaccttcttctcgcgcactaaacagcgactgtggaccaaaggcgaaac

SEQ ID NO: 285722 - DNA, 75 bp, synthetic construct
  source 1..75: mol_type = other DNA
ttgatgtatcacttgctagtgctgttgcaggatcaggatctggatttaacgacggtaattgagaacctgcgtaaa

SEQ ID NO: 285723 - DNA, 75 bp, synthetic construct
  source 1..75: mol_type = other DNA
tgaaagtttggttggcgtgggagatttgcgatttatcaatggcattttaggcaactattcgcgcaccatcgcatt

SEQ ID NO: 285724 - DNA, 75 bp, synthetic construct
  source 1..75: mol_type = other DNA
atcaggccaaccgcgcgccgtttagcgcttttttacgccttgaacagggcgcgattttaagcctttcgccagagc

SEQ ID NO: 285725 - DNA, 75 bp, synthetic construct
  source 1..75: mol_type = other DNA
acagtttctttgctgagtcataatgatgtcaatgcccgtcgggcctggctggaaagccagcaattctccccgcag

SEQ ID NO: 285726 - DNA, 75 bp, synthetic construct
  source 1..75: mol_type = other DNA
gggctaaacaggcaaatgacctggattacgccagcctgccggatagcgtagtggaacaggttcgcgctgcgtgga

SEQ ID NO: 285727 - DNA, 75 bp, synthetic construct
  source 1..75: mol_type = other DNA
taaccagaaaggcgaagatgcgtggcctattacctctaccacgttcattctgatccacaaagatcagaagaaacc

SEQ ID NO: 285728 - DNA, 75 bp, synthetic construct
  source 1..75: mol_type = other DNA
ggcgatatctacctgggcaaaatcaaaaagtgggatgatgaagccatcgccaaattgaatccgggtctgaaactg

SEQ ID NO: 285729 - DNA, 75 bp, synthetic construct
  source 1..75: mol_type = other DNA
acactgcaaaactgtatgccagcggcaccaaacgcatcgcgcagaaagtgggtgaagaaggcgtggaaactgcgc

SEQ ID NO: 285730 - DNA, 75 bp, synthetic construct
  source 1..75: mol_type = other DNA
aacaatagaagtaattattttttattcacatataataaaatctattgataaaaaaattagggtaattggttatgt

SEQ ID NO: 285731 - DNA, 75 bp, synthetic construct
  source 1..75: mol_type = other DNA
ttaatgggtgaagatcaacggcaaattgtagaacggcaaataaaacaacgaagtgggcaaaaaacatttcgcgac

SEQ ID NO: 285732 - DNA, 75 bp, synthetic construct
  source 1..75: mol_type = other DNA
cgacctggcagagcaaaagcaacggctggagcaaaaaatgcttatggatgcacctaaagtcgaattcgccgaacg

SEQ ID NO: 285733 - DNA, 75 bp, synthetic construct
  source 1..75: mol_type = other DNA
gagcgataagcgcacgttgatgagtgcgcttaaccagatggatggactggtgttcagctcctgtgtcgataacta

SEQ ID NO: 285734 - DNA, 75 bp, synthetic construct
  source 1..75: mol_type = other DNA
agtttagggatctgaatcgccacagctttggtaggcacctactttatggtcacgtgcacccgaagatcctgcggg

SEQ ID NO: 285735 - DNA, 75 bp, synthetic construct
  source 1..75: mol_type = other DNA
taaatgatattttgatcatgaattctagatgggagggggaacctcttgttattagagaatttattgataggaatc

SEQ ID NO: 285736 - DNA, 75 bp, synthetic construct
  source 1..75: mol_type = other DNA
actgattaacgttggtacactgacgcagccacgcgcacaggcgatgcgtgccgccgtagaacaggcaacacgctc

SEQ ID NO: 285737 - DNA, 75 bp, synthetic construct
  source 1..75: mol_type = other DNA
actggaacaactgctcgccgagcgcaaatctgccgatccggaaacctcctacaccgccaaactgtatgccagcgg

SEQ ID NO: 285738 - DNA, 75 bp, synthetic construct
  source 1..75: mol_type = other DNA
tgggatacatgaaccaggaggcgctggcgaaaacggtcgacagcggcaaagtgaccttcttctcgcgcacgaaac

SEQ ID NO: 285739 - DNA, 75 bp, synthetic construct
  source 1..75: mol_type = other DNA
taaaacttttgagaacgttgttttaacaggcatcgaatacacagaagaggcaagcgaatccctagtatttgatct

SEQ ID NO: 285740 - DNA, 75 bp, synthetic construct
  source 1..75: mol_type = other DNA
cactggatgaaacaagccggagaacgtgcggccgccagaagcgaagggccgggcagttttatcccccatttcctt

SEQ ID NO: 285741 - DNA, 75 bp, synthetic construct
  source 1..75: mol_type = other DNA
tagctggcattgctaatggtggacggggagtggataccactgacgccgcagctaacgcgatacccgctgcacaaa

SEQ ID NO: 285742 - DNA, 75 bp, synthetic construct
  source 1..75: mol_type = other DNA
cgtactgcctggatcccgttgaaacaacttagcacagagccaagcctgcgctcccgtgtgccagatctggaaaat

SEQ ID NO: 285743 - DNA, 75 bp, synthetic construct
  source 1..75: mol_type = other DNA
gatccgtcagccatacatctattaagggacagtttcgtcgacttgcgaacggaggtgctcgactttcaaaatatt

SEQ ID NO: 285744 - DNA, 75 bp, synthetic construct
  source 1..75: mol_type = other DNA
cccactgcgagcgcattaaagccaccaacggcaaagatcgggtgatcatgcactgccacgccactaacctgatcg

SEQ ID NO: 285745 - DNA, 75 bp, synthetic construct
  source 1..75: mol_type = other DNA
actgcgtgtagcggaaaaaattgacggtcagtgggtgacgcatcagtggttgaaaaaagcggtgctgctctcttt

SEQ ID NO: 285746 - DNA, 75 bp, synthetic construct
  source 1..75: mol_type = other DNA
agtaccatcatgatgagctaaaaagctttgaactcttgataaaagaacggatagagaaagctgattatgacacaa

SEQ ID NO: 285747 - DNA, 75 bp, synthetic construct
  source 1..75: mol_type = other DNA
ttggcatcgactatgagcgttcatttggcggtaaatacaatatcgataatgagctgaacttaaaagtacgctatt

SEQ ID NO: 285748 - DNA, 75 bp, synthetic construct
  source 1..75: mol_type = other DNA
caatcggcgtcgggatggggccgaccaaaacgctggctaaaagcgcgcaatgggcgtccaaagagtggccacagt

SEQ ID NO: 285749 - DNA, 75 bp, synthetic construct
  source 1..75: mol_type = other DNA
gggacgaggcatagctcctgagtggcaaatgaagcgcgaaatgttgtcaccagcatatacgacacgctggactga

SEQ ID NO: 285750 - DNA, 75 bp, synthetic construct
  source 1..75: mol_type = other DNA
taatggcctgtcggtgctaacctatcaccatattctgcgcgacgaagaaaacacccgttttcgccatacttcgac

SEQ ID NO: 285751 - DNA, 75 bp, synthetic construct
  source 1..75: mol_type = other DNA
gggtattacactgttaaggtcaagaaaaacaacagagcttttaaataaggttagatactatatacggtattacga

SEQ ID NO: 285752 - DNA, 75 bp, synthetic construct
  source 1..75: mol_type = other DNA
gggcttcagcggtaccccggccctggtggttctcccgtcagccggcgccagtgctgataacgtgacggttattcc

SEQ ID NO: 285753 - DNA, 75 bp, synthetic construct
  source 1..75: mol_type = other DNA
tggtcgggggatcgcgcctcagtggaaaatgaaacgggaaatgctcagtcctgcttacacaacacgctggaaagg

SEQ ID NO: 285754 - DNA, 75 bp, synthetic construct
  source 1..75: mol_type = other DNA
tttctggcaacctgccgtcgaaagatggcaaatacagcctttattgtgccgttatcgttaagaaagttgacgcga

SEQ ID NO: 285755 - DNA, 75 bp, synthetic construct
  source 1..75: mol_type = other DNA
tatggaatacattaaccatcaaactgatttgaatgaaaaagcgtcttacattgctaacgatagtgtcgttataaa

SEQ ID NO: 285756 - DNA, 75 bp, synthetic construct
  source 1..75: mol_type = other DNA
actcgcgggggcagaaatgcaaactatcctcaacaatccattggcaagtccctttacacttggagtctcttctgc

SEQ ID NO: 285757 - DNA, 75 bp, synthetic construct
  source 1..75: mol_type = other DNA
gaccacggtcatcagatgctggacgacctgaagaagaaaaccaacccaggttactccgcaattggtcgtctgaaa

SEQ ID NO: 285758 - DNA, 75 bp, synthetic construct
  source 1..75: mol_type = other DNA
ttaaattgctggcgctgctggcctacgtgccaatccggtacctggaaatcatcatcagcgtcgatatggacgaat

SEQ ID NO: 285759 - DNA, 75 bp, synthetic construct
  source 1..75: mol_type = other DNA
attgacgccctgcgtccggaaattcagcaagttaaagacgaaacagcaagagcgcattaccgcttagacgttcgt

SEQ ID NO: 285760 - DNA, 75 bp, synthetic construct
  source 1..75: mol_type = other DNA
aaaaacaaaaaggcacaggaaagaccccaccgttccatatgcgtatagttcctgaattgaaggagcagtttgata

SEQ ID NO: 285761 - DNA, 75 bp, synthetic construct
  source 1..75: mol_type = other DNA
tcggcgcgcgctctgaagtcgttgaaggcgtgatcgtcgaagaaggctccgtcatttccatgggcgtatatatcg

SEQ ID NO: 285762 - DNA, 75 bp, synthetic construct
  source 1..75: mol_type = other DNA
gaaggtttccgcgtagtaccgccagcggcagtgcgtcagggggcatttatcgcccgtaacaccgtactgatgccg

SEQ ID NO: 285763 - DNA, 75 bp, synthetic construct
  source 1..75: mol_type = other DNA
tcttacgtcaacatcggcgcatatgttgatgaaggcacgatggttgatacctgggcgaccgtcggttcttgtgcg

SEQ ID NO: 285764 - DNA, 75 bp, synthetic construct
  source 1..75: mol_type = other DNA
tttctggcaacctgccgtcgaaagatggtaaatacagcctttactgtgctgttattgttaagaaagttgacgcga

SEQ ID NO: 285765 - DNA, 75 bp, synthetic construct
  source 1..75: mol_type = other DNA
tggtaaatacagcctctattgtgcggttatcgttaagaaagttgacgcgaaaacccgcggcaaagtcggcatcaa

SEQ ID NO: 285766 - DNA, 75 bp, synthetic construct
  source 1..75: mol_type = other DNA
cgcgttccagcgggttctgtggttgtttctggcaatctgccgtcgaaagatggtaaatacagcctctattgtgcg

SEQ ID NO: 285767 - DNA, 75 bp, synthetic construct
  source 1..75: mol_type = other DNA
gttttttggtcatcagctcagggaacaggtaaagagctggacaggactcaccatgggggtgggcattgcgcctac

SEQ ID NO: 285768 - DNA, 75 bp, synthetic construct
  source 1..75: mol_type = other DNA
ccgggtgtgcagtgctgtgtcacttgtcaggaaatcgcagagctgaaaggcaaacactataacggaggtgcagta

SEQ ID NO: 285769 - DNA, 75 bp, synthetic construct
  source 1..75: mol_type = other DNA
acgtcatatccgtgctgcccgtgccaaagcgccgggcgtgtcccgcgtgctttgcgttgagtgtgaagcgccaat

SEQ ID NO: 285770 - DNA, 75 bp, synthetic construct
  source 1..75: mol_type = other DNA
aaaacaccgggcgtgtcccgcgtgctttgcattgagtgtgaagcgccaattccgccagtacgacgccgcgccatt

SEQ ID NO: 285771 - DNA, 75 bp, synthetic construct
  source 1..75: mol_type = other DNA
ggtgaagaccagcttgagataatcccgctggatacgccagacctggtcattgatgactcatttaatagcggcaaa

SEQ ID NO: 285772 - DNA, 75 bp, synthetic construct
  source 1..75: mol_type = other DNA
ggcagaatatttatttaaatggcgttcaccttacggcgaatgcagactcatttgagataattcgctggatacctc

SEQ ID NO: 285773 - DNA, 75 bp, synthetic construct
  source 1..75: mol_type = other DNA
cgtatcgctgcgccttctcgtttcctctgcgaagaatgtgacgcaccaatcccggaagctcgccgcattgcgatt

SEQ ID NO: 285774 - DNA, 75 bp, synthetic construct
  source 1..75: mol_type = other DNA
caggcgatggcacgcctggggcttcctgctgctgagattatgaatggtcaattgcgatcatcattttctccccca

SEQ ID NO: 285775 - DNA, 75 bp, synthetic construct
  source 1..75: mol_type = other DNA
ggcgcggctgggtgaacccgaccccgatattttctctggtaaaaagcgatcttctttttcatcgcctctgcggga

SEQ ID NO: 285776 - DNA, 75 bp, synthetic construct
  source 1..75: mol_type = other DNA
atgggataaacgacgctctgaaaccgttcctgaggtcaaggtgggggtcaatgagttatatcttgcttatgattt

SEQ ID NO: 285777 - DNA, 75 bp, synthetic construct
  source 1..75: mol_type = other DNA
ggtgtgcagctttgcattacctgccaggaaattgcagagctgaaaggcaaacattacaacggaggtgctgtatga

SEQ ID NO: 285778 - DNA, 75 bp, synthetic construct
  source 1..75: mol_type = other DNA
atgtctgatggtaaaacaaagggcggaacaaccgcttcgcgagcgggggtcctacagtcttctgttaatattctg

SEQ ID NO: 285779 - DNA, 75 bp, synthetic construct
  source 1..75: mol_type = other DNA
aatccctatgccgatatggctctggtacggctcgaagaagccctgcaacgagcaacacttaaaattaatgaaaac

SEQ ID NO: 285780 - DNA, 75 bp, synthetic construct
  source 1..75: mol_type = other DNA
gcgacactaaaagctatcgaaggtaactctaccacgctggtggatagtaaaaatctctatttgtccggtcgacgt

SEQ ID NO: 285781 - DNA, 75 bp, synthetic construct
  source 1..75: mol_type = other DNA
aggcaatatccgccgtacggaaaaactgctgtcactgcagccggcggaggaaatctggggggtaggccgcaggat

SEQ ID NO: 285782 - DNA, 75 bp, synthetic construct
  source 1..75: mol_type = other DNA
agctgttcgacgaacgtcctccacgtcctcacagcgctgagctgatgaaggttctcgatggcattaatcattccg

SEQ ID NO: 285783 - DNA, 75 bp, synthetic construct
  source 1..75: mol_type = other DNA
gctgtatttcactggaggaagcaccgccccccaaacagcagatagtctgcagcaggagctttggagaacgagtca

SEQ ID NO: 285784 - DNA, 75 bp, synthetic construct
  source 1..75: mol_type = other DNA
aaaacactcgatgaactgaaccaatcgggaaaagggaaagtgtggtttgcggggcgaggaaccgcccctgaatgg

SEQ ID NO: 285785 - DNA, 75 bp, synthetic construct
  source 1..75: mol_type = other DNA
caaagcggggataatgcttaacgattttactccgagcggcgttgcgcagctgaatcttttcgatgaagtacagcc

SEQ ID NO: 285786 - DNA, 75 bp, synthetic construct
  source 1..75: mol_type = other DNA
gcggggtatggccccggaatggcagatgaaacgggagatgctttctcctgcttatacgacacgatggtcagatat

SEQ ID NO: 285787 - DNA, 75 bp, synthetic construct
  source 1..75: mol_type = other DNA
cgcccatagagatacgcgtttatgaactgaaaaatgatgcagctttcacggcggcggactggtggtcccttcagg

SEQ ID NO: 285788 - DNA, 75 bp, synthetic construct
  source 1..75: mol_type = other DNA
agccgctttatgccgaagaaaaaagtcgaactggatgctgacatagagcaaagcgccatcgtgattaaagaacgg

SEQ ID NO: 285789 - DNA, 75 bp, synthetic construct
  source 1..75: mol_type = other DNA
aggagcgcgaacaagccgagcgcgagcgccatatcaacaacgcgcgcagccgtattactgtgccttctcgtttcc

SEQ ID NO: 285790 - DNA, 75 bp, synthetic construct
  source 1..75: mol_type = other DNA
ctcgaagaaactgaacacgatgggtattaccacagccctgcagctggcgcgtgcgaaccctgtatttatcaggaa

SEQ ID NO: 285791 - DNA, 75 bp, synthetic construct
  source 1..75: mol_type = other DNA
agttctgcaggcatattgccgtgtttgtgaaaacatcgccgttcgccgtaaatgagccctactacggtaatctgg

SEQ ID NO: 285792 - DNA, 75 bp, synthetic construct
  source 1..75: mol_type = other DNA
aaccttgtcggcctgctggatgggtatttccaccacgaagcggatgtcgaaggcggtcaacacctcaacgtcaac

SEQ ID NO: 285793 - DNA, 75 bp, synthetic construct
  source 1..75: mol_type = other DNA
atctcatgacagacgttgtctacagcggcgcaaacgcaactcttccccattactcttactatagcgatggtcgcg

SEQ ID NO: 285794 - DNA, 75 bp, synthetic construct
  source 1..75: mol_type = other DNA
gccattgagcagcatcaacaggacgatatcctcaaactgcggtttgaagctcactattatggcccctatgcgccc

SEQ ID NO: 285795 - DNA, 75 bp, synthetic construct
  source 1..75: mol_type = other DNA
cgtgccaatatcgctctggctcaggaggcatctcttaacctcagtcagataagcagtgatctgctgaataaccct

SEQ ID NO: 285796 - DNA, 75 bp, synthetic construct
  source 1..75: mol_type = other DNA
agttccgccagcagaatgccgccacaccggcactgaacaaacgcctcccttcctggtccgttaatgaccagtggc

SEQ ID NO: 285797 - DNA, 75 bp, synthetic construct
  source 1..75: mol_type = other DNA
tcattcgtgagggcgaagagaaaatgtcgtttaccagcaaaaaggaagctgatgcttatgataaaatgcttgata

SEQ ID NO: 285798 - DNA, 75 bp, synthetic construct
  source 1..75: mol_type = other DNA
ttgtgcgataaatggcatccacgcggcgtttcattatttgaaaaagaattacatttcaggttgcgttatgacagt

SEQ ID NO: 285799 - DNA, 75 bp, synthetic construct
  source 1..75: mol_type = other DNA
cagacaccggaagccgcacgcttccgcaacgattaccagtcgctgtacgacatcaattaccgcaccgctggtggt

SEQ ID NO: 285800 - DNA, 75 bp, synthetic construct
  source 1..75: mol_type = other DNA
accgggatcattccttcgcaggtaaccacccagttatcggcggtttcccgcgcgcgcagtcccgaggcggtccgt

SEQ ID NO: 285801 - DNA, 75 bp, synthetic construct
  source 1..75: mol_type = other DNA
cttcgcccgccggcgcgcagggaaaataccagatgatgccggatacgggcaaagagctggcggcgaagcgcggag

SEQ ID NO: 285802 - DNA, 75 bp, synthetic construct
  source 1..75: mol_type = other DNA
ttatcaactccgagagataagctttattcagttgtgatcagaacaaaagataaagatggtattacgagggatgat

SEQ ID NO: 285803 - DNA, 75 bp, synthetic construct
  source 1..75: mol_type = other DNA
agacccaagcaacaagtcaatgcagaaagctgctgattacacagaaatggcgcagaactttcgtattaatgatgc

SEQ ID NO: 285804 - DNA, 75 bp, synthetic construct
  source 1..75: mol_type = other DNA
cagtttcagaaaaatgattctggaggcatggacatgcgtgccatacgccttgttgaatcaggtgatcgtcatttt

SEQ ID NO: 285805 - DNA, 75 bp, synthetic construct
  source 1..75: mol_type = other DNA
cagtttccgccaggcgctggaacagctcttcgcactctacaccccggtggaaaaaccgctgtatgcccggaccag

SEQ ID NO: 285806 - DNA, 75 bp, synthetic construct
  source 1..75: mol_type = other DNA
gatgttccgccgcataaatatcggatggcgaatatacagggcgaatcgcgctttttacatccattgaatcattac

SEQ ID NO: 285807 - DNA, 75 bp, synthetic construct
  source 1..75: mol_type = other DNA
atgaaaatagcacgagtgtatttgcgagttagtacagacgaacaggatttgacccggcaaaatgaaattatagaa

SEQ ID NO: 285808 - DNA, 75 bp, synthetic construct
  source 1..75: mol_type = other DNA
aagaatacgagtattgcggaaacagcgaaactttgtgaatgtagcgttagtcttgtaaaaactgtatggtctaaa

SEQ ID NO: 285809 - DNA, 75 bp, synthetic construct
  source 1..75: mol_type = other DNA
atgattaatcgaaccaaactggagcacatcctcgagtatgccagacagcagaggcgctttggtcagcattgcaaa

SEQ ID NO: 285810 - DNA, 75 bp, synthetic construct
  source 1..75: mol_type = other DNA
tctggcgtgggatgaagatttaacaaagcactgtctggatttttctctgctggaaaagaaagtgttctggcgtaa

SEQ ID NO: 285811 - DNA, 75 bp, synthetic construct
  source 1..75: mol_type = other DNA
ttcaccccatcagtgatgctgtcgcccagtatcaggactcgctttataccatcatcgaaacagagtctggtgacc

SEQ ID NO: 285812 - DNA, 75 bp, synthetic construct
  source 1..75: mol_type = other DNA
tgctggctctaacggcgcgtatctgaaaagccgcctgtcagtgccagttattttgattaaaccgagcggctacga

SEQ ID NO: 285813 - DNA, 75 bp, synthetic construct
  source 1..75: mol_type = other DNA
ggcagttattccatattgtatttgtcgtgctatccaacaattgcgccctcgagaagtcattattaaaaaggaaga

SEQ ID NO: 285814 - DNA, 75 bp, synthetic construct
  source 1..75: mol_type = other DNA
gacccgaaccttcaaaaattactttgatgttccgccgcataaataccggatgaccaatatgcagggtgaatcgcg

SEQ ID NO: 285815 - DNA, 75 bp, synthetic construct
  source 1..75: mol_type = other DNA
taaacgcatcattgagtatcgtgcaaagaatacgagtattgcggaaacagcgaaactttgtgaatgtagcgttag

SEQ ID NO: 285816 - DNA, 75 bp, synthetic construct
  source 1..75: mol_type = other DNA
taaaaatactcggtgcaaaaacatccattgccatattatgtgttttttgtggagcaagctttttgttcggccaat

SEQ ID NO: 285817 - DNA, 75 bp, synthetic construct
  source 1..75: mol_type = other DNA
tgagagctggcaggcacttgttgcggcctgcctgtccgacgcgttatcttcaggcgaaataagttcaaatatgaa

SEQ ID NO: 285818 - DNA, 75 bp, synthetic construct
  source 1..75: mol_type = other DNA
attctccggaggattggattctgcattaatttttcacacacttaaagaatcaggtaacaaattctgcgcttatca

SEQ ID NO: 285819 - DNA, 75 bp, synthetic construct
  source 1..75: mol_type = other DNA
ttcgatgggcggcatgaaacagaccatcagccgtgaagagctgattgcactcggtgagcgttttggcgttacgcc

SEQ ID NO: 285820 - DNA, 75 bp, synthetic construct
  source 1..75: mol_type = other DNA
caccgacgcctggctgaaaggctgggacgagcgcaacggcggtaacctcacgctgcgcctggatgacgctgatat

SEQ ID NO: 285821 - DNA, 75 bp, synthetic construct
  source 1..75: mol_type = other DNA
aggatattgaaggtttagaaagttacctgactaatggctatgtagaggctaactcttttaatgacccagaggacg

SEQ ID NO: 285822 - DNA, 75 bp, synthetic construct
  source 1..75: mol_type = other DNA
ttcgatgggcggcatgaaacagaccatcagccgtgaagagttgatagcgctcggccagcgtttcggcgttacacc

SEQ ID NO: 285823 - DNA, 75 bp, synthetic construct
  source 1..75: mol_type = other DNA
atgcaaaacattactcagtcctggtttgtccagggaatgatcaaagccaccaccgacgcctggctgaaaggctgg

SEQ ID NO: 285824 - DNA, 75 bp, synthetic construct
  source 1..75: mol_type = other DNA
tgcgaacgcattaaagccaccaacggtaaagatcgggtgatcatgcactgccatgccaccaacctgatcgccctc

SEQ ID NO: 285825 - DNA, 75 bp, synthetic construct
  source 1..75: mol_type = other DNA
cctcaccgacgacactcgtcacggtattgtgtttaaagatggctccaacggacataaatcgctgtttatgggtta

SEQ ID NO: 285826 - DNA, 75 bp, synthetic construct
  source 1..75: mol_type = other DNA
ttacaggacggttgccgccgcaggacaccttcgctttaacgaggataattgccataaacaatgcaggcactgcaa

SEQ ID NO: 285827 - DNA, 75 bp, synthetic construct
  source 1..75: mol_type = other DNA
aaatggacgattgcagaatgtaaggagctaataaacatctatcaggctaaattggacgccttaaggagaaaggca

SEQ ID NO: 285828 - DNA, 75 bp, synthetic construct
  source 1..75: mol_type = other DNA
cgcttcttatcgataaagccgtagattttatggcctcaagccaggcgtttcgggagtatctgaaaaaacttcccc

SEQ ID NO: 285829 - DNA, 75 bp, synthetic construct
  source 1..75: mol_type = other DNA
atacctgcacgattcactgccaaacgccacctatgttggctttaccggcacaccgattgacgcgacgctcgatgt

SEQ ID NO: 285830 - DNA, 75 bp, synthetic construct
  source 1..75: mol_type = other DNA
tgtaaacgctatcgccgggatattccgcaactgtttatctacaacgcgctctgcattattagcgatggcgttaat

SEQ ID NO: 285831 - DNA, 75 bp, synthetic construct
  source 1..75: mol_type = other DNA
ttagcaatgaattctatagtagagcactgtcaaagtttatcgaccgaagagtatattagaagcctcagccaagag

SEQ ID NO: 285832 - DNA, 75 bp, synthetic construct
  source 1..75: mol_type = other DNA
tctcttcctgacgtgaattacaaaagtttgcgccgtttacccaatttattaatagacccgacaacactagacgaa

SEQ ID NO: 285833 - DNA, 75 bp, synthetic construct
  source 1..75: mol_type = other DNA
gtcggcatggggatgtcggctttccgcgcctgaacataatatttaccagaaacagggaaaaggcgtggtatacct

SEQ ID NO: 285834 - DNA, 75 bp, synthetic construct
  source 1..75: mol_type = other DNA
ctcacccgatcaacaaattgggacggacatgagaaagacggtttacaggtgtttgaatccgttggcccactgata

SEQ ID NO: 285835 - DNA, 75 bp, synthetic construct
  source 1..75: mol_type = other DNA
atgcactatcgcaatgtggtttgtttgttggcttgttcgttgttcttatcatcggcatggggatgtcggctttcc

SEQ ID NO: 285836 - DNA, 75 bp, synthetic construct
  source 1..75: mol_type = other DNA
atgccatttatcgcacaagatagagcgcatttatcgcgcggcgcatcattccgttccccctggaaacctgactta

SEQ ID NO: 285837 - DNA, 75 bp, synthetic construct
  source 1..75: mol_type = other DNA
ggtgaaattccgttccccctggaaacctgactttctggggctgatattacgtgacgctaatttcttatatgtcga

SEQ ID NO: 285838 - DNA, 75 bp, synthetic construct
  source 1..75: mol_type = other DNA
tttcaggcaatattgatagagaggaaataaaagaaaaatcgaaaatatatggattttcaacccattctgattaca

SEQ ID NO: 285839 - DNA, 75 bp, synthetic construct
  source 1..75: mol_type = other DNA
ttgctggcggtagccgaggaaggaacagatgcccgaccaaatatgacccctgaaaagttcttctttgaagagctt

SEQ ID NO: 285840 - DNA, 75 bp, synthetic construct
  source 1..75: mol_type = other DNA
gacatagtgctgccgtggccttggagcctaccacgctatatcgataacgtttcacgcattggaacccataagggg

SEQ ID NO: 285841 - DNA, 75 bp, synthetic construct
  source 1..75: mol_type = other DNA
gaacgtattgcacagtacaaaaaccaactctacgtggtcaggcgttcgtcttttggagaggatcagctcgaaacc

SEQ ID NO: 285842 - DNA, 75 bp, synthetic construct
  source 1..75: mol_type = other DNA
atgaatcttcatttatcgtaaataaatcgggagtacgctggcgaaaagcgctttcaccagacctgcaatggagtg

SEQ ID NO: 285843 - DNA, 75 bp, synthetic construct
  source 1..75: mol_type = other DNA
ttagaagtaatcgcctatcttgatgcaatcgcgaataatatagagcactatataaataataatgaatatttagaa

SEQ ID NO: 285844 - DNA, 75 bp, synthetic construct
  source 1..75: mol_type = other DNA
atattgtcttgttgatattcgttctcctgacgaaataaaacgttgcggagaatatcctggagccttatgtattcc

SEQ ID NO: 285845 - DNA, 75 bp, synthetic construct
  source 1..75: mol_type = other DNA
gtaacagttgtagaaatgggagaacaggttatgtcttctgttgatccagaaatggtatctccccttcacaaagaa

SEQ ID NO: 285846 - DNA, 75 bp, synthetic construct
  source 1..75: mol_type = other DNA
gaaatcatctctacgctgccacccgatgtggtcgcgcatcccaccattaaacggcaactggcattacgtcaggaa

SEQ ID NO: 285847 - DNA, 75 bp, synthetic construct
  source 1..75: mol_type = other DNA
agattccgcaacctgggggtggcagagctgcaacatgaaggtggcgatacctttatggggcatcaggaaatttta

SEQ ID NO: 285848 - DNA, 75 bp, synthetic construct
  source 1..75: mol_type = other DNA
tcatcacagtctttaccacggcagtcaggggacatctatttgtaagatattttcgctgagtattggcagcgtcgg

SEQ ID NO: 285849 - DNA, 75 bp, synthetic construct
  source 1..75: mol_type = other DNA
gcagggcctgccaaccgccagggacggattgctgctgataacatgctcgatcatcacagtctttaccacggcagt

SEQ ID NO: 285850 - DNA, 75 bp, synthetic construct
  source 1..75: mol_type = other DNA
aaaaataatctatgaacaaaggtacgaaactattacagaaaagaacttcactttcgatatgagcaatattaataa

SEQ ID NO: 285851 - DNA, 75 bp, synthetic construct
  source 1..75: mol_type = other DNA
tcgaaagactctctttgtctgttgagaaagaaccaccagaagaattttcccaacatgttttttttagaaatctgc

SEQ ID NO: 285852 - DNA, 75 bp, synthetic construct
  source 1..75: mol_type = other DNA
ccggcgcctgccgggtacacagcatcccgttttatctgcaaagaatttctgccgggttccccagcccggcgcagg

SEQ ID NO: 285853 - DNA, 75 bp, synthetic construct
  source 1..75: mol_type = other DNA
attcggtgcttaatgaagaagcgctcttagcctttgaatatggctattcaacgtctgcgcctcagcaactggtta

SEQ ID NO: 285854 - DNA, 75 bp, synthetic construct
  source 1..75: mol_type = other DNA
ttcttctgctgacattagagataacataaaaaagataattgatttagaaaaaccttctattattattgctgagtc

SEQ ID NO: 285855 - DNA, 75 bp, synthetic construct
  source 1..75: mol_type = other DNA
cagctccaatattcccgacaaataatgggtacaaaagttctgtattaggaagaattgatgagttattaaatgagg

SEQ ID NO: 285856 - DNA, 75 bp, synthetic construct
  source 1..75: mol_type = other DNA
ctggaagaaacattcgaagcgggtaaacgctccgccaaaatctcctttgttattactgtcgtgctttcacttctc

SEQ ID NO: 285857 - DNA, 75 bp, synthetic construct
  source 1..75: mol_type = other DNA
gaaattttatgccagaatgcaaaaaatcgatcccgcgctggatgtcatatctggccaggtaatgagtcatatatt

SEQ ID NO: 285858 - DNA, 75 bp, synthetic construct
  source 1..75: mol_type = other DNA
agtagacaaaaaattaccttcaattggatatgcttatctcgttgaactatttgaatcaaagttttttgatactgt

SEQ ID NO: 285859 - DNA, 75 bp, synthetic construct
  source 1..75: mol_type = other DNA
ggcctgggccggggtattgatcattaccctgtgcgtactgctgctgaacattctggcgcgcgttgtttttgcgaa

SEQ ID NO: 285860 - DNA, 75 bp, synthetic construct
  source 1..75: mol_type = other DNA
atgtctaacactagttctaattttgagatgactggaactttgctggggctggagcttcgtaaacgtaaaacttct

SEQ ID NO: 285861 - DNA, 75 bp, synthetic construct
  source 1..75: mol_type = other DNA
tgctaatgaaatttcgtcaggagcaagtaatgtaggagtagttatattttctactcaggattcggcgaatacatt

SEQ ID NO: 285862 - DNA, 75 bp, synthetic construct
  source 1..75: mol_type = other DNA
gattttagagcccttagcggtgtcatggctgctggctctaggcaaatatttgctaatgaaatttcgtcaggagca

SEQ ID NO: 285863 - DNA, 75 bp, synthetic construct
  source 1..75: mol_type = other DNA
aaaatgactccatcccaccagaacttattaggcttctaggtcaagataaagtttattgggtagaaatagaaggtt

SEQ ID NO: 285864 - DNA, 75 bp, synthetic construct
  source 1..75: mol_type = other DNA
caggcgcctataacctgaaagccggtgacaataccgtgcgttacagcgcctgggttcagaaagctacaggtaaag

SEQ ID NO: 285865 - DNA, 75 bp, synthetic construct
  source 1..75: mol_type = other DNA
tggattacatcgacatgcgcctggcagagaatgtctggaatagtgaggttatctttgcggagattaaggcaatgt

SEQ ID NO: 285866 - DNA, 75 bp, synthetic construct
  source 1..75: mol_type = other DNA
ggcctgggccggggtgttgattattaccctgtgcgtcctgctgttgaacattctggcgcgcgttgtttttgcgaa

SEQ ID NO: 285867 - DNA, 75 bp, synthetic construct
  source 1..75: mol_type = other DNA
caaaatgcaggcgcgtcgccgcctcaagaaccgtattgcgctgacgctctcgatggcgacgatggccttcggtct

SEQ ID NO: 285868 - DNA, 75 bp, synthetic construct
  source 1..75: mol_type = other DNA
gtgacgatctttaagtttgcgatgagcccgtttgcggaatggcagcaactggcctgggccggggtattgatcatt

SEQ ID NO: 285869 - DNA, 75 bp, synthetic construct
  source 1..75: mol_type = other DNA
gttgccaccggcgcactgccggaagatatcaccgtgaagccaggcagcgtggcagacggcgaaatcggctttgcc

SEQ ID NO: 285870 - DNA, 75 bp, synthetic construct
  source 1..75: mol_type = other DNA
aacgggggatatacaaacgttagctttggtgatggtgaaaaccgttacaatatcgtggaccggaataatgcgccg

SEQ ID NO: 285871 - DNA, 75 bp, synthetic construct
  source 1..75: mol_type = other DNA
accgcagttttacctttgacaggctgtcactgaagaacactgattttggtcttggtcgcaatgccacgctgaaca

SEQ ID NO: 285872 - DNA, 75 bp, synthetic construct
  source 1..75: mol_type = other DNA
gaaatcgtctgcagggccgggagcggagcgtggagcttcatgatggcgacgccctgtggctgaaagccggggttg

SEQ ID NO: 285873 - DNA, 75 bp, synthetic construct
  source 1..75: mol_type = other DNA
tcaaaaatggtgttaccactgtgtatatggaagtgcgaggtgagagtggggataaaatcggctctttagaagcac

SEQ ID NO: 285874 - DNA, 75 bp, synthetic construct
  source 1..75: mol_type = other DNA
gcaggctggtatcactccacagattgattatcatggttcagttgacatgtctcaaagtcagtgggggaaggcacc

SEQ ID NO: 285875 - DNA, 75 bp, synthetic construct
  source 1..75: mol_type = other DNA
aaagattctactggtgtgaagattggtacagcagagacttctattgtggctgcagcagcctcttcctacgttgat

SEQ ID NO: 285876 - DNA, 75 bp, synthetic construct
  source 1..75: mol_type = other DNA
ggaaaaatcatcaagatcacacttgatcaggttgtttccggcgatactccaatccagtggaaagcttctctgccg

SEQ ID NO: 285877 - DNA, 75 bp, synthetic construct
  source 1..75: mol_type = other DNA
ggattatttcatcctgaagcagaacacctatggttatttccccacggaccagagcagtaacgtcacctgggagtt

SEQ ID NO: 285878 - DNA, 75 bp, synthetic construct
  source 1..75: mol_type = other DNA
actggtggggagttcgctgtcatggacatatgatagtaacgcaggcattggtgcactgacacagggaagcaccac

SEQ ID NO: 285879 - DNA, 75 bp, synthetic construct
  source 1..75: mol_type = other DNA
acagggtacagtcatggtggatatgacgacttcagcctcaatcagagcggactgaatgtgggattccgccagtct

SEQ ID NO: 285880 - DNA, 75 bp, synthetic construct
  source 1..75: mol_type = other DNA
atgggtgtcagcactgccgacaacacgggcgaccggattgatatcctgaataaggcaacgggcggacataacaca

SEQ ID NO: 285881 - DNA, 75 bp, synthetic construct
  source 1..75: mol_type = other DNA
agtgatgatgtgacagatgcaacctctccggttgcaccggaaacaggaagtacagaggcagatggtgttgtgtct

SEQ ID NO: 285882 - DNA, 75 bp, synthetic construct
  source 1..75: mol_type = other DNA
aatagtgcgcacaatatgacagagggagctgttcgttcgcgtatttctgcaatagattccgaatttactgcaaag

SEQ ID NO: 285883 - DNA, 75 bp, synthetic construct
  source 1..75: mol_type = other DNA
atggctatggttgaaacacaaactaccgcggcgctggcagaatcccgccgcaaaatgcaggcgcgtcgccgcctc

SEQ ID NO: 285884 - DNA, 75 bp, synthetic construct
  source 1..75: mol_type = other DNA
aaaaagaaatcaatgaattgtatgaatataatagcgaaacaggtttgtttatatacaagagaagagaaagtgtaa

SEQ ID NO: 285885 - DNA, 75 bp, synthetic construct
  source 1..75: mol_type = other DNA
ctggtgctaccttcgctggcgcttgggctggtgtttggttacgcaatgaaaaacagcggtctttggctggcggcg

SEQ ID NO: 285886 - DNA, 75 bp, synthetic construct
  source 1..75: mol_type = other DNA
gacgatggcgactggttcggcgcacttgacgggctgggtgagatggccgacagctttctggccgatatggaaaac

SEQ ID NO: 285887 - DNA, 75 bp, synthetic construct
  source 1..75: mol_type = other DNA
gattgcccgtattgccggtgaaaccgcgccgctgctgtttaccgcgctctccaaccagttctggagcacggacat

SEQ ID NO: 285888 - DNA, 75 bp, synthetic construct
  source 1..75: mol_type = other DNA
ttgtggttggtctgtttgtttataccatcgtggtggcgcagatggagcacttctccggctgggcgggcgtaattg

SEQ ID NO: 285889 - DNA, 75 bp, synthetic construct
  source 1..75: mol_type = other DNA
gcgggcgttttggcgtcaacctcgtgactggctggcaaaagcccgagtatgagcagatagatgggtatctggcct

SEQ ID NO: 285890 - DNA, 75 bp, synthetic construct
  source 1..75: mol_type = other DNA
gacgatcggtaaattagctcaatctgtgttggtactaccaggaagtgtgaaagacgataacaatcgtgttgcagg

SEQ ID NO: 285891 - DNA, 75 bp, synthetic construct
  source 1..75: mol_type = other DNA
atattctgcatgaattagagaataatgcgctgaagattgacgattctcaggctgcacagtttatttcgcaaatca

SEQ ID NO: 285892 - DNA, 75 bp, synthetic construct
  source 1..75: mol_type = other DNA
aacagcggcctgtggctggcggcgcgtagtgcaaagacggcgcaccgtgagcaggaaatcaaaaataaagcgtga

SEQ ID NO: 285893 - DNA, 75 bp, synthetic construct
  source 1..75: mol_type = other DNA
atgttgggtggagcggacaatccaaatggtgaattactgtcttatatcattggcgctgacataaccggtattgtc

SEQ ID NO: 285894 - DNA, 75 bp, synthetic construct
  source 1..75: mol_type = other DNA
atgagcgaaaaatacatcgtcacctgggacatgttgcagatccatgcacgtaaactcgcaagccgactgatgcct

SEQ ID NO: 285895 - DNA, 75 bp, synthetic construct
  source 1..75: mol_type = other DNA
gccattacaccgcagcagcaacgcgcgctggctcagcgttttggcgagctgcatattcatcctgtttatccccat

SEQ ID NO: 285896 - DNA, 75 bp, synthetic construct
  source 1..75: mol_type = other DNA
ctgattatctgccgcagcggcggattatgcatcgggcgacaattctcggggataaaccgttttatcgggcagagt

SEQ ID NO: 285897 - DNA, 75 bp, synthetic construct
  source 1..75: mol_type = other DNA
aaaaaaattaacgcagaatcttcttctcagccaaatccagcgcaaagtagctgaaaatcagatccgcacccgcac

SEQ ID NO: 285898 - DNA, 75 bp, synthetic construct
  source 1..75: mol_type = other DNA
caaagtgttcctcacaccggcacagctggcgatgctccttgaaggtatcgactggcggcagcctaaaagactgct

SEQ ID NO: 285899 - DNA, 75 bp, synthetic construct
  source 1..75: mol_type = other DNA
gcaactggcgatgctgctggaaggtatcgactggcgacagcctaagcggctgctgacctccctgaccatgctgta

SEQ ID NO: 285900 - DNA, 75 bp, synthetic construct
  source 1..75: mol_type = other DNA
tttctcgcgactgacgtggtgctggcggggatcgcggtgattgcgattatcgcctttcttttagaactgggtctg

SEQ ID NO: 285901 - DNA, 75 bp, synthetic construct
  source 1..75: mol_type = other DNA
cactcatcatcagcggcctgctcgttggctgtaatcaactcacccagtacaccattagtgaacaagaaattaacc

SEQ ID NO: 285902 - DNA, 75 bp, synthetic construct
  source 1..75: mol_type = other DNA
attacgcaattactttaaccagcaacctgcttacgtcctgcgcgaagatggcagtcagggcgaagcaatggcgaa

SEQ ID NO: 285903 - DNA, 75 bp, synthetic construct
  source 1..75: mol_type = other DNA
ctgacggcggcgacgcccggtgatactggtgtggcggagacgcaggaaaaacctgcggtaactgaaaatgcggct

SEQ ID NO: 285904 - DNA, 75 bp, synthetic construct
  source 1..75: mol_type = other DNA
agccagccagttatttctctggcgtaagcaataccaggaaggaagtcttactgctgtcgccgccggagaactgta

SEQ ID NO: 285905 - DNA, 75 bp, synthetic construct
  source 1..75: mol_type = other DNA
ctgcctgtgtttgataaagaaaaaggcgctatcttcctgaaagagatggaagtggtcagctcagcggtacaaccg

SEQ ID NO: 285906 - DNA, 75 bp, synthetic construct
  source 1..75: mol_type = other DNA
gcagccagggcgaagcaatggcgaaaaaactggcgaaaggcattgaagtgaagccaggcgaaattgtcattccat

SEQ ID NO: 285907 - DNA, 75 bp, synthetic construct
  source 1..75: mol_type = other DNA
cctgccgggtcagcagtatgatgaggagtccggcctctattacaaccgccaccgctattatgacccgctgcaggg

SEQ ID NO: 285908 - DNA, 75 bp, synthetic construct
  source 1..75: mol_type = other DNA
gataccgccagaacactgaaggtcggcatcaacaccgttatccggactttaaaaaactctcaccacgacgagtaa

SEQ ID NO: 285909 - DNA, 75 bp, synthetic construct
  source 1..75: mol_type = other DNA
gcaaagtgttcctcacaccggcacagctggcgatgctgctggaaggtatcgactggcggcagcctaaaagactac

SEQ ID NO: 285910 - DNA, 75 bp, synthetic construct
  source 1..75: mol_type = other DNA
cgtgacggcaaggtgcaccttactccggctcagttatccatgcttcttgaaggtatcaactggaagcacccgaaa

SEQ ID NO: 285911 - DNA, 75 bp, synthetic construct
  source 1..75: mol_type = other DNA
atggctaccattactgttcattgtccgcgctgtaatttcgatgaagtttatcgacatggccgtagtggttcccgg

SEQ ID NO: 285912 - DNA, 75 bp, synthetic construct
  source 1..75: mol_type = other DNA
gcctttaatggtgccggggttcgcgataccgccaggacactgaaaattggtattaacaccgtcatccggacttta

SEQ ID NO: 285913 - DNA, 75 bp, synthetic construct
  source 1..75: mol_type = other DNA
cgtgacagacttcgctgccgtgactgccaccgtgtgtttcagttcacttatacttatcaagcacgtaagccgggt

SEQ ID NO: 285914 - DNA, 75 bp, synthetic construct
  source 1..75: mol_type = other DNA
gcttcaacggcctggcggcaaaggtgcagacgacgctgaaagacgatccgatgtcaggtcacgtttttatcttcc

SEQ ID NO: 285915 - DNA, 75 bp, synthetic construct
  source 1..75: mol_type = other DNA
ccaccggtgacggactgtgcctcctgaccaaacggctggagcgtgggcgcttcgcctggccgaacaggaagcgct

SEQ ID NO: 285916 - DNA, 75 bp, synthetic construct
  source 1..75: mol_type = other DNA
caggtaaggaatacaccgcgacacttccagccgttgaaatctacagttacgtagctgggttcaatgaacaagggc

SEQ ID NO: 285917 - DNA, 75 bp, synthetic construct
  source 1..75: mol_type = other DNA
ctcatttgcgcccgtttttgcggcgctaaaaccgtttatcgcccgagcggggctaacgccttataacgtggcgcg

SEQ ID NO: 285918 - DNA, 75 bp, synthetic construct
  source 1..75: mol_type = other DNA
attgaacgggtgcagcttttcgatatgttcccgcataccgcgcactatgaagtgctgacgctgctggtgaagcaa

SEQ ID NO: 285919 - DNA, 75 bp, synthetic construct
  source 1..75: mol_type = other DNA
ggttaacgccctacaacgtggcgcgtaagcgtggcgaactgaaatacattctgctgactgaaagccagagtgatg

SEQ ID NO: 285920 - DNA, 75 bp, synthetic construct
  source 1..75: mol_type = other DNA
cgcgtttgaccatcttgacgatatgcaccaggcctttttgcagcaaaatttcgatctgcctcctggcagcgtccc

SEQ ID NO: 285921 - DNA, 75 bp, synthetic construct
  source 1..75: mol_type = other DNA
gtgacaaaggcctgtgtcagttatgtctgcgtgctggtgtggtgcgtgaggcgaaaaccgttgaccacatcatcc

SEQ ID NO: 285922 - DNA, 75 bp, synthetic construct
  source 1..75: mol_type = other DNA
agctttttgtgaatcctatgcacatcatcaaatcgagtttttcaatgccacaacgaaccccaaaagcctgccgcg

SEQ ID NO: 285923 - DNA, 75 bp, synthetic construct
  source 1..75: mol_type = other DNA
gccgtgttcgcggctgccgtaataccactacagacccgtcaggctactgcgaaagccacaaaaacgaaggctgga

SEQ ID NO: 285924 - DNA, 75 bp, synthetic construct
  source 1..75: mol_type = other DNA
gccgcgttcgcggctgcccccataccaccactgactcgtcaggctattgcgaaaggcacaaaagcgaaggctgga

SEQ ID NO: 285925 - DNA, 75 bp, synthetic construct
  source 1..75: mol_type = other DNA
tcatcagcgcggctacggttcgaaatgggatgctatccgtgaacgtgtactgaagcgtgacaagggcctgtgtca

SEQ ID NO: 285926 - DNA, 75 bp, synthetic construct
  source 1..75: mol_type = other DNA
atgccatcacaaatcccccgcgcatgtcgtaagcgaggctgcgcaggcacaacaacagacagctctggctactgc

SEQ ID NO: 285927 - DNA, 75 bp, synthetic construct
  source 1..75: mol_type = other DNA
caccaaagagtatggactaatctttgttggttatgctgggaatgatagctccatcatggatgtaataaaatacct

SEQ ID NO: 285928 - DNA, 75 bp, synthetic construct
  source 1..75: mol_type = other DNA
cgtgaggcgaaaaccgttgaccacatcattcccaaagcgcatggcggcaccgatgccgacagtaacctgcagagt

SEQ ID NO: 285929 - DNA, 75 bp, synthetic construct
  source 1..75: mol_type = other DNA
atgaaatttgatgactatctggataaaatgtcacttctggtgaatgaaggaaagctcgaacctgatattttaagc

SEQ ID NO: 285930 - DNA, 75 bp, synthetic construct
  source 1..75: mol_type = other DNA
aaccacagacccgtcaggctactgcgaaagccacaaaagcgaaggctggaagcagtacaaacctggacaatcccg

SEQ ID NO: 285931 - DNA, 75 bp, synthetic construct
  source 1..75: mol_type = other DNA
atggctgatcattttcagtacgaggaagattttgaaacagatgactttgatatcaaaaaaagcgagagtgagatt

SEQ ID NO: 285932 - DNA, 75 bp, synthetic construct
  source 1..75: mol_type = other DNA
gccgagttcgcggctgccgccataccacgactgacccgtcaggttattgcgaaagccacaaaagcgagggctgga

SEQ ID NO: 285933 - DNA, 75 bp, synthetic construct
  source 1..75: mol_type = other DNA
gataaacatcgtggtgaaggctgggtgcagcaccagcgcggactgagccgccaccagcgtggctatggctcaaaa

SEQ ID NO: 285934 - DNA, 75 bp, synthetic construct
  source 1..75: mol_type = other DNA
agatgcagacagcaacctgcagagtctgtgctggccctgccacaaagcgaaaacagcgcacgaacgaatcaggtg

SEQ ID NO: 285935 - DNA, 75 bp, synthetic construct
  source 1..75: mol_type = other DNA
tgggatgctatccgtgaacgtgtactgaagcgtgacaaaggcctgtgtcagttatgtctgcgtgccggtgtggtg

SEQ ID NO: 285936 - DNA, 75 bp, synthetic construct
  source 1..75: mol_type = other DNA
atgccatcacgaaccccaaaagcctgccgttttcgcggttgccgccataccaccacagattcgtcaggctactgc

SEQ ID NO: 285937 - DNA, 75 bp, synthetic construct
  source 1..75: mol_type = other DNA
ctactggcaccgctttgccccagaaagccgcatgatgcgtaaagtcaccgatgctttgctcgactatggtcacaa

SEQ ID NO: 285938 - DNA, 75 bp, synthetic construct
  source 1..75: mol_type = other DNA
gtgccatatcgttaactcgtctgaagccttcgttcaactcgctcgccagggaacaacctgctgtatgatcccaca

SEQ ID NO: 285939 - DNA, 75 bp, synthetic construct
  source 1..75: mol_type = other DNA
tggtcaatggttgttggtgcctgcctggtcggcctgaccgcatggatctcttctgttggttcaactgttggcgtt

SEQ ID NO: 285940 - DNA, 75 bp, synthetic construct
  source 1..75: mol_type = other DNA
gccgtgttcgcggctgccgctctataaccacagacccgtcaggctactgcgaaagccacaaaagcgaaggctgga

SEQ ID NO: 285941 - DNA, 75 bp, synthetic construct
  source 1..75: mol_type = other DNA
atgccatcacggatcccccgcgcctgtcgtaagcgaggctgcgcaggcacaacaacagacagttctggctactgt

SEQ ID NO: 285942 - DNA, 75 bp, synthetic construct
  source 1..75: mol_type = other DNA
catcattaatcaacatcccaatacgttatttatcgtttttatggcaattgccaatgttcattttgatgaatatct

SEQ ID NO: 285943 - DNA, 75 bp, synthetic construct
  source 1..75: mol_type = other DNA
atgccaccacgaaccccaaaagcctgccgcgttcgcggctgccgccataccaccactgacccgtcaggtttttgc

SEQ ID NO: 285944 - DNA, 75 bp, synthetic construct
  source 1..75: mol_type = other DNA
atgccgccacgaatcccaaaagcctgccgtgttcgcggttgccgccataccaccactgacccgtcaggctactgc

SEQ ID NO: 285945 - DNA, 75 bp, synthetic construct
  source 1..75: mol_type = other DNA
atgcccccacgaaccccaaaagcctgccgcgttcgcggctgccgccataccaccactgactcgtcaggctattgt

SEQ ID NO: 285946 - DNA, 75 bp, synthetic construct
  source 1..75: mol_type = other DNA
ggcggaactggctgccgactgccatgtcattcctcgcgccggacataacgcgcaccgggaaaaccccgctggcgt

SEQ ID NO: 285947 - DNA, 75 bp, synthetic construct
  source 1..75: mol_type = other DNA
aggagcacctgtggaaaagaattgacaagacactttctgaggaaattgtacagaaatgcagaaatatgaacggtg

SEQ ID NO: 285948 - DNA, 75 bp, synthetic construct
  source 1..75: mol_type = other DNA
aatgcaagcggccttacattgtcccgtataccaatgatactcattgccctcggtgcagattgtcgtcaacggtct

SEQ ID NO: 285949 - DNA, 75 bp, synthetic construct
  source 1..75: mol_type = other DNA
aaaatacagtatctggaactaaaggacggcatttgcgcaccagtattgcggtaggtggtagtgtggaaatggaag

SEQ ID NO: 285950 - DNA, 75 bp, synthetic construct
  source 1..75: mol_type = other DNA
atggcaaaggtaattattgaaattaaaaatacagtatctggaattaaaggacggaatttgcgcaccagcattgcg

SEQ ID NO: 285951 - DNA, 75 bp, synthetic construct
  source 1..75: mol_type = other DNA
gttttcgctcagaaccgttaaccgcggtatttaccgactggtatcaacagcctgtttttgcctcgctcaacgatg

SEQ ID NO: 285952 - DNA, 75 bp, synthetic construct
  source 1..75: mol_type = other DNA
ctgctgaagcagtgaaggaagtcctgcgctctgaagaagtcctgagcgcactgaaacagaaacttcgccataacc

SEQ ID NO: 285953 - DNA, 75 bp, synthetic construct
  source 1..75: mol_type = other DNA
ggcgcaccggcagctccggagccggaaggcatcgcgggtgaggggatgcttcagatagcggtgaacccacacctg

SEQ ID NO: 285954 - DNA, 75 bp, synthetic construct
  source 1..75: mol_type = other DNA
agaagtggatgccattctggatgaactgctgggcgcaccggcagctccggagccggaaggcatcgcgggtgaggg

SEQ ID NO: 285955 - DNA, 75 bp, synthetic construct
  source 1..75: mol_type = other DNA
acggatttcgggattgtgtttggtgcgtttgcgggagcgttgtttgtggcaacaatgccgcaggcgctttcagcc

SEQ ID NO: 285956 - DNA, 75 bp, synthetic construct
  source 1..75: mol_type = other DNA
ggtcggtgtctcggcgctctcaatcaagattctgacgtttatttataaacaggatatttcatcgctgtttggcct

SEQ ID NO: 285957 - DNA, 75 bp, synthetic construct
  source 1..75: mol_type = other DNA
atctgctgatgtatccggggatggcgctgatggttgcctcggttatctggttttatctggccggcatgctgtccc

SEQ ID NO: 285958 - DNA, 75 bp, synthetic construct
  source 1..75: mol_type = other DNA
ctggctgcctctcgcggagaatttgttgaagggattagcgacccgaatgatccgaaatggattaaggggatccag

SEQ ID NO: 285959 - DNA, 75 bp, synthetic construct
  source 1..75: mol_type = other DNA
cagtattgcaacaaccagcataaataaaaatctggccagtgcacatattcgttactgtgacaaaaacatacacct

SEQ ID NO: 285960 - DNA, 75 bp, synthetic construct
  source 1..75: mol_type = other DNA
acccagagagtgtggcaaagaaaattgcagaaacgacagtgcaaaacatcaatacgaaacaaaccgaagacgaaa

SEQ ID NO: 285961 - DNA, 75 bp, synthetic construct
  source 1..75: mol_type = other DNA
ttctgtgcgtctataaataaacacgactcagagagtatggcaaataaaattgcagaaacgacagcgaaaaacatc

SEQ ID NO: 285962 - DNA, 75 bp, synthetic construct
  source 1..75: mol_type = other DNA
actttcggtaagttctcgccgttcaacgctggcaatgtggttaatcacggttttgaaaccgacaagcgtaagctg

SEQ ID NO: 285963 - DNA, 75 bp, synthetic construct
  source 1..75: mol_type = other DNA
atttctaaaacgcagggttatgatcctgattcccgtctgagcagagccacgcttgaatttcaggtaatagcctga

SEQ ID NO: 285964 - DNA, 75 bp, synthetic construct
  source 1..75: mol_type = other DNA
tgattggcgttctcgcgtactacgtcagttaccgtttgggcggttatgaaggggcgttgctgggtctggcgctga

SEQ ID NO: 285965 - DNA, 75 bp, synthetic construct
  source 1..75: mol_type = other DNA
ccctctccctccgtgcaggagaaaccagccagtactgacaataccaacgtcaacagcgaagacatgacggagatt

SEQ ID NO: 285966 - DNA, 75 bp, synthetic construct
  source 1..75: mol_type = other DNA
atttatacctcctaattgggatgaacttattaactacatgaattctgattatgaaaaatggtacaaactatgcaa

SEQ ID NO: 285967 - DNA, 75 bp, synthetic construct
  source 1..75: mol_type = other DNA
tcctgtcgatgcagacaaattactggctgcctctcgcggagaatttgttgcagggattagcgacccgaatgatcc

SEQ ID NO: 285968 - DNA, 75 bp, synthetic construct
  source 1..75: mol_type = other DNA
acccgaatgattcgaaatgggttaaggggattgaaacctgcgattctgtgaaccagaaccagcaagaaacggaac

SEQ ID NO: 285969 - DNA, 75 bp, synthetic construct
  source 1..75: mol_type = other DNA
gctggctacgacgaagatgatttcaaaaaaacagttcgcatccatttgcctgttgtaaatgacctgccacctgaa

SEQ ID NO: 285970 - DNA, 75 bp, synthetic construct
  source 1..75: mol_type = other DNA
tctggatgacgctcttcaccaggcaaaatacgtaacagccgctatacaaaaactgatcccgaatcaggctgattt

SEQ ID NO: 285971 - DNA, 75 bp, synthetic construct
  source 1..75: mol_type = other DNA
ctgaaacaaaaacttcgccataacctggaagcgcgtcttgatgcagaagtggatgccattctggatgaactgctg

SEQ ID NO: 285972 - DNA, 75 bp, synthetic construct
  source 1..75: mol_type = other DNA
catgtcgtctatggcgttggccgctccattaaccgtaggattttcgcaggtcggatcggaatccggctggcgcgc

SEQ ID NO: 285973 - DNA, 75 bp, synthetic construct
  source 1..75: mol_type = other DNA
caaagaagtcatggagagctttatcaaagcggaaaacaacggcaaaaacatctgcatggtttacgcccataacga

SEQ ID NO: 285974 - DNA, 75 bp, synthetic construct
  source 1..75: mol_type = other DNA
gtggatgcgatctttatcgctccagtggttgcgacgggttgggaaccggtattaaaagaggcgaaagatgccgaa

SEQ ID NO: 285975 - DNA, 75 bp, synthetic construct
  source 1..75: mol_type = other DNA
atggtaacgtcctgtactggacatgttttagataatcagcgcgccaccactcgcggagatttctcctccggtagt

SEQ ID NO: 285976 - DNA, 75 bp, synthetic construct
  source 1..75: mol_type = other DNA
aaagctcgtcgcgaggcaaaacgtgtgctgagacgggattcgcgcagccataaacagcgtgaagaagaatcggtc

SEQ ID NO: 285977 - DNA, 75 bp, synthetic construct
  source 1..75: mol_type = other DNA
tgaaaatgcagtcgtcattcttgacgaggcgcagaatgtgactgccgcgcaaatgaaaatgtttttaacccgcct

SEQ ID NO: 285978 - DNA, 75 bp, synthetic construct
  source 1..75: mol_type = other DNA
ggcagcacttgccgccccgtattctgctgcgttacgcgaggggttaaatacctgccaggcggtgttattgcacta

SEQ ID NO: 285979 - DNA, 75 bp, synthetic construct
  source 1..75: mol_type = other DNA
gctacattaccgaagaagacgcacgcgggcagattaacgagctgaaagctaacggcaccgaagcggtggtcggcg

SEQ ID NO: 285980 - DNA, 75 bp, synthetic construct
  source 1..75: mol_type = other DNA
tccggcactggtggcgtttcaaaaaacctttaatttgcgcctcgaccaacgtagctacattaccgaagaagacgc

SEQ ID NO: 285981 - DNA, 75 bp, synthetic construct
  source 1..75: mol_type = other DNA
atggcgaagcgaacgccagcgttgaactgacgccgaacatggcaggccccgcttttgacgcgctggagaaataca

SEQ ID NO: 285982 - DNA, 75 bp, synthetic construct
  source 1..75: mol_type = other DNA
cgatgcgcggcagggaaaaaagtcacatccgtttgttgccgtcaactgtggagcgattgctgaatcgctgctgga

SEQ ID NO: 285983 - DNA, 75 bp, synthetic construct
  source 1..75: mol_type = other DNA
aggcgttcagcgatgcgctggatatgacgcgcatgtctctgcgaaataatgctcacaacgctaatcgcaacgccc

SEQ ID NO: 285984 - DNA, 75 bp, synthetic construct
  source 1..75: mol_type = other DNA
aacggtgatatcacgcaatgcgatttgcctcgcggcgtgcgctccggattaagtgacgcgctggaacgtttcgaa

SEQ ID NO: 285985 - DNA, 75 bp, synthetic construct
  source 1..75: mol_type = other DNA
aactggaaatgctgtgggcgtcttactatggcggcgtagcgataacccatgcgggcacgcacctggtccatgcgc

SEQ ID NO: 285986 - DNA, 75 bp, synthetic construct
  source 1..75: mol_type = other DNA
aaggcattgcggatgacagtgctgtttcagatggcgtcgggtctcagcctgacggtagtgaagagcctcagcctg

SEQ ID NO: 285987 - DNA, 75 bp, synthetic construct
  source 1..75: mol_type = other DNA
accacgctggctgagttcagcaaacgcagccgtgccgcttacagtggacaacagatgctggaggagtatgtcaac

SEQ ID NO: 285988 - DNA, 75 bp, synthetic construct
  source 1..75: mol_type = other DNA
gggccgctgagagaatcagcgccagtcagtcagccggaagcaaacccgaagatccgctcattccgtagtcacttt

SEQ ID NO: 285989 - DNA, 75 bp, synthetic construct
  source 1..75: mol_type = other DNA
gtcagtcagccggaagcaaacccgaagagccgctcatttagcggcaactttcttaatcacacctttcgacgagaa

SEQ ID NO: 285990 - DNA, 75 bp, synthetic construct
  source 1..75: mol_type = other DNA
acaattccccctgccaactgaatcagcgggacgtgcaggccatttaccaaacgctgtttccgcaacatcaattta

SEQ ID NO: 285991 - DNA, 75 bp, synthetic construct
  source 1..75: mol_type = other DNA
ggacctgctgaggaggcatctgcgccacaggcaggggatggtgagaatacagcagattctccggtggaaaacagc

SEQ ID NO: 285992 - DNA, 75 bp, synthetic construct
  source 1..75: mol_type = other DNA
ttagccatgtgtcgctggtcgaaatcctgatcccattctgtgtgatggcgattgccaatggcgcgatctacccga

SEQ ID NO: 285993 - DNA, 75 bp, synthetic construct
  source 1..75: mol_type = other DNA
atgcataaccttgaaatctctaccatagccattttcagtgcccagtataaaaatatcgaagaggccgagaacgcc

SEQ ID NO: 285994 - DNA, 75 bp, synthetic construct
  source 1..75: mol_type = other DNA
ttgccacccatagcgacgcggcgcgggaagtgctgcaaaaatccggcggtaaaaccgtcagcgaagaagaggtgc

SEQ ID NO: 285995 - DNA, 75 bp, synthetic construct
  source 1..75: mol_type = other DNA
atctttatcttattgagcaaataacagaactggaatcagagttaaaccagtcaatcaaagctgacgctactgcgc

SEQ ID NO: 285996 - DNA, 75 bp, synthetic construct
  source 1..75: mol_type = other DNA
ctttcgacgagaaaatcccatgtcagaaattacatccctggtcactgctgaagcagtgaaggaagtcctgcgctc

SEQ ID NO: 285997 - DNA, 75 bp, synthetic construct
  source 1..75: mol_type = other DNA
gaaatgctatcaatttataattataatcaaaatccaggtaatgaacgattaataaactggattattgatttaaaa

SEQ ID NO: 285998 - DNA, 75 bp, synthetic construct
  source 1..75: mol_type = other DNA
atgacacacaagagaattcctaaagactgggtaatcaaacgctcaactccgttcttcacaaaagagaacgtacct

SEQ ID NO: 285999 - DNA, 75 bp, synthetic construct
  source 1..75: mol_type = other DNA
gaagcaagcgattgacggtagccagattctggaacgaatcacccaagctcaagataggcttgacgccgcatctcg

SEQ ID NO: 286000 - DNA, 75 bp, synthetic construct
  source 1..75: mol_type = other DNA
agttaatctcgaccgcagagattattactgctcttgaggagtataagaaacaataccctcatttggctaagcgtg

SEQ ID NO: 286001 - DNA, 75 bp, synthetic construct
  source 1..75: mol_type = other DNA
aaacgcagatttgcgtgattcaggaagcattgaacaggacgcagactcaatcatcatgaaccgccccgggaatcc

SEQ ID NO: 286002 - DNA, 75 bp, synthetic construct
  source 1..75: mol_type = other DNA
aagccagacagatttgcacagcatcaaatgcacctgctgcgcgtggcagacgatatgcacaaggggctgacgtat

SEQ ID NO: 286003 - DNA, 75 bp, synthetic construct
  source 1..75: mol_type = other DNA
aaatctggatcatcgctggcatcacagatatgcgttgtggtttcaatggtctggcctcaaaagtgcagaacacac

SEQ ID NO: 286004 - DNA, 75 bp, synthetic construct
  source 1..75: mol_type = other DNA
ttgagcaacaagtcaaaatggaattgagcgagtcagggtttcgtcctgggtttcattttcctgtttttcacggcg

SEQ ID NO: 286005 - DNA, 75 bp, synthetic construct
  source 1..75: mol_type = other DNA
cgatattgagcatctgaccgaactgctggaaatagataaagatatgcgtgcgcttatgcagcggatcgaaaatgg

SEQ ID NO: 286006 - DNA, 75 bp, synthetic construct
  source 1..75: mol_type = other DNA
tacgggtaagatgtcacgacgtcagcgtgagctggttaatggctttatgcagccggctaccgagatgggcgagta

SEQ ID NO: 286007 - DNA, 75 bp, synthetic construct
  source 1..75: mol_type = other DNA
taaccactcaaacaggcgaaaccttcacgggcaagatgtcacgacgtcagcctgagttggttaatggctttgtgc

SEQ ID NO: 286008 - DNA, 75 bp, synthetic construct
  source 1..75: mol_type = other DNA
cgacatgcgaaatggctttaacggcctggcatcaaaagttcagaacgtcctgaaggatgacccgttctccggaca

SEQ ID NO: 286009 - DNA, 75 bp, synthetic construct
  source 1..75: mol_type = other DNA
tttatttaaaaaaagagcagagccaatagttttttcagaagaaaagttagaatataaagtattaggtgacattcg

SEQ ID NO: 286010 - DNA, 75 bp, synthetic construct
  source 1..75: mol_type = other DNA
gaggcagatggtgttgtgtctgaagggaataacagcagcggtgtgacgcctgcccctgattcaccggcagagaat

SEQ ID NO: 286011 - DNA, 75 bp, synthetic construct
  source 1..75: mol_type = other DNA
gcttagtggcgtggtgtgggcgatggtcattatttacggtagtgcactggcaccacatctggaaattctcggtta

SEQ ID NO: 286012 - DNA, 75 bp, synthetic construct
  source 1..75: mol_type = other DNA
ctgaccgctggacacaggtggtggacaacagtgatgcagacggcggtgcatgggccatgacagggtacagccatg

SEQ ID NO: 286013 - DNA, 75 bp, synthetic construct
  source 1..75: mol_type = other DNA
ggttggcgttcatacggggggggcttcccgcaacgacatagatggaaccaataatcctgcaacagggaaggggta

SEQ ID NO: 286014 - DNA, 75 bp, synthetic construct
  source 1..75: mol_type = other DNA
ccggagatacatctaaggaaagttataccagcataaatggagcatatgcatacctgaccggggggggggtgcctt

SEQ ID NO: 286015 - DNA, 75 bp, synthetic construct
  source 1..75: mol_type = other DNA
aggcataactccgactggcattttaatagcctccggttcggagatggagataatgaatataagtcggtcagccgt

SEQ ID NO: 286016 - DNA, 75 bp, synthetic construct
  source 1..75: mol_type = other DNA
taacatatcagaaaataattctaatacaaaacaaggaaaagtagtaggtgataattcattacgagcatttagtgt

SEQ ID NO: 286017 - DNA, 75 bp, synthetic construct
  source 1..75: mol_type = other DNA
aagatgactattatattgagccacaggcagagttgacttatggttatattagtaatcaaagtataaatttgtgga

SEQ ID NO: 286018 - DNA, 75 bp, synthetic construct
  source 1..75: mol_type = other DNA
gaagaacttgacgccatcaccggagggatgaacgcggaagaccttgtgataatcgctgctcgtcctggtatgggg

SEQ ID NO: 286019 - DNA, 75 bp, synthetic construct
  source 1..75: mol_type = other DNA
gactgagaaactgtcagtgcaggcaaaagtaaacagcagttttgatggttactttaagacggatgcggaaggaat

SEQ ID NO: 286020 - DNA, 75 bp, synthetic construct
  source 1..75: mol_type = other DNA
taccgaagttatacctgcgtctgttactgaagaagggcaaaaaataaatgcctacgctaatacagagcgttacac

SEQ ID NO: 286021 - DNA, 75 bp, synthetic construct
  source 1..75: mol_type = other DNA
agcgtgaaacataacgggggatataaaaacgtcagctttggtgacggggagaaccgttacaatattgtcgatcgt

SEQ ID NO: 286022 - DNA, 75 bp, synthetic construct
  source 1..75: mol_type = other DNA
taagtcaggaggctgaacgtctgttacagctttccagacaacagttgcagttactggaaaaaatgccgctctctg

SEQ ID NO: 286023 - DNA, 75 bp, synthetic construct
  source 1..75: mol_type = other DNA
ccaggtaaaagtcaccgctgacgaagtaaacaaaattatgcaggcagccaatatcagccagcctgacgccgataa

SEQ ID NO: 286024 - DNA, 75 bp, synthetic construct
  source 1..75: mol_type = other DNA
caaagtcagaaaacgtcttgggattaaaggcggtttttactggcgcacagcaaaaaaattatcggttgcaatatc

SEQ ID NO: 286025 - DNA, 75 bp, synthetic construct
  source 1..75: mol_type = other DNA
ggcggacaggcagagtcatcggtgtcggtgcagattgacgtttatgcggtgacggtcacacaggcgcgtcagata

SEQ ID NO: 286026 - DNA, 75 bp, synthetic construct
  source 1..75: mol_type = other DNA
tccggcggaatcatcgaccgtaaaacaataaagtggtgggcgaaacaatcacgcgaagcacaatccgctattttt

SEQ ID NO: 286027 - DNA, 75 bp, synthetic construct
  source 1..75: mol_type = other DNA
cacgccagcgatagtgaaactggcgagacggcagatcccttaattacggtgaacagtcatcacgttatcacatcc

SEQ ID NO: 286028 - DNA, 75 bp, synthetic construct
  source 1..75: mol_type = other DNA
aagactatagatctggaaactgctggcggagtcattgatcgggacaccattaaatggtggcttaagcaatcacgc

SEQ ID NO: 286029 - DNA, 75 bp, synthetic construct
  source 1..75: mol_type = other DNA
tgctgctggccccgggagccgtcagtgaaatgcaggactatattccggaaaaccgctgttaccgtgcaaccctgg

SEQ ID NO: 286030 - DNA, 75 bp, synthetic construct
  source 1..75: mol_type = other DNA
gtgtctgcggacgtgatgggcgggcaggcggagtcctcagtgtcggtgcagatagacgtttatgccgggactgtg

SEQ ID NO: 286031 - DNA, 75 bp, synthetic construct
  source 1..75: mol_type = other DNA
aacgtggttaatcacggctttgaaactgacaagcgcaagttgatgagcgcgctcaatcagatggatgcgctggtg

SEQ ID NO: 286032 - DNA, 75 bp, synthetic construct
  source 1..75: mol_type = other DNA
ttcggcaaccgtagcaatcctgacaacaggcggactgctttcagaagcggttgtggggctgaatccgattcagtg

SEQ ID NO: 286033 - DNA, 75 bp, synthetic construct
  source 1..75: mol_type = other DNA
ctttgatgtcggctttattattcttgcgccaatcatttacggttttgccaaggttgccaaaatatcgccactcaa

SEQ ID NO: 286034 - DNA, 75 bp, synthetic construct
  source 1..75: mol_type = other DNA
ggcgggtataccggcgggcgaagtgggtaaagtgatgatcgccgggatgggcggtgtgcttggttccgtcactat

SEQ ID NO: 286035 - DNA, 75 bp, synthetic construct
  source 1..75: mol_type = other DNA
tgacaaaagagtggatgagaggaaatcgtgtttcacgcatcacccgcacggcttccggtgctaatgccggtggag

SEQ ID NO: 286036 - DNA, 75 bp, synthetic construct
  source 1..75: mol_type = other DNA
tgaactctatcgcctatgacgcaaaagatgactctatcatcctctcgccaccagggtgttgtgaagattggtcgt

SEQ ID NO: 286037 - DNA, 75 bp, synthetic construct
  source 1..75: mol_type = other DNA
tctgggtttgtcagcatcgggggtgatggcagcaggttttaaacctgcgccacctgccgggcaactcggcgcagt

SEQ ID NO: 286038 - DNA, 75 bp, synthetic construct
  source 1..75: mol_type = other DNA
cccttaaccgcgctggttgatttagacagccatgttatttctgacgtcaaagttaccgtccacgggaagggcgaa

SEQ ID NO: 286039 - DNA, 75 bp, synthetic construct
  source 1..75: mol_type = other DNA
ctggcatcaaaagttcagaacgtcctgaaggatgacccgttctccggacacctgtttatcttccgcggacgccgg

SEQ ID NO: 286040 - DNA, 75 bp, synthetic construct
  source 1..75: mol_type = other DNA
ggtgaccagataaaagtattgtgggctgacagcgacggactgtgcctcttcaccaaacgcctggagcggggccgc

SEQ ID NO: 286041 - DNA, 75 bp, synthetic construct
  source 1..75: mol_type = other DNA
gcaaggtgcaccttactccggcacagttatccatgcttcttgaaggtatcaactggaagcacccgaaacgaacgg

SEQ ID NO: 286042 - DNA, 75 bp, synthetic construct
  source 1..75: mol_type = other DNA
gggccaggccgtaactgggcgcacgttaattccatcgcttatgacgcaaaagatgactcaattattctctcttct

SEQ ID NO: 286043 - DNA, 75 bp, synthetic construct
  source 1..75: mol_type = other DNA
tccggttaatcaggtaaaagttaccgctgacgaagtaaacaaaattatgcaggcagccaatatcaaccagcctga

SEQ ID NO: 286044 - DNA, 75 bp, synthetic construct
  source 1..75: mol_type = other DNA
gttataccaatgatcgcgatgtaagaacgatggttgctctgggactggtgatggatttcgacgcaagaacgacta

SEQ ID NO: 286045 - DNA, 75 bp, synthetic construct
  source 1..75: mol_type = other DNA
caaagaagtgaaagtggaaatcgacgtgttatctgataaacccaaccagactcactatcgcgcgctgttagttcg

SEQ ID NO: 286046 - DNA, 75 bp, synthetic construct
  source 1..75: mol_type = other DNA
aagattgatgagaagaaaggcaccgttcagcaagtttgggaatacggtaaagaacgtggctacgatttctatagc

SEQ ID NO: 286047 - DNA, 75 bp, synthetic construct
  source 1..75: mol_type = other DNA
tctgggtttgtcagcatcaggggtgatggcagcaggttttaaacctgcaccacctgccgggcaactcggcgcagt

SEQ ID NO: 286048 - DNA, 75 bp, synthetic construct
  source 1..75: mol_type = other DNA
gaaaaagacaacatcatgtcggtgtttgccaccgtgggttctggccctgggggaacgggcaaaacgtggcgcgaa

SEQ ID NO: 286049 - DNA, 75 bp, synthetic construct
  source 1..75: mol_type = other DNA
tgggaaacccgtggtaagcccgtcggggtgatgttccacagcgatcaaggcagtcattatacgagcaggcagttc

SEQ ID NO: 286050 - DNA, 75 bp, synthetic construct
  source 1..75: mol_type = other DNA
gatattacagcgcactaagaccgcacgaatataacggtggattacccccaaacgaatcggaaaatcgatactgga

SEQ ID NO: 286051 - DNA, 75 bp, synthetic construct
  source 1..75: mol_type = other DNA
atgtatatgtcatctcagagcagcggcaccggtcaggcatctgtcactttaagttttaaagcaggcaccgatccg

SEQ ID NO: 286052 - DNA, 75 bp, synthetic construct
  source 1..75: mol_type = other DNA
gcaccggtacggcaatggatattatggaatcgttagtgaagcagttgccaagcggctttggtttggaatggacgg

SEQ ID NO: 286053 - DNA, 75 bp, synthetic construct
  source 1..75: mol_type = other DNA
ttgatgggaaccttctccgtactttacgccttcggttacagcgtcaacaccttaaccatgttcgcgatggtactg

SEQ ID NO: 286054 - DNA, 75 bp, synthetic construct
  source 1..75: mol_type = other DNA
gatcctcgacgttcacggcatggaaattcttgacccggtggcgatggaaaacgcaattaacgctatccctggcgt

SEQ ID NO: 286055 - DNA, 75 bp, synthetic construct
  source 1..75: mol_type = other DNA
cacgatgaaaggtcagattgaaggggcagtttccagctcggatgcatccactgaaaaactaaaaagccttggcat

SEQ ID NO: 286056 - DNA, 75 bp, synthetic construct
  source 1..75: mol_type = other DNA
aactgaaaagcctcggcattcacgtttttgatctcaacgaagtcgacagccttggcatctacgttgatggcgcag

SEQ ID NO: 286057 - DNA, 75 bp, synthetic construct
  source 1..75: mol_type = other DNA
acggaaccaaatcaggtgtggtgcggtgatgtgacctatagtgtgcccggagttcagggcgggcatggatgctta

SEQ ID NO: 286058 - DNA, 75 bp, synthetic construct
  source 1..75: mol_type = other DNA
tggtgcggtgatgtgacctatagtgtgcccggagttcagggcgggcatggatgcttaaatgaaccgcgagtctgt

SEQ ID NO: 286059 - DNA, 75 bp, synthetic construct
  source 1..75: mol_type = other DNA
cagtcattatacgagcaggcagttccggcagttattgtggcgataccagaatgagccggcgcggaaactgctggg

SEQ ID NO: 286060 - DNA, 75 bp, synthetic construct
  source 1..75: mol_type = other DNA
ttccggcgcgcaggctccggcgctgtacgccatttccttgctggtggtattcctgtgtctggcggcgttgaaagc

SEQ ID NO: 286061 - DNA, 75 bp, synthetic construct
  source 1..75: mol_type = other DNA
attatcgcctcgctggaagcggggtatcagtggttaccggggcgtggtgtggtgattgaaccgcaggcgcaggtg

SEQ ID NO: 286062 - DNA, 75 bp, synthetic construct
  source 1..75: mol_type = other DNA
ctgacagcctgacttatcttcttggcgtgacgatcaatggtgatctgagcaatactttcggcgcggtcagcctgc

SEQ ID NO: 286063 - DNA, 75 bp, synthetic construct
  source 1..75: mol_type = other DNA
gacgaaaaccggtgcaggcacgctggaactgactgccagcggcacggcgcagtcggcggtgcgagtggaagaagg

SEQ ID NO: 286064 - DNA, 75 bp, synthetic construct
  source 1..75: mol_type = other DNA
cggcggcgacgggaaagatggcgtctacgtggtggtcgatgcgagcgacgggcaggtaagtctggcaaacaataa

SEQ ID NO: 286065 - DNA, 75 bp, synthetic construct
  source 1..75: mol_type = other DNA
gagcggagttttctctatcgccagaaaatgaaactggaatgactctgtttgccaataatactgtctcaggagaat

SEQ ID NO: 286066 - DNA, 75 bp, synthetic construct
  source 1..75: mol_type = other DNA
aaccaggcatatacatcaacaagttacagtgatggcgatggcggggcaatcgatgttaccgataataatagcgac

SEQ ID NO: 286067 - DNA, 75 bp, synthetic construct
  source 1..75: mol_type = other DNA
ttgttcactcactgacgggttttcagaatggcactttaaatattgatgctggcggtaacgtgacggtaaatgccg

SEQ ID NO: 286068 - DNA, 75 bp, synthetic construct
  source 1..75: mol_type = other DNA
atgaaggtggccagtacattttgtgtggtgacgtcttcaacaactaaacgcgtagctctgggagtcacattagta

SEQ ID NO: 286069 - DNA, 75 bp, synthetic construct
  source 1..75: mol_type = other DNA
gtctatgtgcaggcagctgcgccgtatcgcatgctgccagatgacatcaatctctggtatgtccgaaataaagat

SEQ ID NO: 286070 - DNA, 75 bp, synthetic construct
  source 1..75: mol_type = other DNA
tcaatcgatgccacctctggcggcgatatcgacataaccgatggtactgtgttgcgattgacgcagcagaatacg

SEQ ID NO: 286071 - DNA, 75 bp, synthetic construct
  source 1..75: mol_type = other DNA
gtgatcttcactgatccccaacaacacagtgaaatggatgtgacgactgatgttgacactcgctcggctacaaca

SEQ ID NO: 286072 - DNA, 75 bp, synthetic construct
  source 1..75: mol_type = other DNA
ccactgcggcgggtggctttatgtatctcggcttaagtgaagttacctttgatattgccgacggaaaaacgctgg

SEQ ID NO: 286073 - DNA, 75 bp, synthetic construct
  source 1..75: mol_type = other DNA
gtgacctatagtgtgcccggagttcagggcgggcatggatgcttaaatgaaccgcgagtctgtctggaatattga

SEQ ID NO: 286074 - DNA, 75 bp, synthetic construct
  source 1..75: mol_type = other DNA
cccgcaaacctgtgggctgggcgatgtcgacgtcgccggactcggccctcacggtcaaagcgttgcagatggcct

SEQ ID NO: 286075 - DNA, 75 bp, synthetic construct
  source 1..75: mol_type = other DNA
tcgggcgatggctggccggtaatctgatgaaagagctggatatctccagttgccaggtaccggtgcataaataca

SEQ ID NO: 286076 - DNA, 75 bp, synthetic construct
  source 1..75: mol_type = other DNA
gtcagcagcctggccatcgatataagaaagcgtctacggaacacgtagagatccccaattatcttgaacgccagt

SEQ ID NO: 286077 - DNA, 75 bp, synthetic construct
  source 1..75: mol_type = other DNA
cttggcatctacgttgatggcgcagatgaaatcaacggccacatgcaaatgatcaaaggcggcggcgcggcgctg

SEQ ID NO: 286078 - DNA, 75 bp, synthetic construct
  source 1..75: mol_type = other DNA
agccgcaggccgtgtgctggggcaactgaaagctactgtgcgccgtatttactccagcccgccgaattttggtgc

SEQ ID NO: 286079 - DNA, 75 bp, synthetic construct
  source 1..75: mol_type = other DNA
gtcagcgatcccacctgggaaaatcacgtagcaatatttgccggggctggattcgaattgagcacttacccctgg

SEQ ID NO: 286080 - DNA, 75 bp, synthetic construct
  source 1..75: mol_type = other DNA
gaagcggaagcgcgcctgaatgcgcagcctcacggcgcttcactttatctgccgatggaagggcttaacagctat

SEQ ID NO: 286081 - DNA, 75 bp, synthetic construct
  source 1..75: mol_type = other DNA
acccgtggtaagcccgtcggggtgatgttccaagcgatcaaggcagtcattatacgagcaggcagttccggcagt

SEQ ID NO: 286082 - DNA, 75 bp, synthetic construct
  source 1..75: mol_type = other DNA
tgaccactacaatcgtagccacagagcaaaaatactcaggcaaaaattcagttttagaatgcagtgcgcaaaata

SEQ ID NO: 286083 - DNA, 75 bp, synthetic construct
  source 1..75: mol_type = other DNA
ctctcatctctgatgtggaagagcagtatgcaaagcgtattgcattaacagcgctacagagcgaagagccggttg

SEQ ID NO: 286084 - DNA, 75 bp, synthetic construct
  source 1..75: mol_type = other DNA
tggatttatcaaatctggaacgccagcgtaaattaatgtctgctctccccgtggatgacgtctgggggattggac

SEQ ID NO: 286085 - DNA, 75 bp, synthetic construct
  source 1..75: mol_type = other DNA
acgcccactcaggacagcagggatatcattaacgccgctacgcgatctctggatgccatctggcaagcgggccat

SEQ ID NO: 286086 - DNA, 75 bp, synthetic construct
  source 1..75: mol_type = other DNA
tggtattgatgttccgccggtaatggggtcatgcagcaccgatctcaaagtggggattggcgggctggaaggccg

SEQ ID NO: 286087 - DNA, 75 bp, synthetic construct
  source 1..75: mol_type = other DNA
agaacgaatggatgccggtggtgggttacgtaagcttcagcgatgcagctcacgcaataacggactatatcgttg

SEQ ID NO: 286088 - DNA, 75 bp, synthetic construct
  source 1..75: mol_type = other DNA
ctatgtaagcttcagcgatgcagctcacgcaataacggactatatcgttggatattacagcgcactaagaccgca

SEQ ID NO: 286089 - DNA, 75 bp, synthetic construct
  source 1..75: mol_type = other DNA
agagggagaactgccggaggctgaacgacagattgcttttctgcggatggggatggatatcaatgcctggctggt

SEQ ID NO: 286090 - DNA, 75 bp, synthetic construct
  source 1..75: mol_type = other DNA
ggtcggtgacggcgtgttgattgccggtgatgccgccggaatgtgtatgaacctcggttttactattcgcggtat

SEQ ID NO: 286091 - DNA, 75 bp, synthetic construct
  source 1..75: mol_type = other DNA
gctcagacctcatcaatataacggtggtttgacgccgaatgaatcagaacgattgttcaggaaaaactctaaagc

SEQ ID NO: 286092 - DNA, 75 bp, synthetic construct
  source 1..75: mol_type = other DNA
tgaccatcaaagcgctgaaaatggccagggaaatccgcagtaaaccagccgaggtaatgttccacagcgatcagg

SEQ ID NO: 286093 - DNA, 75 bp, synthetic construct
  source 1..75: mol_type = other DNA
tcatctgcatgacgcgaaaaaatcggtgccgcaaatgctggaagatttcaaacaacatccggccgttgcaccgct

SEQ ID NO: 286094 - DNA, 75 bp, synthetic construct
  source 1..75: mol_type = other DNA
gcaccgctgatcgcgggcggcaagctggtggaatattccgctcacgtagtgccggaagcaggcatcaacatgctg

SEQ ID NO: 286095 - DNA, 75 bp, synthetic construct
  source 1..75: mol_type = other DNA
gcgtgaaggaattgatcgagttaccgaagttggttctcgaagaccgttttcagttgcagggtaatcagggcgcgg

SEQ ID NO: 286096 - DNA, 75 bp, synthetic construct
  source 1..75: mol_type = other DNA
aagttgccgttccccagctggatatccgggtgaaaacggacaaaacccattaccagcctggtgaactggtcaatg

SEQ ID NO: 286097 - DNA, 75 bp, synthetic construct
  source 1..75: mol_type = other DNA
tcctgagcacgccggttcacttaccggatggttcattctatggcacgctttgcgccgccagcagcgagaagcgtc

SEQ ID NO: 286098 - DNA, 75 bp, synthetic construct
  source 1..75: mol_type = other DNA
gttgaagtggatcctgaaacaaccgatgccgacagcgccttacatgcagccgatgttgcgatgtatcaggagaaa

SEQ ID NO: 286099 - DNA, 75 bp, synthetic construct
  source 1..75: mol_type = other DNA
ccggttgcggtctgtataaatgtgccgacggctacatcgtgatggaactggtgggcattacccaaattgaagagt

SEQ ID NO: 286100 - DNA, 75 bp, synthetic construct
  source 1..75: mol_type = other DNA
cgcgctgtcgttaaatattttcaaagatgaaggccgcgaagcgtttctgaaattaatggaaaccaccgatatctt

SEQ ID NO: 286101 - DNA, 75 bp, synthetic construct
  source 1..75: mol_type = other DNA
attaatacagcggtaggtctggggctatacccggattacgcaacggctgttgataagatggttcgcgtgaaagat

SEQ ID NO: 286102 - DNA, 75 bp, synthetic construct
  source 1..75: mol_type = other DNA
cattctgataatggtggtcccatgcgcagttacacgttgttggcgaaaatgtatgcgcttggtgtgctaagttct

SEQ ID NO: 286103 - DNA, 75 bp, synthetic construct
  source 1..75: mol_type = other DNA
ctttgaacataagcacagcgggatcaaatacgtcacgccagccgagcgtcatcaaggtaatgatatgaaaatact

SEQ ID NO: 286104 - DNA, 75 bp, synthetic construct
  source 1..75: mol_type = other DNA
tgagcgccatattatgatacctaaggacaatggcagctggctttatctggctgacttagaacatgcactacgtgt

SEQ ID NO: 286105 - DNA, 75 bp, synthetic construct
  source 1..75: mol_type = other DNA
tcgtttccctggctaatgaaaacgccgatatccagtcactgcgtgagcgtatccaacagcaaatacgtggagaat

SEQ ID NO: 286106 - DNA, 75 bp, synthetic construct
  source 1..75: mol_type = other DNA
tccaggtcactggaatatgataattttccggaaatcagcgaagcgaacattctgagcatatttgaacaactgcac

SEQ ID NO: 286107 - DNA, 75 bp, synthetic construct
  source 1..75: mol_type = other DNA
tggcggcagttgccagcgtcatggtcgccggaatcgcgaccgcgaatgacaacgtactcaacggggtggggggcg

SEQ ID NO: 286108 - DNA, 75 bp, synthetic construct
  source 1..75: mol_type = other DNA
agccaatgcctgccttcccgtataccgccgattacttctccggcctgaccgccaccacggcggcgctggcggcac

SEQ ID NO: 286109 - DNA, 75 bp, synthetic construct
  source 1..75: mol_type = other DNA
ttcatcttcagccatttaaacctgatgacagcaaccagccacaggttgtgattctggccgacggacaaatcacgc

SEQ ID NO: 286110 - DNA, 75 bp, synthetic construct
  source 1..75: mol_type = other DNA
tccggccagtgatgtcagacgggagtttgccatctgggcaaaagcggtcgtgaaccgccccgggaatcctggaga

SEQ ID NO: 286111 - DNA, 75 bp, synthetic construct
  source 1..75: mol_type = other DNA
agttcgaacaggaaacggcacaactcattccggccagtgatgtcagacgggaatttgccatctgggcaaaagcgg

SEQ ID NO: 286112 - DNA, 75 bp, synthetic construct
  source 1..75: mol_type = other DNA
cagctgttgctgtaaggtgagcggtgatgtgcagcaatgctataccgccaaagagcgccgtttactgcaacatac

SEQ ID NO: 286113 - DNA, 75 bp, synthetic construct
  source 1..75: mol_type = other DNA
cagcaggcgaagcattgaaagtactgatacatgcgcttgtggatataaattgcatggtagagatcatggagagga

SEQ ID NO: 286114 - DNA, 75 bp, synthetic construct
  source 1..75: mol_type = other DNA
atgatcctgaaacaagatctgaaatggtcacctgacggtatgcgtgttgaggtcattcgggccggtgagtatgac

SEQ ID NO: 286115 - DNA, 75 bp, synthetic construct
  source 1..75: mol_type = other DNA
actggttatcgctcacttgtccggtttcggtcagtacggcaccgaggagtacaccaatctccctgcctataacac

SEQ ID NO: 286116 - DNA, 75 bp, synthetic construct
  source 1..75: mol_type = other DNA
acgtcgcccgtgaatcgatcactcagtggcaaacgatggatggccgcacctgcaaagggccgaacgtgatgccga

SEQ ID NO: 286117 - DNA, 75 bp, synthetic construct
  source 1..75: mol_type = other DNA
agccaatgcctgctttcccgtacaccgctgactacttctccggcctgaccgccaccaccgcagcgctggcagcac

SEQ ID NO: 286118 - DNA, 75 bp, synthetic construct
  source 1..75: mol_type = other DNA
gaactgacgcccattaccggttatggagtattaatgatcgtcatcccggaatgatccgcgtgaatgaaggaggag

SEQ ID NO: 286119 - DNA, 75 bp, synthetic construct
  source 1..75: mol_type = other DNA
aaccaaacataatgatgtaatactgaaaaaatcgtatgaagtgatgcatggggaattggggaatgtggattcgat

SEQ ID NO: 286120 - DNA, 75 bp, synthetic construct
  source 1..75: mol_type = other DNA
tattcttgaacgtgactgcggtctgcagcctgccgctgtgagccgtgttcagtccattattgatgatctgcgcga

SEQ ID NO: 286121 - DNA, 75 bp, synthetic construct
  source 1..75: mol_type = other DNA
agctcaggataatgcttgctggtccggctgcgagttatacggcacattcaccagccataaagaaggttcttgatg

SEQ ID NO: 286122 - DNA, 75 bp, synthetic construct
  source 1..75: mol_type = other DNA
acgcgtgcaaacgcggcgtcgcagattctgtcttcatgtcagggggttaatgtttctaccagttgcctggccagt

SEQ ID NO: 286123 - DNA, 75 bp, synthetic construct
  source 1..75: mol_type = other DNA
ttgtctggagattcagggggccagtctaataacaaccaggcatatacatcaacaagttacagtgatggcgatgga

SEQ ID NO: 286124 - DNA, 75 bp, synthetic construct
  source 1..75: mol_type = other DNA
tctgaattattatcacgatccccatgcgacggaaattgaagaagatggcagcactatcagtgacgatgcggtgaa

SEQ ID NO: 286125 - DNA, 75 bp, synthetic construct
  source 1..75: mol_type = other DNA
cggactatatcgttggatattacagcgcactaagaccgcacgaatataacggtgggttccccccaaacgaatcgg

SEQ ID NO: 286126 - DNA, 75 bp, synthetic construct
  source 1..75: mol_type = other DNA
ccgtcggggtgatgttccacagcgatagtaataatgccgatgtcagtctttaccaccacttagtttgccgtttaa

SEQ ID NO: 286127 - DNA, 75 bp, synthetic construct
  source 1..75: mol_type = other DNA
tttataccatcaacaatgacgtctatttaagtgaagttatttttgacaataaccaggcatatacatcaacaagtt

SEQ ID NO: 286128 - DNA, 75 bp, synthetic construct
  source 1..75: mol_type = other DNA
acgactggtatctgcgatcgcaagaagtaacgccaccatcgccacctgatccagacccgactcccgatcctgatc

SEQ ID NO: 286129 - DNA, 75 bp, synthetic construct
  source 1..75: mol_type = other DNA
acgaaaattgaagaagatggcagcactatcagtgacgaagcggtaaaacaacggggtgaaataaaagtgggagtc

SEQ ID NO: 286130 - DNA, 75 bp, synthetic construct
  source 1..75: mol_type = other DNA
gcaccatcgaaggtgctggtcagctcaccattgcgcaaaacggcagctacgtgctggcaggggctcagtcgatgg

SEQ ID NO: 286131 - DNA, 75 bp, synthetic construct
  source 1..75: mol_type = other DNA
tacggtgcagcttagcggtgacctgtttagggggcgctggggtgatgacggcgaatggatgctaggggccattgg

SEQ ID NO: 286132 - DNA, 75 bp, synthetic construct
  source 1..75: mol_type = other DNA
gctcagcatgaagacacttctacggtgcagcttagcggcgacttgtttagcgggcgctggggcgcggatggcgag

SEQ ID NO: 286133 - DNA, 75 bp, synthetic construct
  source 1..75: mol_type = other DNA
caacacccgacccggccccggaccctacgcctgcctaccagccggtgttgaatgccaaagttggtggatatttta

SEQ ID NO: 286134 - DNA, 75 bp, synthetic construct
  source 1..75: mol_type = other DNA
gaacgcttcttcaggagtctgaagaacgaatggatgccggtggtgggttacgtaagcttcagcgaggcggtaatg

SEQ ID NO: 286135 - DNA, 75 bp, synthetic construct
  source 1..75: mol_type = other DNA
gagctaaccgttgagtgtacgatgaatgccgctaaatgccgcatggtatccgctgcattacagccagtgtgttga

SEQ ID NO: 286136 - DNA, 75 bp, synthetic construct
  source 1..75: mol_type = other DNA
atcgccacttttattggcgatgaaaagatgtttcgtgaggccgtcgaagcctataggaaatggaggtcaaaatga

SEQ ID NO: 286137 - DNA, 75 bp, synthetic construct
  source 1..75: mol_type = other DNA
ccagccataaaaaaggttcttgatgaactggaagccaaagacaagcgcattgcagaactggaggcaagggaagtc

SEQ ID NO: 286138 - DNA, 75 bp, synthetic construct
  source 1..75: mol_type = other DNA
gcagcgcaacctggctctggttatgtttcagcgcgtcatgacgcactgcccagatcagtatctgaagatggccgc

SEQ ID NO: 286139 - DNA, 75 bp, synthetic construct
  source 1..75: mol_type = other DNA
atatgaagtgaatgctacgaacgaagaaataatcgtggaatgtgataccgggattgtatcggctgaactgacgcc

SEQ ID NO: 286140 - DNA, 75 bp, synthetic construct
  source 1..75: mol_type = other DNA
gatgttccacagcgatcagggcagtcattatacgagcaggcagttccggcagttattgtggcgataccagatcag

SEQ ID NO: 286141 - DNA, 75 bp, synthetic construct
  source 1..75: mol_type = other DNA
tcagacagagtatgagccggcgcggaaactgctgggataacagcccaatggagcgcttcttcaggagtctgaaga

SEQ ID NO: 286142 - DNA, 75 bp, synthetic construct
  source 1..75: mol_type = other DNA
attacagcgcactaagaccgcacgaatataacggtgggttacccccaaacgaatcggaaccgttcgccagaaaac

SEQ ID NO: 286143 - DNA, 75 bp, synthetic construct
  source 1..75: mol_type = other DNA
agttattgtggcgataccagatcacgcagagtatgagccggcgcggaaactgctgggataacagcccaatggaac

SEQ ID NO: 286144 - DNA, 75 bp, synthetic construct
  source 1..75: mol_type = other DNA
cagcgcactaagaccgcacgaatataacggtggattacccccaaacgaatcggaaaatcaatactggaaaaactc

SEQ ID NO: 286145 - DNA, 75 bp, synthetic construct
  source 1..75: mol_type = other DNA
tgagggtagcacattgactaaaacgggggcgggtacgctggagctgaccgccagcggtacaacgcagtcggcggt

SEQ ID NO: 286146 - DNA, 75 bp, synthetic construct
  source 1..75: mol_type = other DNA
tgatcccacgccggatcctgacccaacccccgacccggcccctacgcctgcttaccagccggtgctgaatgccaa

SEQ ID NO: 286147 - DNA, 75 bp, synthetic construct
  source 1..75: mol_type = other DNA
tggcgagtggatgcttgggattgttggtggctacagcgataaccagggcgacagccgctcgaatatgaccggaac

SEQ ID NO: 286148 - DNA, 75 bp, synthetic construct
  source 1..75: mol_type = other DNA
tccaggacgatccgcagtcgatcgtgttaaacggcggtgtgcttgatctctctgatttcgccacctggcagagcg

SEQ ID NO: 286149 - DNA, 75 bp, synthetic construct
  source 1..75: mol_type = other DNA
ggtgatgttgcggatatccttccttatgcttcgtcactgtgggttggtgatggggcaacgttcgttactggcgcg

SEQ ID NO: 286150 - DNA, 75 bp, synthetic construct
  source 1..75: mol_type = other DNA
tcccacgccggatcctgatccaacacccgacccggaacctacgcctgcttaccagccggtgttgaatgccaaagt

SEQ ID NO: 286151 - DNA, 75 bp, synthetic construct
  source 1..75: mol_type = other DNA
aagtggcagttgatgcgggggtagacacgcagtggggcgcactgatggctgacagcagcgggcagcatcaggatg

SEQ ID NO: 286152 - DNA, 75 bp, synthetic construct
  source 1..75: mol_type = other DNA
tcgccgatgggcaatggctggttttttcggatatgaccaataatgccagcggtggggccgtatttttgcaacaag

SEQ ID NO: 286153 - DNA, 75 bp, synthetic construct
  source 1..75: mol_type = other DNA
ggagcatcgccgatgggcaatgggtgattttttcgggtatggccaataatgccagcggtggggccgtatttttgc

SEQ ID NO: 286154 - DNA, 75 bp, synthetic construct
  source 1..75: mol_type = other DNA
atcaaggcagttttgctggcaccatcgaaggtgctggtcagctcaccattgcgcaaaacggcagctatgtgctgg

SEQ ID NO: 286155 - DNA, 75 bp, synthetic construct
  source 1..75: mol_type = other DNA
tgccgacggaaaaacgctggttattggcaatacagagaatgacggagctgttgactctattgctggtaccgggtt

SEQ ID NO: 286156 - DNA, 75 bp, synthetic construct
  source 1..75: mol_type = other DNA
gctgatcccacgcagtttcaaacaatgcacagttcagtctggctggcagtggctacgtcaacatgggagcgtatg

SEQ ID NO: 286157 - DNA, 75 bp, synthetic construct
  source 1..75: mol_type = other DNA
agggttacgatacctatgtgtcagaaaggcaagcgcagaaggatcaaccgcaggcaggcgcagcagggcagtcaa

SEQ ID NO: 286158 - DNA, 75 bp, synthetic construct
  source 1..75: mol_type = other DNA
tactcacccggaatggtgcttcagcacatgtgagaaacgtattgcaggttggttagccgtggctgaacacatgct

SEQ ID NO: 286159 - DNA, 75 bp, synthetic construct
  source 1..75: mol_type = other DNA
aacggacattgacccgctggcagctggtatggcgtatatacaattgtcgctgtgtggtgtggccggagaagtggt

SEQ ID NO: 286160 - DNA, 75 bp, synthetic construct
  source 1..75: mol_type = other DNA
cgacgccgggtactgctgacgcccgggcattacctcgggaactggtcatatcgtctgtgtcattctcaggaacag

SEQ ID NO: 286161 - DNA, 75 bp, synthetic construct
  source 1..75: mol_type = other DNA
aaattaacgaggcgctccgcaggatgaaaaaagcaggtctgaacaagtctgaacttgaggcttttttgcgggata

SEQ ID NO: 286162 - DNA, 75 bp, synthetic construct
  source 1..75: mol_type = other DNA
aaagcggagaacaccttcgtctcaccacgctggaaagtgtctggattcagggaaaactgcgtatgtgggggcgct

SEQ ID NO: 286163 - DNA, 75 bp, synthetic construct
  source 1..75: mol_type = other DNA
ggtcgtatattggtggcggtaagacggggaatatgtttaacctgatgttgacctctaaaaagctgacaaaaacgg

SEQ ID NO: 286164 - DNA, 75 bp, synthetic construct
  source 1..75: mol_type = other DNA
cgagcttgtgtcagcaagctggatgcgtttgaaactctgctcacagaagcgcttgagcgagaggtgaaaaagcca

SEQ ID NO: 286165 - DNA, 75 bp, synthetic construct
  source 1..75: mol_type = other DNA
cacaacagggcaagcaccggaagcagctatccaggcactgaaagcaaacccggcattagcgtctcagttcaaagc

SEQ ID NO: 286166 - DNA, 75 bp, synthetic construct
  source 1..75: mol_type = other DNA
aggaaattaacgctggaacacgctaaaaaactggcagcgcgattcggtatttctcccgccttgtttattgattaa

SEQ ID NO: 286167 - DNA, 75 bp, synthetic construct
  source 1..75: mol_type = other DNA
attgagggactggagcagggattctgtgattttctgggcagtgtgttcatgcaactggaactgggggataaatac

SEQ ID NO: 286168 - DNA, 75 bp, synthetic construct
  source 1..75: mol_type = other DNA
gcagctcgaactgggtgataaatatcgtggtcagttttttaccccatgggatgtgggcatcatgatggcgcgcat

SEQ ID NO: 286169 - DNA, 75 bp, synthetic construct
  source 1..75: mol_type = other DNA
atttactgctgaggcgattggttttaaccttgggctggcacgcaactcggttagtaaagatcttaatcaattatg

SEQ ID NO: 286170 - DNA, 75 bp, synthetic construct
  source 1..75: mol_type = other DNA
catgtcacaccaacattagatctgaattattattacgatccccattcgacgaaaattgaagaagatggcagcact

SEQ ID NO: 286171 - DNA, 75 bp, synthetic construct
  source 1..75: mol_type = other DNA
cagccatcgcgattttacccaacgcgcgaacatcagcgggcgcaacgaaatggcgatgcttggaactgcgttgaa

SEQ ID NO: 286172 - DNA, 75 bp, synthetic construct
  source 1..75: mol_type = other DNA
caggttatccctctccgtccaggtcaatcctatggcctgttcatgaaccgctttaacgaactggcggagctgcgc

SEQ ID NO: 286173 - DNA, 75 bp, synthetic construct
  source 1..75: mol_type = other DNA
tcggctgaaatgcgatacctgcaaaaaacgttggggttgcatgggttgccgctgattgccgaaaatggcgcggtg

SEQ ID NO: 286174 - DNA, 75 bp, synthetic construct
  source 1..75: mol_type = other DNA
tccaggataacggctgcggcgtgcctgaaaatgccatccgcagcaatcactacggcatgataataatgcgcgacc

SEQ ID NO: 286175 - DNA, 75 bp, synthetic construct
  source 1..75: mol_type = other DNA
agtttgcaggagtactggcgcaatgaactcgttccaggactattacgtgcgcaaaccagagaaaccgtatcggca

SEQ ID NO: 286176 - DNA, 75 bp, synthetic construct
  source 1..75: mol_type = other DNA
ttcaggagaaaaccgccgggctggagcataaaaatcagatcctctcttttttatggcaggctaaccgccgtttgc

SEQ ID NO: 286177 - DNA, 75 bp, synthetic construct
  source 1..75: mol_type = other DNA
ccgctgatgaattaaagaacactattatacttgccgcgaagggcatgaatctgatcgatgacgcttcgtttcagt

SEQ ID NO: 286178 - DNA, 75 bp, synthetic construct
  source 1..75: mol_type = other DNA
gatattacacaatgccttcattgaactggcccgtaaaatatcctgtcagtgggatcaactttcagaaagtgatca

SEQ ID NO: 286179 - DNA, 75 bp, synthetic construct
  source 1..75: mol_type = other DNA
tactgattgttcgcagaatgctggtactgcacggtggtgatatcaggctggcggactcaacgactggtgcctgtt

SEQ ID NO: 286180 - DNA, 75 bp, synthetic construct
  source 1..75: mol_type = other DNA
tctgcccagttatggaatcgcgcttccataaaacaaaaaatccctgtcaccatcctctacattctcttgtttagc

SEQ ID NO: 286181 - DNA, 75 bp, synthetic construct
  source 1..75: mol_type = other DNA
ttctttttccagagtacttgtcagttctgccacgaagaaagtcaaatactccagtttatggagaattactattct

SEQ ID NO: 286182 - DNA, 75 bp, synthetic construct
  source 1..75: mol_type = other DNA
tattttggctgcaaagggcatgaacctgattgatgatgcctcattccagtccacgttagatgttaagcgtcaata

SEQ ID NO: 286183 - DNA, 75 bp, synthetic construct
  source 1..75: mol_type = other DNA
tcgaactgcgggtgtatgacactgatgatgaagagaatcatcaggagtttacctgccagccagatatgacttgtg

SEQ ID NO: 286184 - DNA, 75 bp, synthetic construct
  source 1..75: mol_type = other DNA
tagttattggcattagcgcaactgcgctttttgacatgagtgaatcagatcgcatgtttcgggaaacctatgcga

SEQ ID NO: 286185 - DNA, 75 bp, synthetic construct
  source 1..75: mol_type = other DNA
gacagcccgaaatagcccttcggaaatgcgcgttattaaaacgctaagaagctggggggtatatgtcgatgaagc

SEQ ID NO: 286186 - DNA, 75 bp, synthetic construct
  source 1..75: mol_type = other DNA
gggaacatctaacccgcaaggcagatcctaatactgatttaactctaccaaataaaccagtaagaccagaatcat

SEQ ID NO: 286187 - DNA, 75 bp, synthetic construct
  source 1..75: mol_type = other DNA
atggctacttggcaacaaggaatcaactcaggcggttttcttgctggcattggtgcgcaaaacgagaatgcgcca

SEQ ID NO: 286188 - DNA, 75 bp, synthetic construct
  source 1..75: mol_type = other DNA
tcagaatccagagcagctatcacacatgctgactactatgacgctaggggctgttggtccggataaaatgctgga

SEQ ID NO: 286189 - DNA, 75 bp, synthetic construct
  source 1..75: mol_type = other DNA
gccaagtgggatatcagaaggcgcgacggcaacgaaccctaaaactggtcagaaactcatttataggaacggaca

SEQ ID NO: 286190 - DNA, 75 bp, synthetic construct
  source 1..75: mol_type = other DNA
cttcagttgtaatgtcgatggcgggtcaagtattggagcaggtacaacctctgtttatgttaatctcgaccctgt

SEQ ID NO: 286191 - DNA, 75 bp, synthetic construct
  source 1..75: mol_type = other DNA
cagcttgccggtacgctttaccctgcaattaccggcggttggatttccttaaaggctgtcgaggtgatggctaac

SEQ ID NO: 286192 - DNA, 75 bp, synthetic construct
  source 1..75: mol_type = other DNA
tgtttgaacgccgccccctgccttatcagtcgatgcagcactcgaaggattaccgctgggcgtctaatgacagag

SEQ ID NO: 286193 - DNA, 75 bp, synthetic construct
  source 1..75: mol_type = other DNA
acaacgagttagaaagccataaacggttacttgatggtaaagctatctcctacgaagaatatatgcgtcgtgtga

SEQ ID NO: 286194 - DNA, 75 bp, synthetic construct
  source 1..75: mol_type = other DNA
atgacaaaacatatagtaacaatagaaggggataataaaggtctaaggagaagtaccaatgaagccgccgacctt

SEQ ID NO: 286195 - DNA, 75 bp, synthetic construct
  source 1..75: mol_type = other DNA
agtaaataaaagcaaagtacctctgggtttaagcgcaacctatggacaaacaggaaacaaggtgatgctgccaac

SEQ ID NO: 286196 - DNA, 75 bp, synthetic construct
  source 1..75: mol_type = other DNA
gctggccccggcgggaaagatatcttcctgttaagcccggatgccggtgctaaacctggccaccaggttaagtaa

SEQ ID NO: 286197 - DNA, 75 bp, synthetic construct
  source 1..75: mol_type = other DNA
cgctgattgaaaacgcggagtttgttgaaggctctgacaaactgctgcgtctgacactggatctcggtggtgaaa

SEQ ID NO: 286198 - DNA, 75 bp, synthetic construct
  source 1..75: mol_type = other DNA
gcaggcgatttgctctatgggcattaacctgttccgcgtgctgatgacgtacctgaagccggtactgccgaaact

SEQ ID NO: 286199 - DNA, 75 bp, synthetic construct
  source 1..75: mol_type = other DNA
atggcatcattaaccaatactgcctcaaaatgatcggtggacctattggtggcatgatttcagataagatcctga

SEQ ID NO: 286200 - DNA, 75 bp, synthetic construct
  source 1..75: mol_type = other DNA
tgttcctgcctctgaacttgctgccgccatgaagcagattaaagaactccagcgcctgctacggcaagaaaacga

SEQ ID NO: 286201 - DNA, 75 bp, synthetic construct
  source 1..75: mol_type = other DNA
cggaactgacctgggatggtatccagcaaccgctgctgggccataaagtgaatccgttcaaagcactgtataacc

SEQ ID NO: 286202 - DNA, 75 bp, synthetic construct
  source 1..75: mol_type = other DNA
agccagccagttatttctctggcgcaagcaataccaggaaggaagtcttactgctgtggccgcaggagaacaggt

SEQ ID NO: 286203 - DNA, 75 bp, synthetic construct
  source 1..75: mol_type = other DNA
ggctctttaaaacaacaatttcgtgtaatttattgaggattattattctaagcatctttttcctccagccgacat

SEQ ID NO: 286204 - DNA, 75 bp, synthetic construct
  source 1..75: mol_type = other DNA
agtacaccgtaaaaaaactcaacgataacgagtggcagctgacgtcggtatcgaacccgcgtgaaaagctgacga

SEQ ID NO: 286205 - DNA, 75 bp, synthetic construct
  source 1..75: mol_type = other DNA
gaagccggtactgccgaaactgaccgagcgtgcagaagcattcctcaatacggaactgacctgggatggtatcca

SEQ ID NO: 286206 - DNA, 75 bp, synthetic construct
  source 1..75: mol_type = other DNA
cctgcgcgtggcgctgattgaaaacgcagagtttgttgaaggttctgacaaactgctgcgcctgacgctggatct

SEQ ID NO: 286207 - DNA, 75 bp, synthetic construct
  source 1..75: mol_type = other DNA
tgtccaagtctcgcggcacctttattaaagccagcacctggctgaatcattttgacgctgacagcctgcgttact

SEQ ID NO: 286208 - DNA, 75 bp, synthetic construct
  source 1..75: mol_type = other DNA
gaactccagcgcctgctcggcaagaaaacgatggaaaatgaactcctcaaagaagccgttgaatatggacgggca

SEQ ID NO: 286209 - DNA, 75 bp, synthetic construct
  source 1..75: mol_type = other DNA
aatccagcacgcgagacatacaccgcctgttcaaccatcgacgaggagttgtgcgccagtcgcagcaagtaacca

SEQ ID NO: 286210 - DNA, 75 bp, synthetic construct
  source 1..75: mol_type = other DNA
agggtctggcgaacgcagcgagaaggaccggaaggctggcgcgaaggactggatcactttttcaccgctcgttaa

SEQ ID NO: 286211 - DNA, 75 bp, synthetic construct
  source 1..75: mol_type = other DNA
cgcagctgcatgaggcgtcggtaacgctaatctggcgcgacagtgacgagcgtatggcacaatttaccgctcgtc

SEQ ID NO: 286212 - DNA, 75 bp, synthetic construct
  source 1..75: mol_type = other DNA
aaatgaggatccgcctcgtgtctggcgaacgcagcgagcaggtcctgatggctggcgcgaggggttggatcactt

SEQ ID NO: 286213 - DNA, 75 bp, synthetic construct
  source 1..75: mol_type = other DNA
gctggcgtgaagggctggaccatttttctccgctcgttaagcgttatcgctcgcgcatacccgattacgcccggc

SEQ ID NO: 286214 - DNA, 75 bp, synthetic construct
  source 1..75: mol_type = other DNA
cgaactgggcttgcagtttatgcagggtgcgcgcttctggcacgtactggatgcctctgccggaaaagatcaggc

SEQ ID NO: 286215 - DNA, 75 bp, synthetic construct
  source 1..75: mol_type = other DNA
atgtgcttctccgtatacaccatgttatcggagagctgcccacgtatggttatcgtcgggtatgcgaaccagata

SEQ ID NO: 286216 - DNA, 75 bp, synthetic construct
  source 1..75: mol_type = other DNA
ggtcgccgcagtcgtcactcagatgatatggatgcacttctccgtatacaccatgttatcggatagctgcccacg

SEQ ID NO: 286217 - DNA, 75 bp, synthetic construct
  source 1..75: mol_type = other DNA
ctgctgtggctgccggagaacaggtcattcctgcctctgaacttgctgccgccatgaagcagattaaagaactcc

SEQ ID NO: 286218 - DNA, 75 bp, synthetic construct
  source 1..75: mol_type = other DNA
ggagcttcgtaaacgtaaaactcctcaggaaaaaatcgccattattcagcagacaatggaacccggtatgacggt

SEQ ID NO: 286219 - DNA, 75 bp, synthetic construct
  source 1..75: mol_type = other DNA
cggaagatcgttgccgaagcggcgttccaccgctcccagcatgacgtcctgtactgtttcactgttgaagccgcc

SEQ ID NO: 286220 - DNA, 75 bp, synthetic construct
  source 1..75: mol_type = other DNA
ggcaaaaaaacgatggaaaatgaactccttaaagaagccgttgaatatgggcgagcaaaaaagtggatagcgcac

SEQ ID NO: 286221 - DNA, 75 bp, synthetic construct
  source 1..75: mol_type = other DNA
cgcgttactggtcatgggttccggcacacgatgagcacgattttacatgagcagggctataacaccgcgtggata

SEQ ID NO: 286222 - DNA, 75 bp, synthetic construct
  source 1..75: mol_type = other DNA
ccggaatttttccgcgtttttaatacgtacaccggaagccagatcgtcaagctgggtatgcgattattgattctt

SEQ ID NO: 286223 - DNA, 75 bp, synthetic construct
  source 1..75: mol_type = other DNA
agaagctgcacgtcttcgtctggcaaaagaaatggcagacaaacaggcaatacagattgccccaccgtggcaaca

SEQ ID NO: 286224 - DNA, 75 bp, synthetic construct
  source 1..75: mol_type = other DNA
gtgcttgttaagattgcgatgcaattgcttattttaaccggagtaaggcctggggagttgaggcaagcggagtgg

SEQ ID NO: 286225 - DNA, 75 bp, synthetic construct
  source 1..75: mol_type = other DNA
cttgcgcttggtgtttatcctgctgtttctttagctgaagcacgaagcaagcgtgaggatgctaaaagaacatta

SEQ ID NO: 286226 - DNA, 75 bp, synthetic construct
  source 1..75: mol_type = other DNA
tccgatgatgttaatcgcaggctattacatgaaacgtattggcaagcgactattaatgctcattgctatcgtgag

SEQ ID NO: 286227 - DNA, 75 bp, synthetic construct
  source 1..75: mol_type = other DNA
ctcttttagtggagactactgagattcacaatgatcgcataggtctgtaccgtaaaaaccatcttgttaaatcgg

SEQ ID NO: 286228 - DNA, 75 bp, synthetic construct
  source 1..75: mol_type = other DNA
gatcattaccggttacgcaagagcaaacggcgcatagcggaagagctctatgaaaagcatcccgactggtgcttt

SEQ ID NO: 286229 - DNA, 75 bp, synthetic construct
  source 1..75: mol_type = other DNA
aatctggtgaaatggttcgtcttcgtactctggaaagcatctggatacagggtaagttgcgcatgtggggccgct

SEQ ID NO: 286230 - DNA, 75 bp, synthetic construct
  source 1..75: mol_type = other DNA
ttcgccctcgcccgtgaacacgccgacagaacaggccgtgagacggtcatgttcagtacatttttacgtgctcag

SEQ ID NO: 286231 - DNA, 75 bp, synthetic construct
  source 1..75: mol_type = other DNA
cacaatcgacgatatcgatgttgaggatatcgcgactgctctttccaacatctgtcgattcgctgggcatctgcc

SEQ ID NO: 286232 - DNA, 75 bp, synthetic construct
  source 1..75: mol_type = other DNA
gcgggcagcagaaatgttggagtgcatgatgctgtcgtcctgggaaaggcactgggcatatctcctcctgagctc

SEQ ID NO: 286233 - DNA, 75 bp, synthetic construct
  source 1..75: mol_type = other DNA
gagttacagctggctcacgtcgataagaactcaattcgtgggacgtataaccatgcgcagtatctggatgggagg

SEQ ID NO: 286234 - DNA, 75 bp, synthetic construct
  source 1..75: mol_type = other DNA
tgaaccgaagaacacggcgatgcggagtccggagagtaacggcatagcagagagcttcgtgaaaacgataaagcg

SEQ ID NO: 286235 - DNA, 75 bp, synthetic construct
  source 1..75: mol_type = other DNA
ctttagcgatagaccggaacggccaatccagtggctgactgataacagttcggcttatatggctcatgaaacagg

SEQ ID NO: 286236 - DNA, 75 bp, synthetic construct
  source 1..75: mol_type = other DNA
tacatgacaaaccttcacgaccgcagcgggaacataaaggccgaatatcggtgaaggaaagcgaccagcgttggt

SEQ ID NO: 286237 - DNA, 75 bp, synthetic construct
  source 1..75: mol_type = other DNA
cgcaaaactgcgtgtcacgttcgcactggactgttgcgatcgtgaagccatagactgggccgcaagcacgggggg

SEQ ID NO: 286238 - DNA, 75 bp, synthetic construct
  source 1..75: mol_type = other DNA
gttttggcgataaaggaccggaacggccaatccagtggctgacagataacggttcagcgtacagagcgcatgaaa

SEQ ID NO: 286239 - DNA, 75 bp, synthetic construct
  source 1..75: mol_type = other DNA
cgaaaaactgcgtgttacgttcgtcatggactgttgcgatcgtgaagccatagactgggcagcaagcacgggagg

SEQ ID NO: 286240 - DNA, 75 bp, synthetic construct
  source 1..75: mol_type = other DNA
tcgcattctggcaatgcgtcaggaactggtgaaggtattgagcacagagatgccagagcgcaatttcgattatct

SEQ ID NO: 286241 - DNA, 75 bp, synthetic construct
  source 1..75: mol_type = other DNA
gtgttgctgcatccatgttgccacaacccaacgggtgccgatctcactaatgaccagtgggattccgtgattgaa

SEQ ID NO: 286242 - DNA, 75 bp, synthetic construct
  source 1..75: mol_type = other DNA
ccgttcgttaggtaaagagaagctgctcgctattggcgtttaccccgatgtttctttagctgaagccagaagcaa

SEQ ID NO: 286243 - DNA, 75 bp, synthetic construct
  source 1..75: mol_type = other DNA
aaggaatgcaaaccagtttttttccttttttggcccaaaatttaaagagtttatgattgagaaggtaaaatcaag

SEQ ID NO: 286244 - DNA, 75 bp, synthetic construct
  source 1..75: mol_type = other DNA
gaggagtacctgtcgaagttctgaatgttatgacaaccgattttttactgaccttgagaactccggtgatgctgc

SEQ ID NO: 286245 - DNA, 75 bp, synthetic construct
  source 1..75: mol_type = other DNA
acccgacaggggctgatctcaccaacgaccagtgggatgcggtaattgaaattctcaaagcacgtgaattaatcc

SEQ ID NO: 286246 - DNA, 75 bp, synthetic construct
  source 1..75: mol_type = other DNA
tgatgcagttgaaaaaattcaggcgttgttaccagcgatccccgccacaggaagagacggtggtcagcattgccg

SEQ ID NO: 286247 - DNA, 75 bp, synthetic construct
  source 1..75: mol_type = other DNA
gcatggcgatgaatgcatgggcgcgtcctgatggtgaaaaagttcctgcggctgagataaccagggcgtatttcg

SEQ ID NO: 286248 - DNA, 75 bp, synthetic construct
  source 1..75: mol_type = other DNA
atgaagaaaggcgacatggtgaacgatatcaaaccgatctgggcttatgcggattcgttgtacaacggcacctgt

SEQ ID NO: 286249 - DNA, 75 bp, synthetic construct
  source 1..75: mol_type = other DNA
gctgaaataaccagggcttattttgaactgggtatgacgttcccagaactgtatgacgacagccatccggaagcc

SEQ ID NO: 286250 - DNA, 75 bp, synthetic construct
  source 1..75: mol_type = other DNA
ccattaccgagtccgggctgcgcgttggtgccggatatctcggtagtgggatacgacgataccgaagacagctcg

SEQ ID NO: 286251 - DNA, 75 bp, synthetic construct
  source 1..75: mol_type = other DNA
cctgtaaagcggcggtgcacaatcttctcgcgcaacgcgtcagtggactgatcattaactatccgctggatgacc

SEQ ID NO: 286252 - DNA, 75 bp, synthetic construct
  source 1..75: mol_type = other DNA
cgttgcatcagcgatcgtgctgttcgaccagatgaatcgtggtggcccggcaggaaatgctgtagcagtacactg

SEQ ID NO: 286253 - DNA, 75 bp, synthetic construct
  source 1..75: mol_type = other DNA
ctgtagcgttaacttcgcaatcacaccgccaaatcaggtaattgatttcggcacatttagcgatcaggatattcg

SEQ ID NO: 286254 - DNA, 75 bp, synthetic construct
  source 1..75: mol_type = other DNA
gctgaaataacccgggcttatttcgagttgggtctgacgtttcctgaactgttcgacgacagccatccggaagcc

SEQ ID NO: 286255 - DNA, 75 bp, synthetic construct
  source 1..75: mol_type = other DNA
tccgctgggtggagaaagacactcctgatgcggttaaaaaaattcaggcgttgttaccagcgatcgaaaaagcaa

SEQ ID NO: 286256 - DNA, 75 bp, synthetic construct
  source 1..75: mol_type = other DNA
atgaaaatcaagcatgaacatatccgcatggcgatgaatgcgtgggcgcatccggatggcgagaaagtaccgact

SEQ ID NO: 286257 - DNA, 75 bp, synthetic construct
  source 1..75: mol_type = other DNA
gcatggcgatgaatgcctgggcgtatccggacggtgaaaaagttccggcggctgaaataacccgggcttattttg

SEQ ID NO: 286258 - DNA, 75 bp, synthetic construct
  source 1..75: mol_type = other DNA
tgttgcgtcagcggttgttttgtatgaccagatgaatcgcggcggcccggcaggaaatgccgtggtgatgcacta

SEQ ID NO: 286259 - DNA, 75 bp, synthetic construct
  source 1..75: mol_type = other DNA
cgaaaatccggtgctgattatgggcgatatgaatatcagccccaccgacctggatatcggcattggcgaagagaa

SEQ ID NO: 286260 - DNA, 75 bp, synthetic construct
  source 1..75: mol_type = other DNA
aaatgttccttcctgccggaagaacgcgaatggatggagcgtctgctcagttgggggttggtagataccttccgc

SEQ ID NO: 286261 - DNA, 75 bp, synthetic construct
  source 1..75: mol_type = other DNA
ggctacaacgtgttttatcacggacagaaaggccattatggcgtggcgctgctgaccaaagagacgccgattacc

SEQ ID NO: 286262 - DNA, 75 bp, synthetic construct
  source 1..75: mol_type = other DNA
agctgggaatgacgttcccggaactgtatgacgacagccatccggaagccctggctcgcaatactcagaaaattt

SEQ ID NO: 286263 - DNA, 75 bp, synthetic construct
  source 1..75: mol_type = other DNA
cttggtgtagatgcgatcgatctggagtgcggcatcagcacgcataatgaagatgaagcccgtttaaaccgtcgg

SEQ ID NO: 286264 - DNA, 75 bp, synthetic construct
  source 1..75: mol_type = other DNA
agaaaggccattatggcgtggcgctgctgaccaaagagacgccgattactgtgcgtcgcggcttccccggcgacg

SEQ ID NO: 286265 - DNA, 75 bp, synthetic construct
  source 1..75: mol_type = other DNA
aatggcggtgaaactggggctggaaaaacgttttcagttgcgcgatgacgagttttatcccagccatgaggcgac

SEQ ID NO: 286266 - DNA, 75 bp, synthetic construct
  source 1..75: mol_type = other DNA
aaacgttttcagttgcgcgatgacgagttttatcccagccatgaggcgacggatttttatcatcgttataaagaa

SEQ ID NO: 286267 - DNA, 75 bp, synthetic construct
  source 1..75: mol_type = other DNA
tgatgccgttgaaaaaatgcaggctctgttaccagctatcgaaaaagcaatgccgcctctgctggtggcccgaat

SEQ ID NO: 286268 - DNA, 75 bp, synthetic construct
  source 1..75: mol_type = other DNA
ctggggctgcgcatcaccatgaacatgatgtacgaccgttaccagaagccgctgtttttagtcgaaaacgggctg

SEQ ID NO: 286269 - DNA, 75 bp, synthetic construct
  source 1..75: mol_type = other DNA
ggcattgctttttatcgttctgtctttgaagagtgtaaaaagtacggtatcgaaccgctggtcacgttgtgccac

SEQ ID NO: 286270 - DNA, 75 bp, synthetic construct
  source 1..75: mol_type = other DNA
ctgacgcgcacgcgtaagaaatcgttctggtggtataaaaaagtgattgccagtaatggtgaagatttagagtaa

SEQ ID NO: 286271 - DNA, 75 bp, synthetic construct
  source 1..75: mol_type = other DNA
gtacgacgacagccatccggaagccctggcccgtaatacccagaaaattttccgctgggtagagaaagacacccc

SEQ ID NO: 286272 - DNA, 75 bp, synthetic construct
  source 1..75: mol_type = other DNA
taccggaatgcgcgagcgcgtaacggcgctgggtggcacattgaccatttcctgtctgcacggcacgcgtgtcag

SEQ ID NO: 286273 - DNA, 75 bp, synthetic construct
  source 1..75: mol_type = other DNA
ggcactatctcgccaataacacctggctgccgctcggcccgtcactggtttctcagccaatcaactggcgcgggc

SEQ ID NO: 286274 - DNA, 75 bp, synthetic construct
  source 1..75: mol_type = other DNA
tggcctcaccggaatgcgtgagcgcgtgacggcgctgggcggcaccttaaccatctcctgtctgcacggcacacg

SEQ ID NO: 286275 - DNA, 75 bp, synthetic construct
  source 1..75: mol_type = other DNA
tcacctgctgatggaaaacctcgccatggtcaatccgaatctcggttattcggtggatgaggcctttctgtaccg

SEQ ID NO: 286276 - DNA, 75 bp, synthetic construct
  source 1..75: mol_type = other DNA
caggtggttttggtcgtgaagttgcacctttagttcagttcatgttcgatgaactaccgtttcatgatagttata

SEQ ID NO: 286277 - DNA, 75 bp, synthetic construct
  source 1..75: mol_type = other DNA
gccggtaaaggagccggacatgctgacggtgatcatgcagcgcctgacggcactggagcagtccggtgagatggg

SEQ ID NO: 286278 - DNA, 75 bp, synthetic construct
  source 1..75: mol_type = other DNA
agcgccctgatatggcggtgctgttatttccgtttggtctgcggctagggctaatgctgcaatgcccgcgcggat

SEQ ID NO: 286279 - DNA, 75 bp, synthetic construct
  source 1..75: mol_type = other DNA
tgtggactggcggtaaatggattgaagggttacccgccgaactgaaacagctctccgcaccgctgctgtttggcg

SEQ ID NO: 286280 - DNA, 75 bp, synthetic construct
  source 1..75: mol_type = other DNA
ttaaggagcgggtgatccggaacagtctgcggccccctgccgtgcccggtatcggacgcacagagaaatacggaa

SEQ ID NO: 286281 - DNA, 75 bp, synthetic construct
  source 1..75: mol_type = other DNA
actcttgagcaggccatccgttcactgatgcgagaaatggaactggaggggcgcggtattatcagtcatctcgaa

SEQ ID NO: 286282 - DNA, 75 bp, synthetic construct
  source 1..75: mol_type = other DNA
tctcgctgaacggttgctggaaaccgaagagagcgtgcgccgtgatgtggcgcgtgagctgcacgatgatatcgg

SEQ ID NO: 286283 - DNA, 75 bp, synthetic construct
  source 1..75: mol_type = other DNA
atttccgtttggtctgcgtctggggctaatgctgcaatgcccgcgcggatactggccggtgctgctgggcgcgga

SEQ ID NO: 286284 - DNA, 75 bp, synthetic construct
  source 1..75: mol_type = other DNA
atgaactgtggttatttggcaagcagtacaaagcggaggacatgttacgtgaagccataggcggccttgcctccc

SEQ ID NO: 286285 - DNA, 75 bp, synthetic construct
  source 1..75: mol_type = other DNA
tgatgtggtgacggtggggattgacggcggagggctggatgatctgctggggatgtatgtgattgggcgtgaccg

SEQ ID NO: 286286 - DNA, 75 bp, synthetic construct
  source 1..75: mol_type = other DNA
atgatacctgtatggagcacggcctgcccggactgggcagagcgcctgaaaaaggggctgtcgattattccggct

SEQ ID NO: 286287 - DNA, 75 bp, synthetic construct
  source 1..75: mol_type = other DNA
agttactggaccatatcggtattgacccgtcagggtggggcagattctggattcactggcggaagccgggatccc

SEQ ID NO: 286288 - DNA, 75 bp, synthetic construct
  source 1..75: mol_type = other DNA
attaaaaccaccgagcgaaaactggctgaaggggtactggtgcatggtggccagcccctgatggcctggtgcgtt

SEQ ID NO: 286289 - DNA, 75 bp, synthetic construct
  source 1..75: mol_type = other DNA
ggggaagagactttccgcggtttcatgtcaaaacacgccaatgtggaaattggtcttgccctgcgttctgaccgc

SEQ ID NO: 286290 - DNA, 75 bp, synthetic construct
  source 1..75: mol_type = other DNA
ggaaaaattgacccgctgatggcgctcttcaatgcggtgtccctgatgtccctgaatccggaaccgaaaaagaaa

SEQ ID NO: 286291 - DNA, 75 bp, synthetic construct
  source 1..75: mol_type = other DNA
tcgcggggatcttgctgaaaactgccgcttacggtttgctgcgtttctccctgccgctgttcccgaacgcgtcgg

SEQ ID NO: 286292 - DNA, 75 bp, synthetic construct
  source 1..75: mol_type = other DNA
ttcatcaacggtgatgatcctgagcagattgaatggatgaagcgccagacgcctcccacactggagagcaaaatt

SEQ ID NO: 286293 - DNA, 75 bp, synthetic construct
  source 1..75: mol_type = other DNA
gtgaagtgatgaatccgctgcagtatgtgccttttaaccagacgctgtatttcatcaatggcgatgatccggcgc

SEQ ID NO: 286294 - DNA, 75 bp, synthetic construct
  source 1..75: mol_type = other DNA
ggagacatacacagtgtcaaatgcttgtctcctcgtgctctcatgatggaggtgaaagagggaccatttgaccct

SEQ ID NO: 286295 - DNA, 75 bp, synthetic construct
  source 1..75: mol_type = other DNA
cctcatttccataaaaacagtaatcaatgggagatgtttattgtaatccaaggtgtttttgaattaactaaatat

SEQ ID NO: 286296 - DNA, 75 bp, synthetic construct
  source 1..75: mol_type = other DNA
aggtaccggcacgggtgagtgcagtccccggcgatcgcttcctgaaggtggagtttataccggcagaggaggaca

SEQ ID NO: 286297 - DNA, 75 bp, synthetic construct
  source 1..75: mol_type = other DNA
caaaatcaacttaattgacgatagtaagtttaccaaaacagctggtattgataccgacgacatcgtcgctgtagg

SEQ ID NO: 286298 - DNA, 75 bp, synthetic construct
  source 1..75: mol_type = other DNA
cgcactaggcccgtatattcgtgaaggtaagtgcgaagataatcgattctttttcgattgtctggctgtatgcgt

SEQ ID NO: 286299 - DNA, 75 bp, synthetic construct
  source 1..75: mol_type = other DNA
agctgctggcgacgctgaatctgaagctggaaccggcggatgattttcgcgacgagccggtgaagttaacggcgt

SEQ ID NO: 286300 - DNA, 75 bp, synthetic construct
  source 1..75: mol_type = other DNA
tctcgcccgttttgagaaagctgcgcagtgtggttttcgcggcgttgaatttatgtttccttatgactacgacat

SEQ ID NO: 286301 - DNA, 75 bp, synthetic construct
  source 1..75: mol_type = other DNA
ttacgctgtcttatcccttcaccactgctgccggtaccagaattgagcaggttgaactgaaacgcctgacggtaa

SEQ ID NO: 286302 - DNA, 75 bp, synthetic construct
  source 1..75: mol_type = other DNA
atctataacaaagacagtaataaactcgatctgtacggaaaagttaatgctaagcactacttctcctctaatgat

SEQ ID NO: 286303 - DNA, 75 bp, synthetic construct
  source 1..75: mol_type = other DNA
ttatgcaaaatctgaccgcactgatggacaggtatcctatgctaatgcaagtcctctgaatgcctttggtaagag

SEQ ID NO: 286304 - DNA, 75 bp, synthetic construct
  source 1..75: mol_type = other DNA
gaaaatgccttaacatcatcgcgaaaaagcaaacacgtaaacatgccatcccttcaactccgacgtacaaactga

SEQ ID NO: 286305 - DNA, 75 bp, synthetic construct
  source 1..75: mol_type = other DNA
aagtgatctcccttatgctttccttcgttggattaatgtttgctgccggaaaattgctgttagcacaaattgaaa

SEQ ID NO: 286306 - DNA, 75 bp, synthetic construct
  source 1..75: mol_type = other DNA
agcttgaagcgcaggaatcccgttttacctacagttaccagtttggtctgttcgataaagcaggcgactggaaga

SEQ ID NO: 286307 - DNA, 75 bp, synthetic construct
  source 1..75: mol_type = other DNA
ttactactttaataaaaacatgtccacttttgttgattacaaaatcaacttaattgacgatagtaagtttaccaa

SEQ ID NO: 286308 - DNA, 75 bp, synthetic construct
  source 1..75: mol_type = other DNA
ctctgccgattacttagtgagcatcctcctcatagcagtgatcccgtttctgcattacgtaagctctctccagac

SEQ ID NO: 286309 - DNA, 75 bp, synthetic construct
  source 1..75: mol_type = other DNA
tgcaaattgccgataatccgcatcgcggcgaaccgggaaccggagaaattaattatgattatctctttaaggtaa

SEQ ID NO: 286310 - DNA, 75 bp, synthetic construct
  source 1..75: mol_type = other DNA
acacgatgctgacgatggagcatatccggaaccccctggcggcgcgtcaggcactgacccggtcagaggcggtat

SEQ ID NO: 286311 - DNA, 75 bp, synthetic construct
  source 1..75: mol_type = other DNA
ggcgaaattgcataaaaagctggaagtgctgcgtttgctggcggtaaaaggcaaggctggaaagcgtgagcttga

SEQ ID NO: 286312 - DNA, 75 bp, synthetic construct
  source 1..75: mol_type = other DNA
ggtttcgtatgcacgacggtgatcatcgttgttcagaagaacaagttcgtcgcatgatggccgaacaggttgaag

SEQ ID NO: 286313 - DNA, 75 bp, synthetic construct
  source 1..75: mol_type = other DNA
agtacgtggcgctgcaattcttaagaaactcagaaatcgccgccaaaggcgtgctgccaacctgccaggataccg

SEQ ID NO: 286314 - DNA, 75 bp, synthetic construct
  source 1..75: mol_type = other DNA
aagggaacgaacatggtcaggcgttccgcgatgtccagcttgaacaggaactgctggaagaggcccagaaactcg

SEQ ID NO: 286315 - DNA, 75 bp, synthetic construct
  source 1..75: mol_type = other DNA
tcaggggacaatgttcggtgatggtggtatgggaggatggcgaaatatgcagggaaatacccctgtgacacatct

SEQ ID NO: 286316 - DNA, 75 bp, synthetic construct
  source 1..75: mol_type = other DNA
tggttgccggaacgctcaacaatgccaaaactatccgcattgaacccccactgacgctgacgattgaacagtgtg

SEQ ID NO: 286317 - DNA, 75 bp, synthetic construct
  source 1..75: mol_type = other DNA
aactggcgcgggaatatcccgatctggtacaggaagcgcgtggtaaagggatgttgatggcgattgagtttgttg

SEQ ID NO: 286318 - DNA, 75 bp, synthetic construct
  source 1..75: mol_type = other DNA
cataacccaatgggccgataaaattggtcatctgcaaatcgctgataatccacatcgcggcgaaccaggaaccgg

SEQ ID NO: 286319 - DNA, 75 bp, synthetic construct
  source 1..75: mol_type = other DNA
taactacggtgtagcatacgatatcggtgcatggactgacgtcctgccagaattcggtggagatacctggaccca

SEQ ID NO: 286320 - DNA, 75 bp, synthetic construct
  source 1..75: mol_type = other DNA
ggcgatgtctgctcaggcagctgaaatttataataaagacagtaacaagctggatctatatgggaaagttaatgc

SEQ ID NO: 286321 - DNA, 75 bp, synthetic construct
  source 1..75: mol_type = other DNA
gggttccgtcatgtaccgtttggcaatatcgaagccatgcgcacggctcttaacgagtgcaaaaaaaccggtgat

SEQ ID NO: 286322 - DNA, 75 bp, synthetic construct
  source 1..75: mol_type = other DNA
attcggcaagccagaacaaaagtgacctgtaaccgtcgtgctcgttttctgagtgaaaaggaactatcacagtaa

SEQ ID NO: 286323 - DNA, 75 bp, synthetic construct
  source 1..75: mol_type = other DNA
ggctggggaaggatgtcgatgattttgttgcgtcagcggttgttttgtatgaccagatgaatcgcggcggcccgg

SEQ ID NO: 286324 - DNA, 75 bp, synthetic construct
  source 1..75: mol_type = other DNA
tgtcgcagtggcgatcgctggtttcaatcagatgaatcgtggtggtccggcgggaaatgccgtggtgatgcacta

SEQ ID NO: 286325 - DNA, 75 bp, synthetic construct
  source 1..75: mol_type = other DNA
agcacgatgcgcaatgcccgctctgtcacggtgagcggttgcgcgtcgataccggcgattcgctaatcgtcaaaa

SEQ ID NO: 286326 - DNA, 75 bp, synthetic construct
  source 1..75: mol_type = other DNA
ctggctcgcaatacccagaaaattttccgctgggtagagaaagacacccctgatgcggttaaaaaaattcaggcg

SEQ ID NO: 286327 - DNA, 75 bp, synthetic construct
  source 1..75: mol_type = other DNA
cgcaatacccagaaaattttccgctgggtagagaaagacacccctgatgctgttgaaaaaatgcaggctctgtta

SEQ ID NO: 286328 - DNA, 75 bp, synthetic construct
  source 1..75: mol_type = other DNA
ctttatctcaacacccaaaagattttccgttggctagataaagacactcctgatgctgttgaaaaaattcaggcg

SEQ ID NO: 286329 - DNA, 75 bp, synthetic construct
  source 1..75: mol_type = other DNA
tgtcgatgattttgttgcgtcagcggttgttttgtatgaccagatgaatcgcggcggcccggcagggaatgctgt

SEQ ID NO: 286330 - DNA, 75 bp, synthetic construct
  source 1..75: mol_type = other DNA
ggtaaggtgccattaactttttatgcgcaattgcgacctgtcaatagcgatgtgcagtcgggtaaagtgaatgcc

SEQ ID NO: 286331 - DNA, 75 bp, synthetic construct
  source 1..75: mol_type = other DNA
cgccgtccgttttagttttgaaattgtctgccacggaacggtggcgcaagggtgcgatttacatatcgtctataa

SEQ ID NO: 286332 - DNA, 75 bp, synthetic construct
  source 1..75: mol_type = other DNA
ctggcacgcaatactcagaaaattttccgctgggtggagaaagacacccctgatgcggttaaaaaaattcaggcg

SEQ ID NO: 286333 - DNA, 75 bp, synthetic construct
  source 1..75: mol_type = other DNA
gcatggctatgaatgcctgggcgcgtccggacggtgaaaaagttccggcggccaagataaccagggcttatttcg

SEQ ID NO: 286334 - DNA, 75 bp, synthetic construct
  source 1..75: mol_type = other DNA
tggcaggaagcactggataacgtgcagaaagtgccgggtattgccgccgctgcgccgtatatcaatttcaccggg

SEQ ID NO: 286335 - DNA, 75 bp, synthetic construct
  source 1..75: mol_type = other DNA
tatgtgtctcgtgacatattatactggttctgttgctgtttacttcctgaacggaaaaacgccgctttatatatg

SEQ ID NO: 286336 - DNA, 75 bp, synthetic construct
  source 1..75: mol_type = other DNA
caaacctgctggtcaggaaacattccctgattgcattagatccaaaacaggaactgtggaaaatcaccagtaagg

SEQ ID NO: 286337 - DNA, 75 bp, synthetic construct
  source 1..75: mol_type = other DNA
tgtctccggactctaccgcatcaaatacacctcagctgccaaatgcagaggtcatggggccgggtgaagccgacg

SEQ ID NO: 286338 - DNA, 75 bp, synthetic construct
  source 1..75: mol_type = other DNA
gatactaaaaccagtattagctggtatgtgcagctatctagacaagcgatagatttccttaagatgctgcaacta

SEQ ID NO: 286339 - DNA, 75 bp, synthetic construct
  source 1..75: mol_type = other DNA
cctcaagcgcggttatatcgccgtagcggtgccagcagcacaggccggtaccgccaagaagggcgacaaggttta

SEQ ID NO: 286340 - DNA, 75 bp, synthetic construct
  source 1..75: mol_type = other DNA
attatctatgctgtcagcgaagaggatgatgccgcgaagatatcagaaaaacttgggtatattaccactacatca

SEQ ID NO: 286341 - DNA, 75 bp, synthetic construct
  source 1..75: mol_type = other DNA
gcagttatgattttagtgatgatgtttcttgcagctaaacaaagtaagacatcaatttatggtgatgcaaaattt

SEQ ID NO: 286342 - DNA, 75 bp, synthetic construct
  source 1..75: mol_type = other DNA
atgaaaacttttaattcgggacagttgattttcttactcatcgtgacaatcccactggcatgggtgattgctacc

SEQ ID NO: 286343 - DNA, 75 bp, synthetic construct
  source 1..75: mol_type = other DNA
tggcaggaagcactggataacgtgcaaaaagtgccaggtattgccgccgctgcgccgtatatcaatttcaccggg

SEQ ID NO: 286344 - DNA, 75 bp, synthetic construct
  source 1..75: mol_type = other DNA
gagaaagctctctacttcctcgacccgtattttatggacaggctgatgatggtaagccctaaacttaccgagtta

SEQ ID NO: 286345 - DNA, 75 bp, synthetic construct
  source 1..75: mol_type = other DNA
ctggcttggtgagttcgggcttaaacctgttttctcaattggttctgtagtcgatttgtacagcaacattgaccg

SEQ ID NO: 286346 - DNA, 75 bp, synthetic construct
  source 1..75: mol_type = other DNA
gagcggggctaaagacctgctgaagctgattgagatcctgttcccgtcttacggtctgaccggagcggaagcaca

SEQ ID NO: 286347 - DNA, 75 bp, synthetic construct
  source 1..75: mol_type = other DNA
tgacattatcccgacaagaaatccgcaaaatgattcggcaacgtcgtcgtgcgttaacgccggaacaacagcagg

SEQ ID NO: 286348 - DNA, 75 bp, synthetic construct
  source 1..75: mol_type = other DNA
gccaacaggccgccgcgcggatgatgagttaccccccggtggtaatggcgcacacggtcgccgtcttcctctctt

SEQ ID NO: 286349 - DNA, 75 bp, synthetic construct
  source 1..75: mol_type = other DNA
atttactgactcaggaacagtttctctcctggggatggcgtattccgttctggctttctgcggtgatgttgatcg

SEQ ID NO: 286350 - DNA, 75 bp, synthetic construct
  source 1..75: mol_type = other DNA
tagaaacaaaataaaaaaggcaaaacgtcaatgggagatatatagaaaaatagagggtttaccattagtgtattc

SEQ ID NO: 286351 - DNA, 75 bp, synthetic construct
  source 1..75: mol_type = other DNA
ctgtagatacccataatattcaatacgttacctattatgatatgttgcgaaaaaaagccactttagggtgttcta

SEQ ID NO: 286352 - DNA, 75 bp, synthetic construct
  source 1..75: mol_type = other DNA
ttagctgatagagattgtagaattgtaattcatcgaaatgagattaatagtggagcggcagttgcaagaaataaa

SEQ ID NO: 286353 - DNA, 75 bp, synthetic construct
  source 1..75: mol_type = other DNA
acgcgcatgatccgtctgtcctgcatccgttgatgatgtttacgacggatattgctcttaaagttgatcctgaat

SEQ ID NO: 286354 - DNA, 75 bp, synthetic construct
  source 1..75: mol_type = other DNA
ggtggcctgcggattatggtcattatggtcctttctttattcgtatggcctggcacggtgccggaacatacagga

SEQ ID NO: 286355 - DNA, 75 bp, synthetic construct
  source 1..75: mol_type = other DNA
aaagacagcctgggcttcagcttccacatttcgtgtgactgattatcgtgggggaaataatggtgcccgcatcag

SEQ ID NO: 286356 - DNA, 75 bp, synthetic construct
  source 1..75: mol_type = other DNA
ttcgactacaaagaagttgagggggtgattgacgcagagaaactcaccttcaccgtttgtggcatcgaatacaaa

SEQ ID NO: 286357 - DNA, 75 bp, synthetic construct
  source 1..75: mol_type = other DNA
gtagcgcgattggataccaagtagagggacgctggttaattaagggggattatttgcaaattgaccaaggcccca

SEQ ID NO: 286358 - DNA, 75 bp, synthetic construct
  source 1..75: mol_type = other DNA
gtagcgcgattggatatcaagtagatggacgctggttaataaaaggggattatttgcaaatcgagcaaggcccca

SEQ ID NO: 286359 - DNA, 75 bp, synthetic construct
  source 1..75: mol_type = other DNA
tgctttcattgatagtgatgatctatggcatccagagaagttgtctaggcaaatagcattcatgggtgataatat

SEQ ID NO: 286360 - DNA, 75 bp, synthetic construct
  source 1..75: mol_type = other DNA
tgtgcaggcctccacccgggatgaaatagagcgactctggaatccgcagggtatggccgcgcagcctgcacaacc

SEQ ID NO: 286361 - DNA, 75 bp, synthetic construct
  source 1..75: mol_type = other DNA
agagtatgaacagcgttcaagcacactgtcacaattagccgttgaagcaaaagccttgaatgatgagtctaccgt

SEQ ID NO: 286362 - DNA, 75 bp, synthetic construct
  source 1..75: mol_type = other DNA
aactcaacacccaaatgaaccgcgagttttatgcatccaatctctaccttcacctgagcaaatggtgttctgaac

SEQ ID NO: 286363 - DNA, 75 bp, synthetic construct
  source 1..75: mol_type = other DNA
caggtaggcatgattaaccaggcattcgaagctgccgcaaaaacggaagcacactcgccgatgctgccaatgtct

SEQ ID NO: 286364 - DNA, 75 bp, synthetic construct
  source 1..75: mol_type = other DNA
aggaactggtgcaatataatttgtggctggattatctggacgcactggaactggttgatacctccagtgctccag

SEQ ID NO: 286365 - DNA, 75 bp, synthetic construct
  source 1..75: mol_type = other DNA
actgctggcacagcagtacggcttttccgtttttccctacaccctggatggtcagggtgatacggcctttccgga

SEQ ID NO: 286366 - DNA, 75 bp, synthetic construct
  source 1..75: mol_type = other DNA
catccagaaagcaaaagcaggatgcccggtttctcagctattgaaagcggaaattacgttggattaccagttgaa

SEQ ID NO: 286367 - DNA, 75 bp, synthetic construct
  source 1..75: mol_type = other DNA
gctgattttgcacgtatcgtcggctttaaatatctgcgcggcatgcacctcaacgatgcgaaaagcgcctttggt

SEQ ID NO: 286368 - DNA, 75 bp, synthetic construct
  source 1..75: mol_type = other DNA
cagccatctgatgcagatttcagaagaggattgccttgcgcgtattgccgaatccatcaacattgcgctggataa

SEQ ID NO: 286369 - DNA, 75 bp, synthetic construct
  source 1..75: mol_type = other DNA
tattacaatggattatcaacgaaaactggattatggggcactcaaggatattttttcccttctgtgcctctatct

SEQ ID NO: 286370 - DNA, 75 bp, synthetic construct
  source 1..75: mol_type = other DNA
tccagcctggcgaaagagaatttgatgctggtgcgaaaaggtaaacaaagatattcgagaattaagctggacgcg

SEQ ID NO: 286371 - DNA, 75 bp, synthetic construct
  source 1..75: mol_type = other DNA
ggccaactgtgtaatggcgttactgacatttaagtccattgtcagaaataacaccgttcagaacatctatataag

SEQ ID NO: 286372 - DNA, 75 bp, synthetic construct
  source 1..75: mol_type = other DNA
tctggctgaacgtttgttagaaactgaagagagcgtgcgccgtgatgtggcgcgtgagctgcacgacgatatagg

SEQ ID NO: 286373 - DNA, 75 bp, synthetic construct
  source 1..75: mol_type = other DNA
cacctcaacggaccgatcgtccaggacaaagcccagatgaaggatacaaccgcttcgctgattggcccgcttact

SEQ ID NO: 286374 - DNA, 75 bp, synthetic construct
  source 1..75: mol_type = other DNA
tgatgagcacactcgctcaagaatggatatgaaaggccgcgagttgccctgccatgttgtcgatgtcagtgggca

SEQ ID NO: 286375 - DNA, 75 bp, synthetic construct
  source 1..75: mol_type = other DNA
gcgtgagcgtcagcggccacagtcacgatgtgactggcgttcaaagcggcggcagcacgattacgtcgaagcagc

SEQ ID NO: 286376 - DNA, 75 bp, synthetic construct
  source 1..75: mol_type = other DNA
attacggcaatcagtcggtggtactgaatgaactgtctggtctgcagcgtgtggaatacctggcttatgcccgtg

SEQ ID NO: 286377 - DNA, 75 bp, synthetic construct
  source 1..75: mol_type = other DNA
ctttaaacaatccctgcccctactggcggctctactgttaatgctaatgctggtgacatatatcccggcgatttc

SEQ ID NO: 286378 - DNA, 75 bp, synthetic construct
  source 1..75: mol_type = other DNA
tgcggatttctcatgtcgtcaaagcattgggcgaaacggcacgcgcaaccgcatcggtgatgctggtaatcatgg

SEQ ID NO: 286379 - DNA, 75 bp, synthetic construct
  source 1..75: mol_type = other DNA
ggccacagccacgatgtgactggtgttcaaagcggcagcagcacgattacgtcgaagaaaccaaatcctggttaa

SEQ ID NO: 286380 - DNA, 75 bp, synthetic construct
  source 1..75: mol_type = other DNA
cgccagccgtcgctttgtttcggcagaccaactgccgctcattgcgctggaaatcactattacgccactggacgc

SEQ ID NO: 286381 - DNA, 75 bp, synthetic construct
  source 1..75: mol_type = other DNA
ctgcccacgacgagcgcagcagcattgcggcaaaaggcttaaccggcgaaggctacaaaggccacgttttctggg

SEQ ID NO: 286382 - DNA, 75 bp, synthetic construct
  source 1..75: mol_type = other DNA
ccgcgaaaaattgtgttatacggtcctgacggcgcaattattaaaacagaggacggaagcagctcggtaacggtg

SEQ ID NO: 286383 - DNA, 75 bp, synthetic construct
  source 1..75: mol_type = other DNA
aaacaaggagtggtccgacgaagatccgcaaaaaatcgttttgtacggtccggatggcgcgatcctcaaaacaga

SEQ ID NO: 286384 - DNA, 75 bp, synthetic construct
  source 1..75: mol_type = other DNA
gtcgagatggatgcagttatcaacggcgtgagcgtcagcggccacagtcacgatgtgactggtgttcaaagcggc

SEQ ID NO: 286385 - DNA, 75 bp, synthetic construct
  source 1..75: mol_type = other DNA
cagcgtacccgatcctgcagggcgccacggatgcacagggctttatggccagagtggatacggtatttcagatga

SEQ ID NO: 286386 - DNA, 75 bp, synthetic construct
  source 1..75: mol_type = other DNA
gatcgtaaaacaggtacgcttaaatggaaggcatcttctgtagatttaatatttagttcacatccagaattacga

SEQ ID NO: 286387 - DNA, 75 bp, synthetic construct
  source 1..75: mol_type = other DNA
ccgctgaacagctggccggataacgttaatctggataaagcccgtcgattgctgtggccagtcaagaaaaaatac

SEQ ID NO: 286388 - DNA, 75 bp, synthetic construct
  source 1..75: mol_type = other DNA
ctggggcagctacgccggtctgtttattcgtatggcctggcacggcgcaggtacttaccgttcaatcgatggacg

SEQ ID NO: 286389 - DNA, 75 bp, synthetic construct
  source 1..75: mol_type = other DNA
caccggaatgcgcgagcgcgtaacggcgctgggcggcacattgaccatttcctgtctgcacggcacgcgtgtcag

SEQ ID NO: 286390 - DNA, 75 bp, synthetic construct
  source 1..75: mol_type = other DNA
ctgggattcgctggcggaagagaagatgactgggagtccgacttggtatactggggccccggtaacaaacctctg

SEQ ID NO: 286391 - DNA, 75 bp, synthetic construct
  source 1..75: mol_type = other DNA
attatggtcattatggtcctttctttattcgtatggcttggcacggtgccggaacatacaggacatatgatggcc

SEQ ID NO: 286392 - DNA, 75 bp, synthetic construct
  source 1..75: mol_type = other DNA
cagacggcattgacccgcaggcggctgcgttgattgaacctttcgccattagcgctcatgcggtacgtcgtgcgg

SEQ ID NO: 286393 - DNA, 75 bp, synthetic construct
  source 1..75: mol_type = other DNA
gttgaccttcgtcagcagagcttcaccattgaagggctggcggttggggttattcgcaacggcgactggctgtaa

SEQ ID NO: 286394 - DNA, 75 bp, synthetic construct
  source 1..75: mol_type = other DNA
cgtttcttgatgaagaaacagcacaacaacgccaacaacaactcggctggacgctgatggaggacgccgggcgtg

SEQ ID NO: 286395 - DNA, 75 bp, synthetic construct
  source 1..75: mol_type = other DNA
cagccattttttagctacccacgtgttttaggtcatgaaatatgtggagagattattgatgcagggaaaaatatt

SEQ ID NO: 286396 - DNA, 75 bp, synthetic construct
  source 1..75: mol_type = other DNA
gccacgctggcagaaacctacgagcgcgatgtgattaacaatcgtgagttgattaagggcgtaattactttctga

SEQ ID NO: 286397 - DNA, 75 bp, synthetic construct
  source 1..75: mol_type = other DNA
gcaggtgctggtggtcggggcggggccaatcggtctgggcgcggcggcaatcgctaaagccgatggcgcgcaggt

SEQ ID NO: 286398 - DNA, 75 bp, synthetic construct
  source 1..75: mol_type = other DNA
aacgacaaaaattccttctgcccccaacattaattgccatcctgctactaagcggttgcggggacaaaaacgagc

SEQ ID NO: 286399 - DNA, 75 bp, synthetic construct
  source 1..75: mol_type = other DNA
ttgcgggtacacctgactttgcagcgcgtcatctggacgcgctgctgtcttctggacataacgtcgttggtgtgt

SEQ ID NO: 286400 - DNA, 75 bp, synthetic construct
  source 1..75: mol_type = other DNA
gttcaggacgaaactcttgtcacttacgccgaaaagttgagtaaagaagaagcgcgtattgactggtcactttcg

SEQ ID NO: 286401 - DNA, 75 bp, synthetic construct
  source 1..75: mol_type = other DNA
acgctatcctcatcaccaaacaggccagcggtaagggtaaaattgacccccttatggccctgtttaatgccgttt

SEQ ID NO: 286402 - DNA, 75 bp, synthetic construct
  source 1..75: mol_type = other DNA
agacgctgggcaatgtggtgatccagcggattgatccgacgacccggaccatcatcaccagtgcagggacgttac

SEQ ID NO: 286403 - DNA, 75 bp, synthetic construct
  source 1..75: mol_type = other DNA
tcggtttgtatttaaccgctccagcaattcaatacatagtcaataaaatcccacaagccgacagccttaaggtga

SEQ ID NO: 286404 - DNA, 75 bp, synthetic construct
  source 1..75: mol_type = other DNA
tgtcgttatccagatatatgaccccagcagtggtcagtagtttatcgaaaattaaagagcttatttcggcatccc

SEQ ID NO: 286405 - DNA, 75 bp, synthetic construct
  source 1..75: mol_type = other DNA
attccttttatcccgccatcgcctgtttttcgctgttactgatgctggccgggtgtgcgcctatgcatgaaaccc

SEQ ID NO: 286406 - DNA, 75 bp, synthetic construct
  source 1..75: mol_type = other DNA
tggcatctggatatctggggaaagaatcgggctgaagtcacagcgcgcctcggtacggttaaagcacgggcggcg

SEQ ID NO: 286407 - DNA, 75 bp, synthetic construct
  source 1..75: mol_type = other DNA
ggcccacaagggcttatcaccacgttgaaacaactggcagacggcacggcgaaaccagaagttcaggacgaaact

SEQ ID NO: 286408 - DNA, 75 bp, synthetic construct
  source 1..75: mol_type = other DNA
taagctctcctgcccgattactgcagaagataccagtggtacgctgtacgacaaactggcagagcttggcccaca

SEQ ID NO: 286409 - DNA, 75 bp, synthetic construct
  source 1..75: mol_type = other DNA
atgctttataagctctcctgcccgattactgcagaagataccagtggtacgctgtacgacaagctggcagagctt

SEQ ID NO: 286410 - DNA, 75 bp, synthetic construct
  source 1..75: mol_type = other DNA
cgatatcctgcagcgcgctgatgtggtgacggtggggattgacggcgggggcctggatgatctgctgggaatgta

SEQ ID NO: 286411 - DNA, 75 bp, synthetic construct
  source 1..75: mol_type = other DNA
acgcttgactaatgaagacaagcaacgacttgatataaattttaaaattagcgaaggttctagtgatgcggaagg

SEQ ID NO: 286412 - DNA, 75 bp, synthetic construct
  source 1..75: mol_type = other DNA
atcacgccataaaacttgataaattattttttcagaaaaatatacaaaaaccttattttgagggaattattaaca

SEQ ID NO: 286413 - DNA, 75 bp, synthetic construct
  source 1..75: mol_type = other DNA
ttgtattattgacaaagcatgattataaattgcttaagtcaaatgttagggctcatactcacgttatcaataatg

SEQ ID NO: 286414 - DNA, 75 bp, synthetic construct
  source 1..75: mol_type = other DNA
ttaaggagcgggtgatccgcaacagtctgcggccccctgccgtgcccggtatcggacgcacggagaaatacggga

SEQ ID NO: 286415 - DNA, 75 bp, synthetic construct
  source 1..75: mol_type = other DNA
ttaaggagcgggtgatccgtaacagtctgcggccccctgccgtgcccggtatcggacgcaccgagaaatacggta

SEQ ID NO: 286416 - DNA, 75 bp, synthetic construct
  source 1..75: mol_type = other DNA
ttaaggagcgggtgatccgtaacagtctgcggccccctgccgtgcccggtatcggacgcactgagaaatacggca

SEQ ID NO: 286417 - DNA, 75 bp, synthetic construct
  source 1..75: mol_type = other DNA
ccgcccgccggggtgttcagacagaaactgcagtatgcccgggatgtccgtgacggcaaaattcatgatccgcac

SEQ ID NO: 286418 - DNA, 75 bp, synthetic construct
  source 1..75: mol_type = other DNA
ccgctgatggcgctcttcaatgcggtatccctgatgtccctgaatccggagccaaaaaagaaagaatatgcggtt

SEQ ID NO: 286419 - DNA, 75 bp, synthetic construct
  source 1..75: mol_type = other DNA
gactggatgatctgctggggatgtacgtgattgggcgtgaccgggagacccgagaatggctgggctggggccatg

SEQ ID NO: 286420 - DNA, 75 bp, synthetic construct
  source 1..75: mol_type = other DNA
ggctgccgctggtgatttgcctactgtcatgattgacggtcggaagttcaactgcgttgccagcatagccagagc

SEQ ID NO: 286421 - DNA, 75 bp, synthetic construct
  source 1..75: mol_type = other DNA
gggtgacggacaccaccctgaaggtggtggcagccgatccgaatacggtgtccggtatcaagtccgtgggtacgc

SEQ ID NO: 286422 - DNA, 75 bp, synthetic construct
  source 1..75: mol_type = other DNA
cgacggcaaaattcatgatccgcactttctgccggtgatatttgaacaccctcctgaaatggtggaaagcggggc

SEQ ID NO: 286423 - DNA, 75 bp, synthetic construct
  source 1..75: mol_type = other DNA
atgaatcgtgattccttttatccagctatcgcctgttttccgctgttcctcattctggctgggtgtgcgcctgtg

SEQ ID NO: 286424 - DNA, 75 bp, synthetic construct
  source 1..75: mol_type = other DNA
tgttgatttggtgatgagcaacggcaaagtgctgcgatataccgatcctcgtcgctttggtgcctggttgtggac

SEQ ID NO: 286425 - DNA, 75 bp, synthetic construct
  source 1..75: mol_type = other DNA
ccgcaggccgacggttcggtgatgtcgctggcgaatgccgcatggatttgggtgccattactggcgattgccacg

SEQ ID NO: 286426 - DNA, 75 bp, synthetic construct
  source 1..75: mol_type = other DNA
attgatacccccagagatttcatggccggtctggtctgtcagattgaacgcagtgttcatgcattgcgtgagacg

SEQ ID NO: 286427 - DNA, 75 bp, synthetic construct
  source 1..75: mol_type = other DNA
ctggcccatcttggaccggagccgcttagtgacgatttcaacggtgagtacctgcatcagaagtgcgcgaagaaa

SEQ ID NO: 286428 - DNA, 75 bp, synthetic construct
  source 1..75: mol_type = other DNA
ctgtttgctgcggggatccatcctgatcggctggcatcgtctctgtcgctggctgagtgtgaattgttggcgcga

SEQ ID NO: 286429 - DNA, 75 bp, synthetic construct
  source 1..75: mol_type = other DNA
tggataacaagctggtggtaggggtagggaatatctatgccagcgaatcactgtttgcggcggggatccatccgg

SEQ ID NO: 286430 - DNA, 75 bp, synthetic construct
  source 1..75: mol_type = other DNA
cgcgcgtttgcgtggttttgaactgccggaagatgtggggcgtttcttgctgaagcggctcgacagagagatgcg

SEQ ID NO: 286431 - DNA, 75 bp, synthetic construct
  source 1..75: mol_type = other DNA
agagtgcatggttccggcatataaggtcactcggatgggattttatcggtcgcgtcaggggaaatatccagatgc

SEQ ID NO: 286432 - DNA, 75 bp, synthetic construct
  source 1..75: mol_type = other DNA
tatcattgagaaagaaacggtaaaagcgttggtggacgcaggccaggtcgtgattaccgttggtggtggtggtat

SEQ ID NO: 286433 - DNA, 75 bp, synthetic construct
  source 1..75: mol_type = other DNA
gttgaggcggaatctgctatcgccgtccgactgtccagtgcttttgagacgctgtgcgcatattgtgctgaaaac

SEQ ID NO: 286434 - DNA, 75 bp, synthetic construct
  source 1..75: mol_type = other DNA
gaggcggaatctgctatcgccgttcgattgtccagcgcttttgagacgctgtgcgcatattgtgctgaaaacatg

SEQ ID NO: 286435 - DNA, 75 bp, synthetic construct
  source 1..75: mol_type = other DNA
tgaagcgtctggacagagaaatgcgcacgctatttatgacgttggatcagctcgatcgggcgtcgattaccgcac

SEQ ID NO: 286436 - DNA, 75 bp, synthetic construct
  source 1..75: mol_type = other DNA
cctgcatcagaagtgcgcgaagaaaaaaacggcgattaaaccgtggctgatggataacaagctggtggtaggcgt

SEQ ID NO: 286437 - DNA, 75 bp, synthetic construct
  source 1..75: mol_type = other DNA
gcggagaaaaaccagcatcaggcgcaaattgagcgcgatgccttgcgtgtagtaggtcttgcgcaggcgcgcttt

SEQ ID NO: 286438 - DNA, 75 bp, synthetic construct
  source 1..75: mol_type = other DNA
ctgttggaagaggcccagaaactcggtctcggcgcgcagtttggcggtaaatacttcgcgcacgacattcgcgtt

SEQ ID NO: 286439 - DNA, 75 bp, synthetic construct
  source 1..75: mol_type = other DNA
gtgcctgcggctaatttgctacccgcagacggcattgacccgcaggcggctgcgttgattgaacctttcgccatt

SEQ ID NO: 286440 - DNA, 75 bp, synthetic construct
  source 1..75: mol_type = other DNA
atatatcgcaacacacggtaatctccgcgcaccttttcttacctgattactcccccatgaatcgtgattcctttt

SEQ ID NO: 286441 - DNA, 75 bp, synthetic construct
  source 1..75: mol_type = other DNA
aactaaaaaatatatcgcaacacacggtaatctccgcgcaccttttcttacctgattattcccccatgaatcgtg

SEQ ID NO: 286442 - DNA, 75 bp, synthetic construct
  source 1..75: mol_type = other DNA
accatcatacactaaatcagtaagttggcagcatcacctgaatcgtgattccttttatccagccatcgcctgttt

SEQ ID NO: 286443 - DNA, 75 bp, synthetic construct
  source 1..75: mol_type = other DNA
tggcggttttagtgagtatttgagcgtgccggtggcgaacattttgcccgcagacggtattgacccgcaggcggc

SEQ ID NO: 286444 - DNA, 75 bp, synthetic construct
  source 1..75: mol_type = other DNA
cgcggcggcaatcgctaaagccgatggcgcacaggtggtggtggcggataccagtccggcgcgccgtgaacatgt

SEQ ID NO: 286445 - DNA, 75 bp, synthetic construct
  source 1..75: mol_type = other DNA
cgttccgctgccatttttcattttcattgatatctaaggcaacaaaaaatggagagccgaatcatgtctacgatg

SEQ ID NO: 286446 - DNA, 75 bp, synthetic construct
  source 1..75: mol_type = other DNA
ttgatggcgcacaggtggtggtggtcgataccagtccggcgcggcgtgagcatgtgataaggcgtctggagttgc

SEQ ID NO: 286447 - DNA, 75 bp, synthetic construct
  source 1..75: mol_type = other DNA
tgttaacccatcgctacccgttcgccacgctggcagaaacctacgagcgcgatgtgattaacaatcgtgagttga

SEQ ID NO: 286448 - DNA, 75 bp, synthetic construct
  source 1..75: mol_type = other DNA
gttttagtgagtatttgagcgtgccggtggcgaacattttgcccgcagacggtattgacccgcaggcggcagcat

SEQ ID NO: 286449 - DNA, 75 bp, synthetic construct
  source 1..75: mol_type = other DNA
gggtaagcgcgatgcagcaaagaaattgttgtctcagggcattgaccccaaagctgagcaaaagggggcacaagc

SEQ ID NO: 286450 - DNA, 75 bp, synthetic construct
  source 1..75: mol_type = other DNA
ttgtatcttgaagtctcccctaaaggttccaagtactggcgcatgaaatatcgccgcccatcagacaaaaaggaa

SEQ ID NO: 286451 - DNA, 75 bp, synthetic construct
  source 1..75: mol_type = other DNA
atatcgttccgctgagtcgtcaggcgatgaatttgttagaccagttaaagcagattagtggtgataaagagctgc

SEQ ID NO: 286452 - DNA, 75 bp, synthetic construct
  source 1..75: mol_type = other DNA
cgatccaaagagtcgaatatgatattgaatattatagtctatacctttattttcttcgtcagtgtgatacctata

SEQ ID NO: 286453 - DNA, 75 bp, synthetic construct
  source 1..75: mol_type = other DNA
tttatcaggttttgagacaataaaagaaaatgacaggttagatgttgttaagcgtttaaaatatattgaattgct

SEQ ID NO: 286454 - DNA, 75 bp, synthetic construct
  source 1..75: mol_type = other DNA
tttagaagatgagttgaatttaaaaaaaagagaagttgagtatatacatgaacgaattaagagtaaacaagatac

SEQ ID NO: 286455 - DNA, 75 bp, synthetic construct
  source 1..75: mol_type = other DNA
ctgtgtctggcatgcctgcaatccgggaaaccggaccaggaaaaaacttgcaggccataacagtatctacagacg

SEQ ID NO: 286456 - DNA, 75 bp, synthetic construct
  source 1..75: mol_type = other DNA
ttggcagacacccgtagacacccgtaggccggataaggcgctcgcgccgcatccggcaagttacaacaaacaacc

SEQ ID NO: 286457 - DNA, 75 bp, synthetic construct
  source 1..75: mol_type = other DNA
cgtgacaatattccgctgctctcctggctgatgctcaaagggcgctgccgcgactgtcaggcgaaaatcagcaag

SEQ ID NO: 286458 - DNA, 75 bp, synthetic construct
  source 1..75: mol_type = other DNA
gatcgcctcgcttttggtgtttggcctacggtggctcttgctcaggcaagagcaaagcgcgacgaagctaaaaag

SEQ ID NO: 286459 - DNA, 75 bp, synthetic construct
  source 1..75: mol_type = other DNA
ttaatgtctaacaatgaaaagcatattacgccattcgagtttgctaaactgaatgttccattaaacaatagggtc

SEQ ID NO: 286460 - DNA, 75 bp, synthetic construct
  source 1..75: mol_type = other DNA
atgcagatcgaacaggaggtgctcaccacctggcctgcggatgccattgcccgggcggaagatgtggtgttgcgt

SEQ ID NO: 286461 - DNA, 75 bp, synthetic construct
  source 1..75: mol_type = other DNA
tatcactgggaatgatgcctaaaaaaggcggagctttaaaagattttagctttaaagaaatggattataatgcaa

SEQ ID NO: 286462 - DNA, 75 bp, synthetic construct
  source 1..75: mol_type = other DNA
tggtgttcacaaaacaccggataatgtggctgatgccgtgaatatgctgaaccgcgaaggtacgaagtattttaa

SEQ ID NO: 286463 - DNA, 75 bp, synthetic construct
  source 1..75: mol_type = other DNA
cggaaatgaaaaatgccgccagtgttgcagacctgaaaacggcaattgatggtgtgtccaccagtatgcagggtg

SEQ ID NO: 286464 - DNA, 75 bp, synthetic construct
  source 1..75: mol_type = other DNA
ttgtcaggcggtaatggtgccggacaaaatggtgttgttatcagtggtgtggcaagtggattgaataataaggac

SEQ ID NO: 286465 - DNA, 75 bp, synthetic construct
  source 1..75: mol_type = other DNA
cggtatcgatgtccgcccggggcgcggtaacgcactgggtgatgaggaaaacgccgccctgtggcgacagtggca

SEQ ID NO: 286466 - DNA, 75 bp, synthetic construct
  source 1..75: mol_type = other DNA
ttttactttggactttccagtgtggatgttgcggcgcgccggcgcattgccggtattgatgttcgtccgggacgt

SEQ ID NO: 286467 - DNA, 75 bp, synthetic construct
  source 1..75: mol_type = other DNA
tggttcagctttcagaacatattgataccggtaaaaatggcagtgtgacagtgggcgatacggtgataacagatg

SEQ ID NO: 286468 - DNA, 75 bp, synthetic construct
  source 1..75: mol_type = other DNA
gaaaaagaaattcgccagaaaattgatagattagagaaaaatcttgcggtgatgaaaaatgaactaactttgaaa

SEQ ID NO: 286469 - DNA, 75 bp, synthetic construct
  source 1..75: mol_type = other DNA
caaaaagaaaaaattatttctatgtctcgagctagaaatgaatcattgaaagaaaatataaagctagatctattg

SEQ ID NO: 286470 - DNA, 75 bp, synthetic construct
  source 1..75: mol_type = other DNA
ctcggcgaaacgctgacaccgatggccagcaaggtgctatcgaccctgggcagctacgagcgtcgccaccgcacc

SEQ ID NO: 286471 - DNA, 75 bp, synthetic construct
  source 1..75: mol_type = other DNA
catcagtagtatctgttggtgatgcgggtaaagagcgtcagattgttaacgtgggggcgggtgctgtatctgaga

SEQ ID NO: 286472 - DNA, 75 bp, synthetic construct
  source 1..75: mol_type = other DNA
tggcacgcgcgtgacagagcaccacgaaacgccagggcttggcgataaaatcgaactgcgcctttctgactggat

SEQ ID NO: 286473 - DNA, 75 bp, synthetic construct
  source 1..75: mol_type = other DNA
atgctgaaaactatccgaaaacacggcattacactggcactatttgcagcgggttctacagggttaactgcggcc

SEQ ID NO: 286474 - DNA, 75 bp, synthetic construct
  source 1..75: mol_type = other DNA
ccgagtgcgcagtcaaaaataagccttgcgctaccgcgttcgcactgtccgcattgtcagcagactatccgcgtt

SEQ ID NO: 286475 - DNA, 75 bp, synthetic construct
  source 1..75: mol_type = other DNA
cggaggttgattttggtatcacggaaggtctgcgcagtaagtatcgccagaaacagctggtagcggcagggaaaa

SEQ ID NO: 286476 - DNA, 75 bp, synthetic construct
  source 1..75: mol_type = other DNA
gttctgcgtgctggtgatacgcgcacgcgggaacgtcacaaaaatctttccattgttgaggtgaatatgtcgggt

SEQ ID NO: 286477 - DNA, 75 bp, synthetic construct
  source 1..75: mol_type = other DNA
cgtgctgacgctctttttttatcgtcgtcgtgattccagacataaaccgctggtgtcatggctggcctggctgct

SEQ ID NO: 286478 - DNA, 75 bp, synthetic construct
  source 1..75: mol_type = other DNA
atgagtcaaacatcaaccttgaaaggccagtgcattgctgaactcctcggtaccgggttgttgattttcttcggt

SEQ ID NO: 286479 - DNA, 75 bp, synthetic construct
  source 1..75: mol_type = other DNA
ggacgatggcaacggtgtaccacgtgggccgttggcaccgttgttgattggtctactgattgcggttattggcgc

SEQ ID NO: 286480 - DNA, 75 bp, synthetic construct
  source 1..75: mol_type = other DNA
cctgcgcagtaagtatcgccagaaacagctggttgcggaagggaaaagccagaccatgaacagccggcacctgac

SEQ ID NO: 286481 - DNA, 75 bp, synthetic construct
  source 1..75: mol_type = other DNA
gctggtcagtgaaggtgaactccgtctgcatacgggaggcctgcagaacagccacggacagatacagtctgtggg

SEQ ID NO: 286482 - DNA, 75 bp, synthetic construct
  source 1..75: mol_type = other DNA
atggattgagccaacctggtagtgaaaatcagtcatgggattataaaggtagcgcatcttcattcatgacaggga

SEQ ID NO: 286483 - DNA, 75 bp, synthetic construct
  source 1..75: mol_type = other DNA
gagcggtgcatcgctgaatctccgtgctgacacactgagtaaccgtaacagtggtgaccggggcggggttatcag

SEQ ID NO: 286484 - DNA, 75 bp, synthetic construct
  source 1..75: mol_type = other DNA
atttcggtattacggaaggtctgcgcacgaaagaacgccagaaacaactggttgcagaaggcaagagccagacca

SEQ ID NO: 286485 - DNA, 75 bp, synthetic construct
  source 1..75: mol_type = other DNA
cttgcattctccctgtggctggcctcggggatggtgcattctgtcagtgctgcaggcattgtcgcagaccatggc

SEQ ID NO: 286486 - DNA, 75 bp, synthetic construct
  source 1..75: mol_type = other DNA
actatcggcgccggacataatctgaacgttgcaggcagcagcgtggtcggggataaccgtgtctccctggctgcc

SEQ ID NO: 286487 - DNA, 75 bp, synthetic construct
  source 1..75: mol_type = other DNA
tttaagcaggctgccgcagagctgggaactgccatcgaatggggcggggactggaaaacactgaaagacgggcct

SEQ ID NO: 286488 - DNA, 75 bp, synthetic construct
  source 1..75: mol_type = other DNA
ttgatttagaaacaacaaaaacatttactgcgcgtggcgtaacaaaccgttatgctatcaaaaaagttaaacgta

SEQ ID NO: 286489 - DNA, 75 bp, synthetic construct
  source 1..75: mol_type = other DNA
gaaacagtcaaattgatggttaccgctcctgctgcacctggatcaatcggtgttatttattcaatgcaagagtta

SEQ ID NO: 286490 - DNA, 75 bp, synthetic construct
  source 1..75: mol_type = other DNA
atggaggaggcagacgctttcagaatcgcaaagcgggttgtcgctgcaatcgccttctatgctggtgggcgaagt

SEQ ID NO: 286491 - DNA, 75 bp, synthetic construct
  source 1..75: mol_type = other DNA
gtcccggcaatatcaggcattttttagcgatgttagtgatgctcaaggcgcatgccaggctatcaccgatatgat

SEQ ID NO: 286492 - DNA, 75 bp, synthetic construct
  source 1..75: mol_type = other DNA
ttgaaatggcatgggaaactcgcggtaagcccatcggggtgatgttccacagcgatagtaataatgccgatgtca

SEQ ID NO: 286493 - DNA, 75 bp, synthetic construct
  source 1..75: mol_type = other DNA
atgagcggtaagcgttatcctgaagagtttaaaactgaagcagtcaaacaggttgttgatcgcggttattctgtt

SEQ ID NO: 286494 - DNA, 75 bp, synthetic construct
  source 1..75: mol_type = other DNA
ttcgggcgtcgggcgggcggctgagtttggcgtgctggtgcgggacgccgacgcgctgcaacgcgccagtacgct

SEQ ID NO: 286495 - DNA, 75 bp, synthetic construct
  source 1..75: mol_type = other DNA
gccaggtatgttgctgcgcctgacgaccggcgatcgcgtgccggtagatggcgagattacccagggcgaagcgtg

SEQ ID NO: 286496 - DNA, 75 bp, synthetic construct
  source 1..75: mol_type = other DNA
tttcgtgccagtgcggtcggcagccatactacgctgtcacggatcattcgcatggtgcgacaggcccagagcagc

SEQ ID NO: 286497 - DNA, 75 bp, synthetic construct
  source 1..75: mol_type = other DNA
gttcgccgtgcccttgaactgacggaggttgattttggtattacggaaggtctgcgcacgaaagagcgccagaaa

SEQ ID NO: 286498 - DNA, 75 bp, synthetic construct
  source 1..75: mol_type = other DNA
gcttccgctggcaggcaattgtcgcactggcggtgggtatcccggtgatggtctgggggatgatcggcgataaca

SEQ ID NO: 286499 - DNA, 75 bp, synthetic construct
  source 1..75: mol_type = other DNA
tgatggtcaccgctgacaaccgcagcctgtggttggttatcggcctgataaccctggcggtaatggtttttgccg

SEQ ID NO: 286500 - DNA, 75 bp, synthetic construct
  source 1..75: mol_type = other DNA
atgtacgcggcaaaaggcacccaggcctatgcacaaattggcgtcgaaagcgccgtaatgagcgccagccaacag

SEQ ID NO: 286501 - DNA, 75 bp, synthetic construct
  source 1..75: mol_type = other DNA
acgatctgtattggttaatttctaattctccactccttcttatgctaaggcaagaaagtgcaccactggtcagtg

SEQ ID NO: 286502 - DNA, 75 bp, synthetic construct
  source 1..75: mol_type = other DNA
gagatccacaaaccacttactcgtctactaaaagagtttggccccaagcgtcgcactgactatcccaatatgcct

SEQ ID NO: 286503 - DNA, 75 bp, synthetic construct
  source 1..75: mol_type = other DNA
cggaagagcaggcgaaaaaagaggccgaagaaaaggccaaagccgatgaagccgcagaggaacagcgtaaagctg

SEQ ID NO: 286504 - DNA, 75 bp, synthetic construct
  source 1..75: mol_type = other DNA
gataacatggaactgatgtatcaactctacgcattggccagccgaaaaccgctattaaaaacggtgatgcaaaac

SEQ ID NO: 286505 - DNA, 75 bp, synthetic construct
  source 1..75: mol_type = other DNA
aagaagtggaaacgttgatgcgcaaccttgccgatgcctggaaagagtctttactctccccttctttgattcagg

SEQ ID NO: 286506 - DNA, 75 bp, synthetic construct
  source 1..75: mol_type = other DNA
ctatgaggtcatttgatgggttattgcatgattttgatgagggaacatatagcctgtacgaacgaagtaatacaa

SEQ ID NO: 286507 - DNA, 75 bp, synthetic construct
  source 1..75: mol_type = other DNA
cggttgtgacagataatgataactctatcaagtcagttggttggaacgatgtagcaaaaggtcaagttccttgtt

SEQ ID NO: 286508 - DNA, 75 bp, synthetic construct
  source 1..75: mol_type = other DNA
tccatcgttataatatagttaaaaaattcgcagaaaatcactgggaaaatttttactcaattaaggtgagtgacc

SEQ ID NO: 286509 - DNA, 75 bp, synthetic construct
  source 1..75: mol_type = other DNA
ttgcaaaccgcgcaagggcaatactcagccgacaaagaaagaactgattgataaccaggtggcgggcggcttcga

SEQ ID NO: 286510 - DNA, 75 bp, synthetic construct
  source 1..75: mol_type = other DNA
tcgtgtcttgccaatctgcaattttatgaaccgcgcactattcacgactcgtcattaagtaaagcaatccacggc

SEQ ID NO: 286511 - DNA, 75 bp, synthetic construct
  source 1..75: mol_type = other DNA
caccagctatatggcgtattacaacgtccagcaggcgctgaatatcgctcgtcagtttggctgtagcgacgacgc

SEQ ID NO: 286512 - DNA, 75 bp, synthetic construct
  source 1..75: mol_type = other DNA
ctccgcattcagtgcctgcggtaaaaacgcgccagcaccgttttctggtgaaaatgcgctggactaccgcaagcg

SEQ ID NO: 286513 - DNA, 75 bp, synthetic construct
  source 1..75: mol_type = other DNA
cgttgacttttccggtaaaagccggggatgagtgtcttgtcgtttttgccgatcgttgtattgatttctggtggc

SEQ ID NO: 286514 - DNA, 75 bp, synthetic construct
  source 1..75: mol_type = other DNA
gtcacaaagaagtggattccggcgagtggaagacgggcgaaagtaacaccaccaaagtgaccagtaccaacagct

SEQ ID NO: 286515 - DNA, 75 bp, synthetic construct
  source 1..75: mol_type = other DNA
agttgcgctttaccggctctatccagcgtgacgataccggagaagtgcaggccgtggagcttgtcgtgcgtggac

SEQ ID NO: 286516 - DNA, 75 bp, synthetic construct
  source 1..75: mol_type = other DNA
atggcagtaactgaccagacccgcagtggcgatcttgccgaatcatttaaatctgaacgggaaacaacaaagaac

SEQ ID NO: 286517 - DNA, 75 bp, synthetic construct
  source 1..75: mol_type = other DNA
gcggcgaccttgccgaaacattcaaatctgagcgggacacgacaaaaaaccagatccgcgtcgctttgcctggta

SEQ ID NO: 286518 - DNA, 75 bp, synthetic construct
  source 1..75: mol_type = other DNA
cccattgctggtggatgtgccagtggtattcccgcgtggcggaggctgtacgctaacgtttccagttaaagccgg

SEQ ID NO: 286519 - DNA, 75 bp, synthetic construct
  source 1..75: mol_type = other DNA
tcaatatgcactgcttgatgacagaatgggggtgatggagttactgtcaccctatattgaagaagtgaaatctcg

SEQ ID NO: 286520 - DNA, 75 bp, synthetic construct
  source 1..75: mol_type = other DNA
gaaccagtatcacaattgttcataactacccactcccccgcattttataatctctcgaaacaagacagtgctgtt

SEQ ID NO: 286521 - DNA, 75 bp, synthetic construct
  source 1..75: mol_type = other DNA
ggtgagcaaaaccgcgaccgccatgagcgtgctcgaaaatctgccgcctggcaacgcagagctgcgtcatgccat

SEQ ID NO: 286522 - DNA, 75 bp, synthetic construct
  source 1..75: mol_type = other DNA
acacagaattttccattggtggtactgaactgctgctgtttaagcagataggcaaagccacggtggatggcatcc

SEQ ID NO: 286523 - DNA, 75 bp, synthetic construct
  source 1..75: mol_type = other DNA
gcgtgacgataccggggaagtgcaggctgtggagcttgtggtgcgtggacgtcacaaagaagtggactccggcga

SEQ ID NO: 286524 - DNA, 75 bp, synthetic construct
  source 1..75: mol_type = other DNA
ggcaaatccacggtggatggtatccagttgcgctttaccggctctattcagcgtgacgataccggggaagtgcag

SEQ ID NO: 286525 - DNA, 75 bp, synthetic construct
  source 1..75: mol_type = other DNA
gaagcatcctggtctgataacacctactgcaatggaaagggttatgcaagttgcgtatacggtaaaattaaactc

SEQ ID NO: 286526 - DNA, 75 bp, synthetic construct
  source 1..75: mol_type = other DNA
ttatcggtggcggtactctggtcaatgtctccgatggtacggtgttgaccggtgagcttaataccaatcttgaaa

SEQ ID NO: 286527 - DNA, 75 bp, synthetic construct
  source 1..75: mol_type = other DNA
ccagcgagtttccctgcgcggcagcgtggcgtggcagaagggaagtgatgattttgcccagacggcaggattttt

SEQ ID NO: 286528 - DNA, 75 bp, synthetic construct
  source 1..75: mol_type = other DNA
tcaggaaagaatatctcttaatttttctggctgtcgttgcatgtgcgtttacacgagcgaatgcagcgtcgcaga

SEQ ID NO: 286529 - DNA, 75 bp, synthetic construct
  source 1..75: mol_type = other DNA
gatgaccttgatgctattaatccgacgtggaagttaaaagacagcacaggaaaagaaaaagaggtcggcagtaaa

SEQ ID NO: 286530 - DNA, 75 bp, synthetic construct
  source 1..75: mol_type = other DNA
ggagataaggctgcatcagtagtatctgttggtgatgcgggtaaagagcgtcagattgttaacgtgggggcgggt

SEQ ID NO: 286531 - DNA, 75 bp, synthetic construct
  source 1..75: mol_type = other DNA
tatgacagtgttctttattgcttggtaaatgtgagtggcagcgttagttctggtgacgaagttaataaagttgtt

SEQ ID NO: 286532 - DNA, 75 bp, synthetic construct
  source 1..75: mol_type = other DNA
ctttcatatcttctcgataaatacggggatttacggcttgctctggctgcatataacgctggggaaggtgctgtt

SEQ ID NO: 286533 - DNA, 75 bp, synthetic construct
  source 1..75: mol_type = other DNA
tctgactgggaacgcggagtgaaacgccctggtggtcccgccctgcgacttctttccgttattgaaaaaaacggg

SEQ ID NO: 286534 - DNA, 75 bp, synthetic construct
  source 1..75: mol_type = other DNA
cgcgtcatttcttgtggtgggccaacccggcagtgaaaggggggggaagggcatcagagcgttttcccgccggat

SEQ ID NO: 286535 - DNA, 75 bp, synthetic construct
  source 1..75: mol_type = other DNA
cttcagggggtaaacgacaaagtgtataccctggcgaaattgtataatttgcctgctgatgttctgcctcgttaa

SEQ ID NO: 286536 - DNA, 75 bp, synthetic construct
  source 1..75: mol_type = other DNA
gatatccgcgatgtatttatcaacgcaggtattaaaggtgaagagtacgacgcggcgtggaacagttttgtcgtt

SEQ ID NO: 286537 - DNA, 75 bp, synthetic construct
  source 1..75: mol_type = other DNA
tggcgttccggcgatgtttgttaacggtaaatatcagctgaatccgcagggtatggataccagcaatatggatgt

SEQ ID NO: 286538 - DNA, 75 bp, synthetic construct
  source 1..75: mol_type = other DNA
ataaggctcccggcagcatcaaagttaacggggctgatggtaaggaggctgtgagtctgaatggtcaggatggca

SEQ ID NO: 286539 - DNA, 75 bp, synthetic construct
  source 1..75: mol_type = other DNA
ggtgttgttattagtggagtagctagtgggttgaatggtaaaactcttaatactatcactgataatgaaaagttt

SEQ ID NO: 286540 - DNA, 75 bp, synthetic construct
  source 1..75: mol_type = other DNA
aggaagttaaacagtcttttgggaaggctattaaagtatctggggatagcaatatcactaccacagcaatcactg

SEQ ID NO: 286541 - DNA, 75 bp, synthetic construct
  source 1..75: mol_type = other DNA
agtgttttttccattggaaagaatggaaatgaacgtcagatagtcaatgttgctgctggttctatatctgagaca

SEQ ID NO: 286542 - DNA, 75 bp, synthetic construct
  source 1..75: mol_type = other DNA
tccggcatccatatcacaggccagtgctcaggcagatacaaataagttaactgttgaagttgatgaaaccagcct

SEQ ID NO: 286543 - DNA, 75 bp, synthetic construct
  source 1..75: mol_type = other DNA
cgcggagaacaatgagagacagatagttaatgtagcggcaggtgatatatctaaaacaagtactgatgcgatcaa

SEQ ID NO: 286544 - DNA, 75 bp, synthetic construct
  source 1..75: mol_type = other DNA
tgataaaggaatgacgattgacggaacaacgctgcaagataacattaaaaaagatgctatcaaaattaaaggtgg

SEQ ID NO: 286545 - DNA, 75 bp, synthetic construct
  source 1..75: mol_type = other DNA
tgtcaatattggtggtcgtttttacacacagaccgaagatgctgcgaccgggaaactgacaatgacgccggctga

SEQ ID NO: 286546 - DNA, 75 bp, synthetic construct
  source 1..75: mol_type = other DNA
gcggaaggtgacttgtctgtaagtctaggggctataagtaaagcttcgggagtctctgcgaatgctttgggggct

SEQ ID NO: 286547 - DNA, 75 bp, synthetic construct
  source 1..75: mol_type = other DNA
cactggtgaataccggctttggtctgcaggcggatgacggaagcaaggtgaacacgtctctcgggaagcatatca

SEQ ID NO: 286548 - DNA, 75 bp, synthetic construct
  source 1..75: mol_type = other DNA
gtggtgatgaccttacgccattaaaaggacgttcgtatgggggagtattgatccctgataattatgacgcatcag

SEQ ID NO: 286549 - DNA, 75 bp, synthetic construct
  source 1..75: mol_type = other DNA
atgggcgcaacatctgtcgcgacaggaaatagaagcaatgctataggttataatgctaaagttgaggctgaagat

SEQ ID NO: 286550 - DNA, 75 bp, synthetic construct
  source 1..75: mol_type = other DNA
caaaaatggaatgacgattgacggaacaacgctgcaagataacattaaaaaagatgccatcaaaattaaaggtgg

SEQ ID NO: 286551 - DNA, 75 bp, synthetic construct
  source 1..75: mol_type = other DNA
atgaacagaaattgttaccgcattatttttaacaaagcccggggaatgctgatggtggtggcagatattgcccgt

SEQ ID NO: 286552 - DNA, 75 bp, synthetic construct
  source 1..75: mol_type = other DNA
gaaaattaagaacggtgataagtcattagcgacagccaatgagcttatcaggctggaaaatgccgataagcgtag

SEQ ID NO: 286553 - DNA, 75 bp, synthetic construct
  source 1..75: mol_type = other DNA
cctcagtattcaggccaccggctccggcgtgaagggcgtggatggtgacctgacgatacagggcagtcagataaa

SEQ ID NO: 286554 - DNA, 75 bp, synthetic construct
  source 1..75: mol_type = other DNA
gaccatcacgtcggcaaacattgaccgtctgcgttttactttcggcgtgcaggcactggtggaaaccacctcaaa

SEQ ID NO: 286555 - DNA, 75 bp, synthetic construct
  source 1..75: mol_type = other DNA
taatcgcctaccgatgaatgctggctgggatgaagatctgttgcggatggagctgtcggacctaatcaatgctga

SEQ ID NO: 286556 - DNA, 75 bp, synthetic construct
  source 1..75: mol_type = other DNA
aggaagggacgcttgccgccggcggggacctgaatactcacctgaatgtgctggaaaatcagcaggggacggtgg

SEQ ID NO: 286557 - DNA, 75 bp, synthetic construct
  source 1..75: mol_type = other DNA
cagccggcttgagctgaacagcatccgccttgaaaacacagaaaaaggtgaaatcagtgccgggcagacctggct

SEQ ID NO: 286558 - DNA, 75 bp, synthetic construct
  source 1..75: mol_type = other DNA
tttggactgataccatttttggttggctgcttcatttttgcaatagttgccggatggctgcactggcgacatcgc

SEQ ID NO: 286559 - DNA, 75 bp, synthetic construct
  source 1..75: mol_type = other DNA
ggagccgatgccggaaataataacacggtgggcatcagcctctcttacggcagccagtcttcgaaatcagaacag

SEQ ID NO: 286560 - DNA, 75 bp, synthetic construct
  source 1..75: mol_type = other DNA
aatgtgccatatctggttgaaacggacccgcgttttacgaaccagaagacgtggctgggcagtgattacatgcag

SEQ ID NO: 286561 - DNA, 75 bp, synthetic construct
  source 1..75: mol_type = other DNA
gcgcgacctcatttacaacaggcatgatggctcccggtcgtggtgtccttgcgaacacaggtatcgcaatgggtg

SEQ ID NO: 286562 - DNA, 75 bp, synthetic construct
  source 1..75: mol_type = other DNA
aggcgcaatgagcgccagcctgtgcagcgtatgagcgagcgtgaacgggagttgcgggaatgcttccgcaaccgc

SEQ ID NO: 286563 - DNA, 75 bp, synthetic construct
  source 1..75: mol_type = other DNA
aagatgacgggcgcctggcaaaaacgggagaattggtcatcagtgcctctggcgaactggcggcacatggacagc

SEQ ID NO: 286564 - DNA, 75 bp, synthetic construct
  source 1..75: mol_type = other DNA
gaagattaatgcgggtatctgggcgcaggacctgaaagtgaccaccggacgtaacaatgtggatatcgcgcacgg

SEQ ID NO: 286565 - DNA, 75 bp, synthetic construct
  source 1..75: mol_type = other DNA
ggcacactggacagcactgccggtgtgcttttgtcgggagatgctctgtccctgactgcaggcgtggttaacaat

SEQ ID NO: 286566 - DNA, 75 bp, synthetic construct
  source 1..75: mol_type = other DNA
tgagctgattaagctggaaaatgcagataaacgtagtgatgctctggtatccaaatttaataaagatccttcaca

SEQ ID NO: 286567 - DNA, 75 bp, synthetic construct
  source 1..75: mol_type = other DNA
tctcgacactggcaacggttgctgccggcctggccggtggtctagtgggcaactcgggggcttcagcggtagccg

SEQ ID NO: 286568 - DNA, 75 bp, synthetic construct
  source 1..75: mol_type = other DNA
agacccggttacaggtgaggtgaataaggctgcaaatgtgacagcccatgccgtggtgaatgctgcactggcggt

SEQ ID NO: 286569 - DNA, 75 bp, synthetic construct
  source 1..75: mol_type = other DNA
gcaggtgaatattcagacgccttctgccggcggggtttcacataatacatacagccagttcgacgtcggtaacca

SEQ ID NO: 286570 - DNA, 75 bp, synthetic construct
  source 1..75: mol_type = other DNA
gaaaagcattcactatccgtaacgtacgggttatgcctgaatccattccggctggctttaaggcactggctgaca

SEQ ID NO: 286571 - DNA, 75 bp, synthetic construct
  source 1..75: mol_type = other DNA
ctgcggagttaatgcgactttcatcgcggatggggtgccacagtttgctctggttaatgggctgtacgcaatgga

SEQ ID NO: 286572 - DNA, 75 bp, synthetic construct
  source 1..75: mol_type = other DNA
tgtatgtgcagaacgaccagggaagactggtgctgcaggccggacgggatatgaatctgacggctgcaacggtgg

SEQ ID NO: 286573 - DNA, 75 bp, synthetic construct
  source 1..75: mol_type = other DNA
tctccacactggcaacggttgctgccggtctggccggcggtctggtgggagactcgggggcttcagcggtagccg

SEQ ID NO: 286574 - DNA, 75 bp, synthetic construct
  source 1..75: mol_type = other DNA
ttgaaccagccgcagaatgcgaataagtcgtgggactatctgggaagcgcgacctcatttacaacaggcatgatg

SEQ ID NO: 286575 - DNA, 75 bp, synthetic construct
  source 1..75: mol_type = other DNA
ccggcacgtggcgaaaccatcgacatcgacggttaccagttcaaagtggcgatggccgacagtcggcgtattatt

SEQ ID NO: 286576 - DNA, 75 bp, synthetic construct
  source 1..75: mol_type = other DNA
aaagaagcattaggcatgggcgatgtattactcttcgctgctttaggtggctgggtgggggcattgtcgctaccc

SEQ ID NO: 286577 - DNA, 75 bp, synthetic construct
  source 1..75: mol_type = other DNA
aaaaaaaggatcaaccacactgccttttggaccgtgtttaagtctgggcggtatagcaacactttatctacaggc

SEQ ID NO: 286578 - DNA, 75 bp, synthetic construct
  source 1..75: mol_type = other DNA
ccatgatgttcaccgaagtgccttttattgaacgcttcgccgcagcgcgaaaagccgggttcgatgctgtggaat

SEQ ID NO: 286579 - DNA, 75 bp, synthetic construct
  source 1..75: mol_type = other DNA
ggagacgcccgtggcgctgggaatgagctacggctcgccatcactggaaagcgccgtagatgaactactggcaga

SEQ ID NO: 286580 - DNA, 75 bp, synthetic construct
  source 1..75: mol_type = other DNA
tatgcttaaaactgtctacacggtgagactcgatctctataaccaccttcgttttagttatgaagagcactctta

SEQ ID NO: 286581 - DNA, 75 bp, synthetic construct
  source 1..75: mol_type = other DNA
gcgtcagaagttggatcacaactcaaaatatccgctaacaaggttggtcgcattgccaatacctacatgctcaaa

SEQ ID NO: 286582 - DNA, 75 bp, synthetic construct
  source 1..75: mol_type = other DNA
atcaattctacttgcgtctgggaaacaggtagaaaagtcttaagaaataatctagttaatgaacaggaaaatcaa

SEQ ID NO: 286583 - DNA, 75 bp, synthetic construct
  source 1..75: mol_type = other DNA
acttttacctggtgatatagcattaattgtaaccaactatatttctagggatataaaaagcgccgttttgagcca

SEQ ID NO: 286584 - DNA, 75 bp, synthetic construct
  source 1..75: mol_type = other DNA
gttcctgagctgaaattatccggctatggcgatctgaaaatctacggcgatgtcgaattcaacatggatgcgaaa

SEQ ID NO: 286585 - DNA, 75 bp, synthetic construct
  source 1..75: mol_type = other DNA
tagtatagacaggcaaactgctacaggatggtttgtagctgcaatagaagaagatgcccactaccgttataacag

SEQ ID NO: 286586 - DNA, 75 bp, synthetic construct
  source 1..75: mol_type = other DNA
gtgtgggatgtcggcactgatattcagagctaatcgtaaactttcacttgaactgttagttgcatccttgcctga

SEQ ID NO: 286587 - DNA, 75 bp, synthetic construct
  source 1..75: mol_type = other DNA
atgccgatatggcggaagatggagcaaggcgtaataggtactggaaatcatcaagccttccagtttgtgaaagat

SEQ ID NO: 286588 - DNA, 75 bp, synthetic construct
  source 1..75: mol_type = other DNA
agctacggctcgccatcactggaaagcgccgtagatgaactcctggcagagcatgtagatcatattgtggtgctg

SEQ ID NO: 286589 - DNA, 75 bp, synthetic construct
  source 1..75: mol_type = other DNA
atgcgcagcgatgctgaagccttcagcatggacaaagtgttacgtcaggcggttgtcgttcctgaaagtaagcgc

SEQ ID NO: 286590 - DNA, 75 bp, synthetic construct
  source 1..75: mol_type = other DNA
cgccagtcggcgcaatgaaagtatttttgattttctatatcgcctgcgtagtgattacctgggcggtatatggtc

SEQ ID NO: 286591 - DNA, 75 bp, synthetic construct
  source 1..75: mol_type = other DNA
agctgtatctggcgaatgcgtcctgggtatgggtgccgttccttgccatcttcaccattgcggcgtggtttggca

SEQ ID NO: 286592 - DNA, 75 bp, synthetic construct
  source 1..75: mol_type = other DNA
gtcatacctggaccgtgcgcgcactggcttccatcgaagatttcaacgaagcgttcggcacccactttagcgatg

SEQ ID NO: 286593 - DNA, 75 bp, synthetic construct
  source 1..75: mol_type = other DNA
tgatgtcatcatcgagtccgctcactcgcgtttcccggtcatcagcgaggacaaagatcacattgaagggattct

SEQ ID NO: 286594 - DNA, 75 bp, synthetic construct
  source 1..75: mol_type = other DNA
ggttgtcgttcctgaaagtaagcgcgtagaccggatgctgaaagagtttcgctctcagcgttaccacatggcgat

SEQ ID NO: 286595 - DNA, 75 bp, synthetic construct
  source 1..75: mol_type = other DNA
agtaatgagtatgcccgtcgtcagttagcgattgcagcggaatcggtgcgtgaaggcgttagcctgcatcaagcg

SEQ ID NO: 286596 - DNA, 75 bp, synthetic construct
  source 1..75: mol_type = other DNA
tgtctggatggagggtggctcgccgctgatggtttacagccgccagcaacagcaggcgctggcacaacgtttacc

SEQ ID NO: 286597 - DNA, 75 bp, synthetic construct
  source 1..75: mol_type = other DNA
aacgttgtcgcacaactacacgtgaactggcttccgcactgggaatggctccggaaaaagtgatgatgacctttc

SEQ ID NO: 286598 - DNA, 75 bp, synthetic construct
  source 1..75: mol_type = other DNA
cgggcagggcggaagctttatggcgttcttcgctgtcttcctggcgctgttcctgacggcagggctgggtagcgg

SEQ ID NO: 286599 - DNA, 75 bp, synthetic construct
  source 1..75: mol_type = other DNA
gggttattgccattctgcttactgcggttgtgccgaaagtggttgagcagtttattcatatgaaacagacccttc

SEQ ID NO: 286600 - DNA, 75 bp, synthetic construct
  source 1..75: mol_type = other DNA
catgagcgagtgggtacatacgtttagcccttggctgttactgttaatggtcatgggaggactgttggcacgtat

SEQ ID NO: 286601 - DNA, 75 bp, synthetic construct
  source 1..75: mol_type = other DNA
gttcgctaatgtgatggatatggagaactttaatatttaccttggtacttattactccattctggatagcgacgg

SEQ ID NO: 286602 - DNA, 75 bp, synthetic construct
  source 1..75: mol_type = other DNA
cgtattactccattctggatagcgacggtgataaaaaacacggtgatgatactgatgaccgttacggcgcacgcg

SEQ ID NO: 286603 - DNA, 75 bp, synthetic construct
  source 1..75: mol_type = other DNA
aacaagccgctgagatccgcgaaattaaggccgctcagggcaatacgccggtaaatggacaggcaacggcggaat

SEQ ID NO: 286604 - DNA, 75 bp, synthetic construct
  source 1..75: mol_type = other DNA
cccgtctggttacccagcgattaatatggggggtttatccggcaaatgaaccgcgtcgtttactcaacgcctttc

SEQ ID NO: 286605 - DNA, 75 bp, synthetic construct
  source 1..75: mol_type = other DNA
acctgacgagtcagccagtaacagcctgactcgctgggaaggtaaatccgctaccgttgggcaacttatgggaat

SEQ ID NO: 286606 - DNA, 75 bp, synthetic construct
  source 1..75: mol_type = other DNA
aactggtattttgaattaaacacgttacttgaagacggaacatctttatataacgacggtaattatcatggacgc

SEQ ID NO: 286607 - DNA, 75 bp, synthetic construct
  source 1..75: mol_type = other DNA
caaccagaacccttctggcgttatctttattccttactgtcagtctgcccggacaagcaaccgtcaccctgacgg

SEQ ID NO: 286608 - DNA, 75 bp, synthetic construct
  source 1..75: mol_type = other DNA
tggtgaagacggcaatgatacctttaaattaggcacaattgccaaaaacctgaccattgatgccggtgccggtga

SEQ ID NO: 286609 - DNA, 75 bp, synthetic construct
  source 1..75: mol_type = other DNA
agcaactgcgttagatggtattgagcatacttatacgctttacagcagtgtaagtggcgcaaatgtgtatattga

SEQ ID NO: 286610 - DNA, 75 bp, synthetic construct
  source 1..75: mol_type = other DNA
atgacaaacatgatctcatatcagggacttgttcgcaccttccctaatcttttgctttcaggttatggcgattta

SEQ ID NO: 286611 - DNA, 75 bp, synthetic construct
  source 1..75: mol_type = other DNA
atgctaataatgagaaagatttcactgccgggattaacgcgctgtggaaacgtttcgagctgggttatatctacg

SEQ ID NO: 286612 - DNA, 75 bp, synthetic construct
  source 1..75: mol_type = other DNA
caaagacgccggaatacaaaagtacggataacggtaaacagaacacgtatttttcgtcactggacaacatgattg

SEQ ID NO: 286613 - DNA, 75 bp, synthetic construct
  source 1..75: mol_type = other DNA
gtgtgccgttttgggtggtatcaaaaaaaatccaaaacggtatcaaatgattttgcgcgctttacacaaacgctg

SEQ ID NO: 286614 - DNA, 75 bp, synthetic construct
  source 1..75: mol_type = other DNA
gataatgaagaaaaagcccgtcatcaggaggttcagcaacaacgatttgatgaattgagtaaaatatatgataaa

SEQ ID NO: 286615 - DNA, 75 bp, synthetic construct
  source 1..75: mol_type = other DNA
gacagcagcctgtttaaaacaaatccggcagtgaatgtgccatatctggttgaaacggacccgcgttttacgaac

SEQ ID NO: 286616 - DNA, 75 bp, synthetic construct
  source 1..75: mol_type = other DNA
aacgtgctgaactggcagcttacttgcgtgtatatgcttcagaaatggaaaaggagtacggtacagcggtggcac

SEQ ID NO: 286617 - DNA, 75 bp, synthetic construct
  source 1..75: mol_type = other DNA
cgctgaaaagtaacacagcgttcagtaacagtggtcagaccattgcgaacggaaaccttacgctttccgttaatg

SEQ ID NO: 286618 - DNA, 75 bp, synthetic construct
  source 1..75: mol_type = other DNA
acagtggttctgtttatgcagggcaggatacgcagatacagagcgatggtgcattcacccaaacgggctctgtgg

SEQ ID NO: 286619 - DNA, 75 bp, synthetic construct
  source 1..75: mol_type = other DNA
cagataaaggccgggaacaacattctgctgcaggcaaaccgtgacgtgaatctggtatcagcagaaaacacttca

SEQ ID NO: 286620 - DNA, 75 bp, synthetic construct
  source 1..75: mol_type = other DNA
tgctacattgaacgtattcgacgtaacgggattctggcaaatccagacggtgatgctgtgctacaaatgggcgat

SEQ ID NO: 286621 - DNA, 75 bp, synthetic construct
  source 1..75: mol_type = other DNA
acaaacaactcgtcactcttgctcgccaggggcggggaagttataaaacggtggctgaccgttcaagaattgcag

SEQ ID NO: 286622 - DNA, 75 bp, synthetic construct
  source 1..75: mol_type = other DNA
catcatatatcgcaacgggctaaatcccgccccttacgtgataacgcggcggaatttcttcaggtggtcgcagaa

SEQ ID NO: 286623 - DNA, 75 bp, synthetic construct
  source 1..75: mol_type = other DNA
gctgaaaattggggttgaggatgttgatggggagttgctgaaaggtggcggtggaattgctaatggacggccctc

SEQ ID NO: 286624 - DNA, 75 bp, synthetic construct
  source 1..75: mol_type = other DNA
acggtgatgtttcccttcaggcaggtaaccggttgaccgtcaacggctctgacctgattgccggcagggacatgg

SEQ ID NO: 286625 - DNA, 75 bp, synthetic construct
  source 1..75: mol_type = other DNA
ggcaaatgtcagcctgaccgcacgtgcggatatcaacagtaccggtgggctgctgcaggccacggacagtctgct

SEQ ID NO: 286626 - DNA, 75 bp, synthetic construct
  source 1..75: mol_type = other DNA
gttggtatcggtcagggttactggacggcgacccctatccagatgagtaaggcactgatgatcctgattaatgac

SEQ ID NO: 286627 - DNA, 75 bp, synthetic construct
  source 1..75: mol_type = other DNA
tgcgtctgcgcgaagagtttggcgtgtatgctgttgcttctggtcgtgtgaacgtagccgggatgacaccagata

SEQ ID NO: 286628 - DNA, 75 bp, synthetic construct
  source 1..75: mol_type = other DNA
gctgaacaatcagtccggtcttattcaggggaagggtatcagcattaataccgcaggccagacgctggataacag

SEQ ID NO: 286629 - DNA, 75 bp, synthetic construct
  source 1..75: mol_type = other DNA
tatttactgatggacctgataaaggtgctttagctggtacgggagctggttgggtattcggtactgtagttgggg

SEQ ID NO: 286630 - DNA, 75 bp, synthetic construct
  source 1..75: mol_type = other DNA
aaccacgctggatgtggcaaaggttcaggggcaactggcaggtatcagccaggtgttttgcgatccacacgtagg

SEQ ID NO: 286631 - DNA, 75 bp, synthetic construct
  source 1..75: mol_type = other DNA
attatcagcaggctattgaaaatggatttgtccggatgacgcagcgcatggtggagatcatgcatggcggggagg

SEQ ID NO: 286632 - DNA, 75 bp, synthetic construct
  source 1..75: mol_type = other DNA
aagagctgactgatatgcgtcagcgtattcagcgtatgcgtcaattgttcgttaatacgctgcaggaaaaaggcg

SEQ ID NO: 286633 - DNA, 75 bp, synthetic construct
  source 1..75: mol_type = other DNA
gcacgcagacggttcaggtacctcaggtgtatgcccgtgtaaaacccggtgatgtgaacagtgccggtgcactga

SEQ ID NO: 286634 - DNA, 75 bp, synthetic construct
  source 1..75: mol_type = other DNA
ggttataaagatggcgtattgattgcaggtgcctggtatctggggcctgcggtgtcagtgggtaaagctgcggtc

SEQ ID NO: 286635 - DNA, 75 bp, synthetic construct
  source 1..75: mol_type = other DNA
taaagtacacccgatagttcaggctggcggtgatgttagttttatccggggttatactttaaacggaactataga

SEQ ID NO: 286636 - DNA, 75 bp, synthetic construct
  source 1..75: mol_type = other DNA
cagcattaccgccgccacagaccagcatgtgcagacgcatacggtggagcaaaaaacctccggtctgacgcttgc

SEQ ID NO: 286637 - DNA, 75 bp, synthetic construct
  source 1..75: mol_type = other DNA
tacggcagtgatgaagagcagtttaaggcattaatggatgcgggtattgcatttggtaagcaatacaacctgaaa

SEQ ID NO: 286638 - DNA, 75 bp, synthetic construct
  source 1..75: mol_type = other DNA
ccgttcacggaacaggatgtggcacagcgggcctacaataacggtatggcggcctcaggttttggaacgggaggc

SEQ ID NO: 286639 - DNA, 75 bp, synthetic construct
  source 1..75: mol_type = other DNA
gcattacaacagcctgatggcggttattcgtgaaaaggaagaaacactgaaacaacgcgtgatccgcgcgctggc

SEQ ID NO: 286640 - DNA, 75 bp, synthetic construct
  source 1..75: mol_type = other DNA
ggctggacatccagtgatccgacgctgatcccggacagcactggcgataaagcgaccattccggcagataatgtg

SEQ ID NO: 286641 - DNA, 75 bp, synthetic construct
  source 1..75: mol_type = other DNA
tttatccgtatggcgctcaatgcgctggatggcatgttggcgcgtgagtgcaaccagcaaacacgtctgggggcg

SEQ ID NO: 286642 - DNA, 75 bp, synthetic construct
  source 1..75: mol_type = other DNA
catttatccacagtggatgcaatggaataatcttttatggagcattgcttcaattctgcttatctggactgcgat

SEQ ID NO: 286643 - DNA, 75 bp, synthetic construct
  source 1..75: mol_type = other DNA
aggcagtcgtgcggctgtcgtggtcaccgatccgcgtacaggtggcgttctggcgctggtttccacgccaagcta

SEQ ID NO: 286644 - DNA, 75 bp, synthetic construct
  source 1..75: mol_type = other DNA
gcagtgataatattacggtaactaaaaatctgaccggtaatatttctgtcggtgacaatgcggataccttaacgg

SEQ ID NO: 286645 - DNA, 75 bp, synthetic construct
  source 1..75: mol_type = other DNA
gctactgacaataacgatacaacattatctggtttattggatcttggtagtggtacaaaagatatatctaatatg

SEQ ID NO: 286646 - DNA, 75 bp, synthetic construct
  source 1..75: mol_type = other DNA
ttatcagtgcagaacagaggcggggagctgtccggttttcgctgggatttaacagcaaaggggaaattgtattgc

SEQ ID NO: 286647 - DNA, 75 bp, synthetic construct
  source 1..75: mol_type = other DNA
gcgggttatgcctgaatccattccggcaggctttaaggcactggctgacatgagtccgtttgaatccctgctgat

SEQ ID NO: 286648 - DNA, 75 bp, synthetic construct
  source 1..75: mol_type = other DNA
cactggctgacatgagtccgtttgaatccctgctgattgtggatttgggcggaaccacgctggatgtggcaaagg

SEQ ID NO: 286649 - DNA, 75 bp, synthetic construct
  source 1..75: mol_type = other DNA
aagtcttttaaagcagattaataactctgtatactcagcgcttgatcattttactgttaaagatgattattcaat

SEQ ID NO: 286650 - DNA, 75 bp, synthetic construct
  source 1..75: mol_type = other DNA
cacagccatgtttatagctggaattcatgacgatttaatagctcagctatcaacagatgctggttcagaagctca

SEQ ID NO: 286651 - DNA, 75 bp, synthetic construct
  source 1..75: mol_type = other DNA
atgggaaatctatggggtgatggtgatgatatattacgagataaccgtattgaacaagcttgggaaaattattct

SEQ ID NO: 286652 - DNA, 75 bp, synthetic construct
  source 1..75: mol_type = other DNA
gtcagcacatcgaaaagtgaagggcgtattgtccgctttgacctgaagtttgtcgaagcgggagaactctcttac

SEQ ID NO: 286653 - DNA, 75 bp, synthetic construct
  source 1..75: mol_type = other DNA
tggtggattctgctgtatcggatgccgccaggctgttgcagggggatatctcggtacttctgccgccgccatcgt

SEQ ID NO: 286654 - DNA, 75 bp, synthetic construct
  source 1..75: mol_type = other DNA
tatcagatgaactggaaacgcctgaaaagcgcaaggaaactctcaatcgctatggctccgcgtcaaagctattaa

SEQ ID NO: 286655 - DNA, 75 bp, synthetic construct
  source 1..75: mol_type = other DNA
gaaccgcccctgagtggcaaatgaaacgggaaatgctttctcctgcgtataccaccagatggacagatttgccag

SEQ ID NO: 286656 - DNA, 75 bp, synthetic construct
  source 1..75: mol_type = other DNA
aagaaccctgttacagcaatgccgctgtggaacagctttcattgccacacaggacagccgggacattattgccgc

SEQ ID NO: 286657 - DNA, 75 bp, synthetic construct
  source 1..75: mol_type = other DNA
aagcggcgtatgccgtcacccgattgcctgcgccaacaacttccgcggtgatgcagaatgccgcagtggggcagt

SEQ ID NO: 286658 - DNA, 75 bp, synthetic construct
  source 1..75: mol_type = other DNA
aagccgatctggtgatcacccaaatgccagtgatcagccgttccgtcatttgcatgccattgcatacaattcgca

SEQ ID NO: 286659 - DNA, 75 bp, synthetic construct
  source 1..75: mol_type = other DNA
cgaagaagcgcgccgagctgcagataaagagcatcgccgtaccgttaaccgcagagtaatcgcagatctgatagc

SEQ ID NO: 286660 - DNA, 75 bp, synthetic construct
  source 1..75: mol_type = other DNA
agcccgtctggcggaagagaagcgcatcgctgatgaagcggcagcacgcgctgctgatgtagagcaccgtcgtgc

SEQ ID NO: 286661 - DNA, 75 bp, synthetic construct
  source 1..75: mol_type = other DNA
gcacagttgcacacgccagaacagccgcctatgaagcgccgtcggttaaacgctcatggtatcagtgtcagaacc

SEQ ID NO: 286662 - DNA, 75 bp, synthetic construct
  source 1..75: mol_type = other DNA
cgctcatggtatcagtgccagaatctggaatgttcctgcacatttaccgctctggaaagcgtggatacggtaatt

SEQ ID NO: 286663 - DNA, 75 bp, synthetic construct
  source 1..75: mol_type = other DNA
atgaagccccggcgcaatgaacaggaatcagagaaagcacaaatgccggaaaaacaacagcaaactctcaatcgc

SEQ ID NO: 286664 - DNA, 75 bp, synthetic construct
  source 1..75: mol_type = other DNA
agggcagggaattcagcaacaatggcagatgaagcgagaaatgctttctccgcggtatacgacccgcttccagga

SEQ ID NO: 286665 - DNA, 75 bp, synthetic construct
  source 1..75: mol_type = other DNA
gatgagtcttttatttgggctggtgggattgataactgcatgacgtttgaggaatacggacatcagctaagggat

SEQ ID NO: 286666 - DNA, 75 bp, synthetic construct
  source 1..75: mol_type = other DNA
tctggaaagaaggacataactatgcaaaggcgggagtcatgctcaacgatttccgtccctgcggagttacccagc

SEQ ID NO: 286667 - DNA, 75 bp, synthetic construct
  source 1..75: mol_type = other DNA
cttcagacccgatttacgcgataaaccagtggtcgtcctttctaacaacgacggctgcgttatagctcgttgtaa

SEQ ID NO: 286668 - DNA, 75 bp, synthetic construct
  source 1..75: mol_type = other DNA
atgtcgaaagtctgcataattgcctgggttttcgggcgagttcagggggtaggatttcgctataccacccagtac

SEQ ID NO: 286669 - DNA, 75 bp, synthetic construct
  source 1..75: mol_type = other DNA
gggtttacgggcgagttcagggggtagggtttcgttataccactcagtacgaagcgaaaaggctagggttaaccg

SEQ ID NO: 286670 - DNA, 75 bp, synthetic construct
  source 1..75: mol_type = other DNA
atgtcgaaagtatgcataattgcctgggttttcgggcgagttcagggggtaggctttcgctataccacgcagtac

SEQ ID NO: 286671 - DNA, 75 bp, synthetic construct
  source 1..75: mol_type = other DNA
aggacagggtatccagcagcagtggcagatgaaacgggaaatgctttctccacgttacaccacccgattctctga

SEQ ID NO: 286672 - DNA, 75 bp, synthetic construct
  source 1..75: mol_type = other DNA
aggacagggtatccagcagcagtgggcgatgaagagagagatgttgtcaccacgatatacgactcgctatgagga

SEQ ID NO: 286673 - DNA, 75 bp, synthetic construct
  source 1..75: mol_type = other DNA
actatgagcagatgaggcaggctatatgcagttatgcggcccgtggcgctgagaagctgcgcggagaacaccagt

SEQ ID NO: 286674 - DNA, 75 bp, synthetic construct
  source 1..75: mol_type = other DNA
atgcatggaaaatctcaaaatcgtcgattattccccgcagcaggaaggcaaggtcttctttggcgcttgggtaga

SEQ ID NO: 286675 - DNA, 75 bp, synthetic construct
  source 1..75: mol_type = other DNA
agtatgaagagatgcgccaggcgatctgcagctatgcctcgcgggcggcagagaaactgcgtggcgagcaccagt

SEQ ID NO: 286676 - DNA, 75 bp, synthetic construct
  source 1..75: mol_type = other DNA
ttttaatgtcgtgctggagcgaacggtgcgtgagttacgcggagaaccctgcctggcactggaagaattcgcgcc

SEQ ID NO: 286677 - DNA, 75 bp, synthetic construct
  source 1..75: mol_type = other DNA
agcggatcacgagatggccctgctgatgaacgacgcattcgaccgagaagcgaaggcgaaagcagaagaagcaga

SEQ ID NO: 286678 - DNA, 75 bp, synthetic construct
  source 1..75: mol_type = other DNA
tggcaagcgagctggctgacccgcagttgtacaaaaccttcactgatgccgctgaagtgattggcgaagcgtggg

SEQ ID NO: 286679 - DNA, 75 bp, synthetic construct
  source 1..75: mol_type = other DNA
cggttttattaaaaaccgcactatttctcagctgtacgatccggaaaaaggcatgttcctaccggaccgttttgt

SEQ ID NO: 286680 - DNA, 75 bp, synthetic construct
  source 1..75: mol_type = other DNA
gccgaccaacctgtttgttcacggctatgtaacggtgaacggcgcgaaaatgtccaaatctcgcggcacgttcat

SEQ ID NO: 286681 - DNA, 75 bp, synthetic construct
  source 1..75: mol_type = other DNA
ttcatgcacatgcaagccattggtgacggcatcgttacctcagggtttattaaacaacttcaaaaatccggtatg

SEQ ID NO: 286682 - DNA, 75 bp, synthetic construct
  source 1..75: mol_type = other DNA
agatatatctatccaagccagggttttagaggaacttaaaggttcaattgcatttagaattagaaatctaaatac

SEQ ID NO: 286683 - DNA, 75 bp, synthetic construct
  source 1..75: mol_type = other DNA
tcaggaaaccatcacctttgacgacttcgccaaagttgacctgcgcgtggctctgattgaaaacgcggagtttgt

SEQ ID NO: 286684 - DNA, 75 bp, synthetic construct
  source 1..75: mol_type = other DNA
ccgaaatgccggcctccgtggcgctgcattatgcagtactgccgctgcgtctggaaaatgatgagttaattgtcg

SEQ ID NO: 286685 - DNA, 75 bp, synthetic construct
  source 1..75: mol_type = other DNA
ccgatggagttgcgtctgttcaactatctggtcgagcgtaaagatctgattcagatcccggtatacccattcgaa

SEQ ID NO: 286686 - DNA, 75 bp, synthetic construct
  source 1..75: mol_type = other DNA
cggcacatattgatgccttcggggaactgctgcgccgggagggctgccgggggttttttattcataccggccgta

SEQ ID NO: 286687 - DNA, 75 bp, synthetic construct
  source 1..75: mol_type = other DNA
cggccacgaagtcaacttcatctgtgccgacgatgcgcacggtacgccgatcatgctgaaagctcagcaactcgg

SEQ ID NO: 286688 - DNA, 75 bp, synthetic construct
  source 1..75: mol_type = other DNA
gtgaaagcagctgccacgccagtaactggcccactggcagatgatccgattcaggaaaccatcacctttgacgac

SEQ ID NO: 286689 - DNA, 75 bp, synthetic construct
  source 1..75: mol_type = other DNA
cggccacgaggtcaacttcatctgtgccgacgatgcccacggcacaccgatcatgctgaaagctcagcagcttgg

SEQ ID NO: 286690 - DNA, 75 bp, synthetic construct
  source 1..75: mol_type = other DNA
ttcgacataatgatcttaattaatgctatcaaacaagatttgacaaacgatataccgaattaccactcggattta

SEQ ID NO: 286691 - DNA, 75 bp, synthetic construct
  source 1..75: mol_type = other DNA
catatacctgcgagatttctgattcagcaagccctgttaacaaggtgacctccacttcctgcactgttaccgtca

SEQ ID NO: 286692 - DNA, 75 bp, synthetic construct
  source 1..75: mol_type = other DNA
taccgcaggacaaaagcaggatattgatgtcaccacgctgtgttctgttgagcaggaaaatattaacggtcttgg

SEQ ID NO: 286693 - DNA, 75 bp, synthetic construct
  source 1..75: mol_type = other DNA
taaagtaatgacccgtctgactttagttggtgcgctgtacattacctttatctgcctgatcccggagttcatgcg

SEQ ID NO: 286694 - DNA, 75 bp, synthetic construct
  source 1..75: mol_type = other DNA
atgtcgaaagtctgcataattgcctgggtttatggtcgagttcagggcgttggatttcgctataccacgcagtac

SEQ ID NO: 286695 - DNA, 75 bp, synthetic construct
  source 1..75: mol_type = other DNA
gtataccttcacaaaagatcagatcgaagaagaactgctgtttatgccagaaggcggtatgccggatatgcaggt

SEQ ID NO: 286696 - DNA, 75 bp, synthetic construct
  source 1..75: mol_type = other DNA
ccagaatatttaagcccgggcgaaaaaattcgtatccatatcgaagaacgccgttatatggggcgtgctgactaa

SEQ ID NO: 286697 - DNA, 75 bp, synthetic construct
  source 1..75: mol_type = other DNA
cgtatatttcggcgtcgatcattatccaactgctgacggtggttcacccaacgttggcagaaattaagaaagaag

SEQ ID NO: 286698 - DNA, 75 bp, synthetic construct
  source 1..75: mol_type = other DNA
aaatgccacgcggtattccggtaggtacgctggcgattggcaaagccggtgcggcaaacgcggcattactggcag

SEQ ID NO: 286699 - DNA, 75 bp, synthetic construct
  source 1..75: mol_type = other DNA
tgttggcgtggatgcctttatatcttacgagaaaaataaatttaacgaactaaaagcaaagataaaaaaactgaa

SEQ ID NO: 286700 - DNA, 75 bp, synthetic construct
  source 1..75: mol_type = other DNA
cgagctgaaacgcagactgctgtttgttatcggtgcgctgattgtgttccgtgttggctcttttattccgatccc

SEQ ID NO: 286701 - DNA, 75 bp, synthetic construct
  source 1..75: mol_type = other DNA
cgagctgaaactcagactgctgtttgttatcggtgcgctgattgtgtttcgtattggctcttttattccgatccc

SEQ ID NO: 286702 - DNA, 75 bp, synthetic construct
  source 1..75: mol_type = other DNA
taaagtaatgacccgcctgaccctggttggtgcgctgtatattacctttatctgcctgatcccggagttcatgcg

SEQ ID NO: 286703 - DNA, 75 bp, synthetic construct
  source 1..75: mol_type = other DNA
tacaggatagagcaggaattcagtgcctcgtgtagcggaacttctctgtcccatcttcactttcgttgtggcgct

SEQ ID NO: 286704 - DNA, 75 bp, synthetic construct
  source 1..75: mol_type = other DNA
gactccatcccccgctcacggctgtacgggcgctgggtcacccacgtctgggtatggatcgaaacgctctccctg

SEQ ID NO: 286705 - DNA, 75 bp, synthetic construct
  source 1..75: mol_type = other DNA
cagggttcagccatgcggtgcaggtggatgctgacggtcagcacgcgattgaagatatccctaaactgctggcac

SEQ ID NO: 286706 - DNA, 75 bp, synthetic construct
  source 1..75: mol_type = other DNA
ggtgcggtggtttccgtaatgctggttaagcgtattagccaacgtaagaaagagatgctggcggctgaagcttaa

SEQ ID NO: 286707 - DNA, 75 bp, synthetic construct
  source 1..75: mol_type = other DNA
tttgtctgggcgctatttggcgttacttgcgacatgatgaactggccggtcttgctcaagtcggtaagtcgattg

SEQ ID NO: 286708 - DNA, 75 bp, synthetic construct
  source 1..75: mol_type = other DNA
tgcctttccaggctcgatatattgctctcgggcagtcagtagctggtactgcaaacacagatgcgaccttcaaag

SEQ ID NO: 286709 - DNA, 75 bp, synthetic construct
  source 1..75: mol_type = other DNA
catacgctgcagtaccgcgcatatcacggagacaacgcctggctgtactcgctgtcgcatcagacgaatgacacc

SEQ ID NO: 286710 - DNA, 75 bp, synthetic construct
  source 1..75: mol_type = other DNA
tattcaaattttggaccgtacgggtgaggtattaatacttgatggggccacttttagtgctaaaaccgacttgat

SEQ ID NO: 286711 - DNA, 75 bp, synthetic construct
  source 1..75: mol_type = other DNA
taaaaaagtattactctcagattaatgaactgggtctttctttgatagaagtgtctctggcgagtacgctgttat

SEQ ID NO: 286712 - DNA, 75 bp, synthetic construct
  source 1..75: mol_type = other DNA
cagggttcagccatgcggtgcaggtggatgctgacggtcaacatgcgattgaagatatccccaaactgctggcag

SEQ ID NO: 286713 - DNA, 75 bp, synthetic construct
  source 1..75: mol_type = other DNA
tgggtactactgtcaccagtaatgacgatacgttagcgctgcagagttcagcggcaggctctgcccaaaatgtcg

SEQ ID NO: 286714 - DNA, 75 bp, synthetic construct
  source 1..75: mol_type = other DNA
cactcaggatccgattgggctgaaggggggatggaatttttatcagtatccgttgaatccgatctcaaatataga

SEQ ID NO: 286715 - DNA, 75 bp, synthetic construct
  source 1..75: mol_type = other DNA
gcgaagaatgacgcgatcagttcatccaacagttacactgacaataaaatcagtgatacgaaaacggagctgaac

SEQ ID NO: 286716 - DNA, 75 bp, synthetic construct
  source 1..75: mol_type = other DNA
gtagtgaagacggcattgatccggtgtcactggcggcactgacgcgcaaggttggacgtaaagtgcgctacgtca

SEQ ID NO: 286717 - DNA, 75 bp, synthetic construct
  source 1..75: mol_type = other DNA
taaatggacttccagcctgacactcaactactttctctggcgtgaccgcaaaggggcaatcagcaactttgttag

SEQ ID NO: 286718 - DNA, 75 bp, synthetic construct
  source 1..75: mol_type = other DNA
catatctttgttggcacctaccccaacgaccccgatactcagcgtgatgttgacgaagtgtgcgctcgcttcccg

SEQ ID NO: 286719 - DNA, 75 bp, synthetic construct
  source 1..75: mol_type = other DNA
caggatgcttccctggcttttgatctcagtggtaaaggagtcactaacgatgaaattatcaaagcggtagacaaa

SEQ ID NO: 286720 - DNA, 75 bp, synthetic construct
  source 1..75: mol_type = other DNA
cgcctcgcgtacaacaggatgccaccctggcttttgatctcgctggtaaaggagccactaacgatgaaattatca

SEQ ID NO: 286721 - DNA, 75 bp, synthetic construct
  source 1..75: mol_type = other DNA
ctccttcccgaatggagaaagagcaatcggctacaaacaacgttttaaaatgccctacattggcttgactggaag

SEQ ID NO: 286722 - DNA, 75 bp, synthetic construct
  source 1..75: mol_type = other DNA
atgaaaatactcgttgctggcgcaacaggaagtattggtattcatgttgtgaatactgctattgcaatgggccat

SEQ ID NO: 286723 - DNA, 75 bp, synthetic construct
  source 1..75: mol_type = other DNA
aaaatcagtgatacgaagacagaactgaacgccaatattgatagtgcgaagaatgacgcgatcagttcgtcgaat

SEQ ID NO: 286724 - DNA, 75 bp, synthetic construct
  source 1..75: mol_type = other DNA
aactatacggataagaaatatcaacaaggtatcagttataccaatgaaaaatatgagcaaagcatacagtatgct

SEQ ID NO: 286725 - DNA, 75 bp, synthetic construct
  source 1..75: mol_type = other DNA
gcatgacgctgaagacgttatttcgccgatggaactgcgtctgtttaactatctggttgagcgtaaagatctgat

SEQ ID NO: 286726 - DNA, 75 bp, synthetic construct
  source 1..75: mol_type = other DNA
ctgaacaatgcaccggcggtgaaaaacacggttgacctgccgacgtgggaagaactgactgacattcgcgacaca

SEQ ID NO: 286727 - DNA, 75 bp, synthetic construct
  source 1..75: mol_type = other DNA
cttaccccacatcaggtgcggcgacggcgcagacgctgatgtcatcctgttctgcactggatgactgcatcagtg

SEQ ID NO: 286728 - DNA, 75 bp, synthetic construct
  source 1..75: mol_type = other DNA
agaaattgaagttatggcgataataccaaaaggaagctcttatgttaagaggtgcttaattgatactggaggaat

SEQ ID NO: 286729 - DNA, 75 bp, synthetic construct
  source 1..75: mol_type = other DNA
gccggatattgcccgcgcggcaacggcaacacgcacgtcatctcaggactgggcaaaagtggccgctgtctggca

SEQ ID NO: 286730 - DNA, 75 bp, synthetic construct
  source 1..75: mol_type = other DNA
atggtgtgcaatctgccgcagggattccggacaccggtgaataacggcggagccgatctgtccgcaggtcagcgc

SEQ ID NO: 286731 - DNA, 75 bp, synthetic construct
  source 1..75: mol_type = other DNA
aaacctggacgattgaacgtaaaaaggatcgagttatagtgaagcgcccggataacagttttgtgatgccctggg

SEQ ID NO: 286732 - DNA, 75 bp, synthetic construct
  source 1..75: mol_type = other DNA
agcagcaccataaaggttgtgggcgcattactcgctttcaggatggccactatcggtctcaagcttgggctgaat

SEQ ID NO: 286733 - DNA, 75 bp, synthetic construct
  source 1..75: mol_type = other DNA
cgcgcagggtgccgccattggcctgcagcgaaccactccgcttgctgcactggccgggcagcgcctggccgctga

SEQ ID NO: 286734 - DNA, 75 bp, synthetic construct
  source 1..75: mol_type = other DNA
gatattcaggccgtggtgcaacggcaaccggcggtggagcgtctggcggtatccaggtcagctttaatcctcagt

SEQ ID NO: 286735 - DNA, 75 bp, synthetic construct
  source 1..75: mol_type = other DNA
gctgaagacgatggcgcagtcttactaccaggtcaaaaaagcgtttctgaaatgcaatgtgatgaccgaatttta

SEQ ID NO: 286736 - DNA, 75 bp, synthetic construct
  source 1..75: mol_type = other DNA
ggtgctttcacactctcggcaccgtttgtcttttatacattaatcggatcagttcttaatgccgttattcatttc

SEQ ID NO: 286737 - DNA, 75 bp, synthetic construct
  source 1..75: mol_type = other DNA
gtctgcagcaggagctttggggaacgtgtcacaacttatgaagccatgcgacaggcagtttgtcagtacgctgag

SEQ ID NO: 286738 - DNA, 75 bp, synthetic construct
  source 1..75: mol_type = other DNA
cattcagacgttcgctaaccagatttatattgataccggatcgccgaacagcgggcggctgtcattttataaaat

SEQ ID NO: 286739 - DNA, 75 bp, synthetic construct
  source 1..75: mol_type = other DNA
gctgaaattccatcaccttccacatattattgaaatcactaacgacaacataaaatatgtcatcgcacatgcaga

SEQ ID NO: 286740 - DNA, 75 bp, synthetic construct
  source 1..75: mol_type = other DNA
gtctcgccgtactctgcctgaacggctgccatctccccccggataatacagcgccgaccagaaagtatggtgctg

SEQ ID NO: 286741 - DNA, 75 bp, synthetic construct
  source 1..75: mol_type = other DNA
atcatggctgccggatattcaggccgtggcgcaacggcaaccggcggtggagcgtctggcggtatccaggtcagc

SEQ ID NO: 286742 - DNA, 75 bp, synthetic construct
  source 1..75: mol_type = other DNA
gccccagtcgttccagtcacacgtgatgaaacagtcgatatcaatacttatatttttgacatgttgcaggccagc

SEQ ID NO: 286743 - DNA, 75 bp, synthetic construct
  source 1..75: mol_type = other DNA
cgcagaaaaaagcgcggctggtagcgttgctcaatcagtacaacgtaacgctgattgaagatgacgtttacagcg

SEQ ID NO: 286744 - DNA, 75 bp, synthetic construct
  source 1..75: mol_type = other DNA
caccagctcaccgatgcagcttgcgttggtggattatctttccacacgccgttacgacgcccatcttcggcgcct

SEQ ID NO: 286745 - DNA, 75 bp, synthetic construct
  source 1..75: mol_type = other DNA
cctaccgccagggaatgccgagcttcgccaggctattgctcgccgctatgccttacagggtatcaccatttcgcc

SEQ ID NO: 286746 - DNA, 75 bp, synthetic construct
  source 1..75: mol_type = other DNA
ggtggcgacggatgttaacgaagggatcgaccttcaggcgcttgaactggcgttacaagagtatccggtgaaagc

SEQ ID NO: 286747 - DNA, 75 bp, synthetic construct
  source 1..75: mol_type = other DNA
ctttaatactgcatggcagtggggagagcgtgaagaacaggcggtaaaacaattaggcaaacttattcaagaacg

SEQ ID NO: 286748 - DNA, 75 bp, synthetic construct
  source 1..75: mol_type = other DNA
aatgcgcttaagctgtccattcctgagattgaaagagcactggaagctatccttgcccgtaagcaccgggttgct

SEQ ID NO: 286749 - DNA, 75 bp, synthetic construct
  source 1..75: mol_type = other DNA
ctggggattcactcgccaagccgtgtatttatgggcttcgggtcgaatatcgcagaaggggcagcgattggcatt

SEQ ID NO: 286750 - DNA, 75 bp, synthetic construct
  source 1..75: mol_type = other DNA
ccctgatgataaacacccgtgatttatctatctctctcggcgatcagttgtcccctacatttgtgtcagcaaccc

SEQ ID NO: 286751 - DNA, 75 bp, synthetic construct
  source 1..75: mol_type = other DNA
ttttaataccgcgtggcagtggggcgagcgcgaagaacaggcggttaaacaattaggcaaacttattcaagaacg

SEQ ID NO: 286752 - DNA, 75 bp, synthetic construct
  source 1..75: mol_type = other DNA
ttgggtgatagtagagaatccttgtttctatggcgcgttgcaggcgctggagcggctacggctgaaggcgttatc

SEQ ID NO: 286753 - DNA, 75 bp, synthetic construct
  source 1..75: mol_type = other DNA
gaatctctgatatcggcaattacatgccgaatatcgcccacgcagccacggcgacccgtacagcaggaactgaat

SEQ ID NO: 286754 - DNA, 75 bp, synthetic construct
  source 1..75: mol_type = other DNA
gaagaagctatgttatcgggtattaaagttttacaaggtattgaaaagttattagaaatggggcttgaaaatggc

SEQ ID NO: 286755 - DNA, 75 bp, synthetic construct
  source 1..75: mol_type = other DNA
tataacaaagccagcaataatattaaccagatagctaaaaaaattaattccgcatttgcggctaaaataatcagt

SEQ ID NO: 286756 - DNA, 75 bp, synthetic construct
  source 1..75: mol_type = other DNA
tcagaaacgaatgctgcagcgtcacaaaaatctgcagccacttctgcatccaccgcgaccacgaaagcgtcagaa

SEQ ID NO: 286757 - DNA, 75 bp, synthetic construct
  source 1..75: mol_type = other DNA
attgaaggaacgcacgatgccgctcacttttcaggatcttcaccagctcattcgtagtgcggcaatacgcgcgga

SEQ ID NO: 286758 - DNA, 75 bp, synthetic construct
  source 1..75: mol_type = other DNA
agcaagttgtggtctggtgtgatggacgtaagccggaagcataccaatggtttctggagcaaattcaggtctggg

SEQ ID NO: 286759 - DNA, 75 bp, synthetic construct
  source 1..75: mol_type = other DNA
aatagcccgtcgacgcagcaccggtggcatgcgccgacgcagaccacgcgaacgggcatgcgccacatgaatagc

SEQ ID NO: 286760 - DNA, 75 bp, synthetic construct
  source 1..75: mol_type = other DNA
atggcgacaacgcatgggcgttaagcgaaagctggtgtggcaccattcagtggatttgcccgagcccgtatcggc

SEQ ID NO: 286761 - DNA, 75 bp, synthetic construct
  source 1..75: mol_type = other DNA
tgaaagctggtgcggtactatccagtggatttgccccagcccataccggcctcatcacgggcgtaaaaactggtt

SEQ ID NO: 286762 - DNA, 75 bp, synthetic construct
  source 1..75: mol_type = other DNA
ctgaaatcgcagcggcgaatgttccatcaccagattgaacgtggcaacccgcgacgaacgtttacagggatggcc

SEQ ID NO: 286763 - DNA, 75 bp, synthetic construct
  source 1..75: mol_type = other DNA
gtcagcgtcttccagcgcaggaacggcatcgacaaaggccagtgaagcagcgaaaagtgctgctgctgcagagtc

SEQ ID NO: 286764 - DNA, 75 bp, synthetic construct
  source 1..75: mol_type = other DNA
atgagtaaccgttattggatgatctccttccataaaaatacgcgtaatctaacggttcgctctgtaccaaaagaa

SEQ ID NO: 286765 - DNA, 75 bp, synthetic construct
  source 1..75: mol_type = other DNA
gttcggcgctgatttctctggatggcgacaacgcatgggcgttaagcgaaagctggtgtggcactattcagtgga

SEQ ID NO: 286766 - DNA, 75 bp, synthetic construct
  source 1..75: mol_type = other DNA
acttgctgacgccgtacaacccggagcgccactttacgggctcgaaagccatatgcaaggcaaagtcgtcacttt

SEQ ID NO: 286767 - DNA, 75 bp, synthetic construct
  source 1..75: mol_type = other DNA
cagcagttgctgctgagcggcatgagctgcgccagctgtgtcacccgcgtacaaaatgcgctgcaaagcgtaccg

SEQ ID NO: 286768 - DNA, 75 bp, synthetic construct
  source 1..75: mol_type = other DNA
atgaaagattttgtgaaagaagaacttagatactacatatcttttgaatccagttttgaaggctactatattcct

SEQ ID NO: 286769 - DNA, 75 bp, synthetic construct
  source 1..75: mol_type = other DNA
atttgtttgatgaccaagtggtgctgccatccctggagtcggtactgaccggcagaccttccagtcagcgttgtg

SEQ ID NO: 286770 - DNA, 75 bp, synthetic construct
  source 1..75: mol_type = other DNA
atgtcacaaactatcgacctgaccctggacggcctgtcctgcggtcaatgcgttaaacgcgtgaaagaaagtctt

SEQ ID NO: 286771 - DNA, 75 bp, synthetic construct
  source 1..75: mol_type = other DNA
gatatgcagctgccgcaggtcaacggtttccgcacattgcgcgggctgggcgtgagcggtgaagctgaaggtcat

SEQ ID NO: 286772 - DNA, 75 bp, synthetic construct
  source 1..75: mol_type = other DNA
gtgctgtttcgtgccagtgcggttggcagccataccacgctgtcacggatcattcgcatggtgcgccaggcccag

SEQ ID NO: 286773 - DNA, 75 bp, synthetic construct
  source 1..75: mol_type = other DNA
gtgcgattgtggcagggctacagtgtttcgcgtgaaaaaagaaatgctcgctaatattagcagccttaaacgcta

SEQ ID NO: 286774 - DNA, 75 bp, synthetic construct
  source 1..75: mol_type = other DNA
atgattgttggttatgcaagagtctcaacgaaggatcagaatcttgagcgtcagttggcagtactggaacctatc

SEQ ID NO: 286775 - DNA, 75 bp, synthetic construct
  source 1..75: mol_type = other DNA
ttcgtagtgcggcaatgcgcgcagatgaactgcatattcccgttgtcatcagcattgttgatgccaacggaacag

SEQ ID NO: 286776 - DNA, 75 bp, synthetic construct
  source 1..75: mol_type = other DNA
atgacctgcatctacaactcacagcgtatctggtccacgatccgtcactactggcctgaagaaccacggcagcct

SEQ ID NO: 286777 - DNA, 75 bp, synthetic construct
  source 1..75: mol_type = other DNA
gcaatcgccatcactccaaacaaggtggtgctcatcagccttgaagatcgatgttggccgcagagctcttaataa

SEQ ID NO: 286778 - DNA, 75 bp, synthetic construct
  source 1..75: mol_type = other DNA
atcgagtaggacggataaggcgtttacgccgcatccggcatggatgacatgtactttgttatcaatctggggcca

SEQ ID NO: 286779 - DNA, 75 bp, synthetic construct
  source 1..75: mol_type = other DNA
ctgaaatcgcagcggcgaatgttccatcaccagattgaacgtggcaacccgagacggacatttacagggatggca

SEQ ID NO: 286780 - DNA, 75 bp, synthetic construct
  source 1..75: mol_type = other DNA
gtctggggaagactgcagggccaaacatttaactggaacgacagtggaatggatgtctcaatgcgtcgtaacagc

SEQ ID NO: 286781 - DNA, 75 bp, synthetic construct
  source 1..75: mol_type = other DNA
tcggtgtggcgacactgataaacccgcagtatatcgccagcgtgaaacataacgggggatatacaaacgttagct

SEQ ID NO: 286782 - DNA, 75 bp, synthetic construct
  source 1..75: mol_type = other DNA
acctgtcacgattgtttctaccggaccgcaaactaacgttgccttgctgctcaatagccatccggaactgcatag

SEQ ID NO: 286783 - DNA, 75 bp, synthetic construct
  source 1..75: mol_type = other DNA
gaactttgccggagctggtaaacagaacttccgcagccattcactgtatgcaggtgcagaagtcggataccgtta

SEQ ID NO: 286784 - DNA, 75 bp, synthetic construct
  source 1..75: mol_type = other DNA
aacggtcgtctgaccattcagggccacccggttatccatgcttcaacgtctcagagtattgcaaatacagtctcg

SEQ ID NO: 286785 - DNA, 75 bp, synthetic construct
  source 1..75: mol_type = other DNA
ggtaacagtctgacgtttcatcagttgaaggcggcagattatggtgccgtgctggcgaataacgttgataaacgg

SEQ ID NO: 286786 - DNA, 75 bp, synthetic construct
  source 1..75: mol_type = other DNA
ttagtggtggcggtacgctggtgaatgccaccgacggcatgacgttgacaggtgagcttaataccaaccttgaaa

SEQ ID NO: 286787 - DNA, 75 bp, synthetic construct
  source 1..75: mol_type = other DNA
gagttgactgccagcggcaccgcgacgtctgcggtacgtgtggaggacggaacgctaaaaggcgatgcggagaat

SEQ ID NO: 286788 - DNA, 75 bp, synthetic construct
  source 1..75: mol_type = other DNA
cagatccgagtcgctttgcctggcatcgtccagtcattcgatcctgacgctgtgacggcggttgtgcagccttct

SEQ ID NO: 286789 - DNA, 75 bp, synthetic construct
  source 1..75: mol_type = other DNA
attatcgcggacaatgtgcacggcgaaagcggtctcgacggcccggcattaccggaaccgacgttcgcaccgcaa

SEQ ID NO: 286790 - DNA, 75 bp, synthetic construct
  source 1..75: mol_type = other DNA
atggcactgccaattctgttagattgcgacccaggtcatgacgacgctatcgcaatcgttctcgccctcgcctca

SEQ ID NO: 286791 - DNA, 75 bp, synthetic construct
  source 1..75: mol_type = other DNA
aatacgtccggtgcagtcagtctgcaaaatggcgttgctggcgatacattgacggtgaatggcgattatactggc

SEQ ID NO: 286792 - DNA, 75 bp, synthetic construct
  source 1..75: mol_type = other DNA
tacgaactgataaagagctgtttgcggctgcattctggcttggtgatggtgcgataggtgcatacagcccttccg

SEQ ID NO: 286793 - DNA, 75 bp, synthetic construct
  source 1..75: mol_type = other DNA
aatactatttacttaaggcagtaaaactttattcactcggtgatatacgccttatctgtccactaaatatcattc

SEQ ID NO: 286794 - DNA, 75 bp, synthetic construct
  source 1..75: mol_type = other DNA
tatggtcacatcttgcgcgtattggacaaacaggacttttttttgacagtatttctttttcatcattgttcagtt

SEQ ID NO: 286795 - DNA, 75 bp, synthetic construct
  source 1..75: mol_type = other DNA
ttggatcgtaaaggcccgcgcctgatgctgggactggggatgttcttctggtcactgttccaggcaatgtctggc

SEQ ID NO: 286796 - DNA, 75 bp, synthetic construct
  source 1..75: mol_type = other DNA
ttgggccctccagcatccttgatcttggtttcgagttatacaaccgcacagtacaggccacctcggagctgggat

SEQ ID NO: 286797 - DNA, 75 bp, synthetic construct
  source 1..75: mol_type = other DNA
aagctggagcaacagcaacaggaaaatagcgcagtgctgaaatcgcagcggcgaatgttccatcaccagattgaa

SEQ ID NO: 286798 - DNA, 75 bp, synthetic construct
  source 1..75: mol_type = other DNA
cgactgttcaaggatgcccacctgactggtggcggcgtatgcaatacatgcggtgccaatcatgatggttttgag

SEQ ID NO: 286799 - DNA, 75 bp, synthetic construct
  source 1..75: mol_type = other DNA
tgctgggactggggatgttcttctggtcactgttccaggcaatgtctggcatggtgcacaactttacgcagttcg

SEQ ID NO: 286800 - DNA, 75 bp, synthetic construct
  source 1..75: mol_type = other DNA
accattggtgtgttgggtatttttctcgccatcggttggtatatgctctatcgcaaccgcgagcacgttgaactg

SEQ ID NO: 286801 - DNA, 75 bp, synthetic construct
  source 1..75: mol_type = other DNA
agccggtagtgcggtaaattcccgggaaggctcccggattgcagtcaaaacggctggcgattaccttttaaatca

SEQ ID NO: 286802 - DNA, 75 bp, synthetic construct
  source 1..75: mol_type = other DNA
tccacgtcgcagttgcttctcgcatgactgcgtcggtgggcagtatccagaactttgccagcttcatctgcgcct

SEQ ID NO: 286803 - DNA, 75 bp, synthetic construct
  source 1..75: mol_type = other DNA
ctggaccgcaaaggcccacgcctgatgctggggctagggatgatcgtctggtcgctgtttcaggcaatgtctggc

SEQ ID NO: 286804 - DNA, 75 bp, synthetic construct
  source 1..75: mol_type = other DNA
atccgcgttcttcgtttggttcatcttcgtcggcagatatccccgtgccgcctgatggattagttcaacgtagta

SEQ ID NO: 286805 - DNA, 75 bp, synthetic construct
  source 1..75: mol_type = other DNA
cgtccgtcttacgttctcggcggtcgggcgatggaaatcgtctatgacgaagctgacctgcgtcgctacttccag

SEQ ID NO: 286806 - DNA, 75 bp, synthetic construct
  source 1..75: mol_type = other DNA
taaactttggtttgatggttaaccgcatcgtgcagcgggtgattttcgttactggctactacggcctgacgcagg

SEQ ID NO: 286807 - DNA, 75 bp, synthetic construct
  source 1..75: mol_type = other DNA
tatacctgcgtggtgaccgattcggcagagagggcacagagtgtgacgtctgttgaatgcaccgtgactgtgagc

SEQ ID NO: 286808 - DNA, 75 bp, synthetic construct
  source 1..75: mol_type = other DNA
ttgctggaccacttccttgatgacgcagtagaagttgacgtggatgccatctgcgacggtgaaatggtgctgatt

SEQ ID NO: 286809 - DNA, 75 bp, synthetic construct
  source 1..75: mol_type = other DNA
ctcgatggcggtactgcgtgaaatcggtgttgaaacgggcggttccaacgtccagtttgcggttaacccgaaaaa

SEQ ID NO: 286810 - DNA, 75 bp, synthetic construct
  source 1..75: mol_type = other DNA
cgtggtggacctggcggcaaaactgctgaaacagggcttcgagctggatgcgacccacggcacggcgattgtgct

SEQ ID NO: 286811 - DNA, 75 bp, synthetic construct
  source 1..75: mol_type = other DNA
gccagtggagaccattcggttctgactcagcctacgtcattcagtcaggaggactgggagaaccgcagttttacc

SEQ ID NO: 286812 - DNA, 75 bp, synthetic construct
  source 1..75: mol_type = other DNA
atcctggcaacagcctgccgttcccggaggtgggcggcaaagacaggtcgatgttctgtctggccttggtgccat

SEQ ID NO: 286813 - DNA, 75 bp, synthetic construct
  source 1..75: mol_type = other DNA
cattgcgctgctttcagagattgtttactggtatcgcccgacagaagtcagggatgagcatacaggggctttact

SEQ ID NO: 286814 - DNA, 75 bp, synthetic construct
  source 1..75: mol_type = other DNA
catcttgagaaaaatctcagaggccttgaacaaacgatcaatattgttaataagtctgagctaaagaaaaatttt

SEQ ID NO: 286815 - DNA, 75 bp, synthetic construct
  source 1..75: mol_type = other DNA
atggcgaatctttatgacctaaaaaaatttgatctgaatttactggtcatatttgagtgtatttatcaacatctc

SEQ ID NO: 286816 - DNA, 75 bp, synthetic construct
  source 1..75: mol_type = other DNA
agtgtggcatctgtaactattcatgcggagcagaaaaccacgtggaacatcggtgttgaagggatgcctgatggg

SEQ ID NO: 286817 - DNA, 75 bp, synthetic construct
  source 1..75: mol_type = other DNA
cttcgaattgcaggtgcgcggtctgatgaacgtgcagtttgcggtgaaaaacaacgaagtctacctgattgaagt

SEQ ID NO: 286818 - DNA, 75 bp, synthetic construct
  source 1..75: mol_type = other DNA
tgaccagtatgacctgcacccggtttacaagcgcgtggatacctgtgcggcagagttcgccaccgacaccgctta

SEQ ID NO: 286819 - DNA, 75 bp, synthetic construct
  source 1..75: mol_type = other DNA
cgctggcgtcgaaagcgaccggtttcccgattgccaaagtggcggcgaaactggcggtgggttacaccctcgacg

SEQ ID NO: 286820 - DNA, 75 bp, synthetic construct
  source 1..75: mol_type = other DNA
gcgaagcagaaatccgtaagctgcgtgaccagtatgacctgcatccggtctacaagcgcgtggatacttgtgcgg

SEQ ID NO: 286821 - DNA, 75 bp, synthetic construct
  source 1..75: mol_type = other DNA
gtgctggacgccatcacccagtttgagcgtagcgccaatttcgcttttgctggttttattctgcatgacgccgaa

SEQ ID NO: 286822 - DNA, 75 bp, synthetic construct
  source 1..75: mol_type = other DNA
gccatgaacgcagttctctgccgctcggcaagttttggtcaccgaaggcgttatcagccaggaaacgttggatcg

SEQ ID NO: 286823 - DNA, 75 bp, synthetic construct
  source 1..75: mol_type = other DNA
aacgtgcataaggtagtctgcgcgcgtcctggccccaccagcaaagccgactgcctgaacaacgtgctggacgcc

SEQ ID NO: 286824 - DNA, 75 bp, synthetic construct
  source 1..75: mol_type = other DNA
ccgcgtcattctggtgaactccaacccagcgaccatcatgaccgacccggaaatggctgatgcaacctacatcga

SEQ ID NO: 286825 - DNA, 75 bp, synthetic construct
  source 1..75: mol_type = other DNA
ggcgttgaaaccggtggttccaatgtccagtttgcggtgaacccgaaaaacggtcgcctgattgttatcgaaatg

SEQ ID NO: 286826 - DNA, 75 bp, synthetic construct
  source 1..75: mol_type = other DNA
ctgctggatcatttccttgatgacgcggtagaagttgatgtggacgccatctgcgacggcgaaatggtgctgatt

SEQ ID NO: 286827 - DNA, 75 bp, synthetic construct
  source 1..75: mol_type = other DNA
cccgattgccaaagtggcagcgaaactggcggtcggttataccctcgatgaactgatgaatgacatcactggcgg

SEQ ID NO: 286828 - DNA, 75 bp, synthetic construct
  source 1..75: mol_type = other DNA
acgaagtctacctgattgaagttaacccgcgtgcggcgcgtactgttccgttcgtctccaaagccaccggcgtac

SEQ ID NO: 286829 - DNA, 75 bp, synthetic construct
  source 1..75: mol_type = other DNA
tgattggtgccactgccgatgcgattgataaagccgaagaccgccgccgtttcgacgtagcgatgaagaaaatcg

SEQ ID NO: 286830 - DNA, 75 bp, synthetic construct
  source 1..75: mol_type = other DNA
ttattaactatggtcctgttcgcctgttgcgtaagtttaattcaaaatctgttttgcgttgtagttcaaatgaac

SEQ ID NO: 286831 - DNA, 75 bp, synthetic construct
  source 1..75: mol_type = other DNA
tgacgccaccgccgcgtgcgattctgtcgctgatcctgatcgtgggtatgatgaccatcgttcgctttggtgagc

SEQ ID NO: 286832 - DNA, 75 bp, synthetic construct
  source 1..75: mol_type = other DNA
agcaatggagatcatcagcgacactgcgcgcagcaacattccggcattaggttatgcgggcacttatgcaatagc

SEQ ID NO: 286833 - DNA, 75 bp, synthetic construct
  source 1..75: mol_type = other DNA
tatcggtctgatcaacctcggtcatatgctggaagcgcgtgcacgccagcgttcatcgaaggcgctggagaaatt

SEQ ID NO: 286834 - DNA, 75 bp, synthetic construct
  source 1..75: mol_type = other DNA
ctgtagatggcgttaagtatgagttaaaggattattatcctcgtgtgctagatgacgctgagttttatcacctta

SEQ ID NO: 286835 - DNA, 75 bp, synthetic construct
  source 1..75: mol_type = other DNA
gcgaggaacggttaaaagttcgattgaagattaaagaagctgttaagtctataaattgttacaagattgatacca

SEQ ID NO: 286836 - DNA, 75 bp, synthetic construct
  source 1..75: mol_type = other DNA
agatagcaggaggactaattgtgatcatccaaattggggctttcgtggtgatcaactggataaggctgtattgca

SEQ ID NO: 286837 - DNA, 75 bp, synthetic construct
  source 1..75: mol_type = other DNA
tggtcactgccgacaaccgcaacctgtggttggttatcggcctgattacgctggcggtgatggttttcgcgggtg

SEQ ID NO: 286838 - DNA, 75 bp, synthetic construct
  source 1..75: mol_type = other DNA
agcatcggtattccggtcgccgccggtattttgtggccgtttactggaacactgcttaacccggtagttgccgga

SEQ ID NO: 286839 - DNA, 75 bp, synthetic construct
  source 1..75: mol_type = other DNA
tgaagccgatatttctgcccaggcgtcgcaaggcgcaacccccgtgttgctggctgtcgacggtcaagcggtagc

SEQ ID NO: 286840 - DNA, 75 bp, synthetic construct
  source 1..75: mol_type = other DNA
tgttgccattgaaacagcggcgattaccctgatgcgccatagcctgatgggggttgcagacgcactcgccatctc

SEQ ID NO: 286841 - DNA, 75 bp, synthetic construct
  source 1..75: mol_type = other DNA
tactggccgttgatggcaaagcggtggctctgttggcggtacgcgatccattgcgtagcgatagcgtggcggcgc

SEQ ID NO: 286842 - DNA, 75 bp, synthetic construct
  source 1..75: mol_type = other DNA
accctgatgcgccatagcctgatgggtgttgcggatgcgctcgcgatttcccgcgcaacgctgcgcaacatgaag

SEQ ID NO: 286843 - DNA, 75 bp, synthetic construct
  source 1..75: mol_type = other DNA
atgaaaactaaactgtattcgtatattcgcttctcgtctatgaagcaagcggatggtagttcttatgaacgccag

SEQ ID NO: 286844 - DNA, 75 bp, synthetic construct
  source 1..75: mol_type = other DNA
atctggcagccgtggaagcactgagtgagaaatttggtaatctcgagctgatctttgtggaaagcggcggcgaca

SEQ ID NO: 286845 - DNA, 75 bp, synthetic construct
  source 1..75: mol_type = other DNA
cgggcggcattaccgcgtaacgtttgtggatccgtacacctcatatggtgccgggttcgttcaggcccactgtga

SEQ ID NO: 286846 - DNA, 75 bp, synthetic construct
  source 1..75: mol_type = other DNA
tgcaggcagggcaggtgatcagcggtgcaattctgattgtgacgactgagagactgacgcagggacagactggcc

SEQ ID NO: 286847 - DNA, 75 bp, synthetic construct
  source 1..75: mol_type = other DNA
gcaacagccagccgctcacggaggtgggcgacagcgacaggtcgatgtcctggctggcctgggagccatgtctga

SEQ ID NO: 286848 - DNA, 75 bp, synthetic construct
  source 1..75: mol_type = other DNA
tttctggcaacagccagccgctcccggaggtgggcgacagcgacagatagatatcctgtctggtcttggtgccat

SEQ ID NO: 286849 - DNA, 75 bp, synthetic construct
  source 1..75: mol_type = other DNA
cccccgacgtcgtaacggaacaggggatacgccgaatgttgatacaaatacagagattactacagagattacaac

SEQ ID NO: 286850 - DNA, 75 bp, synthetic construct
  source 1..75: mol_type = other DNA
gcggcaaccggcaaggctgaccgtgtaggctttagattcgaagacggtaaaaaaagtccgtttcttcaagtctaa

SEQ ID NO: 286851 - DNA, 75 bp, synthetic construct
  source 1..75: mol_type = other DNA
tcattgttgaaggtatcaatctggttaagaaacatcagaagccggttccggccctgaaccaaccgggtggcatcg

SEQ ID NO: 286852 - DNA, 75 bp, synthetic construct
  source 1..75: mol_type = other DNA
gatgacgctgagttttatcaccttaagaaaagcattggtgttagagcatgtaactttggagacaaagaagaagtt

SEQ ID NO: 286853 - DNA, 75 bp, synthetic construct
  source 1..75: mol_type = other DNA
cgggcgagattatcgtgtgacgtttgtcgacccgtatacggcgtacggtgccgggttcgttcaggcgcattgcga

SEQ ID NO: 286854 - DNA, 75 bp, synthetic construct
  source 1..75: mol_type = other DNA
cggttgatctctccccggaaagcaaagtactggtagagaaagcggtttctatggcccgcccctacaatgcgaaag

SEQ ID NO: 286855 - DNA, 75 bp, synthetic construct
  source 1..75: mol_type = other DNA
atgatattcaaatggaaatagacgagaagtttatgaatcgcaaaatttcatttcgtggttcctctttgctgacaa

SEQ ID NO: 286856 - DNA, 75 bp, synthetic construct
  source 1..75: mol_type = other DNA
cattgttacatggcgaccttcattcaggctcaatcatggtgaccgacacggataccaaagtgattgatccggagt

SEQ ID NO: 286857 - DNA, 75 bp, synthetic construct
  source 1..75: mol_type = other DNA
attgaaagctaaaggcatgaaacagaaagctgtagcggaggcgttaggcttagggattgcaacggttaaacgtaa

SEQ ID NO: 286858 - DNA, 75 bp, synthetic construct
  source 1..75: mol_type = other DNA
aacgaacaacgacaaagggatctgtaacttcaagactattgcacttaatagcctggaggataacgggaaaggaaa

SEQ ID NO: 286859 - DNA, 75 bp, synthetic construct
  source 1..75: mol_type = other DNA
tcaggacgatgtcatcattcggcgggtgtcggtcgtttgttttagtttatttttcgcagcaatctgctggcagcg

SEQ ID NO: 286860 - DNA, 75 bp, synthetic construct
  source 1..75: mol_type = other DNA
ccgttggcggctggatgacgctgccaccgggagagatcaaggccgactggaatgatttccatcgggagcacggta

SEQ ID NO: 286861 - DNA, 75 bp, synthetic construct
  source 1..75: mol_type = other DNA
gaggtaaaaattatcatcgccggtgataacgattttcaggacgggggtgagaatcccggcagagcctttgctgaa

SEQ ID NO: 286862 - DNA, 75 bp, synthetic construct
  source 1..75: mol_type = other DNA
aaacagaattacagcaggatggcgacggttggcggctgaacgggaaaaagaaatggatcacgctagggcagattg

SEQ ID NO: 286863 - DNA, 75 bp, synthetic construct
  source 1..75: mol_type = other DNA
ttgtcgtgctgctgataattgttgtgggatggtgcctggtattcgccagtaataaagatattgcgttcatctcaa

SEQ ID NO: 286864 - DNA, 75 bp, synthetic construct
  source 1..75: mol_type = other DNA
aagcaatcctttaggggcaagcatgaaaactttatcaaaatatgcccaggcatgcggtgctacgattaatattaa

SEQ ID NO: 286865 - DNA, 75 bp, synthetic construct
  source 1..75: mol_type = other DNA
cggctattttttcatccgtgcgccagaactgggcatttttgctattgcagcatttatcgcagggttgttctgtgt

SEQ ID NO: 286866 - DNA, 75 bp, synthetic construct
  source 1..75: mol_type = other DNA
ttttaatgctcgacgaacctgcggcaggtcttaacccgaaagaaacgaaagagctggatgagctgattgccgaac

SEQ ID NO: 286867 - DNA, 75 bp, synthetic construct
  source 1..75: mol_type = other DNA
atgcgtatttttctcttacttctgatgctatatggtttccaggcattagctgaacaattgccttcagtaactgac

SEQ ID NO: 286868 - DNA, 75 bp, synthetic construct
  source 1..75: mol_type = other DNA
ccatgccttgcctggacagtgctgatgatcgttgccatcattgtcctctggcgatttaccagccgtccaggacct

SEQ ID NO: 286869 - DNA, 75 bp, synthetic construct
  source 1..75: mol_type = other DNA
accagaaatacaggagaagcccgctttgccagccaggaaaaaggccgcaggaaaagaagcgggcgcggagcgata

SEQ ID NO: 286870 - DNA, 75 bp, synthetic construct
  source 1..75: mol_type = other DNA
tagcaagagaacggagaggcctgactcaaagagcgctagctgaagctgctggattaaccagcaagaccatttcta

SEQ ID NO: 286871 - DNA, 75 bp, synthetic construct
  source 1..75: mol_type = other DNA
actcggagccggaaagctcgcgcaagagctatcagcttggattgacgggcagtttaagcttcctaaacctaatgt

SEQ ID NO: 286872 - DNA, 75 bp, synthetic construct
  source 1..75: mol_type = other DNA
cggatttctgctgttctgggctatccgattgagttcttcctcgacagggatgtacctactctgtcgccagaagcc

SEQ ID NO: 286873 - DNA, 75 bp, synthetic construct
  source 1..75: mol_type = other DNA
gccggacatcggctgggtacgcgtgagattgaagagagtatctccagtcatccgggcttgccgaagtggcggtgg

SEQ ID NO: 286874 - DNA, 75 bp, synthetic construct
  source 1..75: mol_type = other DNA
cggggatcaacatccgcacatttgaggttgccgcaaccggtccgggcgtcgacaccccagcatgcctggaaaaag

SEQ ID NO: 286875 - DNA, 75 bp, synthetic construct
  source 1..75: mol_type = other DNA
agtggttgtgaatacccgccaggatgcgctttatttcagccgttcgccgattccgtatccgcgtaatgctgaaaa

SEQ ID NO: 286876 - DNA, 75 bp, synthetic construct
  source 1..75: mol_type = other DNA
cgagagatgcctttcgcgaagaaatgacgttgcatggcaaagggcagacccgtttacctgaaggattccggctga

SEQ ID NO: 286877 - DNA, 75 bp, synthetic construct
  source 1..75: mol_type = other DNA
cttgagcagcacgtagcgcattatcatggcgcaccattccgcgactggctgcattgcctgaccgctgatctgccg

SEQ ID NO: 286878 - DNA, 75 bp, synthetic construct
  source 1..75: mol_type = other DNA
caccagtgatgctgatggaagtaattacgggcgtttgctggaatgggaagataccaacggaaacagccgtaaatg

SEQ ID NO: 286879 - DNA, 75 bp, synthetic construct
  source 1..75: mol_type = other DNA
ctgcggaccaggcaccgtatcgctggcgctggctgacaaactcactacggtttatggcgttgattacagtcaggg

SEQ ID NO: 286880 - DNA, 75 bp, synthetic construct
  source 1..75: mol_type = other DNA
ccaacaggatgcccgtactatcgccccagccagtcgcgactgggcactcatttggtgggacagtgtgccgcagga

SEQ ID NO: 286881 - DNA, 75 bp, synthetic construct
  source 1..75: mol_type = other DNA
atgctcattgatgatattgattttgcagacctttatctgcagcaactcaagctggcccaccgcacagaaaaaacg

SEQ ID NO: 286882 - DNA, 75 bp, synthetic construct
  source 1..75: mol_type = other DNA
ttctggccggtattatccggtttcctcgtcgcagtcgcctatttattgatcggctatttcttcatccgcgcaccg

SEQ ID NO: 286883 - DNA, 75 bp, synthetic construct
  source 1..75: mol_type = other DNA
cagaaattcaggcgtggttgcagcaaaataaatactatcaatatcagctacctggtgccgggaaaccgcatctgt

SEQ ID NO: 286884 - DNA, 75 bp, synthetic construct
  source 1..75: mol_type = other DNA
agatatgctaccgattgcctgccagatgtttgccgagggaaaaactgtcgcggtggaacatgccgagccggttta

SEQ ID NO: 286885 - DNA, 75 bp, synthetic construct
  source 1..75: mol_type = other DNA
gcgaagtgttactgcccgctgcagaagatatgctgccgattgcgtgccagatgtttgccgagggtaaaacggtgg

SEQ ID NO: 286886 - DNA, 75 bp, synthetic construct
  source 1..75: mol_type = other DNA
gctggcctggctgggtgatttgtccatcaaggatgcctcaacgctgggcggcctgatgattggtgtactgatgct

SEQ ID NO: 286887 - DNA, 75 bp, synthetic construct
  source 1..75: mol_type = other DNA
ccggggcgctgtgcctgttctggtcgtggctggtggcacgatatatcgaccgtacacagccatctgtcggcggag

SEQ ID NO: 286888 - DNA, 75 bp, synthetic construct
  source 1..75: mol_type = other DNA
gcttacgtgttttaaaccttcttgctcgttcaaagaatgttttgctcacaggagctccggggacaggtaagtcaa

SEQ ID NO: 286889 - DNA, 75 bp, synthetic construct
  source 1..75: mol_type = other DNA
ctctgtgcacctttatggtcaggaagtgaacctgctgacatccgctattgctcgtatgaatatgttcctgcacga

SEQ ID NO: 286890 - DNA, 75 bp, synthetic construct
  source 1..75: mol_type = other DNA
ccgtttcaatattccctctgaagccagttgggaaaaggtacgcaataccagtaaaaacattggtgaagcgatcca

SEQ ID NO: 286891 - DNA, 75 bp, synthetic construct
  source 1..75: mol_type = other DNA
aaatgttcctgtgtatatagaaaaagaatttaaagatttaaatctctcaagggagataagtaaatggcaatcgtt

SEQ ID NO: 286892 - DNA, 75 bp, synthetic construct
  source 1..75: mol_type = other DNA
tggcatacgggcgcggccccggtagctttaccggcgtgcgcattggtattggcattgcgcaaggactggcacttg

SEQ ID NO: 286893 - DNA, 75 bp, synthetic construct
  source 1..75: mol_type = other DNA
atgacgaagtttataacgatgaagttcgccggacattattgcgtcaggctgcgccaccgggaatgaaggttaacg

SEQ ID NO: 286894 - DNA, 75 bp, synthetic construct
  source 1..75: mol_type = other DNA
aagtcgcactcaactaaaaaaacaaactaataaattattccaaagccttgcagagcttggatataacgttgaaag

SEQ ID NO: 286895 - DNA, 75 bp, synthetic construct
  source 1..75: mol_type = other DNA
ttatcacgtattgcatcgccgtcgtgctggcctggctgggtgatttgtccatcaaggatgcctcaacgctgggcg

SEQ ID NO: 286896 - DNA, 75 bp, synthetic construct
  source 1..75: mol_type = other DNA
tcgcccatcgtatggggattgtgttgtttcgtcccggcgcggaactgatgcacctctttatgcgcggtcgcgttc

SEQ ID NO: 286897 - DNA, 75 bp, synthetic construct
  source 1..75: mol_type = other DNA
ggtaaatgagacatacacccgctgggttaaaacacaaccctgtgagtgttgccgagggccagcagatgatccgca

SEQ ID NO: 286898 - DNA, 75 bp, synthetic construct
  source 1..75: mol_type = other DNA
gatgttattccggaaagcgttgcgcacagggggttgcgccttccggatgagaagatccgctctgtcatgagggaa

SEQ ID NO: 286899 - DNA, 75 bp, synthetic construct
  source 1..75: mol_type = other DNA
ggtgcgttatgaaaaaatttcaggtcagaaatttcccggacgatgcatatttcgccctagaacagttagcaaacg

SEQ ID NO: 286900 - DNA, 75 bp, synthetic construct
  source 1..75: mol_type = other DNA
atggatgagatattatatctgaatgggaaaagggtcagactaagaacgtgtaaccatgttttttctgagcgcctt

SEQ ID NO: 286901 - DNA, 75 bp, synthetic construct
  source 1..75: mol_type = other DNA
taagatccgctcggtcatgagggaaagcgacattgtgccttccgcttctgcaaccagcctcgtgcaggagaaggc

SEQ ID NO: 286902 - DNA, 75 bp, synthetic construct
  source 1..75: mol_type = other DNA
tggtgggcgtgctgggtgtgcttttgctggcgtatggcgcctggctgatttatcccccggcgggttttgttgttg

SEQ ID NO: 286903 - DNA, 75 bp, synthetic construct
  source 1..75: mol_type = other DNA
gattgaccaatgtggcatcgttggtgcggcagctggtagtctttttgtatttaaagggaagtatagggcagtatt

SEQ ID NO: 286904 - DNA, 75 bp, synthetic construct
  source 1..75: mol_type = other DNA
gaaaaggtctattctcaaagggctatgaactttcgacaaggaataacactcgcaagcataaaatcgatcccgtct

SEQ ID NO: 286905 - DNA, 75 bp, synthetic construct
  source 1..75: mol_type = other DNA
gattctggttttcccgagtcgcatatcctgacgcttccggaactgtgctggtggatggtcagaaacgacctggct

SEQ ID NO: 286906 - DNA, 75 bp, synthetic construct
  source 1..75: mol_type = other DNA
agtgtatatagcgaaagatgtgaacgcctttgcgatggcgaacggctgcatccgcgtctatagcggcctgatgga

SEQ ID NO: 286907 - DNA, 75 bp, synthetic construct
  source 1..75: mol_type = other DNA
ctgcatgatggtgatgaaaaagcagagtatgaaggctttcccggcaatttcttcctgaatgctgctaacaaagcg

SEQ ID NO: 286908 - DNA, 75 bp, synthetic construct
  source 1..75: mol_type = other DNA
tatcggtgcacgaggggatttattgcgatcagctgcaatggctttttacccgggagacagggctgtatacacgac

SEQ ID NO: 286909 - DNA, 75 bp, synthetic construct
  source 1..75: mol_type = other DNA
tatcggtgcacgaggggatttattgcgatcagttgcagtggctttttacccgggagaccgggctgtacacacgac

SEQ ID NO: 286910 - DNA, 75 bp, synthetic construct
  source 1..75: mol_type = other DNA
gtggtactgcgccgtatattgctgaaattatcaaacagaccaccccggacggagcagggcgtgtagcagctcatg

SEQ ID NO: 286911 - DNA, 75 bp, synthetic construct
  source 1..75: mol_type = other DNA
accgccactcatcgccccggtccgggaacgctggcttttcccgctcccgcaaccggacacggtattcagcggtga

SEQ ID NO: 286912 - DNA, 75 bp, synthetic construct
  source 1..75: mol_type = other DNA
gcagcactgattctggctgccgtcaccctgtatacagagagaaaaacgtatgaacaaaacaccgccactcatcgc

SEQ ID NO: 286913 - DNA, 75 bp, synthetic construct
  source 1..75: mol_type = other DNA
ggacaccctgctgaccaccgagggacaaccggcgtatccgggaatgccgttccagcatcagcttgcccccacggt

SEQ ID NO: 286914 - DNA, 75 bp, synthetic construct
  source 1..75: mol_type = other DNA
ggaactgtacagttactcagcgtctgagctatctgatgaagcattaaaagcccgtagtaattgctctaaaaatgt

SEQ ID NO: 286915 - DNA, 75 bp, synthetic construct
  source 1..75: mol_type = other DNA
ttcttaaccttatcagctactgagaacatggaatttgacagccctatgatggtgaccactcaaaatatgcaatca

SEQ ID NO: 286916 - DNA, 75 bp, synthetic construct
  source 1..75: mol_type = other DNA
tcagatgccgctaatgagcgagcttcaaaggcgcttaataatgctggtacaggtagtactttgaagaagtttagt

SEQ ID NO: 286917 - DNA, 75 bp, synthetic construct
  source 1..75: mol_type = other DNA
tcagatgccgctaatgagcaggcttcaaaagtgcttaagtcggggaatgctttacggaagttttctgttaatcct

SEQ ID NO: 286918 - DNA, 75 bp, synthetic construct
  source 1..75: mol_type = other DNA
ttctcagatgccgctaatgagcaagcttcaaaggtgcttaagtcgggtaatgctctacggaagttttctgtgaat

SEQ ID NO: 286919 - DNA, 75 bp, synthetic construct
  source 1..75: mol_type = other DNA
aggtgtagagtttcgttcaatcgtagggcaaactgatatttcagcagccactggcaaaacggctaccacaaatga

SEQ ID NO: 286920 - DNA, 75 bp, synthetic construct
  source 1..75: mol_type = other DNA
ctaatactccttcacatgaaaaacaattgagtattcctgtaaaatgcccatattctctcggtacaccaaaaatga

SEQ ID NO: 286921 - DNA, 75 bp, synthetic construct
  source 1..75: mol_type = other DNA
agaggaatggatcgtgaattcgaattcgtcgcggatgtggcggcaaacaaggcaaacgcattaatcccgcgatat

SEQ ID NO: 286922 - DNA, 75 bp, synthetic construct
  source 1..75: mol_type = other DNA
attacgccactgatggaattattcagaccaggaaaaacaggggttgcatcaggcaaaagggggattattcctcat

SEQ ID NO: 286923 - DNA, 75 bp, synthetic construct
  source 1..75: mol_type = other DNA
atatattataaataaatttgaaatggcccgtcataatggagatgagtatcgtcctaattctatttctttagaaca

SEQ ID NO: 286924 - DNA, 75 bp, synthetic construct
  source 1..75: mol_type = other DNA
ggtttatcaaataacgctatcaatgccgtcattttcaaccttgcctgccgcattgctccagattatgcgctggaa

SEQ ID NO: 286925 - DNA, 75 bp, synthetic construct
  source 1..75: mol_type = other DNA
tagcggtaaccagttggcgaagtggaatggttggaattacttccaccgaaaggaaccttgcgataacgggagcga

SEQ ID NO: 286926 - DNA, 75 bp, synthetic construct
  source 1..75: mol_type = other DNA
tctagatcacaaaattattcaaatagtaattgtgttagagttataaaatctataaacaaaatagccaacccaaaa

SEQ ID NO: 286927 - DNA, 75 bp, synthetic construct
  source 1..75: mol_type = other DNA
gtgcgttgaggcttgcccgacgaaggcgctgacgtttggcaatctggacgatcccaacagtgagatttcgcaact

SEQ ID NO: 286928 - DNA, 75 bp, synthetic construct
  source 1..75: mol_type = other DNA
gctcggatttaaaggacgttctttcaacggtcagcccgtagaacaattcgatgcctggcagaaagacgaccaaag

SEQ ID NO: 286929 - DNA, 75 bp, synthetic construct
  source 1..75: mol_type = other DNA
aaaggggatgatatggcgtttactcactcgatattgtgtcaggttggcctaccccgttctaaggtggatggccgc

SEQ ID NO: 286930 - DNA, 75 bp, synthetic construct
  source 1..75: mol_type = other DNA
gacaaccgctttctgttccgactggaacgtgcgccgggcagccactgccgctggcacagggggaaccgctcccgc

SEQ ID NO: 286931 - DNA, 75 bp, synthetic construct
  source 1..75: mol_type = other DNA
cggatggctggatgaaggtaatggcccggtagagcagccgctaccttatggggctatgccgcgactcacgttcgc

SEQ ID NO: 286932 - DNA, 75 bp, synthetic construct
  source 1..75: mol_type = other DNA
gggcgtgagtttatgcgccgttctggtgatgcctggctcgtcgtacaggcaggctggattgatgaaggcagtggc

SEQ ID NO: 286933 - DNA, 75 bp, synthetic construct
  source 1..75: mol_type = other DNA
tggtggtgtgaccagtaagaagaatgcaggtaacgtgaccactgaacgcaataacgcgcctatgctatcgtgcaa

SEQ ID NO: 286934 - DNA, 75 bp, synthetic construct
  source 1..75: mol_type = other DNA
ctttaccggcgtgcgcattggtattggtattgcgcaggggctggcgcttggcgcggatctgccgatgattggcgt

SEQ ID NO: 286935 - DNA, 75 bp, synthetic construct
  source 1..75: mol_type = other DNA
gtggcggtggaacatgccgaaccggtttatttacgtaacaacgtcgcgtggaagaaacttccgggcaaagaatga

SEQ ID NO: 286936 - DNA, 75 bp, synthetic construct
  source 1..75: mol_type = other DNA
acaacagtctgcgactgacagacgatgaaccgacgccggctaaacctcagccggcaacccgtcccgatcacctgg

SEQ ID NO: 286937 - DNA, 75 bp, synthetic construct
  source 1..75: mol_type = other DNA
cctttcagggtgtggtgcgatgagcacagcaataaagaagcgtaaccttgaggtgaagactcagatgagtgagac

SEQ ID NO: 286938 - DNA, 75 bp, synthetic construct
  source 1..75: mol_type = other DNA
gtggcggtggaacatgccgagccggtttatttacgtaacaacgtcgcatggaagaaacttccgggcaaagaatga

SEQ ID NO: 286939 - DNA, 75 bp, synthetic construct
  source 1..75: mol_type = other DNA
aatgggtgacggtagggacgggctggcaagcctggccggatctcggtaaagagagcgggctggttttgcgcgacg

SEQ ID NO: 286940 - DNA, 75 bp, synthetic construct
  source 1..75: mol_type = other DNA
ttggcaaaacattctttgctgagttaatgcattgcttcgcttgcaagcacaccataggttcgccacctccgttgg

SEQ ID NO: 286941 - DNA, 75 bp, synthetic construct
  source 1..75: mol_type = other DNA
atcggcgagcatacctggctgattgagaaagctggaatcgtggtccacaaatgcccacgcaatccgtttaccgga

SEQ ID NO: 286942 - DNA, 75 bp, synthetic construct
  source 1..75: mol_type = other DNA
atggatgagatattatatctgaatggaaaaagagtcaggttaagaacatgtaaccatgttttttctgaacgtctt

SEQ ID NO: 286943 - DNA, 75 bp, synthetic construct
  source 1..75: mol_type = other DNA
ctgccggacgccattacaccgggtaatgcggccgagcgccgggacatgctgctgtcggcggcgcggtataaccac

SEQ ID NO: 286944 - DNA, 75 bp, synthetic construct
  source 1..75: mol_type = other DNA
caatgccacgcttctgtgccgcaaaatcaatgagttgttgcatattcagtgcccggcgacggaggtggtctggct

SEQ ID NO: 286945 - DNA, 75 bp, synthetic construct
  source 1..75: mol_type = other DNA
gtaccttccagcggcgtatccaggtatgtattgacttaccgggtattcgccagcgttcggtcgaggagcagctcg

SEQ ID NO: 286946 - DNA, 75 bp, synthetic construct
  source 1..75: mol_type = other DNA
gacggtttactgcctgcatcaacgttatcttaatcgcactatgccggtaggcttgccgggtctggcagctgcctg

SEQ ID NO: 286947 - DNA, 75 bp, synthetic construct
  source 1..75: mol_type = other DNA
gcttcaggagcacgggcttaatcaggatgatatcttaatcacacctgtaacaagagaagaaatcgcctttaaagg

SEQ ID NO: 286948 - DNA, 75 bp, synthetic construct
  source 1..75: mol_type = other DNA
attttactcgcgaagttgcagaagatcgtcttgaacaacagttcgtacaggaaaaagcagaacagcaaaatcagc

SEQ ID NO: 286949 - DNA, 75 bp, synthetic construct
  source 1..75: mol_type = other DNA
cgaaagagaagtttggcggtgtgctcaaacttaccggaagcgaagagtttaagaaagaatgtgctcttgtagcgg

SEQ ID NO: 286950 - DNA, 75 bp, synthetic construct
  source 1..75: mol_type = other DNA
gcgctggacattgcctgggccagctataaagacacggcgctttctttcatcaccaccaacggcatcgtcgcgcca

SEQ ID NO: 286951 - DNA, 75 bp, synthetic construct
  source 1..75: mol_type = other DNA
gtaaggacggaattaaaattgatgattccattattacgagttttaaagcttctaaagatgttggtatttcaaatg

SEQ ID NO: 286952 - DNA, 75 bp, synthetic construct
  source 1..75: mol_type = other DNA
gatactcgccagtatttcagctaacgagcatatgatctccgggcttgaaaacttcctggttaaagaccgttctca

SEQ ID NO: 286953 - DNA, 75 bp, synthetic construct
  source 1..75: mol_type = other DNA
catatgaagaataccatactccagtgtatgcggtgtctttctcgaaggatgaattcagtgaagatattaagactt

SEQ ID NO: 286954 - DNA, 75 bp, synthetic construct
  source 1..75: mol_type = other DNA
aacaaacgtactaagccggaaaaactggaactgaaaaaattcgatccagttgttcgtcagcacgtgatctacaaa

SEQ ID NO: 286955 - DNA, 75 bp, synthetic construct
  source 1..75: mol_type = other DNA
ccgatttgcttaatcacggattcactcgtgaaatggcagaagatgctcttggaaaacaatttgtccaggccagag

SEQ ID NO: 286956 - DNA, 75 bp, synthetic construct
  source 1..75: mol_type = other DNA
aaatctctggatagcgatgaaaatgagatttgggaagtgctgggacatgtacctggagacagcgatgatattttt

SEQ ID NO: 286957 - DNA, 75 bp, synthetic construct
  source 1..75: mol_type = other DNA
ttccaggattgtttatcgcgatcaggaatcggaaaagcctgtctttaccgacaaagggaactttgtcgttgcggg

SEQ ID NO: 286958 - DNA, 75 bp, synthetic construct
  source 1..75: mol_type = other DNA
agcgtctttctgaactcgacacagaggggcgacacataattcgtcaatatcatgctgactggcataaggataaag

SEQ ID NO: 286959 - DNA, 75 bp, synthetic construct
  source 1..75: mol_type = other DNA
tttacggcagtggctgaaagcggatatcaacagcgaagactctcgcgtgaaggagcgtatcgcgcgggcaggtca

SEQ ID NO: 286960 - DNA, 75 bp, synthetic construct
  source 1..75: mol_type = other DNA
cgaaaattttgccgactgaatggctgggtgaacatagcgcagagctggtttctgacgcagttaattctttgcttg

SEQ ID NO: 286961 - DNA, 75 bp, synthetic construct
  source 1..75: mol_type = other DNA
ccgcgacttttatcgttacgctttttttgccgcccaatttttgggtgagcggcgtgaaggcgattgcggaggcgg

SEQ ID NO: 286962 - DNA, 75 bp, synthetic construct
  source 1..75: mol_type = other DNA
cgctgctggtgtgggcgtctggaaagttcgccaccttgctgacagcaaattacttattaaagaagagactatatt

SEQ ID NO: 286963 - DNA, 75 bp, synthetic construct
  source 1..75: mol_type = other DNA
gtgatgaggatttgcgggagcgcctgcaatcctcatcgttcagcgatatgctgtccggcttcaaagataaggtca

SEQ ID NO: 286964 - DNA, 75 bp, synthetic construct
  source 1..75: mol_type = other DNA
cgaaaattttgccaactgaatggctgggtgaacacagtgcggagctggtttccgatgcggtaaattccttgcttg

SEQ ID NO: 286965 - DNA, 75 bp, synthetic construct
  source 1..75: mol_type = other DNA
gccccggccaggagcgggcagagcaacatattgacctggcctatgccatcaccgctcacggtgcgcagggggcga

SEQ ID NO: 286966 - DNA, 75 bp, synthetic construct
  source 1..75: mol_type = other DNA
aaacagaaccgggtgaccgtacatccggagaaaagtgtcccccggacggccggctacagcgatgccgtcagtgtt

SEQ ID NO: 286967 - DNA, 75 bp, synthetic construct
  source 1..75: mol_type = other DNA
cattgtccgcgattataccggcaggacgccggaagcacgggaacagacgctgattgtcacgcatctgaatgagga

SEQ ID NO: 286968 - DNA, 75 bp, synthetic construct
  source 1..75: mol_type = other DNA
gtcatggcgatccgtcacctgttgaaaaagatggcctgactttagcgactaacaaaaccattctcacccggcaat

SEQ ID NO: 286969 - DNA, 75 bp, synthetic construct
  source 1..75: mol_type = other DNA
accgacagcgggcagcgaaccggtacaggcagtgcgctgatggccatgaaggatgccggggtgaacacatatcgc

SEQ ID NO: 286970 - DNA, 75 bp, synthetic construct
  source 1..75: mol_type = other DNA
ctgaccggtaatctggtgatggcactgtttaaccacgacaccagtcgcgatcaggaaccacagttacacacgcat

SEQ ID NO: 286971 - DNA, 75 bp, synthetic construct
  source 1..75: mol_type = other DNA
gtcgctgctgaccacgcaggcgtatacaggacgcccctggcctcttattgatggcgtcgggcagatttacggcat

SEQ ID NO: 286972 - DNA, 75 bp, synthetic construct
  source 1..75: mol_type = other DNA
aatgattgggtgttccattactcaggtagccagtcacacattaatttcaaaacggatgattacacgactaaacta

SEQ ID NO: 286973 - DNA, 75 bp, synthetic construct
  source 1..75: mol_type = other DNA
aaattaccttgaaactcaggaaattgatcctcgatatttctactacatcattttcggcctaaaaatcctctgtgc

SEQ ID NO: 286974 - DNA, 75 bp, synthetic construct
  source 1..75: mol_type = other DNA
ccatgagaccacacagtttgaaattgagtctgttatcgcccgctgccgttttcatcaggaacaggtgaagtccaa

SEQ ID NO: 286975 - DNA, 75 bp, synthetic construct
  source 1..75: mol_type = other DNA
tggcgtcgaatgaaaaaagttacatcaccgcgctgcaccagaacgcacagcggctgctgcgcccgctcaacgtgg

SEQ ID NO: 286976 - DNA, 75 bp, synthetic construct
  source 1..75: mol_type = other DNA
gggcgacaactggttaagaaagggaaagacttcaccacgctgtgcccgttccatgacgagaaaacgccgtcctgt

SEQ ID NO: 286977 - DNA, 75 bp, synthetic construct
  source 1..75: mol_type = other DNA
tcacgcatcgcggcagacatggcggcgtgtggcgtggtgggtgagtccaccaacctgacggcggcgtatctggcg

SEQ ID NO: 286978 - DNA, 75 bp, synthetic construct
  source 1..75: mol_type = other DNA
cgctttctataccaggtaattatgaagtaatagttcttgggaatggtgagtttatcgtaatgccattgccatctg

SEQ ID NO: 286979 - DNA, 75 bp, synthetic construct
  source 1..75: mol_type = other DNA
tttatcgtaatgccattgccatccgatgttattctgatcaccaaagaatcgcatgtggattcggtcagtcacttc

SEQ ID NO: 286980 - DNA, 75 bp, synthetic construct
  source 1..75: mol_type = other DNA
aaattacaggtggcgaagtgtcgctttcgctgctgaccacgcaggcatatacaggacgcccctggcctctgattg

SEQ ID NO: 286981 - DNA, 75 bp, synthetic construct
  source 1..75: mol_type = other DNA
atttctggcgattcccccagaaattggggagttaattatgcaatatacagcgagattcaagaaaaaacccgagga

SEQ ID NO: 286982 - DNA, 75 bp, synthetic construct
  source 1..75: mol_type = other DNA
atgcatcgacgaggtttccaaccaaacttccagcgttgcaccttgattggaggaacatcatttcatattgtcgag

SEQ ID NO: 286983 - DNA, 75 bp, synthetic construct
  source 1..75: mol_type = other DNA
tgatgataaatatataattaacaaaggggataaatgggctttcgattattcaggtagtcggcgatatcttgtttt

SEQ ID NO: 286984 - DNA, 75 bp, synthetic construct
  source 1..75: mol_type = other DNA
agccgggagccggaaatggtgaaccggtcacggcagaggtactggcacagcggcaggctgaagaggccatccgcc

SEQ ID NO: 286985 - DNA, 75 bp, synthetic construct
  source 1..75: mol_type = other DNA
tcactgaaagaccttgagcgggcttacaaaaacttcttccggaagcgggctgcttttccccgattcaaaaagcgg

SEQ ID NO: 286986 - DNA, 75 bp, synthetic construct
  source 1..75: mol_type = other DNA
gccggtaataaatacatcccttacgggaaaatggcttcctggctggttgagtggaaaaatgccactgaaacgtaa

SEQ ID NO: 286987 - DNA, 75 bp, synthetic construct
  source 1..75: mol_type = other DNA
agccggagaagagagcgtggcacaggtcagcggggtacgggaacaggccattctgacacaggccattcgcagtga

SEQ ID NO: 286988 - DNA, 75 bp, synthetic construct
  source 1..75: mol_type = other DNA
atcccttacgggaaaatggcttcctggctggttgagtggaaaaatgccactgaaacgcaatggcttaaagattct

SEQ ID NO: 286989 - DNA, 75 bp, synthetic construct
  source 1..75: mol_type = other DNA
tggggctgatggcgtgactgcgggtagcgtcctgctggttgatagcgttaacaaccgtactaacggttcgctgaa

SEQ ID NO: 286990 - DNA, 75 bp, synthetic construct
  source 1..75: mol_type = other DNA
tgccctcaatgtcggcgctcattacgtgctgtactcctgcgcctctggcaacgttaacgctccaccctacaaatg

SEQ ID NO: 286991 - DNA, 75 bp, synthetic construct
  source 1..75: mol_type = other DNA
actgtatgtggatgtggcaaaaggctatggcacagacctgctggtttcccgtgcgtcgtatgaggcagaaaagag

SEQ ID NO: 286992 - DNA, 75 bp, synthetic construct
  source 1..75: mol_type = other DNA
gaaaaatgccactgaaacgcaatggcttaaagattcgccctcacagccattgcaacagtcactgaaagaccctga

SEQ ID NO: 286993 - DNA, 75 bp, synthetic construct
  source 1..75: mol_type = other DNA
tcctgaacaaccgattagcgagaaaaagccgttaatgcaacctggccaatacgctgcggaacaggttgttacgct

SEQ ID NO: 286994 - DNA, 75 bp, synthetic construct
  source 1..75: mol_type = other DNA
gaaaccggaccgggaggtcatgaatgcagagcggctgttcagtacggcgcgggagctgcgggacgtggcggcagg

SEQ ID NO: 286995 - DNA, 75 bp, synthetic construct
  source 1..75: mol_type = other DNA
acagtgcgacggtttttgcctccgtcacacagatggcgatggacaacgccaccctgaacggtctggcccgcagcg

SEQ ID NO: 286996 - DNA, 75 bp, synthetic construct
  source 1..75: mol_type = other DNA
aaaggctatggcacaggcctgctggtttcccgtgcgtcgtatgaggcagaaaagagcattcttcgccatattctc

SEQ ID NO: 286997 - DNA, 75 bp, synthetic construct
  source 1..75: mol_type = other DNA
aaatggcttcctggctggttgagtggaaaaaagccactgaaacgcaatggcttaaagattcacccagtcacagcc

SEQ ID NO: 286998 - DNA, 75 bp, synthetic construct
  source 1..75: mol_type = other DNA
cccccacggaagcaggggagagaattattgcctgtcttgagccacgtatagatgagcttgagcgcgagctggaat

SEQ ID NO: 286999 - DNA, 75 bp, synthetic construct
  source 1..75: mol_type = other DNA
ctgtgactgaagctggcgagcggctactttcccgtataggaccccattttgacgaaattgaaagtgagatagctg

SEQ ID NO: 287000 - DNA, 75 bp, synthetic construct
  source 1..75: mol_type = other DNA
ggaaaaaagcttcacaaaagcggccgctcagttaggtgtctcacagtcggcgttgagctacacggtgaggactct

SEQ ID NO: 287001 - DNA, 75 bp, synthetic construct
  source 1..75: mol_type = other DNA
tatacattctttgaggctctacccgccaacccggcacctgtcagcattgagcgccttagagcaaggcttaatctc

SEQ ID NO: 287002 - DNA, 75 bp, synthetic construct
  source 1..75: mol_type = other DNA
agcttgatgttatcgagatccagccgcaaaaacagctatctgaactttactatgttgactataagcgaatcctga

SEQ ID NO: 287003 - DNA, 75 bp, synthetic construct
  source 1..75: mol_type = other DNA
cataatcaccctgccattctccgagtttgccgatcgatgcggctatccacgtaagcgcctttcaaaggcgttccg

SEQ ID NO: 287004 - DNA, 75 bp, synthetic construct
  source 1..75: mol_type = other DNA
tataaagccaaattaaatgctgggcaaactgctggtacttttgagactgcagcagcttatactgttacttatgag

SEQ ID NO: 287005 - DNA, 75 bp, synthetic construct
  source 1..75: mol_type = other DNA
aaatggcttcctggctggttgagtggaaaaaggccactgaaacgcaatggcttaaagattcgcccagtcacagcc

SEQ ID NO: 287006 - DNA, 75 bp, synthetic construct
  source 1..75: mol_type = other DNA
aaatggcttcctggctggttgagtggaaaaacgccactgaaacgcaatggcttaaagattcccccagtcacagcc

SEQ ID NO: 287007 - DNA, 75 bp, synthetic construct
  source 1..75: mol_type = other DNA
accgcgtcccccctatcatctttactaccccagtcgtctacagcattctccggcatttgcacttgtgctcgaagc

SEQ ID NO: 287008 - DNA, 75 bp, synthetic construct
  source 1..75: mol_type = other DNA
ttgacccgtacaacccgcagtgtggcaccgacagaaatgggagagcaaattattgcctgcctcgaacctcgcctt

SEQ ID NO: 287009 - DNA, 75 bp, synthetic construct
  source 1..75: mol_type = other DNA
tcctgtcctagatgtcgagttatcagcgggtaatggatgtttggctgaaatagttgaatcaactgtagactggtt

SEQ ID NO: 287010 - DNA, 75 bp, synthetic construct
  source 1..75: mol_type = other DNA
ttcttccgtggcgaacaggtgaaggcgatccataacaccaaatcattggttgaggcgttggtcgaacatgagggg

SEQ ID NO: 287011 - DNA, 75 bp, synthetic construct
  source 1..75: mol_type = other DNA
aggagttcccggcactgaaacgctgcatcgattttcattcacggatgcagcttgcagagctggattttacccaga

SEQ ID NO: 287012 - DNA, 75 bp, synthetic construct
  source 1..75: mol_type = other DNA
ggcaagatggaaggtacgtttaagcgtaagccggagcgttctgatctgtctgcggacattaacgaacacctgatc

SEQ ID NO: 287013 - DNA, 75 bp, synthetic construct
  source 1..75: mol_type = other DNA
gaatatgggagcaaaggataaagcggcaggaaaatcacggagtgatgtgcagcaacgtattcagcagtttcacag

SEQ ID NO: 287014 - DNA, 75 bp, synthetic construct
  source 1..75: mol_type = other DNA
cgcagaaacgcctgacagctggaaatgggatctgaacaccattcccgtgcgtatcattcctgtggaacaccatgc

SEQ ID NO: 287015 - DNA, 75 bp, synthetic construct
  source 1..75: mol_type = other DNA
tggcggttattgatgaaaataactgtattggctgcactaagtgtattcaggcgtgtccggtagacgccatcgttg

SEQ ID NO: 287016 - DNA, 75 bp, synthetic construct
  source 1..75: mol_type = other DNA
atctttggcaaaggatgaagtttatttagacactcacacgagagaagattttctagccgctcacaacgatacaga

SEQ ID NO: 287017 - DNA, 75 bp, synthetic construct
  source 1..75: mol_type = other DNA
atggacagccaggcactaagcgaaattttgtcacggtacgaagagtaccaagaactcaaagtggcggaaatgtga

SEQ ID NO: 287018 - DNA, 75 bp, synthetic construct
  source 1..75: mol_type = other DNA
gtctttccggtaccagacgttaatgtgccagtacgtttgggcacagtttcagcatcagcaggggagtaagaagct

SEQ ID NO: 287019 - DNA, 75 bp, synthetic construct
  source 1..75: mol_type = other DNA
atgaaaattcgcgccttattggtagcaatgagcgtggctacggtgctgaccggttgccagaatatggactccagt

SEQ ID NO: 287020 - DNA, 75 bp, synthetic construct
  source 1..75: mol_type = other DNA
ggcgtggaattaatttacctagtttccccagcctatcgaatgagcaagttatttatatttgtgaatctattaacg

SEQ ID NO: 287021 - DNA, 75 bp, synthetic construct
  source 1..75: mol_type = other DNA
agcaatccttgggagaagttcgcagtgttgaaacctcaagaataactgtgcgagtgactgacggccagcgtttac

SEQ ID NO: 287022 - DNA, 75 bp, synthetic construct
  source 1..75: mol_type = other DNA
acatataaacgtgttgatagcgaacagtttgtaaaactttttacagcaaatattggcttaacttttgagctatct

SEQ ID NO: 287023 - DNA, 75 bp, synthetic construct
  source 1..75: mol_type = other DNA
aaaatctacagacggtaatccaacgcagcggcttaacccagacagatctggcgttaaaatgtgagatatcaccct

SEQ ID NO: 287024 - DNA, 75 bp, synthetic construct
  source 1..75: mol_type = other DNA
aaccaaagaagctaacgttaatctcggggatctttatacacgcaatctgcaacaacctggttctgcatctggctg

SEQ ID NO: 287025 - DNA, 75 bp, synthetic construct
  source 1..75: mol_type = other DNA
ggtcgttctcaagcatgggttgcgcaacgcgatgatcccggtagtcacgatgatgggcttacagtttggcttttt

SEQ ID NO: 287026 - DNA, 75 bp, synthetic construct
  source 1..75: mol_type = other DNA
ctcatcaggagcggaagcttttcaggcttacagtttgagtgatgcgcaggtgaaaaccctgagcgatcaggcatg

SEQ ID NO: 287027 - DNA, 75 bp, synthetic construct
  source 1..75: mol_type = other DNA
catccgccgaacgcgcccaacatattcgcgatcgtatgagcgcggatggactggtggtgccgaacgtaggtcaga

SEQ ID NO: 287028 - DNA, 75 bp, synthetic construct
  source 1..75: mol_type = other DNA
attgccggtatgatctcggccaatcaaattaaacatgagaaacagcttgaaaagagaaaggtagcagagtcagat

SEQ ID NO: 287029 - DNA, 75 bp, synthetic construct
  source 1..75: mol_type = other DNA
ggcgacgtatctgttctatatgggctacatcaggttaattcacttcagcgccgggatggtttttaccgtggtttt

SEQ ID NO: 287030 - DNA, 75 bp, synthetic construct
  source 1..75: mol_type = other DNA
atgagacgttccggcagcaaactgtgtcttatcgccatgataacagcgacagcaactctcactgcctgtgctcca

SEQ ID NO: 287031 - DNA, 75 bp, synthetic construct
  source 1..75: mol_type = other DNA
gttctgggatatgggagctaaagataaagcgacaggaaaatcacggagtgatgtgcaacaacgcattcagcagtt

SEQ ID NO: 287032 - DNA, 75 bp, synthetic construct
  source 1..75: mol_type = other DNA
cggtgatatttggtatggcggcgggaattatcgccgccgtctggcgtaatcgttggccggatcgattgagtatga

SEQ ID NO: 287033 - DNA, 75 bp, synthetic construct
  source 1..75: mol_type = other DNA
tttgttcatatgctgcccggcgatccagcgcgattgattgccggaccagaagccgatgcgcaggtcatcgagctg

SEQ ID NO: 287034 - DNA, 75 bp, synthetic construct
  source 1..75: mol_type = other DNA
aatggggcgcagttctcgctggttggaaagtgaagtagtcatgtggtttaaagagaaaattaacgaatcccgcat

SEQ ID NO: 287035 - DNA, 75 bp, synthetic construct
  source 1..75: mol_type = other DNA
atgaatcaacaagacctgaactttgtcagaatagaactgcgtcgcgcgctacctgacctctctgggggaacaaaa

SEQ ID NO: 287036 - DNA, 75 bp, synthetic construct
  source 1..75: mol_type = other DNA
cgccgccagcttgagtacaagcagctctggcgtggcggtcaggtactggctgttccgccagcgtacacaagccag

SEQ ID NO: 287037 - DNA, 75 bp, synthetic construct
  source 1..75: mol_type = other DNA
cagacggaagccatccacgcggcgcagcgttacgcgcagacgctggaaggactgctggcgtcgaatgaaaaaagt

SEQ ID NO: 287038 - DNA, 75 bp, synthetic construct
  source 1..75: mol_type = other DNA
gggcgcggacaggttgcccttaagttgcccacatgttggggctaagttgggggcggtaaaaccgcctgtaagccg

SEQ ID NO: 287039 - DNA, 75 bp, synthetic construct
  source 1..75: mol_type = other DNA
gctctggcgtggcggtcaggtgcttgctgttccgccagcgtatacaagccagcgttgcgcgtactgtggtcatac

SEQ ID NO: 287040 - DNA, 75 bp, synthetic construct
  source 1..75: mol_type = other DNA
aagtcagcagcgggtacggtcagccagccggggcgcaatgtccgggcaaactcaggtttaaaccgttcgatactg

SEQ ID NO: 287041 - DNA, 75 bp, synthetic construct
  source 1..75: mol_type = other DNA
atgattgtcattgaggatttgaaggttaaatacatgtcaaagtcagcggcgggaacgataagtcatccgggtcgc

SEQ ID NO: 287042 - DNA, 75 bp, synthetic construct
  source 1..75: mol_type = other DNA
cacggcgttaagcaggtgctgatcgcctacgacaacgatccggcgggcaatgaggcagcggtgaaactggcttct

SEQ ID NO: 287043 - DNA, 75 bp, synthetic construct
  source 1..75: mol_type = other DNA
gtgtgcgccaggcggcgtatgcgctgaaactgttgcagtcggacggggaactgaccatcgccagtacgggtaagg

SEQ ID NO: 287044 - DNA, 75 bp, synthetic construct
  source 1..75: mol_type = other DNA
ggtccactgcatgcgccttgcggaaatggaatacctgttgatccacggcggcagccggggtcacctgctacaata

SEQ ID NO: 287045 - DNA, 75 bp, synthetic construct
  source 1..75: mol_type = other DNA
gggcgacaactggttaagaaggggaaggacttcaccacgctgtgcccgttccatgacgagaaaacgccgtcctgt

SEQ ID NO: 287046 - DNA, 75 bp, synthetic construct
  source 1..75: mol_type = other DNA
cttagtcgccgtggttcaggcgcaggggcgacaactggttaagaaggggaaggacttcaccacgctgtgcccgtt

SEQ ID NO: 287047 - DNA, 75 bp, synthetic construct
  source 1..75: mol_type = other DNA
tcggacaatcgaagcacacggaggcaggggctttggaaatacaggggaatgtattgaagttaaaacaaataaacc

SEQ ID NO: 287048 - DNA, 75 bp, synthetic construct
  source 1..75: mol_type = other DNA
agccagcgttgcgcgtgctgtggtcatacagcgaaagaaaaccgcctgacacaaagtaaattcgtgtgtcgggct

SEQ ID NO: 287049 - DNA, 75 bp, synthetic construct
  source 1..75: mol_type = other DNA
atctttccccggatattacctctactacccgagccgtaagcagcatccgcccgcttttgctctgatgatcgatgc

SEQ ID NO: 287050 - DNA, 75 bp, synthetic construct
  source 1..75: mol_type = other DNA
tgcaaatatttcttgtggtggcaagggagcgaagttttaccaaagccgcgggcaaactcggtgtttctcagtctg

SEQ ID NO: 287051 - DNA, 75 bp, synthetic construct
  source 1..75: mol_type = other DNA
tgtcgatattgttgaagggcgttttgatgccgggatacgtctgggtgaaactgttgataaggatatgattgcagt

SEQ ID NO: 287052 - DNA, 75 bp, synthetic construct
  source 1..75: mol_type = other DNA
tgcaaatctttcttgtggtggcgagggaacgaagttttaccaaagctgcgggcaaactaggcgtttctcagtctg

SEQ ID NO: 287053 - DNA, 75 bp, synthetic construct
  source 1..75: mol_type = other DNA
gaactggtggtggataacggttttgtcgatattgttgaaggtcgctttgatgccggggtacggctgggcgaaagc

SEQ ID NO: 287054 - DNA, 75 bp, synthetic construct
  source 1..75: mol_type = other DNA
ttcaggtgttgcaggagtggtgtccaacttttcccggatattatctttactaccccagccgcaagcagcatccgc

SEQ ID NO: 287055 - DNA, 75 bp, synthetic construct
  source 1..75: mol_type = other DNA
tgtcgatattgttgaaggtcgttttgatgccgggatacgtctgggtgaaactgtagataaagatatgattgcagt

SEQ ID NO: 287056 - DNA, 75 bp, synthetic construct
  source 1..75: mol_type = other DNA
tgtcgatattgttgaaggacgttttgatgccgggatacgtctgggtgaaactgttgataaagatatgattgcagt

SEQ ID NO: 287057 - DNA, 75 bp, synthetic construct
  source 1..75: mol_type = other DNA
ggaggaaaggctcaacatccgcctcctgacacggactacccgcagtgtggctcccacagaagcgggggagagaat

SEQ ID NO: 287058 - DNA, 75 bp, synthetic construct
  source 1..75: mol_type = other DNA
tgtcgatattgttgaaggccgttttgatgccgggatacgtctgggtgaaactgttgataacgatatgattgcagt

SEQ ID NO: 287059 - DNA, 75 bp, synthetic construct
  source 1..75: mol_type = other DNA
tgtcgatattgttgaaggtcgttttgatgccgggatacgtctgggtgaaactgtggataaggatatgattgcagt

SEQ ID NO: 287060 - DNA, 75 bp, synthetic construct
  source 1..75: mol_type = other DNA
tgtcgatattgttgaaggtcgttttgatgccgggatacgtctgggtgaaactgtcgataacgatatgattgcagt

SEQ ID NO: 287061 - DNA, 75 bp, synthetic construct
  source 1..75: mol_type = other DNA
cgcacccctgcctatgacgtaatgggcgcggcagcgttgttcttttcggcggagtccgggcagataaaccacgcc

SEQ ID NO: 287062 - DNA, 75 bp, synthetic construct
  source 1..75: mol_type = other DNA
aacgcccggcggcgctgtggggggtgcctatggtgcccctgctggctgtcacgggtgtaaccatcatcgttgctg

SEQ ID NO: 287063 - DNA, 75 bp, synthetic construct
  source 1..75: mol_type = other DNA
attatgtgatcacgcagtcttacacctgcatgtcacgcgaggaagcgaaaaaggccattaagcgtacccgtcgcc

SEQ ID NO: 287064 - DNA, 75 bp, synthetic construct
  source 1..75: mol_type = other DNA
tatgcagtcagccgtgaacataaacagtgcagcaagtggcggtacgcgcagcgttaccgaaacgcctcactatcg

SEQ ID NO: 287065 - DNA, 75 bp, synthetic construct
  source 1..75: mol_type = other DNA
aatgaaactatagaatttaaggaaacaagagaaagattgaaggaacttgaaaatagatataaatcattaacgagt

SEQ ID NO: 287066 - DNA, 75 bp, synthetic construct
  source 1..75: mol_type = other DNA
agaaagattgaaggaacttgaaaatagatataaattattaacaagtgaaactaaagaaaaattcaatgttttttt

SEQ ID NO: 287067 - DNA, 75 bp, synthetic construct
  source 1..75: mol_type = other DNA
ttgctacatgggaactcggcggcactatttttgagtgcgaagatgaagaccatctgacacatttaacagtccagc

SEQ ID NO: 287068 - DNA, 75 bp, synthetic construct
  source 1..75: mol_type = other DNA
ctaaccacagtttacctcgataaagaccgtggtgctgaaatcaatattcgcgcacttggaggaaagtactacagg

SEQ ID NO: 287069 - DNA, 75 bp, synthetic construct
  source 1..75: mol_type = other DNA
atttataccaatacgttgccagaatatatccttgcctgctctgcttactcaaacgctatatattgatctttattc

SEQ ID NO: 287070 - DNA, 75 bp, synthetic construct
  source 1..75: mol_type = other DNA
caccctcgacccctacgcccgccagatggtgatcatgaaatctccgctgcggcgtggtgacgtgcgcccgtatat

SEQ ID NO: 287071 - DNA, 75 bp, synthetic construct
  source 1..75: mol_type = other DNA
tatcggcatcgatggaacagagtttcttgatgataaagacgtgtgcgctccgatcacgttctacttactctatcg

SEQ ID NO: 287072 - DNA, 75 bp, synthetic construct
  source 1..75: mol_type = other DNA
acaaatgggaggacgctactaccgtattcgttccggggaaccaaccggctggaatccgttttcactggaaccgac

SEQ ID NO: 287073 - DNA, 75 bp, synthetic construct
  source 1..75: mol_type = other DNA
accggaaacgatcagaaaagggataatccccccgatgatcagtcaggcacttccgggcaaaacgcatcccctcct

SEQ ID NO: 287074 - DNA, 75 bp, synthetic construct
  source 1..75: mol_type = other DNA
gcccacgtattctgatcgcaaaaatgggtcaggatgggcacgatcgcggagcgaaagtcattgccagcgcctatt

SEQ ID NO: 287075 - DNA, 75 bp, synthetic construct
  source 1..75: mol_type = other DNA
tattgtcgccgcagaagagcaaggtgttacacctgataaactgaccggcaccattcaaaacgatatcctcaaaga

SEQ ID NO: 287076 - DNA, 75 bp, synthetic construct
  source 1..75: mol_type = other DNA
gccgctcgcgttcgcgccaccctgggtgaaatttccgatgcgctggaagttatctggtgccaagccagtgtgtta

SEQ ID NO: 287077 - DNA, 75 bp, synthetic construct
  source 1..75: mol_type = other DNA
cccggacgtgatctctgctggctcctgactcgtcatcctgaaaagccggaataccacgtggtgctgtgcgtcaga

SEQ ID NO: 287078 - DNA, 75 bp, synthetic construct
  source 1..75: mol_type = other DNA
gttcagtgatttcgcccgcgatcgtcgtggtgtgtgcgatccggaagcccgttgcctcgccggtaatcccggcta

SEQ ID NO: 287079 - DNA, 75 bp, synthetic construct
  source 1..75: mol_type = other DNA
ccgtagaagatatgaaggtgctgttcgaccaaattccactggataaaatgtcggtgtcaatgaccatgaacggcg

SEQ ID NO: 287080 - DNA, 75 bp, synthetic construct
  source 1..75: mol_type = other DNA
acagatgtttgctgacctgagtctggaaaaccgggcgctgaaagacgttatcgaaaaaagctttaaaatcagcct

SEQ ID NO: 287081 - DNA, 75 bp, synthetic construct
  source 1..75: mol_type = other DNA
atggccgaacggggcagccagctgctgacccgccaggcagagagcgaaccttaccgtcaggtgacagtatcacgg

SEQ ID NO: 287082 - DNA, 75 bp, synthetic construct
  source 1..75: mol_type = other DNA
cgtcaggggatccagctgataccggcactgacccgcgtaccggcttacatcgacaccgaagtggactctgacaat

SEQ ID NO: 287083 - DNA, 75 bp, synthetic construct
  source 1..75: mol_type = other DNA
atgaaggggtgtataacagccagacgggaaaatacgataaacatcgcgcacgttcttttttagccgccagttggc

SEQ ID NO: 287084 - DNA, 75 bp, synthetic construct
  source 1..75: mol_type = other DNA
atgtgcggattgaaggcgcgggtatcttaggtggtatgaactatcgggtcagcgaagggccgttacaagggatga

SEQ ID NO: 287085 - DNA, 75 bp, synthetic construct
  source 1..75: mol_type = other DNA
tccagatacgggagtatggaggcttctgatattaaaaagatcaaggaccttgaggacgagaaccgacgtctcaaa

SEQ ID NO: 287086 - DNA, 75 bp, synthetic construct
  source 1..75: mol_type = other DNA
tttagcggcgctgaacctggtggccttgagattcctttttggcctgtgactgtgtttatcgctttcttcgacgct

SEQ ID NO: 287087 - DNA, 75 bp, synthetic construct
  source 1..75: mol_type = other DNA
ccatgaaaaatctggatgcaattgatcgccgtgccgttccccgggcctctgccacgacactgaaccgcgttgcgg

SEQ ID NO: 287088 - DNA, 75 bp, synthetic construct
  source 1..75: mol_type = other DNA
aggcttttgatgagaacgttaaccgtatccggcgagaacgtctgccaaaagaactgagctatgcgctgaaacaac

SEQ ID NO: 287089 - DNA, 75 bp, synthetic construct
  source 1..75: mol_type = other DNA
atccggcgtgaacgcctgcccggagaactggcatacgcgctgaaacaacaactgaggattgcgataaaacgatga

SEQ ID NO: 287090 - DNA, 75 bp, synthetic construct
  source 1..75: mol_type = other DNA
cgccggaaactggttaaggaacggtccagactgaaacgggcgacggtcagaaatccgaatgccaaaattatcgtt

SEQ ID NO: 287091 - DNA, 75 bp, synthetic construct
  source 1..75: mol_type = other DNA
taaaaacgccattccggcggcttcagcaatggccattaaccgcgtggctacaacggcgattaatcagtcttcatc

SEQ ID NO: 287092 - DNA, 75 bp, synthetic construct
  source 1..75: mol_type = other DNA
cgattgaaaatctgagccgggttcgtaaaaacgccattccgtcggcttcagcaatggctattaaccgcgtggcca

SEQ ID NO: 287093 - DNA, 75 bp, synthetic construct
  source 1..75: mol_type = other DNA
gcaatggccattaaccgcgtggccacaacggcgattaatcagtcttcgtctcaggtcgcccgtgaaaccagggtg

SEQ ID NO: 287094 - DNA, 75 bp, synthetic construct
  source 1..75: mol_type = other DNA
caaattgtgggacagtttttatgtggacgtctcctgggatgcgctgaatgtggcatacagtgaacaccctgagtg

SEQ ID NO: 287095 - DNA, 75 bp, synthetic construct
  source 1..75: mol_type = other DNA
ccgatgaaattcctaaccctgttgccgctatcattgcctgcctgctaatggggaaattccgctgtatcgatgccg

SEQ ID NO: 287096 - DNA, 75 bp, synthetic construct
  source 1..75: mol_type = other DNA
ccgcgatctcattcgtgaataccgtcttaccgggcgtgcgcgtcgtctggctattcgtcccggttcaccgatgat

SEQ ID NO: 287097 - DNA, 75 bp, synthetic construct
  source 1..75: mol_type = other DNA
tatgccggacaggcggataaccgtaaccgggtggcagaaattgttacccgcaaattgcaggacagcttttatatc

SEQ ID NO: 287098 - DNA, 75 bp, synthetic construct
  source 1..75: mol_type = other DNA
ggcttacggcactgacggtccggtcgcggcgctggggctgcaaaccttaagcgatccgcaaggcgtgcaacctat

SEQ ID NO: 287099 - DNA, 75 bp, synthetic construct
  source 1..75: mol_type = other DNA
tgggatgcgctgaacgcggcatacagtgaacacccggagaggttttctgggcttgtctccggggatgagaattaa

SEQ ID NO: 287100 - DNA, 75 bp, synthetic construct
  source 1..75: mol_type = other DNA
agcgcaatggcgtggcgctggaaggttcgctggcggatgagcctcgctgctgggcgatatcatcctggttgtggg

SEQ ID NO: 287101 - DNA, 75 bp, synthetic construct
  source 1..75: mol_type = other DNA
tcattagtgcgttctcaacaatgcacagtctggtcatcggacagatcaagacggatgagaaatctaatgagatta

SEQ ID NO: 287102 - DNA, 75 bp, synthetic construct
  source 1..75: mol_type = other DNA
ctgtcgctgaaaaatcctgctgcgatgtacctggcttgacccggcagagaaagaggcccgtcgtttgcatctgca

SEQ ID NO: 287103 - DNA, 75 bp, synthetic construct
  source 1..75: mol_type = other DNA
gtaactggaaactgatagggatgttggcaaaacaggggcgtgatttcgtggcgctgaatttgccggaagaggtga

SEQ ID NO: 287104 - DNA, 75 bp, synthetic construct
  source 1..75: mol_type = other DNA
ctcgcctgatgatgcccttgagttttgccgggttgatcagcggtatgatgaccctggtggcgacgccgcctaacc

SEQ ID NO: 287105 - DNA, 75 bp, synthetic construct
  source 1..75: mol_type = other DNA
gtgacgttttgcttattgatatgtctgcggctgatgtcgatctccggcaattttgtagtgagcaattgctggagc

SEQ ID NO: 287106 - DNA, 75 bp, synthetic construct
  source 1..75: mol_type = other DNA
ggtgacggataccgaggcactgcatagcgccgcactagacgcggcagaagtaaagcgccagtcgctgattgatgc

SEQ ID NO: 287107 - DNA, 75 bp, synthetic construct
  source 1..75: mol_type = other DNA
tcagctcgccattgcgaccttaaagtcgttgcggtctctgcgattaccaatatggcggaaggtttaagcgatgtg

SEQ ID NO: 287108 - DNA, 75 bp, synthetic construct
  source 1..75: mol_type = other DNA
ggcgggatcactgcgtccggaggtgggggcgggcagtctggttgcgctgaaagaccacatcaacaccatgccggg

SEQ ID NO: 287109 - DNA, 75 bp, synthetic construct
  source 1..75: mol_type = other DNA
aagacgcgggaatatctttccacatcaactgaatatcttgctgttggcgtcggtatcccggcatgttcttgttta

SEQ ID NO: 287110 - DNA, 75 bp, synthetic construct
  source 1..75: mol_type = other DNA
gcacagcatagcgccgcagtagacgcggcagaagtacagcgtcagtcactgattaatactgcaatggcttccatt

SEQ ID NO: 287111 - DNA, 75 bp, synthetic construct
  source 1..75: mol_type = other DNA
agcaatggcttccattagtctgattcagctgaaattacgggccgggcggaaactgacgcaggcagaaacaacccg

SEQ ID NO: 287112 - DNA, 75 bp, synthetic construct
  source 1..75: mol_type = other DNA
ggtctttccgttgcgtttgaccttgccacccaccgtggctacgactccgataacccgcgcgtggcgggcgacgtc

SEQ ID NO: 287113 - DNA, 75 bp, synthetic construct
  source 1..75: mol_type = other DNA
gatgctccaggcgcatacaaagctggttatacaatctgccgttctgcagattttaactcatgggaatatgtgcca

SEQ ID NO: 287114 - DNA, 75 bp, synthetic construct
  source 1..75: mol_type = other DNA
ctcactggcggcgggtcataaaacgttgataccagaactggttacagcattgaagaaatggggacgtgaagacat

SEQ ID NO: 287115 - DNA, 75 bp, synthetic construct
  source 1..75: mol_type = other DNA
ggtgcctgaggttatttcagctcgccattgtagattcaatctgtcaatgcaacacccctttcaattatctctttc

SEQ ID NO: 287116 - DNA, 75 bp, synthetic construct
  source 1..75: mol_type = other DNA
atgtctcaggctcaattttctcataacccgctgtattgcgtcgatattatccaggcttataaaccagatttcaca

SEQ ID NO: 287117 - DNA, 75 bp, synthetic construct
  source 1..75: mol_type = other DNA
catgcgcaaacgctggcggctgcggagctctctaagcagaacttcatcaaccttatttgtggctttctgcgcaaa

SEQ ID NO: 287118 - DNA, 75 bp, synthetic construct
  source 1..75: mol_type = other DNA
ggcggccactctgggcggaacgcaatcgctacatactaacgcatttgatgaagcgcttggtctgcccaccgattt

SEQ ID NO: 287119 - DNA, 75 bp, synthetic construct
  source 1..75: mol_type = other DNA
gttatgctatctgtcgttctgcaaattttaactcatgggaatatgtgccagaccatcgcggtgaaatcgtctata

SEQ ID NO: 287120 - DNA, 75 bp, synthetic construct
  source 1..75: mol_type = other DNA
caactgaatatcttgctgtgggtgtcggtattccggcattttcctgtctggaggcacctggcatatacaaggctg

SEQ ID NO: 287121 - DNA, 75 bp, synthetic construct
  source 1..75: mol_type = other DNA
aaagatgatgccagctatgccgtgaaacccacctgctggcccgggctggatatcattccatcatgcctagcatta

SEQ ID NO: 287122 - DNA, 75 bp, synthetic construct
  source 1..75: mol_type = other DNA
gttatgcaatttgccgttctgcagattttaactcatgggaatatgtgccagaccatcgcggtgaaacggtctata

SEQ ID NO: 287123 - DNA, 75 bp, synthetic construct
  source 1..75: mol_type = other DNA
gattatatagacgcactgaacgcaatggatataaacatggcatcagatatcaactggccggaaataccactggca

SEQ ID NO: 287124 - DNA, 75 bp, synthetic construct
  source 1..75: mol_type = other DNA
gaccatcgcggtgaaatcgtctataacaccgaaacgggagacgccaaagaaatcacaactccgggtgattacccc

SEQ ID NO: 287125 - DNA, 75 bp, synthetic construct
  source 1..75: mol_type = other DNA
tatcattccgtcctgcctggcactgcatcgcattgaaactgaactgatgggcaaatttgatgaaggaaaactgcc

SEQ ID NO: 287126 - DNA, 75 bp, synthetic construct
  source 1..75: mol_type = other DNA
cggcagaaatccaacgccagtcactgattgatgctgcaatggcttccattagtctgattcagctgaaattacggg

SEQ ID NO: 287127 - DNA, 75 bp, synthetic construct
  source 1..75: mol_type = other DNA
aatttattgccacggaacccggctttattaacgtttataactacaacggagaaacgcggggatatatttccacat

SEQ ID NO: 287128 - DNA, 75 bp, synthetic construct
  source 1..75: mol_type = other DNA
ccggcgcttggagaaatgccctttctatctgggaaccagtctgcaatgaaattttcgagcgtttgattaaaccac

SEQ ID NO: 287129 - DNA, 75 bp, synthetic construct
  source 1..75: mol_type = other DNA
agggactacgaattctgcttgtggaaggtaacgatccccaaggaacagcatcgatgtatcacggatgggtgccag

SEQ ID NO: 287130 - DNA, 75 bp, synthetic construct
  source 1..75: mol_type = other DNA
caccgacccgcatctgatgctccgccttgctattgaaacggtcgctcatgactatgatgtgattgttatcgacag

SEQ ID NO: 287131 - DNA, 75 bp, synthetic construct
  source 1..75: mol_type = other DNA
gatgctcctggcacacataaggttggttatgcaatctgccgttcggcagatttaaactcatgggaatatgtgcca

SEQ ID NO: 287132 - DNA, 75 bp, synthetic construct
  source 1..75: mol_type = other DNA
tcgcctgcgatctgcgcgcgctgaagaacgacagcgcgattgttttgctggcgctgccgcttgcacatggtaacg

SEQ ID NO: 287133 - DNA, 75 bp, synthetic construct
  source 1..75: mol_type = other DNA
accccgaactggtctggcgggagctggcgaggcttgccggtgcgctgctgacgttttcccttgaacataacgtca

SEQ ID NO: 287134 - DNA, 75 bp, synthetic construct
  source 1..75: mol_type = other DNA
tgacccgtcatccggaaaagccggaataccacgtggtgctgtgcgtcagacaggagtatttcgacggccccgaac

SEQ ID NO: 287135 - DNA, 75 bp, synthetic construct
  source 1..75: mol_type = other DNA
ataccatgtggtgctgtgcgtcagacaggagtatttcgacggccccgaactggatcggttgatactggatgcctg

SEQ ID NO: 287136 - DNA, 75 bp, synthetic construct
  source 1..75: mol_type = other DNA
tgggcgttcagtgatttcgcccgcgatcgtcgtggtgtgtgcgatccggaagcccgttgcctcgccggtaatccc

SEQ ID NO: 287137 - DNA, 75 bp, synthetic construct
  source 1..75: mol_type = other DNA
tggaagccagcctgccgtcacgggtgatcgcgctggatctggcgtccctgccgggcaaccgctggaaagcagacc

SEQ ID NO: 287138 - DNA, 75 bp, synthetic construct
  source 1..75: mol_type = other DNA
cccttgatggtcgcgtcaaactgaaagtgcctggcgaaacccagaccggtaagctgttccgtatgcgcggtaaag

SEQ ID NO: 287139 - DNA, 75 bp, synthetic construct
  source 1..75: mol_type = other DNA
cccggacgtgatctctgctggctcctgacccgtcatcctgaaaagccggaataccacgtggtgttatgcgtcaga

SEQ ID NO: 287140 - DNA, 75 bp, synthetic construct
  source 1..75: mol_type = other DNA
gacatcctcaaagagctgatatgggcgttcagtgatttcgcccgcgatcgtcgtggtgtgcgcgatccggaagcc

SEQ ID NO: 287141 - DNA, 75 bp, synthetic construct
  source 1..75: mol_type = other DNA
tgacccgtcatccggaaaagccggaataccacgtggtgctgtgtgtcagacaggagtatttcgacggccctgaac

SEQ ID NO: 287142 - DNA, 75 bp, synthetic construct
  source 1..75: mol_type = other DNA
tcctgcttcgtctgccgtgggaacatgacaacgccttcaacagcagacagacctggtttggtatggattttatcg

SEQ ID NO: 287143 - DNA, 75 bp, synthetic construct
  source 1..75: mol_type = other DNA
tgacccgtcatcctgaaaaacctgaataccacgtggtgctgtgcgtcagacaggagtatttcgatggccctgaac

SEQ ID NO: 287144 - DNA, 75 bp, synthetic construct
  source 1..75: mol_type = other DNA
cgttcagtgatttcgcccgcgatcgtcgtggtgtgcacgatccggaagcccgttacctcgccagtaatccctggt

SEQ ID NO: 287145 - DNA, 75 bp, synthetic construct
  source 1..75: mol_type = other DNA
aatcttaagctgggtacagggaagtaccgaccattacgcaatgtcgatatcgaatcgtacaaaaaacagtcttag

SEQ ID NO: 287146 - DNA, 75 bp, synthetic construct
  source 1..75: mol_type = other DNA
ccgttgaagatatgaaggtgctattcgaccagatcccgctggatcaaatgtcggtttcgatgactatgaacgggg

SEQ ID NO: 287147 - DNA, 75 bp, synthetic construct
  source 1..75: mol_type = other DNA
ccaaccggtgagcacaacagcccgcgttcaaagagcttctttgatggtgtgaagaagttttttgacgacctgact

SEQ ID NO: 287148 - DNA, 75 bp, synthetic construct
  source 1..75: mol_type = other DNA
gattacattgacgcggtgacggcaacagataccagcaccgcgccggatgtcatctggcctgaactgccggaggtg

SEQ ID NO: 287149 - DNA, 75 bp, synthetic construct
  source 1..75: mol_type = other DNA
gattacattgacgcggtgatggcaacggataccagcactgtacctgatatttactggcccgaattacctcaattt

SEQ ID NO: 287150 - DNA, 75 bp, synthetic construct
  source 1..75: mol_type = other DNA
tactgattgtccccacacctgctgagttgtttgactatacttctgcgctgcaatttttcgatatgcttcgtgatc

SEQ ID NO: 287151 - DNA, 75 bp, synthetic construct
  source 1..75: mol_type = other DNA
tgccgaacccaccagcaatgcaaagtatgtcgctttcgaaacaatttatgcaccggaacagatgccaggccagca

SEQ ID NO: 287152 - DNA, 75 bp, synthetic construct
  source 1..75: mol_type = other DNA
ctgaaaacgttaggcatcagcgcagctgcactttctctgccaaccactacacatgccgacctgcttagctggttt

SEQ ID NO: 287153 - DNA, 75 bp, synthetic construct
  source 1..75: mol_type = other DNA
ggatcgccggtcaccggactgcgaagccctgtttaaggaccttatcagggcgttcagtgatttcgcccgcgatcg

SEQ ID NO: 287154 - DNA, 75 bp, synthetic construct
  source 1..75: mol_type = other DNA
gataaaaatgagaacagtatttgaacaagcagcaaaccaacgttcaacattgaatgcatggagaaatgctgtttc

SEQ ID NO: 287155 - DNA, 75 bp, synthetic construct
  source 1..75: mol_type = other DNA
ggcacccttcctggcttgccgccctacgttcgtggcccccgcgccaccatgtacacagcccagccatggaccatc

SEQ ID NO: 287156 - DNA, 75 bp, synthetic construct
  source 1..75: mol_type = other DNA
aacagtatgcgagcagtttttggcaacccaaaccaacgaccacaagataaaaaccctgttgtgcttgccgttatg

SEQ ID NO: 287157 - DNA, 75 bp, synthetic construct
  source 1..75: mol_type = other DNA
agcaattccgacgatgcggatgattttctggaggaggccggacgaacgttacaggccgcaataaaaggtctgctc

SEQ ID NO: 287158 - DNA, 75 bp, synthetic construct
  source 1..75: mol_type = other DNA
tttcattgcaggtcattaacggcagtgagctggaaagcgggcgggcggcgcgctgtctgttcacgcagcagggaa

SEQ ID NO: 287159 - DNA, 75 bp, synthetic construct
  source 1..75: mol_type = other DNA
tatctccatttactgagcgatctgacccatctcggcgctgcaggtgcctggacaggtgctctggttgcatttgct

SEQ ID NO: 287160 - DNA, 75 bp, synthetic construct
  source 1..75: mol_type = other DNA
atgagatcgaacatgcccgtcgtttggctctggcaggtaaaattgaagagttcacacaatttgtgaactcttgcc

SEQ ID NO: 287161 - DNA, 75 bp, synthetic construct
  source 1..75: mol_type = other DNA
cacggaacgcatgacaagggttctaagatgtgcttccagggcactgtatcatcatttgaaattgtgtaacggatt

SEQ ID NO: 287162 - DNA, 75 bp, synthetic construct
  source 1..75: mol_type = other DNA
ggcaccgctgtccgatccggcaagtaatggcgggatcaatacgccgtttatggatctgccgcccatttatgccag

SEQ ID NO: 287163 - DNA, 75 bp, synthetic construct
  source 1..75: mol_type = other DNA
tcccaacagacatcagcaagaaaattcgcgaaatagaagagtcctacaacagatatataaatgaatttcgcatcc

SEQ ID NO: 287164 - DNA, 75 bp, synthetic construct
  source 1..75: mol_type = other DNA
ttgttattattcacttgttgggaacacacatcaaatataaataccgttatcctgaaggtcagggagtattcgatg

SEQ ID NO: 287165 - DNA, 75 bp, synthetic construct
  source 1..75: mol_type = other DNA
ccaaaaaattactcgacgtagtcagtctggacccgaaacacgggcaatatctgatcccgattgaaaatattatgg

SEQ ID NO: 287166 - DNA, 75 bp, synthetic construct
  source 1..75: mol_type = other DNA
gacgtgaattatcacgttcacgtgcagcgcgtcaggaaaggctgcgtgatattgaccagcgtatcaatgacgagt

SEQ ID NO: 287167 - DNA, 75 bp, synthetic construct
  source 1..75: mol_type = other DNA
ccagaccagcttctttgggctggaatggataagatcgtttcacccatcgctaagtttgttaacgaaaacacttcc

SEQ ID NO: 287168 - DNA, 75 bp, synthetic construct
  source 1..75: mol_type = other DNA
tggtttgtcgtaaatggtcggcaagcgtgggggcgttatgggtgactgtaacggccgattttgaacaggtggtga

SEQ ID NO: 287169 - DNA, 75 bp, synthetic construct
  source 1..75: mol_type = other DNA
aagccatcgttatcaccagccgcggtgggatccacaaagatggaccaacggacctggtgacgccgtatctgtcca

SEQ ID NO: 287170 - DNA, 75 bp, synthetic construct
  source 1..75: mol_type = other DNA
ggatacccgaacactcacaccagcaccagaaggtctgacttatactgtaaatggtcgggcacttccggcaaaaga

SEQ ID NO: 287171 - DNA, 75 bp, synthetic construct
  source 1..75: mol_type = other DNA
cgtatgaacacaccattgaccgtgcggagcagattacggcttcagtcaatgagctaagtgaaagcaaaatggctg

SEQ ID NO: 287172 - DNA, 75 bp, synthetic construct
  source 1..75: mol_type = other DNA
gatctctcacggtattgataatgccaactatggtattaacagcacagctggttcaggggaagacagccatcctta

SEQ ID NO: 287173 - DNA, 75 bp, synthetic construct
  source 1..75: mol_type = other DNA
gctggcagacgaggttcgtgaggctgtgactggattcaataccagtgaactcgacttaggaccactctaccggta

SEQ ID NO: 287174 - DNA, 75 bp, synthetic construct
  source 1..75: mol_type = other DNA
ctgaaacgtttgtcacccgactggacatgttgcgagcgctggataacagaggggcaacccggagactctacacaa

SEQ ID NO: 287175 - DNA, 75 bp, synthetic construct
  source 1..75: mol_type = other DNA
atgggtgagaggcgagtaatgtttgatgccgcagagattttggcatggagcaaaaaacaagcaaaaaatcgataa

SEQ ID NO: 287176 - DNA, 75 bp, synthetic construct
  source 1..75: mol_type = other DNA
gacggccggcgcgttcatcggggagcactggggtattgcagccctcacgctgaccggcttgtttgtcctgtctgt

SEQ ID NO: 287177 - DNA, 75 bp, synthetic construct
  source 1..75: mol_type = other DNA
ttgacctggttgcacgtgcaggcgttactttccgctatacggagaacggtccggaaggcctggtcaccggtaaaa

SEQ ID NO: 287178 - DNA, 75 bp, synthetic construct
  source 1..75: mol_type = other DNA
tgaaagcccacgacgttatcgttattgcggcaccgatgtataacttcaatatctcgacccagttgctggagcacc

SEQ ID NO: 287179 - DNA, 75 bp, synthetic construct
  source 1..75: mol_type = other DNA
gttacaggtagagaccaaagatggacaattgagattcaaattggctaaccagcgtgctaacagctcggttatgaa

SEQ ID NO: 287180 - DNA, 75 bp, synthetic construct
  source 1..75: mol_type = other DNA
cgtttggggcaaacacatgtagttcatgctgaaggtgattgtagtgcatgcttatctgatggagttgattcatga

SEQ ID NO: 287181 - DNA, 75 bp, synthetic construct
  source 1..75: mol_type = other DNA
tttgtgagaaatcacggcagggctttacaggggtataccgccgaacctcccctggccggaacgtcaccgcgttcc

SEQ ID NO: 287182 - DNA, 75 bp, synthetic construct
  source 1..75: mol_type = other DNA
tcttcccttctgatgttggtcagaagccggttgatatcgttaacgcggcgctgaaagaagccaaactgaaattct

SEQ ID NO: 287183 - DNA, 75 bp, synthetic construct
  source 1..75: mol_type = other DNA
ccacggattctaatcctgtatggctcagtaagagagcgttcgtacagccgctttgccgcggaagaagctggtcgc

SEQ ID NO: 287184 - DNA, 75 bp, synthetic construct
  source 1..75: mol_type = other DNA
acccctgccggatgatgccccggatacgcaccctaaagtctccgagctacgcgggctggtcagatggtgtgacgg

SEQ ID NO: 287185 - DNA, 75 bp, synthetic construct
  source 1..75: mol_type = other DNA
ctgactgttttgatcaacatattgccgaacgtctgcacctgcaggagcccccacggattctgatcctgtatggct

SEQ ID NO: 287186 - DNA, 75 bp, synthetic construct
  source 1..75: mol_type = other DNA
ggtggttggcaacctattttatggcagccggagtcgcattcgctttttacgtagggcagttagtcgtaaaactgc

SEQ ID NO: 287187 - DNA, 75 bp, synthetic construct
  source 1..75: mol_type = other DNA
ccgattctttgcccgctttggacaaatcctttgccatcgagcgcccggcgctcgggctggcacccgacgccccgc

SEQ ID NO: 287188 - DNA, 75 bp, synthetic construct
  source 1..75: mol_type = other DNA
tgacgcgcggtcgcagtgattatctcaccgaccgctacagcgaaaggaaagagagtgccgcgcagctttctgagc

SEQ ID NO: 287189 - DNA, 75 bp, synthetic construct
  source 1..75: mol_type = other DNA
tcgttcttgcctctttacggaaacttggggttgcatcgaacgcaacgcttaccgatgtagagccgcaatccattg

SEQ ID NO: 287190 - DNA, 75 bp, synthetic construct
  source 1..75: mol_type = other DNA
atgaatattgtctgtgttgccgcctgtacggcgggtattgctcatacctatattgctcgtgaaaagttaatcaaa

SEQ ID NO: 287191 - DNA, 75 bp, synthetic construct
  source 1..75: mol_type = other DNA
gcgtctgcaaaacttataaccactgccagatacgggaaagagcgactcgtcaaactgtctgcaatggacagagca

SEQ ID NO: 287192 - DNA, 75 bp, synthetic construct
  source 1..75: mol_type = other DNA
gttcggatttgttcgacacttcaatcacagaggcaagattaggtgtccctgccgttcctcatcctccgcgaatcc

SEQ ID NO: 287193 - DNA, 75 bp, synthetic construct
  source 1..75: mol_type = other DNA
aagtcatggagttgcgtgagctggttcgttggtccgaaggcatggtgtggtgctcacctgaacggcatggtgcga

SEQ ID NO: 287194 - DNA, 75 bp, synthetic construct
  source 1..75: mol_type = other DNA
agcgatgccagcaaaagcgatcgggaaaaactgaaccgcatgctggaggaaatgtttgaagagtccgatatgtgg

SEQ ID NO: 287195 - DNA, 75 bp, synthetic construct
  source 1..75: mol_type = other DNA
tgcactcggtgccgccatcctgccgacccctgcgtttgcaacactctctaccccacgcccgcgcattttgacact

SEQ ID NO: 287196 - DNA, 75 bp, synthetic construct
  source 1..75: mol_type = other DNA
cggcgatgggcgaagagaaccagaccctgaacctggcggcgcaaccgcctgcggtcgtgctgatggcgggcctgc

SEQ ID NO: 287197 - DNA, 75 bp, synthetic construct
  source 1..75: mol_type = other DNA
cctgacgccggggcaggagttcgtcaaaatcgtccgtaacgaactggttgcggcgatgggcgaagagaaccagac

SEQ ID NO: 287198 - DNA, 75 bp, synthetic construct
  source 1..75: mol_type = other DNA
tgcgcatggcgctgctggaggcggatgtcgctctgccggtagtgcgtgagtttatcaatcgcgtaaaagagaaag

SEQ ID NO: 287199 - DNA, 75 bp, synthetic construct
  source 1..75: mol_type = other DNA
aaggtgccggtaaaacaaccagcgtgggcaagctcggtaagttcctgcgtgagaagcacaagaaaaaagtgctgg

SEQ ID NO: 287200 - DNA, 75 bp, synthetic construct
  source 1..75: mol_type = other DNA
tccttgagcagctacgccagatgaaaaatatgggcggcatggccagtctgatgggcaaactgccgggcatggggc

SEQ ID NO: 287201 - DNA, 75 bp, synthetic construct
  source 1..75: mol_type = other DNA
tggtttctgccgacgtttatcgcccggcggcaatcaaacagcttgagacgctggccgaacaggtaggcgtcgatt

SEQ ID NO: 287202 - DNA, 75 bp, synthetic construct
  source 1..75: mol_type = other DNA
atggacaaattcgacgctaatcgccgcaaactgctggcgcttggtggcgttgcactgagtgccgccatcttgccg

SEQ ID NO: 287203 - DNA, 75 bp, synthetic construct
  source 1..75: mol_type = other DNA
actcgcaaaccggtacaactcatttccggctaccgctctattgacaccaataatgaattacgcgcccacagtcgt

SEQ ID NO: 287204 - DNA, 75 bp, synthetic construct
  source 1..75: mol_type = other DNA
caatgaactacgcgcccgcagccgtggagtagcgaagaaaagctatcacactaaaggccaggcgatggatttcca

SEQ ID NO: 287205 - DNA, 75 bp, synthetic construct
  source 1..75: mol_type = other DNA
agcggaacgactttcgactctcgaagtgatgaaatattttcatagccgcccgcgtgatagccagattggtgcatg

SEQ ID NO: 287206 - DNA, 75 bp, synthetic construct
  source 1..75: mol_type = other DNA
cgctttttgtaccagcgtgaaaatgatgcgtggaagattgatcgtcttgcccctgaaaagatgcaaaaatcttgc

SEQ ID NO: 287207 - DNA, 75 bp, synthetic construct
  source 1..75: mol_type = other DNA
aaggctctggctcttctgaaaatgacgaggcgcaaggaagtgatattgaagagaaagagttgcgtatagatgatg

SEQ ID NO: 287208 - DNA, 75 bp, synthetic construct
  source 1..75: mol_type = other DNA
gcactggcacagaacgccacgcagcccgtttctcaaccagtgcatcacgcagcaacacgcactacagcctgcagg

SEQ ID NO: 287209 - DNA, 75 bp, synthetic construct
  source 1..75: mol_type = other DNA
acggataaggcgtgaacgtctgccggaagaactggcatacgcgctgaaacaacaactcagaattgcgataaaacg

SEQ ID NO: 287210 - DNA, 75 bp, synthetic construct
  source 1..75: mol_type = other DNA
ttgacaacggggataccattacctgttttcctaacctgacccccggagaaatatctcgtttccgtaactcgctga

SEQ ID NO: 287211 - DNA, 75 bp, synthetic construct
  source 1..75: mol_type = other DNA
atgtcattatcacgtctgcttttttttaacaaagacgcctattaccacctgggagactatgagcgctctgacacc

SEQ ID NO: 287212 - DNA, 75 bp, synthetic construct
  source 1..75: mol_type = other DNA
gttgaccgtatccggcgtgaacgcctgcccggagaactggcatacgcgctgaaacaacaactgaggattgcgata

SEQ ID NO: 287213 - DNA, 75 bp, synthetic construct
  source 1..75: mol_type = other DNA
cgccggaacagatgccaggccagcaggatcgctttattggcggcgggcttaaatatccttatgtcgagggattac

SEQ ID NO: 287214 - DNA, 75 bp, synthetic construct
  source 1..75: mol_type = other DNA
atgaataataaagtcagcttcactaacagcaataatccaaccatctctttgtctgcagtgatctatttccctcca

SEQ ID NO: 287215 - DNA, 75 bp, synthetic construct
  source 1..75: mol_type = other DNA
cggaaaagggatttgtcactattgcttatgacgcatcttatcaaggtgaaagtggcggcgagccgcgtcagttag

SEQ ID NO: 287216 - DNA, 75 bp, synthetic construct
  source 1..75: mol_type = other DNA
tagttttgttaatcggccggatgaaaattggaccagaactatatacgatatgcaagggaataaacaaaatggaat

SEQ ID NO: 287217 - DNA, 75 bp, synthetic construct
  source 1..75: mol_type = other DNA
tttttgacatgaagcaacagtgcaattcttcacagcaacgcttccgcaacggggcggaacgccatgctaaccgtt

SEQ ID NO: 287218 - DNA, 75 bp, synthetic construct
  source 1..75: mol_type = other DNA
aatcgtcaggaaatggtgctgattggcatgctgttaattgcctcagttccggcgacctggatgctggtgggataa

SEQ ID NO: 287219 - DNA, 75 bp, synthetic construct
  source 1..75: mol_type = other DNA
aatttgcctggtgctgatctggctgacaggctctgattacaacactctgctgactattgcttcagaaatgattct

SEQ ID NO: 287220 - DNA, 75 bp, synthetic construct
  source 1..75: mol_type = other DNA
ttgtacgcctctggtccaatgcacctgttgttgtccgtcgttctgtatgcgccggggttgctggtattcctgtac

SEQ ID NO: 287221 - DNA, 75 bp, synthetic construct
  source 1..75: mol_type = other DNA
tcagcatcggtatcagcgggcatttattcagcgattaaaaaatggtcgctggcatgtcatgcagcgtgtggccgg

SEQ ID NO: 287222 - DNA, 75 bp, synthetic construct
  source 1..75: mol_type = other DNA
tgtgcttccctatggaagagttaaccgccaccattgattcccagctttaccacgataatccagagaagtttttta

SEQ ID NO: 287223 - DNA, 75 bp, synthetic construct
  source 1..75: mol_type = other DNA
acattatacgaagcacttcgcacggttgatcgtctgcttcgcgggcaaagttttattaaacagactgatttataa

SEQ ID NO: 287224 - DNA, 75 bp, synthetic construct
  source 1..75: mol_type = other DNA
aaccgcatttttgctctaagcagtggcgacaatcagttcgggcaggatttcacattatacgaagcacttcgcacg

SEQ ID NO: 287225 - DNA, 75 bp, synthetic construct
  source 1..75: mol_type = other DNA
acattgtacgaagcacttcgcacggttgatcgtctgcttcgcgggcaaagttttattaaacaggctgatttataa

SEQ ID NO: 287226 - DNA, 75 bp, synthetic construct
  source 1..75: mol_type = other DNA
gctgtgcgcagtcatcgccaacgtctcctatctggtgatcgttttttccgcgttaagcttttttacggacacgcc

SEQ ID NO: 287227 - DNA, 75 bp, synthetic construct
  source 1..75: mol_type = other DNA
gtctatggccggcctgatggtgaaaatgatggggccgtggggcgagattatcatcgctgccggactgatcgtttc

SEQ ID NO: 287228 - DNA, 75 bp, synthetic construct
  source 1..75: mol_type = other DNA
acgccatgccaaccgtttcgctaccagcgcatcacgtagcagctctcgctacagcctgagcgaaacacacgcaac

SEQ ID NO: 287229 - DNA, 75 bp, synthetic construct
  source 1..75: mol_type = other DNA
ccgttgaaaacctcagccgtatcagcagaacggcggtgcccggtgcgtcagcaatggccattaaccgcgttgctt

SEQ ID NO: 287230 - DNA, 75 bp, synthetic construct
  source 1..75: mol_type = other DNA
gttggcggtgcttctctgaaagctgacgctttcgcagtaatcgttaaagctgcagaagcggctaaacaggcttaa

SEQ ID NO: 287231 - DNA, 75 bp, synthetic construct
  source 1..75: mol_type = other DNA
gtttaatggtacaacacagcaatggacaactggttattactggtgaatattgtcctgaaggtgtgcaaacagcat

SEQ ID NO: 287232 - DNA, 75 bp, synthetic construct
  source 1..75: mol_type = other DNA
agtttcagctatacacgagatttctttgcttactcaaaacaggaaaataacatcttcacatttgataattctaag

SEQ ID NO: 287233 - DNA, 75 bp, synthetic construct
  source 1..75: mol_type = other DNA
gttaaaccctcaatagaaaacactaaacctacaaaatctgatgtaccgcaggaggcagcaaagaaaggtcctcgt

SEQ ID NO: 287234 - DNA, 75 bp, synthetic construct
  source 1..75: mol_type = other DNA
gccttgttgatctgaaattcatcatggcggatactggctttggaaaaaccttcatttacgaccggattaagtccg

SEQ ID NO: 287235 - DNA, 75 bp, synthetic construct
  source 1..75: mol_type = other DNA
gcgacctgcctaaagccaaagttatccacggacgagcaagatggttatatcgtgaccattgtgaattcaaaaata

SEQ ID NO: 287236 - DNA, 75 bp, synthetic construct
  source 1..75: mol_type = other DNA
gggatgtgtcagatggcggcaaacgttataccttccatttacgtaaaggcttacggtggtctgatggtcagcctc

SEQ ID NO: 287237 - DNA, 75 bp, synthetic construct
  source 1..75: mol_type = other DNA
cgctgtttccggttccgcatcatgtgattgcgaagtatggcgatagctggagtaagccagaacatatggtttaca

SEQ ID NO: 287238 - DNA, 75 bp, synthetic construct
  source 1..75: mol_type = other DNA
cagccctgggagaaacgaaaacgccgcataatgcgtatacaaaaaggcgtgaagtttatctggaaagacggacag

SEQ ID NO: 287239 - DNA, 75 bp, synthetic construct
  source 1..75: mol_type = other DNA
cggataaaatagaagcattcaactctgcagttgatcatcgccttgcggaactgacaatgaacaaattgtacgaca

SEQ ID NO: 287240 - DNA, 75 bp, synthetic construct
  source 1..75: mol_type = other DNA
cttgttatggttagagaccttcagatggtcgcatacagcaaaggtcttagagaagatcaaatttttccccaaaac

SEQ ID NO: 287241 - DNA, 75 bp, synthetic construct
  source 1..75: mol_type = other DNA
ggaaaaacgcacagtatgacgccttactaaaccaggcggcacaaacgacggatgctacaacgcgtaatgcgctgt

SEQ ID NO: 287242 - DNA, 75 bp, synthetic construct
  source 1..75: mol_type = other DNA
ggctggttgtaatgagagtaataaaaaagaagttgagggttgtattgaaagaggtgtccaatattttatagagat

SEQ ID NO: 287243 - DNA, 75 bp, synthetic construct
  source 1..75: mol_type = other DNA
ctgttgaaaacctcagccgtatcagcaaaacggcggtgcctggtgcgtcagcaattgccattaaccgcgtggcca

SEQ ID NO: 287244 - DNA, 75 bp, synthetic construct
  source 1..75: mol_type = other DNA
tcgcccgaacagcatacttaaagccggtcagcatcggtatcagcgggcattcattcagcgattaaaaaacggtcg

SEQ ID NO: 287245 - DNA, 75 bp, synthetic construct
  source 1..75: mol_type = other DNA
aggcgcagcaccagccgcgccatgttttgctggtggatcgcgggctggcgaaaatggcgcgcgtcagcgggcggg

SEQ ID NO: 287246 - DNA, 75 bp, synthetic construct
  source 1..75: mol_type = other DNA
cgttgaaaatcagcggtgaagtcgctaaaccgttaaccctcgatcatgatgcactgactcgtcgtttcccgctgg

SEQ ID NO: 287247 - DNA, 75 bp, synthetic construct
  source 1..75: mol_type = other DNA
acgtcggcaagttctgaaagcattagatatcagcgctgcagccctctctttaccaaacgccgcccatgcggatgt

SEQ ID NO: 287248 - DNA, 75 bp, synthetic construct
  source 1..75: mol_type = other DNA
aattaacaccgtcaataattgataatttgattgcgttttcccctccgctgtgtggctgtatctctcgtttttttt

SEQ ID NO: 287249 - DNA, 75 bp, synthetic construct
  source 1..75: mol_type = other DNA
actggaggtgaaccgccgggggcatcttgattcactttctgtgaaagtggagttgaaagaaagtagcctgacatt

SEQ ID NO: 287250 - DNA, 75 bp, synthetic construct
  source 1..75: mol_type = other DNA
tgcgtgagactagctggatggcaaactcctttagcgaacgatgcaacaggttcaacgcattgctacagcggaaaa

SEQ ID NO: 287251 - DNA, 75 bp, synthetic construct
  source 1..75: mol_type = other DNA
caggggaattcagaacctatctggatgcgtgagactagctggatggcaaactcctttagcgaacgatgcaacagg

SEQ ID NO: 287252 - DNA, 75 bp, synthetic construct
  source 1..75: mol_type = other DNA
ggcgctggcattgattgccgtctcttcggagacagaagaagagcgcacctttacctttcgccagttatatgacga

SEQ ID NO: 287253 - DNA, 75 bp, synthetic construct
  source 1..75: mol_type = other DNA
agtgaacgcggtggcgtcaatgctgcgctcgctgggcgtgcagcgtggcgatcgggtgctggtgtatatgccgat

SEQ ID NO: 287254 - DNA, 75 bp, synthetic construct
  source 1..75: mol_type = other DNA
tctgtcttgagttgaccatagggcctatctgggccgtcccgatggatattacgccgaagtatgtgggaattgcca

SEQ ID NO: 287255 - DNA, 75 bp, synthetic construct
  source 1..75: mol_type = other DNA
ttatggaagcgcagggcgttaaacagctgctgtggagcaaccgcattcgcgccttgccggggccggaatatcatg

SEQ ID NO: 287256 - DNA, 75 bp, synthetic construct
  source 1..75: mol_type = other DNA
atcgcttacaggggcaaattttaaaacgcaccaccgatcgcgaactgttatctcacggtttgttgccgggcgtgg

SEQ ID NO: 287257 - DNA, 75 bp, synthetic construct
  source 1..75: mol_type = other DNA
acactgaagatgcggcgtttagttttccaccgcagggcctgacgctgcgctggtttagcgtggcagcacagcgta

SEQ ID NO: 287258 - DNA, 75 bp, synthetic construct
  source 1..75: mol_type = other DNA
tccaatccttcttataataattggtggtgtgataggcgctttcgtaggtatagtaggggcaacaatcaataccag

SEQ ID NO: 287259 - DNA, 75 bp, synthetic construct
  source 1..75: mol_type = other DNA
ttgacactgtcatcgcaacattatctggtgatcactgcgttgggtgccgatcgccctggaattgtgaacaccatc

SEQ ID NO: 287260 - DNA, 75 bp, synthetic construct
  source 1..75: mol_type = other DNA
tgtacaccaccgtgcaggatggcggccgtcacggctttcgtcagtctggtatcagccactgtggcgcactggata

SEQ ID NO: 287261 - DNA, 75 bp, synthetic construct
  source 1..75: mol_type = other DNA
atgttcaaaacgacgctctgcgccttattaattaccgcctcttgctccgcactttccgccccccaacagctcaac

SEQ ID NO: 287262 - DNA, 75 bp, synthetic construct
  source 1..75: mol_type = other DNA
tttattccagaaaaagagctgggtatcgtgatgctggcaaacaaaaactatcccaatccagcgagagtcgacgcc

SEQ ID NO: 287263 - DNA, 75 bp, synthetic construct
  source 1..75: mol_type = other DNA
cttcgatgaagtggctattgacctggtcaatggtgatttcactcgatttgtaacagatgttcgcaaggctgaacg

SEQ ID NO: 287264 - DNA, 75 bp, synthetic construct
  source 1..75: mol_type = other DNA
atgaaaaacgcgtagccgaaggtttcaccgtaaaaggcaagaccatgtttgtgccagccgtgaaattgcctaggg

SEQ ID NO: 287265 - DNA, 75 bp, synthetic construct
  source 1..75: mol_type = other DNA
tcgcgcccataacccatgggggctggcaattgtgactgcgcccaatgtggtactggcaacaggagggcctggcga

SEQ ID NO: 287266 - DNA, 75 bp, synthetic construct
  source 1..75: mol_type = other DNA
tatcaaaccgaccacgacgaagccgggcgtgcaacctcgtgtgggccgcgtacctcaaggttaatggtgaaagtg

SEQ ID NO: 287267 - DNA, 75 bp, synthetic construct
  source 1..75: mol_type = other DNA
gtttgcggcacgttgccatcagtatgacagctttggtttttacgcggcactaagccagttattgctggcgttagt

SEQ ID NO: 287268 - DNA, 75 bp, synthetic construct
  source 1..75: mol_type = other DNA
tagcacagctggcagctccggcactggcttctataagagagatcattactcaggcgcacgataacgggaccggga

SEQ ID NO: 287269 - DNA, 75 bp, synthetic construct
  source 1..75: mol_type = other DNA
agatatgatgaaattcaccgactacagcgtgaaaaccggacatctgaccgcgtactggacgccatctttcgccca

SEQ ID NO: 287270 - DNA, 75 bp, synthetic construct
  source 1..75: mol_type = other DNA
cggcgaaggggacttcaccaaaggcgtgtatgtctctgtaccgctggatctcttctcgtctggcccgacacgcag

SEQ ID NO: 287271 - DNA, 75 bp, synthetic construct
  source 1..75: mol_type = other DNA
caccacccaggaactggcttcaaacatcttccgtaagggctatcagtggccgttccatgccacgcgggtaatgga

SEQ ID NO: 287272 - DNA, 75 bp, synthetic construct
  source 1..75: mol_type = other DNA
gtcgtggggcgcggatggttattgatccacaaggcaaatgcctaccacaaactcgtcgcggcgcaaaagaagaat

SEQ ID NO: 287273 - DNA, 75 bp, synthetic construct
  source 1..75: mol_type = other DNA
gacgcgcaacctcctgtgggccgcgcacttctcgtctgatggtgaaagtattgctcgaagaagtgcagcgtcttt

SEQ ID NO: 287274 - DNA, 75 bp, synthetic construct
  source 1..75: mol_type = other DNA
ccggtcatgctgaaccgccccgggtttcctggagagtattttatctgtgaactcaggctgccagatcattatttc

SEQ ID NO: 287275 - DNA, 75 bp, synthetic construct
  source 1..75: mol_type = other DNA
taaaaaacaaaaatttcaacattaaagactcacaaaattttttgcataatactaaattagtcgaagatttgcttt

SEQ ID NO: 287276 - DNA, 75 bp, synthetic construct
  source 1..75: mol_type = other DNA
gcggcgggcatgtgccggatgcattggttaagtcccatcattatttactgggcgagacggcaaagcgcacaggag

SEQ ID NO: 287277 - DNA, 75 bp, synthetic construct
  source 1..75: mol_type = other DNA
tgaactatcgcgataacgatcagtaccgttattactcagcttcagtgcaactcttcccgtggctggaaacaacgc

SEQ ID NO: 287278 - DNA, 75 bp, synthetic construct
  source 1..75: mol_type = other DNA
gctggcgcaaaaacgcgtcgagccagtggttccgaagtccaccgagcagggctggtatatcgacaaatcacgctt

SEQ ID NO: 287279 - DNA, 75 bp, synthetic construct
  source 1..75: mol_type = other DNA
gacaaatattgctatcgcgataacagctataaacaggcgggttctatcgacggcagccagatgttccacggcccg

SEQ ID NO: 287280 - DNA, 75 bp, synthetic construct
  source 1..75: mol_type = other DNA
cgtcatggtattgagctgaataaagagcaattcgcttttgtcgatacgttctgtaaagagattggtattggctgg

SEQ ID NO: 287281 - DNA, 75 bp, synthetic construct
  source 1..75: mol_type = other DNA
caaaactgcggctggcgggatgtcggatcgtattcagtcaggtgggccgcgatctgcaaatcttcaactcgctga

SEQ ID NO: 287282 - DNA, 75 bp, synthetic construct
  source 1..75: mol_type = other DNA
ttgatgatgctcgcccacggtgtcgcttcgccacggatcccggaagcgcgtaatttgtggctgatttcacttaag

SEQ ID NO: 287283 - DNA, 75 bp, synthetic construct
  source 1..75: mol_type = other DNA
ttattacatctgattattccggctgaagcgattttcgaccacgcagaaaatatgcataaattgcggctggcaggc

SEQ ID NO: 287284 - DNA, 75 bp, synthetic construct
  source 1..75: mol_type = other DNA
ccttgattgatgacaacaatcatcaggcggctgaagtgatgtcgcaggctgatatcgcctgttatgcctccaaaa

SEQ ID NO: 287285 - DNA, 75 bp, synthetic construct
  source 1..75: mol_type = other DNA
cccagattgaagacataaacgatctcaaacgcaccgaacagatcaacaaacgtctgatggagcggataacactgg

SEQ ID NO: 287286 - DNA, 75 bp, synthetic construct
  source 1..75: mol_type = other DNA
agtgggtatcgaagggcaatggctgcaatccaacaaatcgctatgccagtttcttggttacagccaggaagagct

SEQ ID NO: 287287 - DNA, 75 bp, synthetic construct
  source 1..75: mol_type = other DNA
tcggttacagtcaggaagagctgcgcggactcacctttcagcaactgacctggccggaggatctcaataaagatc

SEQ ID NO: 287288 - DNA, 75 bp, synthetic construct
  source 1..75: mol_type = other DNA
atggatacgctttcgggcatcggcgtcgatctgatttatggtgatgtgattgccgatgcccaaccgctggatttg

SEQ ID NO: 287289 - DNA, 75 bp, synthetic construct
  source 1..75: mol_type = other DNA
cggagaagatgagcggctggacgcaggaagaagcgttaggtgttccgctcctgacggtgttgcatattacttttg

SEQ ID NO: 287290 - DNA, 75 bp, synthetic construct
  source 1..75: mol_type = other DNA
atggtgagttatgcgccaacgtgcagggaaatttgatggatgagatgctgattacgatcattcaggggcacgctc

SEQ ID NO: 287291 - DNA, 75 bp, synthetic construct
  source 1..75: mol_type = other DNA
cgacgtgcattacagtattacgccgttaagtactctggatggcagcaatattggttcggttctggtgattcagga

SEQ ID NO: 287292 - DNA, 75 bp, synthetic construct
  source 1..75: mol_type = other DNA
tctattatgatggtggcgttttatcgtcatgccggacacatgtggccggggatcgcgctgagctgctcgctgggg

SEQ ID NO: 287293 - DNA, 75 bp, synthetic construct
  source 1..75: mol_type = other DNA
cgggttgttgatcctcgcaatggcatggttgccgccatttattctggtgttattgattcgcgtcctggcgggtgt

SEQ ID NO: 287294 - DNA, 75 bp, synthetic construct
  source 1..75: mol_type = other DNA
acagcggcgatcggatgagttatccgacgttgcgtctggcactgttgagcggcgactggatcccgctaacgttac

SEQ ID NO: 287295 - DNA, 75 bp, synthetic construct
  source 1..75: mol_type = other DNA
gtcgacggcggcggatcatgtggcccgcgccctgttagcgctgggcgtgcagcatggcgaccgcgtggcggtggt

SEQ ID NO: 287296 - DNA, 75 bp, synthetic construct
  source 1..75: mol_type = other DNA
tgaagcacgtagcatgcagctggaggaggaggtaacgcagctgttacagcggcttgagcaaagcgctaccgatat

SEQ ID NO: 287297 - DNA, 75 bp, synthetic construct
  source 1..75: mol_type = other DNA
gcgcaagtattcgtgctgaaagaaggcgtcgctggctgggctggcgaaaacttgcctctggtgcgcggcaaataa

SEQ ID NO: 287298 - DNA, 75 bp, synthetic construct
  source 1..75: mol_type = other DNA
tggatttgcacaagtattcgtactgaaagagggcatcgcgggctgggctggcgagaacttgcctctggtgcgcgg

SEQ ID NO: 287299 - DNA, 75 bp, synthetic construct
  source 1..75: mol_type = other DNA
tgattagttcggttcaaaaaaaagatctgaggaaagattattctgatgtattaaaaaattttcctggaaaaaaac

SEQ ID NO: 287300 - DNA, 75 bp, synthetic construct
  source 1..75: mol_type = other DNA
tgttacattcttctggtgttggtgtgtatatcaaacaaattatacatgaattggtcactgattctaatgaaaatg

SEQ ID NO: 287301 - DNA, 75 bp, synthetic construct
  source 1..75: mol_type = other DNA
cgccgcgaaacgacgtaatgaacaatatgccgtggttgccatttttgctgatcctcttacccgccaacatcatga

SEQ ID NO: 287302 - DNA, 75 bp, synthetic construct
  source 1..75: mol_type = other DNA
gtcatctgcatttttcgctgggagaggggaccgttcctgcgcgaagaatcgacggtttgcggcaaaaaacactga

SEQ ID NO: 287303 - DNA, 75 bp, synthetic construct
  source 1..75: mol_type = other DNA
atgccgtctggctgcataattttaacgttcgctggcgcgtcaccgacgctggttttgaagtctttgcgctggaac

SEQ ID NO: 287304 - DNA, 75 bp, synthetic construct
  source 1..75: mol_type = other DNA
atgccgtctggctgcatgattttaatgtccgctggcgcgtcaccgatgccggttttgaagtctttgcgctggaac

SEQ ID NO: 287305 - DNA, 75 bp, synthetic construct
  source 1..75: mol_type = other DNA
cttgacggcatgaccggtcatgctggcgagctcccgaactgtcgctgttacaaagagatcgtcttccccaaccct

SEQ ID NO: 287306 - DNA, 75 bp, synthetic construct
  source 1..75: mol_type = other DNA
gccgccgatcgggtgtatgacattcagaacaaggccatcgaggctgtagtaactggtggccgcgctgagccattc

SEQ ID NO: 287307 - DNA, 75 bp, synthetic construct
  source 1..75: mol_type = other DNA
ttagggatcatgtttgctgcaacatttcttctgatgtggatattcacccttccaggtgatttctatagaaaaaaa

SEQ ID NO: 287308 - DNA, 75 bp, synthetic construct
  source 1..75: mol_type = other DNA
tacccgcgctgcgcattgctaatctgctggtggggaatgatgccaacgctcccgcactggaaattacgctcggtc

SEQ ID NO: 287309 - DNA, 75 bp, synthetic construct
  source 1..75: mol_type = other DNA
cccgcgctggagatcacgctcggtcagttaacggttgagttcgaaactgatgggtggtttgctctgacgggtgcc

SEQ ID NO: 287310 - DNA, 75 bp, synthetic construct
  source 1..75: mol_type = other DNA
cccgcgctggagataacgctcggtcagttaacggtagagttcgaaactgatggttggtttgccctgacgggggca

SEQ ID NO: 287311 - DNA, 75 bp, synthetic construct
  source 1..75: mol_type = other DNA
gagtcaaatcaatcaggcaaaactcgccttgaaccgccccgggtttcctggagagtgttttatctgtgaactcag

SEQ ID NO: 287312 - DNA, 75 bp, synthetic construct
  source 1..75: mol_type = other DNA
aaaaaagtgcccttgcctatctggataaacatactgcccgtctgaagaacctcggcgttgcagaagttatcgcca

SEQ ID NO: 287313 - DNA, 75 bp, synthetic construct
  source 1..75: mol_type = other DNA
tggcgagcaaccaaatgtcgttgcccaagtttccggtttgtccgacccagtatggttggctcgggaagtggataa

SEQ ID NO: 287314 - DNA, 75 bp, synthetic construct
  source 1..75: mol_type = other DNA
atcatgtttgctgcaacgtttcttctgatgtgggtattcacccttccaggtgatttctatagaaatagagtcaaa

SEQ ID NO: 287315 - DNA, 75 bp, synthetic construct
  source 1..75: mol_type = other DNA
tcaaccaactaataatcagggattatccgcagcagcgcgtgcatgggaaaagcatgctggaaagcctggaggggt

SEQ ID NO: 287316 - DNA, 75 bp, synthetic construct
  source 1..75: mol_type = other DNA
gggataattatcggaaggattgggtctattgtttttgagcctgtgttgaaatttttggggctggtaaaatttgtt

SEQ ID NO: 287317 - DNA, 75 bp, synthetic construct
  source 1..75: mol_type = other DNA
ctggacggtatgaccggacacgccggatgtttgccgaactgcaaatgctggcctgaagtacagattcctgcaccg

SEQ ID NO: 287318 - DNA, 75 bp, synthetic construct
  source 1..75: mol_type = other DNA
ataccaagcttaagctagatcgtttgcaagggtggctaaatcagcaaccgctgcctgtggttttacaaggaatga

SEQ ID NO: 287319 - DNA, 75 bp, synthetic construct
  source 1..75: mol_type = other DNA
caatgcggtagatgaagaacgaagcaacagcatccggcagcaagagaatgaatctgttgagtacaatgatttcta

SEQ ID NO: 287320 - DNA, 75 bp, synthetic construct
  source 1..75: mol_type = other DNA
cgctctgcaaaaccggatcaaaacgtactgccctatctgatatcacctggccgctcgaaatacgactcgctgacc

SEQ ID NO: 287321 - DNA, 75 bp, synthetic construct
  source 1..75: mol_type = other DNA
tcaggcactggcaaacgagaacggaatgacgctggcaacggtgaaagaaaaaatccaggcgcgaatgtctgatta

SEQ ID NO: 287322 - DNA, 75 bp, synthetic construct
  source 1..75: mol_type = other DNA
cattatattgacgcaggtggtggtagtcggggagcacgtattattctcgacagggatggaaattctattccgcaa

SEQ ID NO: 287323 - DNA, 75 bp, synthetic construct
  source 1..75: mol_type = other DNA
ctcgcctgattcagggattgttcagtctgcatttgaaaatggtaatgctggaacaagccagcgagcgcttttcgg

SEQ ID NO: 287324 - DNA, 75 bp, synthetic construct
  source 1..75: mol_type = other DNA
tcgcgctattgaatcaggccgtaggtaatgactccaacttattgatagtgttttatgttcagataatgcccgatg

SEQ ID NO: 287325 - DNA, 75 bp, synthetic construct
  source 1..75: mol_type = other DNA
tcgcttgcaggatgattgtgatggctatggcccacgcgggcgtgattttatcgttcacgttgattttcctacaga

SEQ ID NO: 287326 - DNA, 75 bp, synthetic construct
  source 1..75: mol_type = other DNA
gtgctgctggtaaagccgttactggtaatgctccacgctgggataaagtaggcacgatctacggtgctcgcgtgt

SEQ ID NO: 287327 - DNA, 75 bp, synthetic construct
  source 1..75: mol_type = other DNA
atattgatcacaagttgttggatgcgattgattttattaatgaacaattgacaagcaaccctactcaatacgaaa

SEQ ID NO: 287328 - DNA, 75 bp, synthetic construct
  source 1..75: mol_type = other DNA
atatttacctgcaaccgcatgagaatggagtgtttgttctggtaagcgatgctcagcctacaaatcctactattg

SEQ ID NO: 287329 - DNA, 75 bp, synthetic construct
  source 1..75: mol_type = other DNA
atcgacgcggcatgcaagattgccagagatcggcaaattcctttattgatcagcggtggtatcggtcattcgaca

SEQ ID NO: 287330 - DNA, 75 bp, synthetic construct
  source 1..75: mol_type = other DNA
aaaatcacagccgttcccacgattgtgatgcttgaggatgagccgttgcctggcgagcaaccaaatgtcgttgcc

SEQ ID NO: 287331 - DNA, 75 bp, synthetic construct
  source 1..75: mol_type = other DNA
ccgaagttaagtctttacgcaaacaaccgcatattaacggtattttctttgaaaaaaactggccagattttctga

SEQ ID NO: 287332 - DNA, 75 bp, synthetic construct
  source 1..75: mol_type = other DNA
gtctggcgcgctttattggttgcacacaaaagcggtctgttgagggtgatgtcgcgcagctggtagcctcatctc

SEQ ID NO: 287333 - DNA, 75 bp, synthetic construct
  source 1..75: mol_type = other DNA
ataacttcctcgcagattactatcgcaccacccaggagttggcttcaaacatcttccgtaaaggctatcagtggc

SEQ ID NO: 287334 - DNA, 75 bp, synthetic construct
  source 1..75: mol_type = other DNA
gtataaagttttttcaaatattccatttaatatgacagcagagattttaacaaaattattaactgcacctaatcc

SEQ ID NO: 287335 - DNA, 75 bp, synthetic construct
  source 1..75: mol_type = other DNA
gaaatggctgagttgctgttcgggcagttggtgatgttgctgaatcgccatcgttacaccagtgattcgttgccg

SEQ ID NO: 287336 - DNA, 75 bp, synthetic construct
  source 1..75: mol_type = other DNA
ttacgtaccggcagtacccgaccctggtgggaagtaccggcgtcatcggtttattcctttgccttctatattttc

SEQ ID NO: 287337 - DNA, 75 bp, synthetic construct
  source 1..75: mol_type = other DNA
ccgaagatcctgccgcctgccatcgtcaatgaaatggtgatgaccggcagacgaatgggcgcagaagaggcgctg

SEQ ID NO: 287338 - DNA, 75 bp, synthetic construct
  source 1..75: mol_type = other DNA
gtgaacggctacgcctttggcggcggctttgaactggcgctggcggcagattttattgtttgtgccgataacgcc

SEQ ID NO: 287339 - DNA, 75 bp, synthetic construct
  source 1..75: mol_type = other DNA
cgcttgaagctgcgcttagttacgcatacacgtctgttagagaattgccaccggatagtggcgctgtgttcggta

SEQ ID NO: 287340 - DNA, 75 bp, synthetic construct
  source 1..75: mol_type = other DNA
aagaccgggatcagcatattctgacactgcgtattgcctgcggtgtactggcctttttcctgttaatcacctgcg

SEQ ID NO: 287341 - DNA, 75 bp, synthetic construct
  source 1..75: mol_type = other DNA
gttcatcttcatgcccgcaaactctggcagcacaattatctgcggctaccggagctggtagaggatgtctgcaat

SEQ ID NO: 287342 - DNA, 75 bp, synthetic construct
  source 1..75: mol_type = other DNA
aacatccagcgaaacgttgctggataagctgattacccggctggcggccagcctgaaaagtccctttgcgctgga

SEQ ID NO: 287343 - DNA, 75 bp, synthetic construct
  source 1..75: mol_type = other DNA
ttttcggtggtgtttacccgggaaactgggatgacgcccagccagtggcgtcatctcaattcgcagaaagattaa

SEQ ID NO: 287344 - DNA, 75 bp, synthetic construct
  source 1..75: mol_type = other DNA
atccctcagttctgcattcggaagatgccattgaagggtcgctggcgtttgctgagaagcgcgatccggtgtgga

SEQ ID NO: 287345 - DNA, 75 bp, synthetic construct
  source 1..75: mol_type = other DNA
aagaactggaaaaacgcggtattggtcgtccttccacctatgcgtcgatcatttcgaccattcaggatcgtggtt

SEQ ID NO: 287346 - DNA, 75 bp, synthetic construct
  source 1..75: mol_type = other DNA
cttctcggatttcacccagcagttagataaagctgaaaaagatccggaagaggggggatgcgcccgaaccagatg

SEQ ID NO: 287347 - DNA, 75 bp, synthetic construct
  source 1..75: mol_type = other DNA
tgaggcgcttaataataaaggagaatatatttttatcagaaatagtgtcccgggattgagttcagtatgcatacc

SEQ ID NO: 287348 - DNA, 75 bp, synthetic construct
  source 1..75: mol_type = other DNA
gcaggtcaccgatgcctgtcacaaacatggcggctttaatctgggaagtattggcggtgcggcggcgttactggc

SEQ ID NO: 287349 - DNA, 75 bp, synthetic construct
  source 1..75: mol_type = other DNA
atttcgactattcaggatcgtggctatgtgcgagtagaaaatcgtcgtttctatgcggaaaaaatgggcgaaatc

SEQ ID NO: 287350 - DNA, 75 bp, synthetic construct
  source 1..75: mol_type = other DNA
agtccccggcaaaagccaaaacgatccacaagtatctgggtagtgactacgtggtgaaatccagcgtcggtcaca

SEQ ID NO: 287351 - DNA, 75 bp, synthetic construct
  source 1..75: mol_type = other DNA
ccagcagcggctgaaattaagcctgtccggaaggctggcgataaaggtgattgcagagccaccggataagcgccg

SEQ ID NO: 287352 - DNA, 75 bp, synthetic construct
  source 1..75: mol_type = other DNA
gcgccgctggatgcgctgacgcatgcgggagtgctaatggacgacgagcagtttgatgaaatcaatatcgttcgt

SEQ ID NO: 287353 - DNA, 75 bp, synthetic construct
  source 1..75: mol_type = other DNA
gcgtcgtcgtggcagcacatattttgtatcaaaagccggtgagcgttatcgccgtgatgtggcgcttattgttcg

SEQ ID NO: 287354 - DNA, 75 bp, synthetic construct
  source 1..75: mol_type = other DNA
gtccctgaagagcggctggtacattcgtttcacagctactttcttcgcccaggcgatagtaagaagccgattatt

SEQ ID NO: 287355 - DNA, 75 bp, synthetic construct
  source 1..75: mol_type = other DNA
tgaggaaggactctttcgcggccagagtgaagatttaggtttacgccaggtgtttggcggccaggtcgtgggtca

SEQ ID NO: 287356 - DNA, 75 bp, synthetic construct
  source 1..75: mol_type = other DNA
gggttgttaatggacgatgagcagtttgatgaaatcaatattgtacgtggcaagccagtatctggtggacggctg

SEQ ID NO: 287357 - DNA, 75 bp, synthetic construct
  source 1..75: mol_type = other DNA
tgccggattacctgaagcatcatattgtctattacgctggcccggcgaaaacaccggagaacatggcctgcggtt

SEQ ID NO: 287358 - DNA, 75 bp, synthetic construct
  source 1..75: mol_type = other DNA
ctggttctcttagcagtatttcccaggtagcacagcaaaacagtgcaaataatgctggtcagttgctttatgtgc

SEQ ID NO: 287359 - DNA, 75 bp, synthetic construct
  source 1..75: mol_type = other DNA
cgggctgtggcgcttattgttcgccagcagcggctgaaattaagcctgtccggacggctggcaataaaaattatt

SEQ ID NO: 287360 - DNA, 75 bp, synthetic construct
  source 1..75: mol_type = other DNA
cgcatgccggactacttatagacgacgagcagtttgatgaaatcaatattgtgcgcggtcagctcgtttctggtg

SEQ ID NO: 287361 - DNA, 75 bp, synthetic construct
  source 1..75: mol_type = other DNA
gtttgatgaaatcaatattgtgcgcggtcagctcgttcctggtggacgtctgggggtgaagatttaccccataat

SEQ ID NO: 287362 - DNA, 75 bp, synthetic construct
  source 1..75: mol_type = other DNA
gcgccgtcgcgacctggataatatcctgaaagcacctctggatgcgctgacgcatgcgggactgcttatcgacga

SEQ ID NO: 287363 - DNA, 75 bp, synthetic construct
  source 1..75: mol_type = other DNA
ataacatgccaatactggatcgcgtgaactttatcgccaattatattgaaatggctaaagagtctggtgtaattg

SEQ ID NO: 287364 - DNA, 75 bp, synthetic construct
  source 1..75: mol_type = other DNA
ggatgtatctggtgccaccggttttttcacaactgaccgaacaacatcaggctgtcattgacgccatttttgctg

SEQ ID NO: 287365 - DNA, 75 bp, synthetic construct
  source 1..75: mol_type = other DNA
gtttgatgaaaatcaatattgtgcgcggtcagcctgtgccaggtggacggctgggcgtgaagatttacgaaatca

SEQ ID NO: 287366 - DNA, 75 bp, synthetic construct
  source 1..75: mol_type = other DNA
tgttatcgaaaggtaaccgcagccagcaggtcaccgatgcctgtcacaaacatggcggcttcaatctgggaagta

SEQ ID NO: 287367 - DNA, 75 bp, synthetic construct
  source 1..75: mol_type = other DNA
gtttgatgaagttaatattatgcgcggtcaggttattcccggtggtcggctggggataaaaatcacagaactgga

SEQ ID NO: 287368 - DNA, 75 bp, synthetic construct
  source 1..75: mol_type = other DNA
gtttgatgaaattaatattgtgcgcggactgcctgttcctggtggtcggctgggtgtgaagatttacgaaataat

SEQ ID NO: 287369 - DNA, 75 bp, synthetic construct
  source 1..75: mol_type = other DNA
atgactgttttacccagacgcctgtcagacgaggttgctgatcgtgtgcgggcgctgattgatgaaaaaaaactg

SEQ ID NO: 287370 - DNA, 75 bp, synthetic construct
  source 1..75: mol_type = other DNA
gcgacgtcgtggcagcacatattttgtatcaaaagccggtgagcgttatcgccgtgatgtggcgctaattgttcg

SEQ ID NO: 287371 - DNA, 75 bp, synthetic construct
  source 1..75: mol_type = other DNA
ccagcagcggttgaaattaaacctctccggaaggctggcgataaagattattgcagagccaccggataagcgccg

SEQ ID NO: 287372 - DNA, 75 bp, synthetic construct
  source 1..75: mol_type = other DNA
gaaacgaatcacaccgacaattcagaatggtgacacagaaaccgggaggctgatcgacaaaattgttgaggtata

SEQ ID NO: 287373 - DNA, 75 bp, synthetic construct
  source 1..75: mol_type = other DNA
ccaatagtcatccgggattgtggaaagtcggaatgatggcaggcgctcatgcggcgagctggtttatcaatggcg

SEQ ID NO: 287374 - DNA, 75 bp, synthetic construct
  source 1..75: mol_type = other DNA
gtttgatgaaatcaatattgtacgtggccagccagtatcaggtggacggctggagataaaaattacagatgtggg

SEQ ID NO: 287375 - DNA, 75 bp, synthetic construct
  source 1..75: mol_type = other DNA
acccgccaacggtgaacacctactggcgtcgtcgtggcagcacatattttatctcggaggagggaaagcgctatc

SEQ ID NO: 287376 - DNA, 75 bp, synthetic construct
  source 1..75: mol_type = other DNA
cgcatgcgggagtgctcattgatgacgagcagtttgatgaaatcaatattgtacgtggtcagccagtatctggtg

SEQ ID NO: 287377 - DNA, 75 bp, synthetic construct
  source 1..75: mol_type = other DNA
tccacaaccggaatgcggactgggaaaacccgcttgataacccgtcatttatcgtatcggcgaaaagctgcctga

SEQ ID NO: 287378 - DNA, 75 bp, synthetic construct
  source 1..75: mol_type = other DNA
cggtggttcagattattaccctgctggtgtgggagatgagccatgttgtgacgagactgaaatccgccacgcagt

SEQ ID NO: 287379 - DNA, 75 bp, synthetic construct
  source 1..75: mol_type = other DNA
ctgaagacctggtaaaacaggcgctgtattccggcgaagtaaataaattactgaaagcgcaggtccgcaaggatt

SEQ ID NO: 287380 - DNA, 75 bp, synthetic construct
  source 1..75: mol_type = other DNA
cgatgagttaggccactgggaagaatggcgcgatcgtgccagccagatccgcgatcacgttctgagcaacctcga

SEQ ID NO: 287381 - DNA, 75 bp, synthetic construct
  source 1..75: mol_type = other DNA
tggcgcgatcgtgctgcccagatacgtgatcatgttctgagtaatctcgacgcttatctgtaccagctctcagaa

SEQ ID NO: 287382 - DNA, 75 bp, synthetic construct
  source 1..75: mol_type = other DNA
cggtgaacacctactggcgacgtcgtggcagcacatattttgtatcaaaagccggtgagcgttatcgccgggatg

SEQ ID NO: 287383 - DNA, 75 bp, synthetic construct
  source 1..75: mol_type = other DNA
cgcctcacaagcggacgttcgttttcatctggcgattgccgaagcctcacataacattgtgctgctgcaaaccat

SEQ ID NO: 287384 - DNA, 75 bp, synthetic construct
  source 1..75: mol_type = other DNA
aaagagggatatcagcttgatacccgacgccaggcgcaggcggcgtatccgcgcattaaagtgctggtgatccac

SEQ ID NO: 287385 - DNA, 75 bp, synthetic construct
  source 1..75: mol_type = other DNA
ggttgagcaactggaaagcctgtctgttacgaaaattggccagccgctggcagtatctaccgaaacctttgttac

SEQ ID NO: 287386 - DNA, 75 bp, synthetic construct
  source 1..75: mol_type = other DNA
ttgagacggtctgggcgggcaccattacgccgccgcgcgaaggcatcatcaagcgctggacctggcctgccgggg

SEQ ID NO: 287387 - DNA, 75 bp, synthetic construct
  source 1..75: mol_type = other DNA
cgagcagtttgatgaaatcaatattgtacgtggtcagccagtatctggtggacgtctgggggtgaagatttaccc

SEQ ID NO: 287388 - DNA, 75 bp, synthetic construct
  source 1..75: mol_type = other DNA
cggcgatcctgttactggcagggtgtgcaggcgaaaaaggcattgtcgagaaagagggataccaactcgataccc

SEQ ID NO: 287389 - DNA, 75 bp, synthetic construct
  source 1..75: mol_type = other DNA
atgagaagagtcttctggctggtcgctgccgctctgttactggcagggtgcacaggcgaaaaaggcattgtcgag

SEQ ID NO: 287390 - DNA, 75 bp, synthetic construct
  source 1..75: mol_type = other DNA
gcgctgccgcgacctggacaatatcctgaaggcaccactggatgcactgacacatgcaggactgcttatcgacga

SEQ ID NO: 287391 - DNA, 75 bp, synthetic construct
  source 1..75: mol_type = other DNA
atgcccatagatttggttttaccttacccgccaacggtgaacacctactggcgacgtcgtggcagcacatatttt

SEQ ID NO: 287392 - DNA, 75 bp, synthetic construct
  source 1..75: mol_type = other DNA
tatcgccgggctgtggcgcttattgttcgccagcagcggctgaaattaagcctgtccggaaggctggcgataaag

SEQ ID NO: 287393 - DNA, 75 bp, synthetic construct
  source 1..75: mol_type = other DNA
tatcagccagttgggtaaaatcgaagaagataaaatcctgcaagccaaaggccacaactacagcctcgaagcctt

SEQ ID NO: 287394 - DNA, 75 bp, synthetic construct
  source 1..75: mol_type = other DNA
gccggtgagcgttatcgccgggctgtggcgcttattgttcgccagcagcggctgaaattaagcctgtccggacgg

SEQ ID NO: 287395 - DNA, 75 bp, synthetic construct
  source 1..75: mol_type = other DNA
gcaccgctggatgcgttgacgcatgcgggactgcttatcgacgacgagcagtttgatgaaatcaatattgcgcgc

SEQ ID NO: 287396 - DNA, 75 bp, synthetic construct
  source 1..75: mol_type = other DNA
gaactatcgtggattgccagcggcaactacgctgggtatctggctggaagcctgttgttttcattcggcgcattt

SEQ ID NO: 287397 - DNA, 75 bp, synthetic construct
  source 1..75: mol_type = other DNA
cggcgctgaccagtatgctcggcaacggaacgtcggccctcgccagtgccacgctctgcggcgcagcggcgctat

SEQ ID NO: 287398 - DNA, 75 bp, synthetic construct
  source 1..75: mol_type = other DNA
aatataaaaaatatttgctcggtaaattatatttagatatatataataaaatgccaaatgcaaatatagttaaca

SEQ ID NO: 287399 - DNA, 75 bp, synthetic construct
  source 1..75: mol_type = other DNA
tcatggccgatctggagttcgaccgcgacaaccttgaggaagtatggcgtaaacagccacggcttttaatggagt

SEQ ID NO: 287400 - DNA, 75 bp, synthetic construct
  source 1..75: mol_type = other DNA
aggctatctgcgtactgttaaccctcgccagcagttctcctttattactcatcatcagcagtattggctttggcg

SEQ ID NO: 287401 - DNA, 75 bp, synthetic construct
  source 1..75: mol_type = other DNA
catttaccctcacgtctgcgcccgtttttattggcttgcgccctggcaaccggcttgttgatcctcgcgatggcg

SEQ ID NO: 287402 - DNA, 75 bp, synthetic construct
  source 1..75: mol_type = other DNA
ggtgcaagaagtgaatccaccgttaaatctgctattgcagaactggcgaaagagggctggctgacgaaggaagag

SEQ ID NO: 287403 - DNA, 75 bp, synthetic construct
  source 1..75: mol_type = other DNA
agggcgtggtagtgaacaacgtgaaaacgggcactccggctgcgcagatcggcctgaagaaaggtgatgtgatta

SEQ ID NO: 287404 - DNA, 75 bp, synthetic construct
  source 1..75: mol_type = other DNA
tccgttctgccaggggggccagggcggtaatggcggcggccagcaacagaaattcatggcgctgggttccggcgt

SEQ ID NO: 287405 - DNA, 75 bp, synthetic construct
  source 1..75: mol_type = other DNA
acggctgaaagatttacccaatatgtcttaccatcttgaggctattctcggggaagtggggattaaggatgtacg

SEQ ID NO: 287406 - DNA, 75 bp, synthetic construct
  source 1..75: mol_type = other DNA
tctataagtcacaagaataccttgcaacgttaggcaccattgaatatcgatcgctgtttggcagttacagtttga

SEQ ID NO: 287407 - DNA, 75 bp, synthetic construct
  source 1..75: mol_type = other DNA
cggcaccggagcctggcggaggtgttgcaggaggacacgggggtgacgcttccggcggagctggcggtgatgctg

SEQ ID NO: 287408 - DNA, 75 bp, synthetic construct
  source 1..75: mol_type = other DNA
gtcgggtttattgcgcaccctggcgattagatgctttaaatttaaatgacattatcgatcaatggattgacgata

SEQ ID NO: 287409 - DNA, 75 bp, synthetic construct
  source 1..75: mol_type = other DNA
cgccgggcacgagatttttgtcattagcgatgaagtctacgagcacatcaacttttcacaacagggccatgccag

SEQ ID NO: 287410 - DNA, 75 bp, synthetic construct
  source 1..75: mol_type = other DNA
gtaaggtgcatcagtatctgaccttttcggtcaacacccccgcacaactggcgcttgccgatatgctgcgggaaa

SEQ ID NO: 287411 - DNA, 75 bp, synthetic construct
  source 1..75: mol_type = other DNA
cggctggcgtaccacgttgcccagggggcaaaccaatacgcgcctatgactggcgtgcaggccttgcgcgaggcg

SEQ ID NO: 287412 - DNA, 75 bp, synthetic construct
  source 1..75: mol_type = other DNA
atcaatcttgattggaggctgtttagcgaagatttgaaggtttggttaattgttgagcaccatgcctataacaag

SEQ ID NO: 287413 - DNA, 75 bp, synthetic construct
  source 1..75: mol_type = other DNA
gctttcctgattttgatggtccgcgctatttacaggagcggctggcgtaccacgttgcccagggggcaaaccaat

SEQ ID NO: 287414 - DNA, 75 bp, synthetic construct
  source 1..75: mol_type = other DNA
tagcgggtggggtagtgaaacgcatcgcgctgcaaccgccgtattttcgcgttgactggcaagagtttgctgcgt

SEQ ID NO: 287415 - DNA, 75 bp, synthetic construct
  source 1..75: mol_type = other DNA
ggtgaagtggcagctacacgatgctcagcactgtttcaatctcaatgccctggcaaaagtctccgacgatccact

SEQ ID NO: 287416 - DNA, 75 bp, synthetic construct
  source 1..75: mol_type = other DNA
ggcttcccctgatttccccgcccaggtattcagtgcgctgctgattaacgccggtatcgatcgcggaaacaccga

SEQ ID NO: 287417 - DNA, 75 bp, synthetic construct
  source 1..75: mol_type = other DNA
gggcagcggggaattcttcagagttttaccctataagtaagctgatgaattatgtggcaaaagtggtttcggtgt

SEQ ID NO: 287418 - DNA, 75 bp, synthetic construct
  source 1..75: mol_type = other DNA
tgcactggaggagtaaaaatttgaattcgcatatcatcgcgaacaacaaattcatgttcgtggaagttaatactc

SEQ ID NO: 287419 - DNA, 75 bp, synthetic construct
  source 1..75: mol_type = other DNA
tacactggaggagtaaaaatttgaattcgcatatcatcgcgaacagcaaattcatgttcgtggaagttaatactc

SEQ ID NO: 287420 - DNA, 75 bp, synthetic construct
  source 1..75: mol_type = other DNA
gctttcacggcgcagaagataacttttaccaaagccaaacgccgcctcgccatagcgccaatcaaatgctttttc

SEQ ID NO: 287421 - DNA, 75 bp, synthetic construct
  source 1..75: mol_type = other DNA
gcagcatgtgagctacgttttggcaaaggtaatgagttatcgcatggcggattcgttggaacgtcgttgatcagg

SEQ ID NO: 287422 - DNA, 75 bp, synthetic construct
  source 1..75: mol_type = other DNA
ggattacaactggcgtgctaatggcacccctccctctttccatgagcagagatctttatcagagcgattgttcag

SEQ ID NO: 287423 - DNA, 75 bp, synthetic construct
  source 1..75: mol_type = other DNA
catttaaaaaagcccgggattctgtggattacaactggcgtgctaatggcacccctccctctttccatgagcaga

SEQ ID NO: 287424 - DNA, 75 bp, synthetic construct
  source 1..75: mol_type = other DNA
tgaaacaaaaagcggctcctctcagggtgtttgatgaacgttttggagccaggccgctagatgccataaccgtaa

SEQ ID NO: 287425 - DNA, 75 bp, synthetic construct
  source 1..75: mol_type = other DNA
gccactggggcaattgccgcagaagtgctgactgagctaccacctgagccattttggtggatgacagggatttcc

SEQ ID NO: 287426 - DNA, 75 bp, synthetic construct
  source 1..75: mol_type = other DNA
gtctgccttagaaagtatatttgaacattatcttgattatattattgataataataaaaaccttatccctatcca

SEQ ID NO: 287427 - DNA, 75 bp, synthetic construct
  source 1..75: mol_type = other DNA
agtatttgatgaacgttttggtaccagaccattagatgccataaccgtaaaagatgtggtatcggtgctggaaga

SEQ ID NO: 287428 - DNA, 75 bp, synthetic construct
  source 1..75: mol_type = other DNA
ggaaactgctctggaatatgctcgtcgatttaaagcccttgccgcagaggttagcgatagcctctatctggtaat

SEQ ID NO: 287429 - DNA, 75 bp, synthetic construct
  source 1..75: mol_type = other DNA
gccggcacccgctatttcgataaaaacaacaacccggtaagcgatccgtcgctggatgaatgcaatggcacgctg

SEQ ID NO: 287430 - DNA, 75 bp, synthetic construct
  source 1..75: mol_type = other DNA
accgcctgcaagcttcggtttggtgaacacaatgaacttcctttcggtggttttccgggaacatctttgatcagg

SEQ ID NO: 287431 - DNA, 75 bp, synthetic construct
  source 1..75: mol_type = other DNA
aaattaaatctcaccctggatgatgtagtgtcatcctgtcgcgattgcgttcttagtccgtggttattgcaccac

SEQ ID NO: 287432 - DNA, 75 bp, synthetic construct
  source 1..75: mol_type = other DNA
gctggtcggcaattggtgctcgtaccacggaatcgcaaacgcaccgtgaaatggcatccgggctatctatgccgg

SEQ ID NO: 287433 - DNA, 75 bp, synthetic construct
  source 1..75: mol_type = other DNA
accactgttggctggaaagggctgatcaatgatcctcatatggatggctcttttgacgtagaagccgggctgcaa

SEQ ID NO: 287434 - DNA, 75 bp, synthetic construct
  source 1..75: mol_type = other DNA
acagaagggactaaaaggcaaacctttggcttttatggcgctgtcgcatttgcaaaaggtgatggcaaaacatcc

SEQ ID NO: 287435 - DNA, 75 bp, synthetic construct
  source 1..75: mol_type = other DNA
caaccgttgataaaaaacatccggttaggggggcgatggttggccccgatccgtcagtattaaaacctgatccgt

SEQ ID NO: 287436 - DNA, 75 bp, synthetic construct
  source 1..75: mol_type = other DNA
cgtaaggtcggtgggcgtaatgtaagcaatatctatcggcttaatgtggaaaaactcgaagcagctgctgcggcg

SEQ ID NO: 287437 - DNA, 75 bp, synthetic construct
  source 1..75: mol_type = other DNA
gacttcgaacgtctgatggaaggcgctaaactgttgaaatgttcagagtttggtgacgcgatcatcaagaacatg

SEQ ID NO: 287438 - DNA, 75 bp, synthetic construct
  source 1..75: mol_type = other DNA
gcgcgtgaggcatataaaccgaaaagaaaaattagccaggcaaaaaatgacccgtcaaatattgacccctcaacg

SEQ ID NO: 287439 - DNA, 75 bp, synthetic construct
  source 1..75: mol_type = other DNA
atggcccgtctagcagactacagcaatgacgagggcgtgtcatggcctgccattgaaactatccggcgtcagatc

SEQ ID NO: 287440 - DNA, 75 bp, synthetic construct
  source 1..75: mol_type = other DNA
gccagtgacgatggtgagatcacgcgaccgaaagagcccaactggacggcgtgggccaatgacgtgcgcacaatg

SEQ ID NO: 287441 - DNA, 75 bp, synthetic construct
  source 1..75: mol_type = other DNA
taaggagcccatcatgcacggaggcaaccaaggtgagcgtttgatggaggaggaggcggatctgttccctgccca

SEQ ID NO: 287442 - DNA, 75 bp, synthetic construct
  source 1..75: mol_type = other DNA
acggggatctgtggcgtgatggcgatggctcgtttgccaaaggctatcaaacttcacctgctccaaaagcatttg

SEQ ID NO: 287443 - DNA, 75 bp, synthetic construct
  source 1..75: mol_type = other DNA
gcgttgtttaccggcaatcatggcgaacgcttgatggaggaagaaggcgatatgtttccaccgcagttattaggc

SEQ ID NO: 287444 - DNA, 75 bp, synthetic construct
  source 1..75: mol_type = other DNA
gacttcgaacgtctgatggagggcgctaaactgctgaaatgttcagagtttggtgacgcgatcatcaagaatatg

SEQ ID NO: 287445 - DNA, 75 bp, synthetic construct
  source 1..75: mol_type = other DNA
ggaaggcgcaatcaacgccaagaccgtaacctatgacttcgaacgtctgatggaaggcgctaaactgctgaaatg

SEQ ID NO: 287446 - DNA, 75 bp, synthetic construct
  source 1..75: mol_type = other DNA
gacttcgaacgtctgatggaaggcgctaagctgctgaaatgttcagagtttggtgatgcgatcatcaagaagatg

SEQ ID NO: 287447 - DNA, 75 bp, synthetic construct
  source 1..75: mol_type = other DNA
caggcagggctggccgggggagacagccctgcacggtttattgcaccgggacgtaaatatccgcagccgtatgtg

SEQ ID NO: 287448 - DNA, 75 bp, synthetic construct
  source 1..75: mol_type = other DNA
gtggggaccggtgaccggatgcgcttcacgaagagtgaccgggggcgtggttatgtggccaacagcgtctggacg

SEQ ID NO: 287449 - DNA, 75 bp, synthetic construct
  source 1..75: mol_type = other DNA
ttgtatgcgggaagttaacctctggggatgtccttatcgactgaaatgccaaagtgctgccttttgtgaacattt

SEQ ID NO: 287450 - DNA, 75 bp, synthetic construct
  source 1..75: mol_type = other DNA
gcctgctggctgataatatgcaggatggtgtccggattgcccgtgataatcctgacagcggtgtggtggtgagaa

SEQ ID NO: 287451 - DNA, 75 bp, synthetic construct
  source 1..75: mol_type = other DNA
tctccgcccccaaaagtgtctccatgatggccatgctcgggggggataaacgtcttattgatgcacataaccagg

SEQ ID NO: 287452 - DNA, 75 bp, synthetic construct
  source 1..75: mol_type = other DNA
ttcacgctgacaggccggatagatgagctaccaaatctgattgccaaaaaacaggctttacagcaagcacattcg

SEQ ID NO: 287453 - DNA, 75 bp, synthetic construct
  source 1..75: mol_type = other DNA
ccttgccctggtggataatgtgtatcaccggattgccggtatcagcagggatgacgggctgataaccctgcagga

SEQ ID NO: 287454 - DNA, 75 bp, synthetic construct
  source 1..75: mol_type = other DNA
atatgaggttctgacggatgccgttaactactacgtaaatcacgggtgggatagcgaaaaatcattgctcgaatg

SEQ ID NO: 287455 - DNA, 75 bp, synthetic construct
  source 1..75: mol_type = other DNA
tggccctgtcgcgtatgaagcagcatgtgcaggtgtacaccgataaccgtcagggctggacggatgccattaaca

SEQ ID NO: 287456 - DNA, 75 bp, synthetic construct
  source 1..75: mol_type = other DNA
tgacgctggcgacagcgcgtgatccggaggcggcaagcatgcgctaccggaaacggatcattatcgttgaaagta

SEQ ID NO: 287457 - DNA, 75 bp, synthetic construct
  source 1..75: mol_type = other DNA
gcgaaccggattgcgttcgggaaaatatatcagagtgagttacgtcagcgcgttgaggcgctgggttatgaaacc

SEQ ID NO: 287458 - DNA, 75 bp, synthetic construct
  source 1..75: mol_type = other DNA
gtcgcgatcaggacccacagttacacacgcatgtggtggtggctaatgtcacgcagcataacggcgaatggaaga

SEQ ID NO: 287459 - DNA, 75 bp, synthetic construct
  source 1..75: mol_type = other DNA
gatcttcaactcgttgaagagggaatgtcttgtgaagttcgtatcggagatgatctgacactgacgggatatgtt

SEQ ID NO: 287460 - DNA, 75 bp, synthetic construct
  source 1..75: mol_type = other DNA
ggtggctgaaggcgtcacgctgtacaccccggacaccatccgggtggggaccggtgacaggatacgcttcacgaa

SEQ ID NO: 287461 - DNA, 75 bp, synthetic construct
  source 1..75: mol_type = other DNA
ggcttttccggatgtccccatgacactgtatgaagccattgtccgcgactataccggcaggacaccggaagcacg

SEQ ID NO: 287462 - DNA, 75 bp, synthetic construct
  source 1..75: mol_type = other DNA
ggaagttgcccgggaaaatttgctgcaggagcgtctgcagcagatggagcgggatatggttcgtgacctgcagaa

SEQ ID NO: 287463 - DNA, 75 bp, synthetic construct
  source 1..75: mol_type = other DNA
atgaggccattgtccgcgactataccggcaggacaccggaagcacgggagcagacgctgattgtcacgcacctga

SEQ ID NO: 287464 - DNA, 75 bp, synthetic construct
  source 1..75: mol_type = other DNA
gagtcagcctacgtggcgctgagccgcatgaagcagcacgcgcaggtctataccgacaaccgggataagtgggtg

SEQ ID NO: 287465 - DNA, 75 bp, synthetic construct
  source 1..75: mol_type = other DNA
cggtgaaggccgtccgtggaatcccggtgccatcaccggtggtcgcgtgtggggggatctcccggacaacagcgt

SEQ ID NO: 287466 - DNA, 75 bp, synthetic construct
  source 1..75: mol_type = other DNA
tcctcttaaactcacagaaacgacatttgccgatgatttacggttcagacttgagggccctgcgaattttacaga

SEQ ID NO: 287467 - DNA, 75 bp, synthetic construct
  source 1..75: mol_type = other DNA
ctgatgtcgatgacttgattaaggtacctcaattcacaattaactggggtgaatcaccacaggaaattattgaaa

SEQ ID NO: 287468 - DNA, 75 bp, synthetic construct
  source 1..75: mol_type = other DNA
aattgtcaggaaaatggcagagaacaaacctgacttgccggacggcaaaacagagctggctgtcagggatattgc

SEQ ID NO: 287469 - DNA, 75 bp, synthetic construct
  source 1..75: mol_type = other DNA
cacaggtcagcggagtacgggaacaggccatactgacacaggccattcgcagtgagctgaaaacacagggcgtgc

SEQ ID NO: 287470 - DNA, 75 bp, synthetic construct
  source 1..75: mol_type = other DNA
gcgcgtaatgatcgacgatagtagtgtcgtgattggtgacgttcgtctggctgatgatgtgggggtttggccgct

SEQ ID NO: 287471 - DNA, 75 bp, synthetic construct
  source 1..75: mol_type = other DNA
gcgggtagtctggtcccacaaaataaacggctggagagcggatatctgtatctcggtagccccgtcaaacagatc

SEQ ID NO: 287472 - DNA, 75 bp, synthetic construct
  source 1..75: mol_type = other DNA
ggaggttgcccgggaaaatctgctgcaggagcgactgcagcagatggagcgggatatggttcgtgacctgcagaa

SEQ ID NO: 287473 - DNA, 75 bp, synthetic construct
  source 1..75: mol_type = other DNA
aaattgaactggtggtggcgattggtaaaaaaggcagtgatatcccgctggaaaacgcccatgaatatgtctggg

SEQ ID NO: 287474 - DNA, 75 bp, synthetic construct
  source 1..75: mol_type = other DNA
ttcagcgtgatgtcaccacgtacaggaaaaacgcttacggggttgcggataacagctacctcgacagcgagacgc

SEQ ID NO: 287475 - DNA, 75 bp, synthetic construct
  source 1..75: mol_type = other DNA
gtggctcaccgttgtgaaggagatacacgcagacatttcccgcgcctgaccgagatgaacgataccagcggtcgc

SEQ ID NO: 287476 - DNA, 75 bp, synthetic construct
  source 1..75: mol_type = other DNA
tagtagtgaagacgatattaaaaagtttaagcagggtaagtttatgccagtggtagaaacctctccagtactatc

SEQ ID NO: 287477 - DNA, 75 bp, synthetic construct
  source 1..75: mol_type = other DNA
cgccaatctggttacaggttaacggcgaagatcatcagcgcagcgatattcgtcatctcatctggtcagtgaatg

SEQ ID NO: 287478 - DNA, 75 bp, synthetic construct
  source 1..75: mol_type = other DNA
gttatgccacgggtcttgatatgactcgccgtgaccgtcaaatggaaatgcgccagatgggccgcccgtgggaaa

SEQ ID NO: 287479 - DNA, 75 bp, synthetic construct
  source 1..75: mol_type = other DNA
tgctatcggttttaacgcgccagacctgaatatgaaacacggtttatatactcaactgcgggaaaaacttgccag

SEQ ID NO: 287480 - DNA, 75 bp, synthetic construct
  source 1..75: mol_type = other DNA
tggcgataacggacgtaaaaattacgatgaagcatcaggtatgcagcaggctttgatcgctaaaggcgtaccggc

SEQ ID NO: 287481 - DNA, 75 bp, synthetic construct
  source 1..75: mol_type = other DNA
gaatttcataaccaacgcgccatctggctggcaaaacagtacggcatcgacgctatcggttttaacgcgccagac

SEQ ID NO: 287482 - DNA, 75 bp, synthetic construct
  source 1..75: mol_type = other DNA
catcaggctgagcaggggcgttattatctgacagaatgtcagttggtggaaagaaacagagatacgggcttctgg

SEQ ID NO: 287483 - DNA, 75 bp, synthetic construct
  source 1..75: mol_type = other DNA
acagacaccccaaatcgagggttaaagttagttattcttcaaaaagataccacactgcaatgttactttggttac

SEQ ID NO: 287484 - DNA, 75 bp, synthetic construct
  source 1..75: mol_type = other DNA
tgcagcaggctttgatcgcaaagggcgtaccggcaaaagtgatcttctgtgactatgccggattctcaacgcttg

SEQ ID NO: 287485 - DNA, 75 bp, synthetic construct
  source 1..75: mol_type = other DNA
aggcagatcatgataactttggtgatagtctaatttattattgttatttatctttactcaaagaaatgggacatg

SEQ ID NO: 287486 - DNA, 75 bp, synthetic construct
  source 1..75: mol_type = other DNA
gaattgtgcactttaggatcttacattgcgcttaatttagatggcagcgtgcaggaacgcacattttcgttatca

SEQ ID NO: 287487 - DNA, 75 bp, synthetic construct
  source 1..75: mol_type = other DNA
acccgtactggcagtacatcatcaaaggggcgatcattatcttcgccgtggcgctggattccctgaagtacgcgc

SEQ ID NO: 287488 - DNA, 75 bp, synthetic construct
  source 1..75: mol_type = other DNA
tgcggtggcgttcgtctgggtgttgtggaacaaaacccgcttcggtaagaacatttttgccattggcggtaaccc

SEQ ID NO: 287489 - DNA, 75 bp, synthetic construct
  source 1..75: mol_type = other DNA
ttttaaggcagagcaacctaatcagaaatggctgacagatatcacggagttccagctccctgcaggtaaagtctg

SEQ ID NO: 287490 - DNA, 75 bp, synthetic construct
  source 1..75: mol_type = other DNA
agtgatcgttcatggaccaaaaggggaagataaagccagggtattagtggattgttataataatgatcctaccca

SEQ ID NO: 287491 - DNA, 75 bp, synthetic construct
  source 1..75: mol_type = other DNA
ttttaattgttacgtcgacaattaatttagaagtctttaatgcgctcaaacttgaacagactaaattaacattag

SEQ ID NO: 287492 - DNA, 75 bp, synthetic construct
  source 1..75: mol_type = other DNA
tcaaaggaaccacaaatatttagcctacaagaagagcaacacaaagaagaaggtcgtgataccgtgaaacgttta

SEQ ID NO: 287493 - DNA, 75 bp, synthetic construct
  source 1..75: mol_type = other DNA
ctttaagtgggatggacagacgcgcgatatcgccacttggaatcgcgatcataatctaatcaccgcgatgaaata

SEQ ID NO: 287494 - DNA, 75 bp, synthetic construct
  source 1..75: mol_type = other DNA
tctgcttttttccagaccagtgttcgtgtctggccacaatatggtcgtgtggaaatccgtgggattcggaaaaca

SEQ ID NO: 287495 - DNA, 75 bp, synthetic construct
  source 1..75: mol_type = other DNA
agggggtgaataattaccgccttcagaatgaacagcgtactgccgtgacaccgatggggtttaatatgccctttg

SEQ ID NO: 287496 - DNA, 75 bp, synthetic construct
  source 1..75: mol_type = other DNA
ccgtgtcacagaacagtgccgacgcctcttatttgcagcagatggcgctgtcatttattgccctccgtctgaatg

SEQ ID NO: 287497 - DNA, 75 bp, synthetic construct
  source 1..75: mol_type = other DNA
ttgaacatatcagtaattcagcgtggcgtgtggcaaccagtgatatctcacagcaatacagattcagttatattt

SEQ ID NO: 287498 - DNA, 75 bp, synthetic construct
  source 1..75: mol_type = other DNA
cgaatatacgtgacggagaactgcgtcgtctttccacctgggagacacatcgggacgcacttgcccttgtggata

SEQ ID NO: 287499 - DNA, 75 bp, synthetic construct
  source 1..75: mol_type = other DNA
aattgtcaggaaaatggcagagaacaaacctgacctgccggatggcaaaacagagctggctgtcagggatattgc

SEQ ID NO: 287500 - DNA, 75 bp, synthetic construct
  source 1..75: mol_type = other DNA
accccggtcaggagcgggcagagcaacatattgacctggcctatgccatcaccgcccacggtgcgcagggggcaa

SEQ ID NO: 287501 - DNA, 75 bp, synthetic construct
  source 1..75: mol_type = other DNA
tctccaggatttccggggcggttcaatcaccggattgccggtatcagcagggatgacgggctgataactctgcag

SEQ ID NO: 287502 - DNA, 75 bp, synthetic construct
  source 1..75: mol_type = other DNA
ccgggcaggagcgtgaatgggctgtcacttctgaacgggaagctgcgctgccggagagtgtactgcgtgaaccac

SEQ ID NO: 287503 - DNA, 75 bp, synthetic construct
  source 1..75: mol_type = other DNA
gggacgtggcggcaggccgtgccgttctccgtcaggcgggacttgccgggggagacagtcctgcacggtttattg

SEQ ID NO: 287504 - DNA, 75 bp, synthetic construct
  source 1..75: mol_type = other DNA
ctccgtcaggcggggctggccgggggagacagtccggcacggtttattgcaccggggcgcaaatatccgcagccg

SEQ ID NO: 287505 - DNA, 75 bp, synthetic construct
  source 1..75: mol_type = other DNA
ggcgaagtcgtttgctgcagaaggaaccagttttgttgacctgggacgggaaatcgatgcgcagataaaacgggg

SEQ ID NO: 287506 - DNA, 75 bp, synthetic construct
  source 1..75: mol_type = other DNA
cacgcgccggtatcgatgaggccatcagccgtgagcagcttatccccctcgatcgtgagaaggggctgttcacgt

SEQ ID NO: 287507 - DNA, 75 bp, synthetic construct
  source 1..75: mol_type = other DNA
aagattttattccactattaaatattgtaccatttaagccgaacctatcacctactcccattactgataaaataa

SEQ ID NO: 287508 - DNA, 75 bp, synthetic construct
  source 1..75: mol_type = other DNA
tggccctgtcgcgtatgaagcagcatgtgcaggtgtacactgatgaccgtcagggctggacggatgccatcaaca

SEQ ID NO: 287509 - DNA, 75 bp, synthetic construct
  source 1..75: mol_type = other DNA
ttcatgtgctcgatgagctgtcagtccgggcactcagtcgcgatatcatgaaacagaaccgggtgaccgtacatc

SEQ ID NO: 287510 - DNA, 75 bp, synthetic construct
  source 1..75: mol_type = other DNA
tgttagctacgttttgcacattattcacagcaactctccaggccgccgatgtcactatcactgttaatggtcggg

SEQ ID NO: 287511 - DNA, 75 bp, synthetic construct
  source 1..75: mol_type = other DNA
agtggattacccaacaaattttgcaggaacttgccaccagtaaaaaaacggcagcgcctgctgccgcgcccgtcg

SEQ ID NO: 287512 - DNA, 75 bp, synthetic construct
  source 1..75: mol_type = other DNA
ctgtagcaaaatcctcagcaaactgggcgtaacgacatcgtggtttgatccgctgattggcgcggatatcgttaa

SEQ ID NO: 287513 - DNA, 75 bp, synthetic construct
  source 1..75: mol_type = other DNA
aactggtcaatgcaggacgcagcaaaaaatatacccttggcgcggtaaatagcgtgattcagcgcgcctcttcgc

SEQ ID NO: 287514 - DNA, 75 bp, synthetic construct
  source 1..75: mol_type = other DNA
tcgaaaagcatctcgtcgctgaagtgaaaaaagctggcggggttgcctttaagttcgtatctcccggtcgccgct

SEQ ID NO: 287515 - DNA, 75 bp, synthetic construct
  source 1..75: mol_type = other DNA
cacgccccgaccagctgcgcgagcacgaacggctacgcgcgctgggctttaccgtggtggtactggatagcaaaa

SEQ ID NO: 287516 - DNA, 75 bp, synthetic construct
  source 1..75: mol_type = other DNA
cacggcctgaccagttgcgcaaacatgaacgtctgcgaaaactgggctttaccgtagtggtgctggatagcaaga

SEQ ID NO: 287517 - DNA, 75 bp, synthetic construct
  source 1..75: mol_type = other DNA
atgatctcactcccgtcaggtacccgcatctggctcgttgccggcgttaccgatatgcgtaaatccttcaacgga

SEQ ID NO: 287518 - DNA, 75 bp, synthetic construct
  source 1..75: mol_type = other DNA
tacagcaactctccaggccgccgatgtcactatcactgttaatggtcgggtagtcgctaaaccatgcactattca

SEQ ID NO: 287519 - DNA, 75 bp, synthetic construct
  source 1..75: mol_type = other DNA
gcatctggctcgttgccggcgttgccgatatgcgtaaatccttcaacggagtggggggacagatacagcatgtgc

SEQ ID NO: 287520 - DNA, 75 bp, synthetic construct
  source 1..75: mol_type = other DNA
gcagatggacatagagaacttcgacgttagcccgttcctctgcggggtgatcgccctgtccctgctgtatgctgc

SEQ ID NO: 287521 - DNA, 75 bp, synthetic construct
  source 1..75: mol_type = other DNA
ctggtgatcaccctgctcagtcagtacattctcaaacgcattgacctgcgcgcgacacgttttgagcggaggccc

SEQ ID NO: 287522 - DNA, 75 bp, synthetic construct
  source 1..75: mol_type = other DNA
ccatttacctggtacattgtggcggcggcgatttacctggtgatcaccctgctcagtcagtacattctcaaacgc

SEQ ID NO: 287523 - DNA, 75 bp, synthetic construct
  source 1..75: mol_type = other DNA
gggagctgcgggacgtggtggccggccgtgccgttctccgtcaggcagggctggccgggggagacagtcctgcac

SEQ ID NO: 287524 - DNA, 75 bp, synthetic construct
  source 1..75: mol_type = other DNA
aaacctgacctgccggatggcaaaacagagcaggctgtcagggagattgccgggcaggagcgtgaccgggctgcc

SEQ ID NO: 287525 - DNA, 75 bp, synthetic construct
  source 1..75: mol_type = other DNA
ggcgcaaatatccgcagccgtatgtggcactgccggcgtttgaccgtaacggcaagtcagccggtatctggctga

SEQ ID NO: 287526 - DNA, 75 bp, synthetic construct
  source 1..75: mol_type = other DNA
cggcgaccggatgcgcttcacgaagagtgaccgggagcgcggttatgtggccaacagcgtctggacggtgacagc

SEQ ID NO: 287527 - DNA, 75 bp, synthetic construct
  source 1..75: mol_type = other DNA
tcgccccggacaggagcgggcagagcaacatattgacctggcctatgccatcaccgcccacggtgcgcagggggc

SEQ ID NO: 287528 - DNA, 75 bp, synthetic construct
  source 1..75: mol_type = other DNA
gtaaaaacctggccttcagcatggtggacctgctgacagaggcgaagtcgtttgctgcagaaggaaccggtttta

SEQ ID NO: 287529 - DNA, 75 bp, synthetic construct
  source 1..75: mol_type = other DNA
acgggtgcgggaagctgtcagggaaattgcccgggaaaatctgctgcaggagcgacttcagcagatggagcggga

SEQ ID NO: 287530 - DNA, 75 bp, synthetic construct
  source 1..75: mol_type = other DNA
tgaccgggctgccataactgaacgggaagccgcgctgccggagagtgtgctgcgtgaacctcaacgggtgcggga

SEQ ID NO: 287531 - DNA, 75 bp, synthetic construct
  source 1..75: mol_type = other DNA
ggcaccggagcactccgtgacggagttcagtcacagccaggaagcgaaactggcagaagcgcagcagaaggcgat

SEQ ID NO: 287532 - DNA, 75 bp, synthetic construct
  source 1..75: mol_type = other DNA
ccgggcagtactgttatcgttgaccagggcgaaaaactctccctgaaagagacgttaaccctgctggacggtgcc

SEQ ID NO: 287533 - DNA, 75 bp, synthetic construct
  source 1..75: mol_type = other DNA
ccggaaatggcgaaccggtcacggcagaggtactggcacagcggcaggctgaagaggccatccgccgtgaaacgg

SEQ ID NO: 287534 - DNA, 75 bp, synthetic construct
  source 1..75: mol_type = other DNA
gtcgtttgctgcagaaggaaccagttttgctgacctggagcgggaaatcgatgcgcagataaaacggggcgattt

SEQ ID NO: 287535 - DNA, 75 bp, synthetic construct
  source 1..75: mol_type = other DNA
gttcctgctcgatgagagctcaatggtgggcaataccgacatggcacgggcatacgccctgattgcggccggtgg

SEQ ID NO: 287536 - DNA, 75 bp, synthetic construct
  source 1..75: mol_type = other DNA
cggccggcagtgccgggaactattacaccgacaaggataattactatgtgctgggcagcatgggagaacgctggg

SEQ ID NO: 287537 - DNA, 75 bp, synthetic construct
  source 1..75: mol_type = other DNA
gccgaaaccggaccgggaggtcatgaatgcgcagcggctgttcagtacggcacgggaactgcgggacgtggcggc

SEQ ID NO: 287538 - DNA, 75 bp, synthetic construct
  source 1..75: mol_type = other DNA
ggcacaggatcgcccgtcgctggccattgtgtccgggcagggcggtgcagccgggcagcgtgagcgggtggctga

SEQ ID NO: 287539 - DNA, 75 bp, synthetic construct
  source 1..75: mol_type = other DNA
ccgaccgtttcacggtggttcagggttatgccggtgtgggtaagaccacacaattccgggcagtgatgtcagccg

SEQ ID NO: 287540 - DNA, 75 bp, synthetic construct
  source 1..75: mol_type = other DNA
gcagcatgtgcaggtgtacaccgataaccgtcagggctggacggatgccatcaacaatgccgtacagaaaggaac

SEQ ID NO: 287541 - DNA, 75 bp, synthetic construct
  source 1..75: mol_type = other DNA
ataacccggatgcccttgccctggtggataatgtgtatcaccggattgccggtatcagcagggatgacgggctga

SEQ ID NO: 287542 - DNA, 75 bp, synthetic construct
  source 1..75: mol_type = other DNA
tggatgaaacccgtactgcggaaaaacttgcccgccatccctcctttacggtggtttctgagcagataaaggcgc

SEQ ID NO: 287543 - DNA, 75 bp, synthetic construct
  source 1..75: mol_type = other DNA
ctggcacaggaccgtccgtcgctggccattgtgtccgggcaggggggagccgccgggcagcgtgagcgggtggct

SEQ ID NO: 287544 - DNA, 75 bp, synthetic construct
  source 1..75: mol_type = other DNA
gcctttgtccggcaccagttacggcattgccgggctgctgatgctggcagtcagccaccggctgtaccgggcgga

SEQ ID NO: 287545 - DNA, 75 bp, synthetic construct
  source 1..75: mol_type = other DNA
gctttgagtcagcctacgtggccctgtcgcgtatgaagcagcatgtgcaggtgtacaccgataaccgtcagggct

SEQ ID NO: 287546 - DNA, 75 bp, synthetic construct
  source 1..75: mol_type = other DNA
ccgggcactcagtcgtgatatcatgaaacagaaccgggtgaccgtacatccggagaaaagtgtcccccggacggc

SEQ ID NO: 287547 - DNA, 75 bp, synthetic construct
  source 1..75: mol_type = other DNA
cccggccaggagcgggcagagcaacatattgacctggcctatgccatcaccgcccacggtgcgcagggggcaagt

SEQ ID NO: 287548 - DNA, 75 bp, synthetic construct
  source 1..75: mol_type = other DNA
cgggaagccgcgctgccggagagtgtgctgcgtgaatcacaacgggagcgggaagcggtccgggaggttgcccgg

SEQ ID NO: 287549 - DNA, 75 bp, synthetic construct
  source 1..75: mol_type = other DNA
agctgataagaaagcagcggcagaaaaagccgccgcagacaaaaaagcggcagcggcaaaagcagcagctgaaaa

SEQ ID NO: 287550 - DNA, 75 bp, synthetic construct
  source 1..75: mol_type = other DNA
tgcaattaatgatccggggatactgcaacaggccgaccagtgtctggagcgggctgcctggctgcatcccaaaat

SEQ ID NO: 287551 - DNA, 75 bp, synthetic construct
  source 1..75: mol_type = other DNA
tttcagtgttgagaacagtgatatttatatcaactgtcaataataagaaaacttatattaattttattctaaaag

SEQ ID NO: 287552 - DNA, 75 bp, synthetic construct
  source 1..75: mol_type = other DNA
ggtctgacagagagagctttccccgatagcttaccctatgagatagagcgcgaacctttaagtaacagttttaca

SEQ ID NO: 287553 - DNA, 75 bp, synthetic construct
  source 1..75: mol_type = other DNA
gcaaaagaagcgatcgaacttggtctctcctttgatgaatatgaccccaagtgtcttcctgcaattcagtataaa

SEQ ID NO: 287554 - DNA, 75 bp, synthetic construct
  source 1..75: mol_type = other DNA
gttgaagaaaagctttgaaacaagcattaagcttgctgaaagcttcatatccccgtttatttatcttcaagctta

SEQ ID NO: 287555 - DNA, 75 bp, synthetic construct
  source 1..75: mol_type = other DNA
cggtgagttgtcgccgcgtgaccaggcgctggtgaccgatatgtgggaaaacctgtttcagcaggcgtcacagca

SEQ ID NO: 287556 - DNA, 75 bp, synthetic construct
  source 1..75: mol_type = other DNA
gaattgtcgccgcgtgaccaggcgctggtgaccgatatgtgggaacacctgtttcagcaggcctcacagcagtaa

SEQ ID NO: 287557 - DNA, 75 bp, synthetic construct
  source 1..75: mol_type = other DNA
aaagtgtttatttcagccagttatccgctcaacgtaaagaggaacgcacgataggtaatataggttttggggtga

SEQ ID NO: 287558 - DNA, 75 bp, synthetic construct
  source 1..75: mol_type = other DNA
acgctggaaagcggaaaatcaggaagggatggctgaggtcgcccggtttattgaaatgaacggctcttttgctga

SEQ ID NO: 287559 - DNA, 75 bp, synthetic construct
  source 1..75: mol_type = other DNA
ccagtcatacatcgaaggcgcattgtcaccttatggcaaggtaagatcaaacctctccatcggtcagggtggtga

SEQ ID NO: 287560 - DNA, 75 bp, synthetic construct
  source 1..75: mol_type = other DNA
tcttttaaagaacagggtgccgattacatcacgaactctgccacgcagggttttgaaaacctgactcccgaggcg

SEQ ID NO: 287561 - DNA, 75 bp, synthetic construct
  source 1..75: mol_type = other DNA
ttttcttcccggacactgaagttcgaccgattgagcttcctggcgggcgtttttttattggcgctaccagtgagc

SEQ ID NO: 287562 - DNA, 75 bp, synthetic construct
  source 1..75: mol_type = other DNA
atggcacgaaacaaacaagccctgcggcgaactgcgcaggccacagccgatggttatgagaattttattgcccgc

SEQ ID NO: 287563 - DNA, 75 bp, synthetic construct
  source 1..75: mol_type = other DNA
cgtcaggcggaaatccgctatcgaaccagcctacgcaggatagcgcgggcggtcggggacatcgtaaatggtcgc

SEQ ID NO: 287564 - DNA, 75 bp, synthetic construct
  source 1..75: mol_type = other DNA
gcgttcgacagcgctactgtcggtgcggcgcagctggtctacaaggcgcatttgcgtacctacagcgtggagaag

SEQ ID NO: 287565 - DNA, 75 bp, synthetic construct
  source 1..75: mol_type = other DNA
cgccgcactttctgaccgaatttcccggctggagcaccaactcgccgccgagaaaaagactgactattccacgtt

SEQ ID NO: 287566 - DNA, 75 bp, synthetic construct
  source 1..75: mol_type = other DNA
atgtttattcttaatcagaaaattatcatcggtggagaacgctggtttacgccaatgaaggacttaaaacctgta

SEQ ID NO: 287567 - DNA, 75 bp, synthetic construct
  source 1..75: mol_type = other DNA
gcgtgactttttcggcaaaagcgccatttcactgttactgctgttacccattgcattgcctggcattgtcactgg

SEQ ID NO: 287568 - DNA, 75 bp, synthetic construct
  source 1..75: mol_type = other DNA
gatgatatcctttcgcagtttgcagaacagattagtggcgctgttggtatcccactggtgaggttgttcggacag

SEQ ID NO: 287569 - DNA, 75 bp, synthetic construct
  source 1..75: mol_type = other DNA
tggatgattaacccggtgctgacacgccgcattaaagagatggggccggacctcggcaagcctgagttttacgac

SEQ ID NO: 287570 - DNA, 75 bp, synthetic construct
  source 1..75: mol_type = other DNA
ttggccctaacctcggcaagcctgaattctatgaaatcgtgacaacggcgcaggggcttcctccttggactgttc

SEQ ID NO: 287571 - DNA, 75 bp, synthetic construct
  source 1..75: mol_type = other DNA
ccaccagtacagcttcagtggtctggatgacattctttcgcagttcgctgagcagatcagcggtgccgttggtat

SEQ ID NO: 287572 - DNA, 75 bp, synthetic construct
  source 1..75: mol_type = other DNA
cgtcaggcggaaatccgctatcgaaccagcctacgcaggatagcgcgggcggtcggagacatcgtaaatggtcac

SEQ ID NO: 287573 - DNA, 75 bp, synthetic construct
  source 1..75: mol_type = other DNA
gattgatgacgcgtaaggcggcgatgaccgacctgcgcgaaaactctgacgtcaccggcatcggggcatccatta

SEQ ID NO: 287574 - DNA, 75 bp, synthetic construct
  source 1..75: mol_type = other DNA
aaaagggtaatcggcagaattccggtgtggtggaaatcaccgtgcagcaagaccgtaaaattgagctgatcgtca

SEQ ID NO: 287575 - DNA, 75 bp, synthetic construct
  source 1..75: mol_type = other DNA
gttatcaaggtgagaccggagaaagtgatttaagaacgttgatgcttggtgatattttatatatctcattgcgag

SEQ ID NO: 287576 - DNA, 75 bp, synthetic construct
  source 1..75: mol_type = other DNA
aatcaggtccctccactgtaactgaagatatgcaatcccttgatgatcgacttgcttttctggatatgaggatgg

SEQ ID NO: 287577 - DNA, 75 bp, synthetic construct
  source 1..75: mol_type = other DNA
cataccgtcgttgactaaatatggggtatacccacctccgccagaagctaaaggatcagccttcgcgcaaatggc

SEQ ID NO: 287578 - DNA, 75 bp, synthetic construct
  source 1..75: mol_type = other DNA
agcttggtgtgaaaatctttcagttcaaaaaaacaggaaggtgattcgcaaggattgtagagagaattcactctt

SEQ ID NO: 287579 - DNA, 75 bp, synthetic construct
  source 1..75: mol_type = other DNA
agcctggtgcgaaaatatttcagttcaaaaaagcaggaaagtgattcgcaagaattgtagagagaattcactctt

SEQ ID NO: 287580 - DNA, 75 bp, synthetic construct
  source 1..75: mol_type = other DNA
gttgaaaaccgtctgaaattgttagaatcaagtccttccactataactgaagatatgcaatcccttgatgagcga

SEQ ID NO: 287581 - DNA, 75 bp, synthetic construct
  source 1..75: mol_type = other DNA
gacgaaaacggcgaagaccgtgtggcgggggcaatcctcgcgaccggtcatcgcgcccataacccatgggggctg

SEQ ID NO: 287582 - DNA, 75 bp, synthetic construct
  source 1..75: mol_type = other DNA
atggattttggctccagcttgttagatatggcagtagcgcaagagcagcaatcagggcgtcaggtatttatggat

SEQ ID NO: 287583 - DNA, 75 bp, synthetic construct
  source 1..75: mol_type = other DNA
caccaatctgaccgaaagccagtttggtatcggcacaacgcgcagcacctttccgtggaatttgtccgggactta

SEQ ID NO: 287584 - DNA, 75 bp, synthetic construct
  source 1..75: mol_type = other DNA
tggagtccaacggcatcgatgaagtacctgactacaccgacccgattaccttcaacgccaaaataagctcgcccc

SEQ ID NO: 287585 - DNA, 75 bp, synthetic construct
  source 1..75: mol_type = other DNA
tgtggcggcatatggcactgacttctgccgccgtattaacgcaattaacgcaattaacgcaattaacgcaattaa

SEQ ID NO: 287586 - DNA, 75 bp, synthetic construct
  source 1..75: mol_type = other DNA
aatgccggacaggttattgccgtgcgtctggcgcgctttattggttgcacacaaaagcggtctgttgagggtaat

SEQ ID NO: 287587 - DNA, 75 bp, synthetic construct
  source 1..75: mol_type = other DNA
acgattatgctacctatagctatccgttcaatgtcaaacgccctgatgtaatagctgccatcctgcaggaacccg

SEQ ID NO: 287588 - DNA, 75 bp, synthetic construct
  source 1..75: mol_type = other DNA
attccctcgttgctctgttgaagtctgaaatgaagacatacgtaaacaaagcaccagagacttacagaagaatca

SEQ ID NO: 287589 - DNA, 75 bp, synthetic construct
  source 1..75: mol_type = other DNA
aatggggcaatgggtgaccttacggctctgcagacgatatttagcaaagtggtaagcgaagccggggaatctgag

SEQ ID NO: 287590 - DNA, 75 bp, synthetic construct
  source 1..75: mol_type = other DNA
cagcggatggactcagaaaaactcgtaacgttcaccactgcgctaatgaccggactttccggggcaatggcgagc

SEQ ID NO: 287591 - DNA, 75 bp, synthetic construct
  source 1..75: mol_type = other DNA
atgttgcgatggatacgctattttatgctaatttttatctctggtgctgcttatgcggagccagagataaatgtt

SEQ ID NO: 287592 - DNA, 75 bp, synthetic construct
  source 1..75: mol_type = other DNA
tgaaatggcaatcgactagcgatgtcagtatcagtagcgcaactcttgcctcaatcgcatgtggactgaaaaaga

SEQ ID NO: 287593 - DNA, 75 bp, synthetic construct
  source 1..75: mol_type = other DNA
atgtcagatttggctatgaaggttttgaaatggcaatcgactggcgatgtcggcatcagtagcgcaactcttgcc

SEQ ID NO: 287594 - DNA, 75 bp, synthetic construct
  source 1..75: mol_type = other DNA
ttaccttcaccacagcgctaatgaccgggctttccggggcaatggcgagcgtgcttttgctggtgatgaccgtag

SEQ ID NO: 287595 - DNA, 75 bp, synthetic construct
  source 1..75: mol_type = other DNA
ttagacttaccggatattgactttgacctcaacattatgacagttgatgactatttccgtcagttttacaagtag

SEQ ID NO: 287596 - DNA, 75 bp, synthetic construct
  source 1..75: mol_type = other DNA
agatttaatcaggctcaaatgcttagacttaccagatattgattttgacctcaacattatgatagtcgatgacta

SEQ ID NO: 287597 - DNA, 75 bp, synthetic construct
  source 1..75: mol_type = other DNA
gtcacctggtttattcgtcgcggagtccagcgtcccgttgccattacgattgtggtggtagtaatgctgatcgca

SEQ ID NO: 287598 - DNA, 75 bp, synthetic construct
  source 1..75: mol_type = other DNA
caggtgctgctgtttaatggcgtttacgaatgtattctggtcggcgcattgtttttagtggtccatatggtcatc

SEQ ID NO: 287599 - DNA, 75 bp, synthetic construct
  source 1..75: mol_type = other DNA
ttgaataatccgcagatccacatcgctggactgcatcgcgcattaaaaggcgtttcgcattatctggctttaaag

SEQ ID NO: 287600 - DNA, 75 bp, synthetic construct
  source 1..75: mol_type = other DNA
cacactgtcagaactggtgaacgcaggtgaccagtttaaccagcagcacatcaccctggcggggtacgaaaaaga

SEQ ID NO: 287601 - DNA, 75 bp, synthetic construct
  source 1..75: mol_type = other DNA
cgagatgaacgataccagcggtcgctggagctatgcgcgtcagctgtatggtcatgtgtatacggcaaagaccgg

SEQ ID NO: 287602 - DNA, 75 bp, synthetic construct
  source 1..75: mol_type = other DNA
ttcattgatgcagggaacggtaacgctacggatactgtgaaaaaattcactacacgttggagtaagtatcatccg

SEQ ID NO: 287603 - DNA, 75 bp, synthetic construct
  source 1..75: mol_type = other DNA
tgctgccatggccgatgagccgtttgattatattggtcatccgttcagcgatttggcctcggttaatgcatttgt

SEQ ID NO: 287604 - DNA, 75 bp, synthetic construct
  source 1..75: mol_type = other DNA
gctttggtgcgccggtggcgattaccggtgcgctgctggtgggcctgggcttcaaaccgttatacgcggcggggc

SEQ ID NO: 287605 - DNA, 75 bp, synthetic construct
  source 1..75: mol_type = other DNA
tgccaatgggaggactggggctatccgctctggtcgccctgatcccgataatattcttcttcgttgcactcgcgg

SEQ ID NO: 287606 - DNA, 75 bp, synthetic construct
  source 1..75: mol_type = other DNA
cggcaaccgaaaccggcacggtgaatgtttatgtgggacgtacccgcgtgcaggcaccggtgaccaacggcgata

SEQ ID NO: 287607 - DNA, 75 bp, synthetic construct
  source 1..75: mol_type = other DNA
aggaactcaacctttcagaaaattacgcgaacataaagctaagtcgaacgaaaatactaaatatagcaaggaagc

SEQ ID NO: 287608 - DNA, 75 bp, synthetic construct
  source 1..75: mol_type = other DNA
atgacgataagctttaacaccattccgtcgaatacgctggttccgctgttttatgcggaaatggataactcggcg

SEQ ID NO: 287609 - DNA, 75 bp, synthetic construct
  source 1..75: mol_type = other DNA
actctgccgtttacagcttcatcttcggctggtgtggtcacgctgaccgcgcgtcataaggggctttgcgggaat

SEQ ID NO: 287610 - DNA, 75 bp, synthetic construct
  source 1..75: mol_type = other DNA
ttcaaaccgctatacgcggcggggctgtgtctgattgccaacactgcgccggtggcgtttggtgcgttgggcgtg

SEQ ID NO: 287611 - DNA, 75 bp, synthetic construct
  source 1..75: mol_type = other DNA
atgacgatgagctttaacaccattccgtcgaatacgctggttccgattttttatgcggaaatggataaccaggcg

SEQ ID NO: 287612 - DNA, 75 bp, synthetic construct
  source 1..75: mol_type = other DNA
cgtcgaatacgctggtgccgttgttctacgccgagatggacaattctgcggcaaatacagcagtgaccagcgcgc

SEQ ID NO: 287613 - DNA, 75 bp, synthetic construct
  source 1..75: mol_type = other DNA
catcagttattacaagctttctttgtcttgctgtagatcgactaccacatcaacttaagtggagggaagagcctg

SEQ ID NO: 287614 - DNA, 75 bp, synthetic construct
  source 1..75: mol_type = other DNA
tcacttatcctttattttggggggggttgctatgtcctgatttttgttctgatccattatttaggatttatgggg

SEQ ID NO: 287615 - DNA, 75 bp, synthetic construct
  source 1..75: mol_type = other DNA
ctgtcgtcttatatcagacagcgataatatcgacattattctctggcatggttttcctttttccggtgaacacgc

SEQ ID NO: 287616 - DNA, 75 bp, synthetic construct
  source 1..75: mol_type = other DNA
gattggctgtttgttgttgcttatagcaggagcgaccatttttattgccgatcgcgttatggtcaacgccagcaa

SEQ ID NO: 287617 - DNA, 75 bp, synthetic construct
  source 1..75: mol_type = other DNA
agatgtgaccattgtcatacgagaataaaatggttctatttgattcccgtttttggatatcttttttccagagga

SEQ ID NO: 287618 - DNA, 75 bp, synthetic construct
  source 1..75: mol_type = other DNA
ccatcgagatgtaataattgtcatataaatataaaatggatatatctaatacccattctgggctttttgctttct

SEQ ID NO: 287619 - DNA, 75 bp, synthetic construct
  source 1..75: mol_type = other DNA
gctacagctgggtgctggggcgtgataaacagcacgccgaacgctgcgcgctgattgacgcgctgatgcagcaat

SEQ ID NO: 287620 - DNA, 75 bp, synthetic construct
  source 1..75: mol_type = other DNA
gagttaccggtctgtctgaattattatggttctggtggtggtgagattttgccagcagggcttcgggtggtgacg

SEQ ID NO: 287621 - DNA, 75 bp, synthetic construct
  source 1..75: mol_type = other DNA
agcctggtgctgatgccgtcggcagattatgcccgtcagatttgtggggcggggagccagctggcgcgtatggtc

SEQ ID NO: 287622 - DNA, 75 bp, synthetic construct
  source 1..75: mol_type = other DNA
ggaaaactacgaactgtttaagcagtacctggttgtggagcgtgatgccagcgatccgaaccgcctgaacacgct

SEQ ID NO: 287623 - DNA, 75 bp, synthetic construct
  source 1..75: mol_type = other DNA
aggcagaaaaaagaaattaataacaccattatttatccggtactttcgttatatccggtcagaatggatatagaa

SEQ ID NO: 287624 - DNA, 75 bp, synthetic construct
  source 1..75: mol_type = other DNA
actggccagccacacaggagatattctgcaggattatttcagcccgcgagaatatggacattattctctggcatg

SEQ ID NO: 287625 - DNA, 75 bp, synthetic construct
  source 1..75: mol_type = other DNA
tggcgataacggacgtaaaaattacgatgaagcgtcaggaatgcagcaagccttgatcgctaaaggcgtaccggc

SEQ ID NO: 287626 - DNA, 75 bp, synthetic construct
  source 1..75: mol_type = other DNA
tctgcgtctgaaccgggtgacggataaagagcgcgtagaaaaaggaatgatgagcgcccttcccgaaacggatat

SEQ ID NO: 287627 - DNA, 75 bp, synthetic construct
  source 1..75: mol_type = other DNA
ctggcgtgaagggagtgattcaggagacacggcacatcatagaccggataagcgcggctaccattcctgaggtga

SEQ ID NO: 287628 - DNA, 75 bp, synthetic construct
  source 1..75: mol_type = other DNA
gaactccttggtgaagtcgccacaacggggataaatccgaacatagcaaagcgcacgaacaataaggccatgata

SEQ ID NO: 287629 - DNA, 75 bp, synthetic construct
  source 1..75: mol_type = other DNA
aagagaaaacgactgacgcggaaattgccgcgctttctgatcgcatttcccggctggagcaccagcttgccgctg

SEQ ID NO: 287630 - DNA, 75 bp, synthetic construct
  source 1..75: mol_type = other DNA
gccgatgattcgcgctgaacaaccgcagcgtcagtgggcagaccgttcgcgcacagtgctggccgggcagagcct

SEQ ID NO: 287631 - DNA, 75 bp, synthetic construct
  source 1..75: mol_type = other DNA
ggaaatctcgccaggttcggctctatattccggacattgatatttctcagcccctcgggctggtcgtgctgcccg

SEQ ID NO: 287632 - DNA, 75 bp, synthetic construct
  source 1..75: mol_type = other DNA
gcagcaaagtttagtgcccaggtaaccgatggcgtgcagggatacggtttgcaggtcaattacagcaagaaatag

SEQ ID NO: 287633 - DNA, 75 bp, synthetic construct
  source 1..75: mol_type = other DNA
caaccacagccacgaagccagcgctcaggcagatggcgttgatggtgtggtgatggatcttgaggtgaccgacag

SEQ ID NO: 287634 - DNA, 75 bp, synthetic construct
  source 1..75: mol_type = other DNA
ggatggcagttccatcgattattttgttccctggtacgataatcaaaccactgtttatttcagtcaattttctgc

SEQ ID NO: 287635 - DNA, 75 bp, synthetic construct
  source 1..75: mol_type = other DNA
gatcccggcaacgaacaaggaagcggcagcgaagtttagtgcccaggtaaccgatggtgtgcaagggtacggttt

SEQ ID NO: 287636 - DNA, 75 bp, synthetic construct
  source 1..75: mol_type = other DNA
gaccattaacgcgctcattaaccatcactacaaaatcgttgctgcctcctggcaggcgaaaaacaatgctgcccg

SEQ ID NO: 287637 - DNA, 75 bp, synthetic construct
  source 1..75: mol_type = other DNA
actccgaagatttcgatttttatgaggagcgcccggcgcgcggctgggatattcgcgccgaagcctggctacctg

SEQ ID NO: 287638 - DNA, 75 bp, synthetic construct
  source 1..75: mol_type = other DNA
ggtttcaatctggtgctggacggcctgtcgctgaccatgctctcggtggtcactggtgtgggtttccttattcac

SEQ ID NO: 287639 - DNA, 75 bp, synthetic construct
  source 1..75: mol_type = other DNA
ttggtttctgacgcggtgaattctttgcttgatgatattagtcgcgatcgtgcgcatcagatccgccatgcgttt

SEQ ID NO: 287640 - DNA, 75 bp, synthetic construct
  source 1..75: mol_type = other DNA
tctgcagtttatccgtgtcaacggtacgctagttggcggttgtattgggctaattttgtatttgctgtcgcagct

SEQ ID NO: 287641 - DNA, 75 bp, synthetic construct
  source 1..75: mol_type = other DNA
gcgcggagttggtttctgacgcggtgaattctttgcttgatgatattagtcgcgatcgtgcgcatcagatccgcc

SEQ ID NO: 287642 - DNA, 75 bp, synthetic construct
  source 1..75: mol_type = other DNA
gaagccggaactgcgggtagtggcgcgcctgatcttactgccgctgttgctgctatgggcgatgaggcattcgac

SEQ ID NO: 287643 - DNA, 75 bp, synthetic construct
  source 1..75: mol_type = other DNA
ctgagttttccgcattcctgactcgccatatcagcgacacggtaaaaagctgggacgcacgggacatgtcgcggc

SEQ ID NO: 287644 - DNA, 75 bp, synthetic construct
  source 1..75: mol_type = other DNA
cctgaaatggcagcgcgagccgatgccgtaaaaagctatctgaaagaagacgaagcttttaaccgctatctcagt

SEQ ID NO: 287645 - DNA, 75 bp, synthetic construct
  source 1..75: mol_type = other DNA
gaccgatgatgcgcgtattcagcgcctgcttaagcgcgcggtccaccgggcgatcgataaggtcgatctttccgt

SEQ ID NO: 287646 - DNA, 75 bp, synthetic construct
  source 1..75: mol_type = other DNA
aaatgctgaaaccacatcaggagccgacgctgtacggggccaacggtcaaacctcaacgccccatcgcggcggta

SEQ ID NO: 287647 - DNA, 75 bp, synthetic construct
  source 1..75: mol_type = other DNA
cagcactgtcggcgctgccgctggtcactgctggcttcttcagtaaggatgagatcctcgcgggtgcgatggcga

SEQ ID NO: 287648 - DNA, 75 bp, synthetic construct
  source 1..75: mol_type = other DNA
atgcgtttgatcgcgccacttttgccctgatcgacaagctgaaaaacgatccggaaatggcagcgcgagccgatg

SEQ ID NO: 287649 - DNA, 75 bp, synthetic construct
  source 1..75: mol_type = other DNA
ctgcttaagcgcgcggtccaccgggcgatcgataaggtcgatctttccggcaccagcgcactgattctggagagc

SEQ ID NO: 287650 - DNA, 75 bp, synthetic construct
  source 1..75: mol_type = other DNA
cctttggtagttcttcagaatcagaagtaaagaaattcaaggatggtaaatttcttcctgcaattgaaaccagtg

SEQ ID NO: 287651 - DNA, 75 bp, synthetic construct
  source 1..75: mol_type = other DNA
aatttacgcggatatcttttctcaggatttatttccgtcggttcatttttattgagcctacacacttttgtcata

SEQ ID NO: 287652 - DNA, 75 bp, synthetic construct
  source 1..75: mol_type = other DNA
ataaaagattgaggtatcagtaccttacactgcttgcattctcgatcctggcattgcttgcactttacctattgt

SEQ ID NO: 287653 - DNA, 75 bp, synthetic construct
  source 1..75: mol_type = other DNA
taacatattgttagttttggtgtgggatacttcccgccgccgtcgtttggcacgtcgcagcattgccgccagttt

SEQ ID NO: 287654 - DNA, 75 bp, synthetic construct
  source 1..75: mol_type = other DNA
cgacaatctatatcgcgattggtatggcgaacttgctggcgattggcggcggtagttggatggtggtgcagggca

SEQ ID NO: 287655 - DNA, 75 bp, synthetic construct
  source 1..75: mol_type = other DNA
cgattggtgggggaagctggatggtggtgcagggcagcttaacgctgggacagctcaccagttttatgatgtatc

SEQ ID NO: 287656 - DNA, 75 bp, synthetic construct
  source 1..75: mol_type = other DNA
gccgtattcgctcgatgctggctgaagcgccagtagtgaacgatggtagcgaccccgttccgcaagggcggggcg

SEQ ID NO: 287657 - DNA, 75 bp, synthetic construct
  source 1..75: mol_type = other DNA
aagtctggaccgactttcatgctctggccctgcgcccgtttggctggcgcgaagtgtggatcggttatgacccgg

SEQ ID NO: 287658 - DNA, 75 bp, synthetic construct
  source 1..75: mol_type = other DNA
ccggacgaataccagaacctgctgatgtgtgagttcgtggacgatctcgcgtccgtgttcccgctcagcgagctg

SEQ ID NO: 287659 - DNA, 75 bp, synthetic construct
  source 1..75: mol_type = other DNA
ctgtaacctgttcgacctcgaccagctgcgcatggagtacagcccggacgaatatcagaacctgctgatgtgcga

SEQ ID NO: 287660 - DNA, 75 bp, synthetic construct
  source 1..75: mol_type = other DNA
atggcaattttcatccatagaaggacgcttacatgtttaaaaaaaggcttacttgctctggcactggtgttttca

SEQ ID NO: 287661 - DNA, 75 bp, synthetic construct
  source 1..75: mol_type = other DNA
gggcccgcgccgtcagccggaaaagaatgttttcaccgatgaacagattgagaaactggaagaaatcttccattc

SEQ ID NO: 287662 - DNA, 75 bp, synthetic construct
  source 1..75: mol_type = other DNA
agcgttttttcctgccgtcagggagtttgtctacaaccccaacgttaaaaaacgccctggtactcaaggcctacg

SEQ ID NO: 287663 - DNA, 75 bp, synthetic construct
  source 1..75: mol_type = other DNA
aactggatgtcgctattcgtcagtttacttatccacaaactcaccatcctgtactggagaatgtgaactttgcgc

SEQ ID NO: 287664 - DNA, 75 bp, synthetic construct
  source 1..75: mol_type = other DNA
cagtcatcttctgaagaagactcagtgcttttacaatccattgtaaaatggaaggaaggagatgaagaacaacgg

SEQ ID NO: 287665 - DNA, 75 bp, synthetic construct
  source 1..75: mol_type = other DNA
ggaatattaatgcatcagtcgaataaatattatgatgcacctgatgaaggtgtgttttttctttttcggcattgg

SEQ ID NO: 287666 - DNA, 75 bp, synthetic construct
  source 1..75: mol_type = other DNA
cagctggattttccactcagacaggtgcccttggattatcattatttttatcacagggaagtttaagtccggctc

SEQ ID NO: 287667 - DNA, 75 bp, synthetic construct
  source 1..75: mol_type = other DNA
ttgttgacgctgccaataacgtagctggcgtggtgcgccatattttcgatcgcaccactgataaaaatttattga

SEQ ID NO: 287668 - DNA, 75 bp, synthetic construct
  source 1..75: mol_type = other DNA
tcacaaggaagtttgagtccgacttcatatccaccagtccatgcaccgtcatgttcagaaaaaaaattatttatg

SEQ ID NO: 287669 - DNA, 75 bp, synthetic construct
  source 1..75: mol_type = other DNA
cagctggtttttccactcagactggtgcccttgggttatcattatttatatcacagggaagtttaagtccggccc

SEQ ID NO: 287670 - DNA, 75 bp, synthetic construct
  source 1..75: mol_type = other DNA
gatcacaagaatcagcactaaggacaatgaaattatcgagacattcaaaacaggaaaaatcagtaatcactttgc

SEQ ID NO: 287671 - DNA, 75 bp, synthetic construct
  source 1..75: mol_type = other DNA
tgggttaataatgaggagattcagccagttagataccaaattgccaacattcgcatgagtgaaaatcaacttctt

SEQ ID NO: 287672 - DNA, 75 bp, synthetic construct
  source 1..75: mol_type = other DNA
caagaaagcctcaccagtatccgtatgatcaaagcctttggtctggaagatcgtcagtctgcgctatttgccgca

SEQ ID NO: 287673 - DNA, 75 bp, synthetic construct
  source 1..75: mol_type = other DNA
ttccggaaattaataaaacagttgagcaaatgctgataaaagggagatggctggatgcacttgatttctggatta

SEQ ID NO: 287674 - DNA, 75 bp, synthetic construct
  source 1..75: mol_type = other DNA
ctccctaggggtatctttatttatatctcagggaagtatgagtccatccccatatgatccagtatatgcaccgcc

SEQ ID NO: 287675 - DNA, 75 bp, synthetic construct
  source 1..75: mol_type = other DNA
tggaatattaattaatcagtcgtgtatagtttctgatacccctgacgtgggggtagtttgcctttttcagcattg

SEQ ID NO: 287676 - DNA, 75 bp, synthetic construct
  source 1..75: mol_type = other DNA
aataccagaatctgctgatgtgtgagttcgtggacgatctcgcgtccgtattcccgctcagcgagctgcaggcgt

SEQ ID NO: 287677 - DNA, 75 bp, synthetic construct
  source 1..75: mol_type = other DNA
gacattgagcagctcaaacgtgaaaacagcgccgacgattttaaaaacctgttcatgtgtgaatttgttgacgac

SEQ ID NO: 287678 - DNA, 75 bp, synthetic construct
  source 1..75: mol_type = other DNA
gatttttctgtcggccagtaaaacgcaggcgtatgtgttccgtgaatacatcatcgcctttgcccggctggttga

SEQ ID NO: 287679 - DNA, 75 bp, synthetic construct
  source 1..75: mol_type = other DNA
accttaatccgaacgtcgctaaccgcaacaaaggcgggcgtcgcaaaccgaaaaagaattttttcagtgacgagg

SEQ ID NO: 287680 - DNA, 75 bp, synthetic construct
  source 1..75: mol_type = other DNA
cccaacggggccacactgtatttcctcggcaccaatgcccgcactgcccagagttaccacggtaacctgtatctg

SEQ ID NO: 287681 - DNA, 75 bp, synthetic construct
  source 1..75: mol_type = other DNA
ttaaaaaactgacgcagcagtacaacgtgacatacatcggtatcgactcgaccggcgttggtcacggggtttatg

SEQ ID NO: 287682 - DNA, 75 bp, synthetic construct
  source 1..75: mol_type = other DNA
gaaatgaaaaccgcaatggtgctcaaggcaaaagacgttatccgtcgtggctgtctggaatatgacgtcagcgcc

SEQ ID NO: 287683 - DNA, 75 bp, synthetic construct
  source 1..75: mol_type = other DNA
gggcgaaaaagttgcaaccgttcacagctggaaaaagcgtgataagtggggcgagtatggcccactcgatcagat

SEQ ID NO: 287684 - DNA, 75 bp, synthetic construct
  source 1..75: mol_type = other DNA
gactgactttcatgcactggcgctgcgcccgtttggctggcacgaagtgtggatcggttatgacccggcaaaagg

SEQ ID NO: 287685 - DNA, 75 bp, synthetic construct
  source 1..75: mol_type = other DNA
tcaacgagtccgccacgctgttccgccgcaagtattacattaacggtagtcatgcaggcttcatcatgtacatga

SEQ ID NO: 287686 - DNA, 75 bp, synthetic construct
  source 1..75: mol_type = other DNA
atcctaacgtcgccaaccgcaacaaaggcccgcgccgtcagccggaaaagaatgtcttcaccgatgaacagattg

SEQ ID NO: 287687 - DNA, 75 bp, synthetic construct
  source 1..75: mol_type = other DNA
gacttccgcgcccaagctgacgccatcaaaaaactgaccgaacagtacaacgtgacctatatcggtatcgactcg

SEQ ID NO: 287688 - DNA, 75 bp, synthetic construct
  source 1..75: mol_type = other DNA
tgacctgctggcacgtcagtcagagcgtcacgcccggatcgggaaattcaacgatggcgggaacgaggcagattt

SEQ ID NO: 287689 - DNA, 75 bp, synthetic construct
  source 1..75: mol_type = other DNA
ccagctcattatgaaggaacacaaagaagggaaagatttcaaagagattgacctgctggcacgccagtctgagcg

SEQ ID NO: 287690 - DNA, 75 bp, synthetic construct
  source 1..75: mol_type = other DNA
tcaaaaaactgactgaacagtacaacgtgacatacatcggtatcgactcaaccggcgttggtcacggggtttatg

SEQ ID NO: 287691 - DNA, 75 bp, synthetic construct
  source 1..75: mol_type = other DNA
cgtccgagagtttgtctacaaccccaacgttaaaaatgccctggtactcaaggcctacgacattatcagtcaccg

SEQ ID NO: 287692 - DNA, 75 bp, synthetic construct
  source 1..75: mol_type = other DNA
cgtccgggagtttgtctacaatcccaacgttaaaaacgccctggtactcaaggcctacgacattattagccaccg

SEQ ID NO: 287693 - DNA, 75 bp, synthetic construct
  source 1..75: mol_type = other DNA
cggtatggctattcacaaaaaatggcgacaaacctatttttccacgccatccagtctgacacacagtgcttatcc

SEQ ID NO: 287694 - DNA, 75 bp, synthetic construct
  source 1..75: mol_type = other DNA
ccagctcatcatgaaggagcataaagaagggaaagatttcaaagagattgacctgctggcgcgccagtctgagcg

SEQ ID NO: 287695 - DNA, 75 bp, synthetic construct
  source 1..75: mol_type = other DNA
cggcaatcgcccgacctatgaagcaagccgcagtgaagaagccagccatgccgatctggcctgggcaacaatgca

SEQ ID NO: 287696 - DNA, 75 bp, synthetic construct
  source 1..75: mol_type = other DNA
cgcatttattttttctgtcagtcatccggctggcaggtaatgagaacgcaggaacagaaggaggaatacaccgga

SEQ ID NO: 287697 - DNA, 75 bp, synthetic construct
  source 1..75: mol_type = other DNA
agtgaaactaaaaaaaggattccagcacatttattcagaatgataaaagatgaactttatgaattagtcttaacc

SEQ ID NO: 287698 - DNA, 75 bp, synthetic construct
  source 1..75: mol_type = other DNA
tacgcagaatggcgacagcgccggatgcgtggtggtggctccgccaaccgtgccgggcggcaagttccgcattct

SEQ ID NO: 287699 - DNA, 75 bp, synthetic construct
  source 1..75: mol_type = other DNA
cgggatggctattcacaagaaatggcgacaaacctatttttccacgccatccagcctgacccacagtgcttatcc

SEQ ID NO: 287700 - DNA, 75 bp, synthetic construct
  source 1..75: mol_type = other DNA
tgcgtggtggtggctccgccagccgtgccgggtggtaagttccgcattcttgagcatcaccagtggcgcgggatg

SEQ ID NO: 287701 - DNA, 75 bp, synthetic construct
  source 1..75: mol_type = other DNA
gagccgggtctggaagacctggttaaacgggccgtcaatgatggtcatctgactgcccataccagcccgcagaaa

SEQ ID NO: 287702 - DNA, 75 bp, synthetic construct
  source 1..75: mol_type = other DNA
ttaacgatggagggtttcagaatgtcaacagcggcggtagtgccacgagtaccgtcattaatagtggtgggagcc

SEQ ID NO: 287703 - DNA, 75 bp, synthetic construct
  source 1..75: mol_type = other DNA
cgaccaaatctctgcaggctgaggctggtgtgaatctgggtatggatcttgacgttgctggcaagacggttaagc

SEQ ID NO: 287704 - DNA, 75 bp, synthetic construct
  source 1..75: mol_type = other DNA
tttgcgaaaaggcagggatcccaatcgaacctgattttgaactggcaggaggtttaacacttacttgcactggcg

SEQ ID NO: 287705 - DNA, 75 bp, synthetic construct
  source 1..75: mol_type = other DNA
cgaagcgggtagaactttcagtctgaatgagaatgcgtgggcgcagccatacgtgcggacaacggcattcagggc

SEQ ID NO: 287706 - DNA, 75 bp, synthetic construct
  source 1..75: mol_type = other DNA
taagccagatgcaggtacatcgtcgtctccggtgcgtcgcacaacaaaatcggccgacgcagtactgggcatggc

SEQ ID NO: 287707 - DNA, 75 bp, synthetic construct
  source 1..75: mol_type = other DNA
ctacaattaattccggtggggggcagtatctctacgccggaaatgccacgaaaactactgttaacaacggcggga

SEQ ID NO: 287708 - DNA, 75 bp, synthetic construct
  source 1..75: mol_type = other DNA
acgcaccccgttccgtggtgcgaaaggttcgacctgggaaggcggcgttcgcgtaccgactttcgtttactggaa

SEQ ID NO: 287709 - DNA, 75 bp, synthetic construct
  source 1..75: mol_type = other DNA
gccgccatgatgttattacgcgtgggcggtaatgactccaacttattgatagtgttttatgttcagataatgccc

SEQ ID NO: 287710 - DNA, 75 bp, synthetic construct
  source 1..75: mol_type = other DNA
ttatccggaatacatgagccgaccaaaggcaccattaccattaataacattagctataacaagctggatcataaa

SEQ ID NO: 287711 - DNA, 75 bp, synthetic construct
  source 1..75: mol_type = other DNA
tgcaggcggctgaagtcgttgagcaggcgttagaaaaggcagagcaggcgactgatgcagcagaacaggcagagg

SEQ ID NO: 287712 - DNA, 75 bp, synthetic construct
  source 1..75: mol_type = other DNA
tgcaggcggcagaagtcgtcgatcaggcgctggaacaggcagaacagccgaaggaagaagaaaagccagcgaaga

SEQ ID NO: 287713 - DNA, 75 bp, synthetic construct
  source 1..75: mol_type = other DNA
gtaagccatcgtggtaaaaattgggtaagtactgttactggtgataacaagggaaatcttccgacaaacaggtct

SEQ ID NO: 287714 - DNA, 75 bp, synthetic construct
  source 1..75: mol_type = other DNA
aacggcagctttagcattgccggtggcagtgccgtcaatatgctgctggagaacggtggttctctgagcgtttat

SEQ ID NO: 287715 - DNA, 75 bp, synthetic construct
  source 1..75: mol_type = other DNA
tccgtgggaagagatgttttatctggatattcaggccaatcttgaatcagcggaaatgcaaaaagcattgaaaga

SEQ ID NO: 287716 - DNA, 75 bp, synthetic construct
  source 1..75: mol_type = other DNA
tcggccctaaaggttcctattcacaccttgccgcacgtcagtacgctgctcgccatttcgaacaatttattgaaa

SEQ ID NO: 287717 - DNA, 75 bp, synthetic construct
  source 1..75: mol_type = other DNA
ctgttccagctcatcattgaagattccgtattaactcagcaggcactgctccagcagcatctcaataaaattaat

SEQ ID NO: 287718 - DNA, 75 bp, synthetic construct
  source 1..75: mol_type = other DNA
tgctggctatacgttgacacagaacggaatggaaacaggcggagataaggtttttgagtttggcgacagccaact

SEQ ID NO: 287719 - DNA, 75 bp, synthetic construct
  source 1..75: mol_type = other DNA
gatgggggtcacctggtgctcagtggtactctgtcacaggatggtggggtctccatcgtgaacagtggcactatg

SEQ ID NO: 287720 - DNA, 75 bp, synthetic construct
  source 1..75: mol_type = other DNA
gcggttgcgcaaaatttgccgatatttttaatcaggtggaaacgggtcaggccgactatgccgttgtaccgattg

SEQ ID NO: 287721 - DNA, 75 bp, synthetic construct
  source 1..75: mol_type = other DNA
taacaatactgggcgccagtttgtctccagcggcggtagtgccgctaaaactacaattaattccggcggggggat

SEQ ID NO: 287722 - DNA, 75 bp, synthetic construct
  source 1..75: mol_type = other DNA
gtagtgccacgaatacaactgttaacaatggtgggagacagacggtattcagcggcggcagtgccatgggcacca

SEQ ID NO: 287723 - DNA, 75 bp, synthetic construct
  source 1..75: mol_type = other DNA
tagtgccagtaatatgctgctggagaatggcggatacctgagtgttaatagtggtcatcaggccacaagcaccac

SEQ ID NO: 287724 - DNA, 75 bp, synthetic construct
  source 1..75: mol_type = other DNA
cgctgcgtgagaaaatcagctcgctggatgaaaaattactggcgctactggcagagcggcgcgaacttgctgtcg

SEQ ID NO: 287725 - DNA, 75 bp, synthetic construct
  source 1..75: mol_type = other DNA
gctggtaaaccgggaacaggtaagccagatgcaggtacatcgtcgtctccagtgcgtcgcacaacaaaatcggtc

SEQ ID NO: 287726 - DNA, 75 bp, synthetic construct
  source 1..75: mol_type = other DNA
ccggtacctgggaatacggcctgagcaaggaaaataccaactggtatctgaaggctgatactccgcctccagtta

SEQ ID NO: 287727 - DNA, 75 bp, synthetic construct
  source 1..75: mol_type = other DNA
acgggagtcagcctgtcgcttaccacccagaaatcgaaatcacaacaacattctgaaagtgacacagtatccggc

SEQ ID NO: 287728 - DNA, 75 bp, synthetic construct
  source 1..75: mol_type = other DNA
tgtctgcgtgtggcagtttcgcctggacaacggcggcagtggtgaggggtttgggcctctgacgctctccctacg

SEQ ID NO: 287729 - DNA, 75 bp, synthetic construct
  source 1..75: mol_type = other DNA
atgaagaagctgaaaggcgttctctcagtttgcgttctgagcctttgcctgctgtcaccggctcaggccgaagaa

SEQ ID NO: 287730 - DNA, 75 bp, synthetic construct
  source 1..75: mol_type = other DNA
agagcgtcatggttaccagattgacctgccattgtccgttttcgacccgcagtattaccggccgatacaagtcac

SEQ ID NO: 287731 - DNA, 75 bp, synthetic construct
  source 1..75: mol_type = other DNA
cttatcaaccaacaggcgatcagcagaaagacgcaatcgcacaaatcgggatcatgcagaatcgtgctgttcagg

SEQ ID NO: 287732 - DNA, 75 bp, synthetic construct
  source 1..75: mol_type = other DNA
cgtcttcgcttgatggcaggaacgcagtttgaagcaacaaccccgctggtacgagtacccgtcccgctaatttgc

SEQ ID NO: 287733 - DNA, 75 bp, synthetic construct
  source 1..75: mol_type = other DNA
cgcgaacaggtgaatggcaaacctcacgcacaggaaaattccagaccacgggctttgaaaacgtggataacgcgt

SEQ ID NO: 287734 - DNA, 75 bp, synthetic construct
  source 1..75: mol_type = other DNA
gacaaatgcaatctgttcacgacgctctgtttatcgatcgtcagcaagggaatcaaacgattttactttgccaca

SEQ ID NO: 287735 - DNA, 75 bp, synthetic construct
  source 1..75: mol_type = other DNA
agccataaccggctgaatgccacaatgccatttagccagcagctccacgatgcatttgactcacctgaccgcgat

SEQ ID NO: 287736 - DNA, 75 bp, synthetic construct
  source 1..75: mol_type = other DNA
acacaggaaaataatctggcgcatgttatctctgtcgcgggacgtattcacaatgcggtactcagcctggagcgc

SEQ ID NO: 287737 - DNA, 75 bp, synthetic construct
  source 1..75: mol_type = other DNA
gccaccagcggttttagccacaccaaaaacggtaacttcaatcgtcaattcttggcgcgttatagtcgtgatctt

SEQ ID NO: 287738 - DNA, 75 bp, synthetic construct
  source 1..75: mol_type = other DNA
atgagaaaaagctggactataaaggaagattgtaagctgcttaccttggtacgtcagcacttttccgcgttggtc

SEQ ID NO: 287739 - DNA, 75 bp, synthetic construct
  source 1..75: mol_type = other DNA
ttcgctggcggcgcaagagagtaccggccagagctcaccctctttccgcagtatagaaacgatgtcgattttacc

SEQ ID NO: 287740 - DNA, 75 bp, synthetic construct
  source 1..75: mol_type = other DNA
ccctgatttgccgggcagacctgtttatttaacggttgatgtaaattcctgggcgaacggttcagaacgtcacgg

SEQ ID NO: 287741 - DNA, 75 bp, synthetic construct
  source 1..75: mol_type = other DNA
ttgaaaaggtactgaatgacagcgggatgcctgcgacagaggccgaaattaaggcagcgtttaaagccaccgtac

SEQ ID NO: 287742 - DNA, 75 bp, synthetic construct
  source 1..75: mol_type = other DNA
gtcgaaagcggcgaccggtgtgatcgccggactgggcgcgctgggttacgaactggcgattgacgcggtggtcaa

SEQ ID NO: 287743 - DNA, 75 bp, synthetic construct
  source 1..75: mol_type = other DNA
aaaaagtcctgctggaagaggccgcacagataaaggccagtgatgtgaactccacattctataccacggaaatca

SEQ ID NO: 287744 - DNA, 75 bp, synthetic construct
  source 1..75: mol_type = other DNA
caggcactgaattctaattcgcaactcactcttcttttagtcggcaatcccgacgccatcacgccattactggct

SEQ ID NO: 287745 - DNA, 75 bp, synthetic construct
  source 1..75: mol_type = other DNA
ttgagctgctggacggtggcaaaagcggaactctgcggcagcaggacgctgccagcgaactcgcagtttgcaagt

SEQ ID NO: 287746 - DNA, 75 bp, synthetic construct
  source 1..75: mol_type = other DNA
ccggctcaggttacatcgctgcctcccgggataagatgaagagccgctttgactccgttgctgaacaaaccggaa

SEQ ID NO: 287747 - DNA, 75 bp, synthetic construct
  source 1..75: mol_type = other DNA
gggcaggcgcgtaacctctactccgagctaatgaaaaatctatccacccgaaataagccggatggaaacgcatta

SEQ ID NO: 287748 - DNA, 75 bp, synthetic construct
  source 1..75: mol_type = other DNA
gattttgctcatcgtctggggtgggccagagctatgctggacggccaggactggcgtgacgccgggctacgctat

SEQ ID NO: 287749 - DNA, 75 bp, synthetic construct
  source 1..75: mol_type = other DNA
acgtcgtatgcaggcacgttgccgcagcaagtcggacaagaaaacccgtctggttcataccctgaacggttctgg

SEQ ID NO: 287750 - DNA, 75 bp, synthetic construct
  source 1..75: mol_type = other DNA
tctgaattgtactcatggcctgaaaaatatggtgaaaataaagacgccaagattattatgcgtgataaggaaaga

SEQ ID NO: 287751 - DNA, 75 bp, synthetic construct
  source 1..75: mol_type = other DNA
ttaagagattaatacaaatttgtaatatgatgacaatggctgatttgaaaaaaaacctgattgctaaagtacatg

SEQ ID NO: 287752 - DNA, 75 bp, synthetic construct
  source 1..75: mol_type = other DNA
tacaaatgtgtcagttccgacgattattcaccaaaagctcgccgccctgtctgatatggttggcggttacgattt

SEQ ID NO: 287753 - DNA, 75 bp, synthetic construct
  source 1..75: mol_type = other DNA
ggacacgccatcgctgcctgtgccattctggtgacgaataatgtgagagagtttgagcgggtaccgggtcttgtg

SEQ ID NO: 287754 - DNA, 75 bp, synthetic construct
  source 1..75: mol_type = other DNA
atgcgctttggcgccaccggtccaaaggcctcgccgcgccatattgagctggtagacgcgttctgcgcccgcctc

SEQ ID NO: 287755 - DNA, 75 bp, synthetic construct
  source 1..75: mol_type = other DNA
tgctcgttacgtcgatcatgctgtatctccctgccaatatcttgcccatcatggtgaccgattttttaggttcaa

SEQ ID NO: 287756 - DNA, 75 bp, synthetic construct
  source 1..75: mol_type = other DNA
gatcacatcttccttactgaattaaggggggatgaagcctggaactatttaggcatgttgaatactggtcataat

SEQ ID NO: 287757 - DNA, 75 bp, synthetic construct
  source 1..75: mol_type = other DNA
gacactaaatacggattagggaaaagattaaatgtgagtgataagtatccttctgctttctttgttggatataaa

SEQ ID NO: 287758 - DNA, 75 bp, synthetic construct
  source 1..75: mol_type = other DNA
ccatcacctactccgagatgcgcttcggtgccaccggtccgaaggcctcgccacgccacgtgcaactggttgacg

SEQ ID NO: 287759 - DNA, 75 bp, synthetic construct
  source 1..75: mol_type = other DNA
gccaccggcccgaaggcctcgccgcgccatattcagctggtcgacgcgttctgcgcgcgcctcgatgccgtcctg

SEQ ID NO: 287760 - DNA, 75 bp, synthetic construct
  source 1..75: mol_type = other DNA
gccacgtccagctggttgacgcgttctgcgcacgcctcgacgccatcctgccctgggaccgggccgcggtggatg

SEQ ID NO: 287761 - DNA, 75 bp, synthetic construct
  source 1..75: mol_type = other DNA
atgctatagctgcaggggccattctggtgacgaataatgtgagagagtttgagcgggtgcctgacctggtgctgg

SEQ ID NO: 287762 - DNA, 75 bp, synthetic construct
  source 1..75: mol_type = other DNA
acgccatcgccgccggtgccgtgctggtgacgagtaatgtgagagagtttgcacgggtgccaggcctggtgctgg

SEQ ID NO: 287763 - DNA, 75 bp, synthetic construct
  source 1..75: mol_type = other DNA
gtgatcgcatcgtggtctcggccgtgacgtatgccgagatgcgcttcggcgccaccggcccgaaggcctcgccgc

SEQ ID NO: 287764 - DNA, 75 bp, synthetic construct
  source 1..75: mol_type = other DNA
tatcttcagaagatcgccgctaatgcaaaaaatactcaagtcaattatcctactggtctctacctccccgattcc

SEQ ID NO: 287765 - DNA, 75 bp, synthetic construct
  source 1..75: mol_type = other DNA
atggacaaaattcgcgatccgttccgcagttaccaatggagcctgcgtccgtggcgtaaagatgcactgccgcgc

SEQ ID NO: 287766 - DNA, 75 bp, synthetic construct
  source 1..75: mol_type = other DNA
atgacggaagttagacggcgcggcaggccaggacaggcggagcctgtagcacagaagggcgcacaggcgttagag

SEQ ID NO: 287767 - DNA, 75 bp, synthetic construct
  source 1..75: mol_type = other DNA
gagtaaatcaaaagacgttacacttgctgcgatctatgcattaggtgaaggccgatgtcaggcggagaacattac

SEQ ID NO: 287768 - DNA, 75 bp, synthetic construct
  source 1..75: mol_type = other DNA
ataaatatacttaatgagctcctgccaggtgaagctaagaactttgaaaaagagatgataattggtgtatggtca

SEQ ID NO: 287769 - DNA, 75 bp, synthetic construct
  source 1..75: mol_type = other DNA
tcaatgataatattaagagcgatccatcatggccgaatgaagtccagttattccccataaatactggcggacact

SEQ ID NO: 287770 - DNA, 75 bp, synthetic construct
  source 1..75: mol_type = other DNA
tgctgagcatatgcaggatttgtattccacgctgctgggcgacctgcaactgctgaaagcccgtcgcgggctgag

SEQ ID NO: 287771 - DNA, 75 bp, synthetic construct
  source 1..75: mol_type = other DNA
gatacggcccaggcgctggttaatgtcggcgcacaaatagccgccatgacaccgggcgaactggcatcatggctt

SEQ ID NO: 287772 - DNA, 75 bp, synthetic construct
  source 1..75: mol_type = other DNA
cccttggcatcaaggcggtatttttggtgctcaccttcacgggtcacgcgaccatgtggatggctgtgttcgccg

SEQ ID NO: 287773 - DNA, 75 bp, synthetic construct
  source 1..75: mol_type = other DNA
gagaacccgttcctcggatggcgtgctatccgtattgcaatggatcgtaaagagatccttcgcgatcagcttcgc

SEQ ID NO: 287774 - DNA, 75 bp, synthetic construct
  source 1..75: mol_type = other DNA
gtaaattgcgcatcatgttcccaatgatcatctctgtcgaagaagtacgcgctctgcgcaaagagatcgaaatct

SEQ ID NO: 287775 - DNA, 75 bp, synthetic construct
  source 1..75: mol_type = other DNA
agaagttcaggcgctgctgggtgatgcgcaaaccatcgccgaccaggatcgttttcgcgcgttatcacgtgaata

SEQ ID NO: 287776 - DNA, 75 bp, synthetic construct
  source 1..75: mol_type = other DNA
cacctgagccagaacggtctgtgcctgcagcatcgcttcgtcgtccggaacgccttaaacaacaaactcgcaaaa

SEQ ID NO: 287777 - DNA, 75 bp, synthetic construct
  source 1..75: mol_type = other DNA
tatccgctcagtgacgccatcactgtggctgaaaaacttctgagtggcggaattcgcggtcgtgcagtcattcaa

SEQ ID NO: 287778 - DNA, 75 bp, synthetic construct
  source 1..75: mol_type = other DNA
cgctgatattccctggcattttcagggaacgacataccatggttggtggcaaaatcagtggcaacgctgggggca

SEQ ID NO: 287779 - DNA, 75 bp, synthetic construct
  source 1..75: mol_type = other DNA
gaagcgacagccttaacactgtcgctattttatagatttttacgagagaatgatatatcaattgatgaacgtatt

SEQ ID NO: 287780 - DNA, 75 bp, synthetic construct
  source 1..75: mol_type = other DNA
caaaaatatcttcgtgcgatcctttgcttaacgatttaagaggccatcaattccgtcatacatggaactataact

SEQ ID NO: 287781 - DNA, 75 bp, synthetic construct
  source 1..75: mol_type = other DNA
cccggcgctggctggaagagtttttatcgtggcatggtggttaccgtgcctttttgtggcgaccgccgaaacata

SEQ ID NO: 287782 - DNA, 75 bp, synthetic construct
  source 1..75: mol_type = other DNA
aaacactgtcgatggacatgaatgcgggctatataagagcagcgcgtatccatttacccaatgcggtcgagaaaa

SEQ ID NO: 287783 - DNA, 75 bp, synthetic construct
  source 1..75: mol_type = other DNA
agtctgcccataccgaacttcgcagactggataaaaagagagaatctcttattgaattgtttattgatgaactta

SEQ ID NO: 287784 - DNA, 75 bp, synthetic construct
  source 1..75: mol_type = other DNA
tattttatagatttttacgagagaatgatatatcaattgatgaacgtattttacataatagattcatatcgaatt

SEQ ID NO: 287785 - DNA, 75 bp, synthetic construct
  source 1..75: mol_type = other DNA
tgattttcaacatcgacaggtaaacagaaattgttatttagataaatatggcgatgcaaatatcaatgattatta

SEQ ID NO: 287786 - DNA, 75 bp, synthetic construct
  source 1..75: mol_type = other DNA
ctggcatggtggttaccgtgcctttttgtggcgaccgccgaaacataaccggacggtgagggtggtatgccggga

SEQ ID NO: 287787 - DNA, 75 bp, synthetic construct
  source 1..75: mol_type = other DNA
gttggtggtactacgataggcggcaatgttaacggcaatcttttctgcaacaggaatacggaatgtgcatgcgaa

SEQ ID NO: 287788 - DNA, 75 bp, synthetic construct
  source 1..75: mol_type = other DNA
caagcggcggttgccgacgaaattgaattgcaagcattactggtacgcgaaaaagtagacgccgcgcgcagagcg

SEQ ID NO: 287789 - DNA, 75 bp, synthetic construct
  source 1..75: mol_type = other DNA
actttggcgcgcagcgtttcggtattggcggtagtaacttgcagggcgcgctgcgctgggcgcaaaccaatactc

SEQ ID NO: 287790 - DNA, 75 bp, synthetic construct
  source 1..75: mol_type = other DNA
gcgttgtttaatcagattgttgctgagcgcctcaaaaaagcagacgttaatcaagttgttgacggcgatgcgcta

SEQ ID NO: 287791 - DNA, 75 bp, synthetic construct
  source 1..75: mol_type = other DNA
gttgcgggaacagatgcaacagacaagccagtgctggacactgaaagagctggcaaaaaatatctgggatcgccc

SEQ ID NO: 287792 - DNA, 75 bp, synthetic construct
  source 1..75: mol_type = other DNA
cataagcgacgatgaatattgcaacatggagttttacgagacggggtacgccttactgaaagccttactgagaac

SEQ ID NO: 287793 - DNA, 75 bp, synthetic construct
  source 1..75: mol_type = other DNA
atgcggtctcccgatggaccgggtctctgttctgctttgccgctctgatgatactgattctggtgggaactgtgt

SEQ ID NO: 287794 - DNA, 75 bp, synthetic construct
  source 1..75: mol_type = other DNA
aattgccggaatacactctcgagcagatacaaagaattatttacaataaaaatacaaccattgaagaatatatta

SEQ ID NO: 287795 - DNA, 75 bp, synthetic construct
  source 1..75: mol_type = other DNA
cgaagcgatggtggccgaggccccgaagaaggacgagccggcgatgccggccggcggcggcatgggcggcatggg

SEQ ID NO: 287796 - DNA, 75 bp, synthetic construct
  source 1..75: mol_type = other DNA
tgatcagtatcttgagctttccgtgatcggcctcgatcacgttattgagggctctgttgcaaagattggcggcag

SEQ ID NO: 287797 - DNA, 75 bp, synthetic construct
  source 1..75: mol_type = other DNA
aatcaatgtggcgctgctcagccttactgcgctgatggtactgactctggggggatctgtgctggcacatgtatg

SEQ ID NO: 287798 - DNA, 75 bp, synthetic construct
  source 1..75: mol_type = other DNA
cagtcggaattgctgaaaatactcagttaacctgtccgacctgcaggaaatcctgttctgttcacgatcaccgac

SEQ ID NO: 287799 - DNA, 75 bp, synthetic construct
  source 1..75: mol_type = other DNA
aaacgcagcgaaaaccattaaaaaacggttatacggaatactaatgcaatgcgtcatcgcgtctcgaatggaaat

SEQ ID NO: 287800 - DNA, 75 bp, synthetic construct
  source 1..75: mol_type = other DNA
agccagtgctgggcgctgaaagagctggcaaaggatatctggaacaggccatggagcgaggaaaggcggagtgac

SEQ ID NO: 287801 - DNA, 75 bp, synthetic construct
  source 1..75: mol_type = other DNA
aatacaaccattgaagaatatattatttcagttattcttgaaaaatccgatcaggatttccgtcgaattgtaaaa

SEQ ID NO: 287802 - DNA, 75 bp, synthetic construct
  source 1..75: mol_type = other DNA
tgtggcaatggcgcaaagtgtcaccgttgatgtgccgagtggatacaaagtggtggtggtccctgattcagtcag

SEQ ID NO: 287803 - DNA, 75 bp, synthetic construct
  source 1..75: mol_type = other DNA
ctgctccggcttaccgcccgcatccttatgttcgccatcttgccagcgtaggtgaagggatggttatcgaacacc

SEQ ID NO: 287804 - DNA, 75 bp, synthetic construct
  source 1..75: mol_type = other DNA
atgattatgatcgtgaggtgctgtggagcaaatgggataacgccagcgattcccagcgcagacttgctgaaaaat

SEQ ID NO: 287805 - DNA, 75 bp, synthetic construct
  source 1..75: mol_type = other DNA
gaatcgaaagggcaaacgcgtcccaatcagcattgagcagcatgtatttaaataccacatcaccattcaatactt

SEQ ID NO: 287806 - DNA, 75 bp, synthetic construct
  source 1..75: mol_type = other DNA
caagggctacgcgccgagcaatccatcgtcgtcccacagttaccgcccgcaagtcaggtactggctgacgtgatg

SEQ ID NO: 287807 - DNA, 75 bp, synthetic construct
  source 1..75: mol_type = other DNA
aggacggcaaaactctcgcatcggtacagactctggacgaaagtcgcctgccggagggcgatgtcacggttgatg

SEQ ID NO: 287808 - DNA, 75 bp, synthetic construct
  source 1..75: mol_type = other DNA
tttactgatgggtgcgaaaatgcactggacaagcgttgttgccggtaaaggctggggccaggcaaaacctgttga

SEQ ID NO: 287809 - DNA, 75 bp, synthetic construct
  source 1..75: mol_type = other DNA
tattttgaaatcgcccgccccacgctggaagcccatgattatgatcgtgaggcactgtggagcaaatgggataac

SEQ ID NO: 287810 - DNA, 75 bp, synthetic construct
  source 1..75: mol_type = other DNA
gtggctgcgccaaatttgccgatatttttaatcaggtggaaaccggccaggccgactatgccgtcgtaccgattg

SEQ ID NO: 287811 - DNA, 75 bp, synthetic construct
  source 1..75: mol_type = other DNA
tgaaagagttaggggacatcacccgttcgatgaaggtattgggctgttacccaagtgagaacgtagtgcctgttg

SEQ ID NO: 287812 - DNA, 75 bp, synthetic construct
  source 1..75: mol_type = other DNA
gcagccgaactgaaaaagcagcaattgattaatcaggtcaacgaatacataaacagtaagcaatggcctggtaaa

SEQ ID NO: 287813 - DNA, 75 bp, synthetic construct
  source 1..75: mol_type = other DNA
caagggctacgcgccgagcaatccatcgtcgtcccacagttgccgcccgcaagtcaggtgctggctgacgtgatg

SEQ ID NO: 287814 - DNA, 75 bp, synthetic construct
  source 1..75: mol_type = other DNA
cacgctgcctgcgccggggatttcacccgcagtcaattcccagcaactgttgaccggcagcttcaacggcaaaac

SEQ ID NO: 287815 - DNA, 75 bp, synthetic construct
  source 1..75: mol_type = other DNA
gccggtaggtgttggtgatgtgacgagcggtttactgctggtgaaactgcttcaggggcaacgctgcaggaggcg

SEQ ID NO: 287816 - DNA, 75 bp, synthetic construct
  source 1..75: mol_type = other DNA
gcaggcgttgaaaggggatgctcgtaagacctacatgagtgattgcctgaagaacagcaagtctgcgcctggtga

SEQ ID NO: 287817 - DNA, 75 bp, synthetic construct
  source 1..75: mol_type = other DNA
aatgttttcaccgatgaacagattgagaagctggaagaaatcttccattcctccatgttcaactaccagcgccac

SEQ ID NO: 287818 - DNA, 75 bp, synthetic construct
  source 1..75: mol_type = other DNA
accgacattgcgcagtcattcatggcaatccgtcgcgccaccaccgccagtggcaaccgcccgacctatgaagcc

SEQ ID NO: 287819 - DNA, 75 bp, synthetic construct
  source 1..75: mol_type = other DNA
gacgggcaatatcgccagatagtcaccgtggaagatgcggtgcgcggcggctgcaacctgttcgaccttgaccag

SEQ ID NO: 287820 - DNA, 75 bp, synthetic construct
  source 1..75: mol_type = other DNA
gacgggcagtaccgccagatagtcactgtggaagatgcggtgcgcggaggctgtaacctgttcgacctcgaccag

SEQ ID NO: 287821 - DNA, 75 bp, synthetic construct
  source 1..75: mol_type = other DNA
cgcccgtttggctggcgcgaagtatggatcggctatgacccggcaaaaggcacgcagaacggcgacagcgccgga

SEQ ID NO: 287822 - DNA, 75 bp, synthetic construct
  source 1..75: mol_type = other DNA
gcccgtgaagccctgattgacgccctgctgaccggacgtaaccagattttcctttccgccagtaaggcacaggcc

SEQ ID NO: 287823 - DNA, 75 bp, synthetic construct
  source 1..75: mol_type = other DNA
gtctggtgattaaatatatcgacaagtcgctggaaaaacgcatacctgctggttttgagatggttatcaataact

SEQ ID NO: 287824 - DNA, 75 bp, synthetic construct
  source 1..75: mol_type = other DNA
ttggtactattggtgtgatcgtcggcgcagagatcccgatgttccttggctcgatgattatggggccgctcggtg

SEQ ID NO: 287825 - DNA, 75 bp, synthetic construct
  source 1..75: mol_type = other DNA
gcaaaagatgcgcgaatgtaataatcaagcaacgcaacaatctctgaaaggtgatgatcgtaataagtttatgag

SEQ ID NO: 287826 - DNA, 75 bp, synthetic construct
  source 1..75: mol_type = other DNA
tggacatcgacctgtcccacagcaatctggcccccggcctgctgtgcgcagacgggcaatatcgccagatagtca

SEQ ID NO: 287827 - DNA, 75 bp, synthetic construct
  source 1..75: mol_type = other DNA
cctttccgccagcaaggctcaggcccacgtctttaagcagtacatcatcgacttcgccaaagaagtcgaggtgga

SEQ ID NO: 287828 - DNA, 75 bp, synthetic construct
  source 1..75: mol_type = other DNA
gcaaaagagatccttagcgagatgggatatacccacgttgagaacgccggcggcctgaaagacatcgcaatgccg

SEQ ID NO: 287829 - DNA, 75 bp, synthetic construct
  source 1..75: mol_type = other DNA
gtcagacggtccgttaagcccggccgaaatgaccatggaagtggcgcagttactgcgcgatgctggcccgtgggg

SEQ ID NO: 287830 - DNA, 75 bp, synthetic construct
  source 1..75: mol_type = other DNA
aatttattaaagattttaacgatgctaaaaagaaaggtgaacatgcctacgatatgacgttaagttatcaaaatt

SEQ ID NO: 287831 - DNA, 75 bp, synthetic construct
  source 1..75: mol_type = other DNA
gtgcgggcgggcgataacatcatcatcagtcagatggagcaccacgctaacattgtcccctggcagatgctttgt

SEQ ID NO: 287832 - DNA, 75 bp, synthetic construct
  source 1..75: mol_type = other DNA
gccgccaatagctggggcaacagcaacgtgcgggcgggcgataacatcatcatcagtcagatggaacatcatgcc

SEQ ID NO: 287833 - DNA, 75 bp, synthetic construct
  source 1..75: mol_type = other DNA
ctctcagagtaggaggtaagacagagaattttttggtccatgaaacacaagaggaagataatgaccgtaagaaag

SEQ ID NO: 287834 - DNA, 75 bp, synthetic construct
  source 1..75: mol_type = other DNA
catgaattagattgtgttcaacatttgctgggtgaaaaacctgatactgtaactatgattggaggaaatttagct

SEQ ID NO: 287835 - DNA, 75 bp, synthetic construct
  source 1..75: mol_type = other DNA
gattggggaccagttatttgatgtaaatggcccagcttacaggctacttgatgcgatgagctctgtctcagaaca

SEQ ID NO: 287836 - DNA, 75 bp, synthetic construct
  source 1..75: mol_type = other DNA
cgctgccggaccactggcttcacgctggctgcaacaggtttttgcgaccgacgccaccctggtgcaaagcggcgc

SEQ ID NO: 287837 - DNA, 75 bp, synthetic construct
  source 1..75: mol_type = other DNA
ccgctgccggtacatccgtggcagtggcagcaaaaaatcgctaccgacttcatcgctgattttgccgaaggcagg

SEQ ID NO: 287838 - DNA, 75 bp, synthetic construct
  source 1..75: mol_type = other DNA
gggagggctggatatcaagctgccgctgaccatctacaacacctcatgctaccgggggatccctggcagatatat

SEQ ID NO: 287839 - DNA, 75 bp, synthetic construct
  source 1..75: mol_type = other DNA
gccggtacacccaataccggggcattattggtcttggcgcggcgctggagtatgtttcggcgctggggcttaata

SEQ ID NO: 287840 - DNA, 75 bp, synthetic construct
  source 1..75: mol_type = other DNA
agctggaatctgtaccggatctcactctctatggcccacaaaacaggcttggcgttattgcttttaatctcggta

SEQ ID NO: 287841 - DNA, 75 bp, synthetic construct
  source 1..75: mol_type = other DNA
cgcggacgagccagtactggctcagacgctgctgatgcagctaaagcaggtactgtcaatgagcgatgcaaccgt

SEQ ID NO: 287842 - DNA, 75 bp, synthetic construct
  source 1..75: mol_type = other DNA
atgtctcaatattcaattcaacagtcattaggtaatgcatccggcgtcgctgttagcccgatcaatgccgatgcg

SEQ ID NO: 287843 - DNA, 75 bp, synthetic construct
  source 1..75: mol_type = other DNA
atttccgtctgctgcaacagcggctggtgggcgaacgtcatttgaaggtgatggtcgaaccggtcggcggcggtc

SEQ ID NO: 287844 - DNA, 75 bp, synthetic construct
  source 1..75: mol_type = other DNA
atttcttggtctgcatccagaagggaaagaaattggcgctgacagttcaggacggccagtatggattaattcccc

SEQ ID NO: 287845 - DNA, 75 bp, synthetic construct
  source 1..75: mol_type = other DNA
gcggctgacaccgaaccatataaagcttttagagcttggataccatgacccaatgaagctacctcaaaactttga

SEQ ID NO: 287846 - DNA, 75 bp, synthetic construct
  source 1..75: mol_type = other DNA
ctgcggcgtttatacgccagtcggggcgtgcgcagcgcgcaggaactggagcgcagcgttaaaggtatgctgccc

SEQ ID NO: 287847 - DNA, 75 bp, synthetic construct
  source 1..75: mol_type = other DNA
caatgtatcaccctgaatggcatcagggcgttgttggcattctggcatcgcgtatcaaagagcgttttcaccgtc

SEQ ID NO: 287848 - DNA, 75 bp, synthetic construct
  source 1..75: mol_type = other DNA
gcgctgcgcacctttttgcgcgatcagggctggtttgatgagcgtggcatcgcaattcctaacctggcagaactg

SEQ ID NO: 287849 - DNA, 75 bp, synthetic construct
  source 1..75: mol_type = other DNA
aggtcgaattgttggcaaaaaaagccgatttttttgcccagcacgatcttctggcttcggtcaatattgatgggc

SEQ ID NO: 287850 - DNA, 75 bp, synthetic construct
  source 1..75: mol_type = other DNA
gaatttggcccgctgtggctggatgattttggcaccgggatggcaaatttctctgcgctaagtgaagtgcgttat

SEQ ID NO: 287851 - DNA, 75 bp, synthetic construct
  source 1..75: mol_type = other DNA
tcagtcgaaaatctcaaccgctgcgtacctgcgtgcggttaaagtgctgaataatgcgccgtacatgtacaccgc

SEQ ID NO: 287852 - DNA, 75 bp, synthetic construct
  source 1..75: mol_type = other DNA
atgaaaaaaacgctactcacgttcacgctggccctgcttatctctggatgtgctcaacagacgtttactgttgaa

SEQ ID NO: 287853 - DNA, 75 bp, synthetic construct
  source 1..75: mol_type = other DNA
gtcatgattgatggttcccatttgccatttgaagacaacattgcgcgagtgcaagaagttaccgccttttgccat

SEQ ID NO: 287854 - DNA, 75 bp, synthetic construct
  source 1..75: mol_type = other DNA
tcgcgctggcctataatggtaacctgacggcgcttgatctgcgcagcggtcagattatgtggaaacgcgaactgg

SEQ ID NO: 287855 - DNA, 75 bp, synthetic construct
  source 1..75: mol_type = other DNA
tggtaaccgtatctatctggtcgatcaaaatgatcgagtgatggcattgactattgatggcggcgttacgctgtg

SEQ ID NO: 287856 - DNA, 75 bp, synthetic construct
  source 1..75: mol_type = other DNA
cctgtcgtcgttaacggcgttgtttttgccctggcctataatggtaatctgacggcgctcgatctgcgcagcggt

SEQ ID NO: 287857 - DNA, 75 bp, synthetic construct
  source 1..75: mol_type = other DNA
acacgctatggacgtggtgggggcgaggaactaatggtaagttaaaaatggatacagtgctaacagcaccaacga

SEQ ID NO: 287858 - DNA, 75 bp, synthetic construct
  source 1..75: mol_type = other DNA
tgacagaacagctaaacccggcaggcttaagctacacgtatcagtatgagaaagaccgcatcaccatcaccgaca

SEQ ID NO: 287859 - DNA, 75 bp, synthetic construct
  source 1..75: mol_type = other DNA
ccgcatccagacgatttatcagccggggagcttcaccataagcgctaacttaagggttgtggtattacgcctgat

SEQ ID NO: 287860 - DNA, 75 bp, synthetic construct
  source 1..75: mol_type = other DNA
aatgaaggcggtacgctgacagttaacgataatggcaaagcgacagatatcgtccagaacagcggtgccgctctc

SEQ ID NO: 287861 - DNA, 75 bp, synthetic construct
  source 1..75: mol_type = other DNA
aacgaaaacccgcccctcaaagaagcaaacttccccgctatgtcgtgaagcttcacgaagatgatttttttgacg

SEQ ID NO: 287862 - DNA, 75 bp, synthetic construct
  source 1..75: mol_type = other DNA
acggagcactattaccgcctgcgggattacgccctgcagcaccctgaatccagcgccattctgcgcattattaat

SEQ ID NO: 287863 - DNA, 75 bp, synthetic construct
  source 1..75: mol_type = other DNA
tgctgcgcagaccttaatattccgttctttgtggatgcgggaaacaaaaagcaggtcttctggtttgtacgtgtt

SEQ ID NO: 287864 - DNA, 75 bp, synthetic construct
  source 1..75: mol_type = other DNA
atcagcgccggcggcatgtactgtccggagtgcggcacggttcactggccggacggagtcaccccgcccttctga

SEQ ID NO: 287865 - DNA, 75 bp, synthetic construct
  source 1..75: mol_type = other DNA
atggcccgttcagctaaaccccgtaaacgcaaatccgcaccacaaagaagcaaacttccccgctatgttgtaaaa

SEQ ID NO: 287866 - DNA, 75 bp, synthetic construct
  source 1..75: mol_type = other DNA
gatgccaccggcagccggaaaaccatgacgtggagccgttacggtcagttgctgagcttcaccgactgttccggt

SEQ ID NO: 287867 - DNA, 75 bp, synthetic construct
  source 1..75: mol_type = other DNA
aacatcgccggtgacctgaccgccgtcattgccccggacggcagcagaaacgggacacagtacgatgcgtgggga

SEQ ID NO: 287868 - DNA, 75 bp, synthetic construct
  source 1..75: mol_type = other DNA
ggcaggcgctgccggaagaccttcgcataagtccgcatcgttatctggcgacgaacagtccgcaggggccgtggt

SEQ ID NO: 287869 - DNA, 75 bp, synthetic construct
  source 1..75: mol_type = other DNA
ggcaggcgctgccggaagacctacgcttaagtccgcatcgttatctggcgacgaacagtccgcaggggccgtggt

SEQ ID NO: 287870 - DNA, 75 bp, synthetic construct
  source 1..75: mol_type = other DNA
gactgattagcgggctatctcgctggggagaacggctgctggatacctcaattcagatgttgcgcaacgtaccgc

SEQ ID NO: 287871 - DNA, 75 bp, synthetic construct
  source 1..75: mol_type = other DNA
atgaggtgctgcccgcgccgctgccgccgtaccgggtactgaccgggctggtggaccgcttcgggcgcacacaga

SEQ ID NO: 287872 - DNA, 75 bp, synthetic construct
  source 1..75: mol_type = other DNA
attcaatagcccttgccctaatggtactgagaaagtatcagcttatcatactcatggtgcagatagtcatggaga

SEQ ID NO: 287873 - DNA, 75 bp, synthetic construct
  source 1..75: mol_type = other DNA
gatgagaaaggccgcctgaccggtgagcgccagacggtgcatcacccgcagacggaagcactgctctggcagcat

SEQ ID NO: 287874 - DNA, 75 bp, synthetic construct
  source 1..75: mol_type = other DNA
tatgaatttaaatcaaaaaatatagatgatattggaatatttgcattggcaatgtgtaatggagaatcaattaac

SEQ ID NO: 287875 - DNA, 75 bp, synthetic construct
  source 1..75: mol_type = other DNA
aaatccacctgtaccactgcgaccatcgcggcctgccgctggcgcttatcagcacggaaggggctacagaatggt

SEQ ID NO: 287876 - DNA, 75 bp, synthetic construct
  source 1..75: mol_type = other DNA
ggcaggcgctgccggaagatctccgcctaagtccgcatcgttatctggcgacgaacagtccgcaggggccgtggt

SEQ ID NO: 287877 - DNA, 75 bp, synthetic construct
  source 1..75: mol_type = other DNA
cccaacggcgatatcacccgctaccgttatgataatccacacagtgacttaccctgcgcaacggaggatgccacc

SEQ ID NO: 287878 - DNA, 75 bp, synthetic construct
  source 1..75: mol_type = other DNA
atatcactcaggatccgattggactgaaggggggatggaatttttatcagtatccgttgaatccggttcagtata

SEQ ID NO: 287879 - DNA, 75 bp, synthetic construct
  source 1..75: mol_type = other DNA
actgagcactactaccgcctgcgggattacgctctgcagcaccctgaatccagcaccattttgcgcattattgat

SEQ ID NO: 287880 - DNA, 75 bp, synthetic construct
  source 1..75: mol_type = other DNA
gcagaattatccgcatgaatgtatgcagcctgtctggaagttccaacaatattttacgaaggtctcggaggcgca

SEQ ID NO: 287881 - DNA, 75 bp, synthetic construct
  source 1..75: mol_type = other DNA
accagcagtaactaccatcatggtagcagcgcgcagaatacttccgcgcaacaggacagcgaagaaaccgaataa

SEQ ID NO: 287882 - DNA, 75 bp, synthetic construct
  source 1..75: mol_type = other DNA
gcattaagccactgcattcaatgggcggaactggtgaaagaagcggtccagatatatgggggaatccgttctatc

SEQ ID NO: 287883 - DNA, 75 bp, synthetic construct
  source 1..75: mol_type = other DNA
tgtggcaacatctggcgatcagctcctggcgggcgctgattggtttttcagttggcggatcgctgggcttgattc

SEQ ID NO: 287884 - DNA, 75 bp, synthetic construct
  source 1..75: mol_type = other DNA
ggttattgcgcgttgccccctggtttttaccggtgggcatcgtggcggtgtggcaactggcctcctcagttggct

SEQ ID NO: 287885 - DNA, 75 bp, synthetic construct
  source 1..75: mol_type = other DNA
gcgattatccgtgccgacagcgtgctgtctgttgtatcgacaacggcagcagaaacgctcgctgaggctgggggg

SEQ ID NO: 287886 - DNA, 75 bp, synthetic construct
  source 1..75: mol_type = other DNA
actacgcactatttccgcatatgtcgattcttgacaacgtcgcctatggtctgatggtcaaaggcgtgaataaaa

SEQ ID NO: 287887 - DNA, 75 bp, synthetic construct
  source 1..75: mol_type = other DNA
caagttgcgtgagcagatgcaacttgagctgaaaaagctgcaacaatctctcggcatcacgtttatcttcgtcac

SEQ ID NO: 287888 - DNA, 75 bp, synthetic construct
  source 1..75: mol_type = other DNA
tcaatatgactggtcaacgcctgatgccatctatgttggacgctactacgaagttcgcatagagaaggtgaagct

SEQ ID NO: 287889 - DNA, 75 bp, synthetic construct
  source 1..75: mol_type = other DNA
tgacccgctgcaggggcggtatatcactcaggatccgattgggctgaaggggggatggaatttttatcagtatcc

SEQ ID NO: 287890 - DNA, 75 bp, synthetic construct
  source 1..75: mol_type = other DNA
tgggcaacaacgcagagatcaatatggccgtaaagttaatccagaagccgacaaattaacagatgaacataagtc

SEQ ID NO: 287891 - DNA, 75 bp, synthetic construct
  source 1..75: mol_type = other DNA
gcgctgcaacgcgctttgaactgaaactgagcggcggtgaaaaactgctggtcagtcaggccaatatgacgggcg

SEQ ID NO: 287892 - DNA, 75 bp, synthetic construct
  source 1..75: mol_type = other DNA
ctgagcagacagcaattacggcctcagtggtccctgacgagctacgcatcggcttctggccgcagcactttggca

SEQ ID NO: 287893 - DNA, 75 bp, synthetic construct
  source 1..75: mol_type = other DNA
gaaggtgcattctccatccacaataaagtggcagacaatgtgttgctggaaaatggaggccatttagaagtatct

SEQ ID NO: 287894 - DNA, 75 bp, synthetic construct
  source 1..75: mol_type = other DNA
tggtacccgctaatgaacctcaatttgcccttactgcaacaccagtacctgacgaacagcgtctcgatttctggc

SEQ ID NO: 287895 - DNA, 75 bp, synthetic construct
  source 1..75: mol_type = other DNA
tccgcaaaaatctttctggtggcgctcggtacgctattccccatttatatcaacacctggcacggcatccgtaat

SEQ ID NO: 287896 - DNA, 75 bp, synthetic construct
  source 1..75: mol_type = other DNA
tcgtacccgctaaccaatccgaatttgaactgaccgtcacgcaggtacccaacgaacagcgtatcgacttctggc

SEQ ID NO: 287897 - DNA, 75 bp, synthetic construct
  source 1..75: mol_type = other DNA
ggtggcggtaccagcagtaactatcatcatggtagcagcgcgcagaatacttccgcgcaacaggacagcgaagaa

SEQ ID NO: 287898 - DNA, 75 bp, synthetic construct
  source 1..75: mol_type = other DNA
ggcttctggccgcagcactttggatccatcccacaatggataacccttgaatctcgcattttcgcctggatggat

SEQ ID NO: 287899 - DNA, 75 bp, synthetic construct
  source 1..75: mol_type = other DNA
tatgccacggacccggcaggcaaccgcctgcccgacccggagctgcacccggacagtaccctcagcacctggccg

SEQ ID NO: 287900 - DNA, 75 bp, synthetic construct
  source 1..75: mol_type = other DNA
ccgctgctcggtgcaaaagtccttcccggcgaaactgacatcgtcctgcccggcccgctgccgttcattctctcc

SEQ ID NO: 287901 - DNA, 75 bp, synthetic construct
  source 1..75: mol_type = other DNA
gcgtctggagcttttacacactcaacaatagcggcgcatttgtggctccggagcctgacggtgagaaatggacgt

SEQ ID NO: 287902 - DNA, 75 bp, synthetic construct
  source 1..75: mol_type = other DNA
acggagtgttatgccatgacggtccattattaccggttgcgggattacgccctgcagcatccggaatgcagcgcc

SEQ ID NO: 287903 - DNA, 75 bp, synthetic construct
  source 1..75: mol_type = other DNA
aggcctgagccagtaccacgcatacgacagccgtggacagttaattgctgtgaaagacacgcagggccatgaaac

SEQ ID NO: 287904 - DNA, 75 bp, synthetic construct
  source 1..75: mol_type = other DNA
agctacagcaccaccggcaggctgaccggcgttcacaccaccgcagcgaatctggatatccgcatcccgtatgcc

SEQ ID NO: 287905 - DNA, 75 bp, synthetic construct
  source 1..75: mol_type = other DNA
gattaccgaaggcgctgacccgaaaaccaaagtgattgcctttacggtgactgaggggggctactacctcaatac

SEQ ID NO: 287906 - DNA, 75 bp, synthetic construct
  source 1..75: mol_type = other DNA
gacaaggcactgttcggcgatttaaccgaccgtgctgattttgccgcgttgctgcgcgaaaaaattgctgacgtc

SEQ ID NO: 287907 - DNA, 75 bp, synthetic construct
  source 1..75: mol_type = other DNA
acatcgggttaggttcttttcatcgcgcacatcaggcgtggtatctacaccgtttgcaggtgatgggcgataaac

SEQ ID NO: 287908 - DNA, 75 bp, synthetic construct
  source 1..75: mol_type = other DNA
atgaaaacgactaacaaagccgcttatctcagaggacaacggcttgccattcagtggaaacgactcgtaagaacg

SEQ ID NO: 287909 - DNA, 75 bp, synthetic construct
  source 1..75: mol_type = other DNA
gatgatggatcgtttagttatcgtggtaacatctggcttgatcgtgcgacccgcgaagaaattcccgcatacatc

SEQ ID NO: 287910 - DNA, 75 bp, synthetic construct
  source 1..75: mol_type = other DNA
atcacttcaattcagaaattgttgccctggcaggtcgatttacaaccgctgattgccgaaggtgctgacccgaaa

SEQ ID NO: 287911 - DNA, 75 bp, synthetic construct
  source 1..75: mol_type = other DNA
tattcggcagcctgatggctgtatgcgcaaatagttacgcgctcagcgaatctgaagccgaagatatggccgact

SEQ ID NO: 287912 - DNA, 75 bp, synthetic construct
  source 1..75: mol_type = other DNA
ctcagcggcattggcattcccgtcgctaaaaaatgcaaagccctggcccgcgattccttaagcctgcttgcctac

SEQ ID NO: 287913 - DNA, 75 bp, synthetic construct
  source 1..75: mol_type = other DNA
ctcagcggcatcggcattcccgtcgctaaaaaatgcaaagccctggctcgcgattccttaagcctgcttgcctac

SEQ ID NO: 287914 - DNA, 75 bp, synthetic construct
  source 1..75: mol_type = other DNA
aaacctttatccagtgggtagtggaagataatttccgcgatgtgcgcccggcactggagaatgtcggcgtggagc

SEQ ID NO: 287915 - DNA, 75 bp, synthetic construct
  source 1..75: mol_type = other DNA
aattaactatccaacactacaacatagtacttacaattggttcgatatagccgaattgttagggaaggtgcgaat

SEQ ID NO: 287916 - DNA, 75 bp, synthetic construct
  source 1..75: mol_type = other DNA
tgacgacgggaaaccggagcaaatcagtgaaagcgacaatcaatgctctgacaccagtgctgtgtggatggataa

SEQ ID NO: 287917 - DNA, 75 bp, synthetic construct
  source 1..75: mol_type = other DNA
tgttgctggagtctgctggccatcgctttgtttctcagtggtatgctctttgccgcctcttcattacctttgatg

SEQ ID NO: 287918 - DNA, 75 bp, synthetic construct
  source 1..75: mol_type = other DNA
tttacagaaagcagtgaacgcggctctgacttttccaagcgagctaaccattacacaggcggttattaatctgga

SEQ ID NO: 287919 - DNA, 75 bp, synthetic construct
  source 1..75: mol_type = other DNA
ttcagatgatggatctggttattgatttacagaaagcagtgaacgcggctctgacttttccaagcgagctaacca

SEQ ID NO: 287920 - DNA, 75 bp, synthetic construct
  source 1..75: mol_type = other DNA
ctttattcatggaaaacggatatgaccttcagacaggtgtatggttttgtcttatttctacccatctatatggct

SEQ ID NO: 287921 - DNA, 75 bp, synthetic construct
  source 1..75: mol_type = other DNA
acactgattccccaggtctatttttatgacccggaaatggcactgtttgccatggagtatttgacgcctcacgta

SEQ ID NO: 287922 - DNA, 75 bp, synthetic construct
  source 1..75: mol_type = other DNA
atgttaagtattattttgacagggcatggcgggtttgccagcggcatggaaaaagcaatgaagcaaatcctcggt

SEQ ID NO: 287923 - DNA, 75 bp, synthetic construct
  source 1..75: mol_type = other DNA
tatttggcaggggtatgtctggcaaacttggcaaccgcgacgtgcagccatggggggcaaacttccggatgatgt

SEQ ID NO: 287924 - DNA, 75 bp, synthetic construct
  source 1..75: mol_type = other DNA
gatgatgaaaaaacttactcctcattaactttactggaggatgcgttaatattattgacggagcttgagtataat

SEQ ID NO: 287925 - DNA, 75 bp, synthetic construct
  source 1..75: mol_type = other DNA
aatgcataggtagtagagttaatacgccacatgattgctttgacgaagaatatagccttaataaatgtgatatta

SEQ ID NO: 287926 - DNA, 75 bp, synthetic construct
  source 1..75: mol_type = other DNA
gctctgcaggccagccatatgtcagtagacgatctggatcgtcgtttccgccggcgcagaacagtatggcgattc

SEQ ID NO: 287927 - DNA, 75 bp, synthetic construct
  source 1..75: mol_type = other DNA
gatgaccctagaaaaaagatgtctgtctttattcagtgaaaacggatatgatcttcagactggtgcatggttctg

SEQ ID NO: 287928 - DNA, 75 bp, synthetic construct
  source 1..75: mol_type = other DNA
agagaactggaaataatacaacgtaatattaataagtttaattgtgagattagtgagttgaaacttagagctgat

SEQ ID NO: 287929 - DNA, 75 bp, synthetic construct
  source 1..75: mol_type = other DNA
aagacaaaataatgatggtgctgaaatttctgattctgaacaacatgcttctgactcccctgatacagaaaatat

SEQ ID NO: 287930 - DNA, 75 bp, synthetic construct
  source 1..75: mol_type = other DNA
tctgaagatgaaccaatagtatataaaaacatcacctcgctggcagcggcgattagaagttggtcattaaatgtc

SEQ ID NO: 287931 - DNA, 75 bp, synthetic construct
  source 1..75: mol_type = other DNA
ctggcagctgcacgcgcacttttatccgcctctgttgcgctccgccaccgtacgtaaatttatggttggttatga

SEQ ID NO: 287932 - DNA, 75 bp, synthetic construct
  source 1..75: mol_type = other DNA
acagatttgggcaaatagcttcctgcctaacgaagctgagcgcgaagaccgcctgcaaaaagaatattttgccga

SEQ ID NO: 287933 - DNA, 75 bp, synthetic construct
  source 1..75: mol_type = other DNA
gaagaaggtctgaagcccagagataagggcgtttcaatcgatcccgaaatcagagtagaagccgtgaaggctgtg

SEQ ID NO: 287934 - DNA, 75 bp, synthetic construct
  source 1..75: mol_type = other DNA
acggttgtcgatctcagcgggcagatcctctgtccaggttttattgatcaacacgtccatttgattggcggtggc

SEQ ID NO: 287935 - DNA, 75 bp, synthetic construct
  source 1..75: mol_type = other DNA
actgatgatggttacaggatcatctcggcacgttttggtgtcccccgaacccaggtcaggacatgggttgccctc

SEQ ID NO: 287936 - DNA, 75 bp, synthetic construct
  source 1..75: mol_type = other DNA
ggttgccctctatgaaaaacatggagaaaaaggtttaattcccaaacctaaaggcgttagtgctgatccagagtt

SEQ ID NO: 287937 - DNA, 75 bp, synthetic construct
  source 1..75: mol_type = other DNA
ttggtaatttagtgttgagaaaaattagaagcgcactatatcctaaattatcagcagttgtatcgcaaactggcg

SEQ ID NO: 287938 - DNA, 75 bp, synthetic construct
  source 1..75: mol_type = other DNA
tgctgcttctgttgaaaaattcaaagaatcaaacgtaattgcaaaatggcgagagttattgaatgaaatttcata

SEQ ID NO: 287939 - DNA, 75 bp, synthetic construct
  source 1..75: mol_type = other DNA
gtggctgacgctgattgttgccgaaaccatttctgccaattcaggcattggttatctggcgatgaatgcgcggga

SEQ ID NO: 287940 - DNA, 75 bp, synthetic construct
  source 1..75: mol_type = other DNA
cagcagtagtcggtgcaccttccaggacgattctggtaaatccggccccacaaccttcggcaccaacagatacag

SEQ ID NO: 287941 - DNA, 75 bp, synthetic construct
  source 1..75: mol_type = other DNA
agagaaaaaggttcaaaagtttattttaatcctaatacgatgaatgtggttataattaagtcaaatggtgagttc

SEQ ID NO: 287942 - DNA, 75 bp, synthetic construct
  source 1..75: mol_type = other DNA
ggactgatttcgggtggtgatgtgaaaccaggaggctcatcaggtatcgctccatccatgcctccgggatggggg

SEQ ID NO: 287943 - DNA, 75 bp, synthetic construct
  source 1..75: mol_type = other DNA
cctacgatgtgacgagcgttacccactcgcgctaaacccgaaaaattcaaacgctaattgtcttaccaatccgct

SEQ ID NO: 287944 - DNA, 75 bp, synthetic construct
  source 1..75: mol_type = other DNA
gccagaatggtgggggaggcggtacgggaagaaattcgcagacaatccggcggtatgaacagtttccgcgatcgt

SEQ ID NO: 287945 - DNA, 75 bp, synthetic construct
  source 1..75: mol_type = other DNA
atgtttgatccagaaaccttgcgaacttttattgctgttgctgaaacaggaagtttttcaaaagcggctgaacga

SEQ ID NO: 287946 - DNA, 75 bp, synthetic construct
  source 1..75: mol_type = other DNA
aaaaagagattattgttcctgatatggaaacgaaaatcgccgcccatcttgcgggcgttggcattggttttttgc

SEQ ID NO: 287947 - DNA, 75 bp, synthetic construct
  source 1..75: mol_type = other DNA
cagattacgtcagtccgccatatcggttcgtttttaacggcagatggcgatgcatgggttacagtgtttactgcg

SEQ ID NO: 287948 - DNA, 75 bp, synthetic construct
  source 1..75: mol_type = other DNA
aaacccggaacaacagggtgaagtaatctatggtgaaatttatctggcctacgccaactggattggcacaaacca

SEQ ID NO: 287949 - DNA, 75 bp, synthetic construct
  source 1..75: mol_type = other DNA
ccagttgttgaagagcaacggcagggtgcgctcattgcggcacagagtggcggcagcgcagaagacggccagcgc

SEQ ID NO: 287950 - DNA, 75 bp, synthetic construct
  source 1..75: mol_type = other DNA
gactttaaatttaaattaagtttttgtagtgattgcataaaacacttcaaagaaatcatttctgtatgtgataag

SEQ ID NO: 287951 - DNA, 75 bp, synthetic construct
  source 1..75: mol_type = other DNA
tacttgcgccaaatgcggaacaataataggcatgagatatgctttttgggaaacatcacatataaaaaaacttca

SEQ ID NO: 287952 - DNA, 75 bp, synthetic construct
  source 1..75: mol_type = other DNA
ccatacataaaccttatgtaaagcctaataaggactccataaaaaccacaagtgaatattggaacctaacaaaag

SEQ ID NO: 287953 - DNA, 75 bp, synthetic construct
  source 1..75: mol_type = other DNA
ccgcgaactcttgcccggatgattggcgaagcggtaaaagcggaattgtccggtcagtcccgtaacgggctgcgt

SEQ ID NO: 287954 - DNA, 75 bp, synthetic construct
  source 1..75: mol_type = other DNA
ttatcgatggtgcgagaggggcgcttgcacctttgcttgccacggtgtcccgttttgcaccgttgctggatctgg

SEQ ID NO: 287955 - DNA, 75 bp, synthetic construct
  source 1..75: mol_type = other DNA
ctgacgggtgtgatttcagccgtgggggctgcgcttggggcgctgacctggccggttgtggtggcggtgggagcc

SEQ ID NO: 287956 - DNA, 75 bp, synthetic construct
  source 1..75: mol_type = other DNA
ataaatacatcccttacgggaaaatggcttcctggctggttgagtggaaaaacgccactgaaacgcaatggctta

SEQ ID NO: 287957 - DNA, 75 bp, synthetic construct
  source 1..75: mol_type = other DNA
tccgcagggactaccttcataaagtcacaacgaccgtcagcaaaaaccacgcaatgatagtcattgaggatttga

SEQ ID NO: 287958 - DNA, 75 bp, synthetic construct
  source 1..75: mol_type = other DNA
aatgatcgggctggatgctggcgtggctaaactcgccacgctgtcagatggcacagtctttgggcctgtaaacag

SEQ ID NO: 287959 - DNA, 75 bp, synthetic construct
  source 1..75: mol_type = other DNA
gtgatggctctgaagagagcatcagcctgactttccgcaatatgaacgatttcacgccagagcaggtcgcccgac

SEQ ID NO: 287960 - DNA, 75 bp, synthetic construct
  source 1..75: mol_type = other DNA
tccctaaagcaagggtaaatttaaaacttgacctgcatacgggaggagcccagaaaaaggtggaacttcctctca

SEQ ID NO: 287961 - DNA, 75 bp, synthetic construct
  source 1..75: mol_type = other DNA
acaaagtcacaacgaccgtcagcaaaaaccacgcaatgatagtcattgaggatttgaaggtcagcaacatgtcaa

SEQ ID NO: 287962 - DNA, 75 bp, synthetic construct
  source 1..75: mol_type = other DNA
acattttagcggcggggcacgccgttcttgcctgtggagggatggtgcagtcaggccgcccgttgaagcaggaac

SEQ ID NO: 287963 - DNA, 75 bp, synthetic construct
  source 1..75: mol_type = other DNA
ctgtcacaaagtaaattcagatgccaggcatgtggatatacagcgaacgccgatgtaaatggcgctcgtaacatt

SEQ ID NO: 287964 - DNA, 75 bp, synthetic construct
  source 1..75: mol_type = other DNA
acgctcacgcccggacaacaggtgatggtttcctggtcgcgtgatgtgatggtggcgctggttgaggagaggtga

SEQ ID NO: 287965 - DNA, 75 bp, synthetic construct
  source 1..75: mol_type = other DNA
tcacgggtgttgtgaaaaatgtcactgtcagccagtcctgcggtaagtggtacatcagtattcagacagaaagtg

SEQ ID NO: 287966 - DNA, 75 bp, synthetic construct
  source 1..75: mol_type = other DNA
actcctgttcacccttcagcatcaatggtcggactggatgctggcgtggccaggctcgccacgctgtcagatggc

SEQ ID NO: 287967 - DNA, 75 bp, synthetic construct
  source 1..75: mol_type = other DNA
cgacagttaagccgcaaggtcaaattcagcaacaacgggcagaagcagaaacgcaaaatacagcgactgcattcc

SEQ ID NO: 287968 - DNA, 75 bp, synthetic construct
  source 1..75: mol_type = other DNA
atataactttccggtgattaattccgctaaccggtggtctgctgctgaattaaatgattcacgttcactggtcga

SEQ ID NO: 287969 - DNA, 75 bp, synthetic construct
  source 1..75: mol_type = other DNA
ggattacggtgatttcagcgttacgttgcagcactcaaaagtgagcgattctgtcctggcaagcgagattcaggg

SEQ ID NO: 287970 - DNA, 75 bp, synthetic construct
  source 1..75: mol_type = other DNA
tcaattatggatatcggcttttactgtctggcgtcggcggtggcattattcggtgaaccgaaaagcgtgcaggca

SEQ ID NO: 287971 - DNA, 75 bp, synthetic construct
  source 1..75: mol_type = other DNA
atgatacgtttcgctgtgattggtacgaactggatcactcgccagttcgtcgaggccgcccatgagagcggcaaa

SEQ ID NO: 287972 - DNA, 75 bp, synthetic construct
  source 1..75: mol_type = other DNA
tggcctggcggactccgtttggagtaagacgccagacgccctgaacgccgacattcttcagattctgacgcagcg

SEQ ID NO: 287973 - DNA, 75 bp, synthetic construct
  source 1..75: mol_type = other DNA
ccatgctctacgaagcagagctgttcgctaccctggtggatgagcatctggtggatcatccagggctggcggtca

SEQ ID NO: 287974 - DNA, 75 bp, synthetic construct
  source 1..75: mol_type = other DNA
cgaactggataactcaccagttcgtggaggccgcacatgaaagcggtaaatataagttaaccgccgtttattccc

SEQ ID NO: 287975 - DNA, 75 bp, synthetic construct
  source 1..75: mol_type = other DNA
ctcagcgatcgctgaacgaagaagacctgcttgaagccatgatacagcttcagggtagctcggaggccatttttg

SEQ ID NO: 287976 - DNA, 75 bp, synthetic construct
  source 1..75: mol_type = other DNA
ctgctgtttgtgaaatctgagtccacttttacctattttgaagcgacgcgcggctatatcgagaaatacggtaaa

SEQ ID NO: 287977 - DNA, 75 bp, synthetic construct
  source 1..75: mol_type = other DNA
attttaacgcgtaccggccgctggcattagacgatgaccttgatgcagaatttacctggcgagagcctcgccggg

SEQ ID NO: 287978 - DNA, 75 bp, synthetic construct
  source 1..75: mol_type = other DNA
tcgcaaaagccacccggaaaagatggccttcagctatagctacgcgctcagccggggtgtggatacgcagttccg

SEQ ID NO: 287979 - DNA, 75 bp, synthetic construct
  source 1..75: mol_type = other DNA
atcgatgaagatgatctgccaattaagatgaccgcccacaccccatgcttccgttctgaagccggttcatatggt

SEQ ID NO: 287980 - DNA, 75 bp, synthetic construct
  source 1..75: mol_type = other DNA
ccttcacgcaggcgtaaagccccgtcgacgaaaaaatcccagcgttccctggatcaggacgatatgctcaatgcc

SEQ ID NO: 287981 - DNA, 75 bp, synthetic construct
  source 1..75: mol_type = other DNA
acgctcacgcccggacaacaggtggtggtttcctggtcgcgtgatgtgatggtaccgctggttgaggagaggtga

SEQ ID NO: 287982 - DNA, 75 bp, synthetic construct
  source 1..75: mol_type = other DNA
gagagcgggatgctggaactcaccatgaccggtgacgatccgcaactgattactcatatactgaacagcatcgct

SEQ ID NO: 287983 - DNA, 75 bp, synthetic construct
  source 1..75: mol_type = other DNA
atgacaactaaaaatatgaatacgccaccaggcagcactcaggaaaatgagatcgatctgcttcgtctggtcggc

SEQ ID NO: 287984 - DNA, 75 bp, synthetic construct
  source 1..75: mol_type = other DNA
tattttctaatcagcagcgccatcgtactaaaaatatccccttcctggcggtggataacccggcggattctgctg

SEQ ID NO: 287985 - DNA, 75 bp, synthetic construct
  source 1..75: mol_type = other DNA
tccgccgtgccggaaatccttgccagcggcgtactaagccgtagcgatattggcctgttagcgacgcttttttat

SEQ ID NO: 287986 - DNA, 75 bp, synthetic construct
  source 1..75: mol_type = other DNA
tatggcgatcgtcgtggggatttttctctgctggcggctgcgcgatcgcccgcaggcgttaggtttaccagcggt

SEQ ID NO: 287987 - DNA, 75 bp, synthetic construct
  source 1..75: mol_type = other DNA
acgtgaaattgatgcccgctatcgttactggcgtcggcatattttgctgacaatctggttgggctatgcgctgtt

SEQ ID NO: 287988 - DNA, 75 bp, synthetic construct
  source 1..75: mol_type = other DNA
aaaacggccactatacgctggaaggtgaagggttcaccgtcaatggtatggtcggccagcgtctggaaaaagacg

SEQ ID NO: 287989 - DNA, 75 bp, synthetic construct
  source 1..75: mol_type = other DNA
tgcgtttccgtcatggcgatgtgatgcagaatacccgcgcaccagggggtgtatggggccgttatacagggtcgg

SEQ ID NO: 287990 - DNA, 75 bp, synthetic construct
  source 1..75: mol_type = other DNA
tccggtgcgtcgcacaacaaaatcggccgacgcagtactgggcatggcgacagcaccggcatacgtcttcaacag

SEQ ID NO: 287991 - DNA, 75 bp, synthetic construct
  source 1..75: mol_type = other DNA
tgctgacttacgtcgtggttattcgcataacctgtttaacgtgagtaatgagcatggtttatctgaatatctgac

SEQ ID NO: 287992 - DNA, 75 bp, synthetic construct
  source 1..75: mol_type = other DNA
ctggaagccaaagccgttcttgagcagattgtgaacgttgataatcaactcaatgagctgaccttccgcgaggca

SEQ ID NO: 287993 - DNA, 75 bp, synthetic construct
  source 1..75: mol_type = other DNA
ataaacgcgtatcggcaatgccttccactcagcaggaagttctgcgtttaagccgtgacgtggaagcgggccgcg

SEQ ID NO: 287994 - DNA, 75 bp, synthetic construct
  source 1..75: mol_type = other DNA
gacgatgtttgaactgggcggatttatcggtgcgctggttgccggttggggttcggacaaactgtttaacggcaa

SEQ ID NO: 287995 - DNA, 75 bp, synthetic construct
  source 1..75: mol_type = other DNA
gacattccacggtggcgcttcccaacaccttgatggcgtcgcgtttatcttccgtttgcatctggtgctggggat

SEQ ID NO: 287996 - DNA, 75 bp, synthetic construct
  source 1..75: mol_type = other DNA
caccgccagcttgagtacaagcagctctggcgtggcggtcaggtgcttgctgttccgccagcgtatacaagccag

SEQ ID NO: 287997 - DNA, 75 bp, synthetic construct
  source 1..75: mol_type = other DNA
tgataaaaaaataaaaaggataaagacaaggatttgtaaatcattctataactttattaagaatggcgattttga

SEQ ID NO: 287998 - DNA, 75 bp, synthetic construct
  source 1..75: mol_type = other DNA
ataatggacgcattgaacaggtcgattctccgcgcgatctctatatgcgcccgcgcacgccgtttgttgcgggat

SEQ ID NO: 287999 - DNA, 75 bp, synthetic construct
  source 1..75: mol_type = other DNA
tgcctgattggcggtgtgctgttactgaaacgccgtctgttcagcccgcgcgtgcgtgcaaccactaccggagca

SEQ ID NO: 288000 - DNA, 75 bp, synthetic construct
  source 1..75: mol_type = other DNA
cttcggtatgctgacgccgcactggatgtatgaagcgtggttgccgattgaagtgaaacagaaaatggcgatgtt

SEQ ID NO: 288001 - DNA, 75 bp, synthetic construct
  source 1..75: mol_type = other DNA
gcgacactgtttttgacctgaatgacagcaggctggctgtgggggcttttgtatcctataccgataacagcatca

SEQ ID NO: 288002 - DNA, 75 bp, synthetic construct
  source 1..75: mol_type = other DNA
caggcggcagtgtcactgataccactcttaacgatggcggagagcagaatgttgagagtgggggcgtagctgtga

SEQ ID NO: 288003 - DNA, 75 bp, synthetic construct
  source 1..75: mol_type = other DNA
gctcgctgtggctaatgccgtttgccagctacgtgatgcaggcgacttgcttcttcaccattggtttttttgttt

SEQ ID NO: 288004 - DNA, 75 bp, synthetic construct
  source 1..75: mol_type = other DNA
acgagcgcaggaagaacaaggcagactttaccgtattgaagaacagcgcaagaaagaagaacaaatacgcaaagc

SEQ ID NO: 288005 - DNA, 75 bp, synthetic construct
  source 1..75: mol_type = other DNA
cgctgcaatgacgatggttacccttcaggcgaacgctaatgtgacgatacagccaggcaccaccctgacgctgga

SEQ ID NO: 288006 - DNA, 75 bp, synthetic construct
  source 1..75: mol_type = other DNA
gctcgctgtggctgatgccatttgccagctacgtgatgcaggcaacctgcttcttcaccattggttttttgtctt

SEQ ID NO: 288007 - DNA, 75 bp, synthetic construct
  source 1..75: mol_type = other DNA
caaagccagccaaatcctgaaatggttctcgctcaggcgcaaatggtagcagcgcaggcagaagcgcaaaaagca

SEQ ID NO: 288008 - DNA, 75 bp, synthetic construct
  source 1..75: mol_type = other DNA
ggttgatgttggaccaagctacacagcacgacgtgatgcaacggtttctgtactgacaaatgtccttagctctat

SEQ ID NO: 288009 - DNA, 75 bp, synthetic construct
  source 1..75: mol_type = other DNA
actaacgaaactgctcaaactcaaatcaaagcatttactgaaccgccccggttttcctggagagtgttttatctg

SEQ ID NO: 288010 - DNA, 75 bp, synthetic construct
  source 1..75: mol_type = other DNA
caacggcgacctggtgcgcatcagcggcccgcgacagacgcgggaatacggctacagcgccacgggcaggttgga

SEQ ID NO: 288011 - DNA, 75 bp, synthetic construct
  source 1..75: mol_type = other DNA
gaccttaataaaaaactaaaaactattaacctcgggcctcttcctgttgcaaataattgttttagccggacgaac

SEQ ID NO: 288012 - DNA, 75 bp, synthetic construct
  source 1..75: mol_type = other DNA
agttaacgtcagccaccgggactgacgggctggagttgcgccgggaatatgatgaatccggccgtctgattcagg

SEQ ID NO: 288013 - DNA, 75 bp, synthetic construct
  source 1..75: mol_type = other DNA
agccgttatggccggtcacggatgagacaatgcgcaactggctgaaacaggcggtgaagcgggctgaagctgacg

SEQ ID NO: 288014 - DNA, 75 bp, synthetic construct
  source 1..75: mol_type = other DNA
gaacgctaaaatatatatgcctgtagctggcatgaatgaaatatccagcgcttcggtagaagtccttacaagtac

SEQ ID NO: 288015 - DNA, 75 bp, synthetic construct
  source 1..75: mol_type = other DNA
caggtgcttgctgttccgccagcgtagacaagccagcgttgcgcgtactgtggtcatacagcgaaagagaatcgc

SEQ ID NO: 288016 - DNA, 75 bp, synthetic construct
  source 1..75: mol_type = other DNA
ggaaaacgctggttcattgatgacattgagcgtgtcgaagggcacattgcaaaagcaatggatccacagcgtttg

SEQ ID NO: 288017 - DNA, 75 bp, synthetic construct
  source 1..75: mol_type = other DNA
ctgacgctaagaagtacgacaaatctgacgcgttgtgggcgttctgcatgtattcgttgtcacctgaaaaatatg

SEQ ID NO: 288018 - DNA, 75 bp, synthetic construct
  source 1..75: mol_type = other DNA
gcctggtcggtaagtcgacgttttgctaaaaactcaccttattttgggcttcatcttgttgaaaacacctcgaat

SEQ ID NO: 288019 - DNA, 75 bp, synthetic construct
  source 1..75: mol_type = other DNA
acacacgcctacaacgaacaggggctggcaaaccgcgtcacgccggacagcctgccgccggtggagtggctgacc

SEQ ID NO: 288020 - DNA, 75 bp, synthetic construct
  source 1..75: mol_type = other DNA
tacgcggcagtcttcagctacctggcggatgatctcgcggagctgcaggacctcatcagccagcaataccaccac

SEQ ID NO: 288021 - DNA, 75 bp, synthetic construct
  source 1..75: mol_type = other DNA
tggaagaagaagttacgctactgcgtgacaaaatcgaaaaccgtcaaactctcagcctgggcggttgcgaaatct

SEQ ID NO: 288022 - DNA, 75 bp, synthetic construct
  source 1..75: mol_type = other DNA
acgggagaaagcgcagtgccgcagcctggcggagaagttacagcaggaagggagcgaagacggccacggtgtggt

SEQ ID NO: 288023 - DNA, 75 bp, synthetic construct
  source 1..75: mol_type = other DNA
ttcgcatagagaaggtgaagctcacggcgtggcgcaaccctgttagcggagaaacggcaatctatgatgaagagc

SEQ ID NO: 288024 - DNA, 75 bp, synthetic construct
  source 1..75: mol_type = other DNA
gacatgcgtcttcttcgatcaggacagcaagcaatatgaccgctctgatgctatgtgggctatggaaatgttctc

SEQ ID NO: 288025 - DNA, 75 bp, synthetic construct
  source 1..75: mol_type = other DNA
gcaggtttgagcattatccgcgttttgaactgaataagattgcccgtgaatgtgatcgcatcattggcgagtatc

SEQ ID NO: 288026 - DNA, 75 bp, synthetic construct
  source 1..75: mol_type = other DNA
acgccagacggtggagaacccggagacgggggaactgctgtggcaccatgagaccggacatgcgtacaacgaaca

SEQ ID NO: 288027 - DNA, 75 bp, synthetic construct
  source 1..75: mol_type = other DNA
accaccgtggactgccgcaggcgctcatcaccccggaaggcgaaacggcgtggtgcggggagtatgacgagtggg

SEQ ID NO: 288028 - DNA, 75 bp, synthetic construct
  source 1..75: mol_type = other DNA
cacgtatccactggcaccaatacgttacactgatccactggggttagaacgagttataagtgtatatgggcctcc

SEQ ID NO: 288029 - DNA, 75 bp, synthetic construct
  source 1..75: mol_type = other DNA
acgggtggaatgacaacggcgacctggtgcgcatcagcgccccccggcagacgcgggaatacggctacagcgcca

SEQ ID NO: 288030 - DNA, 75 bp, synthetic construct
  source 1..75: mol_type = other DNA
cgaccgcctgcaccgggagacggtgcgcagcttcggcaataatgcatatgaactgaccagcacttacacccccgc

SEQ ID NO: 288031 - DNA, 75 bp, synthetic construct
  source 1..75: mol_type = other DNA
gccacgacaacagatgcgacgggcagcacccggcagatgacctggagccgctacgggcagttgctggcgttcacc

SEQ ID NO: 288032 - DNA, 75 bp, synthetic construct
  source 1..75: mol_type = other DNA
caggtgcttgctgttccgccagcgtacacaagccagcgttgcgcgtactgtggtcatacagcgaaagacaatcgc

SEQ ID NO: 288033 - DNA, 75 bp, synthetic construct
  source 1..75: mol_type = other DNA
gcccgttttgaaaaagaaaacccgggcatcaccgttaaacaagtgcccgtggaagaagacgcctataacaccaaa

SEQ ID NO: 288034 - DNA, 75 bp, synthetic construct
  source 1..75: mol_type = other DNA
gggagagatctcagtaaaaaccggaaataacaccagaaatggtggaaaaaatagcctaaataggctgattcgatg

SEQ ID NO: 288035 - DNA, 75 bp, synthetic construct
  source 1..75: mol_type = other DNA
gattgttgctctcacccgccagttacaaattaccctgcgcggcagtgatgtgattggtcgatttggcggcgatga

SEQ ID NO: 288036 - DNA, 75 bp, synthetic construct
  source 1..75: mol_type = other DNA
atggcagcgcctggaccggtgttcctgtcagcgcatggattggcgggatctggtatcgcaaagatgtgctggcaa

SEQ ID NO: 288037 - DNA, 75 bp, synthetic construct
  source 1..75: mol_type = other DNA
tgtcgccaggcgcggcgctgccggtgaacaaagcggttgtgacgactgccacctggaaagataacgacgtgatta

SEQ ID NO: 288038 - DNA, 75 bp, synthetic construct
  source 1..75: mol_type = other DNA
gtactgcgtattgtgcgcaccgaagatggcagcgcctggaccggtgttcctgtcagcgcatggattggcggcatc

SEQ ID NO: 288039 - DNA, 75 bp, synthetic construct
  source 1..75: mol_type = other DNA
atgattaaacaaactattgtcgcgttgcttttgagtgtgggagcgtcatcggtcttcgcggcaggaaccgtcaag

SEQ ID NO: 288040 - DNA, 75 bp, synthetic construct
  source 1..75: mol_type = other DNA
gtgctgtgattagcgaagagctggcaacggcggcagcattgcggcagcagcaggcgctactggcacggctggcag

SEQ ID NO: 288041 - DNA, 75 bp, synthetic construct
  source 1..75: mol_type = other DNA
ggtaacccgccgttgcagggcaactacacgctgtgggtcggaccaccgccgtccacggtcacgttgttcgggctt

SEQ ID NO: 288042 - DNA, 75 bp, synthetic construct
  source 1..75: mol_type = other DNA
gcggcgatgagtttgcagtaatcatgtccggtacgccagctgagagcgccattaccgccatgttacgggtgcatg

SEQ ID NO: 288043 - DNA, 75 bp, synthetic construct
  source 1..75: mol_type = other DNA
atcctttgctgtttggttgggtcagctaccagacggcgattaaactggctgaacataaacgcagattgcaggtta

SEQ ID NO: 288044 - DNA, 75 bp, synthetic construct
  source 1..75: mol_type = other DNA
ggtatgttcttaccgattgcttcaacgctggtttcgcatccgtcgccgggctggtggtggctgttgttggtcggc

SEQ ID NO: 288045 - DNA, 75 bp, synthetic construct
  source 1..75: mol_type = other DNA
gcctacggcagaaagcgtgctgacggaacaatccttctcccagtttgcgttatccaaccaggccaacgtctttaa

SEQ ID NO: 288046 - DNA, 75 bp, synthetic construct
  source 1..75: mol_type = other DNA
caggtgcttgctgttccgccagcgtaaacaagccagcgttgcgcgtactgtggtcatacagcgaaagaaaatcgc

SEQ ID NO: 288047 - DNA, 75 bp, synthetic construct
  source 1..75: mol_type = other DNA
tggaggtttataccagagtgtttgcgctggatatggctgccacgctggcagtgcctttcacaggtgacgggcggg

SEQ ID NO: 288048 - DNA, 75 bp, synthetic construct
  source 1..75: mol_type = other DNA
gctggatatggctgccacgctggcagtgcctttcacaggtgacggtcgggatgctgcggagatcctgcgtacact

SEQ ID NO: 288049 - DNA, 75 bp, synthetic construct
  source 1..75: mol_type = other DNA
caggtgcttgctgttccgccagcgtatacaagccagcgttgcgcgttctgtggtcatacagcgaaagagaatcgc

SEQ ID NO: 288050 - DNA, 75 bp, synthetic construct
  source 1..75: mol_type = other DNA
caggtgcttgctgttccgccagcgtaaacaagccagcgttgcgcgtgctgtggtcatacagcgaaagagaatcgc

SEQ ID NO: 288051 - DNA, 75 bp, synthetic construct
  source 1..75: mol_type = other DNA
caggtgcttgctgttccgccagcgtaaacaagccagcgttgcgcgtcctgtggtcatacagcgaaagacaatcgc

SEQ ID NO: 288052 - DNA, 75 bp, synthetic construct
  source 1..75: mol_type = other DNA
tgttcaatttgctggatggcggcctggtggcaggtcctagcccgggttctatttttgcttatctggcactgacgc

SEQ ID NO: 288053 - DNA, 75 bp, synthetic construct
  source 1..75: mol_type = other DNA
atgatctcatatcagggacttgttcgcaccttccctaacgaacatttcgccaaaattgtcggcccgatgattacc

SEQ ID NO: 288054 - DNA, 75 bp, synthetic construct
  source 1..75: mol_type = other DNA
ttggctgcctaacgaacatttcgccaaaattgtcggcccgatgattacctatttattgcccgtgatgattggttc

SEQ ID NO: 288055 - DNA, 75 bp, synthetic construct
  source 1..75: mol_type = other DNA
ggttccgctgacagatataagctatgtcaggcagatggaaagctggatgatcaccacccggccccgtcgtcgtga

SEQ ID NO: 288056 - DNA, 75 bp, synthetic construct
  source 1..75: mol_type = other DNA
gctggatatggcttccacgctggcagtgcctttcacaggtgacgggcgggatgctgtagagattctgcgtacact

SEQ ID NO: 288057 - DNA, 75 bp, synthetic construct
  source 1..75: mol_type = other DNA
gctgatattgattaataactatattggcgatccaaaactcgacactttatttaatcaattaaccgccgaacataa

SEQ ID NO: 288058 - DNA, 75 bp, synthetic construct
  source 1..75: mol_type = other DNA
gctgaagcagcagaaagagcaactggcactaacttcgtataatgtatgctatacgaagttattacgtgtggatac

SEQ ID NO: 288059 - DNA, 75 bp, synthetic construct
  source 1..75: mol_type = other DNA
actgaacggggaggaaaaagagcgggcccgcctggggtatgcggcggatgacctaggttttgtgggggatccgta

SEQ ID NO: 288060 - DNA, 75 bp, synthetic construct
  source 1..75: mol_type = other DNA
actgaacggggaggaaaaagagcgggcccgactggggtatgcggcggatgacctcggttttgtgggggatccgta

SEQ ID NO: 288061 - DNA, 75 bp, synthetic construct
  source 1..75: mol_type = other DNA
caatttcattgctcaaaaaaggactcctcgttcgaaggcctcctgctgttggatatcctgataccgaccgttttg

SEQ ID NO: 288062 - DNA, 75 bp, synthetic construct
  source 1..75: mol_type = other DNA
gcttatcacgctgtgactgaaagaattgaggtattcgttgctcagaagcgcaaatctaaagaagaaaaatatgtg

SEQ ID NO: 288063 - DNA, 75 bp, synthetic construct
  source 1..75: mol_type = other DNA
caatctcattgctcgaaaaagggcttcttattcgggtaccttctgctactggatatcctgaaatcgaccgttttg

SEQ ID NO: 288064 - DNA, 75 bp, synthetic construct
  source 1..75: mol_type = other DNA
cagagcgtgagctggccctgtcccgactgaagggggacgaaaaagagcggggccgactggggtatgcggcggatg

SEQ ID NO: 288065 - DNA, 75 bp, synthetic construct
  source 1..75: mol_type = other DNA
cagagcgtgagctggccctgtcccgactgaatggggacgaaaaagagcggggccgtctggggtatgcggcggatg

SEQ ID NO: 288066 - DNA, 75 bp, synthetic construct
  source 1..75: mol_type = other DNA
cagagcgtgagctggccctgtcccgactgaaaggggacgaaaaagagcggggccggctggggtatgcggcggatg

SEQ ID NO: 288067 - DNA, 75 bp, synthetic construct
  source 1..75: mol_type = other DNA
actgaaaggggaggaaaaagagcgggcccgcctggggtatgcggcggatgacctcggttttgtgggggatccgta

SEQ ID NO: 288068 - DNA, 75 bp, synthetic construct
  source 1..75: mol_type = other DNA
cagagcgtgagctggccctgtccggactgaacggggacgaaaaagagcggggccgactggggtatgcggcggatg

SEQ ID NO: 288069 - DNA, 75 bp, synthetic construct
  source 1..75: mol_type = other DNA
cagagcgtgagctggccctgtccggactgaaaggggacgaaaaagagcggggccgcctggggtatgcggcggatg

SEQ ID NO: 288070 - DNA, 75 bp, synthetic construct
  source 1..75: mol_type = other DNA
aatatgtgcagttatcttggtattgaagatgccggtaatgactccaacttattgatagtgttttatgttcagata

SEQ ID NO: 288071 - DNA, 75 bp, synthetic construct
  source 1..75: mol_type = other DNA
atgatatccattaagagctattttaactggaataagttatttatgtttttagctgtggccttatactggttttgg

SEQ ID NO: 288072 - DNA, 75 bp, synthetic construct
  source 1..75: mol_type = other DNA
tccagaggttcatcagctttattcagagctgcttgagcatgacacgttagtggtggtttttcctctctggtggta

SEQ ID NO: 288073 - DNA, 75 bp, synthetic construct
  source 1..75: mol_type = other DNA
ccgggaatgacccttccggaactggctgataatgagggtaaaactcgcgaggcactggaagagcagaatcgtctg

SEQ ID NO: 288074 - DNA, 75 bp, synthetic construct
  source 1..75: mol_type = other DNA
gcctcacagtccagtgatgattttcagtcatcacagcgtgaattaatggcgatcagccagagaacggggacggcg

SEQ ID NO: 288075 - DNA, 75 bp, synthetic construct
  source 1..75: mol_type = other DNA
gcggcgatagttggccgttcttatcggatcgggcaaaagccgcgtttggtcaggcggtgcgcgaaaagacactgg

SEQ ID NO: 288076 - DNA, 75 bp, synthetic construct
  source 1..75: mol_type = other DNA
tggcgcacagaacagtgattgatgaggccgaaaaagccggtatcaagcgcatgattctggtgacctctttgggat

SEQ ID NO: 288077 - DNA, 75 bp, synthetic construct
  source 1..75: mol_type = other DNA
gcaggaaatatcaaaagttcttatgaatgccgcgattgtcaacgggatcaagacggcggcaaacagtatgtccgg

SEQ ID NO: 288078 - DNA, 75 bp, synthetic construct
  source 1..75: mol_type = other DNA
gagtgaacgactgaaagagcaggaagccttttatgccgaatcggatgtgcagcgtgcggactggcagaaagggct

SEQ ID NO: 288079 - DNA, 75 bp, synthetic construct
  source 1..75: mol_type = other DNA
aaaaaatccgggagcagttgcgatcccgggaagagaccctgaagaatgataatgtggctgcgcgtgcatcaaatg

SEQ ID NO: 288080 - DNA, 75 bp, synthetic construct
  source 1..75: mol_type = other DNA
gcgggatacccggtttactgatgctgggagccggtgcctggtacacggtgtaccagaatcaggaacaggccaggg

SEQ ID NO: 288081 - DNA, 75 bp, synthetic construct
  source 1..75: mol_type = other DNA
cgccgcccagaatgcgctgaacagtacaacggcggtgggctcacgtctgatgagcggtgcgctgggactggttgg

SEQ ID NO: 288082 - DNA, 75 bp, synthetic construct
  source 1..75: mol_type = other DNA
ctgaaggtgacggaggccatttcgacagggctgaaaatatccggtgccagtacggcagaggcgggctcggtgatc

SEQ ID NO: 288083 - DNA, 75 bp, synthetic construct
  source 1..75: mol_type = other DNA
cagagcgtgagctggccctgtcctgactgaacggggacgaaaaagagcggggccgtctggggtatgcggcggatg

SEQ ID NO: 288084 - DNA, 75 bp, synthetic construct
  source 1..75: mol_type = other DNA
cgctccgtttgtttgcgaagatggtgtagatgcggtagctgatgcactacggattaagcagggcaacatgtcgcg

SEQ ID NO: 288085 - DNA, 75 bp, synthetic construct
  source 1..75: mol_type = other DNA
atcctgaggcttctggatttatcatcgatagtgccattaacatcgggataagaggttctcttaacggttatatcc

SEQ ID NO: 288086 - DNA, 75 bp, synthetic construct
  source 1..75: mol_type = other DNA
cgtctctacacgggacagcgtgagattcacgcttcaacagaaacaaacgacatcagaaaagcgcgagcgattgcc

SEQ ID NO: 288087 - DNA, 75 bp, synthetic construct
  source 1..75: mol_type = other DNA
aatatgtgcagttatcttggtattgaagatgccgatgtcactttcttgtgtaatacagtggtattcgatggggaa

SEQ ID NO: 288088 - DNA, 75 bp, synthetic construct
  source 1..75: mol_type = other DNA
ggcggggctgatgggggaggccggtcctgaagccattatgcccctgacccgggcggcggatggctcgctgggtgt

SEQ ID NO: 288089 - DNA, 75 bp, synthetic construct
  source 1..75: mol_type = other DNA
gtgctacattaggtttgccgggaaggcagacagccttatggatgaacttatcgctcaggataagcatggcaaaaa

SEQ ID NO: 288090 - DNA, 75 bp, synthetic construct
  source 1..75: mol_type = other DNA
ctccgcacccggctgctttgtatgttgccaataaattgggcgcagatatcggctcggtgatcgtctacggcttgc

SEQ ID NO: 288091 - DNA, 75 bp, synthetic construct
  source 1..75: mol_type = other DNA
aacggcaattgttgcacccatgctgccgctgtatcccgacatcagcccggaaattattgcgattgcggtgatgct

SEQ ID NO: 288092 - DNA, 75 bp, synthetic construct
  source 1..75: mol_type = other DNA
cctttttacctgatttaaatgaatttgttccgtaccttgaacaaatttgggaaaataaatggttgacaaataatg

SEQ ID NO: 288093 - DNA, 75 bp, synthetic construct
  source 1..75: mol_type = other DNA
acgcgtgcgcagtttgttggacatatccgcggttctggcgagacagagaaccgatatagcaaagatcatccacca

SEQ ID NO: 288094 - DNA, 75 bp, synthetic construct
  source 1..75: mol_type = other DNA
tttttatttcttagaaatcagcaacgagcgtgtcgatcagtcactgaaaacgattaattcacgaagaaaaatacc

SEQ ID NO: 288095 - DNA, 75 bp, synthetic construct
  source 1..75: mol_type = other DNA
gatgtctgggtgagtatcaaaaattggatagagaaaagttggtaagcagtgcgcctgctttggcgggcgaaggaa

SEQ ID NO: 288096 - DNA, 75 bp, synthetic construct
  source 1..75: mol_type = other DNA
agcactggcagggcagaatactgaactggctaagatgaaatatcaggtcagtcagggcgaattatcaaccctgtc

SEQ ID NO: 288097 - DNA, 75 bp, synthetic construct
  source 1..75: mol_type = other DNA
tgaacagaaatattgctgccagaagcgctgcccagaatgggctgaacagtacaacggcggtgggctcacgtctga

SEQ ID NO: 288098 - DNA, 75 bp, synthetic construct
  source 1..75: mol_type = other DNA
tgaacagaaatattgctgccagaaccgccgcccagaatgtgctgaacagtacaacggcggtgggctcacgtctga

SEQ ID NO: 288099 - DNA, 75 bp, synthetic construct
  source 1..75: mol_type = other DNA
tgaacagaaatattgctgccagaatcgcggcccagaatgggctgaacagtacaacggcggtgggctcacgtctga

SEQ ID NO: 288100 - DNA, 75 bp, synthetic construct
  source 1..75: mol_type = other DNA
cagagcgtgagctggccctgtcctgactgaatggggacgaaaaagagcggggccgcctggggtatgcggcggatg

SEQ ID NO: 288101 - DNA, 75 bp, synthetic construct
  source 1..75: mol_type = other DNA
cagagcgtgagctggccctgtccagactgaagggggacgaaaaagagcggggccgcctggggtatgcggcggatg

SEQ ID NO: 288102 - DNA, 75 bp, synthetic construct
  source 1..75: mol_type = other DNA
cagagcgtgagctggccctgtccagactgaacggggacgaaaaagagcggggccggctggggtatgcggcggatg

SEQ ID NO: 288103 - DNA, 75 bp, synthetic construct
  source 1..75: mol_type = other DNA
tcgcttactgcgctttcgtcatatgcttgcctgtcgtcgtcgcgggttaattgttttaaccgaccgttatccgca

SEQ ID NO: 288104 - DNA, 75 bp, synthetic construct
  source 1..75: mol_type = other DNA
gcagtagtcaaattgcccttaatggggaaatcacttaataaatctattgaacgcaataaagtgaaaacggcgaaa

SEQ ID NO: 288105 - DNA, 75 bp, synthetic construct
  source 1..75: mol_type = other DNA
atgcagtcaataacacctccattaattgccgttattggtagcgatggttcaggcaagtcaacggtgtgtgaacat

SEQ ID NO: 288106 - DNA, 75 bp, synthetic construct
  source 1..75: mol_type = other DNA
gacgcagattgccacggcgcgggcaagtgcagccgtgtaccgtgcacagcaggcagtggcggcagcccgcgggac

SEQ ID NO: 288107 - DNA, 75 bp, synthetic construct
  source 1..75: mol_type = other DNA
cacgcagattgccacggcgcgggcaagcgcagccgtgtaccgtgctcagcaggcagtggcggcagcccgcgggac

SEQ ID NO: 288108 - DNA, 75 bp, synthetic construct
  source 1..75: mol_type = other DNA
tacgcagattgccacggcgcgggcaagagcagccgtgtaccgtgcccagcaggcagtggcggcagcccgcgggac

SEQ ID NO: 288109 - DNA, 75 bp, synthetic construct
  source 1..75: mol_type = other DNA
gacgttttatttttcccgcgaggcgctgctgcgcgccctgaaaaccggtcataaccagatttttctgtcggccag

SEQ ID NO: 288110 - DNA, 75 bp, synthetic construct
  source 1..75: mol_type = other DNA
cgcagcgctggaacgttccggaatgcaaatcagtcgtcactcactggtttcatcatatctggcgttaatggagtt

SEQ ID NO: 288111 - DNA, 75 bp, synthetic construct
  source 1..75: mol_type = other DNA
acggacagaaatatcgacccctcttgagcatatatctcagggggctacatcggtatctgttattaatcatactcc

SEQ ID NO: 288112 - DNA, 75 bp, synthetic construct
  source 1..75: mol_type = other DNA
gaagatagtcaaccagaatgtcagataactggcgacaggcccgttataaaaataaacaatacattatgggaaagt

SEQ ID NO: 288113 - DNA, 75 bp, synthetic construct
  source 1..75: mol_type = other DNA
ttttctgaccgtccgtttaactggcgtccggtctggattggctatgccccgtcacataccggcgacagcgcaggc

SEQ ID NO: 288114 - DNA, 75 bp, synthetic construct
  source 1..75: mol_type = other DNA
tggttgacgttgacctgaccggtgacccgattgtcctgggcaataacggcgcaaaactgatttttctcggcacca

SEQ ID NO: 288115 - DNA, 75 bp, synthetic construct
  source 1..75: mol_type = other DNA
atgcttaccctggacgagataggtcaatcagtacgtaacaatatccagttgattattgatcatgtcggcttacct

SEQ ID NO: 288116 - DNA, 75 bp, synthetic construct
  source 1..75: mol_type = other DNA
aaactggctgctgcccaggcgtcacttacccgtaatattgcggccagaacagcagcacagacaacgctgaatact

SEQ ID NO: 288117 - DNA, 75 bp, synthetic construct
  source 1..75: mol_type = other DNA
gatgcactggccgggaatgttgtggactggaggaactgggggagttcagttctccgggaagtttcaaaaattctg

SEQ ID NO: 288118 - DNA, 75 bp, synthetic construct
  source 1..75: mol_type = other DNA
cgggtactgaagtggttgaagcgaaagccggtggcgggtctgcaaccctgtctatgggccaggcagctgcacgtt

SEQ ID NO: 288119 - DNA, 75 bp, synthetic construct
  source 1..75: mol_type = other DNA
cgggtactgaggtggttgaagcgaaagccggtggcgggtcggcaaccctgtctatgggccaggctgctgcacgtt

SEQ ID NO: 288120 - DNA, 75 bp, synthetic construct
  source 1..75: mol_type = other DNA
ggaaggcgcagatgtcgttcttatctctgcaggtgtagcgcgtaaaccgggtatggatcgttccgacctgtttaa

SEQ ID NO: 288121 - DNA, 75 bp, synthetic construct
  source 1..75: mol_type = other DNA
acaatgaccagagatgcatccagagcagttctgcgttttgtcactgtcacagcagaagccttacgcttcaggcag

SEQ ID NO: 288122 - DNA, 75 bp, synthetic construct
  source 1..75: mol_type = other DNA
gctgaaaggcgatccgatggtgcttcctaacggggccacgctttacttcctcggcactaatgcccgcacggccca

SEQ ID NO: 288123 - DNA, 75 bp, synthetic construct
  source 1..75: mol_type = other DNA
cctaacggggccacgctttacttcctcggcaccaatgcccgcacggcccagagttatcacggcaacctgtatctg

SEQ ID NO: 288124 - DNA, 75 bp, synthetic construct
  source 1..75: mol_type = other DNA
tctggcccccggcctgctgtgcgcagacgggcaataccgccagatagtcaccgtagaagatgcggtgcgcggcgg

SEQ ID NO: 288125 - DNA, 75 bp, synthetic construct
  source 1..75: mol_type = other DNA
atcgcctttgcccggctggttgacgttgacctgaccggtgacccgattgtcctgggcaataacggcgcaaaactg

SEQ ID NO: 288126 - DNA, 75 bp, synthetic construct
  source 1..75: mol_type = other DNA
attcgttcaggagcttctgcaaccagtactgtagccaatactgacggccgggaatatgtgctctctggtggggtt

SEQ ID NO: 288127 - DNA, 75 bp, synthetic construct
  source 1..75: mol_type = other DNA
gaaaggtggctgcacgctgttcgacattgagcagctcaaacgcgaaaacagcgccgacgattttaaaaacctgtt

SEQ ID NO: 288128 - DNA, 75 bp, synthetic construct
  source 1..75: mol_type = other DNA
aggcctacgacattatcagtcaccgccgcctagaatttgacgccggacacaccgacattgcgcagtcattcatgg

SEQ ID NO: 288129 - DNA, 75 bp, synthetic construct
  source 1..75: mol_type = other DNA
cagacatcactggatctgcttccgcaatatgatacagatatcgaatcccgggcaaacgaactgtggaaaaaggct

SEQ ID NO: 288130 - DNA, 75 bp, synthetic construct
  source 1..75: mol_type = other DNA
cgccaaagggtgcaccctgttcaacatcgatacgctgaagcgcgagaacagtgtcgatgagttccgcaacctgtt

SEQ ID NO: 288131 - DNA, 75 bp, synthetic construct
  source 1..75: mol_type = other DNA
ttcttcagaggtaaattatagagatcaacggcaattcacgtttggctacaccatgttcacgaagcaacaatttga

SEQ ID NO: 288132 - DNA, 75 bp, synthetic construct
  source 1..75: mol_type = other DNA
tgtcatttgcagcctgttttttggatgccttaataacatacccccgctatccagttgcaaacgttcagtctgcga

SEQ ID NO: 288133 - DNA, 75 bp, synthetic construct
  source 1..75: mol_type = other DNA
gtagcccgcattgctgaaatgctgggcgagaaagttgcaaccgttcacagctggaagaaacgcgacaagtggggt

SEQ ID NO: 288134 - DNA, 75 bp, synthetic construct
  source 1..75: mol_type = other DNA
agtggtttatcacactccgtgccatatggaaaaaatgggctggacactctacaccctggagctgttgcgtaaaat

SEQ ID NO: 288135 - DNA, 75 bp, synthetic construct
  source 1..75: mol_type = other DNA
gtgctgcaggaaatatcaaaagttcttatgaatgccgcgattgtcaacggaattaagacggcggcaaacggtatg

SEQ ID NO: 288136 - DNA, 75 bp, synthetic construct
  source 1..75: mol_type = other DNA
gccttttatgccgaatcggatgcgcagcgtgcggactggcagaaaggcttgcaggaggggctcagtaactgggtg

SEQ ID NO: 288137 - DNA, 75 bp, synthetic construct
  source 1..75: mol_type = other DNA
gttactttggcaatatggcctccggagcgatgtctgccacggcaggacttgtgacggctgcacgtaatgaagttg

SEQ ID NO: 288138 - DNA, 75 bp, synthetic construct
  source 1..75: mol_type = other DNA
gcgtcgcagtcatcggatgaatttgcgtcatcacagaaagtgctgatggacatcagccagcggacaggcaccgca

SEQ ID NO: 288139 - DNA, 75 bp, synthetic construct
  source 1..75: mol_type = other DNA
actgctggggtacgggcagggggaacgagccagagaacgcatgcgggagttgcagcagatccgcgacagcttccg

SEQ ID NO: 288140 - DNA, 75 bp, synthetic construct
  source 1..75: mol_type = other DNA
gtgcctggcaactggcacaggctgaacttgcactggccagaaatagcagtgcggaggcgctggccacacagaatg

SEQ ID NO: 288141 - DNA, 75 bp, synthetic construct
  source 1..75: mol_type = other DNA
aggccatttccacggggctgaaaatctccggtgccagtacggcagaggcgggctcggtgatcacccagttcagcc

SEQ ID NO: 288142 - DNA, 75 bp, synthetic construct
  source 1..75: mol_type = other DNA
acgggcacggcattttcagataatgcggccctgtttgcccgctcggcagcctcaatgcgtgaatatggttacagt

SEQ ID NO: 288143 - DNA, 75 bp, synthetic construct
  source 1..75: mol_type = other DNA
aaccctgacggagatgcagaagcaggaactgctgcgtaacgcggccctgattgaccagcaaaaaatccgggaaca

SEQ ID NO: 288144 - DNA, 75 bp, synthetic construct
  source 1..75: mol_type = other DNA
gccggtgcctttgccaccggacacctgatttcactggcggatgagtggagttccgtaaatgcccgtctgaaacag

SEQ ID NO: 288145 - DNA, 75 bp, synthetic construct
  source 1..75: mol_type = other DNA
agcagaaccggctgattgatgaacaggccagtcgggtgaaatccctgcaggaaaaaatcgcaggatatcagtatg

SEQ ID NO: 288146 - DNA, 75 bp, synthetic construct
  source 1..75: mol_type = other DNA
gcgcgcggtgggcagtatgaacggcagtgcgggtctggtgtattccccggtctaccatatcgccattcagaatga

SEQ ID NO: 288147 - DNA, 75 bp, synthetic construct
  source 1..75: mol_type = other DNA
tgcggttcaggtgcaacgtaaggcggcggctgacgctctggcggcagaacgtgcctggcaactggcacaggcaga

SEQ ID NO: 288148 - DNA, 75 bp, synthetic construct
  source 1..75: mol_type = other DNA
gcgcggagaatcgcaatcaggagatctcgacgatctcccgctcgctgaaagcactggcgaaggaactgaactgcc

SEQ ID NO: 288149 - DNA, 75 bp, synthetic construct
  source 1..75: mol_type = other DNA
ccgcccgcccttccgtaggtaaaaccgctttcgccctgacgctgtgcgtcaacgcgctaatgctcctccccaccc

SEQ ID NO: 288150 - DNA, 75 bp, synthetic construct
  source 1..75: mol_type = other DNA
cgtgctggcgggcatcgctcagcgctacgaggctgaacgtggcagcctcagcggtacaccgtccgggctggaaca

SEQ ID NO: 288151 - DNA, 75 bp, synthetic construct
  source 1..75: mol_type = other DNA
atggaaaaaatgggctggacgctctacaccctggaactgttgcgtaaaatccccgggcttgagttaaccgtactg

SEQ ID NO: 288152 - DNA, 75 bp, synthetic construct
  source 1..75: mol_type = other DNA
ccgcaactgggtaaagatttaattaaagtgctcaatgcgatgggcactggcgtgcaattgcttagcaaagagaaa

SEQ ID NO: 288153 - DNA, 75 bp, synthetic construct
  source 1..75: mol_type = other DNA
gaaatattgcatcaactgcaaacgttgcgaagtcgcctgcccgtccgatgtgaagattggcgatatcatccagcg

SEQ ID NO: 288154 - DNA, 75 bp, synthetic construct
  source 1..75: mol_type = other DNA
tacggcagaggcgggttcggtgatcacccagttcagtcaggcgctggcacagggtgtgttgcgcggcgaggaatt

SEQ ID NO: 288155 - DNA, 75 bp, synthetic construct
  source 1..75: mol_type = other DNA
aggtggaaaacgcctttatggcctgggtgggcggtgtgaatgaggccagcggctcgacgaaaacgctctccggcg

SEQ ID NO: 288156 - DNA, 75 bp, synthetic construct
  source 1..75: mol_type = other DNA
cacgtactttgcctttgcaaaaggggcagggctgatgggggaggccggacctgaagccataatgcccctgacccg

SEQ ID NO: 288157 - DNA, 75 bp, synthetic construct
  source 1..75: mol_type = other DNA
gaaggcgatggcggacgatggtcaactgacggcggataaagtcgtgcccgcgttaatcagccagctggggacatt

SEQ ID NO: 288158 - DNA, 75 bp, synthetic construct
  source 1..75: mol_type = other DNA
gtcccgtctggcacagatgcaggaaaaagcgcagtccattcaggatgtgcttgccgggctggaagaccgtcgtgt

SEQ ID NO: 288159 - DNA, 75 bp, synthetic construct
  source 1..75: mol_type = other DNA
aaagcggaagacagtttttcccggctactgaagcagcagaaagagcaactggcactggcgggtcagaatacagag

SEQ ID NO: 288160 - DNA, 75 bp, synthetic construct
  source 1..75: mol_type = other DNA
tccagccgggggccggaaatggcgaaccggtcacggcagaggtactggcacagcggcaggctgaagaggccatcc

SEQ ID NO: 288161 - DNA, 75 bp, synthetic construct
  source 1..75: mol_type = other DNA
gtgaccgggagcgtggttatgtggccaacagcgtctggacggtgacagcggtttccggtgacagtgtcacgctgt

SEQ ID NO: 288162 - DNA, 75 bp, synthetic construct
  source 1..75: mol_type = other DNA
acgcaccgtgcggtcggggagatgcgcagtgccggcgtggatgcgcagacactggcgtcctttctgcatgacacg

SEQ ID NO: 288163 - DNA, 75 bp, synthetic construct
  source 1..75: mol_type = other DNA
ggacgtggcggcaggccgtgccgttcttcgtcaggcggggctggccgggggagacagtcctgcacggtttattgc

SEQ ID NO: 288164 - DNA, 75 bp, synthetic construct
  source 1..75: mol_type = other DNA
agccggagaagagagcgtggctcaggtcagcggggtacgtgaacagacctttctgactcaggccattcgccgtga

SEQ ID NO: 288165 - DNA, 75 bp, synthetic construct
  source 1..75: mol_type = other DNA
agcggtgtggtggtgagaattgccggtgaaggtcgtccgtggaatcccggtgccatcaccggtggtcgcgtgtgg

SEQ ID NO: 288166 - DNA, 75 bp, synthetic construct
  source 1..75: mol_type = other DNA
ttcccggatgtccccatgacactgtatgaagccattgtccgcgactataccggcagaacaccggaagcacgggag

SEQ ID NO: 288167 - DNA, 75 bp, synthetic construct
  source 1..75: mol_type = other DNA
gtcggcatactgccgccggaaaatggtgtgattgaacgggcacgcgccggtatcgatgaggccatcagccgtgag

SEQ ID NO: 288168 - DNA, 75 bp, synthetic construct
  source 1..75: mol_type = other DNA
cggacaccatccgggtgggaaccggtgaccggatgcgcttcacgaagagtgaccggggcgcggttatgtggccaa

SEQ ID NO: 288169 - DNA, 75 bp, synthetic construct
  source 1..75: mol_type = other DNA
gcagtcatgaatcggtactggcggaagcgacgcgggaagcccggaagacaggtgaggcttttccggatgttccca

SEQ ID NO: 288170 - DNA, 75 bp, synthetic construct
  source 1..75: mol_type = other DNA
tgtcagggagattgccgggcaggagcgtgaccggtctgccatatctgaacgggaagccgcgctgccggagagtgt

SEQ ID NO: 288171 - DNA, 75 bp, synthetic construct
  source 1..75: mol_type = other DNA
ctgaaatcccgggatgtggcggcgctggatacgcgaaaatccaaacagcacgtcgatcctgaagtcagaatggct

SEQ ID NO: 288172 - DNA, 75 bp, synthetic construct
  source 1..75: mol_type = other DNA
ggcaatggacaacgccaccctgaacggtctggcccgcagcggtcgtgatgtccggctgtattcctcactggatga

SEQ ID NO: 288173 - DNA, 75 bp, synthetic construct
  source 1..75: mol_type = other DNA
tcagcggtctggtggagaagatgcagaaagtaccggagtcaccgtcacagccggacagcaggaaagcggggatga

SEQ ID NO: 288174 - DNA, 75 bp, synthetic construct
  source 1..75: mol_type = other DNA
gccgtactacgttctgaatgctacagcagagatcgggcgtgttgctgccggtgctgtctctggtgaagtgaaaac

SEQ ID NO: 288175 - DNA, 75 bp, synthetic construct
  source 1..75: mol_type = other DNA
ctcactgcgccagagatctggctgcttacagatctcaccgaggacccaactttggttgatggctttctggcgcag

SEQ ID NO: 288176 - DNA, 75 bp, synthetic construct
  source 1..75: mol_type = other DNA
tgaatgtgcagattctgcggaacaaactgaacccagctcaacctcatttattaaccgcaccagaaatttggttgc

SEQ ID NO: 288177 - DNA, 75 bp, synthetic construct
  source 1..75: mol_type = other DNA
gtgcggtttctggcgatgtaaaaaccagtgcaggccgtcgtgatgcgatcagcagcattaactctgtaacacgac

SEQ ID NO: 288178 - DNA, 75 bp, synthetic construct
  source 1..75: mol_type = other DNA
gcagagatcgggcgtgttgctgctggtgcggtatctggtgatgtgaaaaccagcacaggtcgtcgtgatgctatc

SEQ ID NO: 288179 - DNA, 75 bp, synthetic construct
  source 1..75: mol_type = other DNA
atggcacaggcaaaattaaacagcgaactgattgccacggtagcgggtgatgtgaccgtgtttaactacgacagc

SEQ ID NO: 288180 - DNA, 75 bp, synthetic construct
  source 1..75: mol_type = other DNA
ttcctcgtcgttcaaggtaaggcaagatttagatttaaacatataattactggtcagttatttgaaaaatttatt

SEQ ID NO: 288181 - DNA, 75 bp, synthetic construct
  source 1..75: mol_type = other DNA
tctgagggtgacgggaaaaatccccggactccgcgtctccggcggtgaccgcctgcaggtggcatccgtcagtga

SEQ ID NO: 288182 - DNA, 75 bp, synthetic construct
  source 1..75: mol_type = other DNA
tgactgacctgaccgaagactcaaccctcgttgatggttttttggcgcagattcattgcctgccatgcgtgccgg

SEQ ID NO: 288183 - DNA, 75 bp, synthetic construct
  source 1..75: mol_type = other DNA
gcacagcatagcgccgcagtagacacggcagaagcacagcgtcagtcactgattgatgctgcaatggcttccatc

SEQ ID NO: 288184 - DNA, 75 bp, synthetic construct
  source 1..75: mol_type = other DNA
aactcatcgccacaaaggcgggagatattactgtttataattatgatggtgaaacacgagaatatatttccacat

SEQ ID NO: 288185 - DNA, 75 bp, synthetic construct
  source 1..75: mol_type = other DNA
tgtattcctcactggatgaaacccgtactgcggaaaaacttgcccgccatccctcctttacggtggtttctgagc

SEQ ID NO: 288186 - DNA, 75 bp, synthetic construct
  source 1..75: mol_type = other DNA
taacgccatacgatgaatggaatggtgagaaatgggtgacagataccgaggcacagcacggcgcagcagtagatg

SEQ ID NO: 288187 - DNA, 75 bp, synthetic construct
  source 1..75: mol_type = other DNA
gaaaatacaaccactatcgccccattaacgccatacgataaatgggatggtgagaaatgggtgaccgataccgag

SEQ ID NO: 288188 - DNA, 75 bp, synthetic construct
  source 1..75: mol_type = other DNA
aaacacccgacttaacgctgtgctggattacattgatgcggtgacggcaacagataccagcacagcgccggacgt

SEQ ID NO: 288189 - DNA, 75 bp, synthetic construct
  source 1..75: mol_type = other DNA
taagcgcgattgcaaatggttacaaatggttgtaccaccagaggaactccagtacctgcgggtgaagagagatga

SEQ ID NO: 288190 - DNA, 75 bp, synthetic construct
  source 1..75: mol_type = other DNA
aatttatcgccacccaggcaggaaatattactgtttataactatgatggtgaaacacgggaatatattttcacat

SEQ ID NO: 288191 - DNA, 75 bp, synthetic construct
  source 1..75: mol_type = other DNA
cggcagaagcacagcgccagttactgattgatgctgctatggcttccattagtctgattcagttgaaattacagg

SEQ ID NO: 288192 - DNA, 75 bp, synthetic construct
  source 1..75: mol_type = other DNA
ttttaactcatgggaatatgtgccagaccatcgcggtgaagttgtctataacaccgaaacgggagaatcaaaaga

SEQ ID NO: 288193 - DNA, 75 bp, synthetic construct
  source 1..75: mol_type = other DNA
gattacattgacgctgtgacggcaacagataccagcaccgcgcctgatgttatctggcctgaactgccggaggcg

SEQ ID NO: 288194 - DNA, 75 bp, synthetic construct
  source 1..75: mol_type = other DNA
gaaacacgagaatatattttcacatcaactgaatatcttgctgtgggtgtcggcattccggcatgttcctgttta

SEQ ID NO: 288195 - DNA, 75 bp, synthetic construct
  source 1..75: mol_type = other DNA
agtctgattcaactgaaattgcaggccgggcggaagctgacgcagacagaaaacacccgacttaacgctgtgctg

SEQ ID NO: 288196 - DNA, 75 bp, synthetic construct
  source 1..75: mol_type = other DNA
tgttggctctgctattgtagcaacactgcactcaaatcctgtgttccaggcacaattacaaaaagcgaaagatga

SEQ ID NO: 288197 - DNA, 75 bp, synthetic construct
  source 1..75: mol_type = other DNA
tatgcccgcctgttccactggtattgacccgggcgaaaacattccgggaaaagtggcagtatttacaggtaaggg

SEQ ID NO: 288198 - DNA, 75 bp, synthetic construct
  source 1..75: mol_type = other DNA
catcggtaaaaataagtatacaacaaatatttatgctggcattagctatgatagttattggttttctcgggatgt

SEQ ID NO: 288199 - DNA, 75 bp, synthetic construct
  source 1..75: mol_type = other DNA
aatcacgacgctaggtgactacccgaaaaatacaaccactatctccccgtcaacaccatacgataaatgggatgg

SEQ ID NO: 288200 - DNA, 75 bp, synthetic construct
  source 1..75: mol_type = other DNA
gaaaatacaaccactatcgccccgttaacgccatacgataaatgggatggtgagaaatgggtgacagacactgag

SEQ ID NO: 288201 - DNA, 75 bp, synthetic construct
  source 1..75: mol_type = other DNA
gattatattgacgcggtgatggcaacagataccagcaccgtgccgaatgtcatctggcctgaactgccggaggcg

SEQ ID NO: 288202 - DNA, 75 bp, synthetic construct
  source 1..75: mol_type = other DNA
accgaagcacagcatagcgccgcagtagatgcagcagaagcacagcgccagtcactgattgatactgcaatggct

SEQ ID NO: 288203 - DNA, 75 bp, synthetic construct
  source 1..75: mol_type = other DNA
tccatcagtctgattcaactgaaattgcaggctggacgtaaactgacgcaggcagaaaccacccgacttaacgct

SEQ ID NO: 288204 - DNA, 75 bp, synthetic construct
  source 1..75: mol_type = other DNA
aatcacagcaccaggcgactatcccgaaaaaacaaccactctcgcaccgttaacgccatacgataaatgggatgg

SEQ ID NO: 288205 - DNA, 75 bp, synthetic construct
  source 1..75: mol_type = other DNA
aattactgtttataactttgatgtcatgagttgggaatatatttcagcctcaactgaatatcttgctattggtgt

SEQ ID NO: 288206 - DNA, 75 bp, synthetic construct
  source 1..75: mol_type = other DNA
cagcagaagcacagcgccagtcactgattgatgcagcaatggcttcaatcagtctgattcagctgaaactacagg

SEQ ID NO: 288207 - DNA, 75 bp, synthetic construct
  source 1..75: mol_type = other DNA
aatcacagctccgggtgattaccctgaaaatacaaccactatcgccccattaacgccatacgataaatgggatgg

SEQ ID NO: 288208 - DNA, 75 bp, synthetic construct
  source 1..75: mol_type = other DNA
gatacaccaggtatacataaggcgggttatgcaatatgccgctctgtggatttaaattcatgggaatatgtgcca

SEQ ID NO: 288209 - DNA, 75 bp, synthetic construct
  source 1..75: mol_type = other DNA
gatgcgcccggcacacataaagctggttatgcaatctgtcgttctgcagattttaactcatgggaatatgtgcca

SEQ ID NO: 288210 - DNA, 75 bp, synthetic construct
  source 1..75: mol_type = other DNA
tattaccgtctataactatgatggcgaaacacgggaatatatttccacttcaaatgaatatcttgccattggtgt

SEQ ID NO: 288211 - DNA, 75 bp, synthetic construct
  source 1..75: mol_type = other DNA
cgctaagtggtgtcttgataaattaccaagtgattgtcagattgttggtgaagatggcaattattatctgattaa

SEQ ID NO: 288212 - DNA, 75 bp, synthetic construct
  source 1..75: mol_type = other DNA
cgctaaatggtgtcttgataaattaccaagtgattgtcagattgtcggtgaagatggtaattattatctgattag

SEQ ID NO: 288213 - DNA, 75 bp, synthetic construct
  source 1..75: mol_type = other DNA
ctgtgctgttttgcaatcgtacgggaacggaagttgccgccgctcatgcaggctggcgcgggctgtgttctggcg

SEQ ID NO: 288214 - DNA, 75 bp, synthetic construct
  source 1..75: mol_type = other DNA
aaaatgttttctgaagatatcaaaaggtattccttatttttattctaattttgaacgttgctatgaattgtgctc

SEQ ID NO: 288215 - DNA, 75 bp, synthetic construct
  source 1..75: mol_type = other DNA
tgtctctgcaccatatcgccggtcgtaccgcgccgggttgtcataaaaagcaattgccactttgtagatggcacc

SEQ ID NO: 288216 - DNA, 75 bp, synthetic construct
  source 1..75: mol_type = other DNA
ctattccggcgctgaaactgggcgcgaccaaccagctgcgcttcgactttgagtatatgaacccgatgccgggcg

SEQ ID NO: 288217 - DNA, 75 bp, synthetic construct
  source 1..75: mol_type = other DNA
atgcagacactatgctgacgctcccgatatttaatacgacgattaccgggaaataccggcactggaccccgtggg

SEQ ID NO: 288218 - DNA, 75 bp, synthetic construct
  source 1..75: mol_type = other DNA
gcagatattgccagaacggaaggacagatagccggtgagaaagcgaagcgggacccggcagcactgaatcaggcc

SEQ ID NO: 288219 - DNA, 75 bp, synthetic construct
  source 1..75: mol_type = other DNA
acacagatgtacggtaaaccggtgagtgaactgagcgagacagagaagcagactgtttcgacactggcaacggtt

SEQ ID NO: 288220 - DNA, 75 bp, synthetic construct
  source 1..75: mol_type = other DNA
ggttcgcgaggcatttatggcagtagatgccaaagcgagcgaggctttcattcagcgtggtgataaatatctggc

SEQ ID NO: 288221 - DNA, 75 bp, synthetic construct
  source 1..75: mol_type = other DNA
ctgtagctctacccgtatcggcggcgtgagcttgccaccttacgactctctcaaccttggcgctcattgtggtga

SEQ ID NO: 288222 - DNA, 75 bp, synthetic construct
  source 1..75: mol_type = other DNA
ctgtagctctactcgtatcggcggcgtgagcttgcccccgtatgactcgctcaacctcggtgcccattgtggcga

SEQ ID NO: 288223 - DNA, 75 bp, synthetic construct
  source 1..75: mol_type = other DNA
atgtagtaataacaaaacatggcggagtgagagattattttgcagatgatgtactttatgttgatccgaaggatg

SEQ ID NO: 288224 - DNA, 75 bp, synthetic construct
  source 1..75: mol_type = other DNA
acctggccgtggcttccgcccatattcaggaagagttcggcattaccaaagcgggtgatgctgccaacttactga

SEQ ID NO: 288225 - DNA, 75 bp, synthetic construct
  source 1..75: mol_type = other DNA
ctaccacaaactgtcggcgttgtgcagtgaaggcgcgtcacgatcaggtgtacgaaacagtgcgtcgctatgggc

SEQ ID NO: 288226 - DNA, 75 bp, synthetic construct
  source 1..75: mol_type = other DNA
agacgctggcgcgactggatcacgaaagtgtaccgcaactcatagataatttgctgtcagtgcgtaccaatattt

SEQ ID NO: 288227 - DNA, 75 bp, synthetic construct
  source 1..75: mol_type = other DNA
ttgaaaaaaaatggtattttatctaggcgctatttttatccccttattagcaatatgtcgatgtatcgaggtata

SEQ ID NO: 288228 - DNA, 75 bp, synthetic construct
  source 1..75: mol_type = other DNA
gctgactgtgacagctccaggaataaatggcaaaatgagtgaaattaatgctgcctttggacttgttcagttaaa

SEQ ID NO: 288229 - DNA, 75 bp, synthetic construct
  source 1..75: mol_type = other DNA
atgatatttttcagtgccggtattgattcgtggaaagctgacccggaattaaataattttcgttatatgtggaac

SEQ ID NO: 288230 - DNA, 75 bp, synthetic construct
  source 1..75: mol_type = other DNA
atgtctgggtatcgcacctgctggaaaacctgccggaagagaaactggcatcggcgctgaaggacgacaacccgg

SEQ ID NO: 288231 - DNA, 75 bp, synthetic construct
  source 1..75: mol_type = other DNA
cagggtggctgaaaaaatgatggttactgactgggagccgtctttacttacgcagctcgaacaaaaattcacggc

SEQ ID NO: 288232 - DNA, 75 bp, synthetic construct
  source 1..75: mol_type = other DNA
gaagatcaggttgcagcgctcaggcgacacctggtgttcttcaacaccacgccagccgtgtgtggcccagtcatc

SEQ ID NO: 288233 - DNA, 75 bp, synthetic construct
  source 1..75: mol_type = other DNA
aagtgtgccgcagcttattgataatttgctgtcggtgcgtaccaatatttcaacgatttttattcgcaccgcgtt

SEQ ID NO: 288234 - DNA, 75 bp, synthetic construct
  source 1..75: mol_type = other DNA
tggccgatcacgctgatgcttttgccgagctggattacaacattttccgcggtctggcatttgcttccggtaacc

SEQ ID NO: 288235 - DNA, 75 bp, synthetic construct
  source 1..75: mol_type = other DNA
tatgggcatgagagtggcgagatttggcaccggatgcagaaaaatctgccgggtgatttagccattcaggggtga

SEQ ID NO: 288236 - DNA, 75 bp, synthetic construct
  source 1..75: mol_type = other DNA
cttaccggcgcgcaggctggcggtgaaacggtgaaagtggatgccggtcgtcatctgacactgaccagtgagcag

SEQ ID NO: 288237 - DNA, 75 bp, synthetic construct
  source 1..75: mol_type = other DNA
ctatccgaaaaaacagatattatcgcacctgtatttactgaacagacgacagaatcagtatccgccggaataaat

SEQ ID NO: 288238 - DNA, 75 bp, synthetic construct
  source 1..75: mol_type = other DNA
caaggcaattttcccgcatcttcgcgctgaaggcggcggttttctgcctctcagggtcggtatctcccgcgatat

SEQ ID NO: 288239 - DNA, 75 bp, synthetic construct
  source 1..75: mol_type = other DNA
atccgcatttcgatgaagcctgtagggcttttgcactgcgtcacaacctggtgcaactggcagaacgtgcaggca

SEQ ID NO: 288240 - DNA, 75 bp, synthetic construct
  source 1..75: mol_type = other DNA
atttatatatctcttagcttattatttctatcggtattatataatggattggaaaaaataaaaccacttacaaca

SEQ ID NO: 288241 - DNA, 75 bp, synthetic construct
  source 1..75: mol_type = other DNA
gcctgcgccgccatgcgctgtggcagaccatcaccagtaccccgcaggcagaaagcgatggccggacccctctgg

SEQ ID NO: 288242 - DNA, 75 bp, synthetic construct
  source 1..75: mol_type = other DNA
gtttcctcatcttcgtgctgaaggtggtggatttattcccctgaaaattggcataaacaatgatatttcagcatt

SEQ ID NO: 288243 - DNA, 75 bp, synthetic construct
  source 1..75: mol_type = other DNA
cggcagaatcagcccccgccggaataaattcatctgccgtcgaaacacatatccccgaagcgccagccaggaaga

SEQ ID NO: 288244 - DNA, 75 bp, synthetic construct
  source 1..75: mol_type = other DNA
gaaggtgagagtgtgaccggctggaccctgatacatgccagtcacgaacaggcgacgttccgggttaacggacgt

SEQ ID NO: 288245 - DNA, 75 bp, synthetic construct
  source 1..75: mol_type = other DNA
ccttgagcagattcaggctgcacagaaagctctttccctgcggctggacacgctggcggcactggcagagaagcc

SEQ ID NO: 288246 - DNA, 75 bp, synthetic construct
  source 1..75: mol_type = other DNA
ttaatgaggtagcaaaagagaaactgccgcattacgtcatgagtgcaaccgcagagattgggcgtgttgctgctg

SEQ ID NO: 288247 - DNA, 75 bp, synthetic construct
  source 1..75: mol_type = other DNA
tgatggcactcactgcagtttcattgcatgcgcgtttgcaggttaatccggcgatggcaagcgcggtggataccg

SEQ ID NO: 288248 - DNA, 75 bp, synthetic construct
  source 1..75: mol_type = other DNA
gtgcggtatccggcgatgtaaaaaccagtgcaggtcgtcgtgatgctatcagcagcattaactctgtaacacgac

SEQ ID NO: 288249 - DNA, 75 bp, synthetic construct
  source 1..75: mol_type = other DNA
tggccgatcacgccgatgcctttgccgagctggattacaacatattccgcggtctggcgtttgcttccggcaacc

SEQ ID NO: 288250 - DNA, 75 bp, synthetic construct
  source 1..75: mol_type = other DNA
aggcgtatccaaaccaatgaatttagatattgaattggttaattgtgatatcacttcatttaagggggggggggg

SEQ ID NO: 288251 - DNA, 75 bp, synthetic construct
  source 1..75: mol_type = other DNA
ctgggaaaaatgatggaagtatccggggccgcagaaagaattggtctgacacttcaacgctgtcgctggctttca

SEQ ID NO: 288252 - DNA, 75 bp, synthetic construct
  source 1..75: mol_type = other DNA
gacgatgctcacacatacggaaaatggcttcggttctattgctaatattttgctgattatcggggccggaggcgc

SEQ ID NO: 288253 - DNA, 75 bp, synthetic construct
  source 1..75: mol_type = other DNA
gcactcaaactggcccagctaggaaggccagttaaaatcatgctcggcgggatcaccggctgggaagatgaaggc

SEQ ID NO: 288254 - DNA, 75 bp, synthetic construct
  source 1..75: mol_type = other DNA
agctcaaactggaaacaagactcgcctggcatacgctggtctgaagcttgcagatgctggctctcttgattatgg

SEQ ID NO: 288255 - DNA, 75 bp, synthetic construct
  source 1..75: mol_type = other DNA
aggcgtatccaaaccaatgaatttagatattgaattggttaattgtgatatcacttcatttaaggggggggagga

SEQ ID NO: 288256 - DNA, 75 bp, synthetic construct
  source 1..75: mol_type = other DNA
ggcggattcttgctgctggcaattaccggtccgggcgcgtatagcatcgaccgcctgctgaataaaaagtggtaa

SEQ ID NO: 288257 - DNA, 75 bp, synthetic construct
  source 1..75: mol_type = other DNA
tttatgttgccactggtgattctgcttgagtttggtggtggtctggcaatcctgttcggtttcctgacacgtacc

SEQ ID NO: 288258 - DNA, 75 bp, synthetic construct
  source 1..75: mol_type = other DNA
cctgttcggtttcctgactcgcaccactgccctgtttactgcgggctttacgctgctgacggcatttttatttca

SEQ ID NO: 288259 - DNA, 75 bp, synthetic construct
  source 1..75: mol_type = other DNA
cttattctgcatgctgcagtgggctccgctacggtggcaatgatgggggcaacggcaattgttgcccccatgctg

SEQ ID NO: 288260 - DNA, 75 bp, synthetic construct
  source 1..75: mol_type = other DNA
ctccctgccttatctggctaccggcgccggatatcactgcaacactccccgagtgtttctcgcaactcatcctgg

SEQ ID NO: 288261 - DNA, 75 bp, synthetic construct
  source 1..75: mol_type = other DNA
acagaaatggcaggtacagcctcagacgacagagcagcccaggtgcgatccctgaaatgctttcttttatacaga

SEQ ID NO: 288262 - DNA, 75 bp, synthetic construct
  source 1..75: mol_type = other DNA
tggaaggttcccgtgtgctgggcgttattgcgctgaaagatatcgtcaaaggcggtattaaagagcgcttcgccc

SEQ ID NO: 288263 - DNA, 75 bp, synthetic construct
  source 1..75: mol_type = other DNA
tggcaaccgccacgctgtggccgttttccgcgtggggcggtaatgccgtgagtgtaacggtactggtggcgctgc

SEQ ID NO: 288264 - DNA, 75 bp, synthetic construct
  source 1..75: mol_type = other DNA
tgctgggcgttattgcgctgaaagatatcgtcaaaggcggtattaaagagcgcttcgcccagctgcgcaaaatgg

SEQ ID NO: 288265 - DNA, 75 bp, synthetic construct
  source 1..75: mol_type = other DNA
ccttccgcgaactgacagcgaaagacagcattgatgcggaaaccgaggccgagcgtcttatggaaacccgaaatg

SEQ ID NO: 288266 - DNA, 75 bp, synthetic construct
  source 1..75: mol_type = other DNA
gcctgctggataccgcgcttgccggaaagctggcggctgaccgggggcgagcaggcgcagtgtcgggcgcagatt

SEQ ID NO: 288267 - DNA, 75 bp, synthetic construct
  source 1..75: mol_type = other DNA
ctgaccgcaggcgatctgattgatgcccaggcggctgctgaaaagctggtaatgagcaaggaaggcccggtgctg

SEQ ID NO: 288268 - DNA, 75 bp, synthetic construct
  source 1..75: mol_type = other DNA
ccgcgagactaggtctgggactggcttatgtcccgaaggaattggtgtctggtgatatagaacagggaacactga

SEQ ID NO: 288269 - DNA, 75 bp, synthetic construct
  source 1..75: mol_type = other DNA
ttgtcgatattattacagagcgctttgatgccggtatacgtctgggttcagaggtggatagcggtatggtcgcag

SEQ ID NO: 288270 - DNA, 75 bp, synthetic construct
  source 1..75: mol_type = other DNA
tattgcgtgacataagcaatcgtgatgacgttgaacagcgcctgatagatatttgtgttaaaggggtgcctaatt

SEQ ID NO: 288271 - DNA, 75 bp, synthetic construct
  source 1..75: mol_type = other DNA
gaagccatttttgaaataatagtcaatgggatttcttatggtgattttaaattaaagttaacacatgacagcaga

SEQ ID NO: 288272 - DNA, 75 bp, synthetic construct
  source 1..75: mol_type = other DNA
atgaaagtaactgcaaacggtaagacatttaccttccctgatggtacgagcacggaagatattggagccgccatt

SEQ ID NO: 288273 - DNA, 75 bp, synthetic construct
  source 1..75: mol_type = other DNA
acgtattacagggcggcgcaagcctgattaatgcaatcagccaggggcttggtggccccaaggttttggatgatg

SEQ ID NO: 288274 - DNA, 75 bp, synthetic construct
  source 1..75: mol_type = other DNA
ggcgataaatgcctgacccacgcgctgtggcgtgatttgagcgaccgtctcaccggttttctcaacaacattact

SEQ ID NO: 288275 - DNA, 75 bp, synthetic construct
  source 1..75: mol_type = other DNA
aaggggagaagcgtgattatcgtcaccgtgtccgatgtcatgagcgtgttgcatgacggctacgacaacggccag

SEQ ID NO: 288276 - DNA, 75 bp, synthetic construct
  source 1..75: mol_type = other DNA
tcatgccgcgtcaccccagcgaagagattaaagaatcattgcgtcaagccattctgaaactactcagtttgagtt

SEQ ID NO: 288277 - DNA, 75 bp, synthetic construct
  source 1..75: mol_type = other DNA
tctggcatatgcatttctggagcagaatgccccgcgtaaggctctgaacgccgcgcttaaaggactggcggccgg

SEQ ID NO: 288278 - DNA, 75 bp, synthetic construct
  source 1..75: mol_type = other DNA
agctgttacgaacaggtgatcatgagcgagccttcagtgtactgaaaaaacatgctgatgaattttcaccttact

SEQ ID NO: 288279 - DNA, 75 bp, synthetic construct
  source 1..75: mol_type = other DNA
aaacgccgtggttatcagaaggcgctgatcgtcactgataaaacgctggtgcaatgcggcgtggtggcgaaagtg

SEQ ID NO: 288280 - DNA, 75 bp, synthetic construct
  source 1..75: mol_type = other DNA
cggtacaggatgccatcaaatgggttgtccccgaggtattccccggaagtaatgcgtcagaaaaattacaggcag

SEQ ID NO: 288281 - DNA, 75 bp, synthetic construct
  source 1..75: mol_type = other DNA
atggtctggaagaaagttggtctcacaaaatgtttcctatgatcaccgatcacacttacaaatgactaagctcat

SEQ ID NO: 288282 - DNA, 75 bp, synthetic construct
  source 1..75: mol_type = other DNA
tgtatggaagagatattatagattcaataaatttgacatgaacaataatcgaaatagcaaagatagattagatgg

SEQ ID NO: 288283 - DNA, 75 bp, synthetic construct
  source 1..75: mol_type = other DNA
aagtgctggatgtgtctggtcgtcagcatactcacgacgcgccacgcacccgcacacaagacgcgatcgacgtta

SEQ ID NO: 288284 - DNA, 75 bp, synthetic construct
  source 1..75: mol_type = other DNA
ctggtctggacgtaagcttatttctcaaaatgtttcttatgaccacagatcgcatcttcaaatgtctaaagcaat

SEQ ID NO: 288285 - DNA, 75 bp, synthetic construct
  source 1..75: mol_type = other DNA
aacatgactgtttatgttgatgatctcactttttcaggtggtaacgtaaatcgattgttttgcgctgtaattcgt

SEQ ID NO: 288286 - DNA, 75 bp, synthetic construct
  source 1..75: mol_type = other DNA
cagccaatgctaataatccgagttcaaatgttgatgaatttattgaattttgtaagagtaatattttcaactcga

SEQ ID NO: 288287 - DNA, 75 bp, synthetic construct
  source 1..75: mol_type = other DNA
aacggctgcaatacccgttttgtggcggatgcactggcgaaattcctgaaaattcatgcccgtgaagtcagcttc

SEQ ID NO: 288288 - DNA, 75 bp, synthetic construct
  source 1..75: mol_type = other DNA
tctgactcctgccagtggcttcacttctgacagcaaacgtcagtttgcaagtgttggtgctgaatttaacgcatg

SEQ ID NO: 288289 - DNA, 75 bp, synthetic construct
  source 1..75: mol_type = other DNA
gtaaggtcagtgatgcagacctgaactatctggaaagcattgcaaacagcaacggtcagaatgtggacaaaaacc

SEQ ID NO: 288290 - DNA, 75 bp, synthetic construct
  source 1..75: mol_type = other DNA
ccagtatggacctggatgacaactggacgctgggcctggtcgcacaaaacctgatcccccgcagtattgagacaa

SEQ ID NO: 288291 - DNA, 75 bp, synthetic construct
  source 1..75: mol_type = other DNA
gccggtgtgtcctggcacaacgacctgttcaccaccgcacttgatgttgacctgacaccggccagcggattcacc

SEQ ID NO: 288292 - DNA, 75 bp, synthetic construct
  source 1..75: mol_type = other DNA
cctccgggacttccgtcacacacatgccgccgcacagttgggcatttctgctgtggcggcccttcccggtgatcg

SEQ ID NO: 288293 - DNA, 75 bp, synthetic construct
  source 1..75: mol_type = other DNA
attaaaccgcaggccactgccggcgcctcatggcacaacagcttcatcacaaccgcgctcgatgtcgacctgact

SEQ ID NO: 288294 - DNA, 75 bp, synthetic construct
  source 1..75: mol_type = other DNA
tcacacggcaccgtcagtgtcgacggtaaagtctctgatgctgacctcacttacctggaagaggtggcaaacagc

SEQ ID NO: 288295 - DNA, 75 bp, synthetic construct
  source 1..75: mol_type = other DNA
atgctttaaaagttaggaatgagcagcattttttgatggctagggaaatagattattggaaaataattaaagacg

SEQ ID NO: 288296 - DNA, 75 bp, synthetic construct
  source 1..75: mol_type = other DNA
gccccgatgccagagctgcgccagccgctaaaaccaggcgtcacggggatacgtcaggggctgcgttcgtgctcc

SEQ ID NO: 288297 - DNA, 75 bp, synthetic construct
  source 1..75: mol_type = other DNA
gctgggtatctcaccatttgatgtcgtccatattgatgtggcgggtatagcaggcacagacaacaactacggtgc

SEQ ID NO: 288298 - DNA, 75 bp, synthetic construct
  source 1..75: mol_type = other DNA
acatgttcaccacggcactggatgtggatctgaccccggccagcggcttcacatcagacagcaaacgtcagtttg

SEQ ID NO: 288299 - DNA, 75 bp, synthetic construct
  source 1..75: mol_type = other DNA
ctggcaaacccggccctgctgacaaaagccggtccggaagatgacttcagtcttctgcttccgtccgttggtggg

SEQ ID NO: 288300 - DNA, 75 bp, synthetic construct
  source 1..75: mol_type = other DNA
gaaatgggcacaactgcgtgccggttatcgccagaacatggcatcaaactccggaagtgccttcaccgcaggcgt

SEQ ID NO: 288301 - DNA, 75 bp, synthetic construct
  source 1..75: mol_type = other DNA
ttgctcaaaaaattcttaatattttactacttccaattacaataataagcaatgctactttcccccggatgaacc

SEQ ID NO: 288302 - DNA, 75 bp, synthetic construct
  source 1..75: mol_type = other DNA
aggaaacagtgcctgaaacagctgtgggaaaacagcagtatgccatccgacgtgtatcagcagttctgtctggcg

SEQ ID NO: 288303 - DNA, 75 bp, synthetic construct
  source 1..75: mol_type = other DNA
tcagaaggagagatgtttataaactggttaaaaaaaggagtgaggaacggggaaatcagcctgaatggaaaaaaa

SEQ ID NO: 288304 - DNA, 75 bp, synthetic construct
  source 1..75: mol_type = other DNA
gctgacagttatatggaagccaaagccgcgaggctaggtctggggctggcttatgttccggaggaattagtgtct

SEQ ID NO: 288305 - DNA, 75 bp, synthetic construct
  source 1..75: mol_type = other DNA
tttcagcgctacggatttccacaaacccccaccgatttagtgggtcatccctgcatcgcttaccagttcggcgac

SEQ ID NO: 288306 - DNA, 75 bp, synthetic construct
  source 1..75: mol_type = other DNA
atctctatctgtttatgaaggtcgtgcgagaagggagttttaccgccgccgcgcagaggcttggcctggcgcagt

SEQ ID NO: 288307 - DNA, 75 bp, synthetic construct
  source 1..75: mol_type = other DNA
ccgcctgttaacgtcgatgcgaaatgggctgagctggaagccggttatcagtggttaacgcaaaaatatccccgt

SEQ ID NO: 288308 - DNA, 75 bp, synthetic construct
  source 1..75: mol_type = other DNA
tgcactccggttcacgcggaattggtaacgccatcgggacttactttatcgatctggcgcaaaaagagatgcagg

SEQ ID NO: 288309 - DNA, 75 bp, synthetic construct
  source 1..75: mol_type = other DNA
ccactttattgaaatctgccttgatgagtcggatcaggtgtggattatgctgcactccggttcacgcggaattgg

SEQ ID NO: 288310 - DNA, 75 bp, synthetic construct
  source 1..75: mol_type = other DNA
ctcaagactcaagactcaagactcaagactcaagactcaagactcaagactcaagactcaagactcaagactcaa

SEQ ID NO: 288311 - DNA, 75 bp, synthetic construct
  source 1..75: mol_type = other DNA
taaagatgccgaagtgatcgacgaaattccgatggcgtataaagatattgatgcggtgatggcggcacaaagcga

SEQ ID NO: 288312 - DNA, 75 bp, synthetic construct
  source 1..75: mol_type = other DNA
tgcactccggttcacgcggaatcggtaatgccatcggaacttactttatcgatctggcgcaaaaagagatgcagg

SEQ ID NO: 288313 - DNA, 75 bp, synthetic construct
  source 1..75: mol_type = other DNA
aaaccagaacagctttatggtaggtcgcgacagcaaagtggtgttgattgatagcgactcctttcagattaacgc

SEQ ID NO: 288314 - DNA, 75 bp, synthetic construct
  source 1..75: mol_type = other DNA
acaaaattctcgggttaccggaagaagagaaacgcgctctggcagcacttcatgacactgcaagggaacggcaga

SEQ ID NO: 288315 - DNA, 75 bp, synthetic construct
  source 1..75: mol_type = other DNA
tttggttcctgtgctggcggctatctggattattggcagccttgcaagcaaagcgtacaaagcagaaatccagcg

SEQ ID NO: 288316 - DNA, 75 bp, synthetic construct
  source 1..75: mol_type = other DNA
ttggggcttaatgatgtcctcgcaacggatattgtgctgaccgttcgtcagcgactttttgccgaggcggaagcc

SEQ ID NO: 288317 - DNA, 75 bp, synthetic construct
  source 1..75: mol_type = other DNA
tgaactgggcaaaggtggcgaaggcgcggtttatgatatcgaggagtttgtcgatagcgtcgccaagatttatca

SEQ ID NO: 288318 - DNA, 75 bp, synthetic construct
  source 1..75: mol_type = other DNA
catcaacaggtgaaatgaccactctcggtcttgaactgggcaaaggcggtgaaggcgcggtttatgatatcaatg

SEQ ID NO: 288319 - DNA, 75 bp, synthetic construct
  source 1..75: mol_type = other DNA
tggcaggccgcttcctttaggcctgttacggcgtgaatacatcattctgattgagatcgcactgtcagcgttatc

SEQ ID NO: 288320 - DNA, 75 bp, synthetic construct
  source 1..75: mol_type = other DNA
ggctgtatcagttccgtcgttgttcatcccgggagacactggaaaaagtgatttcccacacacgttataaactta

SEQ ID NO: 288321 - DNA, 75 bp, synthetic construct
  source 1..75: mol_type = other DNA
gcggaaggcgaaatcgagatgacaacacgaagtctgaatcaactggcagaagtggctgcacagtccggctcatgg

SEQ ID NO: 288322 - DNA, 75 bp, synthetic construct
  source 1..75: mol_type = other DNA
aggccgaacgaagcggtaacgcctgcagacagacaagcggtaatggcgaaaatggccgccaaacgacatcggctg

SEQ ID NO: 288323 - DNA, 75 bp, synthetic construct
  source 1..75: mol_type = other DNA
cggctatctggattattggcagtctgacaagcaaagcgtacaaagcagaaatccagcaacgccgtgaggcattta

SEQ ID NO: 288324 - DNA, 75 bp, synthetic construct
  source 1..75: mol_type = other DNA
gcaagcgttggcagcactccatgacacagcacgggaacgccagaagcacaaattcctcgaaggattttttattga

SEQ ID NO: 288325 - DNA, 75 bp, synthetic construct
  source 1..75: mol_type = other DNA
gttgatctgacgtcagcgggaatgcgcgtggagatggggtcgctgacaactttgctaagcggtggcgtcagtttc

SEQ ID NO: 288326 - DNA, 75 bp, synthetic construct
  source 1..75: mol_type = other DNA
tacagatattttgataagtataaaaatgcaaagagcggcgtgatccgtacagaaaacattagcattgagtggatg

SEQ ID NO: 288327 - DNA, 75 bp, synthetic construct
  source 1..75: mol_type = other DNA
actgggttcaaagcctatctatacatacgaatacaacgttcagaaaaaacgcatggatacagttttgcgtttctg

SEQ ID NO: 288328 - DNA, 75 bp, synthetic construct
  source 1..75: mol_type = other DNA
attattggcaatcgtgatgcggttagttatatagaaaaaacgattgtagaaagaaaaagcaaaaaaagaactaaa

SEQ ID NO: 288329 - DNA, 75 bp, synthetic construct
  source 1..75: mol_type = other DNA
tgttaacactgccattaaaatgatgtcaatgcaatttgatagcagcactcgcgtcggattaggtggtagatcttc

SEQ ID NO: 288330 - DNA, 75 bp, synthetic construct
  source 1..75: mol_type = other DNA
gataaagagaagcagttcatcaacagcacctccatccccatcctgtcatggatagtggaccagtcatcactgagc

SEQ ID NO: 288331 - DNA, 75 bp, synthetic construct
  source 1..75: mol_type = other DNA
ctgccgtccatcaacgccggatgtggcgggattgatgtctatcttgggtctttttcctttattaactccgaccag

SEQ ID NO: 288332 - DNA, 75 bp, synthetic construct
  source 1..75: mol_type = other DNA
tgaatcgcagcatgcagggcttccagcctggctccgcagcttacaacaagatggtggcggatatgcagcgccttg

SEQ ID NO: 288333 - DNA, 75 bp, synthetic construct
  source 1..75: mol_type = other DNA
atcaggtactgcgtgaactgcaaccggttctgaaaacgctcaatgagaagagcaatgcgctggtttttgaagcga

SEQ ID NO: 288334 - DNA, 75 bp, synthetic construct
  source 1..75: mol_type = other DNA
gcaacaccctggttgccaacctgagtacgcaactgcccggctgggtggttgcctcccagcctctgggaagcgccc

SEQ ID NO: 288335 - DNA, 75 bp, synthetic construct
  source 1..75: mol_type = other DNA
aaaatcgatagtaagaacccgcagccggagggcgcggaaattgtgttaactgcgcctgaatacagcgctatgtat

SEQ ID NO: 288336 - DNA, 75 bp, synthetic construct
  source 1..75: mol_type = other DNA
ctttctctcctaagatagccccgtttctatacgatctaaaaaatgaatttacgcaaatgaatgtatttgcaatgg

SEQ ID NO: 288337 - DNA, 75 bp, synthetic construct
  source 1..75: mol_type = other DNA
ggtgctgaaaacgctcaatgagaagagtaacgcgctggtatttgaagcaaaggacaaaaaagatccagagccgaa

SEQ ID NO: 288338 - DNA, 75 bp, synthetic construct
  source 1..75: mol_type = other DNA
ggagattaaagtggaagcattcggctgtgagctggtgctgtcagggctgcttagtattgacacgaacagcagcga

SEQ ID NO: 288339 - DNA, 75 bp, synthetic construct
  source 1..75: mol_type = other DNA
cgctggctactgggaccggaactgttacgcactggcgctcatgaacaggcacgccatatactgcaggaacatgca

SEQ ID NO: 288340 - DNA, 75 bp, synthetic construct
  source 1..75: mol_type = other DNA
atctggcatatgcatttctggagcagaatgccccgcgtaaggcactgaacgccgctcttaaaggactggcggcag

SEQ ID NO: 288341 - DNA, 75 bp, synthetic construct
  source 1..75: mol_type = other DNA
gaccagggcattgtcgccttcattatggatgtcattccggcgagcgtcattggcgcgtttgccagcggtaatatc

SEQ ID NO: 288342 - DNA, 75 bp, synthetic construct
  source 1..75: mol_type = other DNA
agatcagaagatcgacattgcaggtgcatctatgactttctccatgttcgacgaactggtcgatgcggtgaaaga

SEQ ID NO: 288343 - DNA, 75 bp, synthetic construct
  source 1..75: mol_type = other DNA
atggtattccgcgtctgatgcacaaagatcagaatatcgacattgctggtgcatctatgactttctctatgttcg

SEQ ID NO: 288344 - DNA, 75 bp, synthetic construct
  source 1..75: mol_type = other DNA
gcttccatgaccttctccatgttcgacgaactggtcgacgcggtgaaagatctgggtgcggactgcatcatgatg

SEQ ID NO: 288345 - DNA, 75 bp, synthetic construct
  source 1..75: mol_type = other DNA
atgatttcgaaatatgcgaaagcattttaagacagcagaagctgttgtgggaaagaattgatgagacactttctg

SEQ ID NO: 288346 - DNA, 75 bp, synthetic construct
  source 1..75: mol_type = other DNA
acaggcacgccatgtactgaaagcgcatgcagatgaattttcaccttactggtatgaactcggccttctgcattt

SEQ ID NO: 288347 - DNA, 75 bp, synthetic construct
  source 1..75: mol_type = other DNA
cagtgagacgagttacatcaacaaactcagacgtcttgctcaacgggagcctgactttattgatatacacgcaca

SEQ ID NO: 288348 - DNA, 75 bp, synthetic construct
  source 1..75: mol_type = other DNA
gggtctggcgctgatcctcggtatcgaccgcttcatgtcagaagcccgtgcgctgactaacctggtcggtaacgg

SEQ ID NO: 288349 - DNA, 75 bp, synthetic construct
  source 1..75: mol_type = other DNA
gacgaattacggaaaagaatcgatgacagactttcagaggaaattatacaaaaatgcagaaatatgaagggggaa

SEQ ID NO: 288350 - DNA, 75 bp, synthetic construct
  source 1..75: mol_type = other DNA
tacgctgatgaattttcaccttactggtatgaactcggccttctgcattttcttaatggggaacaggtaaaagct

SEQ ID NO: 288351 - DNA, 75 bp, synthetic construct
  source 1..75: mol_type = other DNA
ccgtcgcaatctgattgttggcgactccaccactaacaacaaagccttcgacggtattccgaagctgatgcatga

SEQ ID NO: 288352 - DNA, 75 bp, synthetic construct
  source 1..75: mol_type = other DNA
cgacgctaagcactgcacggtgattaacgctttgtcacgcaatggctggaaagagttcgcagaggattacggtat

SEQ ID NO: 288353 - DNA, 75 bp, synthetic construct
  source 1..75: mol_type = other DNA
cagcaggaccgcagcgaagacgctcgcgcaaatgctgagttactccttaaaggcaatgaacagacgcacaagcag

SEQ ID NO: 288354 - DNA, 75 bp, synthetic construct
  source 1..75: mol_type = other DNA
gttccggtcttcggggagtggggcttcgttgaagataaagaagtgtatgagggcgtcgtccgcctgacgaaggac

SEQ ID NO: 288355 - DNA, 75 bp, synthetic construct
  source 1..75: mol_type = other DNA
catttgacgtctatatcggcggaacagatatccacgtcagtaatatctcactcgacatcagtgatgaaagtaccg

SEQ ID NO: 288356 - DNA, 75 bp, synthetic construct
  source 1..75: mol_type = other DNA
ttcgtgaccagtcccaagttcgtgaacatcaacggtgtgccgtatctggaagcggaagccacagaaaacctgatc

SEQ ID NO: 288357 - DNA, 75 bp, synthetic construct
  source 1..75: mol_type = other DNA
gcagagggggaaattgaggtcagttcaaaggtactcagtgtactgaccgcaaaagcccgcgcggcaggttcgtgg

SEQ ID NO: 288358 - DNA, 75 bp, synthetic construct
  source 1..75: mol_type = other DNA
agctaagtcagtgttagatcaaatcgttaatgtcgataatcaattaaatgaactaacattcagagaatcagaaat

SEQ ID NO: 288359 - DNA, 75 bp, synthetic construct
  source 1..75: mol_type = other DNA
caagatgctaaaagtttagagttcttaaatgctcagttacctaagatcagaagtgatttagacttagcagaagac

SEQ ID NO: 288360 - DNA, 75 bp, synthetic construct
  source 1..75: mol_type = other DNA
gccagcaccgtcggcgatgtgcgcattgttgacccggcaatcacccagcctggcgtgctgaaaccgaagaaagga

SEQ ID NO: 288361 - DNA, 75 bp, synthetic construct
  source 1..75: mol_type = other DNA
ggaaaaccctgaagtgccgcaagccaacgcttacatgcttgaggctgccaccaacgcagtgaaagaggtggctag

SEQ ID NO: 288362 - DNA, 75 bp, synthetic construct
  source 1..75: mol_type = other DNA
gtgttattgataataacacaatgtggaatgtttctgtaaaagccatgacgttattaataagtggcggtgaacgag

SEQ ID NO: 288363 - DNA, 75 bp, synthetic construct
  source 1..75: mol_type = other DNA
tgcgcaagttgtcgattaccagtccggcaatgtggtcacactcaacgacattcgcggtcgctatgagtgctatac

SEQ ID NO: 288364 - DNA, 75 bp, synthetic construct
  source 1..75: mol_type = other DNA
taagctcatcaagatgatcatcgcacctgtcatcttttgtactgtggtaaccggtatcgcaggcatggaaagcat

SEQ ID NO: 288365 - DNA, 75 bp, synthetic construct
  source 1..75: mol_type = other DNA
acttgagcgtcaccagtggaaaggcatggactttgccactcaggcggaatccatccgcaaactcaccgaaaaata

SEQ ID NO: 288366 - DNA, 75 bp, synthetic construct
  source 1..75: mol_type = other DNA
agcgcgcggtatccgttacacgcctgaaatgaaaaccgcaatggtgctcaaggcaaaagacaccattcgccgcgg

SEQ ID NO: 288367 - DNA, 75 bp, synthetic construct
  source 1..75: mol_type = other DNA
caggcgtacattttcaacaatgcttaacgatatgggtgccgatccttatattgtagagcttctgcttggtcataa

SEQ ID NO: 288368 - DNA, 75 bp, synthetic construct
  source 1..75: mol_type = other DNA
aaaagcatatttttccatatatcggagatatggctatagaacagtgcaaattgcatacctggcttactgtatttg

SEQ ID NO: 288369 - DNA, 75 bp, synthetic construct
  source 1..75: mol_type = other DNA
actgattatgacaatcacgaattatcatatgaaaaccgaattattttacgtttcctggtagtttttggttgtcga

SEQ ID NO: 288370 - DNA, 75 bp, synthetic construct
  source 1..75: mol_type = other DNA
accgacattgcgcaatcatttatggcaatccgtcgcgccaccaccgccagcggcaaccgcccgacctatgaagcc

SEQ ID NO: 288371 - DNA, 75 bp, synthetic construct
  source 1..75: mol_type = other DNA
gaggaaaccgccccgcttaaccgcgtggaaacgacgctcgaggcgcgcctgattcagctgtatgcaaagcctgac

SEQ ID NO: 288372 - DNA, 75 bp, synthetic construct
  source 1..75: mol_type = other DNA
cgctggaaagctatcttaatcgcctgctggctgccgatctccagcaagccagattatggagcgccgcgcctggcg

SEQ ID NO: 288373 - DNA, 75 bp, synthetic construct
  source 1..75: mol_type = other DNA
accgtattcgcgacattctcaaatcccgccagattggcgcgacgttctatttttcccgcgaggcactgctgcgcg

SEQ ID NO: 288374 - DNA, 75 bp, synthetic construct
  source 1..75: mol_type = other DNA
aaagtacaacaggggattatcgcaggctgttctggcggtaactatgaaaacgttattgcagcggcgaatgcactg

SEQ ID NO: 288375 - DNA, 75 bp, synthetic construct
  source 1..75: mol_type = other DNA
tatacaagcgattggactcattgccgatgcgctaagagcttccgtggcaggagatacacaggcgagcgaagatat

SEQ ID NO: 288376 - DNA, 75 bp, synthetic construct
  source 1..75: mol_type = other DNA
cgccggtttctgagctgatcactctcggcgaaaatatggggctggaaaatctggctcgtatgcgtaagcaggaca

SEQ ID NO: 288377 - DNA, 75 bp, synthetic construct
  source 1..75: mol_type = other DNA
ccacgtactttgcctttgcaaaaggggcagggctgatgggggaggccggacctgaagccataatgcccctgaccc

SEQ ID NO: 288378 - DNA, 75 bp, synthetic construct
  source 1..75: mol_type = other DNA
gctggacgaccggtaacggcttcatgataaaccatctgacctcggtgaaaactgtaacggaagggcttgctcagg

SEQ ID NO: 288379 - DNA, 75 bp, synthetic construct
  source 1..75: mol_type = other DNA
gtcaggtatcaacgaaaactgccgaatctaaattcgttgcggatgataaaaacgcggtactcaccgcatcatctg

SEQ ID NO: 288380 - DNA, 75 bp, synthetic construct
  source 1..75: mol_type = other DNA
cagtctcagtatcaggcaggggatatcagtgaggatttttacagacaggcgctggcgcagaatgcgcagtatctg

SEQ ID NO: 288381 - DNA, 75 bp, synthetic construct
  source 1..75: mol_type = other DNA
acgcgcggactggcagaaagggttacaggaggggctcagtaactgggtggataatgcgtccgattacgcctcaca

SEQ ID NO: 288382 - DNA, 75 bp, synthetic construct
  source 1..75: mol_type = other DNA
ggggaacgagccagagaacgcatgcgggagttgcagcagatccgcgacagcttccgccagaaggatgcggacctt

SEQ ID NO: 288383 - DNA, 75 bp, synthetic construct
  source 1..75: mol_type = other DNA
cgccggtttctgagctgatcattctcggcgaaaatatggggctggaaaacctggctcgtatgcgtaagcaggaca

SEQ ID NO: 288384 - DNA, 75 bp, synthetic construct
  source 1..75: mol_type = other DNA
atggaattcctcattaataaactggcaatgaccaagaccaatgacgatttcttcgaaatgatgaaacgctcataa

SEQ ID NO: 288385 - DNA, 75 bp, synthetic construct
  source 1..75: mol_type = other DNA
tatcggtcgtggtcagcgtggtctgattgtggcaccgccgaaagccggtaaaaccatgctgctgcagaacattgc

SEQ ID NO: 288386 - DNA, 75 bp, synthetic construct
  source 1..75: mol_type = other DNA
gtgaaagccaacgatgaggggaaagcagagttgcaggtggtttcagtgactgccggaacctatgagatcacggcg

SEQ ID NO: 288387 - DNA, 75 bp, synthetic construct
  source 1..75: mol_type = other DNA
agtttaaaggtacaggcaacatggaactgcacctctctcgtaagatcgctgaaaaacgcgtcttcccggctatcg

SEQ ID NO: 288388 - DNA, 75 bp, synthetic construct
  source 1..75: mol_type = other DNA
aacgcccgcaacaaaatcctctttgagaacttaaccccactgcacgcaaactctcgtctgcgcatggaacgtggt

SEQ ID NO: 288389 - DNA, 75 bp, synthetic construct
  source 1..75: mol_type = other DNA
aagccaaagacaccattcgccgcggttgcctcgagtacgacgtcagcgcgaccgatatcacgcagtcgtttatgt

SEQ ID NO: 288390 - DNA, 75 bp, synthetic construct
  source 1..75: mol_type = other DNA
agaacgtgaaagcgttctttcctgccgtccgggagtttgtttacaaccccaacgttaaaaacgccctggtactca

SEQ ID NO: 288391 - DNA, 75 bp, synthetic construct
  source 1..75: mol_type = other DNA
cggacgtcgcctgggcgaccatgcacgcgctgttaaacgaaccgcttaccgctggcagcggccaggcaacatcat

SEQ ID NO: 288392 - DNA, 75 bp, synthetic construct
  source 1..75: mol_type = other DNA
gaaatgaaaaccgcgatggtgctgaaagcaaaagatgttattcgccgtggctgtctcgaatacgacgtcagcgcc

SEQ ID NO: 288393 - DNA, 75 bp, synthetic construct
  source 1..75: mol_type = other DNA
accggcgttggtcacggggtttacgagaacgtgaaagcgttttttcctgccgtccgggagtttgtttacaacccc

SEQ ID NO: 288394 - DNA, 75 bp, synthetic construct
  source 1..75: mol_type = other DNA
tgcgtggtactggcaccgccggtggtggccggtggcaaattcagaatacttgagcgtcaccagtggaaaggcatg

SEQ ID NO: 288395 - DNA, 75 bp, synthetic construct
  source 1..75: mol_type = other DNA
ccgatctggcctgggcaacaatgcacgcactgtttaacgaaccactgcagggcgagtccgccaatacaagtaata

SEQ ID NO: 288396 - DNA, 75 bp, synthetic construct
  source 1..75: mol_type = other DNA
atgccggagcaactgttactgatacaaccgtaaattcaggcggtaagcaaaatatctcttctggcggcagtgcca

SEQ ID NO: 288397 - DNA, 75 bp, synthetic construct
  source 1..75: mol_type = other DNA
ccgatctggcctgggcaacgatgcacgcactgtttaatgaaccgctgcagggcgaatccgccaataccagcaata

SEQ ID NO: 288398 - DNA, 75 bp, synthetic construct
  source 1..75: mol_type = other DNA
gcccgtgaagccctgattgacgctctgctgaccggacgtaaccagattttcctttccgcaagcaaggcacaggcc

SEQ ID NO: 288399 - DNA, 75 bp, synthetic construct
  source 1..75: mol_type = other DNA
gtcgtcgggcatggcctcacaaagccacctgcgcagcacctacttttcgacaccttccaccctggcacacggcgc

SEQ ID NO: 288400 - DNA, 75 bp, synthetic construct
  source 1..75: mol_type = other DNA
accgtattcgtgacattctcaaatcccgccagattggcgcgacattctatttctcccgcgaggcactgctgcgcg

SEQ ID NO: 288401 - DNA, 75 bp, synthetic construct
  source 1..75: mol_type = other DNA
cggattttctggcccggcagatggagcgctttgcgcggattaaccgctacggccagaccggaaacgaggctgacc

SEQ ID NO: 288402 - DNA, 75 bp, synthetic construct
  source 1..75: mol_type = other DNA
tggccggtggcaaattcagaatacttgagcgtcaccagtggaaaggcatggactttgccactcaggcggaatcca

SEQ ID NO: 288403 - DNA, 75 bp, synthetic construct
  source 1..75: mol_type = other DNA
gacgaataccagaacctgctgatgtgtgagttcgtggacgatctcgcgtccgtgttcccgctcagcgaactgcag

SEQ ID NO: 288404 - DNA, 75 bp, synthetic construct
  source 1..75: mol_type = other DNA
taccggacgtaaccagattttcctttctgccagtaaggctcaggcccacgtctttaaacaatacatcatcgactt

SEQ ID NO: 288405 - DNA, 75 bp, synthetic construct
  source 1..75: mol_type = other DNA
accgacatagcgcagtcattcatggcaatccgtcgcgccaccaccgcgagcggcaaccgcccaacctatgaagcc

SEQ ID NO: 288406 - DNA, 75 bp, synthetic construct
  source 1..75: mol_type = other DNA
tcgacaagctcgaagagattttcctcgaccagtctttcgactatcagctcgagtggtggcgcgcggggctggcgc

SEQ ID NO: 288407 - DNA, 75 bp, synthetic construct
  source 1..75: mol_type = other DNA
cgcccgtttggctggcgcgaagtgtggatcggttatgacccggccaaaggtacgcagaacggcgacagcgccgga

SEQ ID NO: 288408 - DNA, 75 bp, synthetic construct
  source 1..75: mol_type = other DNA
gcccgtgaagccctgattgacgccctgcagaccgggcgtaaccagattttcctttctgccagcaaggctcaggcc

SEQ ID NO: 288409 - DNA, 75 bp, synthetic construct
  source 1..75: mol_type = other DNA
caagaaatggcggcagacctatttttccacaccatccagtctgacccacagtgcttatccgttctggtccggtgc

SEQ ID NO: 288410 - DNA, 75 bp, synthetic construct
  source 1..75: mol_type = other DNA
cgtccgggagtttgtctacagccccaacgttaaaaacgccctggtactcaaggcctacgacattatcagccaccg

SEQ ID NO: 288411 - DNA, 75 bp, synthetic construct
  source 1..75: mol_type = other DNA
gacttccgcgcccaggctgacgccatcaaaaaacttaccgagcagtacaacgtgacttatatcggtatcgactca

SEQ ID NO: 288412 - DNA, 75 bp, synthetic construct
  source 1..75: mol_type = other DNA
aacgttaaaaacgccctggtactcaaggcctacgacattatcagccaccgccgtcttgagtttgacgccgggcac

SEQ ID NO: 288413 - DNA, 75 bp, synthetic construct
  source 1..75: mol_type = other DNA
gagttatcacggcaacctttatctggatgaatatttctggataccaaaattccaggagctgcgcaaagtggcttc

SEQ ID NO: 288414 - DNA, 75 bp, synthetic construct
  source 1..75: mol_type = other DNA
gctgacgccatcaaaaaactcaccgaacagtacaacgttacgtatatcggtatcgactcgaccggcgttggtcac

SEQ ID NO: 288415 - DNA, 75 bp, synthetic construct
  source 1..75: mol_type = other DNA
tggcgaaatacttcgccattattccggcggcgttcgcggcaacgtatccgcagttaaatgcgctgaacattatgc

SEQ ID NO: 288416 - DNA, 75 bp, synthetic construct
  source 1..75: mol_type = other DNA
agaatataaagcccaggtgaagcagctcattgaaatgaaccgaatcaccattgctaatggcgatattggttttaa

SEQ ID NO: 288417 - DNA, 75 bp, synthetic construct
  source 1..75: mol_type = other DNA
aagatttttgtcgataagctcacacaagcgcagttgattaatggtcgtctggcgattgctcgctttgtaacttcg

SEQ ID NO: 288418 - DNA, 75 bp, synthetic construct
  source 1..75: mol_type = other DNA
accttcgacgtaattatctccgactgcaccgatccaatcggtcccggcgaaagcctgtttacctcagcattttat

SEQ ID NO: 288419 - DNA, 75 bp, synthetic construct
  source 1..75: mol_type = other DNA
gaagccatcgacagccatcgcaaactcagccattacttcagcgacgttggcttttatcaggcggcgatcccgacc

SEQ ID NO: 288420 - DNA, 75 bp, synthetic construct
  source 1..75: mol_type = other DNA
gtcactggcggcacgcgtattctttctgactggctggtaattgagtgcagcgttaaccccggcgagacgtttctg

SEQ ID NO: 288421 - DNA, 75 bp, synthetic construct
  source 1..75: mol_type = other DNA
ccgttagcggaaaaacagttaccggaacggggactgaattcaatgccgcattatctctgatcagggtcggttgca

SEQ ID NO: 288422 - DNA, 75 bp, synthetic construct
  source 1..75: mol_type = other DNA
taatcagggggtgtacctgcttggtcagttcactggcccggttaactacttcacaaaacacagtgatggttggat

SEQ ID NO: 288423 - DNA, 75 bp, synthetic construct
  source 1..75: mol_type = other DNA
gattcgaaacaggccagaacgaccgcattgctatagacgagttgcttcactggcgggaagagtatttgttcaaaa

SEQ ID NO: 288424 - DNA, 75 bp, synthetic construct
  source 1..75: mol_type = other DNA
tcaacctcgggggctgtcgatgtatcaggcgataataagagtgtgacgacatcgtgcagatttaaaacggatttg

SEQ ID NO: 288425 - DNA, 75 bp, synthetic construct
  source 1..75: mol_type = other DNA
taagtggttcagaccgacgaataaatgaaaatgccgggctggaaaaaatggttatggggatgcgtgtaaaagcag

SEQ ID NO: 288426 - DNA, 75 bp, synthetic construct
  source 1..75: mol_type = other DNA
ttacattaacaaatcaggtgttttaactgtggctggtattaatgagccacgttttgaacgcgaaggattactgat

SEQ ID NO: 288427 - DNA, 75 bp, synthetic construct
  source 1..75: mol_type = other DNA
tgctgcatgtcaggcaaactatatccgtgatgttcagggcgggactgtatcaccgtcgtcaactgctgaactgac

SEQ ID NO: 288428 - DNA, 75 bp, synthetic construct
  source 1..75: mol_type = other DNA
atgaagtttttggttactggtgccgcaggttttatcggcttccatatcgcacagcgcctgctgaatgaagggcat

SEQ ID NO: 288429 - DNA, 75 bp, synthetic construct
  source 1..75: mol_type = other DNA
ggtggctatttaacctctgccagcgaactcgattgctgggacaacgtgccggagtacgccttcgatgtaacgccg

SEQ ID NO: 288430 - DNA, 75 bp, synthetic construct
  source 1..75: mol_type = other DNA
tccgattggtctggcggagtttactttgtcacgccgcgatccgggttatgtcggcagaagtaaagccactgccga

SEQ ID NO: 288431 - DNA, 75 bp, synthetic construct
  source 1..75: mol_type = other DNA
aaaaaaaccgcctttgcccgcaaactgcgtgagccgaaatatggcgctgtggcagacaaagttcctgccgatcaa

SEQ ID NO: 288432 - DNA, 75 bp, synthetic construct
  source 1..75: mol_type = other DNA
gtgggtaacgaacctatttggaaagtcgaacgtcagccagcctggctggtggcggcgataaaaaaaacgatcacc

SEQ ID NO: 288433 - DNA, 75 bp, synthetic construct
  source 1..75: mol_type = other DNA
caaaattttctgcgctccagaaaagagtgacgcccgcgagtgtgcagctccgggcgtcgtggcgttttgtgtctg

SEQ ID NO: 288434 - DNA, 75 bp, synthetic construct
  source 1..75: mol_type = other DNA
gcccttgccgaaagcggtattccggccaatgatcggctggtgactttcggcgaaccggacgaaagcggtggcgaa

SEQ ID NO: 288435 - DNA, 75 bp, synthetic construct
  source 1..75: mol_type = other DNA
agctacgaattcgaaggctttggtatcgttggtgcttatggcgccgctgaccgtaccaacctgcaggaagactct

SEQ ID NO: 288436 - DNA, 75 bp, synthetic construct
  source 1..75: mol_type = other DNA
tattgcttcttgcagtcattattctgtctgcatgtcaggcaaactatatccgggatgttcagggcgggaccgtat

SEQ ID NO: 288437 - DNA, 75 bp, synthetic construct
  source 1..75: mol_type = other DNA
gttgacgtcctgctgctggataaaaccggcaccatcacgctaggtaaccgtcaggcatcggagtttatccctgcg

SEQ ID NO: 288438 - DNA, 75 bp, synthetic construct
  source 1..75: mol_type = other DNA
gtggacgtcctgctgctggataaaaccggtaccatcaccctcggtaaccgtcaggcatcagagtttatccctgcg

SEQ ID NO: 288439 - DNA, 75 bp, synthetic construct
  source 1..75: mol_type = other DNA
atggcgaccataaaggatgtagcccgactggcaggcgtttcagtcgccaccgtttcccgtgtcattaataactct

SEQ ID NO: 288440 - DNA, 75 bp, synthetic construct
  source 1..75: mol_type = other DNA
taatgacgattgataactttattttggatgaggctatatcaatactttcttggaaagttgatgatgatttgaaag

SEQ ID NO: 288441 - DNA, 75 bp, synthetic construct
  source 1..75: mol_type = other DNA
tttgtgaaaatgccgatgttattaccaaagtcacactagcgccggaaatggtgccaacggaagtgatcagtaaac

SEQ ID NO: 288442 - DNA, 75 bp, synthetic construct
  source 1..75: mol_type = other DNA
tgtgcgaaaacgctgatgtgattactaaagttaccctggcaccggaaatggttcctgcggaagtgatcagcaaac

SEQ ID NO: 288443 - DNA, 75 bp, synthetic construct
  source 1..75: mol_type = other DNA
ggccgcgaaccgggtttggcgggcgcagttcttgatgaggcagacatttattgcggtattatcgccgatggcctg

SEQ ID NO: 288444 - DNA, 75 bp, synthetic construct
  source 1..75: mol_type = other DNA
gtgagttggtaaaacagctgcttaatgacacctgggatatcgactatccgggcgtggttgcggtgcatctgaccg

SEQ ID NO: 288445 - DNA, 75 bp, synthetic construct
  source 1..75: mol_type = other DNA
tttggcgatccggatatgcatccggcggatttcagtctgcttgcgccagcgtgtgaggaagagcagacggagatg

SEQ ID NO: 288446 - DNA, 75 bp, synthetic construct
  source 1..75: mol_type = other DNA
cactgaacggggccattctctcccccggttttatcgatgtgcagttaaacggctgcggcggcgtacagtttaacg

SEQ ID NO: 288447 - DNA, 75 bp, synthetic construct
  source 1..75: mol_type = other DNA
actgggtggataatgcgtccgattacgcctcacaggcagcacagcttgcgacggagggtatctcagggatggtga

SEQ ID NO: 288448 - DNA, 75 bp, synthetic construct
  source 1..75: mol_type = other DNA
ggggtgacgaaaacgctctccggtgcgctgaacggtgttgccggcaatattgataatgtggccgcggcagcaggt

SEQ ID NO: 288449 - DNA, 75 bp, synthetic construct
  source 1..75: mol_type = other DNA
cgggcggcgctgacagagcagaaccggctgattgatgaacaggccagccgggtgaaatccctgcaggaaaaaatc

SEQ ID NO: 288450 - DNA, 75 bp, synthetic construct
  source 1..75: mol_type = other DNA
tagcggaactgccgccagagatcgaacaacgttcactgaacggggccattctctcccccggttttatcgatgtgc

SEQ ID NO: 288451 - DNA, 75 bp, synthetic construct
  source 1..75: mol_type = other DNA
ttgccaatggcgatatcggttttaactttaccgatggcaatctgattaagaagatttttgtcgataagctcacac

SEQ ID NO: 288452 - DNA, 75 bp, synthetic construct
  source 1..75: mol_type = other DNA
gctaaaaattattcatcgggtttggaaacaaagatggcaaaacttaccttacaggagcagttgctcaaagcggga

SEQ ID NO: 288453 - DNA, 75 bp, synthetic construct
  source 1..75: mol_type = other DNA
ccggacgaggaagaaatgctgatgcagaaagcgacaggagttgccggaggcgtctgtagtggcacagtaaatttg

SEQ ID NO: 288454 - DNA, 75 bp, synthetic construct
  source 1..75: mol_type = other DNA
gatgctgcagctggaggcgctgctcgactgcaaaccagcgaagctctccggtggccagcgccagcgggtggcgat

SEQ ID NO: 288455 - DNA, 75 bp, synthetic construct
  source 1..75: mol_type = other DNA
aaagacgagtcgctaccgatcggcttctcgcctgccgatgtgcatctttttcatgctgagacccagcataattta

SEQ ID NO: 288456 - DNA, 75 bp, synthetic construct
  source 1..75: mol_type = other DNA
atgccggatgaggacgatatgctgatgcggaaagcggcaggactttctggtggtgtccgctttggggctgacggg

SEQ ID NO: 288457 - DNA, 75 bp, synthetic construct
  source 1..75: mol_type = other DNA
gttcaaaatattagtggataaaaatattattcgtatgaatgttgcgccacttaatttcatacgagataactattc

SEQ ID NO: 288458 - DNA, 75 bp, synthetic construct
  source 1..75: mol_type = other DNA
acagcattaagagataaccacttcttctctgattttgaggtggataatgaaaatcccacttattataaaataaca

SEQ ID NO: 288459 - DNA, 75 bp, synthetic construct
  source 1..75: mol_type = other DNA
gcgatgatcttccagaactatgccctgtttccgcatctgtcggtgcgcgacaacatcaccttcggcatgaaggtg

SEQ ID NO: 288460 - DNA, 75 bp, synthetic construct
  source 1..75: mol_type = other DNA
cctcgacagaacattgccccatggctacatcattgcacagcaggacaataatagtcaggctatgcagtggctgac

SEQ ID NO: 288461 - DNA, 75 bp, synthetic construct
  source 1..75: mol_type = other DNA
ttcgatgagcagatgagccgggtaaggcgtcatttttcaggtctggataccgacgtcagaaaaaccgccagtgct

SEQ ID NO: 288462 - DNA, 75 bp, synthetic construct
  source 1..75: mol_type = other DNA
gtactcagcctgtttttttgcgatccggatatgcatccctctgatttcagtctgcttgtcccccggcatgaggaa

SEQ ID NO: 288463 - DNA, 75 bp, synthetic construct
  source 1..75: mol_type = other DNA
gggatgacatccaccgaatatgccgactggcgacgtttttactgcacgcattattttcaggatacccaactggac

SEQ ID NO: 288464 - DNA, 75 bp, synthetic construct
  source 1..75: mol_type = other DNA
gacggtttttccatctggcatcaccttgacgctcacggcattcctttcaaaagcattacccccaagaacgacact

SEQ ID NO: 288465 - DNA, 75 bp, synthetic construct
  source 1..75: mol_type = other DNA
tacatcattgcacagcaggacaataatagtcaggctatgcagtggctgacccggttgcgggataactctcatcgc

SEQ ID NO: 288466 - DNA, 75 bp, synthetic construct
  source 1..75: mol_type = other DNA
aagtggttcgtggcccgatgtcctcgttatatggttctgatgcgctcggcggggtggtcaacattatcaccaaaa

SEQ ID NO: 288467 - DNA, 75 bp, synthetic construct
  source 1..75: mol_type = other DNA
cggcgcagcctggcagttgaccaaagacgtcaaactgcgtgcgggcgtgctgaacctgactgataaagatctcag

SEQ ID NO: 288468 - DNA, 75 bp, synthetic construct
  source 1..75: mol_type = other DNA
tataacgatggtcgtgatgtcagcaatggcgaaaacaaaccactttccgacctgccgttccataccgctaacggt

SEQ ID NO: 288469 - DNA, 75 bp, synthetic construct
  source 1..75: mol_type = other DNA
tgggtgcagcagctgcaagccagaaagttgccgcagagctgattcttaagtcacctgcaaacccggcgatcggcg

SEQ ID NO: 288470 - DNA, 75 bp, synthetic construct
  source 1..75: mol_type = other DNA
aaaaagaaattcgcgcatttgcagaaaaagcccagcgagcaacgtttatctgcgccagctttgatgaaacgctgg

SEQ ID NO: 288471 - DNA, 75 bp, synthetic construct
  source 1..75: mol_type = other DNA
caacgttaacaaagcacgtattcagggcgtggaaaccgaactgaaaattccgttcaacgatgaatggaaactgtc

SEQ ID NO: 288472 - DNA, 75 bp, synthetic construct
  source 1..75: mol_type = other DNA
tctgatgggacgccatgccactattcgggtaatgggatttttggtattcccattgattgcctatttcttatttct

SEQ ID NO: 288473 - DNA, 75 bp, synthetic construct
  source 1..75: mol_type = other DNA
ggttgtcaatttccgggattattgtcgcggtagttgccatgtctaaatcatttttaggcacctactttggcgtta

SEQ ID NO: 288474 - DNA, 75 bp, synthetic construct
  source 1..75: mol_type = other DNA
agttaccggcccactgtcgtctaatcatggagaaattgtccatcagtggtgtctcgatgggcaggggattgctct

SEQ ID NO: 288475 - DNA, 75 bp, synthetic construct
  source 1..75: mol_type = other DNA
cgatgaatggaaactgtcgatcaactacacctacaacgatggtcgtgatgtcagcaacggcgaaaacaaaccgct

SEQ ID NO: 288476 - DNA, 75 bp, synthetic construct
  source 1..75: mol_type = other DNA
cgctggcgctggaagactggtcattctatgtttctggtcactataccgggcagaaacgagccgacagcgcgacgg

SEQ ID NO: 288477 - DNA, 75 bp, synthetic construct
  source 1..75: mol_type = other DNA
ctcttccttcctattcaattaggttcagcaggagcggtggtcctgtttattactgcactggtcgcctggccttta

SEQ ID NO: 288478 - DNA, 75 bp, synthetic construct
  source 1..75: mol_type = other DNA
gctttcaatcagtcaggtaaatcctttggttctgaatccgttgaagctgctgcgcgtttcctttacctaaaccgg

SEQ ID NO: 288479 - DNA, 75 bp, synthetic construct
  source 1..75: mol_type = other DNA
cgttttattaggaattcattcaaacggtgcaagccgacgcatcagagagtacaggaacggagaaaaacacattcc

SEQ ID NO: 288480 - DNA, 75 bp, synthetic construct
  source 1..75: mol_type = other DNA
ctcgatgcacgttattttatgacgattgaacagggctggattgcgcccccctgcgagctggttaatgcctggttt

SEQ ID NO: 288481 - DNA, 75 bp, synthetic construct
  source 1..75: mol_type = other DNA
ctccgccatgcgtttgtgcaacagctcgaccgtgctcaagtgccagaggatcgtattgccttactcgtcggccat

SEQ ID NO: 288482 - DNA, 75 bp, synthetic construct
  source 1..75: mol_type = other DNA
tgttcttcatcaacgcagcctgcgtctgacatctacgaagacgaaggcattttaatgatcaccccagcagcaacc

SEQ ID NO: 288483 - DNA, 75 bp, synthetic construct
  source 1..75: mol_type = other DNA
tcatcaacgcagccagcgtcagacatctatgaagatgaaggcattttaatgatcaccccagcggcaaccgcacca

SEQ ID NO: 288484 - DNA, 75 bp, synthetic construct
  source 1..75: mol_type = other DNA
ttacgggatctggcgtaagtttcttgtaattactggtcgagtaccgcaagaaatctatccggtgttaggcgtgtt

SEQ ID NO: 288485 - DNA, 75 bp, synthetic construct
  source 1..75: mol_type = other DNA
aaccgtgaattttatatccggtttgcggcagagtttggttatgaaatagatatccagccatcaccggaatcacaa

SEQ ID NO: 288486 - DNA, 75 bp, synthetic construct
  source 1..75: mol_type = other DNA
tcggtgcggcagctgcaagcccgaaaacggcggcagagctgattcttaaatggcctttaccggcgacttctgagg

SEQ ID NO: 288487 - DNA, 75 bp, synthetic construct
  source 1..75: mol_type = other DNA
gaaacgcttgatttggttcggggcgggagtgacgttgtttactgtgatccgccttatctgactgatgccgacaat

SEQ ID NO: 288488 - DNA, 75 bp, synthetic construct
  source 1..75: mol_type = other DNA
gcaaaaggttgctgctacgataatgcctgcgtggaaagcttctttcattcgctgaaagtggaatgtatccatgga

SEQ ID NO: 288489 - DNA, 75 bp, synthetic construct
  source 1..75: mol_type = other DNA
tggctggtaaccagcttggtaagtcatttactggtgctgctgaagtcgcgtttcaccttacagggcgttatccgg

SEQ ID NO: 288490 - DNA, 75 bp, synthetic construct
  source 1..75: mol_type = other DNA
gatggtcgcttcaaagtattcaacacctgtgagccattctttgaggagttccgcctctatcaccgtgatgaaaac

SEQ ID NO: 288491 - DNA, 75 bp, synthetic construct
  source 1..75: mol_type = other DNA
atgaacaagattgactatcaggcactgcgtgccaaggcagaaaaagcaacgtgtggtgagtggtcgctcgaatat

SEQ ID NO: 288492 - DNA, 75 bp, synthetic construct
  source 1..75: mol_type = other DNA
ggttgaacctctggtggcggatgacggcgaggtgttctaccgcatcacgccggaccggaactgtgggatcactga

SEQ ID NO: 288493 - DNA, 75 bp, synthetic construct
  source 1..75: mol_type = other DNA
acggccattctgagcaacggggcaaaatacaaccccacgacgttttcaccggtggatgcgcagacggtggaacaa

SEQ ID NO: 288494 - DNA, 75 bp, synthetic construct
  source 1..75: mol_type = other DNA
caggagggcgcgtctgacggtaataaggccataagcgaaacagagcgtgatgcggtgaaggcgatgttcaggggg

SEQ ID NO: 288495 - DNA, 75 bp, synthetic construct
  source 1..75: mol_type = other DNA
ttataatcaatattgcgatctatcttgaagaagttgataaggaacgtttaatcgctgctgggtttcaggttaaat

SEQ ID NO: 288496 - DNA, 75 bp, synthetic construct
  source 1..75: mol_type = other DNA
aaagtctggattgaggacatcgtcggagaccttgacgacctgaaagatgaaccgctgacagaggctgaagtggtt

SEQ ID NO: 288497 - DNA, 75 bp, synthetic construct
  source 1..75: mol_type = other DNA
atgacggaacgggaactgtccattattcgtgcactgggcgaagaattctccacagtgctggcggatttacagcgc

SEQ ID NO: 288498 - DNA, 75 bp, synthetic construct
  source 1..75: mol_type = other DNA
gatcgctttaactgcctatttcatcctttgatcggtatttctcctatctatgcatgtggactcgcagcaatgcag

SEQ ID NO: 288499 - DNA, 75 bp, synthetic construct
  source 1..75: mol_type = other DNA
caaaatgcggcttcgcctgatgcagactgatgtacagggaatacgccgggaaaagcggcagggagatactgcccg

SEQ ID NO: 288500 - DNA, 75 bp, synthetic construct
  source 1..75: mol_type = other DNA
ttgccgtcaatatcttgctcgatctctataaaacgtctgaacgtattgtttactggctgacattgccatggcgca

SEQ ID NO: 288501 - DNA, 75 bp, synthetic construct
  source 1..75: mol_type = other DNA
gcatgacgggtgaacggttgttctctgtggtggtccggcagagcagtggccagcgtacggaaaaaacattttccc

SEQ ID NO: 288502 - DNA, 75 bp, synthetic construct
  source 1..75: mol_type = other DNA
tgtggctgaacgccaaactgcgtcacggcaatacggtggtgctgaaaatccgtaactcccgggggcagatcaaag

SEQ ID NO: 288503 - DNA, 75 bp, synthetic construct
  source 1..75: mol_type = other DNA
ggatgatgtgcgtccgatgcttgaacagatggtgaaggaggctgtaagccatatccctgttccgcgcgacggtcg

SEQ ID NO: 288504 - DNA, 75 bp, synthetic construct
  source 1..75: mol_type = other DNA
acgcagatcggcggggaaaccatccgtgaaaaagcgcggatacagaaacccggagcctgtcacatcttccgccac

SEQ ID NO: 288505 - DNA, 75 bp, synthetic construct
  source 1..75: mol_type = other DNA
atcgcaggaacaaccaccgtttgatttaaatcacatgggtactggcagtgataagtcggatgcgctcggcgtgcc

SEQ ID NO: 288506 - DNA, 75 bp, synthetic construct
  source 1..75: mol_type = other DNA
cagctgcgcttattctcttttccgcgcagggcgttgcggaacaaacccagcaaccgctcgttacttcctgtggcg

SEQ ID NO: 288507 - DNA, 75 bp, synthetic construct
  source 1..75: mol_type = other DNA
cagtttcatcacagctgcctgacggcgcatctgacggtaataaggcaatcagtgaaacagagcatgatgcggtga

SEQ ID NO: 288508 - DNA, 75 bp, synthetic construct
  source 1..75: mol_type = other DNA
caataaacacaatatggcgctcgtgactattgaagatctggtggcataccgtcaggcacatgagcgtaaagccag

SEQ ID NO: 288509 - DNA, 75 bp, synthetic construct
  source 1..75: mol_type = other DNA
tgttcgtttcgtcccgattaatggctttcacaccgggccgggcaaagtgtctcttgagcatgacgaaatccttgt

SEQ ID NO: 288510 - DNA, 75 bp, synthetic construct
  source 1..75: mol_type = other DNA
tggtgttgccgcgccaacgccgattcgctgccaacatgccgaacagactgcacaaaatgcgccattaaacctgca

SEQ ID NO: 288511 - DNA, 75 bp, synthetic construct
  source 1..75: mol_type = other DNA
tcttggtcgccagaacgaacacacgacgcagcgccagcacatgctcgcctggctggaaagcctggaagccgcagg

SEQ ID NO: 288512 - DNA, 75 bp, synthetic construct
  source 1..75: mol_type = other DNA
gacgtaccacggcaaggggctgaaccggggaacgctgacgcagatcggcggggaaaccatccgggagaaagcccg

SEQ ID NO: 288513 - DNA, 75 bp, synthetic construct
  source 1..75: mol_type = other DNA
gcatccgcgccgggagcgtaaccatgcggagatggagcgggcgctggtcagcaggaagcgcagccggagacgctg

SEQ ID NO: 288514 - DNA, 75 bp, synthetic construct
  source 1..75: mol_type = other DNA
cagatggtgaaggaggctgtaagccatatccctgttccgcgtgatggtcgtgactacgatccggaagtactgcag

SEQ ID NO: 288515 - DNA, 75 bp, synthetic construct
  source 1..75: mol_type = other DNA
ggcatgtggcactggagtgggtaacgcgctatctgcgcagcgtgcggcctcacctgacgcaacgcgccgacagcg

SEQ ID NO: 288516 - DNA, 75 bp, synthetic construct
  source 1..75: mol_type = other DNA
cgacgcggtggcggcagagccgcagacgcggcgtgagcgtaaccacgcggagatggagcgtgcgctggtcagcag

SEQ ID NO: 288517 - DNA, 75 bp, synthetic construct
  source 1..75: mol_type = other DNA
cgctgagttggtggggagtcgtccagataacgtaaaaatatcaatagagcgcctggctaaatctggagttattca

SEQ ID NO: 288518 - DNA, 75 bp, synthetic construct
  source 1..75: mol_type = other DNA
cgctggctaaaaatggtgttatccggcatcctcaaattgaggattgtggaagaatcaatgggttaggcttaaatc

SEQ ID NO: 288519 - DNA, 75 bp, synthetic construct
  source 1..75: mol_type = other DNA
agcgcgataaagccacatccatcatcgctgatatgcagaagcggcaacgtgatgtagcagaacgtaactcatgtt

SEQ ID NO: 288520 - DNA, 75 bp, synthetic construct
  source 1..75: mol_type = other DNA
tggcaggctctgatttgtatgtgttcaggccggtggcgcatacggtggattttcatatccgcgtgacgccggaca

SEQ ID NO: 288521 - DNA, 75 bp, synthetic construct
  source 1..75: mol_type = other DNA
cgggatggtgtgccggaagggcgcatgtatctgtccaggatcagcgaggctatcagtttatctgcaggcgaggtg

SEQ ID NO: 288522 - DNA, 75 bp, synthetic construct
  source 1..75: mol_type = other DNA
ctgcctgtcgtgggctgttaatcattaccgtgataacgccatcgcctacaaagaacagcgtgataaaaaagtcag

SEQ ID NO: 288523 - DNA, 75 bp, synthetic construct
  source 1..75: mol_type = other DNA
gctgattttctggctgccttacagccagccgctgtttgctgccttgttcccacaactgccacgacccgtttatca

SEQ ID NO: 288524 - DNA, 75 bp, synthetic construct
  source 1..75: mol_type = other DNA
atcatcatcgggcttagcggatttaataccgcgtatgtgatccaggggggcgttactggtggcactggcggcgat

SEQ ID NO: 288525 - DNA, 75 bp, synthetic construct
  source 1..75: mol_type = other DNA
tgcgtaaggtcgagctaccgctggcagctccggtgattctggcgggcgtgcgaacttcggtgattatcaacattg

SEQ ID NO: 288526 - DNA, 75 bp, synthetic construct
  source 1..75: mol_type = other DNA
ctggaccaaaggtgcgatggtcgcggtgcccgctaatgggcaagcgccataccttgataatggctttaagacgaa

SEQ ID NO: 288527 - DNA, 75 bp, synthetic construct
  source 1..75: mol_type = other DNA
gctgtgctggcgattgctgttccggtgatggggtttggtcagcaaccggcgattattgctttgatcctttacggc

SEQ ID NO: 288528 - DNA, 75 bp, synthetic construct
  source 1..75: mol_type = other DNA
cgttggacagacttttccgcccgtcgcggtgctggcgattgccgttccggtgattgggtttggtctgcaacccgc

SEQ ID NO: 288529 - DNA, 75 bp, synthetic construct
  source 1..75: mol_type = other DNA
cagtgaaaccattcaggtggtcaatagccttggtggggacgagcatctactgagcagcgccaaactggccttttc

SEQ ID NO: 288530 - DNA, 75 bp, synthetic construct
  source 1..75: mol_type = other DNA
atgccaaccgttattacgcacgccgccgttcccctatgcattggtttagggttgggttcgataatcatcccgccg

SEQ ID NO: 288531 - DNA, 75 bp, synthetic construct
  source 1..75: mol_type = other DNA
agcttgctggattcggtaaccactggcggtaagggggttggctggctgtggccgtggtcagatgaacgctttttc

SEQ ID NO: 288532 - DNA, 75 bp, synthetic construct
  source 1..75: mol_type = other DNA
atgccaaccgttattactcacgccgccgttcccctttgtattggtttaggcttgggttcaaaaatcatcccaccg

SEQ ID NO: 288533 - DNA, 75 bp, synthetic construct
  source 1..75: mol_type = other DNA
gtgcgtcaggtgccgcaggggatgctgcgtattatcagcagctttggttttggacgacaggtggtggctccggcg

SEQ ID NO: 288534 - DNA, 75 bp, synthetic construct
  source 1..75: mol_type = other DNA
aatattgccagtgggcatctggtacaggttttacctgaatattatcagccagcaaatgtctgggctgtttatgtc

SEQ ID NO: 288535 - DNA, 75 bp, synthetic construct
  source 1..75: mol_type = other DNA
ttgccgccgtggcagaagaattgggcgtttcaccggcgttcgtcagcaagcgcatcgccttgctggagcaaacgc

SEQ ID NO: 288536 - DNA, 75 bp, synthetic construct
  source 1..75: mol_type = other DNA
ggatgatcaaccaactgcaaaacagcctgacggtaacggagaacggcaaagacgctggcgttttgagcctgactt

SEQ ID NO: 288537 - DNA, 75 bp, synthetic construct
  source 1..75: mol_type = other DNA
ttggcctgatgctctctatcgtgggtgtgctgctgcgctcgttgtttaatcgtggcatcgaaagcccgcaggtgc

SEQ ID NO: 288538 - DNA, 75 bp, synthetic construct
  source 1..75: mol_type = other DNA
gcggtcaggtaccgccaaatccttctgaactgttgatgagcgaacgctttgccgaactggtgaactgggcgagta

SEQ ID NO: 288539 - DNA, 75 bp, synthetic construct
  source 1..75: mol_type = other DNA
atgccaaccgttattacgcacgccgccgttcccctttgcattggtttggggttgggttcgaaaatcatccccccg

SEQ ID NO: 288540 - DNA, 75 bp, synthetic construct
  source 1..75: mol_type = other DNA
tggcgatgctgcccgacgccgacgtattgtcgtttaaatttggcgttgcttacggcaatgtttttggtcatcgcg

SEQ ID NO: 288541 - DNA, 75 bp, synthetic construct
  source 1..75: mol_type = other DNA
aggtctatatgcaactgctgaataaagagcaggagctgaaaatcaccgaagccagtaccgtcggcgatgtgcgca

SEQ ID NO: 288542 - DNA, 75 bp, synthetic construct
  source 1..75: mol_type = other DNA
tggcactggtgccggaattgctgtcactcgcccgtggggcgcggaatttcgcccactggtggaaactattgccgc

SEQ ID NO: 288543 - DNA, 75 bp, synthetic construct
  source 1..75: mol_type = other DNA
gtagacggttggcaacttatcaattattcactgctgctggaaaccgccattcgacgtctggggttggagatgatg

SEQ ID NO: 288544 - DNA, 75 bp, synthetic construct
  source 1..75: mol_type = other DNA
agctttgataaaatcggttcaactgctggaaatgtaccaaaatgctatcaccgaggaggtaatgactccaactta

SEQ ID NO: 288545 - DNA, 75 bp, synthetic construct
  source 1..75: mol_type = other DNA
ccgcaggtgctgtctgcattgctgacgacggtactgggagctggtgcaatgtttactctctacacctatatctct

SEQ ID NO: 288546 - DNA, 75 bp, synthetic construct
  source 1..75: mol_type = other DNA
ctgctgtctacgccgatttacaaagcggatgccttgattcagatagaacaaaaaagttccggtggtattagttca

SEQ ID NO: 288547 - DNA, 75 bp, synthetic construct
  source 1..75: mol_type = other DNA
aaatatgctgaatgtgtatgacattccgtggggagcagatggagcgtaccggcatgatttagtcgattgggaaaa

SEQ ID NO: 288548 - DNA, 75 bp, synthetic construct
  source 1..75: mol_type = other DNA
tcaatccgcaaagtccttcgtatcgatttcgatcggtacgaccgtccacaaaacatgctgaacgtatatgacgta

SEQ ID NO: 288549 - DNA, 75 bp, synthetic construct
  source 1..75: mol_type = other DNA
cgtgacgcgtgacgactggacaaactccgatgtatacggaacgccatacctgattgattgtgcatgggaacgcac

SEQ ID NO: 288550 - DNA, 75 bp, synthetic construct
  source 1..75: mol_type = other DNA
ggtggctggggccaacgttattaccgggatcgttgaatgggatatgagcatgtttaacgacacgccggattataa

SEQ ID NO: 288551 - DNA, 75 bp, synthetic construct
  source 1..75: mol_type = other DNA
gaaatggggcagatcctgcgtcaggcacgcgcggcagggctgaaaactcagtttatggggccggaaggtgtggct

SEQ ID NO: 288552 - DNA, 75 bp, synthetic construct
  source 1..75: mol_type = other DNA
ggcatttcctgacgctgattggtgccgatatgcgggcaaaatacgtcagttttcgttgcgtcgatggttactaca

SEQ ID NO: 288553 - DNA, 75 bp, synthetic construct
  source 1..75: mol_type = other DNA
cagaggacattaccactccattcccttttaatgccttctatggagaagaagagatcccagtaattgatggccagg

SEQ ID NO: 288554 - DNA, 75 bp, synthetic construct
  source 1..75: mol_type = other DNA
tctgcgcattatcagttgggacgacattgtcagtaataaagcggcgtggaacgttttcttctggctggcctcgct

SEQ ID NO: 288555 - DNA, 75 bp, synthetic construct
  source 1..75: mol_type = other DNA
cggcggtagctggcgtcatctggcacttggcgtggctggctggatgcgttatacccagggtgtggatgagcaagg

SEQ ID NO: 288556 - DNA, 75 bp, synthetic construct
  source 1..75: mol_type = other DNA
cgcgttggcgaggccagcggaattttgattggaaactttgcaaaggttgttggtattggtccaaacaaactgttt

SEQ ID NO: 288557 - DNA, 75 bp, synthetic construct
  source 1..75: mol_type = other DNA
tccggcattcgcgatgccattaacaacgccaaagctggtgtcagcgccagtatcatccatgtgggtaacggcgag

SEQ ID NO: 288558 - DNA, 75 bp, synthetic construct
  source 1..75: mol_type = other DNA
ataatcaatgatttaggtgttattaccgggaagcgtgatttctacgtcttcgagggcgaacaaggaaagcgagac

SEQ ID NO: 288559 - DNA, 75 bp, synthetic construct
  source 1..75: mol_type = other DNA
ctggctcatttctggctggtgggaatttcgagtttgtttgcggtgatcattggcactggtgccggaattgctgtc

SEQ ID NO: 288560 - DNA, 75 bp, synthetic construct
  source 1..75: mol_type = other DNA
cacaactgccacgacccgtttatcagcaagaaagttttgcagctctggcactggctcatttctggctggtgggaa

SEQ ID NO: 288561 - DNA, 75 bp, synthetic construct
  source 1..75: mol_type = other DNA
gcctggtggtccaggcaaaaagcgagcgaattccagatatcagcagccaactgaacgcctttcccggctgtgaag

SEQ ID NO: 288562 - DNA, 75 bp, synthetic construct
  source 1..75: mol_type = other DNA
tccgcagacggcgattgtttctctgaccgtaacagaaaaaggttactgcgctgatgcggcaagtggtcaactgga

SEQ ID NO: 288563 - DNA, 75 bp, synthetic construct
  source 1..75: mol_type = other DNA
aacaagcgccaacgctgtcgatgccggaagggactgacctgaacgcctatgcgacgctgctgatcgagcgtttca

SEQ ID NO: 288564 - DNA, 75 bp, synthetic construct
  source 1..75: mol_type = other DNA
agaatgcagactttgttggcgcggtgacgactgcgtatcagcaactgtgtgagcgcggtgcccgcgcgagtgttg

SEQ ID NO: 288565 - DNA, 75 bp, synthetic construct
  source 1..75: mol_type = other DNA
ctaaagttgagtttgccgatcgagttggcgaggccagcggaattttgattggaaactttgcaaaggttgttggta

SEQ ID NO: 288566 - DNA, 75 bp, synthetic construct
  source 1..75: mol_type = other DNA
aggcgaacaaggtaagcgagacagcattattgtcgttgcccagttgtcgccggaattcaccgctcgtcttgttga

SEQ ID NO: 288567 - DNA, 75 bp, synthetic construct
  source 1..75: mol_type = other DNA
cgcactatgacctggtgctgattgacaccccaccaattctggcggtgaccgacgcggcgattgttggccgtcatg

SEQ ID NO: 288568 - DNA, 75 bp, synthetic construct
  source 1..75: mol_type = other DNA
gaaaaaatattaggcgcaccagagtggaaagactacaaccccaaatactctggagccacatataagtattcttaa

SEQ ID NO: 288569 - DNA, 75 bp, synthetic construct
  source 1..75: mol_type = other DNA
ggatgtggattgcggcctggactgatgaacaggatgtatggcatcagccgtcactggttgcctttgaggtcacac

SEQ ID NO: 288570 - DNA, 75 bp, synthetic construct
  source 1..75: mol_type = other DNA
cactacatctgactggatgcagcaatattatactgccggagaaactcccggagagcgtgatatctgtaaccatgc

SEQ ID NO: 288571 - DNA, 75 bp, synthetic construct
  source 1..75: mol_type = other DNA
aactctttggtggctttatggggcaggaagatgacattcgacagataaaatcgccatttatgttcacacttactg

SEQ ID NO: 288572 - DNA, 75 bp, synthetic construct
  source 1..75: mol_type = other DNA
caatccattgaatttatggaaccccgccgctggaacgcttcagacatgattaagtgggcttcagaattcttcagt

SEQ ID NO: 288573 - DNA, 75 bp, synthetic construct
  source 1..75: mol_type = other DNA
cggcgatttggtcagcactcctggcaatttccgcaaggcggaattaaccccggagaatccgcagagcaggcgatg

SEQ ID NO: 288574 - DNA, 75 bp, synthetic construct
  source 1..75: mol_type = other DNA
ggttttccggtgaacgccctgaccggtcatccctatcaggggatgaatgtactgctgttatggttgtcggcggca

SEQ ID NO: 288575 - DNA, 75 bp, synthetic construct
  source 1..75: mol_type = other DNA
tcttcatcagtcaatattggtgcctttaatcttggaaatgcgctgggagcagctgctggtggtgcggtaatttcc

SEQ ID NO: 288576 - DNA, 75 bp, synthetic construct
  source 1..75: mol_type = other DNA
aactggcagatcgttcagttaacggcacgttgaaaggctttttgttgttgctgatggtgattatgctggcaatcc

SEQ ID NO: 288577 - DNA, 75 bp, synthetic construct
  source 1..75: mol_type = other DNA
taatggtcgcccggattgggataaagtgggcgcacagttcgttgcagacgttgtgccgttcgaaatgatgaagct

SEQ ID NO: 288578 - DNA, 75 bp, synthetic construct
  source 1..75: mol_type = other DNA
agaacgccgactttgttggcgcggtgacggcggcatatcagcagctgtgtgagcgcggtgcgcgcgagtgtgtgg

SEQ ID NO: 288579 - DNA, 75 bp, synthetic construct
  source 1..75: mol_type = other DNA
tctcaataacccgctgatcaagcacgatctcgaaaacccgactgcgccgaagtccgcgattggttacatcgtaga

SEQ ID NO: 288580 - DNA, 75 bp, synthetic construct
  source 1..75: mol_type = other DNA
cttttggtttctatcatatagaaaataacattgaaacaatagaccgccatttttatttagataatgaaaacatat

SEQ ID NO: 288581 - DNA, 75 bp, synthetic construct
  source 1..75: mol_type = other DNA
tgtgatgccgcaactggggctgttctacattctgctggcttacttcgtcattgtgggtactggcaacgcggtaaa

SEQ ID NO: 288582 - DNA, 75 bp, synthetic construct
  source 1..75: mol_type = other DNA
aaagggttgatcgctcgttggaagtatttctggatgtcggtcattgcgctgggtgtcgccttcgcgctgtacctt

SEQ ID NO: 288583 - DNA, 75 bp, synthetic construct
  source 1..75: mol_type = other DNA
gcattattggttttgttgatgactatcgcaaagtcgtgcgcaaagacaccaaaggtttgatcgcgcgctggaagt

SEQ ID NO: 288584 - DNA, 75 bp, synthetic construct
  source 1..75: mol_type = other DNA
caaaacatttgcgacactttataaatacattgaacgtataccttttacaccggacgtaaaaaaaagaattcttga

SEQ ID NO: 288585 - DNA, 75 bp, synthetic construct
  source 1..75: mol_type = other DNA
cccgtccaatccgtacgtctggtgcgtactggtggtgctggtaggttacggtgttattggctttgttgatgatta

SEQ ID NO: 288586 - DNA, 75 bp, synthetic construct
  source 1..75: mol_type = other DNA
gcgttgggcattatcgctgtgctgctgcgtcaggaattcctgctggtgattatggggggcgtgtttgttgtcgaa

SEQ ID NO: 288587 - DNA, 75 bp, synthetic construct
  source 1..75: mol_type = other DNA
gcccgtgaactcagcctgtatgaatcacagctctacaactggcgcagtaaacagcaaaatcagcagacgtcttct

SEQ ID NO: 288588 - DNA, 75 bp, synthetic construct
  source 1..75: mol_type = other DNA
agtttgtttgtaccgatattgaaaaactgcgttccgtaaagcaacttttctatccgatgatcgtcaacctgatga

SEQ ID NO: 288589 - DNA, 75 bp, synthetic construct
  source 1..75: mol_type = other DNA
ttaaccccctcgactttacctggaacgatgcagaagatttggcacaaaacatctctactgcacagatagtattca

SEQ ID NO: 288590 - DNA, 75 bp, synthetic construct
  source 1..75: mol_type = other DNA
ctttcctttggtcaggtggtgcgtaacgacggtcctgaatcacacttcagcaagcgcggtacgccgaccatgggc

SEQ ID NO: 288591 - DNA, 75 bp, synthetic construct
  source 1..75: mol_type = other DNA
gttatgtgctgcggctgcatcaatcgccgggccgcagatccgtaatgtcgccacctacggcggaaatatttgcaa

SEQ ID NO: 288592 - DNA, 75 bp, synthetic construct
  source 1..75: mol_type = other DNA
cgttttcttcgacggcattaccgctggcgagaaagatttctccgcgctgatcgcccgcctgaaaaaagaaaacat

SEQ ID NO: 288593 - DNA, 75 bp, synthetic construct
  source 1..75: mol_type = other DNA
aaatcgcatactcacagtgccagtgcgtcaaatacggatttgggaacgaaaacaaccagttcgtttgattacggc

SEQ ID NO: 288594 - DNA, 75 bp, synthetic construct
  source 1..75: mol_type = other DNA
tttcgaaagcaaatttcgtcgcgtaatggaagagagcacccgtaggttcagccttgaggtggaaagcgtggtcca

SEQ ID NO: 288595 - DNA, 75 bp, synthetic construct
  source 1..75: mol_type = other DNA
actggcggattaccggggaagctggagccttattcgtctgctggaacaggcgcaggtgacaccggtggacagcag

SEQ ID NO: 288596 - DNA, 75 bp, synthetic construct
  source 1..75: mol_type = other DNA
tgcggtgaaacgtaccaggaccggaaaatcatcacggttgaagatcccatcgagtatcgcctgggaagtcgagac

SEQ ID NO: 288597 - DNA, 75 bp, synthetic construct
  source 1..75: mol_type = other DNA
aggaaggtttgatcgacgaagcggaagtcatcgaggtcgcaggatatatggactatctggcgttaaaagagggca

SEQ ID NO: 288598 - DNA, 75 bp, synthetic construct
  source 1..75: mol_type = other DNA
ggaacagtgcaggtatggtcattcccaatatcgtaatgaaagaacttaacttacagccggggcagagcgtggagg

SEQ ID NO: 288599 - DNA, 75 bp, synthetic construct
  source 1..75: mol_type = other DNA
agaaagaggctcgtattgaatatggcaaggtcataaccctgaacattgagctagctgagtatttatgtgccctat

SEQ ID NO: 288600 - DNA, 75 bp, synthetic construct
  source 1..75: mol_type = other DNA
ggcagataacctgcgctatgcaggtgtaccggaaggcgtgcggcagggcgtgctgccgtcactgctgaccttctg

SEQ ID NO: 288601 - DNA, 75 bp, synthetic construct
  source 1..75: mol_type = other DNA
actggagcgcctgcaataccgtatccgtgagggtgcgccgtggtatcagcgttttggccttgaacgtaaccagca

SEQ ID NO: 288602 - DNA, 75 bp, synthetic construct
  source 1..75: mol_type = other DNA
agtcgtggcggcaggtgctgacgcctgcggcggacagcctgaaccgccagtggcagcgggcgattgtcagccact

SEQ ID NO: 288603 - DNA, 75 bp, synthetic construct
  source 1..75: mol_type = other DNA
ttccgtggctacgcgccgcgctgataaccagcatctgcatgctggcgatatggggggccggaatgacgacctcgt

SEQ ID NO: 288604 - DNA, 75 bp, synthetic construct
  source 1..75: mol_type = other DNA
ctgtaccccggaacaactggctgcaatgctggaagcacaaaccctgccgctgacggaacagggcatgtcgcagct

SEQ ID NO: 288605 - DNA, 75 bp, synthetic construct
  source 1..75: mol_type = other DNA
atatcagtaagctacctcaggatcgggaatctctgtgttacttcaatttacgtgaaataccgccaaagagtgata

SEQ ID NO: 288606 - DNA, 75 bp, synthetic construct
  source 1..75: mol_type = other DNA
atgtatggcgcagcactgtaagtaaagccaactaccgcttttttatggtgcgcatttcaggaaatccgggaagcc

SEQ ID NO: 288607 - DNA, 75 bp, synthetic construct
  source 1..75: mol_type = other DNA
gattacgtcgatgacaaaatcgcagaacatgagcagtcccgccgccatcctgacgccacgctgacagaaaaaggt

SEQ ID NO: 288608 - DNA, 75 bp, synthetic construct
  source 1..75: mol_type = other DNA
gggctgaaagcatttacggtgatgtcctgcgacaacgtgcgtgaaaacggtcatgtggcgaaggttgccgttctt

SEQ ID NO: 288609 - DNA, 75 bp, synthetic construct
  source 1..75: mol_type = other DNA
gtctttcaggcgaactgtccggcaatgctgctacagcaacaaagctgaaaacggcaaggacaattaacggcgtaa

SEQ ID NO: 288610 - DNA, 75 bp, synthetic construct
  source 1..75: mol_type = other DNA
ccgtgggtgacggtaatggcaaattgccggtgccggatgccggtcagacgaagctggtgcatgaggtctggcgtc

SEQ ID NO: 288611 - DNA, 75 bp, synthetic construct
  source 1..75: mol_type = other DNA
aagtcaggcgaaacattggtactgaagccggggcagggtatttgtctgccgccacgtctgtatcatcgcttctgg

SEQ ID NO: 288612 - DNA, 75 bp, synthetic construct
  source 1..75: mol_type = other DNA
tctttagtgggtttgctgatgatccagacgttataaatgcatttaacctttttcctcctgcagttgttcttgccc

SEQ ID NO: 288613 - DNA, 75 bp, synthetic construct
  source 1..75: mol_type = other DNA
gaacaactggaagagaacctcggctacaaactgcccgtcgaatttgttccggtccgttttacttcgtggatgggc

SEQ ID NO: 288614 - DNA, 75 bp, synthetic construct
  source 1..75: mol_type = other DNA
gtcaacaaaaaggggccagtgctgacgaccttgagcaactggaacagggaatgaaaaactatgcccgttgcatct

SEQ ID NO: 288615 - DNA, 75 bp, synthetic construct
  source 1..75: mol_type = other DNA
gggctgaaagcgtttacggtgatgtcctgcgacaacgtgcgtgaaaacggtcatgtggcgaaggtcgcggttctg

SEQ ID NO: 288616 - DNA, 75 bp, synthetic construct
  source 1..75: mol_type = other DNA
aattatcggttcgatgaaagaagccctgcatccggaaatcgacggttgtgaaggtattctcaacgcgatggcgcg

SEQ ID NO: 288617 - DNA, 75 bp, synthetic construct
  source 1..75: mol_type = other DNA
caagagagcatcatttctacgttgcgatagccaagttccttttccaccatccggagcatggcattgtgtcggtgc

SEQ ID NO: 288618 - DNA, 75 bp, synthetic construct
  source 1..75: mol_type = other DNA
tcgccgccattgctgcggcatctggctgccatcgggaacaatctgaaccagacagcccggaaggtgaacagcggc

SEQ ID NO: 288619 - DNA, 75 bp, synthetic construct
  source 1..75: mol_type = other DNA
ggccgcactgatggccatcggggatgagctgcgccggttgcgtctggccgtcagggaacagggggcgcgggatga

SEQ ID NO: 288620 - DNA, 75 bp, synthetic construct
  source 1..75: mol_type = other DNA
gccattcctgatcgtgtagtcgagcaactgttggctatgcgtcagcaacgaaaaaacatcttcatgccatcatag

SEQ ID NO: 288621 - DNA, 75 bp, synthetic construct
  source 1..75: mol_type = other DNA
cgcctgggcgctgctgggtaagagtgatgccccccccaataaaggccgttaccggacgtggacaggccacagtgc

SEQ ID NO: 288622 - DNA, 75 bp, synthetic construct
  source 1..75: mol_type = other DNA
cctacactggcaccgccgctgttgcgccagttcgcttcggtcggcaataacctgaatcagatagcccggaagata

SEQ ID NO: 288623 - DNA, 75 bp, synthetic construct
  source 1..75: mol_type = other DNA
attgctgcggcatctggctgccatcgggaacaacctgaaccagacagcccggaaggtgaacagcggccagtggtc

SEQ ID NO: 288624 - DNA, 75 bp, synthetic construct
  source 1..75: mol_type = other DNA
gccctgacgttcctgtcagagctggggctgattagctaccagacggaatatgacccgcttattggctgcaacatt

SEQ ID NO: 288625 - DNA, 75 bp, synthetic construct
  source 1..75: mol_type = other DNA
tggcgacggagtctgctgccggaacactctccatcacccgtgccacccgtgccctgacgttcctgtcagagctgg

SEQ ID NO: 288626 - DNA, 75 bp, synthetic construct
  source 1..75: mol_type = other DNA
accacgctggccattgagtgcgggctggcgacggagtctgctgccggaacactctccatcacccgtgccacccgt

SEQ ID NO: 288627 - DNA, 75 bp, synthetic construct
  source 1..75: mol_type = other DNA
aaacactgggtaacggaccggacgcagccatattcgcgattggggcggtgtttttcgacccgttcaccggaaagc

SEQ ID NO: 288628 - DNA, 75 bp, synthetic construct
  source 1..75: mol_type = other DNA
gattgcaatagatagtggtattaagcatcctgttattcgtggtgtagatcaggttatgtctactgattttttagt

SEQ ID NO: 288629 - DNA, 75 bp, synthetic construct
  source 1..75: mol_type = other DNA
atcttatttttgaacgatatatcgaatatataaaccatctaaaattgtcgcccaaacaaaaagatttttattttt

SEQ ID NO: 288630 - DNA, 75 bp, synthetic construct
  source 1..75: mol_type = other DNA
gttctggtggttttctgcgcgatattggcaccgaataccaggaagctgcaaaaaactttatgcagttcatgaacg

SEQ ID NO: 288631 - DNA, 75 bp, synthetic construct
  source 1..75: mol_type = other DNA
attgtagattataacgatgcgcattataaaacgtcagtggatcaggacgcgtggggctttgttcctggcggcgat

SEQ ID NO: 288632 - DNA, 75 bp, synthetic construct
  source 1..75: mol_type = other DNA
ccgcaacagctgctgaaattagtcagtttggcaatacactttcctgcgaaaagagcggcagctcatcttcttcaa

SEQ ID NO: 288633 - DNA, 75 bp, synthetic construct
  source 1..75: mol_type = other DNA
tcagaaaccagtaatccacagtcctgtacttcagcaccacagcctgcgccggatgtgaaaccggcaccggacgtt

SEQ ID NO: 288634 - DNA, 75 bp, synthetic construct
  source 1..75: mol_type = other DNA
atgacgacacttatttatttgcaaattcctgtccctgaaccgattcctagcgatcctgttccagtgcccgatccc

SEQ ID NO: 288635 - DNA, 75 bp, synthetic construct
  source 1..75: mol_type = other DNA
atagttttagagactgttggtttttggatgtatgatactttcccgtctaagaaaaagatctgtgaactaaataaa

SEQ ID NO: 288636 - DNA, 75 bp, synthetic construct
  source 1..75: mol_type = other DNA
agtataccttttattcgccagtttaatctgttcatcaacaagaacagccatttgaaaaagatcagagtttcagac

SEQ ID NO: 288637 - DNA, 75 bp, synthetic construct
  source 1..75: mol_type = other DNA
gcatggtatttttgattctgggcttgcagcttccggccatcatttcggaatcactgacccgcgcacaacacgatc

SEQ ID NO: 288638 - DNA, 75 bp, synthetic construct
  source 1..75: mol_type = other DNA
ggtcttaatcactatttttgccgtcggctacgttattcatttactgttaccgaatgttccgcttattgcggcgtt

SEQ ID NO: 288639 - DNA, 75 bp, synthetic construct
  source 1..75: mol_type = other DNA
gaattcaatcctgaactttttctcttattgtttataccccccctgttgtttgctgaaagttcaaaaatacaacct

SEQ ID NO: 288640 - DNA, 75 bp, synthetic construct
  source 1..75: mol_type = other DNA
gtggagtggccaggaaggtagcgaaatttaccatgttatcttcaatggtaatatttatcagaatgcctggtgggt

SEQ ID NO: 288641 - DNA, 75 bp, synthetic construct
  source 1..75: mol_type = other DNA
aagaggaagctgccgatctgtttatggctaaaatggccatactgagtgtgcaaaagaccgagcaacgtttgctgc

SEQ ID NO: 288642 - DNA, 75 bp, synthetic construct
  source 1..75: mol_type = other DNA
ttcttacgttggtagtatcattaaccagcgtgcttacacgtctgtctcctgtccagataccacttcctttaatcc

SEQ ID NO: 288643 - DNA, 75 bp, synthetic construct
  source 1..75: mol_type = other DNA
gccagaccaggtaaaaccgtgacaggtattgctgctacgctggagcgcgaaggaaaacaggtccgtctgggggcg

SEQ ID NO: 288644 - DNA, 75 bp, synthetic construct
  source 1..75: mol_type = other DNA
atatggagaacaaccgtcagttcggtttcttccgtcttgatccgcgtctgatcaccatgatctcctcgccaaacg

SEQ ID NO: 288645 - DNA, 75 bp, synthetic construct
  source 1..75: mol_type = other DNA
tgaacttaacgccaatcgaagtggcgcaggcattccagactatcgccagcggcggtaaccgtgcgccgctttctg

SEQ ID NO: 288646 - DNA, 75 bp, synthetic construct
  source 1..75: mol_type = other DNA
gaccgctttagcggtgaagttcgtgcgatggtcggtggttctgagccgcagtttgcgggctacaaccgtgcgatg

SEQ ID NO: 288647 - DNA, 75 bp, synthetic construct
  source 1..75: mol_type = other DNA
attagccttaataaatgatgaaaagaaatctgcactgatagcagaggcaacgaatgtaatagctccgcttcagga

SEQ ID NO: 288648 - DNA, 75 bp, synthetic construct
  source 1..75: mol_type = other DNA
tctgacctttgatggcgatcatctggcgaccatcgtcaatatggataacaaccgtcagttcggtttcttccgcct

SEQ ID NO: 288649 - DNA, 75 bp, synthetic construct
  source 1..75: mol_type = other DNA
gtgagcagcgtctgtttgtgccgcgcagtggtttcccggatttgctggtggatactttgctggcgacagaagacc

SEQ ID NO: 288650 - DNA, 75 bp, synthetic construct
  source 1..75: mol_type = other DNA
ctccacagccagcctttatgcaactggtgcgtcaggagctgcaggcaaaactgggcgataaggtaaaagatctct

SEQ ID NO: 288651 - DNA, 75 bp, synthetic construct
  source 1..75: mol_type = other DNA
tacattgaacgtataccttttacaccggacgtaaaaaaagaattcttgagcagtattgagactattaattttagt

SEQ ID NO: 288652 - DNA, 75 bp, synthetic construct
  source 1..75: mol_type = other DNA
caaaacctttgcgacgctttataaatacattgaacgtataccttttactccgggtgtaaagaaagaattcttgag

SEQ ID NO: 288653 - DNA, 75 bp, synthetic construct
  source 1..75: mol_type = other DNA
tcagagcggcgacaacgaaatccgcggtttcccgctggcgagcctgtactactttggtcgcccggtagaagagct

SEQ ID NO: 288654 - DNA, 75 bp, synthetic construct
  source 1..75: mol_type = other DNA
ctccacagccagcctttatgcaactggtgcgtcaggagctacaggcgaaactgggcgataaagtgaaagatctct

SEQ ID NO: 288655 - DNA, 75 bp, synthetic construct
  source 1..75: mol_type = other DNA
gtacagccgcgtggcggggtgatttctccacagccagcctttatgcaactggtgcgtcaggagctacaggcgaaa

SEQ ID NO: 288656 - DNA, 75 bp, synthetic construct
  source 1..75: mol_type = other DNA
tatggatattccaccaggaaaacagattggaacactgaatggaaaaccagcactgatagatattcctcagccgac

SEQ ID NO: 288657 - DNA, 75 bp, synthetic construct
  source 1..75: mol_type = other DNA
tggcaggatgtatcgcgctggcattcagcaatatggctctggcggaagatatcaaagtcgcggttgtcggagcga

SEQ ID NO: 288658 - DNA, 75 bp, synthetic construct
  source 1..75: mol_type = other DNA
ggtgttctttgatggcatcaccgccggggaaaaagatttctctaccctggtggcgcgtctgaagaaagagaatat

SEQ ID NO: 288659 - DNA, 75 bp, synthetic construct
  source 1..75: mol_type = other DNA
attaaagtcgccgtcgtaggcgcaatgtccggtccggtggcgcagtacggtgaccaggagtttactggcgcagag

SEQ ID NO: 288660 - DNA, 75 bp, synthetic construct
  source 1..75: mol_type = other DNA
tgtccaccggcgcggtcagaattccaatatggcttctctgagctgggaagagcttgaacgacactaccagcgacg

SEQ ID NO: 288661 - DNA, 75 bp, synthetic construct
  source 1..75: mol_type = other DNA
gcctgaagaaaggtaacgctaacgtggtgttctttgacggcatcaccgccggagaaaaagacttctcaaccctgg

SEQ ID NO: 288662 - DNA, 75 bp, synthetic construct
  source 1..75: mol_type = other DNA
cataaaatatgtgattggccacctctgttcttcatcaacgcagccagcgtctgacatctatgaagatgaaggtat

SEQ ID NO: 288663 - DNA, 75 bp, synthetic construct
  source 1..75: mol_type = other DNA
gtgtcccaatttccacccagaaaagatgaagcgaatttaataacacaaacccgccgccgagcgggttttttttat

SEQ ID NO: 288664 - DNA, 75 bp, synthetic construct
  source 1..75: mol_type = other DNA
cagatgcgcgtagcgatgcccggcatcattcagtcgttcgatcctgacactgttacctgcacagtagaggtagcg

SEQ ID NO: 288665 - DNA, 75 bp, synthetic construct
  source 1..75: mol_type = other DNA
tggaaaaaatatcgggtgctattgatgcgtgttgatataaaaaatatagagtggccgaaaaaaccagaggaaaat

SEQ ID NO: 288666 - DNA, 75 bp, synthetic construct
  source 1..75: mol_type = other DNA
tggcaggatgtatcgcgctggcattcagcaatatggctctggcagaagatattaaagtcgccgtcgtaggcgcaa

SEQ ID NO: 288667 - DNA, 75 bp, synthetic construct
  source 1..75: mol_type = other DNA
atcacccttaacgggcccgtgcaggtaaacggaacgatcacttccactggcgaccaaacggccaacggtatcagc

SEQ ID NO: 288668 - DNA, 75 bp, synthetic construct
  source 1..75: mol_type = other DNA
agacgagcgcatgcatgatttatccgatgccttctgcattgttggtccgcagtcgcaggcaaagaaaataggcgg

SEQ ID NO: 288669 - DNA, 75 bp, synthetic construct
  source 1..75: mol_type = other DNA
tttggcaccaagggcggacgtccccgaatgactaccgtacaggactccgtcgcggtaaaacaggcggtagaccgg

SEQ ID NO: 288670 - DNA, 75 bp, synthetic construct
  source 1..75: mol_type = other DNA
ggccagcgttatgactcgtggttgcgagggatactgcggggcttctacggcaggtgcaatggatggcctatttaa

SEQ ID NO: 288671 - DNA, 75 bp, synthetic construct
  source 1..75: mol_type = other DNA
ggccagcgtgatgactcgtgcttgcgaaggatactgcggggtttctgcggcaggcacaatggatggtctatttga

SEQ ID NO: 288672 - DNA, 75 bp, synthetic construct
  source 1..75: mol_type = other DNA
ccttaaacaggcaatgaaatactggcgcaaccagactttgcgtatggggctgacgggcaaatactccccacattc

SEQ ID NO: 288673 - DNA, 75 bp, synthetic construct
  source 1..75: mol_type = other DNA
actgcccggctgaaagacgcaggactggcggcagcgctggagctggcgcggctgatggggttacgttcacaggag

SEQ ID NO: 288674 - DNA, 75 bp, synthetic construct
  source 1..75: mol_type = other DNA
atgtcccagatagaagcggtatttttcgactgcgacggtacgctggtcgacagtgaagtcatttgctcccgcgca

SEQ ID NO: 288675 - DNA, 75 bp, synthetic construct
  source 1..75: mol_type = other DNA
tggcgtttgccatcgccgcgagctgcaacttcccaatcattctgctttccatgtactggtcgaagttgactactc

SEQ ID NO: 288676 - DNA, 75 bp, synthetic construct
  source 1..75: mol_type = other DNA
ggcggcagttcacctggccaatgcggtgggcggtaacctgttcctcggctttatttcagcggttgctttcgccac

SEQ ID NO: 288677 - DNA, 75 bp, synthetic construct
  source 1..75: mol_type = other DNA
taacttcccgatcattctgctttccatgtactggtcgaaactgactacccgtggcgcgatgctgggcggctggct

SEQ ID NO: 288678 - DNA, 75 bp, synthetic construct
  source 1..75: mol_type = other DNA
acgcaaaaccgggaattatttcaggtctggttacaaaaattagcgcagtggcatcagaccactacgccttatctt

SEQ ID NO: 288679 - DNA, 75 bp, synthetic construct
  source 1..75: mol_type = other DNA
ttaatcaatgtctatcaaaacagttttgttttaatggtttatactgttgtatttacttcctcgtttggcaactct

SEQ ID NO: 288680 - DNA, 75 bp, synthetic construct
  source 1..75: mol_type = other DNA
atgtcaaataacttacttcgtctttctgatgttatgcgccgtactggttatggtcgcgcttggatttatcgcctg

SEQ ID NO: 288681 - DNA, 75 bp, synthetic construct
  source 1..75: mol_type = other DNA
aacaggccgggcgtgacaggctggcgcagagtgagcgactgaataaccgttctcttggtctgtctggcgcatccc

SEQ ID NO: 288682 - DNA, 75 bp, synthetic construct
  source 1..75: mol_type = other DNA
aggctggacgcaggcaggtggtggagcatccgcgtctgaccaataaggcattaggggtgtcaggcgcttcgcgca

SEQ ID NO: 288683 - DNA, 75 bp, synthetic construct
  source 1..75: mol_type = other DNA
acggcacgcgccgcgccattacgccggaacattatgaaaaagtgatggagagcgcccgtgcacaggatgcggggc

SEQ ID NO: 288684 - DNA, 75 bp, synthetic construct
  source 1..75: mol_type = other DNA
gctgacggcgacggatctgggccacggcgacggtcgcggacgctgggtgaaacaggtgtatggataccgatggaa

SEQ ID NO: 288685 - DNA, 75 bp, synthetic construct
  source 1..75: mol_type = other DNA
tatctggggcagaccctgcagtcagcctccacacaatcgtcgtctcaggccattgacggtaactggcactacaac

SEQ ID NO: 288686 - DNA, 75 bp, synthetic construct
  source 1..75: mol_type = other DNA
caccagaataaacacggattccggtgatatttccggggcgaatacgtccccatttctgcaacagatcctgaatac

SEQ ID NO: 288687 - DNA, 75 bp, synthetic construct
  source 1..75: mol_type = other DNA
cggcactgttcaccgaaatgctgggcgacagctataactattttcacggcaattccatgacctccaccgaaatca

SEQ ID NO: 288688 - DNA, 75 bp, synthetic construct
  source 1..75: mol_type = other DNA
aaagtcaccacctttaccgagctggcgcagctgcctgcactctggaaggcacgcggctggaatataacgcgataa

SEQ ID NO: 288689 - DNA, 75 bp, synthetic construct
  source 1..75: mol_type = other DNA
gcagagtgagcggctgaataaccgttcgctgggcctgtctggcgcatcccgtagcggtacgaagaaggccatcac

SEQ ID NO: 288690 - DNA, 75 bp, synthetic construct
  source 1..75: mol_type = other DNA
cacaaagcgttccctgcaaaatgagatggcggcggtgcgctgcatcctgaaacaggccggacgtgcaaaactggc

SEQ ID NO: 288691 - DNA, 75 bp, synthetic construct
  source 1..75: mol_type = other DNA
tttggcaccaaaggtgggcggccccgcgatacccttattcaggatactggcgcagttaaactggcgctggataat

SEQ ID NO: 288692 - DNA, 75 bp, synthetic construct
  source 1..75: mol_type = other DNA
aacgtgccgatgtgcgtcgtctctaacggcccagtcagcaaaatgcaacattcgcttggcaaactcaatatgctg

SEQ ID NO: 288693 - DNA, 75 bp, synthetic construct
  source 1..75: mol_type = other DNA
atcgatgccggtatggaagtgttttacttctgcgctgacccgcacaataagccgatcgttcatccgaaagtcacc

SEQ ID NO: 288694 - DNA, 75 bp, synthetic construct
  source 1..75: mol_type = other DNA
tcaacaatctgttcagcgaagcgatggcggtacacccgaaaggtgtcgacatcatgaagccgggcgggctggtga

SEQ ID NO: 288695 - DNA, 75 bp, synthetic construct
  source 1..75: mol_type = other DNA
gatactcagagcagcatacatggcgaagaaaatattgtaggaagacagtattctgaactacaaaatcaccataaa

SEQ ID NO: 288696 - DNA, 75 bp, synthetic construct
  source 1..75: mol_type = other DNA
cgaggcaatatcggagatactcagagcagcatacgtggcgaagaaaatattgtaggaagacagtattctgaacta

SEQ ID NO: 288697 - DNA, 75 bp, synthetic construct
  source 1..75: mol_type = other DNA
tgcagcctggtgttgataatgcctggcgtgaatcccgtggggacatcggtaaaggaatggagagcgtaccttcgg

SEQ ID NO: 288698 - DNA, 75 bp, synthetic construct
  source 1..75: mol_type = other DNA
aggatgacgtggaccgggaatccgcctatgagatgttgcaaaaaggctttcaggccagtaccgagcagcaaaata

SEQ ID NO: 288699 - DNA, 75 bp, synthetic construct
  source 1..75: mol_type = other DNA
cggtggatgacggtattcttggtggattgaaggatattttgtttggcactaccggaccacgcggcgggaagaaag

SEQ ID NO: 288700 - DNA, 75 bp, synthetic construct
  source 1..75: mol_type = other DNA
attcggagcattttgttggcgagccttttgccattaatgtcaaatcattaggagggcctcgcttacaggttgcat

SEQ ID NO: 288701 - DNA, 75 bp, synthetic construct
  source 1..75: mol_type = other DNA
ttgtgctggtgcggatgggcaatcatcgcgaagccagcagtggctgttatacggcaatggcgctattaccgatta

SEQ ID NO: 288702 - DNA, 75 bp, synthetic construct
  source 1..75: mol_type = other DNA
atttacgccggatgatggatgcaccagggcaacattttttacaagctgcttgcgaaaacgaaatagtcggggcgc

SEQ ID NO: 288703 - DNA, 75 bp, synthetic construct
  source 1..75: mol_type = other DNA
tacagcagctactgaccatgccgccgggcgtggcagcggtaactgctgcgcgtgggcgcggtaaatcggcgttgg

SEQ ID NO: 288704 - DNA, 75 bp, synthetic construct
  source 1..75: mol_type = other DNA
tgtaccacacttaaactttcaggccgtaaggcattgctggtttgccaacgcgaagaagccgcgcaggcgctattc

SEQ ID NO: 288705 - DNA, 75 bp, synthetic construct
  source 1..75: mol_type = other DNA
ctggaaaaaatggttagcgaggcactggtttttgacgatgaaaccttcacgcgcgtaccacaaggcaagatcccc

SEQ ID NO: 288706 - DNA, 75 bp, synthetic construct
  source 1..75: mol_type = other DNA
gatgtgcgaactctcgcgcagtggaatggcgaatccattccagttgagccgctaaatgataccgtgctttctgac

SEQ ID NO: 288707 - DNA, 75 bp, synthetic construct
  source 1..75: mol_type = other DNA
tgatgcgacgctggcgcgtcttatcatgcccaccccactgcaatatattgaattttaattatttttcaggaatga

SEQ ID NO: 288708 - DNA, 75 bp, synthetic construct
  source 1..75: mol_type = other DNA
gctcgactttaaagatctgcgggcgattacccagtacatcggcgataacgccaaatctttccagaatcagtacgg

SEQ ID NO: 288709 - DNA, 75 bp, synthetic construct
  source 1..75: mol_type = other DNA
ataacgtgctcggccagctcggtaatcgcgttcaacacgctttgcggacttttacgcccaagatcagaaagcggt

SEQ ID NO: 288710 - DNA, 75 bp, synthetic construct
  source 1..75: mol_type = other DNA
gcgaagcgttgatctcgtttctcgatgcaaaaggaagtccttctgtggtggaacgggcgatggtgattgcgcctt

SEQ ID NO: 288711 - DNA, 75 bp, synthetic construct
  source 1..75: mol_type = other DNA
gctggcttgccgcacattctgatgcgcttctttacggtcagcgatgcccgcgaagcacgtaagagcgtgttctac

SEQ ID NO: 288712 - DNA, 75 bp, synthetic construct
  source 1..75: mol_type = other DNA
cgctttatcttatcgcccagatggtcggcgcgggtaaattgatcgagctactgttcggtcttaactatcacatcg

SEQ ID NO: 288713 - DNA, 75 bp, synthetic construct
  source 1..75: mol_type = other DNA
gcatacgtactcgttatgggcgaaacgtgaaattaacagattataacgtttctaatgaacacttctggttactaa

SEQ ID NO: 288714 - DNA, 75 bp, synthetic construct
  source 1..75: mol_type = other DNA
gagaagctttatcagatgccgaaactgtatgccgccagcctgttgtggatgctctcggagttgtatgaacaattg

SEQ ID NO: 288715 - DNA, 75 bp, synthetic construct
  source 1..75: mol_type = other DNA
ctgctcgctcggttgaaaaatatcggcgtcaacgactggcagccacatgcgaatccagtcgttgtgtgggatatt

SEQ ID NO: 288716 - DNA, 75 bp, synthetic construct
  source 1..75: mol_type = other DNA
ccgccagcctgctgtggatgctttcagagttgtatgaacaattgccggaagcgggcgatctggagaaaccaaaac

SEQ ID NO: 288717 - DNA, 75 bp, synthetic construct
  source 1..75: mol_type = other DNA
aagatggcgtggatcgggaatccgcgtatgagatgctgcaaaaaggcgtgcgggcgaataccgggcagcaaaata

SEQ ID NO: 288718 - DNA, 75 bp, synthetic construct
  source 1..75: mol_type = other DNA
agcaagtgatacgacttatccgctcgaaaggcgtaggcgtctggttcgtctcgcaaaatccgtccgatattcctg

SEQ ID NO: 288719 - DNA, 75 bp, synthetic construct
  source 1..75: mol_type = other DNA
ggatgcgtaccgatgctaacggtaaaggtgttatcaatattcttagcgccgaaaagctctaccagatgccaaaac

SEQ ID NO: 288720 - DNA, 75 bp, synthetic construct
  source 1..75: mol_type = other DNA
agtactggtacggtttgccgaacttctacactattacccgttacaaccacagcactcactacgcaatggcggtct

SEQ ID NO: 288721 - DNA, 75 bp, synthetic construct
  source 1..75: mol_type = other DNA
tatttctctggtgaactggaaaccttcctgctaatggcgcgcgatgagcaggacgatccgctcaatctgaaaggt

SEQ ID NO: 288722 - DNA, 75 bp, synthetic construct
  source 1..75: mol_type = other DNA
aggtgatcaggttgcggtgatggcaaacggtcaggctccaggcttgccaaatggcttcaaaaccaagtacagcat

SEQ ID NO: 288723 - DNA, 75 bp, synthetic construct
  source 1..75: mol_type = other DNA
cggtactgatgatggtggtggcaggcagcggacaggcggccaccaccgccacagcaacgctgacgattaatgtca

SEQ ID NO: 288724 - DNA, 75 bp, synthetic construct
  source 1..75: mol_type = other DNA
ctgtacgctgattccggtgactgagactagtttgacagggccgtttggtcgagggtattctacattaagttttgc

SEQ ID NO: 288725 - DNA, 75 bp, synthetic construct
  source 1..75: mol_type = other DNA
gggaacggcagaaaatgacaataagacggtacgtctcaaggcgggtacaggggattctaaggtaacactttcctt

SEQ ID NO: 288726 - DNA, 75 bp, synthetic construct
  source 1..75: mol_type = other DNA
gccggaagggttccggtgaggcgcaatgttgcgggggctttatccctggtggcattggttgctggagagagaaaa

SEQ ID NO: 288727 - DNA, 75 bp, synthetic construct
  source 1..75: mol_type = other DNA
ggagagagaaaacccccgcacgttgcaggtatgcacctgacaacatcacgggggctaatcttgaacctagaccac

SEQ ID NO: 288728 - DNA, 75 bp, synthetic construct
  source 1..75: mol_type = other DNA
acaatcatttcctcagcagtaaccacctgcataatatcaccgaagtggcgattcaccgtctggagcagcagcttg

SEQ ID NO: 288729 - DNA, 75 bp, synthetic construct
  source 1..75: mol_type = other DNA
agtactggtacggtctgccgaacttctacaccatcacccgttataaccacagcacccattacgcaatggcggtct

SEQ ID NO: 288730 - DNA, 75 bp, synthetic construct
  source 1..75: mol_type = other DNA
ccgccagaaattatcgtcggaattattggtgtcgaaacccgctggggacgcgtgatgggtaaaacccgcatcctt

SEQ ID NO: 288731 - DNA, 75 bp, synthetic construct
  source 1..75: mol_type = other DNA
ttgagttatgtaaagtccgtatcgggcagtgactaccgcttccttgtgtggggcgtgatgctttaccatacttgc

SEQ ID NO: 288732 - DNA, 75 bp, synthetic construct
  source 1..75: mol_type = other DNA
ggcaccctgacgccggggtcaaagacacacgctccgctgaatatcacctggaagtgtgaaggtgacacgctggtt

SEQ ID NO: 288733 - DNA, 75 bp, synthetic construct
  source 1..75: mol_type = other DNA
ggaaggcaatgccgaaagcagaagggcgctacgccagcacaaccgggagcagataaaacagcatccagaatggtt

SEQ ID NO: 288734 - DNA, 75 bp, synthetic construct
  source 1..75: mol_type = other DNA
atggctcgcggctatgtttctccggatctgtgggaagaaggaataaatgctgggctactaaactatagttttaat

SEQ ID NO: 288735 - DNA, 75 bp, synthetic construct
  source 1..75: mol_type = other DNA
ttttgacagtgtgaactttcgtggccttaaaataaattcaacagaagcgatgttgcccgatagccaacatggttt

SEQ ID NO: 288736 - DNA, 75 bp, synthetic construct
  source 1..75: mol_type = other DNA
catatccacagccgcgagattgccgaccatatggggtgtatctgggcgacggtcagtttattgagtcaccgcgca

SEQ ID NO: 288737 - DNA, 75 bp, synthetic construct
  source 1..75: mol_type = other DNA
catcaccgaagtggcgattcaccgcctggagcagcagctaggtaagccttatatctgggggggcacgcggcctga

SEQ ID NO: 288738 - DNA, 75 bp, synthetic construct
  source 1..75: mol_type = other DNA
caacgattgtggcgaacaacgacctgcgccggggagatttgctgtttttccatatccacagccgcgagattgccg

SEQ ID NO: 288739 - DNA, 75 bp, synthetic construct
  source 1..75: mol_type = other DNA
tttcactggttgaagagacacgtccattattgccaggtgtgcgtgaagccgttgcgttatgcaaagaacaaggtt

SEQ ID NO: 288740 - DNA, 75 bp, synthetic construct
  source 1..75: mol_type = other DNA
ccgctcaaggcgagtgatagacgctggcaggcgctggcggaaaacaaccactttttaagcagcgatcacctgcat

SEQ ID NO: 288741 - DNA, 75 bp, synthetic construct
  source 1..75: mol_type = other DNA
atatctgggggggcacgcggcctgataaaggcttcgactgtagcgggttggtttttttatgcctacaacaagatc

SEQ ID NO: 288742 - DNA, 75 bp, synthetic construct
  source 1..75: mol_type = other DNA
gcggatattttaatttcgctgatacaacatacagtcgaatgaatggctacaacatcgaaacacaggatggagtta

SEQ ID NO: 288743 - DNA, 75 bp, synthetic construct
  source 1..75: mol_type = other DNA
tttgttatcagcgacaaagttgatcaaatcctggcctgtggccagatgtgcgatgtgctgcgtattccgggcgag

SEQ ID NO: 288744 - DNA, 75 bp, synthetic construct
  source 1..75: mol_type = other DNA
gaaatttccgtctggttgtgaaggaaaatgatatgccctgctggctggacgacgatgatgacaatctgccagtgg

SEQ ID NO: 288745 - DNA, 75 bp, synthetic construct
  source 1..75: mol_type = other DNA
ttattaaaacagtaccaaattcatctgaaaaagcaggccagctatattgtggaaggcaatgccgaaagcagaagg

SEQ ID NO: 288746 - DNA, 75 bp, synthetic construct
  source 1..75: mol_type = other DNA
ttcccagttagccaagagctattcatgggcaaatcttcaaaagcagcttaactacaacccggatcacttagaagc

SEQ ID NO: 288747 - DNA, 75 bp, synthetic construct
  source 1..75: mol_type = other DNA
tacctctgcatttatcgccgagattatccgcgctgggatccaggcagtgccttatggtcaacatgaagcggctcg

SEQ ID NO: 288748 - DNA, 75 bp, synthetic construct
  source 1..75: mol_type = other DNA
cagaactactcgcaggaatttgtgggttatgtcgctagtaaacgtccgggagaggcagaacagttgctttctgac

SEQ ID NO: 288749 - DNA, 75 bp, synthetic construct
  source 1..75: mol_type = other DNA
ctcgcaatgaacagatgctatcggctcggactggtgttccctcccctaaggaagctctccaacatatcattgata

SEQ ID NO: 288750 - DNA, 75 bp, synthetic construct
  source 1..75: mol_type = other DNA
cacttagaagctttacgaaccaacacaccggcaaaagaccaccctgctcctgctcctgctcctgctcctgctcca

SEQ ID NO: 288751 - DNA, 75 bp, synthetic construct
  source 1..75: mol_type = other DNA
gactatatgaaaaagatggggttcaatgatactcatctccgttgctatgtgcttcatgacgacgatggccagcat

SEQ ID NO: 288752 - DNA, 75 bp, synthetic construct
  source 1..75: mol_type = other DNA
actgccagcccggaagtgcgggcagaacgcgaaagactggtacaggcctttgtggaagagcgcatgaagccgcag

SEQ ID NO: 288753 - DNA, 75 bp, synthetic construct
  source 1..75: mol_type = other DNA
ctgaataccattcagtcgattggtaaccgctatgcccgcgatgagaatgtcagtctggctgaagccgtgagggaa

SEQ ID NO: 288754 - DNA, 75 bp, synthetic construct
  source 1..75: mol_type = other DNA
aaactgcctgtcgatattgctctgggtaaaacagcaacgagcagctggcagcagcagcagcgtgatgccatgagc

SEQ ID NO: 288755 - DNA, 75 bp, synthetic construct
  source 1..75: mol_type = other DNA
aatgatgctgttacccgtagtcatgagtatgctcagctggccagttttgcagagaacaatagtgcaaatatcaat

SEQ ID NO: 288756 - DNA, 75 bp, synthetic construct
  source 1..75: mol_type = other DNA
ggataggtgacaatattatcgggagaaaggaattgaacaatatcaaagataagctgcaaagaacgtttgaccagg

SEQ ID NO: 288757 - DNA, 75 bp, synthetic construct
  source 1..75: mol_type = other DNA
tggccagctatgcagagaacaacagtgcgaacattaaccagaactactcgcaggagtttgtcgggtatgtcacca

SEQ ID NO: 288758 - DNA, 75 bp, synthetic construct
  source 1..75: mol_type = other DNA
tggcttttcattctcttactgcgatatagctttcaaagcttcgcaattgggcaagggttactcttgggcaaatct

SEQ ID NO: 288759 - DNA, 75 bp, synthetic construct
  source 1..75: mol_type = other DNA
agaaaacgccccagaactaaatgtttcctacggtatcgataagaattttttgtatggtgctggcgtttcaatttc

SEQ ID NO: 288760 - DNA, 75 bp, synthetic construct
  source 1..75: mol_type = other DNA
tgtcggagccgcgcgagatatggcccgcgccggagtttcaataccggagatcatgcaagctggtggctggaccaa

SEQ ID NO: 288761 - DNA, 75 bp, synthetic construct
  source 1..75: mol_type = other DNA
agagtttagtcagtggccgaataattcaggaacttgaaatcgctcatggccttactcaaaccccagcagtaagag

SEQ ID NO: 288762 - DNA, 75 bp, synthetic construct
  source 1..75: mol_type = other DNA
cacgcattggcatttctattcggcaggttaaacgtctggtgcaacggtatagaaatgaagggccttctggtctag

SEQ ID NO: 288763 - DNA, 75 bp, synthetic construct
  source 1..75: mol_type = other DNA
ttgctgatctgccgacgtcacagttttggtcgtaacgcgacatacttcagggtattgtcttttgaatatctgagt

SEQ ID NO: 288764 - DNA, 75 bp, synthetic construct
  source 1..75: mol_type = other DNA
tctcacagaaattatatttaaagatgagtttgctgcggtcattcctgacaatgatagtactcaggcggcatgtgc

SEQ ID NO: 288765 - DNA, 75 bp, synthetic construct
  source 1..75: mol_type = other DNA
cagaaggctcgcagagcttctcagaagctatgggaagtccattcttcacaaaacccacacacacttctcaaaaat

SEQ ID NO: 288766 - DNA, 75 bp, synthetic construct
  source 1..75: mol_type = other DNA
gcaaatcttattaacaggctcaactacaacccagatcatctagaagctcttcgaatcgacataccttcaaaggaa

SEQ ID NO: 288767 - DNA, 75 bp, synthetic construct
  source 1..75: mol_type = other DNA
acgaaccaacacaccggcaaaagaccaccctgctcctgctcctgctcctgctcctgctcctgctcctgctcctgc

SEQ ID NO: 288768 - DNA, 75 bp, synthetic construct
  source 1..75: mol_type = other DNA
tatgggcttctctgaaacgcatctacgtgcatacgtgcttcatgatgataaagatggtcaacatatccatatagt

SEQ ID NO: 288769 - DNA, 75 bp, synthetic construct
  source 1..75: mol_type = other DNA
aaagccttaggagcggtcgtataatccaggaacttgaaattaagtacgacctaacgataacaaaaggatcagtac

SEQ ID NO: 288770 - DNA, 75 bp, synthetic construct
  source 1..75: mol_type = other DNA
aagattcttcaaaaaaatgccgtcaaaaggcaaaagcatctcaggctcatcggctggattccatttatcagaagg

SEQ ID NO: 288771 - DNA, 75 bp, synthetic construct
  source 1..75: mol_type = other DNA
tctgagcacatttgaacaactgcaccagaagaaagatgaggtgtttgaacggggcgtgatcaacgtcttcatagg

SEQ ID NO: 288772 - DNA, 75 bp, synthetic construct
  source 1..75: mol_type = other DNA
tctgagcacatttgaacaactgcaccagaacaaggatgaggtgtttgaccggggcgtgatcaacgtcttcatagg

SEQ ID NO: 288773 - DNA, 75 bp, synthetic construct
  source 1..75: mol_type = other DNA
tctgagcacatttgaacaactgcaccagaaaaaggatgaggtgtttgaacggggcgtgatcaacgtcttcatagg

SEQ ID NO: 288774 - DNA, 75 bp, synthetic construct
  source 1..75: mol_type = other DNA
tctgagcacatttgaacaactgcaccagaagaaggatgaggtgtttgagcggggcgtgatcaacgtcttcatagg

SEQ ID NO: 288775 - DNA, 75 bp, synthetic construct
  source 1..75: mol_type = other DNA
tctgagcacatttgaacaactgcaccagaagaacgatgaggtgtttgaccggggcgtgatcaacgtcttcatagg

SEQ ID NO: 288776 - DNA, 75 bp, synthetic construct
  source 1..75: mol_type = other DNA
tctgagcacatttgaacaactgcaccagaagaatgatgaggtgtttgatcggggcgtgatcaacgtcttcatagg

SEQ ID NO: 288777 - DNA, 75 bp, synthetic construct
  source 1..75: mol_type = other DNA
ccgggaaaacatcatcattcatctggatgaccacacccagtctgttcaaggtaaagaggactacgaagatgagat

SEQ ID NO: 288778 - DNA, 75 bp, synthetic construct
  source 1..75: mol_type = other DNA
caatctggtgaggtgggaccggtgggggtttcatctgaacaacggcccacaggcagatcgacttgccgatctgga

SEQ ID NO: 288779 - DNA, 75 bp, synthetic construct
  source 1..75: mol_type = other DNA
tatgccgcctgcgaaaataccaatgcgggtaaaggcgctgcgctgagagatcccctcataatttccccaaagcgt

SEQ ID NO: 288780 - DNA, 75 bp, synthetic construct
  source 1..75: mol_type = other DNA
atggagaaacctgaaacagcaatgaaagccatcacccgcaaccttgaccgcgaaatctggcgtgacctgatgcaa

SEQ ID NO: 288781 - DNA, 75 bp, synthetic construct
  source 1..75: mol_type = other DNA
cttcccgacaacagggaaaacatcaccattcatctggatgatcacatccagtctgttcagggtaaagagcgctat

SEQ ID NO: 288782 - DNA, 75 bp, synthetic construct
  source 1..75: mol_type = other DNA
gtgggggggcatcttatcaccgggcaacaggccgatcgacttgccgatctggaaagaatgctgcacctgttcagc

SEQ ID NO: 288783 - DNA, 75 bp, synthetic construct
  source 1..75: mol_type = other DNA
ccacgaatttaaccgccacggcgcgcgttatccttcctacaacaccattgtcggcagcggtgagaacggctgcat

SEQ ID NO: 288784 - DNA, 75 bp, synthetic construct
  source 1..75: mol_type = other DNA
ttcagcgccgccgtcaggccctggtggagcaaatgcaacctggcagcgcggcgctgatttttgccgccccggaag

SEQ ID NO: 288785 - DNA, 75 bp, synthetic construct
  source 1..75: mol_type = other DNA
cgttacccttcctataacaccattgttggcagcggtgaaaacggctgcattttgcactacaccgaaaacgagtgt

SEQ ID NO: 288786 - DNA, 75 bp, synthetic construct
  source 1..75: mol_type = other DNA
agtaccatctggaaggcgaaattcaccacgaatttaaccgccacggcgcgcgttatccttcctacaacaccatag

SEQ ID NO: 288787 - DNA, 75 bp, synthetic construct
  source 1..75: mol_type = other DNA
atgagtgatatatcccggcaagaatttcagcgtcgccgtcaggccctggtagagcaaatgcaacccggcagcgcc

SEQ ID NO: 288788 - DNA, 75 bp, synthetic construct
  source 1..75: mol_type = other DNA
ttcagcgccgccgccaggctttactggcgcaaatgcaacctgccagcgccgcgctgattttcgcagcgccagaag

SEQ ID NO: 288789 - DNA, 75 bp, synthetic construct
  source 1..75: mol_type = other DNA
ggacgctctgtttgagcaagggatccgggtggattccggtcttaccccgcttaacagctatgaaaaccgtgtcta

SEQ ID NO: 288790 - DNA, 75 bp, synthetic construct
  source 1..75: mol_type = other DNA
gaatatctcattgagccacgcaagctgtttggaggacgctacactgataccttccgggttgaaagcggcattcct

SEQ ID NO: 288791 - DNA, 75 bp, synthetic construct
  source 1..75: mol_type = other DNA
gcagcaacaccatcagcgacgcgctggaaaacatcaccctgaacctgaacgatgtcaccacgggcaaccagacgc

SEQ ID NO: 288792 - DNA, 75 bp, synthetic construct
  source 1..75: mol_type = other DNA
gaacagcgcgctggaaaagctgcgtaaaggctcgcgacagaatctcaccgccccggcaacgatgatcgactggcg

SEQ ID NO: 288793 - DNA, 75 bp, synthetic construct
  source 1..75: mol_type = other DNA
tggtcaggatcgctcgcgcattctggaaccggggatggtactgaccgtagagcctggtctgtatatcgcgccgga

SEQ ID NO: 288794 - DNA, 75 bp, synthetic construct
  source 1..75: mol_type = other DNA
ctgttacagcacactggcgggaagatttcaccgttctgcggctacatggtgactgccatgccgggaacattctct

SEQ ID NO: 288795 - DNA, 75 bp, synthetic construct
  source 1..75: mol_type = other DNA
caacttgccagaagatagagaaactttattctgggttgtatctaattctttaccaggtggagataaggaagaaag

SEQ ID NO: 288796 - DNA, 75 bp, synthetic construct
  source 1..75: mol_type = other DNA
gaaaaggttcaggcgattgtccacaacctggcccgacaaaactgttccgcagacagtaagaacatttgcagttaa

SEQ ID NO: 288797 - DNA, 75 bp, synthetic construct
  source 1..75: mol_type = other DNA
tctcgaagcgattcgtgatcaccaggtggtgatcgtcgccggggaaacgggttctggtaaaacgactcagttacc

SEQ ID NO: 288798 - DNA, 75 bp, synthetic construct
  source 1..75: mol_type = other DNA
ccgattatcgaagtctccggtcggacctatccggtggaagtgcgctatcgaccgattgttgaagaagccgatgac

SEQ ID NO: 288799 - DNA, 75 bp, synthetic construct
  source 1..75: mol_type = other DNA
ttttccggaaatcagtgaagagaatattctgagtacgtttgagcagctacaccagaataaggatgaagtgtttga

SEQ ID NO: 288800 - DNA, 75 bp, synthetic construct
  source 1..75: mol_type = other DNA
gtgggttcattaccgtttatcgccgcatattccttcctgggctgcgaaaattattgagcagacctggagatgtga

SEQ ID NO: 288801 - DNA, 75 bp, synthetic construct
  source 1..75: mol_type = other DNA
atgtcaattctgttacccatccaactcttcaaaattcttgccgatgagacccgcctgggcatcgtattactgctc

SEQ ID NO: 288802 - DNA, 75 bp, synthetic construct
  source 1..75: mol_type = other DNA
gtcggtacgataaccggctggttgttgtggtacttttgctttccttcttcgcactcgctctccggtgagttgcac

SEQ ID NO: 288803 - DNA, 75 bp, synthetic construct
  source 1..75: mol_type = other DNA
ttggcatagccgacccgaattttaaaattcagttaccgccgttcgcgctctcggtggcggtgatgtgcctggtac

SEQ ID NO: 288804 - DNA, 75 bp, synthetic construct
  source 1..75: mol_type = other DNA
ttacgttttgatgtggaagaccgactggtcgatttggtcaatgaaggtgtcgatctcgatattcgcattggcgat

SEQ ID NO: 288805 - DNA, 75 bp, synthetic construct
  source 1..75: mol_type = other DNA
tgaacaaggttttaaaagcgtttccgcaattttggagcggagaagatttaaggggccgtttgggaaacggacaat

SEQ ID NO: 288806 - DNA, 75 bp, synthetic construct
  source 1..75: mol_type = other DNA
tcagtaacggcttattggtcgggattttactggctgttcttatggataatcttattccgtgggaacgcatcgaat

SEQ ID NO: 288807 - DNA, 75 bp, synthetic construct
  source 1..75: mol_type = other DNA
cgattcggggcacggatgttttttatccgcagcagggcgcgggaatacgcgttatcgtcgcagctttgtggcgac

SEQ ID NO: 288808 - DNA, 75 bp, synthetic construct
  source 1..75: mol_type = other DNA
gaagggctctgcgcgcatcacgttcaggaagccagaactggttgacagactgaatgatattatcgcaaaaacact

SEQ ID NO: 288809 - DNA, 75 bp, synthetic construct
  source 1..75: mol_type = other DNA
atgtctgcaatcacagtctcccgtccggaagtggtcaacgggcatacggacgttatctgctccaccagtgtcagc

SEQ ID NO: 288810 - DNA, 75 bp, synthetic construct
  source 1..75: mol_type = other DNA
atcgtcaacaacctggtgaggtgggaccggtggggggttcatcttatcaccgggcaacagactgaccgactcgtc

SEQ ID NO: 288811 - DNA, 75 bp, synthetic construct
  source 1..75: mol_type = other DNA
gcagtgagaaacggcaaaagaatgtaaaattcacggcgagattcacggaggatgaggctgaaatcgtaagagaaa

SEQ ID NO: 288812 - DNA, 75 bp, synthetic construct
  source 1..75: mol_type = other DNA
ccgcactggactgggccatgaaacaggattttcgctgcggttgctggctgatggagaaacctgaaaccgcaatga

SEQ ID NO: 288813 - DNA, 75 bp, synthetic construct
  source 1..75: mol_type = other DNA
ccgggaaaatatcatcatccgtctggatgaccacattcagtccgctcagggtcaggagtgctatgaatatgaaga

SEQ ID NO: 288814 - DNA, 75 bp, synthetic construct
  source 1..75: mol_type = other DNA
atgacagaaagtattggcggtaaaactgctctggactgggccatgaaacaggattttcgctgcggttgctggctg

SEQ ID NO: 288815 - DNA, 75 bp, synthetic construct
  source 1..75: mol_type = other DNA
tctgctcaaccagtatccgccacattctggctgtacgaaagagtacactgctgcaaatcgacacacttatccggc

SEQ ID NO: 288816 - DNA, 75 bp, synthetic construct
  source 1..75: mol_type = other DNA
acaggaaaaggttcaggtgattgtccgcaacctggctcgacaaaattgttccgcagacagtaagaacatttgtag

SEQ ID NO: 288817 - DNA, 75 bp, synthetic construct
  source 1..75: mol_type = other DNA
ccgcactggactgggccatgaaacaggattttcgctgtggttgctggctgactgagaaaccggaaaccgcaatga

SEQ ID NO: 288818 - DNA, 75 bp, synthetic construct
  source 1..75: mol_type = other DNA
cactgctgcaaatcgacacacttatccggcaactggctgaaatatcagcaatgacagaaagtattggcggtaaaa

SEQ ID NO: 288819 - DNA, 75 bp, synthetic construct
  source 1..75: mol_type = other DNA
gtcgcagcccaagatatcccgccacctggcgcttcttcgtgaaagcgggctattgctggatcgcaagcagggtaa

SEQ ID NO: 288820 - DNA, 75 bp, synthetic construct
  source 1..75: mol_type = other DNA
aggatgaggtgtttgagcgaggggtgatcaacgtcttcagagggctgagctggaattacaaaaccaattgcccct

SEQ ID NO: 288821 - DNA, 75 bp, synthetic construct
  source 1..75: mol_type = other DNA
gcctgtcgatgggctgcgtcacctggctggaacgctattttgccgatcgtaatctggggcaggaaaattttgatg

SEQ ID NO: 288822 - DNA, 75 bp, synthetic construct
  source 1..75: mol_type = other DNA
tgcgggtgattttattgccaaagcgcaggaaatcctcggttgtccggtacaggtgatcagcggtgaagaggaagc

SEQ ID NO: 288823 - DNA, 75 bp, synthetic construct
  source 1..75: mol_type = other DNA
aaagaatgttgcacctgttcagcggtaaaccaatccccgacaaccggggaaacatcacccttcgtctggatgatc

SEQ ID NO: 288824 - DNA, 75 bp, synthetic construct
  source 1..75: mol_type = other DNA
cgttgatttcaaacaagcgccgcaacatgctgcttatctggtgcgtaatctggatcttcccggttttacgcctgc

SEQ ID NO: 288825 - DNA, 75 bp, synthetic construct
  source 1..75: mol_type = other DNA
tagtgttcccgagtggtctggcgatcctgatagccatttttaccgaactgaatattcagtgtatgaccctggcgg

SEQ ID NO: 288826 - DNA, 75 bp, synthetic construct
  source 1..75: mol_type = other DNA
ggtgccgatcagcgcctggtggtggatataggcggtgccagtactgaactggtaaccggcacgggtgcacaaacc

SEQ ID NO: 288827 - DNA, 75 bp, synthetic construct
  source 1..75: mol_type = other DNA
atgaagatgagatgttcatcattaaatactttaagaagggagctgcacacatcactttcaaaaggctggagctga

SEQ ID NO: 288828 - DNA, 75 bp, synthetic construct
  source 1..75: mol_type = other DNA
cgaacgcggtcaacggacatacagccgttatctgttccacaagtatcagacacatcctggctgtacgaaagagta

SEQ ID NO: 288829 - DNA, 75 bp, synthetic construct
  source 1..75: mol_type = other DNA
tgagcacatttgaacaactgcaccagaataacgatgaggtgtttgaccggggcgtgatcaacgtcttcatagggc

SEQ ID NO: 288830 - DNA, 75 bp, synthetic construct
  source 1..75: mol_type = other DNA
tgttcagggtaaagaatgctatgaggatgaaatgttcagaattaaatactttaagaaaggctccgcgcacatcac

SEQ ID NO: 288831 - DNA, 75 bp, synthetic construct
  source 1..75: mol_type = other DNA
aaaccaatccccgacaatcgggaaaacatcactattcgtctggatgatcacattcagtctgttcagggtaaagag

SEQ ID NO: 288832 - DNA, 75 bp, synthetic construct
  source 1..75: mol_type = other DNA
gttcatcattaaatactttaagaaaggatctgcacacatcactttcaaaaggctggagctgattgacagaattaa

SEQ ID NO: 288833 - DNA, 75 bp, synthetic construct
  source 1..75: mol_type = other DNA
tcagcggcaaaccgatcccagacaaccgggaaaacatcaccattcatctggatgagcacatccagtctgttcagg

SEQ ID NO: 288834 - DNA, 75 bp, synthetic construct
  source 1..75: mol_type = other DNA
caaagaagggagatgatgaacctgaaaacatcctgaaaattgtcaaagaatggcggcgttcacaggggctaccct

SEQ ID NO: 288835 - DNA, 75 bp, synthetic construct
  source 1..75: mol_type = other DNA
aaatccttgttgatgaaaatatgccttatgcccgcgacttatttagccgtttgggtgaggtgaccgcggttcccg

SEQ ID NO: 288836 - DNA, 75 bp, synthetic construct
  source 1..75: mol_type = other DNA
tcgtcattgctgatgcttgccgaacgcgatggattttcactgcatgaccgtaccgtggggatcgtgggcgtcggt

SEQ ID NO: 288837 - DNA, 75 bp, synthetic construct
  source 1..75: mol_type = other DNA
taccgatgagtgatgcgggtaaacaactggctgaacgtgagcattaccgtttacgtcgcgatgcgcaagctctcg

SEQ ID NO: 288838 - DNA, 75 bp, synthetic construct
  source 1..75: mol_type = other DNA
aaaggtttatcagctattgtctggtgcgcactaccggacctcgccgctggatttacgccgcatgatggatgcacc

SEQ ID NO: 288839 - DNA, 75 bp, synthetic construct
  source 1..75: mol_type = other DNA
acgtgagcattaccgtttacgtcgcgatgtgcatgctctcacgcagtggaatggcgaaacgctccccgtcgatcc

SEQ ID NO: 288840 - DNA, 75 bp, synthetic construct
  source 1..75: mol_type = other DNA
ccgggaaaacatcacccttcgtctggatgatcacatccagtctgttcagggtaaagaggactatgaagatgagat

SEQ ID NO: 288841 - DNA, 75 bp, synthetic construct
  source 1..75: mol_type = other DNA
tctgctcaaccagtatccaccacattctggctgtacgaaaaagtacactgctgcaaatcgacacacttatccggc

SEQ ID NO: 288842 - DNA, 75 bp, synthetic construct
  source 1..75: mol_type = other DNA
ggctccgcgcatatcacgttcagaaaaccagaactggttgatcggctaaataacatcgttgcgaagcattatccg

SEQ ID NO: 288843 - DNA, 75 bp, synthetic construct
  source 1..75: mol_type = other DNA
aactggcagacgcggatgcgctgatggtgcgttcggtcacgaaagtgaatgaatctttgctggcaggaaaaccca

SEQ ID NO: 288844 - DNA, 75 bp, synthetic construct
  source 1..75: mol_type = other DNA
cttttccagaaacatcccagaataacggcaatacgggtggatctccattaccctcccgtgattgacaacggggat

SEQ ID NO: 288845 - DNA, 75 bp, synthetic construct
  source 1..75: mol_type = other DNA
gaataaggatgaggtgtttgagcgaggggtgatcaacgtcttcagagggttgagctggaattacaaaaccaactc

SEQ ID NO: 288846 - DNA, 75 bp, synthetic construct
  source 1..75: mol_type = other DNA
tgagcacatttgaacaactgcaccagaataacgatgatgtgtttgaccggggcgtgatcaacgtcttcagagggc

SEQ ID NO: 288847 - DNA, 75 bp, synthetic construct
  source 1..75: mol_type = other DNA
tttggcgagaaaggccatccggtacgcgcgacggtctcggatctggggccgctattgctggcgcggctattaaat

SEQ ID NO: 288848 - DNA, 75 bp, synthetic construct
  source 1..75: mol_type = other DNA
tcgcaaaacccgtctgatattccggataacgtgctcgggcagctcggtaatcgcgttcaacacgctttgcgtgct

SEQ ID NO: 288849 - DNA, 75 bp, synthetic construct
  source 1..75: mol_type = other DNA
gttcacggatggggccggtaacggaagatgagcgtaacggcctgattaatcactctccggtgtatggcaagtatg

SEQ ID NO: 288850 - DNA, 75 bp, synthetic construct
  source 1..75: mol_type = other DNA
cacattctggctgtacgaaagagtgcgctgctgcaaatcgacacacttatccggcaactggcagaaatctcagca

SEQ ID NO: 288851 - DNA, 75 bp, synthetic construct
  source 1..75: mol_type = other DNA
aaaccagaactggttgatcggctaaatgacatcattgcgaagtattatccagaaataatcccatacaatatctaa

SEQ ID NO: 288852 - DNA, 75 bp, synthetic construct
  source 1..75: mol_type = other DNA
tgtgttaacgaactgaagtatggtttgtcgagtaataatgaatatgacctgtttaaaaatagagaaacctcactg

SEQ ID NO: 288853 - DNA, 75 bp, synthetic construct
  source 1..75: mol_type = other DNA
tttttcaaagattgttaattttcaaccgcgttattccattaatagacatcttaaaaataactctacagtaattaa

SEQ ID NO: 288854 - DNA, 75 bp, synthetic construct
  source 1..75: mol_type = other DNA
ttggcagcatcaccgggtctcaatacactcatctcacaatatggttatgccgcgctggtgatcggtagcctggcg

SEQ ID NO: 288855 - DNA, 75 bp, synthetic construct
  source 1..75: mol_type = other DNA
aaaggttcgcggcaaaatctcaccgctccggcaacgatgatcgactggcgtcctgttgttcatgaaatgcgcctg

SEQ ID NO: 288856 - DNA, 75 bp, synthetic construct
  source 1..75: mol_type = other DNA
caggccagtaccgagcagcaaaataatccccccgcgaaagggaaagaggtggcggtggatgacggcattcttggt

SEQ ID NO: 288857 - DNA, 75 bp, synthetic construct
  source 1..75: mol_type = other DNA
actggcagagtcattgtcggaaatcggcgtgccggtgtttatggctgatgtgaaaggcgatctgaccggtatcgc

SEQ ID NO: 288858 - DNA, 75 bp, synthetic construct
  source 1..75: mol_type = other DNA
ccgggaaaacatcacgattcgtctggatggtcacatccagtccgttcagggtaaagagcgctatgaagacgagat

SEQ ID NO: 288859 - DNA, 75 bp, synthetic construct
  source 1..75: mol_type = other DNA
cgaaatctggcgtgacctggtgcaacgctcagggatgctgagtctgatggatgcgcaggcacgtgacacatggta

SEQ ID NO: 288860 - DNA, 75 bp, synthetic construct
  source 1..75: mol_type = other DNA
cacattctggctgtacgaaagagtacactgctgcaaatcgacacacttatccggcaactggcagaaatctcagca

SEQ ID NO: 288861 - DNA, 75 bp, synthetic construct
  source 1..75: mol_type = other DNA
cactggagtacgataatgtcccggaaatcagtgaagcaaacattctgaacacatttaaacaactgcaccagaata

SEQ ID NO: 288862 - DNA, 75 bp, synthetic construct
  source 1..75: mol_type = other DNA
caatcgggaaaacatcactattcgtctggatgatcacattcagtctgttcagggtaaagagagctatgaagatga

SEQ ID NO: 288863 - DNA, 75 bp, synthetic construct
  source 1..75: mol_type = other DNA
cgggcaacagactgaccgactcgtcgacctggaaagaatgctacatctgttcagcggcaaaccgatccccgacaa

SEQ ID NO: 288864 - DNA, 75 bp, synthetic construct
  source 1..75: mol_type = other DNA
tcactttcaaaaggctggaactgattgacagaattaacgatataatagccaggtactttccttctgtgctctcag

SEQ ID NO: 288865 - DNA, 75 bp, synthetic construct
  source 1..75: mol_type = other DNA
ctgacagaaagtattggaggtaaaactgctctggactgggccatgaaacaggattttcgctgtggctgctggctc

SEQ ID NO: 288866 - DNA, 75 bp, synthetic construct
  source 1..75: mol_type = other DNA
tcagcggcaaaccgatccccaacaaccgggaaaacatcacgattcgtctggatggtcacatccagtccgttcagg

SEQ ID NO: 288867 - DNA, 75 bp, synthetic construct
  source 1..75: mol_type = other DNA
atcgtcaacaatctggtaaggtgggaccatagatttcatcttatcaccggacaacaggctgaccgggttgccgac

SEQ ID NO: 288868 - DNA, 75 bp, synthetic construct
  source 1..75: mol_type = other DNA
tgagcacatttaaacaactgcaccagaacaagaatgaggtatttgagcgaggggtcatcaacgtcttcaggggac

SEQ ID NO: 288869 - DNA, 75 bp, synthetic construct
  source 1..75: mol_type = other DNA
aggatgaggtgtttgagcgaggggtgatcaacgtcttcaggggactgagctggaattacaaaaccaattgcccct

SEQ ID NO: 288870 - DNA, 75 bp, synthetic construct
  source 1..75: mol_type = other DNA
aacatcaccattcatctggatgatcacatccagtctgttcagggtaaagaggactatgaagatgagatgttcagc

SEQ ID NO: 288871 - DNA, 75 bp, synthetic construct
  source 1..75: mol_type = other DNA
ggggtgctcaacgttttcagaggactgagctggaattacaaaaccaattcaccctgcaaatttggcagtaaaatt

SEQ ID NO: 288872 - DNA, 75 bp, synthetic construct
  source 1..75: mol_type = other DNA
tgcagtagcggtgcagaagaatattcgtgatgccggaataaacccgccaaaagaaacacaggttacccaggaaga

SEQ ID NO: 288873 - DNA, 75 bp, synthetic construct
  source 1..75: mol_type = other DNA
catgacaccagaccaacaacgctcatttcttgagattgggcgattctatactcagccaaaaccaggaaaaatcgc

SEQ ID NO: 288874 - DNA, 75 bp, synthetic construct
  source 1..75: mol_type = other DNA
cccgcccgctacctgtacgcgagcgtattctggcggggccgctaggtcgtgcactgttgttcaaaatggtcggca

SEQ ID NO: 288875 - DNA, 75 bp, synthetic construct
  source 1..75: mol_type = other DNA
ttggatgtgtagtttttggtgaaccacactacccggaaatctggctgcgtatagaccagggcagcgccccgtctg

SEQ ID NO: 288876 - DNA, 75 bp, synthetic construct
  source 1..75: mol_type = other DNA
atgatcaagattggcgttatcgccgatgattttaccggcgcgacggatatcgccagttttctggtggaaaacggt

SEQ ID NO: 288877 - DNA, 75 bp, synthetic construct
  source 1..75: mol_type = other DNA
tggaatgtaattgaagagagaggggggagagaatatacaatccataatcataatggtgataagataagtttttta

SEQ ID NO: 288878 - DNA, 75 bp, synthetic construct
  source 1..75: mol_type = other DNA
agtatggttctcgttttaccccttgcgagcgtttagtagagatgagcgagcgaggggaaagtttttggaaaacaa

SEQ ID NO: 288879 - DNA, 75 bp, synthetic construct
  source 1..75: mol_type = other DNA
gcaaaacaggcgttaaagctggggctggtggatgacgtcgttccgcaatccattttactggaagccgctgtagag

SEQ ID NO: 288880 - DNA, 75 bp, synthetic construct
  source 1..75: mol_type = other DNA
cgatcgtttagttgagatgagcgagcgtggggaaagttttggaaaacaactgcaactgacctgcaataagaaggt

SEQ ID NO: 288881 - DNA, 75 bp, synthetic construct
  source 1..75: mol_type = other DNA
ggcagaaaaaatggccggggtttctatctttatggcccaaaagggcgtaaaagcaaaaaacaggtcgatcccgcc

SEQ ID NO: 288882 - DNA, 75 bp, synthetic construct
  source 1..75: mol_type = other DNA
cggagcagacatcaacatgatcggcaactgcaaaacggcgcaagaagcggaagagctggcgcggcaggggcaaca

SEQ ID NO: 288883 - DNA, 75 bp, synthetic construct
  source 1..75: mol_type = other DNA
tatcggcctgcatttctttagtccggtcgaaaaaatgccgctggtggaaattattcctcatgtcggtacatcggc

SEQ ID NO: 288884 - DNA, 75 bp, synthetic construct
  source 1..75: mol_type = other DNA
agggaaaacccaccagttaccgcatgttattcaaactgggcaacaagtggggatgttaacgtttcagcagagtta

SEQ ID NO: 288885 - DNA, 75 bp, synthetic construct
  source 1..75: mol_type = other DNA
atgagtaccgtttatcaccgtccggctgacccttcaggcgatgacagttacgtgcgcccgttgtttgccgatcgt

SEQ ID NO: 288886 - DNA, 75 bp, synthetic construct
  source 1..75: mol_type = other DNA
tggataacacattatatgattgggtttcattctatgctcagtcatttactgcaatgctagatgtattagtcaata

SEQ ID NO: 288887 - DNA, 75 bp, synthetic construct
  source 1..75: mol_type = other DNA
ccttacaatcgccgtgaagatgcgaaatatcgcaaccagcagggcgcggtagccagccgaatcgataaagactaa

SEQ ID NO: 288888 - DNA, 75 bp, synthetic construct
  source 1..75: mol_type = other DNA
tgaaaacaaccaaccagatccacggtttcctgctggaatttggaatcagcctgccgacaggggatgccgtaataa

SEQ ID NO: 288889 - DNA, 75 bp, synthetic construct
  source 1..75: mol_type = other DNA
cttgttcagtgcgcccgctcgttcatgatgcggctggagcatcaacagggcagactcgctgaatgggttcgaaaa

SEQ ID NO: 288890 - DNA, 75 bp, synthetic construct
  source 1..75: mol_type = other DNA
tcgatctcggtaaacatttttttcatattcattgtcaggataaatctggcaatgcgcttttgcgtaagaagttta

SEQ ID NO: 288891 - DNA, 75 bp, synthetic construct
  source 1..75: mol_type = other DNA
gcccaactgcgattgccaccattttcaatgccgatatgggtaaaaccctgctgtacgggactattctggcaatcc

SEQ ID NO: 288892 - DNA, 75 bp, synthetic construct
  source 1..75: mol_type = other DNA
gtccgactgcgattgccaccattttcaatgccgatatgggtaaaaccctgctgtacggtactattctggcaatcc

SEQ ID NO: 288893 - DNA, 75 bp, synthetic construct
  source 1..75: mol_type = other DNA
ttttgctgtgtcgctggcggaaaaccagcgattgcgcggcagtgcgttcgcacaacggcaaggtatttctctggc

SEQ ID NO: 288894 - DNA, 75 bp, synthetic construct
  source 1..75: mol_type = other DNA
atgcgtctgtgtgaccgagatattgaagcctggcttgatgaaggccgtttgtcgatcaacccacgtccgccagtg

SEQ ID NO: 288895 - DNA, 75 bp, synthetic construct
  source 1..75: mol_type = other DNA
agcgcgacttactacctgcgtgccagcggagacagcatggccgacggcagtctgtacaatggcgatctgctggtt

SEQ ID NO: 288896 - DNA, 75 bp, synthetic construct
  source 1..75: mol_type = other DNA
gatccgcttcaaaatgaacggattcatcgctctcgtcctcgtggcgcttgctgttggattaatgcagggaatgcc

SEQ ID NO: 288897 - DNA, 75 bp, synthetic construct
  source 1..75: mol_type = other DNA
ctggcgaagcaggagcgtacagtttctcggactctcccgattcgtgaacgagtgatggccgggccattaggtcgt

SEQ ID NO: 288898 - DNA, 75 bp, synthetic construct
  source 1..75: mol_type = other DNA
gaggtgagcctctgcacaactcattaaaagttgcgcaaaacagaccatttttaagaggggcagttcacagcatta

SEQ ID NO: 288899 - DNA, 75 bp, synthetic construct
  source 1..75: mol_type = other DNA
gcgatgcaggcgcgtcgttcgattggttctcttgcaaaaccagcgacttatctaacggccttaagccagccgaaa

SEQ ID NO: 288900 - DNA, 75 bp, synthetic construct
  source 1..75: mol_type = other DNA
gtgataacaggtgtctggaaatataggggcaaatccaaacaggataaaaccgtagagtgcgattgctgtgaacaa

SEQ ID NO: 288901 - DNA, 75 bp, synthetic construct
  source 1..75: mol_type = other DNA
aatactatttcgcgggcatattatgcgctttaccatgaaataaaagagaatctgaccagtcttcctgcttatacg

SEQ ID NO: 288902 - DNA, 75 bp, synthetic construct
  source 1..75: mol_type = other DNA
cgaaagtaacgaggcagctatgaaagatcatatcacacacccgcaagggcggaagtcctacatctggcgttttct

SEQ ID NO: 288903 - DNA, 75 bp, synthetic construct
  source 1..75: mol_type = other DNA
gacattgtcaactcctgtggtctagtctgtagtggagttgacaatgtactacattgcatgacttttagtaaagca

SEQ ID NO: 288904 - DNA, 75 bp, synthetic construct
  source 1..75: mol_type = other DNA
atgcagccacatgaaacatttaccggctcataccagcccggtgacgtggaatttctgctaaagccggttgtcatt

SEQ ID NO: 288905 - DNA, 75 bp, synthetic construct
  source 1..75: mol_type = other DNA
agaaaggtatccaggtgacggaagccggggatacgctcggtcagtatcgtgcggttaccattatcaaaaaggtac

SEQ ID NO: 288906 - DNA, 75 bp, synthetic construct
  source 1..75: mol_type = other DNA
tttaacattaatgatttctacaagattgtatattcgtaaaaaatttgcacacagagcagttttcactcaccaaca

SEQ ID NO: 288907 - DNA, 75 bp, synthetic construct
  source 1..75: mol_type = other DNA
ggactcacctgtgcatgatgccaacgctggaaacagaagatgtctttgacgtggttcagatgcgcgagctggcta

SEQ ID NO: 288908 - DNA, 75 bp, synthetic construct
  source 1..75: mol_type = other DNA
cgtcaatcgtattaaacccggtattgctgaagcaacccgggctgtattacgtcgggtaccggaccatgtatttgt

SEQ ID NO: 288909 - DNA, 75 bp, synthetic construct
  source 1..75: mol_type = other DNA
tcctggccgatccctgtggctgctcctggcttgcagccagtgatgatgactggctcattccttttggcatcatgg

SEQ ID NO: 288910 - DNA, 75 bp, synthetic construct
  source 1..75: mol_type = other DNA
ccagcgttaaccctcagcagtttatgggactgtcctcccgctattccagcctgtctgcgggtaatgctcagaaca

SEQ ID NO: 288911 - DNA, 75 bp, synthetic construct
  source 1..75: mol_type = other DNA
atttcggacaataaaaatatgctgatttactttctctttgatctcttcaaatgtaagtcgcattcaagtttatct

SEQ ID NO: 288912 - DNA, 75 bp, synthetic construct
  source 1..75: mol_type = other DNA
atgtctggaaatataggggcaaatccaaaggcagtttataccgtactggcgctgaatctggaaggcaaaaaagaa

SEQ ID NO: 288913 - DNA, 75 bp, synthetic construct
  source 1..75: mol_type = other DNA
ttgcggcgttgctggctgcaggactcattcgcggtgggcaagtttttctgcctgggtgctggatccactggcaaa

SEQ ID NO: 288914 - DNA, 75 bp, synthetic construct
  source 1..75: mol_type = other DNA
gttttacgtcaatcgcatcttagcgccttacatcaatgaagctatccgcatgttgaccgaaggcgagcgtattga

SEQ ID NO: 288915 - DNA, 75 bp, synthetic construct
  source 1..75: mol_type = other DNA
atttatccgctgattggcgcgcaagggcaggggcgactctccgcaccgcaggttgctgaacggtgtgtgatgatg

SEQ ID NO: 288916 - DNA, 75 bp, synthetic construct
  source 1..75: mol_type = other DNA
caagatgttaagtgaagttaatttttgtaatttcaactcatttatttctgatatttttgaggacgtaagttatgc

SEQ ID NO: 288917 - DNA, 75 bp, synthetic construct
  source 1..75: mol_type = other DNA
atggcaacaaagaaaacggataacacgccacaaaacgcgcttaaacaaaccacgcaaatgcgtatttgggtcatc

SEQ ID NO: 288918 - DNA, 75 bp, synthetic construct
  source 1..75: mol_type = other DNA
tccggatggagcaggaagagaaagctaataacccagcttattattttaatcacgggaattaccttatttaaggtc

SEQ ID NO: 288919 - DNA, 75 bp, synthetic construct
  source 1..75: mol_type = other DNA
ccattacaaatgggacaacggacttgctctgcgtgactggcgttatgttgttcgcattgcaaacatcgatgtcag

SEQ ID NO: 288920 - DNA, 75 bp, synthetic construct
  source 1..75: mol_type = other DNA
atggccgacctgaagccagtgtatcgtgcggtgtcaaaagaagcagcggaaacggcgctggatgagctggaagcg

SEQ ID NO: 288921 - DNA, 75 bp, synthetic construct
  source 1..75: mol_type = other DNA
atggcaataaagaaaacggataacaccccacaaaacgtgctcaaacaaaccacacaaatgcgtatgtgggtcatc

SEQ ID NO: 288922 - DNA, 75 bp, synthetic construct
  source 1..75: mol_type = other DNA
tcgagttgccttatgtcctcaatattccagatggtgattatgattttctatatgaaaataaccatttacgcttaa

SEQ ID NO: 288923 - DNA, 75 bp, synthetic construct
  source 1..75: mol_type = other DNA
atggcaggcgctccaatcagcttgaatcgaaacgctcagatttatgagttgcacaaagagctggctatccgctca

SEQ ID NO: 288924 - DNA, 75 bp, synthetic construct
  source 1..75: mol_type = other DNA
caaccgccaaaggcggggggattattaagtctgaatggtttggtgaatattcggtactccctcccatgcaatggc

SEQ ID NO: 288925 - DNA, 75 bp, synthetic construct
  source 1..75: mol_type = other DNA
ggattcggtgacatccataactcaaaagatattttcattaaagccattggcccaaatgaagcactgaaaacagca

SEQ ID NO: 288926 - DNA, 75 bp, synthetic construct
  source 1..75: mol_type = other DNA
cccaaacgaaacattaaaaacagcagttacagcggaatggtttgaacgaaataagacagaattaggctattggta

SEQ ID NO: 288927 - DNA, 75 bp, synthetic construct
  source 1..75: mol_type = other DNA
atgaaaaaagttctgtatggcatttttgccatatctgcgcttgcggcgacttctgcgtgggctgcacctgtacag

SEQ ID NO: 288928 - DNA, 75 bp, synthetic construct
  source 1..75: mol_type = other DNA
atgggactcgatatttactttatggctcgtgataaccatcagaatggtgctgttgtggaaacacaggaacatcag

SEQ ID NO: 288929 - DNA, 75 bp, synthetic construct
  source 1..75: mol_type = other DNA
aatgacgtaaaagcgtgggtcagcgatacgctgaagacgtttgattttgaacgttgttcactggtgatgctggcg

SEQ ID NO: 288930 - DNA, 75 bp, synthetic construct
  source 1..75: mol_type = other DNA
tcaaaaatcgtatgcatatggacggggaagcgacgctcagtaatggtgcatcaatgaagcaattcattggggatg

SEQ ID NO: 288931 - DNA, 75 bp, synthetic construct
  source 1..75: mol_type = other DNA
cggaaggtgaagcctggttaaatcctaagggctttggtgtgcttgcatatacaaaaacagaggagatcaggaatg

SEQ ID NO: 288932 - DNA, 75 bp, synthetic construct
  source 1..75: mol_type = other DNA
gcaggccgaagtcggtgagattactcagccagaaccggccccggcacagcctgatgaaacggttagcgaagcaga

SEQ ID NO: 288933 - DNA, 75 bp, synthetic construct
  source 1..75: mol_type = other DNA
cagtatgctgacaccggggaactgccacaggctgtttccttatgtcacaggctcgtgtttacggggggaagatta

SEQ ID NO: 288934 - DNA, 75 bp, synthetic construct
  source 1..75: mol_type = other DNA
gaacaaaaagcgcaactaccaatctatattgacaagaacaatttgaaagagagtattttctctgttttgcacaat

SEQ ID NO: 288935 - DNA, 75 bp, synthetic construct
  source 1..75: mol_type = other DNA
tggataagccgctgcaaccgtggcgcaacggcggggggtttacccgacagctgcttgcctggcccgatgatgaaa

SEQ ID NO: 288936 - DNA, 75 bp, synthetic construct
  source 1..75: mol_type = other DNA
atattcctgccgcgccgatgtgcgagaaaaaccgggtttatgcgcacaaggtcaggaaagcactggaaaaaggtg

SEQ ID NO: 288937 - DNA, 75 bp, synthetic construct
  source 1..75: mol_type = other DNA
ggccggaagttccttatagcgacattgcagcaggtacagtgagtgaagccacgcgcaatgagataaaacgtcgcg

SEQ ID NO: 288938 - DNA, 75 bp, synthetic construct
  source 1..75: mol_type = other DNA
tccataactcagcaaatatagtgcagagttccccctgtcaaacggtttcttttgcaggaaaggaatatgagttaa

SEQ ID NO: 288939 - DNA, 75 bp, synthetic construct
  source 1..75: mol_type = other DNA
ttgttggcatgggaattatgagtggaactgtagctcatgcagctaacaataacgaagtgactttcttgggaacag

SEQ ID NO: 288940 - DNA, 75 bp, synthetic construct
  source 1..75: mol_type = other DNA
gttgcgggtgcaaagtgccgttgactggcttcctccgtcacttgcgcaagcgggcctgttccgctgtgtgaaggg

SEQ ID NO: 288941 - DNA, 75 bp, synthetic construct
  source 1..75: mol_type = other DNA
tcaatgacagtaccgataaacaagccaagaacagtaccgagcaacaggacagtaacagttttaatcaagcccgtt

SEQ ID NO: 288942 - DNA, 75 bp, synthetic construct
  source 1..75: mol_type = other DNA
tctcgtttacaaacttacaatgggaaaatttgctgcaatactatagagaaaaccaccagcagccaaatatagcag

SEQ ID NO: 288943 - DNA, 75 bp, synthetic construct
  source 1..75: mol_type = other DNA
tcatttgaagtgaaattagatgccactcatcaatatcaacacctgaataacttcatgatttcttttgacccagta

SEQ ID NO: 288944 - DNA, 75 bp, synthetic construct
  source 1..75: mol_type = other DNA
tgaaatgaaagcgaagctgcgacaacagatcggcgatgtacaacaggtcttcgaaaaactctctgcaaaaatcga

SEQ ID NO: 288945 - DNA, 75 bp, synthetic construct
  source 1..75: mol_type = other DNA
cccaagtgaagcactgaaaacagcagttacagcggaatggtttgagcgtcacaagattgaattaggttattgggg

SEQ ID NO: 288946 - DNA, 75 bp, synthetic construct
  source 1..75: mol_type = other DNA
tctatcttgagggagcatatctgaacaatgataatatcgtgaatcaagccaataacagtaccgagaaacaatcca

SEQ ID NO: 288947 - DNA, 75 bp, synthetic construct
  source 1..75: mol_type = other DNA
ggcagcggtagaaggccagaaggcagatctggagcagaaaattaacgcggttgcttcggaagcggattctcttta

SEQ ID NO: 288948 - DNA, 75 bp, synthetic construct
  source 1..75: mol_type = other DNA
gttaatggcatcaacctatccggcaaacgttgcgcaagcagtgcaatggtcgcacgataatccacttaaacaagg

SEQ ID NO: 288949 - DNA, 75 bp, synthetic construct
  source 1..75: mol_type = other DNA
agaggcagcgcgtgagcgtattcagtccgcctctcctgagcagcgccaggcagtccgcgagaaaatgcagactaa

SEQ ID NO: 288950 - DNA, 75 bp, synthetic construct
  source 1..75: mol_type = other DNA
accatcatcatcatgacgatgatgattatcatcaccacgatggcggtcatcgtgacggtaatggctggcaacaca

SEQ ID NO: 288951 - DNA, 75 bp, synthetic construct
  source 1..75: mol_type = other DNA
atggaagcggtggatcgcgccaacggtcaggtcttcgcccagacggtcgcggcggatggatcgccgggttactgg

SEQ ID NO: 288952 - DNA, 75 bp, synthetic construct
  source 1..75: mol_type = other DNA
aagcgcaccgtcaacgctgggcatgaaaccaacgcgctggccgtcgccaacaagcaggtggatgttgccaccaac

SEQ ID NO: 288953 - DNA, 75 bp, synthetic construct
  source 1..75: mol_type = other DNA
agctttgtgcgcggtttcggctacagcatgggcgttgctactacgtacgcacttttcagcagcatcgactgggat

SEQ ID NO: 288954 - DNA, 75 bp, synthetic construct
  source 1..75: mol_type = other DNA
gccaaactggggccgtatgagttcatctgtacgggtcgtccggacgaaggcatcccggcggtttgcttcaaactg

SEQ ID NO: 288955 - DNA, 75 bp, synthetic construct
  source 1..75: mol_type = other DNA
gcggtccggtgcaaatctgctggcataaattcgcccgctactgggatgtggagctgcgtgagatccctatgcgcc

SEQ ID NO: 288956 - DNA, 75 bp, synthetic construct
  source 1..75: mol_type = other DNA
tattggtccgataaccgccagcgtactgtcatcgcagctgggagacggtaaacaatatagctgcagtcgggactt

SEQ ID NO: 288957 - DNA, 75 bp, synthetic construct
  source 1..75: mol_type = other DNA
agctttgtgcgcggtttcggctacagcatgggcgtcgccactacatacgcgttattcagcagcatcgactgggat

SEQ ID NO: 288958 - DNA, 75 bp, synthetic construct
  source 1..75: mol_type = other DNA
atggataagaagcaagtaacggatttaaggtcggaactactcgattcacgttttggggctaagtccatttcgact

SEQ ID NO: 288959 - DNA, 75 bp, synthetic construct
  source 1..75: mol_type = other DNA
atggataagaagcaagtaacggatttaaggtcggaactactcgattcacgttttggagctaagtcgatttcaact

SEQ ID NO: 288960 - DNA, 75 bp, synthetic construct
  source 1..75: mol_type = other DNA
cttctttgccccggactacgcgggcattatccagggaatgcgcttcaacaaagtggatatcgcctggtacggcaa

SEQ ID NO: 288961 - DNA, 75 bp, synthetic construct
  source 1..75: mol_type = other DNA
tgttttttcaatgccaaagtgaataatgtttctcttaagaaagcatatctttacaatgataatatcgataaaaaa

SEQ ID NO: 288962 - DNA, 75 bp, synthetic construct
  source 1..75: mol_type = other DNA
aaaatacctgaaatacctggagcacctaaaatacctgcaacacctcgaatacctggtacacctaaagtaattctt

SEQ ID NO: 288963 - DNA, 75 bp, synthetic construct
  source 1..75: mol_type = other DNA
cgactagcagcttgtcgattaaatattccagtagtatttaccgctcacggctgggcatttgcagagggtattagt

SEQ ID NO: 288964 - DNA, 75 bp, synthetic construct
  source 1..75: mol_type = other DNA
gccactcatcaatatcaacacctgaataacttcatgatttcttttgacccagtagaaaatcaattaaccatacgg

SEQ ID NO: 288965 - DNA, 75 bp, synthetic construct
  source 1..75: mol_type = other DNA
atatatttacaatgataatatcgataaaaaagccaatgacagtaccgagaaacaacccagtgacagtatcgagaa

SEQ ID NO: 288966 - DNA, 75 bp, synthetic construct
  source 1..75: mol_type = other DNA
agaaagcatatatttacaatgataatatcgataaaaaagccaatgacagtaccgataaacaagccagtgacagta

SEQ ID NO: 288967 - DNA, 75 bp, synthetic construct
  source 1..75: mol_type = other DNA
ttggctacaatgaaagatgttgccgcctggcgggcgtttctacctcaaagttctcacgttatcaataaagatcgc

SEQ ID NO: 288968 - DNA, 75 bp, synthetic construct
  source 1..75: mol_type = other DNA
aaaccaccgccattcaggcgcaactggatgatctggaccgcctgaacaacgcgttaagcgcaatgagttcggtga

SEQ ID NO: 288969 - DNA, 75 bp, synthetic construct
  source 1..75: mol_type = other DNA
aacaccgaaaacctcgacaagctgaaaacctccgcgccggagaagctcaaagaactgaaggtgatctggaaatcg

SEQ ID NO: 288970 - DNA, 75 bp, synthetic construct
  source 1..75: mol_type = other DNA
taaagattatgattggtctcttagcttggtcggtaaaggaccattaatagaccactataaaaaatatgcaattga

SEQ ID NO: 288971 - DNA, 75 bp, synthetic construct
  source 1..75: mol_type = other DNA
tctaaagctgcggttataacattacttatttatgtaatgtggtattttatttttggtgtaaaaaatataagtgat

SEQ ID NO: 288972 - DNA, 75 bp, synthetic construct
  source 1..75: mol_type = other DNA
atgagaaatagaatacttaccttgatgcaagccagtgcgatttttatgtttcttacaaaattgccgatgactact

SEQ ID NO: 288973 - DNA, 75 bp, synthetic construct
  source 1..75: mol_type = other DNA
cgatgcaccgtcaaactggcagtacagcgcaggcggtatcgtggtgctgatctctgcactgttggtactggtgct

SEQ ID NO: 288974 - DNA, 75 bp, synthetic construct
  source 1..75: mol_type = other DNA
agatgattaccggctgttatctgccaacctggtgtcagcttgatcttgatgatggacgcacagtaaacgccattg

SEQ ID NO: 288975 - DNA, 75 bp, synthetic construct
  source 1..75: mol_type = other DNA
gaaatcctggcgtcgcttgatgaactgatagggcgctgggcgaaagagtgcgaagcgggtgaaggcttcggcgac

SEQ ID NO: 288976 - DNA, 75 bp, synthetic construct
  source 1..75: mol_type = other DNA
ctatccctgcgtgggcggcctctatgctgtgctccgtctgatcaaggatgacagtctgcaaatcccgaccttcag

SEQ ID NO: 288977 - DNA, 75 bp, synthetic construct
  source 1..75: mol_type = other DNA
actctctctggtgccgttccacctctggacgccagacgtataccagggcgcgcctgcgccggtttccactttcct

SEQ ID NO: 288978 - DNA, 75 bp, synthetic construct
  source 1..75: mol_type = other DNA
cgatgcaccatcaaactggcagtacagcgcgggcggtatcgtggtgctgatctctgcactgttggtactggtgct

SEQ ID NO: 288979 - DNA, 75 bp, synthetic construct
  source 1..75: mol_type = other DNA
tttatctaaaacttagcgaggtgggaccattcaagcatataaacaaaatatgctataatagggtgttgcatggaa

SEQ ID NO: 288980 - DNA, 75 bp, synthetic construct
  source 1..75: mol_type = other DNA
atggcgatcatccgcgagtacgttttattacgcaagaaaataaaggaattggtgctgcctccaatgctgcagtaa

SEQ ID NO: 288981 - DNA, 75 bp, synthetic construct
  source 1..75: mol_type = other DNA
tggcgaactgctgctgctattgcgcggcgtgccggaagccaatgctaaagcgcatcgtggcgtgtggaacaaact

SEQ ID NO: 288982 - DNA, 75 bp, synthetic construct
  source 1..75: mol_type = other DNA
atttcgctaatgaagcccggctcgctgctgattaatgcttcgcgcggtactgtggtggatattccagcgctgtgt

SEQ ID NO: 288983 - DNA, 75 bp, synthetic construct
  source 1..75: mol_type = other DNA
gtaagcaaacccccatgcgcgggcatccggtttttatcgctcaacacgccacttacaaaatcaacttaattgacg

SEQ ID NO: 288984 - DNA, 75 bp, synthetic construct
  source 1..75: mol_type = other DNA
ctgctgagccagcgtctggttcagctgatatgtccgcactgccgtcgcccctggcatgaggtggccaccggacgc

SEQ ID NO: 288985 - DNA, 75 bp, synthetic construct
  source 1..75: mol_type = other DNA
aaaatttctgaacatctgctgcctcgtacccgcgcgtatgcggagatctggctcgatcaggaaaaagtcgccact

SEQ ID NO: 288986 - DNA, 75 bp, synthetic construct
  source 1..75: mol_type = other DNA
ctgaaactggccggtctgtttggtgcacgctattcccactacccctgcgtgggtggtctctatgccgtactccgc

SEQ ID NO: 288987 - DNA, 75 bp, synthetic construct
  source 1..75: mol_type = other DNA
ctgaagatattcgtgatttcgtcgcaattcagcatgacgctgacggaaaaatcagggtgaaagtcgtcgaggcga

SEQ ID NO: 288988 - DNA, 75 bp, synthetic construct
  source 1..75: mol_type = other DNA
cggctttaaaggcgacaactttctgctgatccgtttccacggtatgtatcagcaggatgaccgcgatatccgcgc

SEQ ID NO: 288989 - DNA, 75 bp, synthetic construct
  source 1..75: mol_type = other DNA
tatctgccacttgagcatacgctggcagtggcggaagctgtggttacgactcagcgtgactggggtaatcgtact

SEQ ID NO: 288990 - DNA, 75 bp, synthetic construct
  source 1..75: mol_type = other DNA
cctggcgtcgcttgatgaactgatagggcgctgggcgaaagagcgcgaagtgggtgaaggcttcggcgactttac

SEQ ID NO: 288991 - DNA, 75 bp, synthetic construct
  source 1..75: mol_type = other DNA
tatctgccactggagcatacgctggcggtggcggaagcggtcattaccactcagcgtgactggggtaatcgtact

SEQ ID NO: 288992 - DNA, 75 bp, synthetic construct
  source 1..75: mol_type = other DNA
gcgaacggttattgcagaagtcatctccccggatgctcgttttttccagttgtatcgggaaaaaggtcgtattga

SEQ ID NO: 288993 - DNA, 75 bp, synthetic construct
  source 1..75: mol_type = other DNA
ttaacatcctcgagcgcctggaaatggaaggcgttcaggccagaatgattgccgacccgcaactttttatagggc

SEQ ID NO: 288994 - DNA, 75 bp, synthetic construct
  source 1..75: mol_type = other DNA
actacccctgcgtgggaggcctctatgctgtgctccgtctgatcaaggatgacagtcagcaaatcccgaccttca

SEQ ID NO: 288995 - DNA, 75 bp, synthetic construct
  source 1..75: mol_type = other DNA
cgtggtgtcacagggcgtacagtgattgcagaagtcatctctcctgacgccagattttttcagttataccgggaa

SEQ ID NO: 288996 - DNA, 75 bp, synthetic construct
  source 1..75: mol_type = other DNA
ccggagcaattcagacagccgttatggataccacccggggctgggtggactccatcaagtcagcactgcgtcttg

SEQ ID NO: 288997 - DNA, 75 bp, synthetic construct
  source 1..75: mol_type = other DNA
ttttgagaaaacagataatttaagactctgtaatactccatttcgatattttagcggtggcaatgtagcatttgc

SEQ ID NO: 288998 - DNA, 75 bp, synthetic construct
  source 1..75: mol_type = other DNA
caccttaggcggagactttatctatcatgttgaggctattgatgtcgtccaggccgtaaatacgttacgagaagg

SEQ ID NO: 288999 - DNA, 75 bp, synthetic construct
  source 1..75: mol_type = other DNA
tatatgattttctggcgctggaagcctgtcgcagtttttgtcaggcagcaaaagaacgtaacctttcacaaccag

SEQ ID NO: 289000 - DNA, 75 bp, synthetic construct
  source 1..75: mol_type = other DNA
gacgacgaaaatgtccacaaattgatggatttatccattaacaaaaactggatcgacaaagaagaatatccgcaa

SEQ ID NO: 289001 - DNA, 75 bp, synthetic construct
  source 1..75: mol_type = other DNA
ggcgcacgcaacttgcctgtcaccaagaaaattaaggaggttccgcaagcggctaacgtccaggcaccgcgtgag

SEQ ID NO: 289002 - DNA, 75 bp, synthetic construct
  source 1..75: mol_type = other DNA
aaatttctttaaacaatccctgcctctactggcggctctactattaatgctaacgctggtgacatatatcccggc

SEQ ID NO: 289003 - DNA, 75 bp, synthetic construct
  source 1..75: mol_type = other DNA
tatatgggcagactggttaatcgtcatttggcagaacagggagggatagccggacacacaatattggtatcttca

SEQ ID NO: 289004 - DNA, 75 bp, synthetic construct
  source 1..75: mol_type = other DNA
ggaaggcattgaaagatgaggttattgctcgtatcgccgcgaaatacaatgcgactccggcacaagtgattctgg

SEQ ID NO: 289005 - DNA, 75 bp, synthetic construct
  source 1..75: mol_type = other DNA
aaccagattgaactctctccttatctgcaaaaccgtaaagtagtcgattgggctaaacagcacggcatccatatt

SEQ ID NO: 289006 - DNA, 75 bp, synthetic construct
  source 1..75: mol_type = other DNA
agataaaaaagcgatcgccgcactggattgcaacgaccgcctggttagcccggaaggtctggctcctgaatggga

SEQ ID NO: 289007 - DNA, 75 bp, synthetic construct
  source 1..75: mol_type = other DNA
caccgacatcgtggtgatgcgcattatgtgtcgtcgcggcttcgaaatggactttgctgaactgttgctggaaga

SEQ ID NO: 289008 - DNA, 75 bp, synthetic construct
  source 1..75: mol_type = other DNA
agtttatgcaggcgctgctggaagcgaaaaaacaaggtctgacgcgtgagatcggtatttccaacttcacgatcc

SEQ ID NO: 289009 - DNA, 75 bp, synthetic construct
  source 1..75: mol_type = other DNA
gtgtggatcactattgcaccgttcgtgacaagtctgaaagagagcctgcaaaaattgcgtaccgattatgttgat

SEQ ID NO: 289010 - DNA, 75 bp, synthetic construct
  source 1..75: mol_type = other DNA
cttttacttttttatcatgggagcctacttcccgtttttcccgatttggctacatgacatcggtgatgctgccaa

SEQ ID NO: 289011 - DNA, 75 bp, synthetic construct
  source 1..75: mol_type = other DNA
gctccctacgctttactggctgaactgcgggcacagggggtggagatggtgcgcgaacacccatcaatcaaactt

SEQ ID NO: 289012 - DNA, 75 bp, synthetic construct
  source 1..75: mol_type = other DNA
gaacggcctggttctgaagtttggttataaaggcgacaaaaccaaagtttctgcgggcaaactgaacactatcag

SEQ ID NO: 289013 - DNA, 75 bp, synthetic construct
  source 1..75: mol_type = other DNA
gtctggatcatcctgccagcgccggaatgtttgaaagcgcggattctaaatctttactggcagagtccctggcgg

SEQ ID NO: 289014 - DNA, 75 bp, synthetic construct
  source 1..75: mol_type = other DNA
atacatctataaaaaaaataggcgtgcagaaagaaaatcactttaaagtgataaatgaatctttggctcgtcaag

SEQ ID NO: 289015 - DNA, 75 bp, synthetic construct
  source 1..75: mol_type = other DNA
ggctccgaacccactatgggttcagtcatatatggaactattagcggtggacgataatgttgctctaattggccc

SEQ ID NO: 289016 - DNA, 75 bp, synthetic construct
  source 1..75: mol_type = other DNA
ttcacaaaaaaacaaaggaattggttcagcatctaatacagcagttagattgtgtcggggattctatataggtca

SEQ ID NO: 289017 - DNA, 75 bp, synthetic construct
  source 1..75: mol_type = other DNA
atgctttttagcttttttcgtaatttgtgccgtgttctgtaccgcgttcgcgtgacaggcgatacccaggcactg

SEQ ID NO: 289018 - DNA, 75 bp, synthetic construct
  source 1..75: mol_type = other DNA
agggctgactagcgccattacggcggctgaaataaaaaccatcttcacttcccgtcagtttctcgataaaggcaa

SEQ ID NO: 289019 - DNA, 75 bp, synthetic construct
  source 1..75: mol_type = other DNA
cgaaaacagcgccatgttgttgatgctgggcatttactcgctggcggtaatggtaggcatcccggtcgtgcccat

SEQ ID NO: 289020 - DNA, 75 bp, synthetic construct
  source 1..75: mol_type = other DNA
aggtaaaacagcagccggaagaagaggcgctgatcctgttcacctccggttcagaaggccatccgaaaggcgtgg

SEQ ID NO: 289021 - DNA, 75 bp, synthetic construct
  source 1..75: mol_type = other DNA
gtttgttgggcgtatactcgaaaaatacactgctgaaggggaaagaatcggcttaatgctgcctaacgcaggtat

SEQ ID NO: 289022 - DNA, 75 bp, synthetic construct
  source 1..75: mol_type = other DNA
cggagccgggaagaaatgtgtcgaagacgtcaactttaccccagactcctatcgcaaattgcttacgaaaacgct

SEQ ID NO: 289023 - DNA, 75 bp, synthetic construct
  source 1..75: mol_type = other DNA
ggaaacacgagtggaccatttaaagcaatcaatatgcttggagcccatgagcaaattcatatttatgagatatgg

SEQ ID NO: 289024 - DNA, 75 bp, synthetic construct
  source 1..75: mol_type = other DNA
gtaggaaatctgagagaacctttagactcgatctctgagcttaatgcttgcaaacagatatatgtttacgagacc

SEQ ID NO: 289025 - DNA, 75 bp, synthetic construct
  source 1..75: mol_type = other DNA
gtttccagtcgccatattcatctttcaacagcggattatttgcgtctttttcctgaacaaccgattagcgagaaa

SEQ ID NO: 289026 - DNA, 75 bp, synthetic construct
  source 1..75: mol_type = other DNA
aacgcgttgaccgactgctcggtaatgaatctcttcaccgcgatatcccactgattttcagtaatattattgcca

SEQ ID NO: 289027 - DNA, 75 bp, synthetic construct
  source 1..75: mol_type = other DNA
caaacagatatatgtttacgagacctggctctcgttaattaaatgccctgatgaaatgaaacttttggcgaagcg

SEQ ID NO: 289028 - DNA, 75 bp, synthetic construct
  source 1..75: mol_type = other DNA
tggttctcgctaattaaatgccctgtagaaatgaaaagtctttcaaagcggataatccaataccatattggtctg

SEQ ID NO: 289029 - DNA, 75 bp, synthetic construct
  source 1..75: mol_type = other DNA
gaactggcaaaccctaaactgcatggcatttttggcgatgccagctggaccaataaagaacgcctttctgatgag

SEQ ID NO: 289030 - DNA, 75 bp, synthetic construct
  source 1..75: mol_type = other DNA
caggaaaaaaacctgactaccgaagccatcgcgcgaatgaacctgttcctgcacggtcaggaggatttcgatatt

SEQ ID NO: 289031 - DNA, 75 bp, synthetic construct
  source 1..75: mol_type = other DNA
tttattaccaacagcatcatcaatgccatcggcctgaccacgcaaaacttcctgcaaatgagcttattcaccgat

SEQ ID NO: 289032 - DNA, 75 bp, synthetic construct
  source 1..75: mol_type = other DNA
ctgcgtaaatcacgtccggccgcgcataaagatcatgtattgatcatcaatgctgaagaaatctataccaaggga

SEQ ID NO: 289033 - DNA, 75 bp, synthetic construct
  source 1..75: mol_type = other DNA
ggggatacgatctgtggtcgaacgatccctatggccgtaagcaatatggcctggcgcctaaaacaaatggtgatt

SEQ ID NO: 289034 - DNA, 75 bp, synthetic construct
  source 1..75: mol_type = other DNA
tccctatggccgtaagcaatatggtctggcacctaaaacaaatggtgattttgcctgggtgcagcatatgttcgc

SEQ ID NO: 289035 - DNA, 75 bp, synthetic construct
  source 1..75: mol_type = other DNA
tatccatctcaggagcatcatgtgctccgcgccagcctgctctgcgatggacgctcgcttcccctgttaagctgg

SEQ ID NO: 289036 - DNA, 75 bp, synthetic construct
  source 1..75: mol_type = other DNA
accggaaactggcagaatacgctgaccgggcagctgaagccggaagggtctgcgaaagacagtacgatgaactga

SEQ ID NO: 289037 - DNA, 75 bp, synthetic construct
  source 1..75: mol_type = other DNA
gattgaagctatgggcgcaccgattatcgcatccctgctgtgcctgttgccgatgtatgccatccgtaaagcgcc

SEQ ID NO: 289038 - DNA, 75 bp, synthetic construct
  source 1..75: mol_type = other DNA
tccggcagtggcacagcttataaaacaggccacaggcgataaccgggaagcaaacctgatggctcacgcagtctg

SEQ ID NO: 289039 - DNA, 75 bp, synthetic construct
  source 1..75: mol_type = other DNA
atgtgacgtttatgggactttacggggtcacgtctccgttgccggcacactatatcagtgatattgcacagcagc

SEQ ID NO: 289040 - DNA, 75 bp, synthetic construct
  source 1..75: mol_type = other DNA
tcaactagcggcgcggttagcagcggaaggcgtgacacgctttattgtcgcaggcggtgagacctccggcgtagt

SEQ ID NO: 289041 - DNA, 75 bp, synthetic construct
  source 1..75: mol_type = other DNA
caagagtaaaaattggtaataacgttgatatcggagctaattgttgcatcattggattatcacgtaaaattgggg

SEQ ID NO: 289042 - DNA, 75 bp, synthetic construct
  source 1..75: mol_type = other DNA
tttgcggaaaaaacatctggtatagtaatgtattttcaggcgtttggatggcttataacaacttttgttaccgtt

SEQ ID NO: 289043 - DNA, 75 bp, synthetic construct
  source 1..75: mol_type = other DNA
taggcacaaaccaggttgatttaaatgctgcggcaaaacgcgggattccggtatttaacgcaccgttttcgaata

SEQ ID NO: 289044 - DNA, 75 bp, synthetic construct
  source 1..75: mol_type = other DNA
tgtagtcgatattccggcactgtgtgacgcgctggcgagcaaacaccttgctggtgcggcaattgacgtattccc

SEQ ID NO: 289045 - DNA, 75 bp, synthetic construct
  source 1..75: mol_type = other DNA
ggcggactgaatgcagggaatccggggcaggtactggctggcggtctgaatccggcagtggcacagcttataaaa

SEQ ID NO: 289046 - DNA, 75 bp, synthetic construct
  source 1..75: mol_type = other DNA
ctaatggtggcgggctgagtatcttcgccagcattaacggctccaaaggcagtgagaaaggcaacggcacgacct

SEQ ID NO: 289047 - DNA, 75 bp, synthetic construct
  source 1..75: mol_type = other DNA
acagcctcagtaccggcacgctgggctggtcggatatccataaccaggcagactataaagccagccataccggaa

SEQ ID NO: 289048 - DNA, 75 bp, synthetic construct
  source 1..75: mol_type = other DNA
aagttgttattgcaaccaggtcaattcgctgctgaacaggttgttacgctggtgggaccaaaagggaaattacac

SEQ ID NO: 289049 - DNA, 75 bp, synthetic construct
  source 1..75: mol_type = other DNA
gaatggcgcttgccaggttgttcaatgtgcctggcgatgaacaacgaccgcctgaatccgggcgaacgttgcgcc

SEQ ID NO: 289050 - DNA, 75 bp, synthetic construct
  source 1..75: mol_type = other DNA
tcgcctactggaaaaccctgcaaaccgacgaaggcgcaactttcgataccgttgtcactctgcaagcagaagaga

SEQ ID NO: 289051 - DNA, 75 bp, synthetic construct
  source 1..75: mol_type = other DNA
gccgccaggggcgcggcgggcgcacgcatctggtcagcccggcaatggctgccgccgctgcggtgaccggacatt

SEQ ID NO: 289052 - DNA, 75 bp, synthetic construct
  source 1..75: mol_type = other DNA
gctggtagtggcggcatggttgttatgttacggacactgtaaaaccgttgatgaagcgattagttatattcgagc

SEQ ID NO: 289053 - DNA, 75 bp, synthetic construct
  source 1..75: mol_type = other DNA
cacgtactggcaacgcaaaccctgaaacagggccgcgcaaagaccatgaaaattgaagtccagggcaaagccgca

SEQ ID NO: 289054 - DNA, 75 bp, synthetic construct
  source 1..75: mol_type = other DNA
atggctaagacgttatacgaaaaattgttcgacgctcacgttgtgtacgaagccgaaaacgaaaccccgctgtta

SEQ ID NO: 289055 - DNA, 75 bp, synthetic construct
  source 1..75: mol_type = other DNA
tgatagggcgctgggcgaaagagcgcgaagcgggtgaaggcttcggtgactttacggtgcgtgcgggcatcattc

SEQ ID NO: 289056 - DNA, 75 bp, synthetic construct
  source 1..75: mol_type = other DNA
ggcgatggcggaagccgaacgtttcctgccctcgtttatcgacaacatcgataacttaatggcgaaacatggcat

SEQ ID NO: 289057 - DNA, 75 bp, synthetic construct
  source 1..75: mol_type = other DNA
gccgtctgcctggtggagtgatcaccaccagacaatggcaggcgattgataaatttgctgaagacaacacgattt

SEQ ID NO: 289058 - DNA, 75 bp, synthetic construct
  source 1..75: mol_type = other DNA
catctggtcagcccggcaatggctgccgccgcggctgtgaccggacatttcgccgacattcgcaacattaaataa

SEQ ID NO: 289059 - DNA, 75 bp, synthetic construct
  source 1..75: mol_type = other DNA
ggcttcggcgactttacggtgcgtgcaggcatcattcgcccggtgctcgatccggcgcgcgatttgtgggattaa

SEQ ID NO: 289060 - DNA, 75 bp, synthetic construct
  source 1..75: mol_type = other DNA
caacgcatcttcaagatgtcgcccaccaagttgatgagctaaaaaaagccgggtgtgagcaaatttatcaggaac

SEQ ID NO: 289061 - DNA, 75 bp, synthetic construct
  source 1..75: mol_type = other DNA
ggatatcactgcactgctatttaacaaagaggttgagaaaaacttagcggaatcgggctttggcaccggcggtaa

SEQ ID NO: 289062 - DNA, 75 bp, synthetic construct
  source 1..75: mol_type = other DNA
tgatgaagcgattagttatattcgagccagacgctcgcggattgtgcttaaggaagagcacaaagcgatgctgaa

SEQ ID NO: 289063 - DNA, 75 bp, synthetic construct
  source 1..75: mol_type = other DNA
cgacgctgacgacctggcagcatcattttattgatgtcatcacagggctggcggtaggtatgttaattgactgga

SEQ ID NO: 289064 - DNA, 75 bp, synthetic construct
  source 1..75: mol_type = other DNA
acaacgtcaaataaagttaccaatagtttaatgaataatggtcgtggaccagtcaagtcagaaattataggagat

SEQ ID NO: 289065 - DNA, 75 bp, synthetic construct
  source 1..75: mol_type = other DNA
tgatattgattacggcccggcagttttacatcaaaacgatccgggaatgctggtgaagccggttcttcctgcata

SEQ ID NO: 289066 - DNA, 75 bp, synthetic construct
  source 1..75: mol_type = other DNA
ttgttgctggccccgtttttcttctttacatatggatttcttaatcagttcaccgcgactcaggatcttaacaac

SEQ ID NO: 289067 - DNA, 75 bp, synthetic construct
  source 1..75: mol_type = other DNA
taccgatgttggatctggtggttccggaagagggggagctccgacaggccgtggcgatgctggaaacattacgcg

SEQ ID NO: 289068 - DNA, 75 bp, synthetic construct
  source 1..75: mol_type = other DNA
ctgtggcaggcgcaaatggccgcgcgcgtgtggcgcgacgacggggggccgcgtctggagagtgggtgcatgagt

SEQ ID NO: 289069 - DNA, 75 bp, synthetic construct
  source 1..75: mol_type = other DNA
ctgtggcaggtgcgagtggccgcgcgcgtgtggcgcgacgacgggggttccgcgtctggagagtgggtgcatgag

SEQ ID NO: 289070 - DNA, 75 bp, synthetic construct
  source 1..75: mol_type = other DNA
tgatagataaaggatatggttctgttacatcaggggtcgcaggagatgttgcgggggctatagtggaatcatcat

SEQ ID NO: 289071 - DNA, 75 bp, synthetic construct
  source 1..75: mol_type = other DNA
ggtaggtatgttgattgactggatggtacccgtcgaccgtcgttggaattatcagaaacctgatcaacgtcgaat

SEQ ID NO: 289072 - DNA, 75 bp, synthetic construct
  source 1..75: mol_type = other DNA
gatggcggtgctgattatggcgctgtcactcccgctgtggcgcattacggagccgacgcgaacagcgactatccc

SEQ ID NO: 289073 - DNA, 75 bp, synthetic construct
  source 1..75: mol_type = other DNA
gatgccgataaaagccgggcgctgctggcgcatttcaatgcgctggaaaacttacagacccgcactcaccgtcag

SEQ ID NO: 289074 - DNA, 75 bp, synthetic construct
  source 1..75: mol_type = other DNA
agcatcatgaactgcgtcagtgtatgtccgaagggactgaaccgacgcgcgccatcggccatatcaagtcgatgt

SEQ ID NO: 289075 - DNA, 75 bp, synthetic construct
  source 1..75: mol_type = other DNA
cacgcctggtatcgttatcccaacgatcaggtcgggcgtcatccattcgatggcattaccgacccgtggtacaac

SEQ ID NO: 289076 - DNA, 75 bp, synthetic construct
  source 1..75: mol_type = other DNA
gtcctcagctacggcgcattcccggatattgccaacgactttggtgagaaaagtctgctgatgcctggcggcgcg

SEQ ID NO: 289077 - DNA, 75 bp, synthetic construct
  source 1..75: mol_type = other DNA
tggtgcagtcaattatcacccgcacggcggacttcattaacaacgtgatgatccccgacgccttagccatcggtc

SEQ ID NO: 289078 - DNA, 75 bp, synthetic construct
  source 1..75: mol_type = other DNA
cgtacagtgcgagaatgatcccggcgacagcacctggcagcagtttactccggacgggccgcgcgcgtttctgcc

SEQ ID NO: 289079 - DNA, 75 bp, synthetic construct
  source 1..75: mol_type = other DNA
ttgcagtatgtgcagccagggcttgctctggtgggcgatgccgcgcataccatccatccgctggcggggcagggg

SEQ ID NO: 289080 - DNA, 75 bp, synthetic construct
  source 1..75: mol_type = other DNA
gtttccgctgatacgtcgccatgcgttgcagtatgtgcagccagggcttgctctggtgggcgatgccgcgcatac

SEQ ID NO: 289081 - DNA, 75 bp, synthetic construct
  source 1..75: mol_type = other DNA
aagcatttcccgtcacgtcttgggtatgtaacaccgcttgccgctggcgcttttccgctgacgcgccgccatgcg

SEQ ID NO: 289082 - DNA, 75 bp, synthetic construct
  source 1..75: mol_type = other DNA
gtgtggtatgactctccggcacgcattcgccagttgcagaatatgaatatggcgcagttacaggcggaaatcgcg

SEQ ID NO: 289083 - DNA, 75 bp, synthetic construct
  source 1..75: mol_type = other DNA
cgtctgggacgcggtacaggctatgcgttgccatccttaccgcagactggaaacgtgggagtgggaaacggcgca

SEQ ID NO: 289084 - DNA, 75 bp, synthetic construct
  source 1..75: mol_type = other DNA
tgcggcgtctgtaccggcgtacacgctctggcttcggtctatgccatcgaagatgctatcggcattaaagtgccg

SEQ ID NO: 289085 - DNA, 75 bp, synthetic construct
  source 1..75: mol_type = other DNA
agtggtcagccagattgaaggagagttggtgcgtcaacaggcggagctaaaacaactgcgcagctatatgaagga

SEQ ID NO: 289086 - DNA, 75 bp, synthetic construct
  source 1..75: mol_type = other DNA
gatgatgccagcgtattacctgatggtagtggcggtgattggtttgattaccggcgtgaccatgaaagagacggc

SEQ ID NO: 289087 - DNA, 75 bp, synthetic construct
  source 1..75: mol_type = other DNA
attgaccacgaaattgccgatttgcaggcgaaacgtacccgcctggtgcagcaacatccgcgaattgatgaataa

SEQ ID NO: 289088 - DNA, 75 bp, synthetic construct
  source 1..75: mol_type = other DNA
caggtgttccagcgttaaccgatgacaactatgcggtgatgaaggtggcgcgaatcggctgtgaatgcggcgcga

SEQ ID NO: 289089 - DNA, 75 bp, synthetic construct
  source 1..75: mol_type = other DNA
aacattgcgcgattcgcattaatccgaatcgtagtggtgaagagacggtgctgcggattttgcgtgagagtattg

SEQ ID NO: 289090 - DNA, 75 bp, synthetic construct
  source 1..75: mol_type = other DNA
actggcgcgatccgtgcggcactggcggctttgctcaaatcggggcagcgtcttctggtgcatgacgcgccggtt

SEQ ID NO: 289091 - DNA, 75 bp, synthetic construct
  source 1..75: mol_type = other DNA
atgagcactcagtacgaaactcaggggtacaccatcaataatgccggacgccgcctggtggttgacccgatcacg

SEQ ID NO: 289092 - DNA, 75 bp, synthetic construct
  source 1..75: mol_type = other DNA
cgaccatctggtgcacttctatcagctcgccgggatggactggatagatgtgttagatgcgctgaaagccgaccc

SEQ ID NO: 289093 - DNA, 75 bp, synthetic construct
  source 1..75: mol_type = other DNA
attatcgccattatgatcggtatgctgtttgttcagccggtgatgggcttgctgagtgaccgttttggccgtcgt

SEQ ID NO: 289094 - DNA, 75 bp, synthetic construct
  source 1..75: mol_type = other DNA
ggctctgggcagtctctcattggtgctgggtgtatgcgccttttctgctgtaggtgctgagcatcagactgcacg

SEQ ID NO: 289095 - DNA, 75 bp, synthetic construct
  source 1..75: mol_type = other DNA
cattcatccgctggcggggcagggcgtgaatcttggttatcgcgatgttgatgctctgattgacgttctggtgag

SEQ ID NO: 289096 - DNA, 75 bp, synthetic construct
  source 1..75: mol_type = other DNA
tctgccggctcagccaatatctacgcaggtaaaggacatgatgttgtttattatgataaaacagacaccggttat

SEQ ID NO: 289097 - DNA, 75 bp, synthetic construct
  source 1..75: mol_type = other DNA
tgatgcattagcctatggaagtcaggataatcttaatccattaattaatgaaatcagcaaaatcatttcagctgc

SEQ ID NO: 289098 - DNA, 75 bp, synthetic construct
  source 1..75: mol_type = other DNA
ctgggagtatggtatttgaattcaggaatcaatgatctcgatacaagtcgtttgcctgacggcagttatgattta

SEQ ID NO: 289099 - DNA, 75 bp, synthetic construct
  source 1..75: mol_type = other DNA
gtctggtaacgcgaagcccgcagaaaaaccgtctcgtcgtctcggcgatgccaaaccggcaggcgaacaaacaac

SEQ ID NO: 289100 - DNA, 75 bp, synthetic construct
  source 1..75: mol_type = other DNA
ccacgatatccgtcgcgtgttaacaaaactgccagcgaagcgccagaacctgttgttctccgcgaccttctctga

SEQ ID NO: 289101 - DNA, 75 bp, synthetic construct
  source 1..75: mol_type = other DNA
ctctatggcggtgatggcaatgataagttaattggggggacaggtaataattaccttaacggcggtgacggagat

SEQ ID NO: 289102 - DNA, 75 bp, synthetic construct
  source 1..75: mol_type = other DNA
atttatacctgtacctgccctgatgcaagccagccttactattgaagagaatacaaataaatctaaaaatattga

SEQ ID NO: 289103 - DNA, 75 bp, synthetic construct
  source 1..75: mol_type = other DNA
atggtgactatcatgaggtaggaatgcgttttaataaaaatagacataatgcagaaggtagactttcaggtcgta

SEQ ID NO: 289104 - DNA, 75 bp, synthetic construct
  source 1..75: mol_type = other DNA
aaaaacaatcaatagtttatactttagacatgatttagataagagatattattatcaatttggacgaatggatcg

SEQ ID NO: 289105 - DNA, 75 bp, synthetic construct
  source 1..75: mol_type = other DNA
cgatggcgtatgttttattgcgcccgctgctggatgacgtaccggacgatgaactatgcggggttgcacctggca

SEQ ID NO: 289106 - DNA, 75 bp, synthetic construct
  source 1..75: mol_type = other DNA
gagactccgtctggtggcactgcgacgtcatccattccgttgccccgttgaaaatcaacagggttggggcaacgt

SEQ ID NO: 289107 - DNA, 75 bp, synthetic construct
  source 1..75: mol_type = other DNA
atggcttctacttttaccagcgacacattgcctgccgatcacaaagcagctatccgtcagatgaagcacgcgctg

SEQ ID NO: 289108 - DNA, 75 bp, synthetic construct
  source 1..75: mol_type = other DNA
acaacgaaagtactgggtaatgttggaaaaggtatttctcaatatattatcgcacagcgcgctgcacaggggtta

SEQ ID NO: 289109 - DNA, 75 bp, synthetic construct
  source 1..75: mol_type = other DNA
ttataatattctgtcaggtggtactggtgatgataaactttatggtggtggtggtattgatcttctggatggagg

SEQ ID NO: 289110 - DNA, 75 bp, synthetic construct
  source 1..75: mol_type = other DNA
cattctgttgaagagctcattggcggaaaacatgatgatgaattcaaaggcggtaagtttaatgatatattccat

SEQ ID NO: 289111 - DNA, 75 bp, synthetic construct
  source 1..75: mol_type = other DNA
catagacctttcaacaggtaatgtatcaagtgttttgacatttataacaccaacatttaccccaggagaagaagt

SEQ ID NO: 289112 - DNA, 75 bp, synthetic construct
  source 1..75: mol_type = other DNA
cagcacggattttcggtaacggtgatcgagcacgcagaacctgcaccgtttgtcgctgatagccaaccggacgtg

SEQ ID NO: 289113 - DNA, 75 bp, synthetic construct
  source 1..75: mol_type = other DNA
taatctcgggttaatggcggcggagcgtgctggcgtattgaaacggcaggcgctgaaatatgcgttagggttgta

SEQ ID NO: 289114 - DNA, 75 bp, synthetic construct
  source 1..75: mol_type = other DNA
attgtggcaggcgctggaagcgcatccgaaagtaacgttacgtgtgccaggctcgctgattgcattacatcgaga

SEQ ID NO: 289115 - DNA, 75 bp, synthetic construct
  source 1..75: mol_type = other DNA
caggagctattgatgcatcattaacaacgataagcactgtactggcttcagtatcttcaggtattagtgctgctg

SEQ ID NO: 289116 - DNA, 75 bp, synthetic construct
  source 1..75: mol_type = other DNA
ctgaaaggtggatatggtaatgatatttatcgttatctttcaggatatggccatcatattattgacgatgatggg

SEQ ID NO: 289117 - DNA, 75 bp, synthetic construct
  source 1..75: mol_type = other DNA
ggaggcagtccggaaaatacgagtatattaccgaactattagtcaagggggttgataaatggacggtgaaggggg

SEQ ID NO: 289118 - DNA, 75 bp, synthetic construct
  source 1..75: mol_type = other DNA
aagtgtttgatcctcaaaaagggaccatagacctttcaacaggtaatgtatcaagtgttttgacatttataacac

SEQ ID NO: 289119 - DNA, 75 bp, synthetic construct
  source 1..75: mol_type = other DNA
aaatgttggtaaagctgtttcgcaatatattctggctcagagaatggcacaggggttatcgacaacagctgcaag

SEQ ID NO: 289120 - DNA, 75 bp, synthetic construct
  source 1..75: mol_type = other DNA
taaagttcattacaccattgttaactccaggtgaggaaatacgtgacagaagacaatccggaaaatacgagtata

SEQ ID NO: 289121 - DNA, 75 bp, synthetic construct
  source 1..75: mol_type = other DNA
taccgcgcttcgtgcgctgctgttaagccgcaaaaatccgtttggcgatatcaaatcggatggcacggtagaacg

SEQ ID NO: 289122 - DNA, 75 bp, synthetic construct
  source 1..75: mol_type = other DNA
agggtaaaatgtactgtgtagggcactgttgcaaagttagcgatgaggcagccttttgtcttattcaaaggcctt

SEQ ID NO: 289123 - DNA, 75 bp, synthetic construct
  source 1..75: mol_type = other DNA
gcatatgaacccgaatctgtgggtaaagatccgacacttccagaatattgccggtggatgaaaaattggatagag

SEQ ID NO: 289124 - DNA, 75 bp, synthetic construct
  source 1..75: mol_type = other DNA
cggaaagcacagacagctatgcaagacgcttcacaaaacgtcagggaattgctgtgggagacgattatattgcct

SEQ ID NO: 289125 - DNA, 75 bp, synthetic construct
  source 1..75: mol_type = other DNA
taaacaatcagcagggggcaatccgtgatttacagcaggaactccttaatgttcttggtagtgtacatattcaac

SEQ ID NO: 289126 - DNA, 75 bp, synthetic construct
  source 1..75: mol_type = other DNA
aggatgcaaatgccacaggaggagaaaagagatggcgcatagattcatcaggaaatctccgcccttatacagata

SEQ ID NO: 289127 - DNA, 75 bp, synthetic construct
  source 1..75: mol_type = other DNA
ataaccagcttctttcccttttacttgtggcacttccggtaatcggaggtgggaattatgaaatgcacaacgatc

SEQ ID NO: 289128 - DNA, 75 bp, synthetic construct
  source 1..75: mol_type = other DNA
tggaggccatgaaggcaacaggaaatatgcctgccaccgatgctttcctggctgaagtacgagcgcagggcgtgg

SEQ ID NO: 289129 - DNA, 75 bp, synthetic construct
  source 1..75: mol_type = other DNA
aattgctgtcgcacatgattggtaaagggaaactggcagcaggtgctggtgtttacccgtaccaaacacggcgct

SEQ ID NO: 289130 - DNA, 75 bp, synthetic construct
  source 1..75: mol_type = other DNA
acattgttctgttggcgcaaatcgaaaacaaaggcctcactgttgaaacccattgtcgcagtggcttttgtggca

SEQ ID NO: 289131 - DNA, 75 bp, synthetic construct
  source 1..75: mol_type = other DNA
tggcctaaatcactttctgttgccattggtggtggggtggggctgattggtgtttgctattcgtggtgcggcaat

SEQ ID NO: 289132 - DNA, 75 bp, synthetic construct
  source 1..75: mol_type = other DNA
aaatctccgcccttatacagataatacgtattcgatcggttatgcctcatggcgacccgcacaggtttattcagc

SEQ ID NO: 289133 - DNA, 75 bp, synthetic construct
  source 1..75: mol_type = other DNA
tcggtcaggcgctgttcgtccgcccggtggagcagtcgtggcggcaggtgctgacgcctgcggcggacagcctga

SEQ ID NO: 289134 - DNA, 75 bp, synthetic construct
  source 1..75: mol_type = other DNA
ccgcgtgcgtctcaaactgcaacaggtgaccaacgccccccgacccgcaggagatgacccagcaactggcgcaga

SEQ ID NO: 289135 - DNA, 75 bp, synthetic construct
  source 1..75: mol_type = other DNA
ctcaaggtcttgtcacttttagtgttgttctgcagtatatatttcaacccttattgtttattttttttgtattac

SEQ ID NO: 289136 - DNA, 75 bp, synthetic construct
  source 1..75: mol_type = other DNA
cagcccgccgcttgccgccgtgccggaggccgcacctcatgcgtggctgccgtcaccggtctgggcgggcgtgac

SEQ ID NO: 289137 - DNA, 75 bp, synthetic construct
  source 1..75: mol_type = other DNA
gccctgccgcccaacagtcctcagcgtaccgccaccggtgaacaacgctataagcagcttaaggcattgctgatg

SEQ ID NO: 289138 - DNA, 75 bp, synthetic construct
  source 1..75: mol_type = other DNA
catcaaccagtttattgccgccaacctttccggcgttctgaaacgtgaaggccgctactgggtggcggacgccat

SEQ ID NO: 289139 - DNA, 75 bp, synthetic construct
  source 1..75: mol_type = other DNA
atcgcgtcgaagtgtctccaactctcgaccacaaccggatgaacctggcccagctcgcctggtacagcaaagaat

SEQ ID NO: 289140 - DNA, 75 bp, synthetic construct
  source 1..75: mol_type = other DNA
ctgtattgcccaaaaattttgactgcactcctaacgagaaacgctctaaagctcagctggacgcctggtgggacc

SEQ ID NO: 289141 - DNA, 75 bp, synthetic construct
  source 1..75: mol_type = other DNA
actccttacaatggaagaatacgataccggagagcgcaagctggtcagggaggctggtgaaataatgtctgtaag

SEQ ID NO: 289142 - DNA, 75 bp, synthetic construct
  source 1..75: mol_type = other DNA
acccgccgtcgtcgcggtacgcactcaacggcgtgtctctgcccggagcccagctggtaccgaccggacaatttc

SEQ ID NO: 289143 - DNA, 75 bp, synthetic construct
  source 1..75: mol_type = other DNA
cgccggcgtgaagccgccctgaagggtaagcgcgagaagaagctgaaagcgctggcagaacagccctatgacgac

SEQ ID NO: 289144 - DNA, 75 bp, synthetic construct
  source 1..75: mol_type = other DNA
gcgagaatgccgcagcgaccggatctgaaccgccccgggtttcctggagagtattttatctgtgaactcaggctg

SEQ ID NO: 289145 - DNA, 75 bp, synthetic construct
  source 1..75: mol_type = other DNA
cccgcgcattgcgattccgggttatgagccggacccgtcaatcaaagccgaaccgatccagaacggtcgccagca

SEQ ID NO: 289146 - DNA, 75 bp, synthetic construct
  source 1..75: mol_type = other DNA
gcagagcgcaagagggcgcagcgagagagggaaagaaagcgggaacaaaatggcgattgtcacggcgcgtcacga

SEQ ID NO: 289147 - DNA, 75 bp, synthetic construct
  source 1..75: mol_type = other DNA
accggcaccgctggctgcaggtaacctggcatctgatgccgttaacgatttgcttaatacacctgaagctttacg

SEQ ID NO: 289148 - DNA, 75 bp, synthetic construct
  source 1..75: mol_type = other DNA
agggggcaccggcaccgctggctgcaggtaacctggcatctgatatccataaagaattacttaatacacctgaag

SEQ ID NO: 289149 - DNA, 75 bp, synthetic construct
  source 1..75: mol_type = other DNA
gattgtcacggcgcgtcacgaaatgtcacgcacatgtcacgacgagtcacgacagataaagatacagataaagat

SEQ ID NO: 289150 - DNA, 75 bp, synthetic construct
  source 1..75: mol_type = other DNA
aacgccggggctgaatcaaccgcgcattactcagcgtgtggagcaggtgctggctgatgcgtttcatgcgccagc

SEQ ID NO: 289151 - DNA, 75 bp, synthetic construct
  source 1..75: mol_type = other DNA
ggtgatgcatgcggtgcaggcgggggtatctgaacggttgctggctttgcttaacggcggcgcggtggcggaagt

SEQ ID NO: 289152 - DNA, 75 bp, synthetic construct
  source 1..75: mol_type = other DNA
agcagatggggctgacgcttattactgctgatttcaatgacctgtcggcactgaagcaggtcgtcgacgagcaac

SEQ ID NO: 289153 - DNA, 75 bp, synthetic construct
  source 1..75: mol_type = other DNA
atgttcgcattcaaaaatacaaaacaatttgtcaggggggctgcaggatgttttttattactatttatggggtgt

SEQ ID NO: 289154 - DNA, 75 bp, synthetic construct
  source 1..75: mol_type = other DNA
ttgataaagccggggcgataattgcatcaccacaacggtttatcctgcctgcaggagggagtcatgttgttcgtt

SEQ ID NO: 289155 - DNA, 75 bp, synthetic construct
  source 1..75: mol_type = other DNA
aatgcggggcaaatgtctcgactttttcctgcttcaagctgtttgggccggagggtgttggcgcggtggtaggcg

SEQ ID NO: 289156 - DNA, 75 bp, synthetic construct
  source 1..75: mol_type = other DNA
cgtcgccgccgtccgcgtaaacctgccgctgcgcagtaatcttttatgccgggctatgcccggcatcaggctgat

SEQ ID NO: 289157 - DNA, 75 bp, synthetic construct
  source 1..75: mol_type = other DNA
acaaagttggtggcgtggagatacgccgctgggtgcagtggttatgtcaattattatggctggtttgcgcattgc

SEQ ID NO: 289158 - DNA, 75 bp, synthetic construct
  source 1..75: mol_type = other DNA
acgttttcatctgcgacgagtgtgtggaagcgtgcaacagagctatccgggaagagcaagaaaagcggggagtaa

SEQ ID NO: 289159 - DNA, 75 bp, synthetic construct
  source 1..75: mol_type = other DNA
agatggcatccgtagtgcggcgatccacggtaataaatcgcaaggtgcgcgtacccgtgcgctggctgattttaa

SEQ ID NO: 289160 - DNA, 75 bp, synthetic construct
  source 1..75: mol_type = other DNA
cggtgaagcgttatcgctggtgtgtgttgatgaacacaaacttctgcgtgatatcgaaaaactgctgaaaaaaga

SEQ ID NO: 289161 - DNA, 75 bp, synthetic construct
  source 1..75: mol_type = other DNA
tgttgcaacacctgatcactcgccagccgcacgccaaagggcgtcgtccggtacgtgcgctcattcttaccccga

SEQ ID NO: 289162 - DNA, 75 bp, synthetic construct
  source 1..75: mol_type = other DNA
tgaacgcatcatggcgaaccattcaccggcagcggtacagggtggcgtgccacagacgtcagcagacggtgatgc

SEQ ID NO: 289163 - DNA, 75 bp, synthetic construct
  source 1..75: mol_type = other DNA
gggtatgcggccattttccggaatgacaggctatgacggtattgtcgcctgtcttcagcaggcaatggcggatag

SEQ ID NO: 289164 - DNA, 75 bp, synthetic construct
  source 1..75: mol_type = other DNA
cgatggcacatgatgtcagcaattcctccgaaaccctaaccagcacgttaggtgaaacaattactgaaatgaaac

SEQ ID NO: 289165 - DNA, 75 bp, synthetic construct
  source 1..75: mol_type = other DNA
gcggtaaaaatcaagaagggaaatggaagcttgacgctcgctataataagagtgatttgatttctcgaatccata

SEQ ID NO: 289166 - DNA, 75 bp, synthetic construct
  source 1..75: mol_type = other DNA
gatggtggcttgaacggtgcgggtaaaaccgcacttgatgctatgcaccccatgttcaccttacgctattcagca

SEQ ID NO: 289167 - DNA, 75 bp, synthetic construct
  source 1..75: mol_type = other DNA
tgatttctatcgccagactaatgaagaaggactgcttgaaccgggtgaatatgcccgcatctttgaagaagaata

SEQ ID NO: 289168 - DNA, 75 bp, synthetic construct
  source 1..75: mol_type = other DNA
tgaacatctggataaagagcttcgccttaatcctcagcaaatcaaggttcttaccctatttttcattgataaggt

SEQ ID NO: 289169 - DNA, 75 bp, synthetic construct
  source 1..75: mol_type = other DNA
ctgtgctggccccagctcagggcgcactctcatttgaagccgcaacaggttcaatgcctgtaaacccacagatac

SEQ ID NO: 289170 - DNA, 75 bp, synthetic construct
  source 1..75: mol_type = other DNA
ttacctatcagcaaaacgccattacttcggtctgtgatttatttgaagggcaagagaaatgggagagcgaaatga

SEQ ID NO: 289171 - DNA, 75 bp, synthetic construct
  source 1..75: mol_type = other DNA
catgagatttgggctgaactccagactgaaggttatctggaaaagtcgggaaaaataactaaagcactgaaagaa

SEQ ID NO: 289172 - DNA, 75 bp, synthetic construct
  source 1..75: mol_type = other DNA
gagagctattagatatcgatgacaaaatgagtttaagcgagcgccttgttgatatggatcaggtagtggagctta

SEQ ID NO: 289173 - DNA, 75 bp, synthetic construct
  source 1..75: mol_type = other DNA
ttgcttgccgctcgattccacaaattcttggttatgaaacaccaagcacatggctgtcatttatgcctcaggttt

SEQ ID NO: 289174 - DNA, 75 bp, synthetic construct
  source 1..75: mol_type = other DNA
aaagactttggtaacaggatcgacaggctcccggcagcagaaatagccgactggcttgttgagaaaggaatgccg

SEQ ID NO: 289175 - DNA, 75 bp, synthetic construct
  source 1..75: mol_type = other DNA
aatgtttaccttacgctattcagcgacacatgtgcataaacatcatatggtgtatcgcctcgatgccattgatgc

SEQ ID NO: 289176 - DNA, 75 bp, synthetic construct
  source 1..75: mol_type = other DNA
atgaaactacattttgaatctgaccttacctatcagcaaaacgccataacttcggtctgtgatttgtttgtggga

SEQ ID NO: 289177 - DNA, 75 bp, synthetic construct
  source 1..75: mol_type = other DNA
gtgaagcttcccggctggtttaaaatcccgacaccattagggacttacaatcctgactgggccttagttattgaa

SEQ ID NO: 289178 - DNA, 75 bp, synthetic construct
  source 1..75: mol_type = other DNA
acaagttgtgggtatcgccggttcacatgagatttgggctgaactacagaccgaaggatatctggaaaaatcggg

SEQ ID NO: 289179 - DNA, 75 bp, synthetic construct
  source 1..75: mol_type = other DNA
tgaagatgaataaagcattactgccactgttactctgctgctttatttttccggcgtcaggaaaagatgcaggct

SEQ ID NO: 289180 - DNA, 75 bp, synthetic construct
  source 1..75: mol_type = other DNA
tcccggactgaccaggggcaggcgcagcgcctcggcgtgaaatatttcccggccatgatgctggttgacccgaaa

SEQ ID NO: 289181 - DNA, 75 bp, synthetic construct
  source 1..75: mol_type = other DNA
aaacgccatgtgaaggcacagcagacaccggaaggagagcaatggacgccacgtaagcgaccggataaagccaga

SEQ ID NO: 289182 - DNA, 75 bp, synthetic construct
  source 1..75: mol_type = other DNA
gcaaagcggggaaagcggagtcgatcgttactttgagcaacaagtttcgctggcggcatttaccgatgcgacacc

SEQ ID NO: 289183 - DNA, 75 bp, synthetic construct
  source 1..75: mol_type = other DNA
catgatgcaaaaaatcacccacgaagagacgcattcgcgcaatcttattatccccgcccggctcatagcggcaaa

SEQ ID NO: 289184 - DNA, 75 bp, synthetic construct
  source 1..75: mol_type = other DNA
gagcggtcagcaaaaaaaccggacgcaggggacgcagaaagccctccctgaaatggattatggaaaacatgagta

SEQ ID NO: 289185 - DNA, 75 bp, synthetic construct
  source 1..75: mol_type = other DNA
acaagttgtaggtatcatcgcttcacaggagatatggtctgaactacatgctgaaggttatctggaaaaaaccgg

SEQ ID NO: 289186 - DNA, 75 bp, synthetic construct
  source 1..75: mol_type = other DNA
gtttattagtgaagctatcaccagaataaactactgcaagcgcttgtctattgttgatggtattaaatattatcc

SEQ ID NO: 289187 - DNA, 75 bp, synthetic construct
  source 1..75: mol_type = other DNA
gcagagcagccactgccagatattcttggtgttctgcaggaaaaaactggactgacaagacgcagtttgagccgc

SEQ ID NO: 289188 - DNA, 75 bp, synthetic construct
  source 1..75: mol_type = other DNA
aaaccatgcgcacccaccccgccacacgacggcaggcagagcgccttctctctctgggctttcgcgcacccgtcg

SEQ ID NO: 289189 - DNA, 75 bp, synthetic construct
  source 1..75: mol_type = other DNA
tgggtttcttctacaaattgcccaggcgatgcgaaagaaaacgatgccagcaacccatggcgttatgttcgcgcg

SEQ ID NO: 289190 - DNA, 75 bp, synthetic construct
  source 1..75: mol_type = other DNA
ctggcggcggaaagtattcgctttaattccgcctatacctgttcaccggtttgtacaccagcgcgcgccgggctg

SEQ ID NO: 289191 - DNA, 75 bp, synthetic construct
  source 1..75: mol_type = other DNA
aaggtcaatgctggcataaaccttctcagttcacctgaagctgaaaaggggatccatatgtctcgtctttatctt

SEQ ID NO: 289192 - DNA, 75 bp, synthetic construct
  source 1..75: mol_type = other DNA
acctggccactttctgccagacctgggacgacgagaaggtccataaattgatggatttttcgattaaaaaaaact

SEQ ID NO: 289193 - DNA, 75 bp, synthetic construct
  source 1..75: mol_type = other DNA
acctggccactttctgccagacctgggacgacgagaacgtccataaattgatggatttctcgatgaaaaaaaact

SEQ ID NO: 289194 - DNA, 75 bp, synthetic construct
  source 1..75: mol_type = other DNA
acctggccactttctgccagacctgggacgacgagaatgtccataaattgatggatttttcgataaaaaaaaact

SEQ ID NO: 289195 - DNA, 75 bp, synthetic construct
  source 1..75: mol_type = other DNA
gctcggaactactcgattcacgttttggtgctaaggccatttcgactatcgcagaatcaaaacgctttccgctgc

SEQ ID NO: 289196 - DNA, 75 bp, synthetic construct
  source 1..75: mol_type = other DNA
gttccgaactactcgattcacgttttggtgcaaaggccatttcgactatcgcagaatcaaaacgctttccgctgc

SEQ ID NO: 289197 - DNA, 75 bp, synthetic construct
  source 1..75: mol_type = other DNA
gttcagaactactcgattcacgttttggtgccaaggccatttcgactatcgcagaatcaaaacgctttccgctgc

SEQ ID NO: 289198 - DNA, 75 bp, synthetic construct
  source 1..75: mol_type = other DNA
cttcatgctgctagttcttggactgctctctttgaaagtcatcggtaacgtggtgaagatccccggcaatattct

SEQ ID NO: 289199 - DNA, 75 bp, synthetic construct
  source 1..75: mol_type = other DNA
ttgccagtatttccggtgagtcactgattaaagggctgattgccggggttggcggattgctgatcgcaacgatag

SEQ ID NO: 289200 - DNA, 75 bp, synthetic construct
  source 1..75: mol_type = other DNA
ctggcggcagaccaggcgcagcagcgacaggccattgcgaaactggctgaacactacggcatcatgtttttttac

SEQ ID NO: 289201 - DNA, 75 bp, synthetic construct
  source 1..75: mol_type = other DNA
acctggccactttctgccagacctgggacgacgagaaagtccataaattgatggatttatcgatcaaaaaaaact

SEQ ID NO: 289202 - DNA, 75 bp, synthetic construct
  source 1..75: mol_type = other DNA
tcttccgaggcttgtatgcttggcgggatggcgatgaaatggcgttggcgcaagcgtatggaagctgcaggcaaa

SEQ ID NO: 289203 - DNA, 75 bp, synthetic construct
  source 1..75: mol_type = other DNA
aggggctgattgccggggttggcggattgctgatcgcaacgataggccttgatccaatgggcggttttccacggt

SEQ ID NO: 289204 - DNA, 75 bp, synthetic construct
  source 1..75: mol_type = other DNA
ggtctgaactactcgattcacgttttggtgccaaggccatttcgactatcgcagaatcaaaacgctttccgctgc

SEQ ID NO: 289205 - DNA, 75 bp, synthetic construct
  source 1..75: mol_type = other DNA
gtttatggacccgaaacgcatgattgaagcctgcgacgaaaacaccatcggcgtggtgccgactttcggcgtgac

SEQ ID NO: 289206 - DNA, 75 bp, synthetic construct
  source 1..75: mol_type = other DNA
agcctccctgaaatacctcagcgatcacccgaaactgcagggtatagcccagcagaacagctttaaacataccta

SEQ ID NO: 289207 - DNA, 75 bp, synthetic construct
  source 1..75: mol_type = other DNA
ccggtcagttgtttatggatccgaaacgcatgattgaagcctgcgacgaaaacaccatcggcgtggtgccgactt

SEQ ID NO: 289208 - DNA, 75 bp, synthetic construct
  source 1..75: mol_type = other DNA
aaatcgggactttcgccatcaacttctctcgccccgccggtcaggtaattgcgcaatactatgaattcctgcgcc

SEQ ID NO: 289209 - DNA, 75 bp, synthetic construct
  source 1..75: mol_type = other DNA
atggataagaagcaagtaacggatttaaggtcggaactactcgattcacgttttggcgcgaagtctatttcaact

SEQ ID NO: 289210 - DNA, 75 bp, synthetic construct
  source 1..75: mol_type = other DNA
atggataagaagcaagtaacggatttaaggtcggaactactcgattcacgttttggcgcaaagtctatttcgact

SEQ ID NO: 289211 - DNA, 75 bp, synthetic construct
  source 1..75: mol_type = other DNA
tccgctcagaactactcgattcacgttttggtgccaagccaatttcaactatcgctgactcaaaacgatttccgc

SEQ ID NO: 289212 - DNA, 75 bp, synthetic construct
  source 1..75: mol_type = other DNA
tccgctcagaactactcgattcacgttttggtgccaagacaatttccactatcgctgactcaaaacgatttccgc

SEQ ID NO: 289213 - DNA, 75 bp, synthetic construct
  source 1..75: mol_type = other DNA
agactacaaggcttctctgaaatacctcagcgatcacccgaaactgcagggtattgcgcaacagaacagctttaa

SEQ ID NO: 289214 - DNA, 75 bp, synthetic construct
  source 1..75: mol_type = other DNA
tccgctcagaactactcgattcacgttttggtgccaaggcgatttccactatcgctgactcaaaacgatttccgc

SEQ ID NO: 289215 - DNA, 75 bp, synthetic construct
  source 1..75: mol_type = other DNA
tccgctcagaactactcgattcacgttttggtgccaagccgatttcgactatcgctgactcaaaacgatttccgc

SEQ ID NO: 289216 - DNA, 75 bp, synthetic construct
  source 1..75: mol_type = other DNA
tccgctcagaactactcgattcacgttttggtgccaagcccatttccactatcgctgactcaaaacgatttccgc

SEQ ID NO: 289217 - DNA, 75 bp, synthetic construct
  source 1..75: mol_type = other DNA
cataccgcacccgctgttgacccggcaggagttcaccgcctgggtgcaggattatttaattttcggtaactgtta

SEQ ID NO: 289218 - DNA, 75 bp, synthetic construct
  source 1..75: mol_type = other DNA
gacattcatcaggagatctacgggatgccggagtacatgggcgcgctattgtcagccagcctgtcacactcggcg

SEQ ID NO: 289219 - DNA, 75 bp, synthetic construct
  source 1..75: mol_type = other DNA
gcatcatctacatcggtgcagcgcaggtaaaccgcgaaagcatggactccctgaaagaaacgctacagggtgcgc

SEQ ID NO: 289220 - DNA, 75 bp, synthetic construct
  source 1..75: mol_type = other DNA
gtacgaacgcccgcgcagcgcagggcagccttgcggattccctgcgaagcgacccgacactgagtgccttcacgt

SEQ ID NO: 289221 - DNA, 75 bp, synthetic construct
  source 1..75: mol_type = other DNA
gatacaagaaagcctgaaggagctgaatgactggctgggctttgaggtgatccgctttaacccttacgccctcgc

SEQ ID NO: 289222 - DNA, 75 bp, synthetic construct
  source 1..75: mol_type = other DNA
agatggtatgagccgccggtcagctttaccggtctggcgaaaagcctgcgtgctgccgtgcatcacagctcgccg

SEQ ID NO: 289223 - DNA, 75 bp, synthetic construct
  source 1..75: mol_type = other DNA
gatgccttaaatcctgaagatattttcacacagtgcgaacgactgctgagggtgggcggtgtgctggtcatgttc

SEQ ID NO: 289224 - DNA, 75 bp, synthetic construct
  source 1..75: mol_type = other DNA
ttaccggaatagaaaaggatgaccggtatttcgctgttgcaaaaaaacgtctggaaaaagaaaacagtgaaatgg

SEQ ID NO: 289225 - DNA, 75 bp, synthetic construct
  source 1..75: mol_type = other DNA
tactcagctacatctgaattcaatgtcgtaaaggaaaacgtagagttaattgaggcacccaaaaaaagcccctgt

SEQ ID NO: 289226 - DNA, 75 bp, synthetic construct
  source 1..75: mol_type = other DNA
gcgttccgccgcaactgatgggggcgatgccgggtgaaaaaagtgcgtttggtgatgtggagaaggccgcgcggg

SEQ ID NO: 289227 - DNA, 75 bp, synthetic construct
  source 1..75: mol_type = other DNA
gcatgagttcacgcattgatctcgctgatgcgctcaggaaagaatcgtcgctcagtgcattcacatttgatggtc

SEQ ID NO: 289228 - DNA, 75 bp, synthetic construct
  source 1..75: mol_type = other DNA
gtggtcgcggggcgtttaaaaacctgtttcttcatgcgccgggtggcggcaaggatggggtgcaaattctgccat

SEQ ID NO: 289229 - DNA, 75 bp, synthetic construct
  source 1..75: mol_type = other DNA
agcatgtcaatgaatggcttggcgttgaggtgatgcgctttaacccctatgccctgcttctggataacgccagct

SEQ ID NO: 289230 - DNA, 75 bp, synthetic construct
  source 1..75: mol_type = other DNA
ggagggagaactggatagctcgcgggacagtttcctgctagtgcaagtgattaaagagtatccagaagcctggca

SEQ ID NO: 289231 - DNA, 75 bp, synthetic construct
  source 1..75: mol_type = other DNA
ctaactgggagactgaaaaaaataagccaagaggacaaaaagtagctgcatacttagctgagaaaggatttaaca

SEQ ID NO: 289232 - DNA, 75 bp, synthetic construct
  source 1..75: mol_type = other DNA
gtggtggtggtgcgtttaaaaacgtgctcatccatgcgcccaacgggggcaaagagggggtgcaaattttgccgt

SEQ ID NO: 289233 - DNA, 75 bp, synthetic construct
  source 1..75: mol_type = other DNA
gcgttccgccgcaactgatgggggcgatgccgggcgaaaaagtgcgtttggtgatgtggagaaggccgcgcgggt

SEQ ID NO: 289234 - DNA, 75 bp, synthetic construct
  source 1..75: mol_type = other DNA
ggcaaggacgcgtttcagtttcgccctggcaaagtgtgccatctgatgaatccggatattaatcaggaaatctac

SEQ ID NO: 289235 - DNA, 75 bp, synthetic construct
  source 1..75: mol_type = other DNA
cgcctgaccgggcatgacctgctggacaatatgtactgtgctgataacgggcggtggtatgaaaccccggtggac

SEQ ID NO: 289236 - DNA, 75 bp, synthetic construct
  source 1..75: mol_type = other DNA
gccggatgtgtactggtttgtacagacgggcgagcaggaccacgagttccgtcaggggcgcgtctgtcatgtgct

SEQ ID NO: 289237 - DNA, 75 bp, synthetic construct
  source 1..75: mol_type = other DNA
gccggtgatggaggcgatgaagcacgttaatgactggctgggtgaggaggtgatccgctttaacccttacgcact

SEQ ID NO: 289238 - DNA, 75 bp, synthetic construct
  source 1..75: mol_type = other DNA
gaaagcgcggcacgggctcactggccgatgcactgaaatcagcgccgtcactcagtgctttcacgtttgacggtc

SEQ ID NO: 289239 - DNA, 75 bp, synthetic construct
  source 1..75: mol_type = other DNA
aacgcgctggtgagcgagaccatcaaagccaaccagttatggagtgaagtgctggataatgcggcgttcgaggca

SEQ ID NO: 289240 - DNA, 75 bp, synthetic construct
  source 1..75: mol_type = other DNA
gaaagcgcgctggaaaacattgttcgtaatgctctgcgttattcccatacgaagatcgaagtaggcttcgcggta

SEQ ID NO: 289241 - DNA, 75 bp, synthetic construct
  source 1..75: mol_type = other DNA
aagctaaccagttgtggggtgaagtgctggataacgcggcgttcgaagcggaacaaatgggcaagtcgtttacgg

SEQ ID NO: 289242 - DNA, 75 bp, synthetic construct
  source 1..75: mol_type = other DNA
caaaagaaatttatgaagaattgataattgccgtgccgagcagggaaaatgaattcaggaaactttctcttgagc

SEQ ID NO: 289243 - DNA, 75 bp, synthetic construct
  source 1..75: mol_type = other DNA
gactgatacttctctggcagatgagagaggggaagcatttatgtccgggaaaaaccactttatctgaccatgctg

SEQ ID NO: 289244 - DNA, 75 bp, synthetic construct
  source 1..75: mol_type = other DNA
ttgttgtggtggccccgaaaaccagtgcgcagaaagatttcaccatcgataacaaaactaactggacctctctac

SEQ ID NO: 289245 - DNA, 75 bp, synthetic construct
  source 1..75: mol_type = other DNA
gttcgtggggcgctggcgctggttgaacgcaatgaagcaccgctgggcattgtttacggttctgacgcggttgcc

SEQ ID NO: 289246 - DNA, 75 bp, synthetic construct
  source 1..75: mol_type = other DNA
aaggcaatttctttatcgtcgggaagagctccagggcgcgtttcgcttttttatcctctcgcaggaacgcccggc

SEQ ID NO: 289247 - DNA, 75 bp, synthetic construct
  source 1..75: mol_type = other DNA
tgaagtccggcaccagtggtgatgtgattgagctgattggtaaatctatcacactgacggataagtatggcagca

SEQ ID NO: 289248 - DNA, 75 bp, synthetic construct
  source 1..75: mol_type = other DNA
tggtggtcaggcaaccggcaaaacctggcttgcgttcacaaatgtcggaaacagtaacctcggggtggcaaccac

SEQ ID NO: 289249 - DNA, 75 bp, synthetic construct
  source 1..75: mol_type = other DNA
aacgaaaccattgcgatgggcgcgtggtttggtttactgaaagcagggcggcaaagcggcgaaagcggggtcgat

SEQ ID NO: 289250 - DNA, 75 bp, synthetic construct
  source 1..75: mol_type = other DNA
cgcggccattgaagagttaggctttgtgcgaaatcgccaggcatctgcgctgcgcggcgggcagagtggcgtaat

SEQ ID NO: 289251 - DNA, 75 bp, synthetic construct
  source 1..75: mol_type = other DNA
gtgtcggtaagtaccgtttcgctggtgcttagtggcaaagggcgaatctctaccgccacaggagaacgcgttaac

SEQ ID NO: 289252 - DNA, 75 bp, synthetic construct
  source 1..75: mol_type = other DNA
ttgccggagcggcactctctttcactgttgctggcaatgcactggcggacgaagggaaaatcacggtttttgcgg

SEQ ID NO: 289253 - DNA, 75 bp, synthetic construct
  source 1..75: mol_type = other DNA
tgaaaaaacattgtgataagctttttaagtctgctgatgaacagaagcctactatgcaggatctgattaaagcaa

SEQ ID NO: 289254 - DNA, 75 bp, synthetic construct
  source 1..75: mol_type = other DNA
ctaccgctacgggggaacgggttaacgcagcgattgaagagctgggatttgtgcgcaatcgccaggcgtcggcac

SEQ ID NO: 289255 - DNA, 75 bp, synthetic construct
  source 1..75: mol_type = other DNA
acctcggttgatgcctaccgacaacagcaactgcggcgggaaaactcccggcaactgatccagttcagtagcgtg

SEQ ID NO: 289256 - DNA, 75 bp, synthetic construct
  source 1..75: mol_type = other DNA
ggttaatgccggtgcttttgccggatttgcaccttgtagcgaaggccagcagaccaccttggctgggatgctcgg

SEQ ID NO: 289257 - DNA, 75 bp, synthetic construct
  source 1..75: mol_type = other DNA
ccggatggcgcgatccacgcgatcgccgatgtgctgggtattccggctagcgacgtcgaaggcgtggcaacgttt

SEQ ID NO: 289258 - DNA, 75 bp, synthetic construct
  source 1..75: mol_type = other DNA
tggagaaaaagctgaacatcaaaccagggcaaacgacatttgacggtcgctttacgctgctgccaacttgctgcc

SEQ ID NO: 289259 - DNA, 75 bp, synthetic construct
  source 1..75: mol_type = other DNA
tattcggttaatggagtaccaagcgcaaggtgcggtgcatttaatgctaggagtcgctgcttctagagttaagag

SEQ ID NO: 289260 - DNA, 75 bp, synthetic construct
  source 1..75: mol_type = other DNA
aggcgaatcagccattaactaaatccgttattgcggaaagctgtgcccgtgcattgcatgaaggccggtcagtcg

SEQ ID NO: 289261 - DNA, 75 bp, synthetic construct
  source 1..75: mol_type = other DNA
gacgatctgctgcagctgggcaagtaccgccggcccataggatttgtgctgcgtcggccgggcatggagatgctg

SEQ ID NO: 289262 - DNA, 75 bp, synthetic construct
  source 1..75: mol_type = other DNA
agaatctcgcgaagcattaaagatgttggggtgtcagcaaactattcatcttaatttttcagacacccgtacaca

SEQ ID NO: 289263 - DNA, 75 bp, synthetic construct
  source 1..75: mol_type = other DNA
tcttagccagggatatggcaaaagccgggcgttcggctgtggtctgatgctgatcaaacccggagcagaggcgtg

SEQ ID NO: 289264 - DNA, 75 bp, synthetic construct
  source 1..75: mol_type = other DNA
aaggcaatttctttatcgtcgggaagaactccagggcgcgtttcgcttttttgtcctctcgcaggaacgcccggc

SEQ ID NO: 289265 - DNA, 75 bp, synthetic construct
  source 1..75: mol_type = other DNA
aaacttgcagcgttaaaaaaacataaaagccaggagcgacgtgattatatgcgtcatgaacgtttacgtgctgtt

SEQ ID NO: 289266 - DNA, 75 bp, synthetic construct
  source 1..75: mol_type = other DNA
ttggataaggttttaaattctgcgttgcattcttcagcagaaaagaggaaaggtattcttgcgattggtgcgcat

SEQ ID NO: 289267 - DNA, 75 bp, synthetic construct
  source 1..75: mol_type = other DNA
gttgcacaatttcgcggacaacaggtcaatagcgatctgggtgaaggctttgtaattcataaaatgattctttga

SEQ ID NO: 289268 - DNA, 75 bp, synthetic construct
  source 1..75: mol_type = other DNA
cagtggatacggggttaagccatttaacagcggcactggatagacccaatatcacggtttatggacctaccgatc

SEQ ID NO: 289269 - DNA, 75 bp, synthetic construct
  source 1..75: mol_type = other DNA
gggcgcaccgcatgaagaagcacgggcgaaaaggctggcagaaggatttgcttatgtcgacgtattgccgaagat

SEQ ID NO: 289270 - DNA, 75 bp, synthetic construct
  source 1..75: mol_type = other DNA
cggtggatacggggttaagccatttaacggcggcactggatagacccaatatcacggtttatggacctaccgatc

SEQ ID NO: 289271 - DNA, 75 bp, synthetic construct
  source 1..75: mol_type = other DNA
ataacggcgtctgggatgcgattattaataatcaggcgaatattgctatcggcgcacccgacacgctgctggacg

SEQ ID NO: 289272 - DNA, 75 bp, synthetic construct
  source 1..75: mol_type = other DNA
cgatgtcagcgagaccaggggagtgtttgaatttgacattttgctggacaaccatcaacgctattgtgtggagtg

SEQ ID NO: 289273 - DNA, 75 bp, synthetic construct
  source 1..75: mol_type = other DNA
tgatttcagcgaggccagagatgtacttgagtttgacatcgtgctggacagccaccagcaataccgagtggagta

SEQ ID NO: 289274 - DNA, 75 bp, synthetic construct
  source 1..75: mol_type = other DNA
agacgctgcgtcgtttcctgggcgggctgtcgttgtttacgctggcggaatcattagggggagtggaaagtttaa

SEQ ID NO: 289275 - DNA, 75 bp, synthetic construct
  source 1..75: mol_type = other DNA
gtgcgctggcagaactggaaggcggtgctggtgcagtacttactaataccggcatgtccgcgattcacctggtaa

SEQ ID NO: 289276 - DNA, 75 bp, synthetic construct
  source 1..75: mol_type = other DNA
gcgcgtttgacagctatttactgctgcgcggtttgcgtacgctggtgccgcgtatggagttggcccagcgcaacg

SEQ ID NO: 289277 - DNA, 75 bp, synthetic construct
  source 1..75: mol_type = other DNA
cagagaactatgacgcagttatcgacgctcaggggctggtaaaaagcgcggcgctggtgacgcgtctggcgcatg

SEQ ID NO: 289278 - DNA, 75 bp, synthetic construct
  source 1..75: mol_type = other DNA
cagtgcgtagcgggttaaatgacgacgaacagtatggttgcgttgtcccaccgatccatctttccagcacctata

SEQ ID NO: 289279 - DNA, 75 bp, synthetic construct
  source 1..75: mol_type = other DNA
tctgttggttgcgccgcacgattgttacggcggcagctatcgtctgttcgacagtctggcgaaacgtggttgtta

SEQ ID NO: 289280 - DNA, 75 bp, synthetic construct
  source 1..75: mol_type = other DNA
ttttttccgcaaggccaccgacctgctgaatgattttcacgctattaaacgcagtatcgatactatttcgcaagg

SEQ ID NO: 289281 - DNA, 75 bp, synthetic construct
  source 1..75: mol_type = other DNA
ctttatgaagatcctcggcggcgacttagagccgacgctgggtaacgtttccctcgatcccaacgagcgcattgg

SEQ ID NO: 289282 - DNA, 75 bp, synthetic construct
  source 1..75: mol_type = other DNA
ctgggtaccaacggcgtcggtaaatcaacgctgctgaaaacgctggtgggcgatctgcaaccggacagcggcacc

SEQ ID NO: 289283 - DNA, 75 bp, synthetic construct
  source 1..75: mol_type = other DNA
gcgccaacgcctcgaaatctcgccaggcaacttcgcgcgcgcgccagattgataaaatcaaactggaagaggtga

SEQ ID NO: 289284 - DNA, 75 bp, synthetic construct
  source 1..75: mol_type = other DNA
aactggccgctgaaaatgtccgccttaaacgacaactggcggagcaggctaaggaactggccatcctccaaaagg

SEQ ID NO: 289285 - DNA, 75 bp, synthetic construct
  source 1..75: mol_type = other DNA
ttcattgcgggagttaattcaggagcggttgacggcaggggcagagcataacccgtttcagcaattgcgtgaaaa

SEQ ID NO: 289286 - DNA, 75 bp, synthetic construct
  source 1..75: mol_type = other DNA
agccactgccgcgacttgctcggcagtcaaatccagaccgcctcacgcagccaggcactatttgaagcgattcgc

SEQ ID NO: 289287 - DNA, 75 bp, synthetic construct
  source 1..75: mol_type = other DNA
caggttcaggcacagttgaaacagcctaaattacgtggaaacgttcagacggcgcaaagggaggttgcaccatga

SEQ ID NO: 289288 - DNA, 75 bp, synthetic construct
  source 1..75: mol_type = other DNA
cgatcaaagtttctgaagggatggaatttgtgcaatcaggtactaacgtgccctatatgaaaatggtgatgctgc

SEQ ID NO: 289289 - DNA, 75 bp, synthetic construct
  source 1..75: mol_type = other DNA
atggtggaggacaccgcgcatacgattaataaaaaagtgggctggttgctgcatgggcaggagtcaattctggtg

SEQ ID NO: 289290 - DNA, 75 bp, synthetic construct
  source 1..75: mol_type = other DNA
attcttctgctcgacgaaccaaccaacaacctcgacatcgataccattcgctggctggagcaggtgctgaacgag

SEQ ID NO: 289291 - DNA, 75 bp, synthetic construct
  source 1..75: mol_type = other DNA
aatttgtgcaatcaggtactaacgtgccctatatgaaaattagcgcaattgattacagtcaaaatatcaacggtg

SEQ ID NO: 289292 - DNA, 75 bp, synthetic construct
  source 1..75: mol_type = other DNA
tcattacaaaaaagacaaagcttacaattcgacttaaacttcttcgtgttgagatagagatttcaataaataaat

SEQ ID NO: 289293 - DNA, 75 bp, synthetic construct
  source 1..75: mol_type = other DNA
tgctgattctctcagggtcgattgaatttatcccgatgcaggtgatccctatcgccgggatgatagccggtaacg

SEQ ID NO: 289294 - DNA, 75 bp, synthetic construct
  source 1..75: mol_type = other DNA
cacatgaaaggtgcgagtgctgctggtgagggcgagttgcttattggctggagtggtacgagcggtgcacatgcg

SEQ ID NO: 289295 - DNA, 75 bp, synthetic construct
  source 1..75: mol_type = other DNA
atgtggtacagggaaggtactatcacatttacacagggtagtaatactctggttggggttgggacagcctggaac

SEQ ID NO: 289296 - DNA, 75 bp, synthetic construct
  source 1..75: mol_type = other DNA
aagctttatgacggaagaacagtccatgttggtggactggctcctggagcaggctgaactcatacccgttaccgc

SEQ ID NO: 289297 - DNA, 75 bp, synthetic construct
  source 1..75: mol_type = other DNA
atcagcgtctgtagcgtcgaccaaagcatcggaggcagcaacatctgcgtccagtgcctctgcatctaaggatgc

SEQ ID NO: 289298 - DNA, 75 bp, synthetic construct
  source 1..75: mol_type = other DNA
ttctaagttcctatgcaagcagatcatcactgacaggctatagtggcaacctggatattattgctgaaacactgg

SEQ ID NO: 289299 - DNA, 75 bp, synthetic construct
  source 1..75: mol_type = other DNA
gagtggtacgagcggtgcacatgcgccagttttcattcgctcacgaagagataccacagatgcggcatggtcagc

SEQ ID NO: 289300 - DNA, 75 bp, synthetic construct
  source 1..75: mol_type = other DNA
gcttttgatgatgttgcaggcaagtggtgatccgcgaatggcgcaagtgctgacctggatttccggttcgaccta

SEQ ID NO: 289301 - DNA, 75 bp, synthetic construct
  source 1..75: mol_type = other DNA
cgcaagtgctgacctggatttccggttcgacctacaacgcgaccgatgcgcaggtctggcgcaccggaattgtga

SEQ ID NO: 289302 - DNA, 75 bp, synthetic construct
  source 1..75: mol_type = other DNA
cggctgatgctggcgtcgctgattggggcgttaattctctggctttccgatcaaatcatcctctggctgactcgc

SEQ ID NO: 289303 - DNA, 75 bp, synthetic construct
  source 1..75: mol_type = other DNA
actgatgttggttaattctgcaaaaaattatactaagattttagagaatgattttgaacacccttcaatacgacg

SEQ ID NO: 289304 - DNA, 75 bp, synthetic construct
  source 1..75: mol_type = other DNA
aattcttcagaatggggattggctgaactgaaaatgagacatgaaaaaatgaaaacgcaattgaagaagctttgg

SEQ ID NO: 289305 - DNA, 75 bp, synthetic construct
  source 1..75: mol_type = other DNA
atctgttgatgagttgaagttgcttgctaaatatattttgcaaaatgtatatatcgtatttgtgcaaacagatga

SEQ ID NO: 289306 - DNA, 75 bp, synthetic construct
  source 1..75: mol_type = other DNA
agttgcagactgcgcgtactatcaatggggtgtcgtttgacggctcggcaaatatttccttgtcgccagcaaata

SEQ ID NO: 289307 - DNA, 75 bp, synthetic construct
  source 1..75: mol_type = other DNA
cagtttctgtttatacatcgccaacatattcagcgagtaagccttccagcgttaccgatggtgttgtttatacga

SEQ ID NO: 289308 - DNA, 75 bp, synthetic construct
  source 1..75: mol_type = other DNA
ttcaggcgatatcttgtccggcggacttacttttgaaaacgactcaatccttgcctggattcgaaatactgactg

SEQ ID NO: 289309 - DNA, 75 bp, synthetic construct
  source 1..75: mol_type = other DNA
ctcaaggcactgctggcattcaaatgtacgaggcgtacaacaatagctacccgaccacgtatggcaacgtattgc

SEQ ID NO: 289310 - DNA, 75 bp, synthetic construct
  source 1..75: mol_type = other DNA
ttcaggtggcacattatctggagggttgacgtcttctggtgagatcgtttcaaaatatgcaaatggtttccgcat

SEQ ID NO: 289311 - DNA, 75 bp, synthetic construct
  source 1..75: mol_type = other DNA
ttatttatgtgtacaatgggagtgattatgcgccaggctggcgtcgttcttataacactagaaacaaaccaacag

SEQ ID NO: 289312 - DNA, 75 bp, synthetic construct
  source 1..75: mol_type = other DNA
atatccggtgttccatttgatggttctactgatatcactttaaccgctgcgcatgttgccgctttcgcaagaagg

SEQ ID NO: 289313 - DNA, 75 bp, synthetic construct
  source 1..75: mol_type = other DNA
cgcgaaggcggcaaaaacgtccgagacgaacgccaggtcttctgaaacggcagcgggacagagcgcctcggctgc

SEQ ID NO: 289314 - DNA, 75 bp, synthetic construct
  source 1..75: mol_type = other DNA
caccttaaatcaaatggggcatttagcaaaagttattggattggctttggcgatgctatgggattcaatgctggc

SEQ ID NO: 289315 - DNA, 75 bp, synthetic construct
  source 1..75: mol_type = other DNA
ttatttcaagtgtgaaagatgacgatttgtgtagtgtattttacgttgaagccagagcattccctatcaagatat

SEQ ID NO: 289316 - DNA, 75 bp, synthetic construct
  source 1..75: mol_type = other DNA
gctcgatgtgcgtgggcctatgccaatagtgcaaccataccaaatagtgaaactggttgtggcgttattccattg

SEQ ID NO: 289317 - DNA, 75 bp, synthetic construct
  source 1..75: mol_type = other DNA
cgtttgatggctctgccgatatcaacctgccgggtgtaaacattgctggtaaccagaacacaaccggtaatgcag

SEQ ID NO: 289318 - DNA, 75 bp, synthetic construct
  source 1..75: mol_type = other DNA
catccgctgcggcatcctcacaaagtgctgcaagtgcgagcgcaactgctgcgaaaaaatctgaaacgaacgcac

SEQ ID NO: 289319 - DNA, 75 bp, synthetic construct
  source 1..75: mol_type = other DNA
ctggggtgacagtgactgatgacatcagcagagcgctggcttttgctattaagtgggtggctgttggtattgctg

SEQ ID NO: 289320 - DNA, 75 bp, synthetic construct
  source 1..75: mol_type = other DNA
ccattattgcctgctatttaacctatcgtaagttttataattcgcgccaccagttggtggtgacgcaattgaaga

SEQ ID NO: 289321 - DNA, 75 bp, synthetic construct
  source 1..75: mol_type = other DNA
ggtggtggtggcaatcttaattagccataaagaaaaactggcgctggagaaagatattctctggagcgtcgggcg

SEQ ID NO: 289322 - DNA, 75 bp, synthetic construct
  source 1..75: mol_type = other DNA
caaaaattatggaacttattgcctatggtgatgctccaatcatcatggccggagcaggagtccgtgcagaaaacc

SEQ ID NO: 289323 - DNA, 75 bp, synthetic construct
  source 1..75: mol_type = other DNA
acggatgaagtgaaagtgcagtttgggagctcgcctgttcaggctctggcgatgctccgccgggttatgacagca

SEQ ID NO: 289324 - DNA, 75 bp, synthetic construct
  source 1..75: mol_type = other DNA
tgaactgaaagcgcctgtaactgatgacatcagcagagcactggcttttgccattaagtgggtggcggtcggtgt

SEQ ID NO: 289325 - DNA, 75 bp, synthetic construct
  source 1..75: mol_type = other DNA
gagatcaaaattgatgatgtcgccgccgctgccggaacggtgggctatgagttgatgtgcgcgctggcgttacgc

SEQ ID NO: 289326 - DNA, 75 bp, synthetic construct
  source 1..75: mol_type = other DNA
ttaacctggaagaggcaataacgttacgtgagcgcggctggaaaggaccgatcctgatgctggaaggatttttcc

SEQ ID NO: 289327 - DNA, 75 bp, synthetic construct
  source 1..75: mol_type = other DNA
cccctgttttagtggacggcgtgcgcaccatgacggtggggaccgtctcgatggatatgctagcggtcgatttaa

SEQ ID NO: 289328 - DNA, 75 bp, synthetic construct
  source 1..75: mol_type = other DNA
ttttcactaatgctggttgctatttgcttttccactgcctggcgcgtcttaactttgtcatggctggtgggggga

SEQ ID NO: 289329 - DNA, 75 bp, synthetic construct
  source 1..75: mol_type = other DNA
tgatgctgctgcaaaagagaaggcagatgctgatgctgcattaagtactgcgatggaaagcaggaagaagaaaga

SEQ ID NO: 289330 - DNA, 75 bp, synthetic construct
  source 1..75: mol_type = other DNA
gctgccgctgccggaacggtgggctatgagttgatgtgcgcgctggcgttacgtgtcccggttgtgacagtgtaa

SEQ ID NO: 289331 - DNA, 75 bp, synthetic construct
  source 1..75: mol_type = other DNA
tacttattttcaatttatcaggttgcggttataacgatattcagacctatgatgagcaagtcaatgcatcctggt

SEQ ID NO: 289332 - DNA, 75 bp, synthetic construct
  source 1..75: mol_type = other DNA
ttccttacattaatggcctgtatagaccttctttcatttctactaccacgcctttataccgtgacatttatcttc

SEQ ID NO: 289333 - DNA, 75 bp, synthetic construct
  source 1..75: mol_type = other DNA
ggcaatgttaattgaagctaacatgttacaggattctggtgaagaacttagtctggaagaattcgttcagcatgt

SEQ ID NO: 289334 - DNA, 75 bp, synthetic construct
  source 1..75: mol_type = other DNA
tgacacacggtgaggcagggaatgctttactcgccagtagcgaaatgattgtaggtaaaacaccgcatactacag

SEQ ID NO: 289335 - DNA, 75 bp, synthetic construct
  source 1..75: mol_type = other DNA
ctggacagccaaaaaataacggtatcggtgattcaggcaaatcagggaaaaattaatgtgatgcatagctatcat

SEQ ID NO: 289336 - DNA, 75 bp, synthetic construct
  source 1..75: mol_type = other DNA
gattgccatttacctatatggccttcgaagtggataacgatagctttcctggagcaattgaaggattaaaagccc

SEQ ID NO: 289337 - DNA, 75 bp, synthetic construct
  source 1..75: mol_type = other DNA
atttattgccgttatcggcggaattattttcttcactcttggcggattaaacaagcaaaaaaaatatattccatt

SEQ ID NO: 289338 - DNA, 75 bp, synthetic construct
  source 1..75: mol_type = other DNA
tataatgtcactatccgcaaattccccgctgtattaaccgcaaaggtcatggattacacaccaaagaaaaattat

SEQ ID NO: 289339 - DNA, 75 bp, synthetic construct
  source 1..75: mol_type = other DNA
cagctgacacgtacactcggccagctaacgattattagtgagcgttatcctgaattaaaggctcaggaactctat

SEQ ID NO: 289340 - DNA, 75 bp, synthetic construct
  source 1..75: mol_type = other DNA
acaagcctggcaacaggctcaagcgcaggtgactcgcactctcggtcagttaacgataattagtgagcgttaccc

SEQ ID NO: 289341 - DNA, 75 bp, synthetic construct
  source 1..75: mol_type = other DNA
aatcgcgccagtagcgatcttcagcaaactccgggcgatgaacaaaaattacaagcctggcaacaggctcaagcg

SEQ ID NO: 289342 - DNA, 75 bp, synthetic construct
  source 1..75: mol_type = other DNA
gccatgaacgagatgtactggaagccgtaacattggctcgtagccaggctaatcgcgccagtagcgatcttcagc

SEQ ID NO: 289343 - DNA, 75 bp, synthetic construct
  source 1..75: mol_type = other DNA
ggattacacaccaaagaaaaattatttgccggatgatgtcaccgcagtaagtaaagccccaacaatagattttag

SEQ ID NO: 289344 - DNA, 75 bp, synthetic construct
  source 1..75: mol_type = other DNA
gcaacaactgcgggcgatgacgaatgtgggggaaatgacgctgatgtcgcattttgccggtgcagagcatcctga

SEQ ID NO: 289345 - DNA, 75 bp, synthetic construct
  source 1..75: mol_type = other DNA
aaacgaagtgggtaaagtgacatccgtcacgccgcccaaactgacgcgcaaaaccgacagctatcgtggtggtgg

SEQ ID NO: 289346 - DNA, 75 bp, synthetic construct
  source 1..75: mol_type = other DNA
cttggtctggatgacggcgcgctggatgcgagtttcaccatgggcgggccgacccgcgaactgttccttaagtac

SEQ ID NO: 289347 - DNA, 75 bp, synthetic construct
  source 1..75: mol_type = other DNA
tatcgctgcggcttatcataaaccaacgcttgcattttatcctaattcacgtactccggaatatccctcacattt

SEQ ID NO: 289348 - DNA, 75 bp, synthetic construct
  source 1..75: mol_type = other DNA
tttttacgctgtttgtggatggtgaaaacgaagtgggtaacgtgacctccgtcactcagcccaaactgacgcgca

SEQ ID NO: 289349 - DNA, 75 bp, synthetic construct
  source 1..75: mol_type = other DNA
tttttacgttgtttgtggatggtgaaaacgaagtgggtaatgtgacctccgtcactccgcccaaactgacgcgca

SEQ ID NO: 289350 - DNA, 75 bp, synthetic construct
  source 1..75: mol_type = other DNA
tttttacgatgtttgtggatggtgaaaacgaagtgggtaaggtgacctccgtcactccgcccaaactgacgcgca

SEQ ID NO: 289351 - DNA, 75 bp, synthetic construct
  source 1..75: mol_type = other DNA
ggcgggcctgagtaccacgatagaattcattagcgcggaaaccagaccaatgacgggtacagtgtcagtgaatag

SEQ ID NO: 289352 - DNA, 75 bp, synthetic construct
  source 1..75: mol_type = other DNA
gggtaggcgttgatgctactggtaaagtgacattcaaaaatgacggtgatagcaatacagtaataatcacagcgc

SEQ ID NO: 289353 - DNA, 75 bp, synthetic construct
  source 1..75: mol_type = other DNA
gagcggaaaaagcaccgggtccggcgccggcgctgaacaggccttactggataacaccaacgtcagggtcttcta

SEQ ID NO: 289354 - DNA, 75 bp, synthetic construct
  source 1..75: mol_type = other DNA
agcatctgcggaatttacagttcgatattgtattagacccctttgagactatgccttcatttaagcatagtttaa

SEQ ID NO: 289355 - DNA, 75 bp, synthetic construct
  source 1..75: mol_type = other DNA
taagatcctggctgatatcgcagtattcgacaaagtagctttcaccgctctggttgaaaaagcgaaagcagctct

SEQ ID NO: 289356 - DNA, 75 bp, synthetic construct
  source 1..75: mol_type = other DNA
gatgtacatggtgtgatcactcgtttacgccagacttttgtaactcgtgaagagatgattgaagctattgaccag

SEQ ID NO: 289357 - DNA, 75 bp, synthetic construct
  source 1..75: mol_type = other DNA
tttttacggtgtttgtggatggtgaaaacgaagtgggtaaagtgacctccgtcactccgcccaaactgacgcgca

SEQ ID NO: 289358 - DNA, 75 bp, synthetic construct
  source 1..75: mol_type = other DNA
cgtcgccaatgtccctattggggtaggctttgctggaggtgtcatatccaacgtgggatacaccatcaccaattt

SEQ ID NO: 289359 - DNA, 75 bp, synthetic construct
  source 1..75: mol_type = other DNA
caatataaacatgaataaattacgtgacagggttcataatactattgtgcaggaggttcagagaaatttaaaatg

SEQ ID NO: 289360 - DNA, 75 bp, synthetic construct
  source 1..75: mol_type = other DNA
tgagcgttaacgatcgcccgctgtgggaaatcgacctgctgaaccacatctaccggaaggacggcaaggacattg

SEQ ID NO: 289361 - DNA, 75 bp, synthetic construct
  source 1..75: mol_type = other DNA
tatgtcccttcaggccgagtaccttatgcttctcgctcaccattatatcagcaaatattgtcaatcaagccagct

SEQ ID NO: 289362 - DNA, 75 bp, synthetic construct
  source 1..75: mol_type = other DNA
cgcctgtaactgatgacatcagcagagcggtggcttttgccattaagtgggtggcggtcggtatcgctgtgtctc

SEQ ID NO: 289363 - DNA, 75 bp, synthetic construct
  source 1..75: mol_type = other DNA
gaatgacagcaatgaccaactccaaaaattacgaacagggtaaggagcttggcgggtatcaagccgcactacagg

SEQ ID NO: 289364 - DNA, 75 bp, synthetic construct
  source 1..75: mol_type = other DNA
atagacctgatgaacaacatataccggaaggacggcaaggacattgtgccagaacgaatccgttccgcgcttggg

SEQ ID NO: 289365 - DNA, 75 bp, synthetic construct
  source 1..75: mol_type = other DNA
agacagacgattatttatgctgcctcattcgctccatgaataagacctgtgaaatggcttacgagtatatagaaa

SEQ ID NO: 289366 - DNA, 75 bp, synthetic construct
  source 1..75: mol_type = other DNA
atgataactccattaaatattcttgaggaagtggcggcacaaataaaagagaatacatcaatgcttgaatttata

SEQ ID NO: 289367 - DNA, 75 bp, synthetic construct
  source 1..75: mol_type = other DNA
ggaaattgacctggtgaaccacatctaccggaaggatggcaaggacattgtacccgaccgcatccgctccgcgct

SEQ ID NO: 289368 - DNA, 75 bp, synthetic construct
  source 1..75: mol_type = other DNA
tgagtattaacgatcgtccggtgtgggaaattgacctggtgaaccacatctaccggaaggatggcaaggacattg

SEQ ID NO: 289369 - DNA, 75 bp, synthetic construct
  source 1..75: mol_type = other DNA
agttcgtgagctgttccttaagtatggcggcacgattgacggcacgctactgcgttttgcgggtgaatactacac

SEQ ID NO: 289370 - DNA, 75 bp, synthetic construct
  source 1..75: mol_type = other DNA
aagccattgtctatgcgctgtctcatcgcgtggaactaagccgcttcctggaagatggtgcggtgccgctggata

SEQ ID NO: 289371 - DNA, 75 bp, synthetic construct
  source 1..75: mol_type = other DNA
ctccacagtgcgtcagagttcaaccttcgctgattgggtactgatggttgcgccgccgctgatctttttcttggt

SEQ ID NO: 289372 - DNA, 75 bp, synthetic construct
  source 1..75: mol_type = other DNA
agacgtcctgatgcgtctgccggagtggccggaagagcgactggaagagttgctgccccttgagggatttacctt

SEQ ID NO: 289373 - DNA, 75 bp, synthetic construct
  source 1..75: mol_type = other DNA
ttggaagaaaaaattatctcttcttcggttctgacaacggtggagaaagcgcggcgattatctacagtctgctgg

SEQ ID NO: 289374 - DNA, 75 bp, synthetic construct
  source 1..75: mol_type = other DNA
tgcgagcgtgccattcgcccggttgttatgggacggaaagcgtggctgttcgccggttcactgatggccggaaac

SEQ ID NO: 289375 - DNA, 75 bp, synthetic construct
  source 1..75: mol_type = other DNA
ttaagagttccccgcgcctgcggggataaaccggtgtttgaggtgccgcagccaatctgtacgtcgagttccccg

SEQ ID NO: 289376 - DNA, 75 bp, synthetic construct
  source 1..75: mol_type = other DNA
tctttgaggaagatttgcagatccgcttccgtccttcctacttcccgtttaccgaaccttctgcagaagtggacg

SEQ ID NO: 289377 - DNA, 75 bp, synthetic construct
  source 1..75: mol_type = other DNA
ggaaagagcgcttcgtgcagtctgtctcggaaagaaaacgtgttcttcggtagcgatcacggcggcgagcgtgga

SEQ ID NO: 289378 - DNA, 75 bp, synthetic construct
  source 1..75: mol_type = other DNA
tggttccccatggctggagcgtggatattcctgcaatgttactggctgctcagggagaaaaaatggccgccatgt

SEQ ID NO: 289379 - DNA, 75 bp, synthetic construct
  source 1..75: mol_type = other DNA
gaatggtaattccggtggtggcagcaattcatccgtagcagcagtggcatttggttttcctgctttggcagctcc

SEQ ID NO: 289380 - DNA, 75 bp, synthetic construct
  source 1..75: mol_type = other DNA
ttcttacccctgcacaggtaaaacaacgtcaggatgaggaaaatcgcctccagcaggaatggaatgacacacatc

SEQ ID NO: 289381 - DNA, 75 bp, synthetic construct
  source 1..75: mol_type = other DNA
aggtaccaccctcccaaaaaggatcgtacctttatgcaaaggttaaaaatttggtttcaaacagtagacgattgg

SEQ ID NO: 289382 - DNA, 75 bp, synthetic construct
  source 1..75: mol_type = other DNA
aaggacagaatcaggcggaaaacgtctgtggatagcggagggatacgcgaccgcacttaccgtgcatcacctgac

SEQ ID NO: 289383 - DNA, 75 bp, synthetic construct
  source 1..75: mol_type = other DNA
ccgcgacgaattcattatgatccgcaaaatgaagaacgttaactggctggatgatgaaggtcgcgatcaggttca

SEQ ID NO: 289384 - DNA, 75 bp, synthetic construct
  source 1..75: mol_type = other DNA
cgatttccgtaagcgcacccaccgtctggcgtgcgatatggggattatcgagctgctggctaacggccaacaatt

SEQ ID NO: 289385 - DNA, 75 bp, synthetic construct
  source 1..75: mol_type = other DNA
gaggttgtattcccgacgcattgtccggtatgtggttctgacgttgagcgtgtggaaggtgaagcggttgcccgc

SEQ ID NO: 289386 - DNA, 75 bp, synthetic construct
  source 1..75: mol_type = other DNA
gatgtcggaattgtcgttgcatcccatgttcataacttctttgccgaagacagtaaccgcaatgtcatcagcgag

SEQ ID NO: 289387 - DNA, 75 bp, synthetic construct
  source 1..75: mol_type = other DNA
cagcatacagctcggcttctgcaagtgctcagggaacactttccaacctgccagatagctattactacagaggtg

SEQ ID NO: 289388 - DNA, 75 bp, synthetic construct
  source 1..75: mol_type = other DNA
agccaggcgacgaactggagatcacgatcgcaaaccccgatcgcagcacagataccgtcatgaccgacatcctga

SEQ ID NO: 289389 - DNA, 75 bp, synthetic construct
  source 1..75: mol_type = other DNA
cggtggactggcggaggaatatctacaagcgatggggatggcggcgcgttacgcatggttaaatcgcgtcacaat

SEQ ID NO: 289390 - DNA, 75 bp, synthetic construct
  source 1..75: mol_type = other DNA
gccggatttagtcattcccgccgccatcggcaccgatatttcttgtggcatgcggctgctgacgaccggattaac

SEQ ID NO: 289391 - DNA, 75 bp, synthetic construct
  source 1..75: mol_type = other DNA
aattgcggatatttacgcgataggcgtttcgtaaacggtaaacagatacgcgtttgggtgaaaactagtaccacc

SEQ ID NO: 289392 - DNA, 75 bp, synthetic construct
  source 1..75: mol_type = other DNA
taaactgaaagcgctgggtaagacgccaagtcgctataaccgggaccgccaggtcaccggtattgctcaatggac

SEQ ID NO: 289393 - DNA, 75 bp, synthetic construct
  source 1..75: mol_type = other DNA
cgacctggtattggggagaactgagcatcttctcccagttgtatgtaaccccggtgcgaccatatcccctgatag

SEQ ID NO: 289394 - DNA, 75 bp, synthetic construct
  source 1..75: mol_type = other DNA
cggcaatgtgctgcagtaccggcgtatgtggctcagatgtcgatcaggttctggttgatttttctgctgatgtgc

SEQ ID NO: 289395 - DNA, 75 bp, synthetic construct
  source 1..75: mol_type = other DNA
gctaagcggcatggccagcgggattgtctccctgtttgataacgtctggcagaccatcaaaggcgggttcctgaa

SEQ ID NO: 289396 - DNA, 75 bp, synthetic construct
  source 1..75: mol_type = other DNA
atggccatcaaaggggcgttatcaccggccattgaaatgtatgacgcgctgaatgatgcggcagcaaaagggatt

SEQ ID NO: 289397 - DNA, 75 bp, synthetic construct
  source 1..75: mol_type = other DNA
gtgtcattgtttgataatgtctggttgtccgttaaaaacggctttctgaaatcatggaactggattgtaagtaaa

SEQ ID NO: 289398 - DNA, 75 bp, synthetic construct
  source 1..75: mol_type = other DNA
gataacgtctttaataccgtcgaacgcaaaacggtgggcacaaaactcaaagtcactccgcaggtcaatgaaggc

SEQ ID NO: 289399 - DNA, 75 bp, synthetic construct
  source 1..75: mol_type = other DNA
tggccagtaacaataaaaatgacatcctcgccaccccaagcatcgtaacgctggataataaactcgcgtccttca

SEQ ID NO: 289400 - DNA, 75 bp, synthetic construct
  source 1..75: mol_type = other DNA
ggatggaacagctttatttctttgctgacaggattttcaccgtctgaagcattaaaggggatggcctccggcatt

SEQ ID NO: 289401 - DNA, 75 bp, synthetic construct
  source 1..75: mol_type = other DNA
ggaaaagccgcgctgggcagtgccatcggcggcggttttaaggatgtggcggactgggtgaaatcccgctacggg

SEQ ID NO: 289402 - DNA, 75 bp, synthetic construct
  source 1..75: mol_type = other DNA
tctcagggcagcgacggcatgatgtgggtctcgccgacggaccagaaagagacggatctgcgcgacgcggccagc

SEQ ID NO: 289403 - DNA, 75 bp, synthetic construct
  source 1..75: mol_type = other DNA
cagcaatcagcaggcgaaggggaatggtactggcgggattggctggatctccgatgaagacggtattccctgcat

SEQ ID NO: 289404 - DNA, 75 bp, synthetic construct
  source 1..75: mol_type = other DNA
tactcagctttgcggctgtgggcgcagtcgccaacatcgtgatgggtgtctccagattcatcatgatggggttgc

SEQ ID NO: 289405 - DNA, 75 bp, synthetic construct
  source 1..75: mol_type = other DNA
gctgggacttgacggactgagtggttctccgggaagcacggtgtcacagggggccgatggcctgatgtgggtgac

SEQ ID NO: 289406 - DNA, 75 bp, synthetic construct
  source 1..75: mol_type = other DNA
ggcgggttcgcacgctgccggcaccggatgtgaacggcaccaccaacagcaatcagcagacgaagaacgggaata

SEQ ID NO: 289407 - DNA, 75 bp, synthetic construct
  source 1..75: mol_type = other DNA
agcagctgcggttccggtgcctgaattaaaacaggttgctaaagcagagggggcagcatcatccctgccacaaaa

SEQ ID NO: 289408 - DNA, 75 bp, synthetic construct
  source 1..75: mol_type = other DNA
tgaactggctcgctggttcggtattccgctggagaaggtagggttagctcccgccagttgctgtggtggtaatac

SEQ ID NO: 289409 - DNA, 75 bp, synthetic construct
  source 1..75: mol_type = other DNA
caggccggtggcacctggcagctggcctggcagaaccccggactcaattacagcatcgatgcgccgctgcatttc

SEQ ID NO: 289410 - DNA, 75 bp, synthetic construct
  source 1..75: mol_type = other DNA
ttgtgccgctgctggcattttctgttccactttttgctgcaccgtcaccttctcaggtcagtgcaccctcatcgt

SEQ ID NO: 289411 - DNA, 75 bp, synthetic construct
  source 1..75: mol_type = other DNA
tggcagggcgatacccaaaacgtgctgagctggctcgctggttcggtattccgctggagaaggtagggttagctc

SEQ ID NO: 289412 - DNA, 75 bp, synthetic construct
  source 1..75: mol_type = other DNA
caacccatgagctttgtacagaacgaaaaagccaaagcattccttgaggcatccggggctgaagggcttccattg

SEQ ID NO: 289413 - DNA, 75 bp, synthetic construct
  source 1..75: mol_type = other DNA
ggttgaacgttacaacctggcgcagcagcccatgagctttgttcagaatgagaaagcgaaagcattcctcgaagc

SEQ ID NO: 289414 - DNA, 75 bp, synthetic construct
  source 1..75: mol_type = other DNA
tagcgcgccgtattccccccgccggccgttttcttcgacatgtacatcaggcgcggaactcatcggggcgcagga

SEQ ID NO: 289415 - DNA, 75 bp, synthetic construct
  source 1..75: mol_type = other DNA
tgtaaaaatccgttccacctggaatggctggtgatggagtggcgcgaggaagcctataccctcgatgaactggct

SEQ ID NO: 289416 - DNA, 75 bp, synthetic construct
  source 1..75: mol_type = other DNA
cgcaaaacctttggcaccgaaatggccactattaaagacctgatggaaggcgcgcgcggcgtgggtacaaattac

SEQ ID NO: 289417 - DNA, 75 bp, synthetic construct
  source 1..75: mol_type = other DNA
ctggcgtctgctttcacagcgtcatggcgacgctctgcctgtggaaccgcccccgtcgccgccccggagtggctg

SEQ ID NO: 289418 - DNA, 75 bp, synthetic construct
  source 1..75: mol_type = other DNA
gagttattcctcaccaccgctcagtggcaacaacagtgccgccacgccggattcagcaaagtggcgtggctaccg

SEQ ID NO: 289419 - DNA, 75 bp, synthetic construct
  source 1..75: mol_type = other DNA
tgcgccccctgctcaagccgggcgggcgcctgctgatgcgcgaaatcacccagccaatgcgtctgtttgacttcg

SEQ ID NO: 289420 - DNA, 75 bp, synthetic construct
  source 1..75: mol_type = other DNA
atgttcacccttcacccattattcaccacctatcactctgaaataaaaggagaaaacagaaaggtgaacagtgtg

SEQ ID NO: 289421 - DNA, 75 bp, synthetic construct
  source 1..75: mol_type = other DNA
attgtggaaacgctgggaggatatgctgaaagtggaacaaatcaggcatgtgctggttcactccgaaggtgagat

SEQ ID NO: 289422 - DNA, 75 bp, synthetic construct
  source 1..75: mol_type = other DNA
tttacgcttaatgttccctttagtcattggatgcgtacagacagtcagtcggcatttcataattcaaacgccagt

SEQ ID NO: 289423 - DNA, 75 bp, synthetic construct
  source 1..75: mol_type = other DNA
agcagcactaccccagagcgtggtagcctgggagtatctggtggaagattatgatcgcattcgcaatgacattga

SEQ ID NO: 289424 - DNA, 75 bp, synthetic construct
  source 1..75: mol_type = other DNA
tacatatcgggtcgacatttatttgaacgacgaatttatggctagtcgggatattacttttattgcagatgataa

SEQ ID NO: 289425 - DNA, 75 bp, synthetic construct
  source 1..75: mol_type = other DNA
atgaaacaaacacaacgtcacaacggtattatcgaactggttaaacagcagggttatgtcagtaccgaagagctg

SEQ ID NO: 289426 - DNA, 75 bp, synthetic construct
  source 1..75: mol_type = other DNA
gacagcgacggctcgctgctggagttcgattaccacgaagttcgtaccaagcgcgccattattgagaactcgcgc

SEQ ID NO: 289427 - DNA, 75 bp, synthetic construct
  source 1..75: mol_type = other DNA
acagttcgctgtgatactggagagtgaagcatttaaagaactaggtatagtaaattattcaatgattcctgatac

SEQ ID NO: 289428 - DNA, 75 bp, synthetic construct
  source 1..75: mol_type = other DNA
acagcctggcgaaacgcggttgctatcgcgtgttgtttgttgatcaaggcgatgaacaggcattacgggcagcgc

SEQ ID NO: 289429 - DNA, 75 bp, synthetic construct
  source 1..75: mol_type = other DNA
tgctgcgtatctccaccggtattgaagatggcgaagatttaattgccgacctggaaaatggcttccgggctgcaa

SEQ ID NO: 289430 - DNA, 75 bp, synthetic construct
  source 1..75: mol_type = other DNA
agccgtaaccgtcgtcgtcgctacaactcatattgcggagaaatcggaccggctccggataaccttatcgccaga

SEQ ID NO: 289431 - DNA, 75 bp, synthetic construct
  source 1..75: mol_type = other DNA
caatgtttccagtaatgcagctgttgcattcctgggtactactgtcaccagtaatgacgacacattagcgctgca

SEQ ID NO: 289432 - DNA, 75 bp, synthetic construct
  source 1..75: mol_type = other DNA
gtaatccgctggcggaaccgacgacacttggcgttgctacaggcgcgcaactggggattaccgtcactacgctct

SEQ ID NO: 289433 - DNA, 75 bp, synthetic construct
  source 1..75: mol_type = other DNA
cggctgatgctggcgtcgctgattggggcgctgatcctctggctttccgatcaaatcattctctggctaacccgc

SEQ ID NO: 289434 - DNA, 75 bp, synthetic construct
  source 1..75: mol_type = other DNA
gccgggtaatgcctttggctggctgttacctgcaggcagtctcggcgcggcggtgacgctgttgatcattatgat

SEQ ID NO: 289435 - DNA, 75 bp, synthetic construct
  source 1..75: mol_type = other DNA
tgatgctggcgtcgctgattggtgcgttaattctgtggctttctgatcaaatcatcctctggctgactcgcgtgt

SEQ ID NO: 289436 - DNA, 75 bp, synthetic construct
  source 1..75: mol_type = other DNA
gtcgccggatattaacgtcatcgagcagatgatttttcactacagcttgttaccacgtctggcgatttctctact

SEQ ID NO: 289437 - DNA, 75 bp, synthetic construct
  source 1..75: mol_type = other DNA
accgggtaatgcttttggctggctgttacccgcgggaagtatcggtgcggcggtgacgctgttgattattatgat

SEQ ID NO: 289438 - DNA, 75 bp, synthetic construct
  source 1..75: mol_type = other DNA
atgacagcctttcgtgccgcatttaaggcatatcgtatgcatcaggtgttaatactaccacgctttgcacggctt

SEQ ID NO: 289439 - DNA, 75 bp, synthetic construct
  source 1..75: mol_type = other DNA
ctgtttcctttatggcgacagtgttacttttatttctctttgcttgccatagcaccattgccaacgcagctgtcg

SEQ ID NO: 289440 - DNA, 75 bp, synthetic construct
  source 1..75: mol_type = other DNA
ccttgggggaatatcgtagtggaaataacctgcaaagctccccaaaattcattcagggcagcgtaatgcatggtc

SEQ ID NO: 289441 - DNA, 75 bp, synthetic construct
  source 1..75: mol_type = other DNA
tgaaggtcaacgatcgtgtcgcgactgaacgccaacatgtgctggcgtttgccctcgcgggcggcgtgctgctgt

SEQ ID NO: 289442 - DNA, 75 bp, synthetic construct
  source 1..75: mol_type = other DNA
ttacgcagcattagcgcgccggatatgaaggtcaacgatcgtgtcgcgactgaacgccaacatgtgctggcgttt

SEQ ID NO: 289443 - DNA, 75 bp, synthetic construct
  source 1..75: mol_type = other DNA
gcgtcgcgtgggggaaacggctttcgccggttacgcttattctcgcggggctggtggtgagcctttattgtgggg

SEQ ID NO: 289444 - DNA, 75 bp, synthetic construct
  source 1..75: mol_type = other DNA
aaataattgattcgttaccgtgtgtaattgttgatgtcggctcatctaatattgaagttttcatgaataaactga

SEQ ID NO: 289445 - DNA, 75 bp, synthetic construct
  source 1..75: mol_type = other DNA
cacacgcggacgagtattcgcgttatgtcgtagacggggcggcggttgctgaaatgaaaggaatcattgaacgcc

SEQ ID NO: 289446 - DNA, 75 bp, synthetic construct
  source 1..75: mol_type = other DNA
gtgatttgcggcgcgatcatggcagacggcataagcccgctaatgaaagcctacatcaagtcaagtgaggatatg

SEQ ID NO: 289447 - DNA, 75 bp, synthetic construct
  source 1..75: mol_type = other DNA
atgaaggtttatatcctctcttcagaggatatggtcgtcggttatatcggtgaaggatctaccgcagaactgtca

SEQ ID NO: 289448 - DNA, 75 bp, synthetic construct
  source 1..75: mol_type = other DNA
tcggcgtccacagtgcgtcagagttcaaccttcgctgattgggtactgatggttgcgccgccgctgatctttttc

SEQ ID NO: 289449 - DNA, 75 bp, synthetic construct
  source 1..75: mol_type = other DNA
gcttgtagataatgtattaagaattcttatgccagaggacaacatggcgaaattaattcatccgataaatgaatt

SEQ ID NO: 289450 - DNA, 75 bp, synthetic construct
  source 1..75: mol_type = other DNA
aactggttaatgaataccgcgagttttgatctgtacaaacaagcgcccgtgcttgtagataatgtattaagaatt

SEQ ID NO: 289451 - DNA, 75 bp, synthetic construct
  source 1..75: mol_type = other DNA
gtgctggtgagtaacgccacactgcataatgctgacgaaatcgaacgtcttggtttacgcattggcgataaagtg

SEQ ID NO: 289452 - DNA, 75 bp, synthetic construct
  source 1..75: mol_type = other DNA
tggtttacgtattggcgataaggtggtgatccgccgcgctggcgatgtgatcccgcaggtggttaacgtcgtgct

SEQ ID NO: 289453 - DNA, 75 bp, synthetic construct
  source 1..75: mol_type = other DNA
gaccgcccgacgctgggctttgatatcgacggcgtggtgattaaggtcaactcactggcacagcaggagcagctt

SEQ ID NO: 289454 - DNA, 75 bp, synthetic construct
  source 1..75: mol_type = other DNA
cgcgcaacttgaagtgaacgcagccattacagcattgctgaagatggaatcgccggaactgaacaatgtagcgcc

SEQ ID NO: 289455 - DNA, 75 bp, synthetic construct
  source 1..75: mol_type = other DNA
acacgggcaagagtcgattctggttcccgactttaatactaagcttcagtgccagatcctgggggagggaatcgg

SEQ ID NO: 289456 - DNA, 75 bp, synthetic construct
  source 1..75: mol_type = other DNA
ttgtcgttgcatcccacgttcacaacttctttgccgaagaaagcaaccgcaatgtcatcagcgagctgttggcgg

SEQ ID NO: 289457 - DNA, 75 bp, synthetic construct
  source 1..75: mol_type = other DNA
tcaccggaggcgaaaagcaagtcggaagagctggaagatgaacccagtgccaatattgcctttgtgccactggca

SEQ ID NO: 289458 - DNA, 75 bp, synthetic construct
  source 1..75: mol_type = other DNA
gcgcgtttgacagttatttgttgctgcgcggtttgcgaacgctggtgccgcgtatggagctggcccagcgcaacg

SEQ ID NO: 289459 - DNA, 75 bp, synthetic construct
  source 1..75: mol_type = other DNA
tggcagacaacaagggcaaatgtgaagccgctaacgtcagcagtaatatccgcgctgagctgaaaaaagctttcc

SEQ ID NO: 289460 - DNA, 75 bp, synthetic construct
  source 1..75: mol_type = other DNA
tctgaacattcctggtcaccacccggcgcgcgctgaccacgacactttctggtttgacactacccgcctgctgcg

SEQ ID NO: 289461 - DNA, 75 bp, synthetic construct
  source 1..75: mol_type = other DNA
acttaataaagccgcagacgacaaggaacaccaggacgccgaggataaagcgcgagcagatgcagcctttacagt

SEQ ID NO: 289462 - DNA, 75 bp, synthetic construct
  source 1..75: mol_type = other DNA
gcaaacaatattggcgtgacgggcggcgcgtttgacagctatctgctgctgcgcggtctacgtacgctggtgccg

SEQ ID NO: 289463 - DNA, 75 bp, synthetic construct
  source 1..75: mol_type = other DNA
tcgcgtgttgtttgttgatcaaggcgatgaacaggcattacgggcagcgctggcagaaaaacccaaactggtact

SEQ ID NO: 289464 - DNA, 75 bp, synthetic construct
  source 1..75: mol_type = other DNA
cgctgctcaatcacagcaatttgcgcattgtcaccaataatctcaacgtcgctaacacgctgatggtgaaagaag

SEQ ID NO: 289465 - DNA, 75 bp, synthetic construct
  source 1..75: mol_type = other DNA
atgaaacaaacacaacgtcacaacggtattatcgaactggttaaacagcagggttatgtcagtaccgaggaactg

SEQ ID NO: 289466 - DNA, 75 bp, synthetic construct
  source 1..75: mol_type = other DNA
gtctggggctggtggtgttactgccgttagctaacccgcttactaccgtagcgttgtttctcggtctggcgggca

SEQ ID NO: 289467 - DNA, 75 bp, synthetic construct
  source 1..75: mol_type = other DNA
gtgaacaggatctggaatacattcaggttctggacgctcgtatgctgttgtccttaccgcaaaatcatccactgg

SEQ ID NO: 289468 - DNA, 75 bp, synthetic construct
  source 1..75: mol_type = other DNA
cggaagcggtggcgcacgcgctgcttaatcacagcaatttacgcattgtgaccaacaatctcaacgtcgctaaca

SEQ ID NO: 289469 - DNA, 75 bp, synthetic construct
  source 1..75: mol_type = other DNA
gatgctgtctacaccgacacgatgccgcctgcgagcgtgatgcaggtgctgaaggaccatcatattcaactggag

SEQ ID NO: 289470 - DNA, 75 bp, synthetic construct
  source 1..75: mol_type = other DNA
actccctttcactggaagagcagagagaatttgccaccaagtgcggaacttctatcggctatttgaggaaagcac

SEQ ID NO: 289471 - DNA, 75 bp, synthetic construct
  source 1..75: mol_type = other DNA
acagcaacggaggcgttgcttaataccattcgcgccgttctgaatgcagaggatacccgcccggtggccgaccgc

SEQ ID NO: 289472 - DNA, 75 bp, synthetic construct
  source 1..75: mol_type = other DNA
tggcagttacagcaatatgatttccgtgcgcctgaatgatccgcgcggcggtggctatacccagctttggctaag

SEQ ID NO: 289473 - DNA, 75 bp, synthetic construct
  source 1..75: mol_type = other DNA
tttgatattgttgtgagcgattgttgcccggaagatgagtatgtgaagtacgcgcagacgcagcgtattaagttg

SEQ ID NO: 289474 - DNA, 75 bp, synthetic construct
  source 1..75: mol_type = other DNA
gtgcatgtcagtaaaggcgctacctgctttaatcttgaagagttgccggtaaaacactgggccatgtcgatggcg

SEQ ID NO: 289475 - DNA, 75 bp, synthetic construct
  source 1..75: mol_type = other DNA
ttcagcaatggtgaagtgactcgcaaagaccttcatccggttgattgggaaagcatctggcctgaattaatggcc

SEQ ID NO: 289476 - DNA, 75 bp, synthetic construct
  source 1..75: mol_type = other DNA
tcagcaaggcgaccagcaatctccatacggaccggggagaacgaagccggacaacgtttgtgtgggaagggttcc

SEQ ID NO: 289477 - DNA, 75 bp, synthetic construct
  source 1..75: mol_type = other DNA
gttgcctggtgttcagctatgaccgcagcggctggctgaccgggcgcacggggcagatgtacgaccatgaccatt

SEQ ID NO: 289478 - DNA, 75 bp, synthetic construct
  source 1..75: mol_type = other DNA
tccgcattgcccagggttccggcaatatctacatcaacagccagcccgccgcccgaaaggatgaccacaccgaat

SEQ ID NO: 289479 - DNA, 75 bp, synthetic construct
  source 1..75: mol_type = other DNA
tcgtgggacgggagcttacacctacgactggtctccggagacgcgtcacgggagcatgaagagcgccagtttaca

SEQ ID NO: 289480 - DNA, 75 bp, synthetic construct
  source 1..75: mol_type = other DNA
tggtagttatagcaatatgatttccgtgcgtctgaatgacccgcgcggcactggttatacgcaactatggctaag

SEQ ID NO: 289481 - DNA, 75 bp, synthetic construct
  source 1..75: mol_type = other DNA
cgccctgaacgatgaagaggtgcgcccggtggctgacagggtaacggtacagtctgcggagatcgtgccgtatca

SEQ ID NO: 289482 - DNA, 75 bp, synthetic construct
  source 1..75: mol_type = other DNA
gatttgatgactgccatgatggtgttatttctggtcgttatggttgcgtcgctgagttccgttacacagcgtatt

SEQ ID NO: 289483 - DNA, 75 bp, synthetic construct
  source 1..75: mol_type = other DNA
catcccgctgatgcatttgctggtttaattaacgaactggaaagcgccgggcaaacggtagtgctggtagtacgt

SEQ ID NO: 289484 - DNA, 75 bp, synthetic construct
  source 1..75: mol_type = other DNA
ccactggcgcaagccattgtgcgcgaagcacaggttgctgaactcgccattcccaccgccgaatcacagcgggcg

SEQ ID NO: 289485 - DNA, 75 bp, synthetic construct
  source 1..75: mol_type = other DNA
ctgttagggatgaccggactgtggctggcggtgctggcagatacgggtgcgacggtgctggtgacggcgaatgcg

SEQ ID NO: 289486 - DNA, 75 bp, synthetic construct
  source 1..75: mol_type = other DNA
cggctgcggcgcgtcgtggcgcgttgattaaaggtggtgcagcgctggagcagttaggtcgtgtcactcaggtcg

SEQ ID NO: 289487 - DNA, 75 bp, synthetic construct
  source 1..75: mol_type = other DNA
attcatccggcaacaggtattagcgaatctgaactgctggcgctggcggcggcggtcgagcaaggcgcgacgcat

SEQ ID NO: 289488 - DNA, 75 bp, synthetic construct
  source 1..75: mol_type = other DNA
aaacattgatgagcgtagccgctatcggcgcgctgtttattggtgcaacggcggaagccgcgatggtgttattgc

SEQ ID NO: 289489 - DNA, 75 bp, synthetic construct
  source 1..75: mol_type = other DNA
atgaacgacatcaaaacggcttattcactcggcagcgaaggcatgttaatcactcgctacactgaagacgcaagt

SEQ ID NO: 289490 - DNA, 75 bp, synthetic construct
  source 1..75: mol_type = other DNA
ccataatagctgttgtgatacctgctgtattggcatggttttcaagaaaaaacctcaaaaatgcacaggaaactt

SEQ ID NO: 289491 - DNA, 75 bp, synthetic construct
  source 1..75: mol_type = other DNA
taccgacaccgatggttcgtacttatacaacctgcatctctccctgcaacgctctgaatgggtaatgtgtagttt

SEQ ID NO: 289492 - DNA, 75 bp, synthetic construct
  source 1..75: mol_type = other DNA
ttacgtgtctttaagtatggaagaaaaaacatcggtagcgcgttatgtattctctcttacttttgtgaagcgcat

SEQ ID NO: 289493 - DNA, 75 bp, synthetic construct
  source 1..75: mol_type = other DNA
gttgcattgtattctatgcgcagcgtaatgaaagaaatatttgaggctaaagcattgcagaagtgtattgatgaa

SEQ ID NO: 289494 - DNA, 75 bp, synthetic construct
  source 1..75: mol_type = other DNA
tctgccttactttcgtaaaacgaatggaagaggaatttggtcgcgtaccagttccggaagaaattgacccgctgg

SEQ ID NO: 289495 - DNA, 75 bp, synthetic construct
  source 1..75: mol_type = other DNA
tccgcattgcccagggttccggcaacatctacatcaacagtcagcctgccgcccgaaaagatgatcatactgaat

SEQ ID NO: 289496 - DNA, 75 bp, synthetic construct
  source 1..75: mol_type = other DNA
tcgctcaagttctactttgaataatagtgtgtctgatcctcagtttgttcagtcttcagcagcaatcggattacc

SEQ ID NO: 289497 - DNA, 75 bp, synthetic construct
  source 1..75: mol_type = other DNA
gctactgcaagttatgacgctcaggttcagagaatccgggcctctatgaatggcggcgcagatagcggcagcgat

SEQ ID NO: 289498 - DNA, 75 bp, synthetic construct
  source 1..75: mol_type = other DNA
atgcaactgcaagttacgacgctcaggttcagagaatccgggcttcaatgaatggcgtcacagatagcaatagcg

SEQ ID NO: 289499 - DNA, 75 bp, synthetic construct
  source 1..75: mol_type = other DNA
cgacagctgcgtatatgcgtggcgttgaatttcctaacccacctggtgaggctgattttattgcagcttatggag

SEQ ID NO: 289500 - DNA, 75 bp, synthetic construct
  source 1..75: mol_type = other DNA
tgaggaggcttctcaaaagtgtaaaacaaattacaaattgcaaaataaaaaagcgaaattcagtgaattaacttt

SEQ ID NO: 289501 - DNA, 75 bp, synthetic construct
  source 1..75: mol_type = other DNA
ccgctcaactcattgctgaatggaaataacctgttcttaaccacgaataccattacgaataatggtcaggtgcaa

SEQ ID NO: 289502 - DNA, 75 bp, synthetic construct
  source 1..75: mol_type = other DNA
gacgcgccgctggccgtaatggcgctcctgtgccacggaaaaaacctcggctgggacaaatcgctcagggaggtg

SEQ ID NO: 289503 - DNA, 75 bp, synthetic construct
  source 1..75: mol_type = other DNA
cgaccagagaaaacctggatttactgtatgcgcaggcccgtgtctacgacagggtaaaaaactggaacagactga

SEQ ID NO: 289504 - DNA, 75 bp, synthetic construct
  source 1..75: mol_type = other DNA
gcgcaggctgtgatggtggcttatgcgatgggcagcgatcttgaccagctcgctgccaactacaacgtgaaacgc

SEQ ID NO: 289505 - DNA, 75 bp, synthetic construct
  source 1..75: mol_type = other DNA
tctttggtaatgccctgttgttatcaggtattaccgcgacaattgcctattctcaggatcgcgatcagaacaaca

SEQ ID NO: 289506 - DNA, 75 bp, synthetic construct
  source 1..75: mol_type = other DNA
cccgccaacattgcctgaacagaacaacaagacagcacagaacaagccaacaactgcgttgccttctgttcctgt

SEQ ID NO: 289507 - DNA, 75 bp, synthetic construct
  source 1..75: mol_type = other DNA
aaaaagtttcagcaccacacagtcagtatgaacttcgtgcgggctgggtcattcctggcgtcatgattagcggta

SEQ ID NO: 289508 - DNA, 75 bp, synthetic construct
  source 1..75: mol_type = other DNA
ggacagtatataggctctttccgcaacatgccgacaagcagcattacagcatatgttgagcaattacgcccggat

SEQ ID NO: 289509 - DNA, 75 bp, synthetic construct
  source 1..75: mol_type = other DNA
acgtttgtgtgggaagggttccggctgttgcaggagacaacgtggcagggaaagcggacgtatctgtacgacgcg

SEQ ID NO: 289510 - DNA, 75 bp, synthetic construct
  source 1..75: mol_type = other DNA
cagatgtacgaccatgaccattattattacgacaaagcgggcaacctgctgacggatgaatatcagggagcggtg

SEQ ID NO: 289511 - DNA, 75 bp, synthetic construct
  source 1..75: mol_type = other DNA
aacagcgcccggacggtctgatacggatgtttgtgctgaatgcgggcgggttcccggtcatcatccagacgcagg

SEQ ID NO: 289512 - DNA, 75 bp, synthetic construct
  source 1..75: mol_type = other DNA
tatccgggctcattaagcgatggatttaatatcagaaaagttgatggaatttctaatatgcagccacgaagtcca

SEQ ID NO: 289513 - DNA, 75 bp, synthetic construct
  source 1..75: mol_type = other DNA
gatgaagagacggggctgcactataatctgttcaggtattatgcgccggagtgcgggaggtttatcagccaggac

SEQ ID NO: 289514 - DNA, 75 bp, synthetic construct
  source 1..75: mol_type = other DNA
gctgtcatggagcgacccgctaggattagagaaatgtttattatcggcagcagataagaaaataatgggcgatgc

SEQ ID NO: 289515 - DNA, 75 bp, synthetic construct
  source 1..75: mol_type = other DNA
atgctcgacagccgggttcgcgatgcgacggctgcgtatatgcgtggcgttgaatttcctaacccaccaggtgag

SEQ ID NO: 289516 - DNA, 75 bp, synthetic construct
  source 1..75: mol_type = other DNA
taccgacaaaaaataaacgttataccggtgtagcctggttcgatgctttaagtgaatcggatcaggccagcgtgt

SEQ ID NO: 289517 - DNA, 75 bp, synthetic construct
  source 1..75: mol_type = other DNA
ctgaacacgggattcgtgcattagggcggaacctgatgtcgtatcagcggcagggtatcgataccgtcagcgaga

SEQ ID NO: 289518 - DNA, 75 bp, synthetic construct
  source 1..75: mol_type = other DNA
cggctacaacgccgataaccggttaagctggcagcgcagcctgccaggcggcagtcagaacccacagcagacagc

SEQ ID NO: 289519 - DNA, 75 bp, synthetic construct
  source 1..75: mol_type = other DNA
aaatgtatgcaggtcaaacaaaaaatctatatcagagaatgttgcaacatgctagaagtgggaagttaactcagg

SEQ ID NO: 289520 - DNA, 75 bp, synthetic construct
  source 1..75: mol_type = other DNA
gctgaggtggattgatccttggggattaataagactcgcaagtgattttttagaacaaataagagatgttactgc

SEQ ID NO: 289521 - DNA, 75 bp, synthetic construct
  source 1..75: mol_type = other DNA
gattatcagcagtgtctgcgcgcaacgcaaaccggtaacgaccaggcagtgaaagccgattgcgataaagtctgg

SEQ ID NO: 289522 - DNA, 75 bp, synthetic construct
  source 1..75: mol_type = other DNA
caaaccggaaatgatcaggcggtgaaagccgattgtgataaagtttggcaggaaattcgcagtaataacaaataa

SEQ ID NO: 289523 - DNA, 75 bp, synthetic construct
  source 1..75: mol_type = other DNA
gctggagatagccaaccttggcagcgtgacggtcgggcaggcctgctcgtcgatcatcagcaacatcggcattta

SEQ ID NO: 289524 - DNA, 75 bp, synthetic construct
  source 1..75: mol_type = other DNA
agtaacctggtaccagcacctgctcagggcactgcgacaatacgatgtgaaagggctatccgcaacaaacccgga

SEQ ID NO: 289525 - DNA, 75 bp, synthetic construct
  source 1..75: mol_type = other DNA
ggcaccacctgcctgcagctgtggaatgcggccgggcagttgacacgcctggaaggcgatcccctgcagatcgcc

SEQ ID NO: 289526 - DNA, 75 bp, synthetic construct
  source 1..75: mol_type = other DNA
cgcaaaccggtaatgaccaagcggtgaaagccgattgtgataaagtctggcaggaaatacgcagtaataacaaat

SEQ ID NO: 289527 - DNA, 75 bp, synthetic construct
  source 1..75: mol_type = other DNA
caatcatcagcaatatcggcatttacagccagcaaaaccagacggaagtcgatgccgcgtccaatgtctattccg

SEQ ID NO: 289528 - DNA, 75 bp, synthetic construct
  source 1..75: mol_type = other DNA
cacatcctttaaaccgcagggctctgacagtttcgcgggagccatctgcaaaaattgtggtcaccttgtaactga

SEQ ID NO: 289529 - DNA, 75 bp, synthetic construct
  source 1..75: mol_type = other DNA
agatgagtcctcgcaattcgatgacgaaatcgttgacgatatcttcggcgcactcaccagagactttctgaagta

SEQ ID NO: 289530 - DNA, 75 bp, synthetic construct
  source 1..75: mol_type = other DNA
gccactgtttatttatgacgccagcaatgccgacggcccactgaccgttaacccggatatcactgccgatgagct

SEQ ID NO: 289531 - DNA, 75 bp, synthetic construct
  source 1..75: mol_type = other DNA
tccgccctgcgcgagcaggtgatcagcgaagccggggcgctgtcgttgcgcatcgacaacacgctggattacatc

SEQ ID NO: 289532 - DNA, 75 bp, synthetic construct
  source 1..75: mol_type = other DNA
tgatggatgtgcaggtcaatatcgacgaccagggcaactacaacgtcaccctgaaaaacggtcagccgctggtga

SEQ ID NO: 289533 - DNA, 75 bp, synthetic construct
  source 1..75: mol_type = other DNA
tggcgtaacaggcaacaaccattacaggaacgttttctggcgttggcgaaaaccatggaggggacttctgatgct

SEQ ID NO: 289534 - DNA, 75 bp, synthetic construct
  source 1..75: mol_type = other DNA
tttttagcgaatcgcgcgggggagccagccgacctggtggactgtattgccggaaccatcgtcaaagataacgaa

SEQ ID NO: 289535 - DNA, 75 bp, synthetic construct
  source 1..75: mol_type = other DNA
tgtccgccactcaggattgccagcaggcgacgcgcgcatttgccgaaaaagccggcgtgagcttccacaatcaat

SEQ ID NO: 289536 - DNA, 75 bp, synthetic construct
  source 1..75: mol_type = other DNA
accgttgcgaatctcaacggtcataccatcggtggcggtattgaacttgccttgtgctgcgatattcgtatcgct

SEQ ID NO: 289537 - DNA, 75 bp, synthetic construct
  source 1..75: mol_type = other DNA
gtaccggcttatccggataaaacattccatgtcgaaaaatggaacattcttcccagcgtggatcagacaacccgt

SEQ ID NO: 289538 - DNA, 75 bp, synthetic construct
  source 1..75: mol_type = other DNA
cattaaggcacctatcgatggtgtcatcactgcgtttgacctgcgtaccggtatgaacatttcgaaagataaagt

SEQ ID NO: 289539 - DNA, 75 bp, synthetic construct
  source 1..75: mol_type = other DNA
ctgtccgggaccggcggtacgcccacgcaactgaaaggcgttctggaacggcttcgcctggcaggcatgccggaa

SEQ ID NO: 289540 - DNA, 75 bp, synthetic construct
  source 1..75: mol_type = other DNA
ctgtcattcagttactggagaatatgcttgaagcgctctccacctccccggacagcatcaacaatgaacgacgtc

SEQ ID NO: 289541 - DNA, 75 bp, synthetic construct
  source 1..75: mol_type = other DNA
ggccgccgaacgcgaacgagtgcagactgagcagcgcgcgacggtggtccgggtcctgcccctggtccggctaaa

SEQ ID NO: 289542 - DNA, 75 bp, synthetic construct
  source 1..75: mol_type = other DNA
cacgacagtaacctggtaccagcagctgctcagggtactgcgacaacacgatgtggaagggctctccgccacaaa

SEQ ID NO: 289543 - DNA, 75 bp, synthetic construct
  source 1..75: mol_type = other DNA
tgcaccagacgctgagccacatcaggtagaggccgatgtaaagcgtttttttctatacttgactgagtataagat

SEQ ID NO: 289544 - DNA, 75 bp, synthetic construct
  source 1..75: mol_type = other DNA
tgaaaaataacggctacgtgcaggacacgaataatcaacgaaattatatgtttgagcggctggatcttggcgttg

SEQ ID NO: 289545 - DNA, 75 bp, synthetic construct
  source 1..75: mol_type = other DNA
agtgggataaatggcagccaggtctggcgatttatgactttaccaatccggatgcctgcaaatggtacgccgaca

SEQ ID NO: 289546 - DNA, 75 bp, synthetic construct
  source 1..75: mol_type = other DNA
gcaggcttttttctccatgataaatcagcgtcaactacgccctggcgaaacattctctgaactacaactggcgcg

SEQ ID NO: 289547 - DNA, 75 bp, synthetic construct
  source 1..75: mol_type = other DNA
tcccaccgcccagtcacagcgggcgctggttggctctggcattgaagcactggttaacggtgagcgcgtgttgat

SEQ ID NO: 289548 - DNA, 75 bp, synthetic construct
  source 1..75: mol_type = other DNA
ggtgcaaatgattgaactggcacgcgccactcacgccaatatccgccagaacatcaccattgcgctggggctgaa

SEQ ID NO: 289549 - DNA, 75 bp, synthetic construct
  source 1..75: mol_type = other DNA
aaagcgccctgaccggcgaatccattccggtggagcgcgcgacgggcgataaagttcctgcaggcgccaccagcg

SEQ ID NO: 289550 - DNA, 75 bp, synthetic construct
  source 1..75: mol_type = other DNA
gatgcatttgctggtttgattaatgaactggaaagcgccgggcaaacggtagtgctggtagtacgtaacgatgac

SEQ ID NO: 289551 - DNA, 75 bp, synthetic construct
  source 1..75: mol_type = other DNA
aagcacaggttgctgcactgaccattcccgccgccgagtcacagcgggcgctggtcgggtctggcattgaagcgc

SEQ ID NO: 289552 - DNA, 75 bp, synthetic construct
  source 1..75: mol_type = other DNA
agccgtatttatacgccagcgattatggccgtcgccctgctggtaacgctggtgccgccgctgctgtttgccgcc

SEQ ID NO: 289553 - DNA, 75 bp, synthetic construct
  source 1..75: mol_type = other DNA
cccgtgtgcgttagttatctcacgcctgcggcgattacctccgggctggcggcggcagcgcgtcgtggggcgttg

SEQ ID NO: 289554 - DNA, 75 bp, synthetic construct
  source 1..75: mol_type = other DNA
caaggggtcagcgcgttaatggcgctgaagccagaaaccgccacgcgtctgcgtaacggtgagcgtgaagaggtg

SEQ ID NO: 289555 - DNA, 75 bp, synthetic construct
  source 1..75: mol_type = other DNA
ctgttagggatgaccggactatggctggcggtgctggcagatacgggtgcgacggtgctggtgacagcgaatgcg

SEQ ID NO: 289556 - DNA, 75 bp, synthetic construct
  source 1..75: mol_type = other DNA
agtgctgtcagaaccgggtgccagcgccattgaccggattctgaaactgatcgaagaagccgaagagcgccgcgc

SEQ ID NO: 289557 - DNA, 75 bp, synthetic construct
  source 1..75: mol_type = other DNA
acgtttgcctgccgacggtaaactgctctcgccctttgccagttttgatgaaagcgccctgaccggcgaatccat

SEQ ID NO: 289558 - DNA, 75 bp, synthetic construct
  source 1..75: mol_type = other DNA
gattgcaatgggcagtggcacggacgtggccctggaaaccgcagatgcagcattaacccataaccacctgcgcgg

SEQ ID NO: 289559 - DNA, 75 bp, synthetic construct
  source 1..75: mol_type = other DNA
gctgggaatgcatcggccttcttttttggtccttttctctccgtattgataatgtgtactcctctgatcttattg

SEQ ID NO: 289560 - DNA, 75 bp, synthetic construct
  source 1..75: mol_type = other DNA
ataatgacgtaccgatggacgctgaaacactgattgctctgagtgctgctgcagagcaggcgatgtttaccaaag

SEQ ID NO: 289561 - DNA, 75 bp, synthetic construct
  source 1..75: mol_type = other DNA
ggatcaccgaaactggctggaaaatgctgggagttgatctggtgaaacttcaggaacagcaacgtaaacgccttg

SEQ ID NO: 289562 - DNA, 75 bp, synthetic construct
  source 1..75: mol_type = other DNA
cgccctgcgtaccgaatatgccgcgctgtcggcacaacacggcagcaccacgctggagcagttgctggataaggc

SEQ ID NO: 289563 - DNA, 75 bp, synthetic construct
  source 1..75: mol_type = other DNA
cctgtagttcttcgttagtcattgtctgcacctggaaagcaatttaccggagtacctcacactacggcaaaaatg

SEQ ID NO: 289564 - DNA, 75 bp, synthetic construct
  source 1..75: mol_type = other DNA
ttcatgtcagacagcgcacgatgaaaaaagagattgaagcgctggatgatgcggaagctatactggcgtataagg

SEQ ID NO: 289565 - DNA, 75 bp, synthetic construct
  source 1..75: mol_type = other DNA
ctcaaaaccgccgggatcaacgcctggcggaacagaatggaatcagccagttatattttcagctttaatggccgt

SEQ ID NO: 289566 - DNA, 75 bp, synthetic construct
  source 1..75: mol_type = other DNA
taagtctgtatgaccgaattaacgatgcggcatttcttgcccgtcttattcattcgtcgctgaactcttcagagg

SEQ ID NO: 289567 - DNA, 75 bp, synthetic construct
  source 1..75: mol_type = other DNA
gaaacggttgctgatgattcatctgaatctgtagctacttctgataccagtaatgcgaaaaaatcaacgcaaaaa

SEQ ID NO: 289568 - DNA, 75 bp, synthetic construct
  source 1..75: mol_type = other DNA
ctactcagaacccccaaattgacgctatgccaagaacagcaagccgaccagaaaatatcgattcggaggctaatt

SEQ ID NO: 289569 - DNA, 75 bp, synthetic construct
  source 1..75: mol_type = other DNA
gcggatgcgcacgacaccctgaaaacgcaggttgccagcctgtcggcagaactggaaaccgcaaaaggcacacca

SEQ ID NO: 289570 - DNA, 75 bp, synthetic construct
  source 1..75: mol_type = other DNA
atgaaaaaacacgcgattggcattgccgcactgagtgcgctgtccattgacgatgacggctggtgccagctattg

SEQ ID NO: 289571 - DNA, 75 bp, synthetic construct
  source 1..75: mol_type = other DNA
gatcctcttcttaagccggtacacctggtaccaatgagtgttaaagactcgaagagtggaaagaatgaatggcgc

SEQ ID NO: 289572 - DNA, 75 bp, synthetic construct
  source 1..75: mol_type = other DNA
catgttcactcgcttagcctttcttccttaaccgaaagattaatagctcttgagagagaggttgcagccattaag

SEQ ID NO: 289573 - DNA, 75 bp, synthetic construct
  source 1..75: mol_type = other DNA
cacaagttaatcttcgacttcctgtggagataaaggatcgcctaaccgcgttagctgaggcgaatggcagatctt

SEQ ID NO: 289574 - DNA, 75 bp, synthetic construct
  source 1..75: mol_type = other DNA
ctatagcatcacgattgatagatcttgaacgcgatgttgagacgctaaagaccatgtatggtaaggatgaaaaat

SEQ ID NO: 289575 - DNA, 75 bp, synthetic construct
  source 1..75: mol_type = other DNA
tattgcctctaacattcaattcacccagcagtatctgaacgaaaatactccagaattgatcgtaaggccagctga

SEQ ID NO: 289576 - DNA, 75 bp, synthetic construct
  source 1..75: mol_type = other DNA
ttaaaagcgcgaagatggtgttattatgtaatcctcataacccgacaggaacggtctggtcggaagacgatcttc

SEQ ID NO: 289577 - DNA, 75 bp, synthetic construct
  source 1..75: mol_type = other DNA
ggtgtaaaagatgtattaccattctctatttcagatatggatcttccgataccagacgctatcaccagagcatta

SEQ ID NO: 289578 - DNA, 75 bp, synthetic construct
  source 1..75: mol_type = other DNA
ttgctgaagtaagtaaaatgttaggtatctcgattaattctctaaaacagatcgaaaagacggaacggcttagct

SEQ ID NO: 289579 - DNA, 75 bp, synthetic construct
  source 1..75: mol_type = other DNA
ggaactggtgtccatcgcaggtgaatactggctgagtgatcaaatcccagcagaattttatggcaaatcggcacg

SEQ ID NO: 289580 - DNA, 75 bp, synthetic construct
  source 1..75: mol_type = other DNA
gctgaaataaaacaatttgaacgatttgcacatgacccaatggctggcggtcacagaatgtggcaaatggccggg

SEQ ID NO: 289581 - DNA, 75 bp, synthetic construct
  source 1..75: mol_type = other DNA
gcaaaaggtaaacatgctgaattctggggaactggtcttaaatatgatgccaataacctgtatctggcagcagtg

SEQ ID NO: 289582 - DNA, 75 bp, synthetic construct
  source 1..75: mol_type = other DNA
tatcgcgacgaagtttatcacccggatagcgaaatgaagggcattgccgaggtaattatcggaatgaaccgcccc

SEQ ID NO: 289583 - DNA, 75 bp, synthetic construct
  source 1..75: mol_type = other DNA
ttcagtgagatggagaggttattaagtcatggcaaaccgattgatttgataacacttgctgaagcacttgaacag

SEQ ID NO: 289584 - DNA, 75 bp, synthetic construct
  source 1..75: mol_type = other DNA
gtattacgccagaaaagcgcagaaaccagcaaaatgatgcagtgcgtaaaagtcacactgctttcgaatcttaac

SEQ ID NO: 289585 - DNA, 75 bp, synthetic construct
  source 1..75: mol_type = other DNA
atataggtgatactcagaacagcatacgtggcgaggaaaatattgtaagaggacagtattctgaactacagaatc

SEQ ID NO: 289586 - DNA, 75 bp, synthetic construct
  source 1..75: mol_type = other DNA
gttggagctaatgctgtaaccgccggtactgttgatgctcaaggtgtaatgactatcaaggcaactgccgctgcc

SEQ ID NO: 289587 - DNA, 75 bp, synthetic construct
  source 1..75: mol_type = other DNA
atgtacgcgaagccgcgtccactgtcagagcaaaaacgcgccctggaaatcatcagcgagctggcggcgaaacaa

SEQ ID NO: 289588 - DNA, 75 bp, synthetic construct
  source 1..75: mol_type = other DNA
gataccattgccagagttgtatcctgtatcagtcctgcaaaatttcatgagtgctttattaactggatgcgtgac

SEQ ID NO: 289589 - DNA, 75 bp, synthetic construct
  source 1..75: mol_type = other DNA
tttatgtcgttatttctggtgcagaaggttgggaagatattgagagttttggggaaacacatctcgatttttctg

SEQ ID NO: 289590 - DNA, 75 bp, synthetic construct
  source 1..75: mol_type = other DNA
gaaaccgtgttcaccgccctgaccgaaaaggtgaaatccatttttggccgcaaacaggccagcgatgacgccctg

SEQ ID NO: 289591 - DNA, 75 bp, synthetic construct
  source 1..75: mol_type = other DNA
atgatgcatcgtggtttgccattgtcacgccaatgtcgtttggtatgccagttttcgatcctgtttccattctga

SEQ ID NO: 289592 - DNA, 75 bp, synthetic construct
  source 1..75: mol_type = other DNA
atgatgcatcgtggtttgcaattgtcacaccgatgtcgtttggcgtgccaattttcgatcccgtttcaattctga

SEQ ID NO: 289593 - DNA, 75 bp, synthetic construct
  source 1..75: mol_type = other DNA
cctgcccgttattatgtcggtgacctttgctgctgtaacgccaatgatagctatcgggatgaacccggatatcgg

SEQ ID NO: 289594 - DNA, 75 bp, synthetic construct
  source 1..75: mol_type = other DNA
ttggcgttttcgttcagctcgaaacgcctatcgcttttgatgccatcgataaccaaccggttgacttgctttttg

SEQ ID NO: 289595 - DNA, 75 bp, synthetic construct
  source 1..75: mol_type = other DNA
tgccaagttaatactagcgatctgactaaatcgatttctcttggagaggtgtctgcggctgttttaaacactgct

SEQ ID NO: 289596 - DNA, 75 bp, synthetic construct
  source 1..75: mol_type = other DNA
aggcttatattggtaagaaaaccggcaatcctacggtaagtcagggtacggttgatgctggtgctattttgacaa

SEQ ID NO: 289597 - DNA, 75 bp, synthetic construct
  source 1..75: mol_type = other DNA
gaagtggatagtttacctgaagatgtagatatcaacggtggttgggtgtttagagacaactctgttgttaaacgc

SEQ ID NO: 289598 - DNA, 75 bp, synthetic construct
  source 1..75: mol_type = other DNA
tgcgtcagagttcaaccttcgctgattgggtactgatggttgcgccgccgctgatctttttcctggtggcggtta

SEQ ID NO: 289599 - DNA, 75 bp, synthetic construct
  source 1..75: mol_type = other DNA
ccttactgaaggaatacttgattaagtatggtgatattcttatttctgtagaagatccacctgaggttccttcac

SEQ ID NO: 289600 - DNA, 75 bp, synthetic construct
  source 1..75: mol_type = other DNA
gcgtggcctgaccaatatggcgctggatgacagtgcgctgcaagggttctttggcgtcgatcgtagcgatcgcga

SEQ ID NO: 289601 - DNA, 75 bp, synthetic construct
  source 1..75: mol_type = other DNA
ttgatttaattctggatgagcatgaacggattttcagaaaacagaggccgctgtatatggcgctgagtaatggcg

SEQ ID NO: 289602 - DNA, 75 bp, synthetic construct
  source 1..75: mol_type = other DNA
tgtttctggcctgtatctgaaatccctgtgcctgtccgttgcctgctgttgtggggtattcagtcgtatttttaa

SEQ ID NO: 289603 - DNA, 75 bp, synthetic construct
  source 1..75: mol_type = other DNA
atggatgtgagcgcggagcgtttacctgaactggatgccgattttgtttttgcaacctggcgcggtgacaccggt

SEQ ID NO: 289604 - DNA, 75 bp, synthetic construct
  source 1..75: mol_type = other DNA
caatggaaaaagtcatgccgggatggtgtcagtttctgacggcctgtcgttccgggcgttatgtgctgatttctc

SEQ ID NO: 289605 - DNA, 75 bp, synthetic construct
  source 1..75: mol_type = other DNA
tttgcatctctggggctgatggctgcgcagatacaatcacaaattgcggggcgacctttaccggaggccaaatga

SEQ ID NO: 289606 - DNA, 75 bp, synthetic construct
  source 1..75: mol_type = other DNA
atgcgtttatttttttctctgctgatactgttgtcattttttgcccgtgcaacagaaccggttcaggtctttact

SEQ ID NO: 289607 - DNA, 75 bp, synthetic construct
  source 1..75: mol_type = other DNA
gatggaaaatgcataccgtcagatgcagatgaatgcgcaagctgaaaaagtaagcgaaaatcatcgccgcaaaca

SEQ ID NO: 289608 - DNA, 75 bp, synthetic construct
  source 1..75: mol_type = other DNA
caatggaaaaagtcatgccgggatggtgtcagtttctgacagcctgtcgttccggacgttatgtgttgatttcgc

SEQ ID NO: 289609 - DNA, 75 bp, synthetic construct
  source 1..75: mol_type = other DNA
tactgttgtcattttttgctcgtgcaacagagcctgttcaggtgtttaccgatgatttagggcgcaaagtcacag

SEQ ID NO: 289610 - DNA, 75 bp, synthetic construct
  source 1..75: mol_type = other DNA
atgcataaatcagaaaatgaaaaaatagattttattctggatgaacatcaacagatatattgcagacataaccgg

SEQ ID NO: 289611 - DNA, 75 bp, synthetic construct
  source 1..75: mol_type = other DNA
tttcggtgaaaccgtaggtgccatactcgatacggtaagcacctttccccttattcccgccccggtgcggaccat

SEQ ID NO: 289612 - DNA, 75 bp, synthetic construct
  source 1..75: mol_type = other DNA
atttttaccgggaggtgattggtgaggcataccggcataaggtgttgtttgttatcagtcagtcggataaggccg

SEQ ID NO: 289613 - DNA, 75 bp, synthetic construct
  source 1..75: mol_type = other DNA
agttctggcgcggtgtgatgcaaccttacaggcaaaaggtactgtttgtgattaaccaggccgacaaaatcgaac

SEQ ID NO: 289614 - DNA, 75 bp, synthetic construct
  source 1..75: mol_type = other DNA
atttttaccggcaagtgattggtgaggcataccggcataaggtgctgtttgttatcagccagtcagacaaagctg

SEQ ID NO: 289615 - DNA, 75 bp, synthetic construct
  source 1..75: mol_type = other DNA
agcctttgcaatgccctgtttgccggtgaagtatcgccggtcagcgatgtagcggcctgtacacgtgatccttta

SEQ ID NO: 289616 - DNA, 75 bp, synthetic construct
  source 1..75: mol_type = other DNA
agcctttgcaatgctctgtttgttggcgaagtatcgccggtcagcgatgtcgcggcctgcacccgtgaaccttta

SEQ ID NO: 289617 - DNA, 75 bp, synthetic construct
  source 1..75: mol_type = other DNA
ggcatcgtgaccaccttgattgcattatgtttgccggtatccgttttgccaccacgctgcggctttcaaccgatg

SEQ ID NO: 289618 - DNA, 75 bp, synthetic construct
  source 1..75: mol_type = other DNA
ctctctgctgcgcggtgcggacagcattgaactggataatggaccgcatcagttagtgtttcgcgttgagaagac

SEQ ID NO: 289619 - DNA, 75 bp, synthetic construct
  source 1..75: mol_type = other DNA
gcatgattcgttgtctgccacgtgaggccagcagttcggtggtatctcagctcagtgcgccgcttcgtaccgatt

SEQ ID NO: 289620 - DNA, 75 bp, synthetic construct
  source 1..75: mol_type = other DNA
gaaaacggtgattcgtagcgtgcgtgatgcggtggtgtcggtcgcacgggccgtctgggactggatattcttttg

SEQ ID NO: 289621 - DNA, 75 bp, synthetic construct
  source 1..75: mol_type = other DNA
agttgttccaacctgtaaaccctgtctgtgcggtgtcggtacgtttgcagtggggactgcgggtgatggctgaac

SEQ ID NO: 289622 - DNA, 75 bp, synthetic construct
  source 1..75: mol_type = other DNA
cggcgtcggggagtctgagcgccgggatacagagtatgccacgctgtaccgtaaacagctcccccagctggatct

SEQ ID NO: 289623 - DNA, 75 bp, synthetic construct
  source 1..75: mol_type = other DNA
aagaggtcataacccgtacagcgaaaattaccaataccggcaagccggaactggcagaagaaagcgggaccccga

SEQ ID NO: 289624 - DNA, 75 bp, synthetic construct
  source 1..75: mol_type = other DNA
cgtagagttgctggatgtgaaaccagcgccgaaggctgatgcgaagccagaagccgatgcgaaagccgcagattc

SEQ ID NO: 289625 - DNA, 75 bp, synthetic construct
  source 1..75: mol_type = other DNA
aacctcttctactggcctggtttaccaggtagagaaagcaggctctggcgaagcgccgaaagacagcgatactgt

SEQ ID NO: 289626 - DNA, 75 bp, synthetic construct
  source 1..75: mol_type = other DNA
ccactggctgacattgtgctcagtaaataccaggcatcctgttgcaccgaataccacatcgctgacggggggccg

SEQ ID NO: 289627 - DNA, 75 bp, synthetic construct
  source 1..75: mol_type = other DNA
gagggtgacggcactgccagccctgagctactggcgattgttgataaagcgctgaacgccgaagatgtgcgcccg

SEQ ID NO: 289628 - DNA, 75 bp, synthetic construct
  source 1..75: mol_type = other DNA
tccgagcctctcgtcaaactgctggaggaaaatgcttatcgtgaacttatctggcgtcagcgtgtgaatgaggcc

SEQ ID NO: 289629 - DNA, 75 bp, synthetic construct
  source 1..75: mol_type = other DNA
aacagatacaaattcgcctgatggcactggcctcgttaaacgacttaccacaggaccgagaaacgttgttctact

SEQ ID NO: 289630 - DNA, 75 bp, synthetic construct
  source 1..75: mol_type = other DNA
ctcgaaagtggctcactgtaagctttacgtcaccaaaacaccgattaccgcggctgacttactgaatgatcgtgt

SEQ ID NO: 289631 - DNA, 75 bp, synthetic construct
  source 1..75: mol_type = other DNA
gacgaggcctgtggcgaaatcgaaacggctcatccgggatatctgggttcgcaggacacgttctatgtaggcaac

SEQ ID NO: 289632 - DNA, 75 bp, synthetic construct
  source 1..75: mol_type = other DNA
cttccgtctggatggtgtaatcccgggctggactgaaggtctgaagaacattaagaaaggcggcaagattaagct

SEQ ID NO: 289633 - DNA, 75 bp, synthetic construct
  source 1..75: mol_type = other DNA
actggcatcgctcaataacttaccacaagacagggaaaccttgttctactataacgtccgggaaattccgcctcg

SEQ ID NO: 289634 - DNA, 75 bp, synthetic construct
  source 1..75: mol_type = other DNA
atgaaattaccattaatcacaacaggaatgatttgttttctggggatctgcaactttgcccaggcgactgtctcc

SEQ ID NO: 289635 - DNA, 75 bp, synthetic construct
  source 1..75: mol_type = other DNA
ctgccgccatcgttgaataccagataaacgccacgctttacctttaccctggtcccgaaagcgaacccatccgcg

SEQ ID NO: 289636 - DNA, 75 bp, synthetic construct
  source 1..75: mol_type = other DNA
gccggactttgagacgctgattgccgaacgcaaggccgaatttgttgcgcttcatccgaaagatgagcaggaagc

SEQ ID NO: 289637 - DNA, 75 bp, synthetic construct
  source 1..75: mol_type = other DNA
ctgcgtgtgcctgcggcttttgaagggctttcggttgcggggccaactgccgcttatgaatttcatgcccgaagc

SEQ ID NO: 289638 - DNA, 75 bp, synthetic construct
  source 1..75: mol_type = other DNA
gctgcaccgctggccgacatcgtgctcaacaatacgcaggcgtctttctgtaccgaatacagcgtcgtgaccgga

SEQ ID NO: 289639 - DNA, 75 bp, synthetic construct
  source 1..75: mol_type = other DNA
gctggattttgaaagcattctcgctgaacgcaaggcgacactgatttccctttacccggaagatcagcaggaggc

SEQ ID NO: 289640 - DNA, 75 bp, synthetic construct
  source 1..75: mol_type = other DNA
cgtctccgccgcgctggagctggaatcggaacccctgaacgttatcgcccagacaacagcgtttcgtgaaatgct

SEQ ID NO: 289641 - DNA, 75 bp, synthetic construct
  source 1..75: mol_type = other DNA
ccgcaggccgacattgttctgagtaagtcgcaggcatcgaactgtacagagtaccagataactatcgggggctcg

SEQ ID NO: 289642 - DNA, 75 bp, synthetic construct
  source 1..75: mol_type = other DNA
ggcctatcagtatcatggtcgcagtgctgacgggcgtgtcgcggatatttctgtcaccagtccgtctcctgcctg

SEQ ID NO: 289643 - DNA, 75 bp, synthetic construct
  source 1..75: mol_type = other DNA
aagcgcagtccgaagaaaacacctccagactatttaggtcgaaatgatccagcaacagtatatggttcgccaggt

SEQ ID NO: 289644 - DNA, 75 bp, synthetic construct
  source 1..75: mol_type = other DNA
ctgccgccgtgaaaaaactggaagcgtatatcacggcacagcaccggctggggcgcgacatccgactgtctgcca

SEQ ID NO: 289645 - DNA, 75 bp, synthetic construct
  source 1..75: mol_type = other DNA
ggtcccgaatctgaacccatcaggcaggcatcagagcagaagctgcagagctacatcagcgcgcagcaccgcctc

SEQ ID NO: 289646 - DNA, 75 bp, synthetic construct
  source 1..75: mol_type = other DNA
tctgagccgattgttaagctgctgcaggagaatgcttaccgggaggttatctggcgtcagcgcgtgaatgaatcg

SEQ ID NO: 289647 - DNA, 75 bp, synthetic construct
  source 1..75: mol_type = other DNA
ccgctggcggatgtggtcctgaacaaaacgcaggcggcatcatgtacgcagtggagcgtaaccaacgggggaact

SEQ ID NO: 289648 - DNA, 75 bp, synthetic construct
  source 1..75: mol_type = other DNA
atactgatattgcaagagaaaattcgctgttctatcgctcagactttgatcctacacaagggagaaaatatcctg

SEQ ID NO: 289649 - DNA, 75 bp, synthetic construct
  source 1..75: mol_type = other DNA
tgaagaaaaaccaatgcctaaccctcttaaaatgtacgcggtcgatgctgttgccgctattgcagaggtgagagg

SEQ ID NO: 289650 - DNA, 75 bp, synthetic construct
  source 1..75: mol_type = other DNA
gctggttgcaggcgaaaaccatgctcgaacgtcacaggacattgcgcgacagcattggcagcaactttcggatgt

SEQ ID NO: 289651 - DNA, 75 bp, synthetic construct
  source 1..75: mol_type = other DNA
ctccttactgctttcagctgccgacaatatcttttttgatcaatcgcttgagatcatctcagtcatctttcattt

SEQ ID NO: 289652 - DNA, 75 bp, synthetic construct
  source 1..75: mol_type = other DNA
aacaagaagagttaccagcgccaaaactggatattaacttcccgatttcatggtttgctgaaaatgcaccttacg

SEQ ID NO: 289653 - DNA, 75 bp, synthetic construct
  source 1..75: mol_type = other DNA
atgaaactgagcttgttgattttggtaaagatatcagaatcgttttggcttcatcggattttagtaaggaactga

SEQ ID NO: 289654 - DNA, 75 bp, synthetic construct
  source 1..75: mol_type = other DNA
aaacaaaaaaaactatcgcgcactagggctaaagctggaaagaaaggtggggaaagtaaagcggaagtgtacgtt

SEQ ID NO: 289655 - DNA, 75 bp, synthetic construct
  source 1..75: mol_type = other DNA
ccagcagaattttatggcaaagcggcacgactgcaattagtcgaaaacgctttgaccgttcaatcgttaaattga

SEQ ID NO: 289656 - DNA, 75 bp, synthetic construct
  source 1..75: mol_type = other DNA
agacaagcctggaaagtggaacataaattatcggatattctactgttgactatttgtgccgttatttctggtgca

SEQ ID NO: 289657 - DNA, 75 bp, synthetic construct
  source 1..75: mol_type = other DNA
acaagcctggaaagtggaacataaattatccgatattctactgttgactatttgtgccgttatttctggtgcgga

SEQ ID NO: 289658 - DNA, 75 bp, synthetic construct
  source 1..75: mol_type = other DNA
tcattgccgtcgatgagcatatgaccattctcagcgctctgatttgccgcagtgaccttgatgccacccttgcgc

SEQ ID NO: 289659 - DNA, 75 bp, synthetic construct
  source 1..75: mol_type = other DNA
gaataactggctgacaacccgaacgggtattgcctttgcggataatacgccggtctttgcccgccaggattttcg

SEQ ID NO: 289660 - DNA, 75 bp, synthetic construct
  source 1..75: mol_type = other DNA
tgaatcagtggggcgcactctgttattacagtgttgacggtcaggcggaggcagacataatgccgcggaaaaagc

SEQ ID NO: 289661 - DNA, 75 bp, synthetic construct
  source 1..75: mol_type = other DNA
gactttactaaagcaattgatacatatgcctttgctgttacagcaatgtgcttagctaaaacccctgtcccagat

SEQ ID NO: 289662 - DNA, 75 bp, synthetic construct
  source 1..75: mol_type = other DNA
aggcggcatatcactctatactggcccggtgatcaccaggtaccgctatacccactatgactccagcgatgcagg

SEQ ID NO: 289663 - DNA, 75 bp, synthetic construct
  source 1..75: mol_type = other DNA
tatctgcgcaagcccggcatatcctttacttcaagtactgcggcccgtgactggcttcggttacagctagccaga

SEQ ID NO: 289664 - DNA, 75 bp, synthetic construct
  source 1..75: mol_type = other DNA
gccgcgcccacagcatttatggcagccagaactgattgagatatttgaagagaaattagccagacgcgcaacaac

SEQ ID NO: 289665 - DNA, 75 bp, synthetic construct
  source 1..75: mol_type = other DNA
aggcggcgtatcactctatactggcccggtgatcaccagataccgctatacccactatgactccagcgatgcagg

SEQ ID NO: 289666 - DNA, 75 bp, synthetic construct
  source 1..75: mol_type = other DNA
aggcggcctatcactctatactggcccggtgatcaccagctaccgctatacccaatatgactccagcgatgcagg

SEQ ID NO: 289667 - DNA, 75 bp, synthetic construct
  source 1..75: mol_type = other DNA
aggcggcttatcactctatactggcccggtgatcaccagttaccgctatacccactatgactccagcgatgcagg

SEQ ID NO: 289668 - DNA, 75 bp, synthetic construct
  source 1..75: mol_type = other DNA
aacacgccaaaggttacatcgaaggtctggaaatgctggcttcaatgcgcctgtgtgctaacgttcctgcgcaac

SEQ ID NO: 289669 - DNA, 75 bp, synthetic construct
  source 1..75: mol_type = other DNA
tttacgacaaaatcctctatgacgacgcagagcatcactcgattgcgccgttagctcctgacctgctgaccatta

SEQ ID NO: 289670 - DNA, 75 bp, synthetic construct
  source 1..75: mol_type = other DNA
cccagcgccgttcggttttgacgcacccgatgagatcctggttgacgtgatacgcaacctcccgacagctcaggg

SEQ ID NO: 289671 - DNA, 75 bp, synthetic construct
  source 1..75: mol_type = other DNA
tttatctccaccgttctttccgcagctgcacgacggtgtcaacgacggatgaaaagtgatccacttatatctcca

SEQ ID NO: 289672 - DNA, 75 bp, synthetic construct
  source 1..75: mol_type = other DNA
tcgacaatgaccagtacgatttcatgacagagtggaacaccgcagtcatggataagtgggtcgcggagaacattg

SEQ ID NO: 289673 - DNA, 75 bp, synthetic construct
  source 1..75: mol_type = other DNA
cacttccgcattgtcacgctgccgcgtgttgatgatatcgaactgtccttgagcaagttcgctcgtttcctttcc

SEQ ID NO: 289674 - DNA, 75 bp, synthetic construct
  source 1..75: mol_type = other DNA
attgctgctgtaggggctgtcattctgtttgcggtggcgaagcgaggccatgccattaacactggcaaagtgctt

SEQ ID NO: 289675 - DNA, 75 bp, synthetic construct
  source 1..75: mol_type = other DNA
tggcggcactgtttgccaacgatggggcggcacttattctgacgccgatagtcatcgccatgctgctggcattag

SEQ ID NO: 289676 - DNA, 75 bp, synthetic construct
  source 1..75: mol_type = other DNA
ccgacggcgaacgctgggataatctggcatggcattactacggtgatgcgctggcttatgaacgcataatcgtcg

SEQ ID NO: 289677 - DNA, 75 bp, synthetic construct
  source 1..75: mol_type = other DNA
tctttcgataatgaaaaagtcggcgaactgcaagcaaaagccctggttgatatcgtcccacaaggcaattatttc

SEQ ID NO: 289678 - DNA, 75 bp, synthetic construct
  source 1..75: mol_type = other DNA
aatgaaagtgttaaaaccttacgttgattccggaaaaattaaagtcgttggtgaccaatgggttgatggctggtt

SEQ ID NO: 289679 - DNA, 75 bp, synthetic construct
  source 1..75: mol_type = other DNA
agaaacccaaatgtcgcagattgaaaacatgattaaccggggcgtcgacgttcttgtcattattccatataacgg

SEQ ID NO: 289680 - DNA, 75 bp, synthetic construct
  source 1..75: mol_type = other DNA
ggaccctaaaactcttcaatgcacgggtctgatcgaccttgggcggctcggaacagcagatcgctatgccgattt

SEQ ID NO: 289681 - DNA, 75 bp, synthetic construct
  source 1..75: mol_type = other DNA
tgtcagaggcggagaatctggtgattttgtttttcgacgtggtgacgggcatgccttcgcgaaaatcgcacctgc

SEQ ID NO: 289682 - DNA, 75 bp, synthetic construct
  source 1..75: mol_type = other DNA
ttcgctgtcctattcaatgtattggggatcgaagcccccgaccgcgaacgccttgccttctatctgcgattggac

SEQ ID NO: 289683 - DNA, 75 bp, synthetic construct
  source 1..75: mol_type = other DNA
tgaaagccgcctgaaagcgcgcaaaggccatttctttaaaacccaaatgctggtgacgcagtttgaaacgctgca

SEQ ID NO: 289684 - DNA, 75 bp, synthetic construct
  source 1..75: mol_type = other DNA
gcgtttgccatgcagcgaaccaataaagtgtcactgatcgtctgttccgcgctgaaaaagcactatcgcgacctg

SEQ ID NO: 289685 - DNA, 75 bp, synthetic construct
  source 1..75: mol_type = other DNA
ttgagcacgactaaccatgatcaccacatttacgttctgatgggcgtctcaggcagcggcaaatctgcggtcgcc

SEQ ID NO: 289686 - DNA, 75 bp, synthetic construct
  source 1..75: mol_type = other DNA
gggcaatatggagatatgcttggaagcactattagaggatcagactctggttatattctgattatcctatatggt

SEQ ID NO: 289687 - DNA, 75 bp, synthetic construct
  source 1..75: mol_type = other DNA
gctggcgcaggaatttttccgcgatgtggaagccggactagacccggatgtaccgtataactatttcccgcacaa

SEQ ID NO: 289688 - DNA, 75 bp, synthetic construct
  source 1..75: mol_type = other DNA
cgctgggtctggtggagtttaatgatgtcgcttactggccgcagatcaaacaggtgctggagtggtcgaaagatc

SEQ ID NO: 289689 - DNA, 75 bp, synthetic construct
  source 1..75: mol_type = other DNA
caaactctcctttgcaggtcgatattcagttgttgcgcatcgattctcgcgagtcgcgcaacacgcctgcagagc

SEQ ID NO: 289690 - DNA, 75 bp, synthetic construct
  source 1..75: mol_type = other DNA
ttatcaatggtgggctgtacgggggcggagcaatccgcgccggtttcttcagtgtccggtaaggctaaccctgta

SEQ ID NO: 289691 - DNA, 75 bp, synthetic construct
  source 1..75: mol_type = other DNA
attggcgtttcctgcggtggaaattcttcactgtcaaaggaggctgccaacatggctactatccctaccctcgta

SEQ ID NO: 289692 - DNA, 75 bp, synthetic construct
  source 1..75: mol_type = other DNA
agcgagtttaggacctccggcggtggttacattccatcgataaaggaggctgccatcatggctactacccctgcc

SEQ ID NO: 289693 - DNA, 75 bp, synthetic construct
  source 1..75: mol_type = other DNA
accggctggatagttttaattcttctgctggttgggttctttgtcctcgagccgctcggtattcccgttagcgcg

SEQ ID NO: 289694 - DNA, 75 bp, synthetic construct
  source 1..75: mol_type = other DNA
gcaccacgctggcattcgtcatggctgccggttttattgccgatacagccagcctgccgcttatcgtgtcgaacc

SEQ ID NO: 289695 - DNA, 75 bp, synthetic construct
  source 1..75: mol_type = other DNA
ttgggccgcgacgtttggtaccggcttcctgacagctttcctgtcttccatcatgaacaatatgcctaccgtgct

SEQ ID NO: 289696 - DNA, 75 bp, synthetic construct
  source 1..75: mol_type = other DNA
atctgaacaacttctactgcaactttgaagacatacaggaacagaactttgacggcttgatagtcaccggcgcgc

SEQ ID NO: 289697 - DNA, 75 bp, synthetic construct
  source 1..75: mol_type = other DNA
tcttactccaattgtcatcgccatgctgcttgcattaggtttcagtaaaggtactactctggcatttgtcatggc

SEQ ID NO: 289698 - DNA, 75 bp, synthetic construct
  source 1..75: mol_type = other DNA
tactatttccgcaccgggatcgtcatgactctgccagtgctgtttgtaacgctggccgcgctggcgctacgtctc

SEQ ID NO: 289699 - DNA, 75 bp, synthetic construct
  source 1..75: mol_type = other DNA
ggtctttctaagcagccttgcgctggtttttattgaaatctggtgtgcgttttcgctggtgaaagggcgtcgcct

SEQ ID NO: 289700 - DNA, 75 bp, synthetic construct
  source 1..75: mol_type = other DNA
gcgtcatccggtcactttctgctcattcctaaaaacgcagcggggagcaagagcgacggaacaccggtacaggct

SEQ ID NO: 289701 - DNA, 75 bp, synthetic construct
  source 1..75: mol_type = other DNA
tggtgttattgggttatttttctcggctcaatcacggtactgcaggggatatacgtcttagtcagttccgatgca

SEQ ID NO: 289702 - DNA, 75 bp, synthetic construct
  source 1..75: mol_type = other DNA
caattatcaccatgatatggggttgggcactgttagcaggcaatgatgtgatggcagacgagtttgtcgccggcc

SEQ ID NO: 289703 - DNA, 75 bp, synthetic construct
  source 1..75: mol_type = other DNA
atctgaaatttgcatactttttttattattgacactaatgattctgtctttatgtatttttgtaacattaaaagt

SEQ ID NO: 289704 - DNA, 75 bp, synthetic construct
  source 1..75: mol_type = other DNA
agttaggaatttatgtctcaaaaatcgatcccaccctacgtatcactgtaaccgatgttgatattgttgatggtg

SEQ ID NO: 289705 - DNA, 75 bp, synthetic construct
  source 1..75: mol_type = other DNA
cgtgacggagagctggttacggtcaccattaagacagcagctgcaaccggcaccctgaatgttctgctgcgttat

SEQ ID NO: 289706 - DNA, 75 bp, synthetic construct
  source 1..75: mol_type = other DNA
tagccaataccgatcccttcttttttctccgtttcttccaccataccgttctaattgaagaaggaacaacacagg

SEQ ID NO: 289707 - DNA, 75 bp, synthetic construct
  source 1..75: mol_type = other DNA
atggaaggtcagttaattttttgttccgatgcaatactacggtttaagtccgattacgatgaaaccgctgccgtt

SEQ ID NO: 289708 - DNA, 75 bp, synthetic construct
  source 1..75: mol_type = other DNA
aatgaaacctctctgctccaggaaatgaccgcacgttatcagttgtggcatcaaagctgccgtgacctcgcgcat

SEQ ID NO: 289709 - DNA, 75 bp, synthetic construct
  source 1..75: mol_type = other DNA
atgaacgtcaggcagtttccgttaacaagcacaatttcggtgcagtgatggctgaagcagccattggcctcaatt

SEQ ID NO: 289710 - DNA, 75 bp, synthetic construct
  source 1..75: mol_type = other DNA
gctccaggcattgctggaaaatgaggagtcccgcgagcagttgctcaaagaaatcggccaagtgagtgggaaata

SEQ ID NO: 289711 - DNA, 75 bp, synthetic construct
  source 1..75: mol_type = other DNA
aattttactgtccccgccacgctgaagggaagcacaacagacgatgaactgaatgtggcgctgaatatccaaatc

SEQ ID NO: 289712 - DNA, 75 bp, synthetic construct
  source 1..75: mol_type = other DNA
acagcttcaaatcttgagccgcttgccttttgggtggaagaacatcatggagaacgagcagcggccccctttaaa

SEQ ID NO: 289713 - DNA, 75 bp, synthetic construct
  source 1..75: mol_type = other DNA
ggcggatttgacggatgacattctgatctatcatctgaaaatgcgtgattccgcgaaagatgcggtgatcccggg

SEQ ID NO: 289714 - DNA, 75 bp, synthetic construct
  source 1..75: mol_type = other DNA
caacgaaaaagggttttggtggagcaaatctaatcaaaatatttatggaataacagggcttgagcaggttgatga

SEQ ID NO: 289715 - DNA, 75 bp, synthetic construct
  source 1..75: mol_type = other DNA
taatgaaaaagggttttggtggagtaagtcgaatcaaaatatttatggaataacagggcttgaacaaatcgacga

SEQ ID NO: 289716 - DNA, 75 bp, synthetic construct
  source 1..75: mol_type = other DNA
gcctgatgctgcagaagttgccggatatgctcatcctgttgctactgttcgttccctcgaccagtcggcggttct

SEQ ID NO: 289717 - DNA, 75 bp, synthetic construct
  source 1..75: mol_type = other DNA
ttaagaaaacatcttcatctcatgctcgcctgaatgtgcctgcgctggtgcaggtggcggcgctcgccattatta

SEQ ID NO: 289718 - DNA, 75 bp, synthetic construct
  source 1..75: mol_type = other DNA
tccggagctgttcagcattcccggtgaatcaaaacgtgaaatcttccatagcctgatgctgcagaagctgccgga

SEQ ID NO: 289719 - DNA, 75 bp, synthetic construct
  source 1..75: mol_type = other DNA
tggtccgaaatctccggcacaaacaattacgttaatgtaccgcattaataatgactatacagttgaagcactggc

SEQ ID NO: 289720 - DNA, 75 bp, synthetic construct
  source 1..75: mol_type = other DNA
tcgtgtttattctacgagcgatgttagtgggttatctcgtccgtattcagctatcgctgctggtttacgagccag

SEQ ID NO: 289721 - DNA, 75 bp, synthetic construct
  source 1..75: mol_type = other DNA
ccctcgtgtttattctacgagtgatgttagtggtttatctcgtccgtattcagctatcgctgctggtttacgagc

SEQ ID NO: 289722 - DNA, 75 bp, synthetic construct
  source 1..75: mol_type = other DNA
gctgcccgacggaacaaaaaaattaacgatgattacggagccgggaatgacccccggcaaaatgtatgatcagaa

SEQ ID NO: 289723 - DNA, 75 bp, synthetic construct
  source 1..75: mol_type = other DNA
aactatctgtgcagtctggattcgcagtggtcgtttgaatgcgttcgtcgaacagctgatgtaattgaggattct

SEQ ID NO: 289724 - DNA, 75 bp, synthetic construct
  source 1..75: mol_type = other DNA
tcactggctgataatctcgttgaattttcaacggtatcaccaggcagcgacggtaataaatgggttgttgaaatt

SEQ ID NO: 289725 - DNA, 75 bp, synthetic construct
  source 1..75: mol_type = other DNA
agcacggcatctggcgttatcaaagaagcgatggtttatgccaacgtgattggctgcgatttgggaccgaaaatt

SEQ ID NO: 289726 - DNA, 75 bp, synthetic construct
  source 1..75: mol_type = other DNA
gcaccacgctggcgtttgtaatggccgcagggtttattgccgataccgccagcttgccacttatcgtatcgaacc

SEQ ID NO: 289727 - DNA, 75 bp, synthetic construct
  source 1..75: mol_type = other DNA
ggcccatcggttatgaagatgcaattgttaacgaagaattggtggcgaagttaagagggtataaaaaacagggat

SEQ ID NO: 289728 - DNA, 75 bp, synthetic construct
  source 1..75: mol_type = other DNA
tccaacagcggcagttgtcggcaaactgctgcgtcaactcggcgaatcaactcaggtgatgtgtgttacccacct

SEQ ID NO: 289729 - DNA, 75 bp, synthetic construct
  source 1..75: mol_type = other DNA
tcgccgcgattgttgccacgctggtgatgttgcatctctatttccgcaaagatattccgcagaactacgacatgg

SEQ ID NO: 289730 - DNA, 75 bp, synthetic construct
  source 1..75: mol_type = other DNA
cacgctggggcaatggacgcggtcgcttgctgtttacctggattgtcctgctcggtgctgccgttgccgccctgt

SEQ ID NO: 289731 - DNA, 75 bp, synthetic construct
  source 1..75: mol_type = other DNA
tgcggtaaaagccattctggcgcaacaccctgatgtgcagatcatcgtaaccgacgacggtttacagcattatcg

SEQ ID NO: 289732 - DNA, 75 bp, synthetic construct
  source 1..75: mol_type = other DNA
gttggtaatctcaccgcaggcggcaacggaaaaaccccggtcgttgtctggctggtggaacagctgcaacagcgc

SEQ ID NO: 289733 - DNA, 75 bp, synthetic construct
  source 1..75: mol_type = other DNA
atgatcgaaaaaatctggtctggtgaatcccctttgtggcggctattgctgccactctcctggttgtatggtctg

SEQ ID NO: 289734 - DNA, 75 bp, synthetic construct
  source 1..75: mol_type = other DNA
cccagccgggatcgctcaaccggcggctgcgggctggggctggcaattgtccactctatagcactggcaatgggc

SEQ ID NO: 289735 - DNA, 75 bp, synthetic construct
  source 1..75: mol_type = other DNA
ggcagtaacgcccgataaaacggtacggataaaaacgctcgtgcaaggccattatgcggcgttggatatgcgctt

SEQ ID NO: 289736 - DNA, 75 bp, synthetic construct
  source 1..75: mol_type = other DNA
gcgtgccccagtgcctgttgtggtggtcggtaatctcaccgcaggtggcaacgggaaaaccccggtcgttgtctg

SEQ ID NO: 289737 - DNA, 75 bp, synthetic construct
  source 1..75: mol_type = other DNA
aactggaagatggccgcgaatgcctgcttcgtcgcgtgatcagtagcgatggccgctcccgtggtttcatcaacg

SEQ ID NO: 289738 - DNA, 75 bp, synthetic construct
  source 1..75: mol_type = other DNA
atgtatcccgtcgaccttcatatgcataccgttgccagcacacatgcatatagcacattaagtgattacattgcc

SEQ ID NO: 289739 - DNA, 75 bp, synthetic construct
  source 1..75: mol_type = other DNA
acatcagttattggatctggttcagctactgggccaacgttgaatcccgtagcattagcctctctattaatacac

SEQ ID NO: 289740 - DNA, 75 bp, synthetic construct
  source 1..75: mol_type = other DNA
ctgtgtcgttacaacctgaagcgaaagttctcagttccatggggaaagcgataccagttcagtctggatatccag

SEQ ID NO: 289741 - DNA, 75 bp, synthetic construct
  source 1..75: mol_type = other DNA
atcgtgcgaatcataacttctacctttctaccctgtcgttaacgaagcaggcggtgcctgctttgaggaaattct

SEQ ID NO: 289742 - DNA, 75 bp, synthetic construct
  source 1..75: mol_type = other DNA
aagatacgccggtctataacgcgccgagtgcgggcagtgcgccgtttggggtactggcggacaatttgcgctacc

SEQ ID NO: 289743 - DNA, 75 bp, synthetic construct
  source 1..75: mol_type = other DNA
aggggcgacaaaaagttgaagacggtttgggtgacctcaacaagccgctgagtaatcagaacttaattacctgga

SEQ ID NO: 289744 - DNA, 75 bp, synthetic construct
  source 1..75: mol_type = other DNA
gtgtggccctgacttcattatttgccagcgacgaactggcaaaaaacggcccatatttctgggggctggcctgtg

SEQ ID NO: 289745 - DNA, 75 bp, synthetic construct
  source 1..75: mol_type = other DNA
cggagaagatactgtgcgtcgcagtgtcattcccgtattaaccaataaaccggttaccgggcgtttatccgaaat

SEQ ID NO: 289746 - DNA, 75 bp, synthetic construct
  source 1..75: mol_type = other DNA
acaaagccagctttacacggctaaacaactggtgagcgaattgattggcatggacagcaaattgtctggcgtgct

SEQ ID NO: 289747 - DNA, 75 bp, synthetic construct
  source 1..75: mol_type = other DNA
ccgcgggtcgtggtcgccatcgcgctggacgatcagcagcgcatcgtcgacaccttgtttatgaaaggactgacc

SEQ ID NO: 289748 - DNA, 75 bp, synthetic construct
  source 1..75: mol_type = other DNA
gatcctgcgtggtatcgaagctaacattaaaaatgttgatggtgaaattgactgcagtggcaaaatgtttgattc

SEQ ID NO: 289749 - DNA, 75 bp, synthetic construct
  source 1..75: mol_type = other DNA
cggcaactgaaactgctgcgcctgcgggcgcaccgctatgcggataaagccctgctgaaccgaaaaatggaaatc

SEQ ID NO: 289750 - DNA, 75 bp, synthetic construct
  source 1..75: mol_type = other DNA
aaaaagccgctgcagcaaaagcggccgcagaggcagatgatattttcggtgagctaagctctggtaagaatgcac

SEQ ID NO: 289751 - DNA, 75 bp, synthetic construct
  source 1..75: mol_type = other DNA
gtcgcaatgcgggttatcagggcgtactttccgttggacgcgtgcagacgccagtgctcgggctggtggtgcgcc

SEQ ID NO: 289752 - DNA, 75 bp, synthetic construct
  source 1..75: mol_type = other DNA
cgtcggtaaggcagtttcggggaataatggctcccggcggtggagaagggaagaaaaaggattcgccacgcaaga

SEQ ID NO: 289753 - DNA, 75 bp, synthetic construct
  source 1..75: mol_type = other DNA
aattgctggtggatgaagtgctggattacctgcaacttgcgccggaaaagcgccagcaagttcagcgttgtttaa

SEQ ID NO: 289754 - DNA, 75 bp, synthetic construct
  source 1..75: mol_type = other DNA
gggaagtgaaaacggttgtcccggtcagttcagttgcgccggtaacgcctccccgtccgttaagaacgggtgagc

SEQ ID NO: 289755 - DNA, 75 bp, synthetic construct
  source 1..75: mol_type = other DNA
cggcatcgctgccgcgcctggctgaagggaacttccggacaatgccggcgcggaccgtcaccgcgaccacttcgt

SEQ ID NO: 289756 - DNA, 75 bp, synthetic construct
  source 1..75: mol_type = other DNA
atgacccgcgcgtacaccattctcggtcgtaatgcgggttatcagggcgtgctttccgtgggacgcgtgcagacg

SEQ ID NO: 289757 - DNA, 75 bp, synthetic construct
  source 1..75: mol_type = other DNA
tggacggaacgcgaagcgcgtaaccgttgcccgtccggttgtgttgctgtatttgccgcccgtattcgtcaggag

SEQ ID NO: 289758 - DNA, 75 bp, synthetic construct
  source 1..75: mol_type = other DNA
catggctactatccctaccctcgtacattctcagactgcctttctctggcgctttattgcctttggcgcgtcaga

SEQ ID NO: 289759 - DNA, 75 bp, synthetic construct
  source 1..75: mol_type = other DNA
gtctatctacgaacgctttatggaacgcgccatccgccgtgtcgaaagcattcgcagcggtaacccgctcgacag

SEQ ID NO: 289760 - DNA, 75 bp, synthetic construct
  source 1..75: mol_type = other DNA
tccaacagcgagtttgtaccgttgtgcgtgtctgcgctggcgcgggcgcgtgccgactggttgtacggcatcaat

SEQ ID NO: 289761 - DNA, 75 bp, synthetic construct
  source 1..75: mol_type = other DNA
gattgtcccggaaaagtggcaactgcagccgcggccttccgtgactaaacaacttaacgtcatcaaacgcctttt

SEQ ID NO: 289762 - DNA, 75 bp, synthetic construct
  source 1..75: mol_type = other DNA
caaaaaagggcgctatatccactccaccgacgccggaaaagcgttattccattcgctgccagaaatggctacgcg

SEQ ID NO: 289763 - DNA, 75 bp, synthetic construct
  source 1..75: mol_type = other DNA
atgaaacagatttctttatttattcctctgctggggaccttattactttccggctgtgccggaaccagtacggaa

SEQ ID NO: 289764 - DNA, 75 bp, synthetic construct
  source 1..75: mol_type = other DNA
tgatgcaatgggattacagcgcgaaggataaggctgaccgtatccttaacgccgcgctaaaggcgaatacggaag

SEQ ID NO: 289765 - DNA, 75 bp, synthetic construct
  source 1..75: mol_type = other DNA
gattgctccgcctctctctcttgatggcttctccagtttggagggcgatcagagttcaaccgaaacaaaacaaaa

SEQ ID NO: 289766 - DNA, 75 bp, synthetic construct
  source 1..75: mol_type = other DNA
cgcaaaggctcatgagaatgagggaggcggaagagttaagcagacgtcaattctctgatattacagggattccac

SEQ ID NO: 289767 - DNA, 75 bp, synthetic construct
  source 1..75: mol_type = other DNA
gaaagctgcagccgacaaaaaagcagcagaaaaagcggctgctgaaaaggcagcagctgataagaaagcagcggc

SEQ ID NO: 289768 - DNA, 75 bp, synthetic construct
  source 1..75: mol_type = other DNA
acctatcatgacgctaaaccgggcggcatcagcgccgactgggcgggcaatattcagcaactgctggacgatgtg

SEQ ID NO: 289769 - DNA, 75 bp, synthetic construct
  source 1..75: mol_type = other DNA
aaaaaattcacctcatgcgtaaggcggaagggctatcccgaagagaaatgtctgagataacaggtatctcagcta

SEQ ID NO: 289770 - DNA, 75 bp, synthetic construct
  source 1..75: mol_type = other DNA
ggcccgacgcattatcttcgcggtaatgatccctgcgttattaatctcctatgtcatctcgtcgctgttctatat

SEQ ID NO: 289771 - DNA, 75 bp, synthetic construct
  source 1..75: mol_type = other DNA
gtgagcgacaaacccgttgattatctgaacattccggcagaagctaacccgttcctcggttatcgcgctgtgcgt

SEQ ID NO: 289772 - DNA, 75 bp, synthetic construct
  source 1..75: mol_type = other DNA
acacgctgcgggcgatcagcacatgcgcattttctcgcgcctcgctcgccgcatcatgcacgaagaattccgtaa

SEQ ID NO: 289773 - DNA, 75 bp, synthetic construct
  source 1..75: mol_type = other DNA
tatatttagattttataaaaacaaaatcaacactcatgcgttttacagatagcgtgttaagcaccgcaaacatta

SEQ ID NO: 289774 - DNA, 75 bp, synthetic construct
  source 1..75: mol_type = other DNA
aagtttgatataagcatacttatacccaaaagagaacagaggaaacagataaaaagatatgaaaactcaacacgg

SEQ ID NO: 289775 - DNA, 75 bp, synthetic construct
  source 1..75: mol_type = other DNA
gtatttttggcgcaccgctggcccgacgcattatcttcgcggtaatgatccctgcgttattaatctcctatgtca

SEQ ID NO: 289776 - DNA, 75 bp, synthetic construct
  source 1..75: mol_type = other DNA
gcactggatgaagtcatggccacgctgaccacgccggcgcgcagcagagttatcagcattgttaacggcaactga

SEQ ID NO: 289777 - DNA, 75 bp, synthetic construct
  source 1..75: mol_type = other DNA
gacacatgctggtactgaagcagcaactgaaagaggcccgtattccacaggcggtggtggcgagagctgtcgatg

SEQ ID NO: 289778 - DNA, 75 bp, synthetic construct
  source 1..75: mol_type = other DNA
taccgccagttaacggcacagtagccggacggcgtaccggaagctgcactggatgaagtcatggccacgctgacc

SEQ ID NO: 289779 - DNA, 75 bp, synthetic construct
  source 1..75: mol_type = other DNA
tgcacccggaacaactggatgcgcctgcaccgcataccgaagtggccagtctgcatcccaatcatgtctggcaga

SEQ ID NO: 289780 - DNA, 75 bp, synthetic construct
  source 1..75: mol_type = other DNA
tgcacccggaacaactggatgctcctgcaccgcataccgaagtggccagtctgcaacccaatcatgtctggcaga

SEQ ID NO: 289781 - DNA, 75 bp, synthetic construct
  source 1..75: mol_type = other DNA
gtgactgataaacgcaaaaaacgcgcggatgccggacgcagcgccctgacccgcgacgaagccgcgctgatatct

SEQ ID NO: 289782 - DNA, 75 bp, synthetic construct
  source 1..75: mol_type = other DNA
gcttttacgttggtaagggtcgaaaccgggaagaagaaaacgacgctgaagcagaaagcgaaaaaactaaagaat

SEQ ID NO: 289783 - DNA, 75 bp, synthetic construct
  source 1..75: mol_type = other DNA
cgccggatgtcttctcgcaaacgctgctggcgatcccgatgtactgcctgtttgaaatcggtgtcttcttctcac

SEQ ID NO: 289784 - DNA, 75 bp, synthetic construct
  source 1..75: mol_type = other DNA
tggcgctgtttatggcgtttggtgtctcctttgaagtgccggtggcaattgtgctgctgtgctggatgggaatta

SEQ ID NO: 289785 - DNA, 75 bp, synthetic construct
  source 1..75: mol_type = other DNA
atgagtgctgccctgactgaacgactggtttctgttgcccgcgcggcacgtgacgcggggcatggtaaacgtggt

SEQ ID NO: 289786 - DNA, 75 bp, synthetic construct
  source 1..75: mol_type = other DNA
acaccgcggccatgaccaaaaacctctgccgttcgctgggcattgacgtggtagcacataaagcccacaacgccc

SEQ ID NO: 289787 - DNA, 75 bp, synthetic construct
  source 1..75: mol_type = other DNA
tcacctggtatccgcgccattgatcaagcagttgccgcaaggctcaacgatgatcgccactgacgtggcctcgcc

SEQ ID NO: 289788 - DNA, 75 bp, synthetic construct
  source 1..75: mol_type = other DNA
ttcacagtctggaagaactcaacgcgctggccgcgaaatggcgcagccactttaacgccacggctgttcacagcc

SEQ ID NO: 289789 - DNA, 75 bp, synthetic construct
  source 1..75: mol_type = other DNA
gcggtggctgaaatggcacgagctggaaagctgccagcattctatatgacagacccgttaaagccgggcggtcac

SEQ ID NO: 289790 - DNA, 75 bp, synthetic construct
  source 1..75: mol_type = other DNA
gcaggatgctccaaccgagtggcatgactggaaaaaccgtattagttacagcaagtcggctcatggtcgcgcggt

SEQ ID NO: 289791 - DNA, 75 bp, synthetic construct
  source 1..75: mol_type = other DNA
tgcagaacaggaaaattcagaagaataataaatctggataccgtggcgtgtcttgggatgctaagtacgggaaat

SEQ ID NO: 289792 - DNA, 75 bp, synthetic construct
  source 1..75: mol_type = other DNA
agctctcgaaaaccttggtttgggagaagcggcaaaacggaatgtgggcaacggggaaaaccaaatccctgatat

SEQ ID NO: 289793 - DNA, 75 bp, synthetic construct
  source 1..75: mol_type = other DNA
ctggcggcttaacctccacacatgctaactcggcgatggatgccttcacccgtatagggttgatggttaaagcta

SEQ ID NO: 289794 - DNA, 75 bp, synthetic construct
  source 1..75: mol_type = other DNA
acgacgatctcctgctgaaagagttataccgggctaaacgccgggaagaatttttgcttactgcggtacggaaaa

SEQ ID NO: 289795 - DNA, 75 bp, synthetic construct
  source 1..75: mol_type = other DNA
atgactcatgtggaggctgcgaaagccctgcgcgataagttcagcgccgacggccttacctggacgccggaacat

SEQ ID NO: 289796 - DNA, 75 bp, synthetic construct
  source 1..75: mol_type = other DNA
ctggctgaagattactgctgaccagctgaaaaaagcgccatccgttgaggtttgccgcgaactggcggtggccgc

SEQ ID NO: 289797 - DNA, 75 bp, synthetic construct
  source 1..75: mol_type = other DNA
tgtatgacgacctgaatgtgaatggtctgcctggtgaaagcacagccatgaaggcttctgatattccgggtgttc

SEQ ID NO: 289798 - DNA, 75 bp, synthetic construct
  source 1..75: mol_type = other DNA
gctgggatgatgggcgcgggattgatgcgggacgtaccctgctttcagggcaggatggtacaagtttttctcatt

SEQ ID NO: 289799 - DNA, 75 bp, synthetic construct
  source 1..75: mol_type = other DNA
cattaattgaagtaatgattggcgtccttttttttcgattgtttctctttctgtatataactattacaacaggag

SEQ ID NO: 289800 - DNA, 75 bp, synthetic construct
  source 1..75: mol_type = other DNA
tggagttacgagattaccgaccataccagcggctggatttacgttgagtacgtgatgggtgcggaatctggtgag

SEQ ID NO: 289801 - DNA, 75 bp, synthetic construct
  source 1..75: mol_type = other DNA
ttatcacgcatctgattgagctgcgtaagcgtctgctgaactgcattatcgcggtgatcgtgatattcctgtgtc

SEQ ID NO: 289802 - DNA, 75 bp, synthetic construct
  source 1..75: mol_type = other DNA
ttcatcaaccctgattatccaaatacaattgagcatcttaactcggtaagaaataaactaaaaactaaaaacttt

SEQ ID NO: 289803 - DNA, 75 bp, synthetic construct
  source 1..75: mol_type = other DNA
aagcaggaagtggaaaggattaacaacgccgcaaaaagcgaatccagtacgtctgattctctcggacagtgcctg

SEQ ID NO: 289804 - DNA, 75 bp, synthetic construct
  source 1..75: mol_type = other DNA
aaaggaagagggaaatatgcagatacggatgcggtaagatttaatataaaagccttcgcacgcagcattatcggg

SEQ ID NO: 289805 - DNA, 75 bp, synthetic construct
  source 1..75: mol_type = other DNA
tcgattggttacacaccaacagaatgcacagaaccaaaagagaaaaataaccaattcgtcaggagtgactggagt

SEQ ID NO: 289806 - DNA, 75 bp, synthetic construct
  source 1..75: mol_type = other DNA
gaaggcgagctgatgcggttacgtgcctggcaacggctgggtattaccccggagccggatgatgagacggagcct

SEQ ID NO: 289807 - DNA, 75 bp, synthetic construct
  source 1..75: mol_type = other DNA
ggagccggatgatgagacggagccttcactggtatacgtgcatctgtgggataccggcgaggcgctgggctggct

SEQ ID NO: 289808 - DNA, 75 bp, synthetic construct
  source 1..75: mol_type = other DNA
ccctccggggttaccttaatgatcatggcgtaccgctcgctctctactctgatagacacagtatattcagggtaa

SEQ ID NO: 289809 - DNA, 75 bp, synthetic construct
  source 1..75: mol_type = other DNA
gaggttgaaaccacatcaaaagtgttttccctgcatctgggggcaacgcgcgttgtttacaatccggattcagcc

SEQ ID NO: 289810 - DNA, 75 bp, synthetic construct
  source 1..75: mol_type = other DNA
tgaaatcggttatgaaacatcagaagaataagatattaacagggctcccgcttctttctgttgtggcaacgatga

SEQ ID NO: 289811 - DNA, 75 bp, synthetic construct
  source 1..75: mol_type = other DNA
gttcagaaaaaacagcgtgagaagacacccaaaaagcaggaaaaaacggcggacataacggataaaagcaaaaaa

SEQ ID NO: 289812 - DNA, 75 bp, synthetic construct
  source 1..75: mol_type = other DNA
tccatttgtagtaacacctccattatttagacttgacgggcttcaatccagccgccttaggattattcgtactgg

SEQ ID NO: 289813 - DNA, 75 bp, synthetic construct
  source 1..75: mol_type = other DNA
atgctttataagccgaattcttctggagaaacattggcagttattaatgaacataactatcctatattagtccaa

SEQ ID NO: 289814 - DNA, 75 bp, synthetic construct
  source 1..75: mol_type = other DNA
atgaaatcagctgaagactggctgcatactgtcagacgtttcatgaatgaagattcgcttgatacgtatgtagac

SEQ ID NO: 289815 - DNA, 75 bp, synthetic construct
  source 1..75: mol_type = other DNA
ctgtctcaattatgactgtctgtcgatggaaaattacgaaggcgttcgcttgcgtcagtacaagatgaggctgga

SEQ ID NO: 289816 - DNA, 75 bp, synthetic construct
  source 1..75: mol_type = other DNA
aaaaccgctacagatccgccacggcacgccagatgcgcgtctgctggctgaaatctcgatgtgtatacatgaata

SEQ ID NO: 289817 - DNA, 75 bp, synthetic construct
  source 1..75: mol_type = other DNA
ttttcataaacgttggtttgggggaattggctctggctggcgcaacaaccggcgctatgttggtgaatgggtatg

SEQ ID NO: 289818 - DNA, 75 bp, synthetic construct
  source 1..75: mol_type = other DNA
ttggcttccttgccaataccgcgccggaaggggtacaggtatccaccgacatcgccagctatttaagcttcgtta

SEQ ID NO: 289819 - DNA, 75 bp, synthetic construct
  source 1..75: mol_type = other DNA
atgctgcggttatcgaacaaattcgtcgcgctcgtccacactggctggatgttaaaccagcatcttcactcatta

SEQ ID NO: 289820 - DNA, 75 bp, synthetic construct
  source 1..75: mol_type = other DNA
gcgcagttggctgcgtggggaattgtgccgcaaccggctaatgaatcgcgttgtctcaattatgactgtctgtcg

SEQ ID NO: 289821 - DNA, 75 bp, synthetic construct
  source 1..75: mol_type = other DNA
ttgccggaagtgcgcagccgccttgatgtcgctgaaaacaaactgaatgccttccgtcaggataaagattccgtc

SEQ ID NO: 289822 - DNA, 75 bp, synthetic construct
  source 1..75: mol_type = other DNA
ctccggtcaggcagttcagaggaattgtggcatcgggtgggggggctgttaaaaaagcacccaataagcgtgtga

SEQ ID NO: 289823 - DNA, 75 bp, synthetic construct
  source 1..75: mol_type = other DNA
ccgcatcagcggccaaccggctattgtcaccagctataacgataaacgggaatcagaatccgcaccgctgccgtt

SEQ ID NO: 289824 - DNA, 75 bp, synthetic construct
  source 1..75: mol_type = other DNA
ttcgccacgccgatttatagtgccgacgcactggtacaaatcgagcaaagcagcggcaattcgttagtgcaggac

SEQ ID NO: 289825 - DNA, 75 bp, synthetic construct
  source 1..75: mol_type = other DNA
accaataacgtcaatggcctgtcggagcttctgattggcaagggtgatattgcggccagtgccaaacccacttcg

SEQ ID NO: 289826 - DNA, 75 bp, synthetic construct
  source 1..75: mol_type = other DNA
cgcacagcttaacgaactgacctttaaagaggcggaaatctccaaactgtataccaaagtccacccggcctaccg

SEQ ID NO: 289827 - DNA, 75 bp, synthetic construct
  source 1..75: mol_type = other DNA
aatacgaaaaagacagcatgtcaactgaaattacggagcatgacatagatatagaaggcatgtctatcataagaa

SEQ ID NO: 289828 - DNA, 75 bp, synthetic construct
  source 1..75: mol_type = other DNA
taatggcctgccggtgctaacctatcaccatattctgcgcgacgaagaaaatacccgttttcgccatacttcgac

SEQ ID NO: 289829 - DNA, 75 bp, synthetic construct
  source 1..75: mol_type = other DNA
gtactggcggacaatttgcgctacccaattttgcataaaatgaaagacaggttaaatcaaacctggtatcagatc

SEQ ID NO: 289830 - DNA, 75 bp, synthetic construct
  source 1..75: mol_type = other DNA
atgaacgggagtaaagcgaaaagactaaagagtgaaggagaaattttgagggtgcgtctcaccgataaagatgag

SEQ ID NO: 289831 - DNA, 75 bp, synthetic construct
  source 1..75: mol_type = other DNA
ttgtgcgaagcatataaagccgcaatatttgtaaatggttgtttctggcacggtcatcaatgtcatatgttcaga

SEQ ID NO: 289832 - DNA, 75 bp, synthetic construct
  source 1..75: mol_type = other DNA
cacatattatgaggtcaatacactcaaagaatacaaaacctgaaataattgtagatggaattctgagtaatcttg

SEQ ID NO: 289833 - DNA, 75 bp, synthetic construct
  source 1..75: mol_type = other DNA
gggggatttacataagccactgagtaaccaaaatcttattacatggaaagatactccgatatacaacgcgcctga

SEQ ID NO: 289834 - DNA, 75 bp, synthetic construct
  source 1..75: mol_type = other DNA
atccacctccacgctacgttacatgctctatgttggctttatgggtaccctgagcgctgctgtaggttgggctgc

SEQ ID NO: 289835 - DNA, 75 bp, synthetic construct
  source 1..75: mol_type = other DNA
tgcggcagcaatcgcggcggctctcacaaaccttggtttgggagaagcagctaaaaggaatgtaggtacaggggc

SEQ ID NO: 289836 - DNA, 75 bp, synthetic construct
  source 1..75: mol_type = other DNA
ggatttaatgacaaagccgtgaaggcagcaaaagaagccggatttcacctggcggtgacaaccatgaaaggcaaa

SEQ ID NO: 289837 - DNA, 75 bp, synthetic construct
  source 1..75: mol_type = other DNA
aagaccgaattactttcatcaagactaaataaattcaatgattttaaagataattttaatggcgggaatcagcat

SEQ ID NO: 289838 - DNA, 75 bp, synthetic construct
  source 1..75: mol_type = other DNA
tctgctgatgatatgcagtatggggatatggaagaacaagattttctctctctcggcttaagcgacatctctgca

SEQ ID NO: 289839 - DNA, 75 bp, synthetic construct
  source 1..75: mol_type = other DNA
ttttacattatataaaattatatctttatgaaaatgataaaagattctcagatataaaaaacatatcaagcaaca

SEQ ID NO: 289840 - DNA, 75 bp, synthetic construct
  source 1..75: mol_type = other DNA
taccgttacccgtggcggttttggtgaatctgttgccaaacaaagcactatgcagcgtagcgcaaccggcacctc

SEQ ID NO: 289841 - DNA, 75 bp, synthetic construct
  source 1..75: mol_type = other DNA
taaataaatttaatgacttcgaggacagttttaatggcttaggaatcagtgttcatgatatttcagctcaaaaaa

SEQ ID NO: 289842 - DNA, 75 bp, synthetic construct
  source 1..75: mol_type = other DNA
gtcttgatgtaactgatataaaaaacaagacttacagcaaatatagattttttcgcatatggttctttttacaac

SEQ ID NO: 289843 - DNA, 75 bp, synthetic construct
  source 1..75: mol_type = other DNA
ccagcccaggctggcatggcacctgaaaatcaggcgcaggcccagcaatccagcggaagtttctggatgccactg

SEQ ID NO: 289844 - DNA, 75 bp, synthetic construct
  source 1..75: mol_type = other DNA
cgtctgatgggcggcggcgcgggatttgcacagcagccgctgttctcctcgaaaaacccagccagcccggcttac

SEQ ID NO: 289845 - DNA, 75 bp, synthetic construct
  source 1..75: mol_type = other DNA
tgatgggcggcggcgcgggctttgcacagcaaccgctgtttacctcgaagaacccagccagcccggcttacggta

SEQ ID NO: 289846 - DNA, 75 bp, synthetic construct
  source 1..75: mol_type = other DNA
caagcgatagtcgctgttctggctgacggaggagcctggtttgcacaacaaatcagccaacggatacgcgacaaa

SEQ ID NO: 289847 - DNA, 75 bp, synthetic construct
  source 1..75: mol_type = other DNA
atcagtcgtcaggcagtgatagccgaaaatatccctggcgggtttccatcgatgcaaacgctttgtcgaagtatg

SEQ ID NO: 289848 - DNA, 75 bp, synthetic construct
  source 1..75: mol_type = other DNA
aacaagaaagttattctgttgttaatttagaaaaacaactaatgagtaatgaatcaccgaagcaatcgctattaa

SEQ ID NO: 289849 - DNA, 75 bp, synthetic construct
  source 1..75: mol_type = other DNA
gctctgtttaatcgaccactactttgcggacctcaccctctggccgacgctgcaacgcttcgacagcggttcgct

SEQ ID NO: 289850 - DNA, 75 bp, synthetic construct
  source 1..75: mol_type = other DNA
caacgcttcaatgctttgacagcggttcgctacacgattttctgcgcgagcaaacggggattacgctacgacgca

SEQ ID NO: 289851 - DNA, 75 bp, synthetic construct
  source 1..75: mol_type = other DNA
gtgaaccgccacaccctgcgccgcgccatcgaccaactggtggaaaaaggctgggtacagcgccgtcagggcgtc

SEQ ID NO: 289852 - DNA, 75 bp, synthetic construct
  source 1..75: mol_type = other DNA
atgccatttgcttgttatttcttcattttcataaacgttggtttgggagaaggagcaaaactcaatgcagcaacg

SEQ ID NO: 289853 - DNA, 75 bp, synthetic construct
  source 1..75: mol_type = other DNA
ctggtgggcttgggtgcagtatgttttacgctgttttcaatcgtttctatattagaagcgggttctgcgaaaaaa

SEQ ID NO: 289854 - DNA, 75 bp, synthetic construct
  source 1..75: mol_type = other DNA
catgttcgttagccaacagaatacccatgattccggtatttacctgtctgttttgtctgttccttgctgcgttcc

SEQ ID NO: 289855 - DNA, 75 bp, synthetic construct
  source 1..75: mol_type = other DNA
taattgccgttcccgttctgcttactctctttggtttcatttggtcagtcatactgttacgtagtgcagatatca

SEQ ID NO: 289856 - DNA, 75 bp, synthetic construct
  source 1..75: mol_type = other DNA
ttccgacccggttaaatttatatccagagccagtactcctggcctcggcgcttcatttttagcgttaggctgtta

SEQ ID NO: 289857 - DNA, 75 bp, synthetic construct
  source 1..75: mol_type = other DNA
tgagtggaaaggatgtcgctggtcttctcacataccttggtttaggagaagcggcgaaaagggatgtgggcacag

SEQ ID NO: 289858 - DNA, 75 bp, synthetic construct
  source 1..75: mol_type = other DNA
cagtgttatgtctgatgccgttcagtcagacccgtcgaatcctgccctgcaggttttgtctgtaaattttgaaca

SEQ ID NO: 289859 - DNA, 75 bp, synthetic construct
  source 1..75: mol_type = other DNA
tcgtaacgagctgccggacaccttaggtttacgcatcgatatggtggtcgatctttggtacgcccggcaaccgtg

SEQ ID NO: 289860 - DNA, 75 bp, synthetic construct
  source 1..75: mol_type = other DNA
aatgccgtaacttgcttaacgtcaggtacgagccccgactctaatctttctgacgcttatttttttgctattgga

SEQ ID NO: 289861 - DNA, 75 bp, synthetic construct
  source 1..75: mol_type = other DNA
tccctgttgcattccccagatattgcgcccaaataattacatcttacgataatggaagctcgtcaatcattgctg

SEQ ID NO: 289862 - DNA, 75 bp, synthetic construct
  source 1..75: mol_type = other DNA
tgagcttacgtgctgactcagtgggtgctgcagtgacgcgcagtagtgacagtgatttgtgttacggtcgttatc

SEQ ID NO: 289863 - DNA, 75 bp, synthetic construct
  source 1..75: mol_type = other DNA
gcgacaaatgtccagaacactggatttaatattacagtgtcgcccggttcaggatatggttcatctgctgatgcg

SEQ ID NO: 289864 - DNA, 75 bp, synthetic construct
  source 1..75: mol_type = other DNA
aacggctctcgaaaaccttggtttgggaacagctgcaacgaggaacgtcggaacaggtcccgggcaagtaccaga

SEQ ID NO: 289865 - DNA, 75 bp, synthetic construct
  source 1..75: mol_type = other DNA
ggatgaccaggtcagtaatacaggtttttatgtccgctgccagatgtacgacggaagaccatcaacaagtgcttt

SEQ ID NO: 289866 - DNA, 75 bp, synthetic construct
  source 1..75: mol_type = other DNA
atggcgaaaaatgactttaaagcgtttgcaacggatcgaaaagccaatgttatatcgcaggaggaatgggaagcg

SEQ ID NO: 289867 - DNA, 75 bp, synthetic construct
  source 1..75: mol_type = other DNA
aaccgctggacaatacgcttaccaatttgagtggaaaggatgtagctggtcttctcacataccttggtttaggag

SEQ ID NO: 289868 - DNA, 75 bp, synthetic construct
  source 1..75: mol_type = other DNA
atagtgggaggatttttgcagatttctctatgtgtaactgcttttccaaaaaccttggtttgggagaagcggcga

SEQ ID NO: 289869 - DNA, 75 bp, synthetic construct
  source 1..75: mol_type = other DNA
ggattggcactcgacattaacgatatgactcaggttttaaaagccattcaaaaactcacactgagccgtgcaaac

SEQ ID NO: 289870 - DNA, 75 bp, synthetic construct
  source 1..75: mol_type = other DNA
caggggcgaatcagatacctgatatgggtagttttatgctttctgcttcagttcctggatatcaaaaattgccat

SEQ ID NO: 289871 - DNA, 75 bp, synthetic construct
  source 1..75: mol_type = other DNA
taccgcgcttcgtgcgctgctgttaagccgcaagaatccgtttggcgatatcaaattggacggcacggtgcaaaa

SEQ ID NO: 289872 - DNA, 75 bp, synthetic construct
  source 1..75: mol_type = other DNA
aaacaaaatcattaacaggggccagcatctggcaggcaggtcccggaggatttaatgtggacattatagcggtgg

SEQ ID NO: 289873 - DNA, 75 bp, synthetic construct
  source 1..75: mol_type = other DNA
cccaaaaaagcggactgcgccatgcttactcattctggtgatggcggtgcgcctttaggcgctgggcggggattc

SEQ ID NO: 289874 - DNA, 75 bp, synthetic construct
  source 1..75: mol_type = other DNA
aattacccaacgggaaaatcctgcaatatggtcgtggtgcggttacgccgacattatcgacgcaaacaatgagaa

SEQ ID NO: 289875 - DNA, 75 bp, synthetic construct
  source 1..75: mol_type = other DNA
cgactaacgccgcggcggtatctacaaatgtgactttccccattccttttacgcaggagccagacgtagtgattg

SEQ ID NO: 289876 - DNA, 75 bp, synthetic construct
  source 1..75: mol_type = other DNA
cccaaaaaagcggactgcgccatgcttactcattctggtgatggcggtgcgcctttaggcgctgggcgagggttc

SEQ ID NO: 289877 - DNA, 75 bp, synthetic construct
  source 1..75: mol_type = other DNA
ggtgctaaccaactaccagacatgtctgcatggaccagtggtagtgggtgggtaaagtttccagacgggacaatt

SEQ ID NO: 289878 - DNA, 75 bp, synthetic construct
  source 1..75: mol_type = other DNA
tcaaacacaaaaccggtttgctcaatctggctgaagaactcagcaacgtatcaaaagcctgtaaaatcatgggcg

SEQ ID NO: 289879 - DNA, 75 bp, synthetic construct
  source 1..75: mol_type = other DNA
gtagtcgccgcgctcctaaccttaaaaaccgcaccggtgaggcaactgaacaggttgttgttgattacgccgtcg

SEQ ID NO: 289880 - DNA, 75 bp, synthetic construct
  source 1..75: mol_type = other DNA
ttttcgaactgcgcacggtcccttatcaggagctgcagtatcagcgtagctggcgccatgcgacaaacagccgcg

SEQ ID NO: 289881 - DNA, 75 bp, synthetic construct
  source 1..75: mol_type = other DNA
tgtttatgctgcgcaccgttccgtatcaggaactgcagtatcaacgcagttggcgacatgcggcaaacagtcggg

SEQ ID NO: 289882 - DNA, 75 bp, synthetic construct
  source 1..75: mol_type = other DNA
ccaggcatcagatgctaattgatcagaatatttttaaacccagagatttgaaggataaaccgggcaaaaatatct

SEQ ID NO: 289883 - DNA, 75 bp, synthetic construct
  source 1..75: mol_type = other DNA
gtcaaagcgggggaacaaggtttgccggtcggtgagttgcaaaagcagcttgggatacccggctctacactcagt

SEQ ID NO: 289884 - DNA, 75 bp, synthetic construct
  source 1..75: mol_type = other DNA
tgcaactggcatttcgcacacgtataaaacttttctatcgcccggatggattgaagggaaatccctctgaagccc

SEQ ID NO: 289885 - DNA, 75 bp, synthetic construct
  source 1..75: mol_type = other DNA
acgacgttgctgatgctgaagctacaggtgcggatgatccaaaagttatagatggtaagcatttcatccctcagc

SEQ ID NO: 289886 - DNA, 75 bp, synthetic construct
  source 1..75: mol_type = other DNA
taaatacgccaaaaaacaccaagagaaaggtaatggctttggctttggcctggttaaaccagacgatgataaagc

SEQ ID NO: 289887 - DNA, 75 bp, synthetic construct
  source 1..75: mol_type = other DNA
cgggccaccggggaatggtgggctcggccatcgtccgacagcttgcacaacgcggcgacgtggatctggtggttc

SEQ ID NO: 289888 - DNA, 75 bp, synthetic construct
  source 1..75: mol_type = other DNA
cggtatgccgcgccggattgagttcaccctgtcgctcaaacgggtggatgaatccctgtccgatatattcggtga

SEQ ID NO: 289889 - DNA, 75 bp, synthetic construct
  source 1..75: mol_type = other DNA
atgatgatggtgctaggattgtacgtgtttatgctgcgcaccgttccgtatcaggaactgcagtatcaacgcagc

SEQ ID NO: 289890 - DNA, 75 bp, synthetic construct
  source 1..75: mol_type = other DNA
atgatgatggtgctgggattttacgtgtttatgctgcgcaccgtgccgtatcaggagctgcagtatcaacgcagc

SEQ ID NO: 289891 - DNA, 75 bp, synthetic construct
  source 1..75: mol_type = other DNA
tttgatgacgtggttaagttgtttgagtttgatacattcgaaagccctgcaagggagacaaccagtgaacaagat

SEQ ID NO: 289892 - DNA, 75 bp, synthetic construct
  source 1..75: mol_type = other DNA
atgacaatcacaaaacaacgagtagaaaaaatcatatatcgccatgaaatgggactgaacagcgatgtcactgcc

SEQ ID NO: 289893 - DNA, 75 bp, synthetic construct
  source 1..75: mol_type = other DNA
ctgtttgatgacgtggttaagttgtttgagcttgatacattcgaaagcccagcaaaggaggcaaccagtgagcga

SEQ ID NO: 289894 - DNA, 75 bp, synthetic construct
  source 1..75: mol_type = other DNA
caggggcgcgacgttatgttctgcatacctttgcacacacccaaagtgcactgatgaggaaacgcgtctccagtt

SEQ ID NO: 289895 - DNA, 75 bp, synthetic construct
  source 1..75: mol_type = other DNA
tgaagattctgatggcgattatgtcctgtttgatgacgtggttaagttgtttgagtttgatacaaccactcagaa

SEQ ID NO: 289896 - DNA, 75 bp, synthetic construct
  source 1..75: mol_type = other DNA
tttgatgacgtggttaagttgtttgagtttgatacaaccactcaaaagttagaaatcccggcaaaggaggctgcc

SEQ ID NO: 289897 - DNA, 75 bp, synthetic construct
  source 1..75: mol_type = other DNA
attccacaccgatcaaggtttactgcttaccggaagagaagatgcagattgaagcaaatgccgccgctgccggtc

SEQ ID NO: 289898 - DNA, 75 bp, synthetic construct
  source 1..75: mol_type = other DNA
tctattgtagatattaaacaggttatagagcttagccgggtaaatgctgatcttggtcgacttggtgggttactt

SEQ ID NO: 289899 - DNA, 75 bp, synthetic construct
  source 1..75: mol_type = other DNA
tccctgtccgatatgttcggtgatctacgtgcgcagctgaataatttgcaggatacggcaacgtctgccttaagc

SEQ ID NO: 289900 - DNA, 75 bp, synthetic construct
  source 1..75: mol_type = other DNA
tgaagatcctgatggcgattatgtcctgtttgatgacgtggttaagttgtttgagtttgatacattcgaaagccc

SEQ ID NO: 289901 - DNA, 75 bp, synthetic construct
  source 1..75: mol_type = other DNA
cggccagtcaacaatccttgctgttctcagcaagatcgaggcgacgcaggaagaaatgggtaacatcatgaccaa

SEQ ID NO: 289902 - DNA, 75 bp, synthetic construct
  source 1..75: mol_type = other DNA
taaccactgaaacggtgaccgaggcgcactatatatcgaataattttactcgcggaatcctgcatcaatactcta

SEQ ID NO: 289903 - DNA, 75 bp, synthetic construct
  source 1..75: mol_type = other DNA
aattcagactggaccagggagaccctgaaccgctggattaacgggaaatgtgggccacgttcacttaccgtaact

SEQ ID NO: 289904 - DNA, 75 bp, synthetic construct
  source 1..75: mol_type = other DNA
tatctttctgtttatcaggatggcagtaatttaagcttgggtaacgacaacaatattgacactgccacagatgtt

SEQ ID NO: 289905 - DNA, 75 bp, synthetic construct
  source 1..75: mol_type = other DNA
attacagacccggcaggcaacaccagtggtcagggtcaggcggctgaatttgcagtggacagggttgcaccgtcg

SEQ ID NO: 289906 - DNA, 75 bp, synthetic construct
  source 1..75: mol_type = other DNA
gctgcaggtaaagcagatgtgaccattccggcggataaggtgacggcagatggtcagtattccgtaactgcggaa

SEQ ID NO: 289907 - DNA, 75 bp, synthetic construct
  source 1..75: mol_type = other DNA
gtggatgtcacctttgaagatgaaaagggtggtaaccacaccgtgacgctggagaacggggataacggctggaca

SEQ ID NO: 289908 - DNA, 75 bp, synthetic construct
  source 1..75: mol_type = other DNA
gtggatgtcacctttgaagatgaaaagggtgctaagcacaccgtgacgctggagaacggggataacggctggaca

SEQ ID NO: 289909 - DNA, 75 bp, synthetic construct
  source 1..75: mol_type = other DNA
taatgccatttcattacgtaatttggacggtgattttacactgaaatattcactatcatcttctgtcgccgaaaa

SEQ ID NO: 289910 - DNA, 75 bp, synthetic construct
  source 1..75: mol_type = other DNA
accggcattaacggccggagataatggttcagtttctgttgaactgccggatgatgcgaataaaggcgatactgt

SEQ ID NO: 289911 - DNA, 75 bp, synthetic construct
  source 1..75: mol_type = other DNA
gctacggcattgtgaactacctcggcgtcgatcttctgcatctctatgagcaggcaccgctgtggttcgataatc

SEQ ID NO: 289912 - DNA, 75 bp, synthetic construct
  source 1..75: mol_type = other DNA
acgaatgataaggtattcaaggcagggttaagacgtaagatgcgaaaagcagccatggacagaaactatctcgcg

SEQ ID NO: 289913 - DNA, 75 bp, synthetic construct
  source 1..75: mol_type = other DNA
acagttatctctttatggaatccggagatgatactgttaccattaaacaaacaggaaatctggctaatgccggtc

SEQ ID NO: 289914 - DNA, 75 bp, synthetic construct
  source 1..75: mol_type = other DNA
tgcctcattgggtaaatcagcaacgacaacatcggtcagagccggagagaatgatgatgtcattaaacttggtga

SEQ ID NO: 289915 - DNA, 75 bp, synthetic construct
  source 1..75: mol_type = other DNA
ctgttgagatctatggttctgtgagcggtacaatatcaggtggatatggtattgataatattaccataactaaaa

SEQ ID NO: 289916 - DNA, 75 bp, synthetic construct
  source 1..75: mol_type = other DNA
gtggatgtcacctttgaagatgaaaagggtggtaagcacaccgtgacgctggagaacggcgataacggctggaca

SEQ ID NO: 289917 - DNA, 75 bp, synthetic construct
  source 1..75: mol_type = other DNA
acgaagttgctgatgccggtgtctcaggttctgatgatcctaaaattattgacgggaaaaatttcttacctcagc

SEQ ID NO: 289918 - DNA, 75 bp, synthetic construct
  source 1..75: mol_type = other DNA
gttcgggaactcagtggtcgttcccgtttttgaagccgtggcaaaactgcttcagccttatattatgaaagtcgc

SEQ ID NO: 289919 - DNA, 75 bp, synthetic construct
  source 1..75: mol_type = other DNA
gttcggtaactccgtcgtggttcctgtctttgaagccgtagccagactgctggagccctacatcctcaaggctgt

SEQ ID NO: 289920 - DNA, 75 bp, synthetic construct
  source 1..75: mol_type = other DNA
cgcagtggatacagtggcgccgtcggcaccggtattaaaagcagaggatgatggttctgtttctgttgagctgcc

SEQ ID NO: 289921 - DNA, 75 bp, synthetic construct
  source 1..75: mol_type = other DNA
gaaaccgtggcttatcacttccacgaaccgttaggcgtggtggggcagattatcccgtggaacttcccgctgttg

SEQ ID NO: 289922 - DNA, 75 bp, synthetic construct
  source 1..75: mol_type = other DNA
cgaaaccagtgctgctgatgtgccgctggcgattgatcattttcgctattttgcctcgtgtattcgggcgcagga

SEQ ID NO: 289923 - DNA, 75 bp, synthetic construct
  source 1..75: mol_type = other DNA
atgaagttgcggatgcagctgagatgggcaaaaacgatcctaaagttatcgacggaaagcactttttacctcagc

SEQ ID NO: 289924 - DNA, 75 bp, synthetic construct
  source 1..75: mol_type = other DNA
cgctggcatcgatcatgccgcgtaatgaacaggaagcagatgctgtagtggacccggtaatcgctgaaatgaatg

SEQ ID NO: 289925 - DNA, 75 bp, synthetic construct
  source 1..75: mol_type = other DNA
aaaccagctatttttgtgcttgagaatgtgaagaaccttaaaagtcatgataaaggtaagacttttaaagtcatc

SEQ ID NO: 289926 - DNA, 75 bp, synthetic construct
  source 1..75: mol_type = other DNA
gatcatgatgtccttctggctggtttcccctgtcagccgttcagcctcgcgggtgtaagcaagaaaaattcactc

SEQ ID NO: 289927 - DNA, 75 bp, synthetic construct
  source 1..75: mol_type = other DNA
tcctttaaagcaacggcggatcaccacaaagaacaccggtacgaagaagattgccagcaacgttgcagagaccat

SEQ ID NO: 289928 - DNA, 75 bp, synthetic construct
  source 1..75: mol_type = other DNA
tcactgaaaataataaaggcacccgaaagtgcctttatgtttctgatttatcctttaaagcaacggcggatcacc

SEQ ID NO: 289929 - DNA, 75 bp, synthetic construct
  source 1..75: mol_type = other DNA
attttcatcgtgcaaatgctgccattgcggcaggacaattagcggtagagaagaaaatggatgaacttttaccgc

SEQ ID NO: 289930 - DNA, 75 bp, synthetic construct
  source 1..75: mol_type = other DNA
gagatcgtgctgcaaatagtgcacttcacatcattgccatcggacgtttgcgaactgacgataaaacgaaggaat

SEQ ID NO: 289931 - DNA, 75 bp, synthetic construct
  source 1..75: mol_type = other DNA
ttgttcaagaaatggttgaaggggcgcttgtcggtatttgtgttcacgacagtatttctgtgcgccattccggga

SEQ ID NO: 289932 - DNA, 75 bp, synthetic construct
  source 1..75: mol_type = other DNA
gcgtggtggattgttgcgcggtgagcgtgtgttcaaccagtaccgcgaaataatgccggaaacagagatcgaaaa

SEQ ID NO: 289933 - DNA, 75 bp, synthetic construct
  source 1..75: mol_type = other DNA
ttaacccaattcctatttccctcacgcgtgcattgggggctgatattgtgatagcggtcgacctgcagcacgatg

SEQ ID NO: 289934 - DNA, 75 bp, synthetic construct
  source 1..75: mol_type = other DNA
caacaagatttgctctcctttaatgtcagtgaagaaaatagcgagaatggtgattctctgccgtggcatgcgcgt

SEQ ID NO: 289935 - DNA, 75 bp, synthetic construct
  source 1..75: mol_type = other DNA
ccgccctgtgtcagataaacagcccgattgatttaatcacgctcagtgatgtactggaaaaagatggcgtgcttg

SEQ ID NO: 289936 - DNA, 75 bp, synthetic construct
  source 1..75: mol_type = other DNA
agtgcagccaacatcgtccgctatgcagaaattgtggtggagcgcagccgtgcccgtggactgatgatgctcggg

SEQ ID NO: 289937 - DNA, 75 bp, synthetic construct
  source 1..75: mol_type = other DNA
accttctgcggccaacatcatggcctatgcgggcattgtggtggagaaaagcgttctgcgtcagttacaggccac

SEQ ID NO: 289938 - DNA, 75 bp, synthetic construct
  source 1..75: mol_type = other DNA
cagcgttgccacggtcccgctcacctacgcgtccgcaacagacgtagccagacttgttacggaactgactaaaga

SEQ ID NO: 289939 - DNA, 75 bp, synthetic construct
  source 1..75: mol_type = other DNA
gataaactaagtgctaactacgatatagtgtggaaatatcgagatggcaagttaaagttttcatcagaagatgta

SEQ ID NO: 289940 - DNA, 75 bp, synthetic construct
  source 1..75: mol_type = other DNA
ctctgcaacacctgcgcaatggcgatatgcaggatgaagattgggcgcgggtcagtgcagcaatgaaagttctgc

SEQ ID NO: 289941 - DNA, 75 bp, synthetic construct
  source 1..75: mol_type = other DNA
gcagaatcagaaaggcaattattgcttaatcaggccaacgaatacatgaacagtaaacaatggcccggtaaagcc

SEQ ID NO: 289942 - DNA, 75 bp, synthetic construct
  source 1..75: mol_type = other DNA
cgccgatgtttattgcctgtggtctgctcgcaggctgcggtctgacgcagaccgtcacggatggcacgatcagca

SEQ ID NO: 289943 - DNA, 75 bp, synthetic construct
  source 1..75: mol_type = other DNA
acgtttttttgtgccagaaatcagtgtcacacaaggcttttcgctatttttcgctcaacctacatcaacttactg

SEQ ID NO: 289944 - DNA, 75 bp, synthetic construct
  source 1..75: mol_type = other DNA
gcaatattaaccactctatgtcattaacggttgccgaaggccgtcaatatgaaataaaaaaagggaatgataaac

SEQ ID NO: 289945 - DNA, 75 bp, synthetic construct
  source 1..75: mol_type = other DNA
cagcgaggaaaaaacgctgcccttttcgccactggattttcagttatccggcgcgcaactggtttactggcatcc

SEQ ID NO: 289946 - DNA, 75 bp, synthetic construct
  source 1..75: mol_type = other DNA
cctgacggcagcggcctcggccggggatgcgatgtcgcagagtcagtataccgcgcagaacaacgggtacggtat

SEQ ID NO: 289947 - DNA, 75 bp, synthetic construct
  source 1..75: mol_type = other DNA
aagtccaatgctgccacatacctgcccaccattttcggcctgtctgccgcgggggcggccggtgaggccctgagt

SEQ ID NO: 289948 - DNA, 75 bp, synthetic construct
  source 1..75: mol_type = other DNA
taattatgatagcagcatgaagcatacatgtattatcatattacagccagagattgccaagttagaaactagtaa

SEQ ID NO: 289949 - DNA, 75 bp, synthetic construct
  source 1..75: mol_type = other DNA
ataaatataaaaggtacccaaattgccattgaggggcaaggctctgcagagcttaaaggcgctacacttaagctt

SEQ ID NO: 289950 - DNA, 75 bp, synthetic construct
  source 1..75: mol_type = other DNA
ctatcagggtcagctgatgatctccgtgtggaaccgtggtcaggacagtttcaccattcaacctggcgaacgtat

SEQ ID NO: 289951 - DNA, 75 bp, synthetic construct
  source 1..75: mol_type = other DNA
ataatgagagtaatgtcagtgaaattactataaagtcagaaagtaagatgactgatgttaaatccagtaagggaa

SEQ ID NO: 289952 - DNA, 75 bp, synthetic construct
  source 1..75: mol_type = other DNA
acgattattataaataccaggacaaacattttattcggttgcatggttgtaatgtgttcttatttccacttgaaa

SEQ ID NO: 289953 - DNA, 75 bp, synthetic construct
  source 1..75: mol_type = other DNA
tatttactactttttcgttcataataaaaataaacatattatgaagttagcagatgcccctgcatctcatcctga

SEQ ID NO: 289954 - DNA, 75 bp, synthetic construct
  source 1..75: mol_type = other DNA
ccaggtaggttccattagcgatgcatcacaaggcgtattccagatcttcgccagtggcagtgacgaagatgatcc

SEQ ID NO: 289955 - DNA, 75 bp, synthetic construct
  source 1..75: mol_type = other DNA
ggttgctcagtggcgatggttgtatgtgacgacattcatcaacgaagaagaagacaagaacggcacaattgatat

SEQ ID NO: 289956 - DNA, 75 bp, synthetic construct
  source 1..75: mol_type = other DNA
cagtggcgctggttgtacgtgacgacattcatcaacgaagaagaaaacaagaatggcactattgatatcccaaac

SEQ ID NO: 289957 - DNA, 75 bp, synthetic construct
  source 1..75: mol_type = other DNA
gctgcaaccgtacgtgaaggccgttctcaggatctggcttcccaagcggaagaaagcttcgtagaagctgagtaa

SEQ ID NO: 289958 - DNA, 75 bp, synthetic construct
  source 1..75: mol_type = other DNA
aagagcgctgtttctttatcagaaaatgctcaccacttcccctgataaaggtttcattctttcagatataggtcg

SEQ ID NO: 289959 - DNA, 75 bp, synthetic construct
  source 1..75: mol_type = other DNA
cgagaagggcttgaactccttctggatgaaatgattaacgacctgaatactcatggtatgccagaaggccagtga

SEQ ID NO: 289960 - DNA, 75 bp, synthetic construct
  source 1..75: mol_type = other DNA
ttacatacccagataaaggtttcattgtttcagacatggggcgagaagggcttgaactccttctggatgaaatga

SEQ ID NO: 289961 - DNA, 75 bp, synthetic construct
  source 1..75: mol_type = other DNA
tactggcgctgaatttatcaaatatcgcaaacctgaagcgatacgagcttgatatgggaggttgcgactcgtgcg

SEQ ID NO: 289962 - DNA, 75 bp, synthetic construct
  source 1..75: mol_type = other DNA
cgtaagctctttgccggaacacctgctgctaaaaactatcattatgatgccggacagttttctttcaatgtggca

SEQ ID NO: 289963 - DNA, 75 bp, synthetic construct
  source 1..75: mol_type = other DNA
gggttccggaaagtctagtctgattgctcaggccttacctgagctggtgctttcctcgcttggccatgaaccaga

SEQ ID NO: 289964 - DNA, 75 bp, synthetic construct
  source 1..75: mol_type = other DNA
aaacacaatacatatcaacttcgctatttttttaataattgcaaatattatctacagcagcgccagtgcatcaac

SEQ ID NO: 289965 - DNA, 75 bp, synthetic construct
  source 1..75: mol_type = other DNA
gctttggcgatgcgtcaggttatgttttaacagccgcaattaacggcaatgcggatgatcttgtcgacactgttg

SEQ ID NO: 289966 - DNA, 75 bp, synthetic construct
  source 1..75: mol_type = other DNA
tttgatgacgtggttaagttgtttgaatttgatacaaccactcaaaagttagaaagcccagcaaaggagtcatcc

SEQ ID NO: 289967 - DNA, 75 bp, synthetic construct
  source 1..75: mol_type = other DNA
aagttacgccacatggcataaaaattggcaatacaaccattgattatgttgaggccgtacagcgacttaatgatg

SEQ ID NO: 289968 - DNA, 75 bp, synthetic construct
  source 1..75: mol_type = other DNA
cagggaccaaccggaacgatacgggtgaacttcgacggccgctacaccctgttttcaccgtttgaacgtggatgg

SEQ ID NO: 289969 - DNA, 75 bp, synthetic construct
  source 1..75: mol_type = other DNA
ggtgctgccgtgtggggcaaagccggacttaacatagagtgcggcgattgcgagctggctttcatcgaaaattaa

SEQ ID NO: 289970 - DNA, 75 bp, synthetic construct
  source 1..75: mol_type = other DNA
atccgggattgatattgaagcggtgctgtcaatggcgctgctgccgtcagtgtcaccgcagaacgggagcggcga

SEQ ID NO: 289971 - DNA, 75 bp, synthetic construct
  source 1..75: mol_type = other DNA
caatagcaagcagaaacagagttcagtttataccgggccagcgtcgggggcgcattcatggttctagtatctaca

SEQ ID NO: 289972 - DNA, 75 bp, synthetic construct
  source 1..75: mol_type = other DNA
ggagaaaacaatgaagacaacgaagatcatgagacaccctcatcgttagataatcacaaatctatcaaatcagaa

SEQ ID NO: 289973 - DNA, 75 bp, synthetic construct
  source 1..75: mol_type = other DNA
aggggacatttgccggtgaaggtaaccgcctgatcattgatgacacgtcatctcagactccgtcatcactgcgcg

SEQ ID NO: 289974 - DNA, 75 bp, synthetic construct
  source 1..75: mol_type = other DNA
gaccagcagttcattaacagggactcctttttgcttaagcggctcaatggttctttctatataaaccgtattcca

SEQ ID NO: 289975 - DNA, 75 bp, synthetic construct
  source 1..75: mol_type = other DNA
tgattctgatggttatggctctggcatcgatggtgatggcggtgaggactccgatactgatcgtggggaaactga

SEQ ID NO: 289976 - DNA, 75 bp, synthetic construct
  source 1..75: mol_type = other DNA
gtagcgaaatttatcagtgaagaggaagacaagaacggcaccattaatatccctaacgataacgggacgacagat

SEQ ID NO: 289977 - DNA, 75 bp, synthetic construct
  source 1..75: mol_type = other DNA
gccctcctccaccgggagacctggtggcgcgaaagtcggccagaagattaatgactatccgatccctggtggccg

SEQ ID NO: 289978 - DNA, 75 bp, synthetic construct
  source 1..75: mol_type = other DNA
atgctttcaggtaaacagatacctgttgcagaacgaggcaatgaagcatatgtccgctataaccggcgcggcgaa

SEQ ID NO: 289979 - DNA, 75 bp, synthetic construct
  source 1..75: mol_type = other DNA
agcggtgaacgcgtgtgtccagcaggtcatcgacttgtccggctcaatggatggcgtgaagattcaactggccct

SEQ ID NO: 289980 - DNA, 75 bp, synthetic construct
  source 1..75: mol_type = other DNA
gatgctctgtttagccccagtattttttaccctgctgctggagaacgactggtccggatatttgctggcgatcgt

SEQ ID NO: 289981 - DNA, 75 bp, synthetic construct
  source 1..75: mol_type = other DNA
ttaagcgttatgccattatttattcactgttgtttttggcttttattttaatgctgatagtgtttgttagctatg

SEQ ID NO: 289982 - DNA, 75 bp, synthetic construct
  source 1..75: mol_type = other DNA
cagttcaggggttaattacccctattacgcaggcatgctatccaaggattaattatctttacagaacttctccag

SEQ ID NO: 289983 - DNA, 75 bp, synthetic construct
  source 1..75: mol_type = other DNA
agaaacggaccgtggaagagtaccagtggcaacattacgatgaacaatgcaatctcctggagcaactgttaaggc

SEQ ID NO: 289984 - DNA, 75 bp, synthetic construct
  source 1..75: mol_type = other DNA
aataccttacagagacaaaaatacacctgaaacggcatctgaaataatagaaccgaaccaacgcatatatgacta

SEQ ID NO: 289985 - DNA, 75 bp, synthetic construct
  source 1..75: mol_type = other DNA
gttatcaaggtcatgcagtttttaataaccttgtgcggatggactggctcaaagcaatcaagctagaccctgact

SEQ ID NO: 289986 - DNA, 75 bp, synthetic construct
  source 1..75: mol_type = other DNA
aaagacatgatttaaccaaccaggtaattaacctgcgccactgtacgttgctccatgacagacaggcctggagca

SEQ ID NO: 289987 - DNA, 75 bp, synthetic construct
  source 1..75: mol_type = other DNA
tagttgggcgcaacattatgcggttaatttgccaacatcttctggaattggctttgatcgctctgatttagccgt

SEQ ID NO: 289988 - DNA, 75 bp, synthetic construct
  source 1..75: mol_type = other DNA
gtggccaaaaattgaggcatttattacctggctaagagagcaggtatgtcagtcttgtcagtagctgtgataccg

SEQ ID NO: 289989 - DNA, 75 bp, synthetic construct
  source 1..75: mol_type = other DNA
gaattatcgttccattttcccaagcctgttatccaaggattgtttccttggtgcaaaaaaatagaaaggatggac

SEQ ID NO: 289990 - DNA, 75 bp, synthetic construct
  source 1..75: mol_type = other DNA
atttatgtctactgctgcgataaatttatataccacaagcgttacagtaattcttggaatcataagcggtcccat

SEQ ID NO: 289991 - DNA, 75 bp, synthetic construct
  source 1..75: mol_type = other DNA
ggattagtaactggcgtagcaccaggcaaagtaaaaattactgcaactgatcaggaaacccagctttccgcgtca

SEQ ID NO: 289992 - DNA, 75 bp, synthetic construct
  source 1..75: mol_type = other DNA
accaagcatactcatgttcgattaattgattttgtgttgtggtcaactaaaactggccaccgcgttagagttttt

SEQ ID NO: 289993 - DNA, 75 bp, synthetic construct
  source 1..75: mol_type = other DNA
gagatagaccccaataataacccgagctatggcgtgctatgcggaatgtcagtgatgggattcagtttagtgctg

SEQ ID NO: 289994 - DNA, 75 bp, synthetic construct
  source 1..75: mol_type = other DNA
gcgctggagcgggccagaacggcctctctgcaggcttcttcacagggggaacgctacttttttgattatttgcgt

SEQ ID NO: 289995 - DNA, 75 bp, synthetic construct
  source 1..75: mol_type = other DNA
gttagtggatgttcctgcggtgaaactgccgaaagaaaaagtgatcgacaccaccgctgcgggtgactctttcag

SEQ ID NO: 289996 - DNA, 75 bp, synthetic construct
  source 1..75: mol_type = other DNA
gtcttcaggcaagaaacatctctttcaggcttcttcaaggcgaattaaagtattttaatatgaagtcagctaggg

SEQ ID NO: 289997 - DNA, 75 bp, synthetic construct
  source 1..75: mol_type = other DNA
gacggctgccggacgtggtgctgtatcaccggaaaatatcgcgttcacccgctggctgacacacctgcagaacgg

SEQ ID NO: 289998 - DNA, 75 bp, synthetic construct
  source 1..75: mol_type = other DNA
atgtcagtacctctcattctgaccatactggcgggggcagccacgtttattggcgcgtttctcggcgttcttgga

SEQ ID NO: 289999 - DNA, 75 bp, synthetic construct
  source 1..75: mol_type = other DNA
gcacggcgagaacgttgatacttccctgacccaacggatggaaaaccgtctgccgggcctttactacattgaaac

SEQ ID NO: 290000 - DNA, 75 bp, synthetic construct
  source 1..75: mol_type = other DNA
tatcagggcagcagcggaacgccagtccagtctgtgacatacaggaacagcggggcgatttttacagtaacgcca

SEQ ID NO: 290001 - DNA, 75 bp, synthetic construct
  source 1..75: mol_type = other DNA
acgataatccgccagtgattgttgaagtgtctggtattggtcagtacaccgtggtggttgagaaagatcgcctgg

SEQ ID NO: 290002 - DNA, 75 bp, synthetic construct
  source 1..75: mol_type = other DNA
gcggcattagcctggcgatcttaagccccaccagtcgcgaaaaactgctttctctgctgcgcgaatgccgcgcca

SEQ ID NO: 290003 - DNA, 75 bp, synthetic construct
  source 1..75: mol_type = other DNA
cggtggaagacgtcattgcgcgcacccataacgcaggcgtgaaagaagtggtggtgaaacgcggggcggattctt

SEQ ID NO: 290004 - DNA, 75 bp, synthetic construct
  source 1..75: mol_type = other DNA
cgaaacgcgggcacctgaccgcaagtaccgttattcagtatcgcggcgcgattatcccgcgtgaggcgatgccag

SEQ ID NO: 290005 - DNA, 75 bp, synthetic construct
  source 1..75: mol_type = other DNA
gtggccaaaaattgaggcatttattacctggctaagagagcaggtatgtcagtcttgtcagtaccggcgataccg

SEQ ID NO: 290006 - DNA, 75 bp, synthetic construct
  source 1..75: mol_type = other DNA
atgctacattaccagtctgatgttatgatgaacggcgcaattctgctggcgctggggttgtcctggtatggctgg

SEQ ID NO: 290007 - DNA, 75 bp, synthetic construct
  source 1..75: mol_type = other DNA
atgctccattatcagtctgatgttatgatgaacggcgcgattttgctggcacttgcattatcctggtacggctgg

SEQ ID NO: 290008 - DNA, 75 bp, synthetic construct
  source 1..75: mol_type = other DNA
gccacctttgtcacggcgagcagcaacctggagctgggatttggtatcgccctggccgtcgcgttgcacaatatc

SEQ ID NO: 290009 - DNA, 75 bp, synthetic construct
  source 1..75: mol_type = other DNA
cggcaccggtattggtctggccgtttctcgtcgtctggcgaaaaatatgggcggcgatattacggttaccagcga

SEQ ID NO: 290010 - DNA, 75 bp, synthetic construct
  source 1..75: mol_type = other DNA
cctgaaggtctggccgttgcagggccggtttacgctgcaacaggatcgaaacgtaccgcgattctgtgggcgggc

SEQ ID NO: 290011 - DNA, 75 bp, synthetic construct
  source 1..75: mol_type = other DNA
ggacgaattaatgccgttagccaaagagattgatcccaataataatcccagctatggcgtgctgtgtgggatgtc

SEQ ID NO: 290012 - DNA, 75 bp, synthetic construct
  source 1..75: mol_type = other DNA
gcagctggaaggctatgtgaaaaacagcgttaacttgcctgcgcgagccgtggtgattacctttgatgatggcct

SEQ ID NO: 290013 - DNA, 75 bp, synthetic construct
  source 1..75: mol_type = other DNA
atgtacaaacaagctgttattctcctgctgatgctgtttaccgcaagcgtcagtgccgcattaccccattatatg

SEQ ID NO: 290014 - DNA, 75 bp, synthetic construct
  source 1..75: mol_type = other DNA
tggtgattacctttgatgatggcctcaagtcggtgagccgctatgcgtatcctgtattgaaacaatatggcatga

SEQ ID NO: 290015 - DNA, 75 bp, synthetic construct
  source 1..75: mol_type = other DNA
ctattctgctcactcttggaatcagcctgcataacttcccggaagggattgccacctttgttacagcaagcagta

SEQ ID NO: 290016 - DNA, 75 bp, synthetic construct
  source 1..75: mol_type = other DNA
ggataccgaaaccgatgcgaagggcattattcccgaagatttcgttcctcaggagagacgtaaagtcttttatcc

SEQ ID NO: 290017 - DNA, 75 bp, synthetic construct
  source 1..75: mol_type = other DNA
tttcaggccattttcaccgaacccgacggtgaggcacgctctatgctcttgcttaatcttatcaataaagagatt

SEQ ID NO: 290018 - DNA, 75 bp, synthetic construct
  source 1..75: mol_type = other DNA
ccgccgctggtggccttaaccgctaacgtgctgaaagacaaacaagagtacctcaatgctggaatggatgatgtg

SEQ ID NO: 290019 - DNA, 75 bp, synthetic construct
  source 1..75: mol_type = other DNA
atgacaaatctaaaaaagcgcgagcgagcgaaaaccaatgcatcgttaatctctatgatgcaacgcttttcagat

SEQ ID NO: 290020 - DNA, 75 bp, synthetic construct
  source 1..75: mol_type = other DNA
agaacgacaaagtggtgacccaggcgacgcagaacgatccgcgcgtcaccaaagtggggaactttctgcgccgca

SEQ ID NO: 290021 - DNA, 75 bp, synthetic construct
  source 1..75: mol_type = other DNA
aaaacgccggtcagtattcgtgaactgtggaacccgaacacctgtccggcaaatctgctgccgtggctggcgtgg

SEQ ID NO: 290022 - DNA, 75 bp, synthetic construct
  source 1..75: mol_type = other DNA
gtggccaaaaattgaggcatttattacctggctaagagagcaggtatgtcagtcttgtcagtatctgggataccg

SEQ ID NO: 290023 - DNA, 75 bp, synthetic construct
  source 1..75: mol_type = other DNA
gtggccaaaaattgaggcatttattacctggctaagagagcaggtatgtcagtcttgtcagtaaccgagataccg

SEQ ID NO: 290024 - DNA, 75 bp, synthetic construct
  source 1..75: mol_type = other DNA
gctgaccagtatcggactggtggtttgccgttcgtgtattcgcattggtgcgggctggctgcgtaatcatggcta

SEQ ID NO: 290025 - DNA, 75 bp, synthetic construct
  source 1..75: mol_type = other DNA
cgtcaaattcacccagcaaggccaggttaccgtgcgcgtgcgctacgatgaaggcgatatgctgcattttgaagt

SEQ ID NO: 290026 - DNA, 75 bp, synthetic construct
  source 1..75: mol_type = other DNA
ccttccttgacgcctctccagatctggttttttaccgtaacgaagataaagagttttccggctgtaaccgtgcaa

SEQ ID NO: 290027 - DNA, 75 bp, synthetic construct
  source 1..75: mol_type = other DNA
gagttttccggctgtaaccgtgcgatggaattgctgaccgggaaaagcgaaaaacagttggtgcatctaaagcct

SEQ ID NO: 290028 - DNA, 75 bp, synthetic construct
  source 1..75: mol_type = other DNA
tttcggctatttgctgagggtgattgagtggtggcagaacggcgaggagccaggcactttccggcttgaaatcgg

SEQ ID NO: 290029 - DNA, 75 bp, synthetic construct
  source 1..75: mol_type = other DNA
aaccggcaaggatatcgccgggctgaaaactgagcttgagcagaaaaaattaagtttgattaccaggaatatccg

SEQ ID NO: 290030 - DNA, 75 bp, synthetic construct
  source 1..75: mol_type = other DNA
agtactatgttgacctgatgatgaagttaggtctggtgcgcttctcaatgctactggcgctggcgctggtggtgc

SEQ ID NO: 290031 - DNA, 75 bp, synthetic construct
  source 1..75: mol_type = other DNA
gcgcgatatcgcagatgctatcacccctgcacttttgcacgaagtgattgctattttgcatcacgatttgcgtac

SEQ ID NO: 290032 - DNA, 75 bp, synthetic construct
  source 1..75: mol_type = other DNA
gataccctgtttcagccgaaatatctcgataacgccgacgccgtgctggcgatgtaccacgatcagggtcttccc

SEQ ID NO: 290033 - DNA, 75 bp, synthetic construct
  source 1..75: mol_type = other DNA
tcgcatgtgatccctgcattgctgcgtcgcttccacgaggcgacggcacagaatgcgccggacgttgtggtatgg

SEQ ID NO: 290034 - DNA, 75 bp, synthetic construct
  source 1..75: mol_type = other DNA
tgtatttttctggtgaaccggcacagatcgctgagattaaacgactggccagcggcgcagtcacaccgctttatc

SEQ ID NO: 290035 - DNA, 75 bp, synthetic construct
  source 1..75: mol_type = other DNA
cacatcagtggaccacggcaccgcgcttgaactggcgggcgggggggggaggggaaaaagccgatgtcggcagtt

SEQ ID NO: 290036 - DNA, 75 bp, synthetic construct
  source 1..75: mol_type = other DNA
gtctgaacggtgaatttgctgcgctgatcacaggccccgtgcataaaggcgtcattaacgacgcaggcattccgt

SEQ ID NO: 290037 - DNA, 75 bp, synthetic construct
  source 1..75: mol_type = other DNA
cttctgcagaccactgaagatgtgcggtttgaaccatgccccggactgacggctgccggacgtggcgttgtatcg

SEQ ID NO: 290038 - DNA, 75 bp, synthetic construct
  source 1..75: mol_type = other DNA
atgccaaactggtgctcgaatcgtatggatttttctggtgaaccggcacagatcgctgagattaaacgactggcc

SEQ ID NO: 290039 - DNA, 75 bp, synthetic construct
  source 1..75: mol_type = other DNA
ccgtcgtttcagctgcacgctggagcactggtatgccgaacagggctgtgatttctgtggctggcagttgtatga

SEQ ID NO: 290040 - DNA, 75 bp, synthetic construct
  source 1..75: mol_type = other DNA
aaccgccagtacggacgcgattaccgctcagtcatgccgaccaacctgtacgggccgcatgacaacttccacccg

SEQ ID NO: 290041 - DNA, 75 bp, synthetic construct
  source 1..75: mol_type = other DNA
ggcacagaatgcgccggacgtggtggtatggggcagcggtacaccgatgcgtgaattcctgcacgtcgatgatat

SEQ ID NO: 290042 - DNA, 75 bp, synthetic construct
  source 1..75: mol_type = other DNA
cgcggtgatgtggaactggtattacgcacccgcgacgagctgaacctgctggacagccgcgcggtgcatgatttc

SEQ ID NO: 290043 - DNA, 75 bp, synthetic construct
  source 1..75: mol_type = other DNA
aaaggattggcactggtcgccggataaaccaaaccaacctaaaccgccaaaaccaccaataactccgaagccagt

SEQ ID NO: 290044 - DNA, 75 bp, synthetic construct
  source 1..75: mol_type = other DNA
gcagaacaaaagaaagagctcgaaatgacggtcagatattatatcagttctgctgatttaaccgcagagaagttc

SEQ ID NO: 290045 - DNA, 75 bp, synthetic construct
  source 1..75: mol_type = other DNA
attatatcagttctgctgatttaaccgctgagaaattcgccacagcgatccgaaatcactggcacgtggagaata

SEQ ID NO: 290046 - DNA, 75 bp, synthetic construct
  source 1..75: mol_type = other DNA
ttcaaggcagggttaagacgtaagatgcgaaaagcagtcatggacagaaactatctggcgtcagtccttgcgggg

SEQ ID NO: 290047 - DNA, 75 bp, synthetic construct
  source 1..75: mol_type = other DNA
tggtcgttggtgataaagatgtcgtaaccggcaaggatatcgccgggctgaaaactgagcttgagcagaaaaaaa

SEQ ID NO: 290048 - DNA, 75 bp, synthetic construct
  source 1..75: mol_type = other DNA
cagttatctggatacgcgttctgttgcgcatggtgatttgatcgccataacttaccactccaacgcattgcaatc

SEQ ID NO: 290049 - DNA, 75 bp, synthetic construct
  source 1..75: mol_type = other DNA
tgattaccaggaatatcccggcctgaaccatgaaatggatgtctggcggcctgcctatgcagccttcgtacagaa

SEQ ID NO: 290050 - DNA, 75 bp, synthetic construct
  source 1..75: mol_type = other DNA
ctgaacggtgttccttctgcatatcactggtatacggaacggtatggcgtgaagtggcctgtggggtatgaggtg

SEQ ID NO: 290051 - DNA, 75 bp, synthetic construct
  source 1..75: mol_type = other DNA
atgtatcggtgtggtggaaccgtctgtgtgacaacgtactgccggaaaataccatgccgtttgacctgctgacgg

SEQ ID NO: 290052 - DNA, 75 bp, synthetic construct
  source 1..75: mol_type = other DNA
ctggctccggtggggtaactcccctcataggctcgctgggaaaattatccagcacattacgcgggctgatcccct

SEQ ID NO: 290053 - DNA, 75 bp, synthetic construct
  source 1..75: mol_type = other DNA
taccagagttgtatcctgtatcagtcctgcgaaatttcacgagtgctttattaactggatgcgtgacagtcattc

SEQ ID NO: 290054 - DNA, 75 bp, synthetic construct
  source 1..75: mol_type = other DNA
tttcagggatacggcacatcgctattaatattttgacgaatgataaggtattcaaggcagggttaagacgtaaga

SEQ ID NO: 290055 - DNA, 75 bp, synthetic construct
  source 1..75: mol_type = other DNA
ggctgacacacctgcagaacggtgtgctactggatgaacaaaactgcctgatgctgcatgaactctggctgcaga

SEQ ID NO: 290056 - DNA, 75 bp, synthetic construct
  source 1..75: mol_type = other DNA
acggtggtgttctgaatggtgttccttctgcgtatcactggtatacggaacagtatggcgtgaagtggcctgtgg

SEQ ID NO: 290057 - DNA, 75 bp, synthetic construct
  source 1..75: mol_type = other DNA
tgccggaaaaaaccatgccgtttgacctgcggatggttctgcccacccgcctggatgttgaagtgaacggcttca

SEQ ID NO: 290058 - DNA, 75 bp, synthetic construct
  source 1..75: mol_type = other DNA
cgacagatgatgatgagctgccggaagtcaccggacctgcgtggatagttgacaaggtggcgcattacggtggat

SEQ ID NO: 290059 - DNA, 75 bp, synthetic construct
  source 1..75: mol_type = other DNA
gcttggctggtatcacgaaatctcactggaagcggggcttgccagcacttacctgtggttccttgagaatcaaga

SEQ ID NO: 290060 - DNA, 75 bp, synthetic construct
  source 1..75: mol_type = other DNA
ggcttttagctcatcagctattgcagacatcgtaatttcaggtactcgcgtagtttataaaagcgaacaaaaaag

SEQ ID NO: 290061 - DNA, 75 bp, synthetic construct
  source 1..75: mol_type = other DNA
ctggtgtggcttctggagtaacgaggatgtatcggtgtggtggaaccgtctgtgtgacaacgtactgccggaaaa

SEQ ID NO: 290062 - DNA, 75 bp, synthetic construct
  source 1..75: mol_type = other DNA
tggaatcgtcagtgtgacaacgtgctgccggaaaaaaccatgccgtttgatttgctggccgttttccctacacgt

SEQ ID NO: 290063 - DNA, 75 bp, synthetic construct
  source 1..75: mol_type = other DNA
aaagcgacgttattgcagaattaagccgccgtttcagctgcacgctggagcactggtatgccgaacagggctgcg

SEQ ID NO: 290064 - DNA, 75 bp, synthetic construct
  source 1..75: mol_type = other DNA
ccgacagatgacgatgagctgccggaagtcaccggacctgcgtggatagtcgacaatgtggcgcattatggcgga

SEQ ID NO: 290065 - DNA, 75 bp, synthetic construct
  source 1..75: mol_type = other DNA
gccgcgtacagtgttccccgcgccagcggggataaaccgtccgtttggtccaccaaatgtttgatgcttcagtgt

SEQ ID NO: 290066 - DNA, 75 bp, synthetic construct
  source 1..75: mol_type = other DNA
agccttatgctattgccaaaatcgccgggatcaaactgtgcgaatcttacaaccgccagtatggacgcgattacc

SEQ ID NO: 290067 - DNA, 75 bp, synthetic construct
  source 1..75: mol_type = other DNA
gtacaccgatgcgtgaatttctgcacgtcgatgatatggcggcggcgagcattcatgtgatggagctggcgcacg

SEQ ID NO: 290068 - DNA, 75 bp, synthetic construct
  source 1..75: mol_type = other DNA
cagctcgcagcgctcggaacgtggcgctataggtgttccccgcgccagcggggatagaccggtttctcatatttc

SEQ ID NO: 290069 - DNA, 75 bp, synthetic construct
  source 1..75: mol_type = other DNA
cgtcgctggataccctgaaccaggaaattcttgatatcaaaaatcaggagttatcgggaacgttaactctgtatt

SEQ ID NO: 290070 - DNA, 75 bp, synthetic construct
  source 1..75: mol_type = other DNA
tggtcttccccgacagatgacgatgagctgccggaagtcaccggacctgcgtggatagtcgacaatgtggcgcat

SEQ ID NO: 290071 - DNA, 75 bp, synthetic construct
  source 1..75: mol_type = other DNA
gtacgccgaacagggctgcaatttctgtggctggcagcgatatgagcgtggagagcttgttgatgtgctgtgggg

SEQ ID NO: 290072 - DNA, 75 bp, synthetic construct
  source 1..75: mol_type = other DNA
cgggatcaaactgtgcgaatcttacaatcgccagtacggacgcgattaccgctcggtcatgccgaccaacctgta

SEQ ID NO: 290073 - DNA, 75 bp, synthetic construct
  source 1..75: mol_type = other DNA
agtttgaaccgtgccccggactgacggctgccggacgtggtgttgtatcgccggagaatatcgcgttcacacgct

SEQ ID NO: 290074 - DNA, 75 bp, synthetic construct
  source 1..75: mol_type = other DNA
atgccaaactggtgcagtaaccgtatgcatttttctggtgaactggcacagatcgctgagattaaacgactggcc

SEQ ID NO: 290075 - DNA, 75 bp, synthetic construct
  source 1..75: mol_type = other DNA
agggggaaaacttcattcaggtggatttcgacacgccgtggtgtcagccggaaagcgacgttgttgcagaattaa

SEQ ID NO: 290076 - DNA, 75 bp, synthetic construct
  source 1..75: mol_type = other DNA
acacctgcagaacggtgtactgctggatgagcaaaactgcctgatgctgcatgaactctggctgcagagcggtac

SEQ ID NO: 290077 - DNA, 75 bp, synthetic construct
  source 1..75: mol_type = other DNA
atgtgctgtggggggaactggaatggtcttccccgacagatgacgatgagctgccggaagtcaccggacctgcgt

SEQ ID NO: 290078 - DNA, 75 bp, synthetic construct
  source 1..75: mol_type = other DNA
ccagtatgtagcccggaatacgctcaaagacatgctttaaccaacacggtaattaacctgtgtcactgtacgttg

SEQ ID NO: 290079 - DNA, 75 bp, synthetic construct
  source 1..75: mol_type = other DNA
gagctggcgcatgaagtctggctggagaacacccagccgatgctgtcgcacattaacgtcggcacgggcgttgac

SEQ ID NO: 290080 - DNA, 75 bp, synthetic construct
  source 1..75: mol_type = other DNA
agtaactcgcatgtgatccctgcattgctgcgtcgcttccacgaggcgacggcacagaatgcgccggacgtggtg

SEQ ID NO: 290081 - DNA, 75 bp, synthetic construct
  source 1..75: mol_type = other DNA
aaaagaggtgactggtgtggcttctggagtaacgaggatgtatcggtgtggtggaaccgtctgtgtgacaacgtg

SEQ ID NO: 290082 - DNA, 75 bp, synthetic construct
  source 1..75: mol_type = other DNA
atggctatccctgcatttggtttaggtactttccgtctgaaagacgacgttgttatttcatctgtgataacggcg

SEQ ID NO: 290083 - DNA, 75 bp, synthetic construct
  source 1..75: mol_type = other DNA
gatcgacgactatcgcaccgctgtatggaactttatcgatcacatcagaacggttacgccagatggtgaactaca

SEQ ID NO: 290084 - DNA, 75 bp, synthetic construct
  source 1..75: mol_type = other DNA
atgaaactttttaacaataaaaaaacccctcaacctgatagccctaatccgtatctcaacgcacgtcgttcatgg

SEQ ID NO: 290085 - DNA, 75 bp, synthetic construct
  source 1..75: mol_type = other DNA
cgaaggcgcagagatccatctccctgcggacagtcgcctgacgccctctgcccgggagttgctggaaagccgcca

SEQ ID NO: 290086 - DNA, 75 bp, synthetic construct
  source 1..75: mol_type = other DNA
ggttgatgattaccgttccagtgcctggaggtttatcgagaatatcaggacggttacaccagatagcgagctgca

SEQ ID NO: 290087 - DNA, 75 bp, synthetic construct
  source 1..75: mol_type = other DNA
ctcgctgcagtagggggtatgacctatatcggtagtcagccgaaatttgtcccaatggtctatcaacaggaccgt

SEQ ID NO: 290088 - DNA, 75 bp, synthetic construct
  source 1..75: mol_type = other DNA
ctggctgcggtcggtggtatcacttatatgggtagccagcctaaatttgtcccgatggtttatcagcaggatcgt

SEQ ID NO: 290089 - DNA, 75 bp, synthetic construct
  source 1..75: mol_type = other DNA
ccgacggacgcgaccggcatcagactctcttacagtaaatggagcggtgatgagctgactttaatgaccgacctg

SEQ ID NO: 290090 - DNA, 75 bp, synthetic construct
  source 1..75: mol_type = other DNA
tggtcattccagggatcatggcccaaacagttgttcgttacgttccaaacagtagagttgcaagcgatacttcta

SEQ ID NO: 290091 - DNA, 75 bp, synthetic construct
  source 1..75: mol_type = other DNA
attatcttatgcatgaagagagtatagatcaaagacagacgttgcttgtttattttaacgagtttggggattcct

SEQ ID NO: 290092 - DNA, 75 bp, synthetic construct
  source 1..75: mol_type = other DNA
aagcgccaggatctggtttacgaaaaagaggatctgctgatctccggtctgggcaaatacccggaatataacttc

SEQ ID NO: 290093 - DNA, 75 bp, synthetic construct
  source 1..75: mol_type = other DNA
cgttaaaggcacgtttggtaagcaatccagcgtcgtcaaatgggtggttttggcagaagttgtcgccggcggcat

SEQ ID NO: 290094 - DNA, 75 bp, synthetic construct
  source 1..75: mol_type = other DNA
ttgaagggctgttccctcgctgggatgacaggctactgggtattttattgggtaacacgaaaaacaaccagtttc

SEQ ID NO: 290095 - DNA, 75 bp, synthetic construct
  source 1..75: mol_type = other DNA
ccacaacaaaagcgaatgaatacctgaatggttcgaaagaacgtaatcctttcacccgtgcaaaaacggaaatgg

SEQ ID NO: 290096 - DNA, 75 bp, synthetic construct
  source 1..75: mol_type = other DNA
ctaatcaacaggtgaattttatcggtgatcaaagtactgcagccctgaccctcagtgtgccttcaggtgatatca

SEQ ID NO: 290097 - DNA, 75 bp, synthetic construct
  source 1..75: mol_type = other DNA
tgggaaaggattacggcgacgccaaaatcaggaggccctagctatgtatacgaaatccgtgtgaagagttggtag

SEQ ID NO: 290098 - DNA, 75 bp, synthetic construct
  source 1..75: mol_type = other DNA
cacctaccccgtgacagttagcgtgaacaattatggtgtcagtgatacgaaacaggtgactttgattgccgatgc

SEQ ID NO: 290099 - DNA, 75 bp, synthetic construct
  source 1..75: mol_type = other DNA
tcactgatgctgaacgtgtcgctggcgctgatgctggcactgtccctgatttacccgcagagcgtggccgtcagt

SEQ ID NO: 290100 - DNA, 75 bp, synthetic construct
  source 1..75: mol_type = other DNA
ccgatcaaagtttctgaagggatggaatttgtgcaatcaggtactaacgtgccctatataaaaattagcgcaatt

SEQ ID NO: 290101 - DNA, 75 bp, synthetic construct
  source 1..75: mol_type = other DNA
gcatgtcacgctgaaaggtaaaaaagcgggtacgcatacggttaccgcaacgctgggtaataacaataccagtga

SEQ ID NO: 290102 - DNA, 75 bp, synthetic construct
  source 1..75: mol_type = other DNA
ccatttctgtttctgactgcggagagggctgggcagacctgcttatccgcaatgtcggcaaagtgaccggcgcgc

SEQ ID NO: 290103 - DNA, 75 bp, synthetic construct
  source 1..75: mol_type = other DNA
ctgcgaaaccggtcattgcggcagggcagacttattttgctatccagacccgacggcaggagctggctgacgatg

SEQ ID NO: 290104 - DNA, 75 bp, synthetic construct
  source 1..75: mol_type = other DNA
acgcaaaaattaacgaaaacaatgatgtgatgaacccacatcgtattttcattaaagatttcaactggtcaaaac

SEQ ID NO: 290105 - DNA, 75 bp, synthetic construct
  source 1..75: mol_type = other DNA
cgcatgtcacgctgaaaggtaaaaaagcgggtacgcatacggttaccgcaacgctgggtaataacaataccagtg

SEQ ID NO: 290106 - DNA, 75 bp, synthetic construct
  source 1..75: mol_type = other DNA
aacggctatcctgtcgatgccttccgccacaaatctctggtggtcattgccggcggtactggcgttgcgccagtc

SEQ ID NO: 290107 - DNA, 75 bp, synthetic construct
  source 1..75: mol_type = other DNA
ggggaaatgcggtcactgccgcatgggggatgtttacgtctgcgtcgatggcccggttttcaactatgccgtagc

SEQ ID NO: 290108 - DNA, 75 bp, synthetic construct
  source 1..75: mol_type = other DNA
gccagcaagttggcatgagtttttccgggttgcttgcctttggtgggattgggggtatcgctgttggcatggctg

SEQ ID NO: 290109 - DNA, 75 bp, synthetic construct
  source 1..75: mol_type = other DNA
gtgggaaaggaactggatgatatctgcaccagctgtccgtatatcgatgctataaaacggcacaaacaacagctc

SEQ ID NO: 290110 - DNA, 75 bp, synthetic construct
  source 1..75: mol_type = other DNA
gaatgagcaacaggtacagtttttactgaaaagtaatcccagacgaaacagagcgaagtttacgataagtccctt

SEQ ID NO: 290111 - DNA, 75 bp, synthetic construct
  source 1..75: mol_type = other DNA
agcagaaatactggtttgcctgcgccacgtttgataactgggagggctggaatgagcaacaggtgcgtattaccg

SEQ ID NO: 290112 - DNA, 75 bp, synthetic construct
  source 1..75: mol_type = other DNA
cgttatttttttgaaactgggaaccccctgttcaaattgaacaagtccccccatgttcaaaatgaacagccaata

SEQ ID NO: 290113 - DNA, 75 bp, synthetic construct
  source 1..75: mol_type = other DNA
taactttcaacacttctgagtataaaaacaacactgaataccacaaaaaaatcaaaggtcatcagttgagttttt

SEQ ID NO: 290114 - DNA, 75 bp, synthetic construct
  source 1..75: mol_type = other DNA
aagtcgtggtgtcctcccaaaaaaactgctgaatgaaatgattgagcaggcgtaccaggactttgtggcaaatga

SEQ ID NO: 290115 - DNA, 75 bp, synthetic construct
  source 1..75: mol_type = other DNA
tggaacgtcagggcgtacttcccgccaccgatgggagtccggcgctttttacctcagcatcagtgggcgtttatg

SEQ ID NO: 290116 - DNA, 75 bp, synthetic construct
  source 1..75: mol_type = other DNA
gatcgaacaacttgccggtgttggtttacccgcctcgctctgggaaagccagatcctgccagcccgcgtgcgcga

SEQ ID NO: 290117 - DNA, 75 bp, synthetic construct
  source 1..75: mol_type = other DNA
tgcatgaaccctgggcgctggcgattgccgggcgaatacatgcgctatggggcgctgacgcgtctgtggtcgcca

SEQ ID NO: 290118 - DNA, 75 bp, synthetic construct
  source 1..75: mol_type = other DNA
gccacgctggatatgctttccgggcgctatccctctggcgatttttctgcttttcgccccaaactggtctggaac

SEQ ID NO: 290119 - DNA, 75 bp, synthetic construct
  source 1..75: mol_type = other DNA
atgaccgttgaagacctggcgcaacggcatacaggcagcagtgaagagattgcgtcgtatctggaaaatcttctt

SEQ ID NO: 290120 - DNA, 75 bp, synthetic construct
  source 1..75: mol_type = other DNA
atgaattactaccgcctgacgtttttcaggcgctggcaaccgcgctgcgacgcgaaccacgattgcgctttacac

SEQ ID NO: 290121 - DNA, 75 bp, synthetic construct
  source 1..75: mol_type = other DNA
ccatgttcaaaatgaacagccaatagaaaataagagtcactctatagccaaaagaagagaaagatcatgcgcggt

SEQ ID NO: 290122 - DNA, 75 bp, synthetic construct
  source 1..75: mol_type = other DNA
ttcgtaccgggcaactggatgatgaagactgggcgcgtatttccggcacgatgggcattttgctggaaaaacgaa

SEQ ID NO: 290123 - DNA, 75 bp, synthetic construct
  source 1..75: mol_type = other DNA
ggtggttttgcttatttggcagagctgtcaaaaaatacgccaagtgcagcgaacatcagtgcctatgccgacatc

SEQ ID NO: 290124 - DNA, 75 bp, synthetic construct
  source 1..75: mol_type = other DNA
agatgatctcggttgcgaatgagattgccgaagccggttttgatccgcaggggcgtaccagcgaagatctgctgg

SEQ ID NO: 290125 - DNA, 75 bp, synthetic construct
  source 1..75: mol_type = other DNA
atggcaggcaataaacccttcaacaaacaacaaactgaaccccgcgaacgcgatccacaagttgccgggctgaaa

SEQ ID NO: 290126 - DNA, 75 bp, synthetic construct
  source 1..75: mol_type = other DNA
tgtcaaaaaatacgccaagtgcggcgaacatcagtgcttatgcggacatcgtgcgtgaacgtgccgttgttcgcg

SEQ ID NO: 290127 - DNA, 75 bp, synthetic construct
  source 1..75: mol_type = other DNA
taacggcccaatcgggacggtacgcctgacctttaacggtcaatggtcgcgcttcgataattacgcagggccgca

SEQ ID NO: 290128 - DNA, 75 bp, synthetic construct
  source 1..75: mol_type = other DNA
atgcctgaactcactgaactgcctgatggatcgtttacgcgccagcaggcagaggtggttgcggctcaatatacc

SEQ ID NO: 290129 - DNA, 75 bp, synthetic construct
  source 1..75: mol_type = other DNA
ggacgcatttccgtctggttatccgtcatgagtgttgcatagtctggcgagcctggaactttgagccggatgccg

SEQ ID NO: 290130 - DNA, 75 bp, synthetic construct
  source 1..75: mol_type = other DNA
gaaaagctggcaaaaaaatttgcatggatacgtagtgccgctaccgcagtgaataagcctaaacaatccagcgcc

SEQ ID NO: 290131 - DNA, 75 bp, synthetic construct
  source 1..75: mol_type = other DNA
gaagtcgaaatgagcgacctgacaccttcgcttgctttctttggcctgcgcaataccgcatgggccgggcatatt

SEQ ID NO: 290132 - DNA, 75 bp, synthetic construct
  source 1..75: mol_type = other DNA
gtgatcttgtcgtattgcctgaatatcgtgatgaccctggattggttgtactgaacaagatgtgcaacgatcttg

SEQ ID NO: 290133 - DNA, 75 bp, synthetic construct
  source 1..75: mol_type = other DNA
atgagagggctttcttcgaaaagactgggtacgatcagtgaccgatatgaggcgagtcctgatttcacagagtat

SEQ ID NO: 290134 - DNA, 75 bp, synthetic construct
  source 1..75: mol_type = other DNA
gggctgcgctggtacggggtgcgagtcgctgagcctcatcatgatggcactgtgcactggcacctgctgtgcttt

SEQ ID NO: 290135 - DNA, 75 bp, synthetic construct
  source 1..75: mol_type = other DNA
gcagtcgcacggcgcggattttgcgttccccagccagacgctgtatatggataatattacacctcccgaacagct

SEQ ID NO: 290136 - DNA, 75 bp, synthetic construct
  source 1..75: mol_type = other DNA
attattgtggtgcttgttctgctttatggcgaacatttcggcatgagcctttctggcttgctgacctttggtggt

SEQ ID NO: 290137 - DNA, 75 bp, synthetic construct
  source 1..75: mol_type = other DNA
agtattccgtcaggtgccgggctgcgtattatttaccgcaaccaccgtctgcaggaagatgacaaatggcgtcag

SEQ ID NO: 290138 - DNA, 75 bp, synthetic construct
  source 1..75: mol_type = other DNA
agcatgtcagcgcctgggcgtcactgcaccgtgtccagcaatttcgtttctttggtattccagggcgtcaggcat

SEQ ID NO: 290139 - DNA, 75 bp, synthetic construct
  source 1..75: mol_type = other DNA
tgaatcacgccgcagtcaggagatggactactttatggaagtgtttgttcccagcttccatctgtctctcgatga

SEQ ID NO: 290140 - DNA, 75 bp, synthetic construct
  source 1..75: mol_type = other DNA
tgatgtggaaacatccagaaagccgccgaacggctggcggaactggtgccagaagcgcggattgccatcggtcac

SEQ ID NO: 290141 - DNA, 75 bp, synthetic construct
  source 1..75: mol_type = other DNA
cctgaacaatatcgttatacgctgcccgtcaaagcgggtgagcagcgtctgctgggcgagttaaccggcgctgcc

SEQ ID NO: 290142 - DNA, 75 bp, synthetic construct
  source 1..75: mol_type = other DNA
tgccacgccgcccgcccgtcgtctggcggtcaaaacgtttgtccgcgagtatgacagtctggtggtcagggaggc

SEQ ID NO: 290143 - DNA, 75 bp, synthetic construct
  source 1..75: mol_type = other DNA
tcgaatcggcataccgggccggagtccttagtctccgtgatataggcgataaatacggcgttactgaaggggcta

SEQ ID NO: 290144 - DNA, 75 bp, synthetic construct
  source 1..75: mol_type = other DNA
cattaaaacacggtggttatgcccgtcgccttctgctcaaagatgaggtgatagaggacgctaaagcgttgacgc

SEQ ID NO: 290145 - DNA, 75 bp, synthetic construct
  source 1..75: mol_type = other DNA
caacgtgatgagcgaaaggaaaatatgaaagctatcaaatcactcatggatgaacatggtatatctctggaagat

SEQ ID NO: 290146 - DNA, 75 bp, synthetic construct
  source 1..75: mol_type = other DNA
aagggcacgccgaccagctacatcgccaaatacatcagtaagaacatcgacgggcgcgggctggctaaagaaatc

SEQ ID NO: 290147 - DNA, 75 bp, synthetic construct
  source 1..75: mol_type = other DNA
gataacgctgaatacgttaatgcctgggcgtctctgcatcgtgttcagcaattccgcttctttggcattccgggg

SEQ ID NO: 290148 - DNA, 75 bp, synthetic construct
  source 1..75: mol_type = other DNA
cagtatgagcaaaaaagatcgccgggagctggcagcaaggttgcgcttggtgaaaccgaaacggcgtaaagacta

SEQ ID NO: 290149 - DNA, 75 bp, synthetic construct
  source 1..75: mol_type = other DNA
tgtctggaacgactggagcatgtacgcgacagccagctatctgcatcttttcgttttatggcaagccatgtaggg

SEQ ID NO: 290150 - DNA, 75 bp, synthetic construct
  source 1..75: mol_type = other DNA
caaacagcgaattacagaccatcagcgacagcagctcgtctatgagctgaagtccagaggatttgatggcagcga

SEQ ID NO: 290151 - DNA, 75 bp, synthetic construct
  source 1..75: mol_type = other DNA
ggtaataacactggtccacgctttaaatctgagctgataaacccgcgcaaaggaacgccgacaagctacatcgcg

SEQ ID NO: 290152 - DNA, 75 bp, synthetic construct
  source 1..75: mol_type = other DNA
tagctgagccgcatcatgacggtactgtgcactggcatctcatgtgtttcatgcgtaaaaaagaccgccgcgcca

SEQ ID NO: 290153 - DNA, 75 bp, synthetic construct
  source 1..75: mol_type = other DNA
caaagaaaccggcagatcgctgcgcgacagcgccgagcatgttagtgcatgggcgtcactgcatcgcgtccaaca

SEQ ID NO: 290154 - DNA, 75 bp, synthetic construct
  source 1..75: mol_type = other DNA
ctgattgctctttacgctgcggataacgagcaggagcagctgcgccgtgaggcgctgagcgatgaggtctgggaa

SEQ ID NO: 290155 - DNA, 75 bp, synthetic construct
  source 1..75: mol_type = other DNA
ccatgccaaaatggcccgcgagcagcaacgcgttaaccccgatttggttatcctggctgatgtaagcgccatgcc

SEQ ID NO: 290156 - DNA, 75 bp, synthetic construct
  source 1..75: mol_type = other DNA
aaaaaaatgagagtctcctaaagtttccttcgataatatcaatgcttaatatcaatcttctttttaatccactaa

SEQ ID NO: 290157 - DNA, 75 bp, synthetic construct
  source 1..75: mol_type = other DNA
tccccttgctgaaaatttgaaccaacaagggaaagacaaatcagctgatggggataccagaacggacattacccg

SEQ ID NO: 290158 - DNA, 75 bp, synthetic construct
  source 1..75: mol_type = other DNA
cacgtttccattccacgctcaacaacggcagacccaacccgacctggacaaatgcgacggtaagacaaagcagcg

SEQ ID NO: 290159 - DNA, 75 bp, synthetic construct
  source 1..75: mol_type = other DNA
tgaatctggcggactgggaaaccctcccttacgacagtttttcgcctcatcaggacattatctcctcgcgtcttt

SEQ ID NO: 290160 - DNA, 75 bp, synthetic construct
  source 1..75: mol_type = other DNA
caccatccggtacgctggtgcgcgtgcagttgttaggtcagttcccacaatggctggcagagaacgccgcccgtg

SEQ ID NO: 290161 - DNA, 75 bp, synthetic construct
  source 1..75: mol_type = other DNA
atggcccataacaatgaaatgtcccgcgcacaggggcgcatcgacgaacttaaccagcgtgtactggctggtagc

SEQ ID NO: 290162 - DNA, 75 bp, synthetic construct
  source 1..75: mol_type = other DNA
ctggctcccgcattctgcgcgttcttaaagcactgcgcggtcacgctctgaacggggtttctaacggtgaactgg

SEQ ID NO: 290163 - DNA, 75 bp, synthetic construct
  source 1..75: mol_type = other DNA
atacgatgaagcaacagaattatttcagcatgttcgggtgttgaataattcccctgatattgcaagggctattca

SEQ ID NO: 290164 - DNA, 75 bp, synthetic construct
  source 1..75: mol_type = other DNA
atggcgcctcatttttttgcgggtgatgatatgcgtgtgttactggctccgatggagggtgtacttgactctctg

SEQ ID NO: 290165 - DNA, 75 bp, synthetic construct
  source 1..75: mol_type = other DNA
ggtaaaagtttttcatcgcatttgccctgagctacaaaacgccagccggacaccatccggtacgctggtgcgcgt

SEQ ID NO: 290166 - DNA, 75 bp, synthetic construct
  source 1..75: mol_type = other DNA
tgctgaacaagcagcttgagcgcggcaagatcgatggtctgaaactggctggcgtgatctccacgattcacccaa

SEQ ID NO: 290167 - DNA, 75 bp, synthetic construct
  source 1..75: mol_type = other DNA
ggcggcgctgtttttccggctgatacgtacggcctgccgtcagcgtcttgaggggcgggaaccatgtcaaagctg

SEQ ID NO: 290168 - DNA, 75 bp, synthetic construct
  source 1..75: mol_type = other DNA
ggcgtcggtgtttttccggctgatacgtaaagcctgtcgtcagcgtcttgaggggcgggaattatgtcaaagctg

SEQ ID NO: 290169 - DNA, 75 bp, synthetic construct
  source 1..75: mol_type = other DNA
taaagaagacagcaaaggtaagccgaagaaagaagaagatgccgtcgttgacgacctgctggcagaagtgagcca

SEQ ID NO: 290170 - DNA, 75 bp, synthetic construct
  source 1..75: mol_type = other DNA
cgctcgactacgccgggtttgaccgcgtggatattgtggtagaagcggttgtcgaaaacccgaaagtgaaaaaag

SEQ ID NO: 290171 - DNA, 75 bp, synthetic construct
  source 1..75: mol_type = other DNA
tctaatacttcaaccattcctatcagcgaactggccaacgcgctggaacgcccggaaaacttctgcgggatgcac

SEQ ID NO: 290172 - DNA, 75 bp, synthetic construct
  source 1..75: mol_type = other DNA
aacggtatttctaacggtgaactggcgacagcactgcacgagtcaccggcaaacatcaaccgggcactcaacacc

SEQ ID NO: 290173 - DNA, 75 bp, synthetic construct
  source 1..75: mol_type = other DNA
cacattacctgccgggatcgagtactggcagccattgttcttcagcgaaccgctgccgccactgttcagttattt

SEQ ID NO: 290174 - DNA, 75 bp, synthetic construct
  source 1..75: mol_type = other DNA
gcccgcacagtttcctccacggccacgcgctgatgatgaaaaaaggtcagcggttatctcgtgatgccttgcgta

SEQ ID NO: 290175 - DNA, 75 bp, synthetic construct
  source 1..75: mol_type = other DNA
cagcagcattacgacaacttccgcgaccgtttcgccaactggccggtacgtatcgaaatgatctcccgtttccgc

SEQ ID NO: 290176 - DNA, 75 bp, synthetic construct
  source 1..75: mol_type = other DNA
gccgccgtgaagcgctgggtgaactgctcgcgcgaattaaaattgctccgcaacgcattatgcgtcttgatgaag

SEQ ID NO: 290177 - DNA, 75 bp, synthetic construct
  source 1..75: mol_type = other DNA
cgccaaagagggcttcgcgtttaaacacgatcgtgagcagtatcaattgttctgcgacagcttcccgtttgaaac

SEQ ID NO: 290178 - DNA, 75 bp, synthetic construct
  source 1..75: mol_type = other DNA
catccctaccgccaacaccattattattgaacgcgcggatcacttcggtctggcgcaactacaccagttgcgtgg

SEQ ID NO: 290179 - DNA, 75 bp, synthetic construct
  source 1..75: mol_type = other DNA
cgaacggctggcagaactggtgccagaagcgcggatcgccatcggtcacgggcagatgcgtgagcgcgaactgga

SEQ ID NO: 290180 - DNA, 75 bp, synthetic construct
  source 1..75: mol_type = other DNA
gtgcagctaaaaactgaacatttaccgacaaaagccgcgaatgccaatttaggtttccagaaactgccagacctg

SEQ ID NO: 290181 - DNA, 75 bp, synthetic construct
  source 1..75: mol_type = other DNA
tgctcctggcatccagttactacagatcgccatggcccacagtaacgagatggcacgagcgcaggatcgtattaa

SEQ ID NO: 290182 - DNA, 75 bp, synthetic construct
  source 1..75: mol_type = other DNA
agccagtttaccgatcaaatggtgatgaatctggcggactgggaaactcttccctacgacagtttttcgcctcat

SEQ ID NO: 290183 - DNA, 75 bp, synthetic construct
  source 1..75: mol_type = other DNA
ggcgaatacgccacgcgcggcgcgttgctggatctcttcccgatgggcagcgaactaccttatcgtcttgatttc

SEQ ID NO: 290184 - DNA, 75 bp, synthetic construct
  source 1..75: mol_type = other DNA
tgaatctggcggactgggaaactctcccttacgacagtttttcgcctcatcaggacattatctcctcgcgccttt

SEQ ID NO: 290185 - DNA, 75 bp, synthetic construct
  source 1..75: mol_type = other DNA
cgacagtgatcaggttgaagatattgaagatgaactggcaatagctggatttcaggaagtggcaaggcgctcagt

SEQ ID NO: 290186 - DNA, 75 bp, synthetic construct
  source 1..75: mol_type = other DNA
tttcgggttgtccggcctgatacatcagagcaatacgttgcgttaaaaacggctgttcagtctctgatgccacgg

SEQ ID NO: 290187 - DNA, 75 bp, synthetic construct
  source 1..75: mol_type = other DNA
atgatgttttataattgcgtgagacaattgatttattcgtttttattgtggtttttattatcttttaatgtagcg

SEQ ID NO: 290188 - DNA, 75 bp, synthetic construct
  source 1..75: mol_type = other DNA
gagccggcagcacaacgcctgcgcttcatgctcgacttcggctatgccacgggcctgcgcgctagcgaactggtc

SEQ ID NO: 290189 - DNA, 75 bp, synthetic construct
  source 1..75: mol_type = other DNA
cgtcgaacgcgcgatccggctcttgcccacgctgccggcgccgaagccccagatcagcgacagcatcgaccagtg

SEQ ID NO: 290190 - DNA, 75 bp, synthetic construct
  source 1..75: mol_type = other DNA
ccggcgtcaaggtacgcggtcacgccttgcggcccgcactggatacggcgcgaggctttaccgagggagaatggc

SEQ ID NO: 290191 - DNA, 75 bp, synthetic construct
  source 1..75: mol_type = other DNA
ccaggggccaagtccacgctggtatcagcaggattgtgcgggcctggtgcgatttgcggcgaacgagacgctgaa

SEQ ID NO: 290192 - DNA, 75 bp, synthetic construct
  source 1..75: mol_type = other DNA
accacaccggaagcgccacgaaaactgacaacggaatgcgcgcagtcagtctgcaacaacttatgacatggaagg

SEQ ID NO: 290193 - DNA, 75 bp, synthetic construct
  source 1..75: mol_type = other DNA
cctccgtgaaggtaaagccctttacgacaaccttcacccgtcacgtattgtcatcggtgagcgttcagaacgcgc

SEQ ID NO: 290194 - DNA, 75 bp, synthetic construct
  source 1..75: mol_type = other DNA
attggatccgcgatgttcagaagccgacgacagtgattgaaggcgaacaacgttgtctgacgtcggctgaacagg

SEQ ID NO: 290195 - DNA, 75 bp, synthetic construct
  source 1..75: mol_type = other DNA
cattattgtcgccgcccgcccatcgatggggaagactacgtttgcgatgaatctcgtcgaaaatgccgcagtccg

SEQ ID NO: 290196 - DNA, 75 bp, synthetic construct
  source 1..75: mol_type = other DNA
taactcaggcctcaatcagcgttaaaaccgccaccattagccgcataaaggtaaccgcagaaccccgaccatacg

SEQ ID NO: 290197 - DNA, 75 bp, synthetic construct
  source 1..75: mol_type = other DNA
tgggtaaacaattcgataaactgcttaatgttacgctgtgttatccggacaataaccgtcagccgttcttcgata

SEQ ID NO: 290198 - DNA, 75 bp, synthetic construct
  source 1..75: mol_type = other DNA
gcaggtccgttcccgactgaactgtttgatgaaactggcgagttcctctgtaagcagggtaacgaattcggtgca

SEQ ID NO: 290199 - DNA, 75 bp, synthetic construct
  source 1..75: mol_type = other DNA
caaagcttactcaactcgtgtaggtgcaggtcctttcccgaccgaactgtttgatgaaactggcgagttcctctg

SEQ ID NO: 290200 - DNA, 75 bp, synthetic construct
  source 1..75: mol_type = other DNA
gtggtatcgggcctgcttatgaagataaagtagcacgtcgcggtctgcgtgttggcgaccttttcgacaaagaaa

SEQ ID NO: 290201 - DNA, 75 bp, synthetic construct
  source 1..75: mol_type = other DNA
atcttggtttctctttggtgtaaattgcaggagaaatggatttctcgcaatgatattgccgaagcattcggtata

SEQ ID NO: 290202 - DNA, 75 bp, synthetic construct
  source 1..75: mol_type = other DNA
atgcacctcccaccgcaagcggcgggccccaaccggagtcactttagttacaacactcagacacaaccaccagaa

SEQ ID NO: 290203 - DNA, 75 bp, synthetic construct
  source 1..75: mol_type = other DNA
cggcctgccgcaggcggcgctgaactatatcaagcgtattgaagagctgactggtgtgccgatcgatatcatctc

SEQ ID NO: 290204 - DNA, 75 bp, synthetic construct
  source 1..75: mol_type = other DNA
caataatcgccaaccattcttcgatatgttaagtggcaaactgacacgaattgtcgtgcatgtggatttacagcc

SEQ ID NO: 290205 - DNA, 75 bp, synthetic construct
  source 1..75: mol_type = other DNA
tggctgaactcactgtggcaggaaaaagaccgacttctgacgtcgttgatgtcatcacagcggcaggacaagtaa

SEQ ID NO: 290206 - DNA, 75 bp, synthetic construct
  source 1..75: mol_type = other DNA
ttcagcaatggctgaactcactgtggcatgaaaaagacaggcttctgacgtcattgatgtcatcgcagcgccagg

SEQ ID NO: 290207 - DNA, 75 bp, synthetic construct
  source 1..75: mol_type = other DNA
caaggtttttggaatgcgtgccgatgcgatcacccgcgcttttgatcgagctgtaaagcgcgccagagaaagata

SEQ ID NO: 290208 - DNA, 75 bp, synthetic construct
  source 1..75: mol_type = other DNA
cttagccgcagcgaagcggaatctacgacattgtatgaagccctaacgcgatatgaaaaagagattgttcccgac

SEQ ID NO: 290209 - DNA, 75 bp, synthetic construct
  source 1..75: mol_type = other DNA
ctgtaaagcgagcccgagaaaggtatgtagaaactaatccacactgtgatgacactttcctaaaagatctgagat

SEQ ID NO: 290210 - DNA, 75 bp, synthetic construct
  source 1..75: mol_type = other DNA
gataatctccatccttcacgtattgtcataggtgagcgttcagaacgcgcagaacgttttgctgcgttgttacag

SEQ ID NO: 290211 - DNA, 75 bp, synthetic construct
  source 1..75: mol_type = other DNA
tgtagtctatgaatatgcgacaaagccctttgccatcggttacagaatatctcctgaagaatctgcaacaggggg

SEQ ID NO: 290212 - DNA, 75 bp, synthetic construct
  source 1..75: mol_type = other DNA
acgggtaatcgccgcaggaaaatacacacaccgcctcaggctcaagaagcaatttcccgctggactgccacttgt

SEQ ID NO: 290213 - DNA, 75 bp, synthetic construct
  source 1..75: mol_type = other DNA
acgggtaatcgccgcagcaaaatacacacaccggctcaggctcaagaagcaatttcccgctggactgccacttgt

SEQ ID NO: 290214 - DNA, 75 bp, synthetic construct
  source 1..75: mol_type = other DNA
atttgataaaacccgggcgaaaacatgcggaacctggacaccaaaagcgcctgatgaaagtggttacaacggtat

SEQ ID NO: 290215 - DNA, 75 bp, synthetic construct
  source 1..75: mol_type = other DNA
ccgacgacaccgttgggctgaaagcccgtctactacaactcccggccccggatatctggacagagtttaaaaaga

SEQ ID NO: 290216 - DNA, 75 bp, synthetic construct
  source 1..75: mol_type = other DNA
tggccgtattacaggaagtaaaaaatgtagtctatgaatatgcgacaaagccctttgctatcggttacagaatat

SEQ ID NO: 290217 - DNA, 75 bp, synthetic construct
  source 1..75: mol_type = other DNA
cgcaggaaaatacacacaccgtctcaggctcaagaagcaattacccgctggcctgccacttgttgcgatccggca

SEQ ID NO: 290218 - DNA, 75 bp, synthetic construct
  source 1..75: mol_type = other DNA
cgcagcaaaatacacacaccgtctcaggctcaagaagcaattacccgctggcctgccacttgttgcgatccgcca

SEQ ID NO: 290219 - DNA, 75 bp, synthetic construct
  source 1..75: mol_type = other DNA
cgcagtaaaatacacacaccgtctcaggctcaagaagcaattacccgctggcctgccacttgttgcgatccgtca

SEQ ID NO: 290220 - DNA, 75 bp, synthetic construct
  source 1..75: mol_type = other DNA
acgggtaatcgccgcagtaaaatacacacaccgactcaggctcaagaagcaattacccgctggactgccacttgt

SEQ ID NO: 290221 - DNA, 75 bp, synthetic construct
  source 1..75: mol_type = other DNA
acgggtaatcgccgcagaaaaatacacacaccgtctcaggctcaagaagcaattacccgctggactgccacttgt

SEQ ID NO: 290222 - DNA, 75 bp, synthetic construct
  source 1..75: mol_type = other DNA
cgcaggaaaatacacacaccgtctcaggctcaagaagcaattacccgctgggctgccacttgttgcgatccgcca

SEQ ID NO: 290223 - DNA, 75 bp, synthetic construct
  source 1..75: mol_type = other DNA
ccctgtcggccggatctgcggcaactgcggtttgaggtgcagcggacgttcattgagaaccgcgctctggctgat

SEQ ID NO: 290224 - DNA, 75 bp, synthetic construct
  source 1..75: mol_type = other DNA
gggagatgaaacgacggtagctgaagttactgaaatgaagaattcagagagactgaatgatatgcctcaccttta

SEQ ID NO: 290225 - DNA, 75 bp, synthetic construct
  source 1..75: mol_type = other DNA
ggagcagttcggacaccggactgaaagcacgggtgaaggaccaggccgaccccgatatgtggctgcgtatctcgg

SEQ ID NO: 290226 - DNA, 75 bp, synthetic construct
  source 1..75: mol_type = other DNA
gagggattcaatcgagcagggcatgttacacaacaagcaggccagcatgctggaagttttgttaaaagaataaaa

SEQ ID NO: 290227 - DNA, 75 bp, synthetic construct
  source 1..75: mol_type = other DNA
cattcaggggattatgaaacgtatcaaggcgaaaggtgttgaagtcatcatttacgagccagtgatgaaagaaga

SEQ ID NO: 290228 - DNA, 75 bp, synthetic construct
  source 1..75: mol_type = other DNA
actatgatcctaaaactaattatttcaatacatccagtgtagaatcagtaattaaagacgtagttgagataaatc

SEQ ID NO: 290229 - DNA, 75 bp, synthetic construct
  source 1..75: mol_type = other DNA
ttggtaacagcatcgtagtaatgcaatccagatctcttacaacaagagaacttgaaacacatctgaaatggttac

SEQ ID NO: 290230 - DNA, 75 bp, synthetic construct
  source 1..75: mol_type = other DNA
cggacgaccggatacggggcggggaggctatccgacatgccgggagtggtggagtgacagtagtgtggggctgaa

SEQ ID NO: 290231 - DNA, 75 bp, synthetic construct
  source 1..75: mol_type = other DNA
cgggcgtccgaatacgggacgtggaggatatccgacatgtaatgagtggtggctggcagcagataacggcctgag

SEQ ID NO: 290232 - DNA, 75 bp, synthetic construct
  source 1..75: mol_type = other DNA
gctgacggcgctttacagctccgatacacatacacgcttcaatatgatgggattccagaatacgtcggatgatct

SEQ ID NO: 290233 - DNA, 75 bp, synthetic construct
  source 1..75: mol_type = other DNA
tgctctcgttaccccgcatcgagaatgcattgtatggtgcgttttttgtgatggtggcttcctgtgtaccgctgg

SEQ ID NO: 290234 - DNA, 75 bp, synthetic construct
  source 1..75: mol_type = other DNA
cacgctgcagtccagaacgccaagggcggcgtttccgtggaataacgcccgtgacagcggtcgtccggatacggg

SEQ ID NO: 290235 - DNA, 75 bp, synthetic construct
  source 1..75: mol_type = other DNA
atgacaagccgcagccgccaggctgcctactcgatgcagggggattacggcacgctgcagtccagaacgccaagg

SEQ ID NO: 290236 - DNA, 75 bp, synthetic construct
  source 1..75: mol_type = other DNA
cactgaaactgtccggaaaaatccacaaacagcttgaaagtattgcccgaagtcgtggcgaccccccacccaaaa

SEQ ID NO: 290237 - DNA, 75 bp, synthetic construct
  source 1..75: mol_type = other DNA
ccacaaacagcttgaaagtattgcccgaagtcgtggtgtccccccaaaaaaaatgctgaatgaaatgattgagca

SEQ ID NO: 290238 - DNA, 75 bp, synthetic construct
  source 1..75: mol_type = other DNA
taccagcggtactaatctttttggttcatatcattgcgtactaacagtatttggcgatacggcagaagctgcccg

SEQ ID NO: 290239 - DNA, 75 bp, synthetic construct
  source 1..75: mol_type = other DNA
ctctgaaactgtccggaaaaatccacaaacagcgtgaaagtattgcccgaagtcgtggcgaccccccgcccaaaa

SEQ ID NO: 290240 - DNA, 75 bp, synthetic construct
  source 1..75: mol_type = other DNA
ctctgaaactgtccggaaaaatccacaaacagcctgaaagtattgcccgaagtcgtggcgaccccccccccaaaa

SEQ ID NO: 290241 - DNA, 75 bp, synthetic construct
  source 1..75: mol_type = other DNA
ctctgaaactgtccggaaaaatccacaaacagcatgaaagtattgcccgaagtcgtggcgaccccccacccaaaa

SEQ ID NO: 290242 - DNA, 75 bp, synthetic construct
  source 1..75: mol_type = other DNA
gtgggtccagtaatgttggatgtcaaaggttacgaactggacgcggaagagcgtgaaatacttgcgcatccgctg

SEQ ID NO: 290243 - DNA, 75 bp, synthetic construct
  source 1..75: mol_type = other DNA
caggtaacggaagcagcggacatcatttttattatggtgccggacacacctcaggttgaagaagttctgtttggt

SEQ ID NO: 290244 - DNA, 75 bp, synthetic construct
  source 1..75: mol_type = other DNA
ctgcatgtcacaactattggttcggttgctgatgaattactgtcactcggtgccgtcagcgttgacactgcgtgc

SEQ ID NO: 290245 - DNA, 75 bp, synthetic construct
  source 1..75: mol_type = other DNA
ctggaaagtaatcccagacgaaacagagcgaagtttgcgataaactccttccagactctcggggttaaacagcat

SEQ ID NO: 290246 - DNA, 75 bp, synthetic construct
  source 1..75: mol_type = other DNA
tttgatggttataaaaaaattggtcttgttgaaaaagaatttaagaaattaaaatctttatcaaaagaatccaga

SEQ ID NO: 290247 - DNA, 75 bp, synthetic construct
  source 1..75: mol_type = other DNA
gtgggagggctgattctctttacgcgtaactatcatgatcctgcgcaattacgcgaactggtgcgccaaatccgc

SEQ ID NO: 290248 - DNA, 75 bp, synthetic construct
  source 1..75: mol_type = other DNA
ccctgaaactgtccggaaaaatccacaaacagcttgaaagtattgcccgaagtcgtggcgaccccccccccaaaa

SEQ ID NO: 290249 - DNA, 75 bp, synthetic construct
  source 1..75: mol_type = other DNA
tccaacgcgtcgggcgggtgcgctggtggtcgtttctggcggcaaattgttactctatctggcgcaaggtggcaa

SEQ ID NO: 290250 - DNA, 75 bp, synthetic construct
  source 1..75: mol_type = other DNA
tctttttcctgtagctttcccctttcagttcgaacatatatccgtgatggatcagcctgtctgccgcagccaccg

SEQ ID NO: 290251 - DNA, 75 bp, synthetic construct
  source 1..75: mol_type = other DNA
gcggaaaaactgacggcacgattaaatgagctttacgccgcacgcttacagcgttccccgtctatcgccgttgat

SEQ ID NO: 290252 - DNA, 75 bp, synthetic construct
  source 1..75: mol_type = other DNA
cccgcgtccgccgcgctgcaccgtggaaagatttgccacggcgtatttttgacgccacgctggatatgctctgcg

SEQ ID NO: 290253 - DNA, 75 bp, synthetic construct
  source 1..75: mol_type = other DNA
gactaccgcactgcgtcgcgaaccacggctgcgctttacgctaacagaagtgaatgatctaccggtccggcaaac

SEQ ID NO: 290254 - DNA, 75 bp, synthetic construct
  source 1..75: mol_type = other DNA
gatcgggaaagtggaatattaactgcgcgtccaggcgcccaactgctggcggtgaccagcggtggcaccattccg

SEQ ID NO: 290255 - DNA, 75 bp, synthetic construct
  source 1..75: mol_type = other DNA
cccgcgtacgccgtgccgcaccgtggaaagatctgccaagacgtgtttttgacgccacgctggatatgctttccg

SEQ ID NO: 290256 - DNA, 75 bp, synthetic construct
  source 1..75: mol_type = other DNA
ctgaattaggcgagatgatcggcgattttcttcatttgctggcggatggcgcgttcttttccgggactattcccc

SEQ ID NO: 290257 - DNA, 75 bp, synthetic construct
  source 1..75: mol_type = other DNA
cgctgaaactgtccggaaaaatccacaaacagcttgaaagtattgcccgaagtcgtggcgaccccccgcccaaaa

SEQ ID NO: 290258 - DNA, 75 bp, synthetic construct
  source 1..75: mol_type = other DNA
tacagggtattgccgatgaacggcggcggcgcggcgaaacggaagtcaatcttcgcgtagggatccgtactggcg

SEQ ID NO: 290259 - DNA, 75 bp, synthetic construct
  source 1..75: mol_type = other DNA
tgtagagtgtatgttcgcaggcaggctggaaaacctgacaccaccgcataatccactcgacgtccttgcgcagca

SEQ ID NO: 290260 - DNA, 75 bp, synthetic construct
  source 1..75: mol_type = other DNA
cgtactgtcgctggacagcgagttactgcgcaatctactcggacaggtcgatccgggggaattactcgacccgca

SEQ ID NO: 290261 - DNA, 75 bp, synthetic construct
  source 1..75: mol_type = other DNA
tggcgttgacggtgtgtatctgccgttccataaagcaaaccaattcctcggtatggaaccgctgccgacatttat

SEQ ID NO: 290262 - DNA, 75 bp, synthetic construct
  source 1..75: mol_type = other DNA
tacaacacattatggagtgggcaaccagtcaccgtagaacgggcatccagacccgggttccgggtaaaggattcc

SEQ ID NO: 290263 - DNA, 75 bp, synthetic construct
  source 1..75: mol_type = other DNA
atgatgacgacaaaactatcactccctgaacttgacataactaaactgcctgacaggagccaggcattacttaat

SEQ ID NO: 290264 - DNA, 75 bp, synthetic construct
  source 1..75: mol_type = other DNA
gttttttactctcactggcgatcagatccggggcaatggctttctggcccggttgctattttgcgaacccggagc

SEQ ID NO: 290265 - DNA, 75 bp, synthetic construct
  source 1..75: mol_type = other DNA
tggagggcgttatcctttataattccaaggggaaatatgtcgtcatgtataagcaaagtttaggggggaacatga

SEQ ID NO: 290266 - DNA, 75 bp, synthetic construct
  source 1..75: mol_type = other DNA
cttccgtggctaactctttcggaatagtgtcttccctggctaaatctatcggaatatcttttcccacgggcaatg

SEQ ID NO: 290267 - DNA, 75 bp, synthetic construct
  source 1..75: mol_type = other DNA
atgaaatttattattttaaatagcacaattgccagaaacgactctgttttccctgttaacaatttctttgtcgtt

SEQ ID NO: 290268 - DNA, 75 bp, synthetic construct
  source 1..75: mol_type = other DNA
gactctctgaaagcatccagagaaagacgtgcaaaaagtgaagagcgcatctgcatgacattatcaaatgcagca

SEQ ID NO: 290269 - DNA, 75 bp, synthetic construct
  source 1..75: mol_type = other DNA
aaagaaaaacctaccgagttggtaatggtattgtgggacagtctaatatctggaacgaaatgatcatgaggcgga

SEQ ID NO: 290270 - DNA, 75 bp, synthetic construct
  source 1..75: mol_type = other DNA
atggaatctaaaaataaaaatggcgactatatagttcctgactctgtaaagagttatgatggtgagcctctgtat

SEQ ID NO: 290271 - DNA, 75 bp, synthetic construct
  source 1..75: mol_type = other DNA
aggttctcatcgtgaatgacgcgacaccagaagggatagctttgaaactcagccagtcaccctctcttctgttgc

SEQ ID NO: 290272 - DNA, 75 bp, synthetic construct
  source 1..75: mol_type = other DNA
gatgtccgtctcactatacttatactgactcaaccggtaatatttgataagttttttactctcactggcgatcag

SEQ ID NO: 290273 - DNA, 75 bp, synthetic construct
  source 1..75: mol_type = other DNA
agccagtccccctctcttctgttgctgtctgacgaaggaggtactattctggataagcgtttcgaacgcaaatcg

SEQ ID NO: 290274 - DNA, 75 bp, synthetic construct
  source 1..75: mol_type = other DNA
acatcatcgtgttgcaattgaatatggcggcagcgtatacgatattgataatttacgaattgttacccccagact

SEQ ID NO: 290275 - DNA, 75 bp, synthetic construct
  source 1..75: mol_type = other DNA
aaagaaggcaagatccatgccgattacaacgctttctgggaatcggttggcggcgtatgtgatgctgaacgccat

SEQ ID NO: 290276 - DNA, 75 bp, synthetic construct
  source 1..75: mol_type = other DNA
atggtgaaatcgacgctatgtataatcattgattttgtgaatatgtcacaacttactgaacgggcttttacgcca

SEQ ID NO: 290277 - DNA, 75 bp, synthetic construct
  source 1..75: mol_type = other DNA
tcggcggaagaattcagcttatatttgaatacccccgggctgcaactggcgaagctggaaggcaaaaacggcgag

SEQ ID NO: 290278 - DNA, 75 bp, synthetic construct
  source 1..75: mol_type = other DNA
tggtcaactgaacgacaccctgaccgaagtcgcggatggcacactgcgcgacctcgggcatgatgtccgcatcgt

SEQ ID NO: 290279 - DNA, 75 bp, synthetic construct
  source 1..75: mol_type = other DNA
ctatgctattgattttattcgaggtggaaaccttaaagctatttctcagtttgctaattattctaattatgaaaa

SEQ ID NO: 290280 - DNA, 75 bp, synthetic construct
  source 1..75: mol_type = other DNA
gctatcgcgataaagaaggaaaaatccatgcggactataacgcgttctgggagtcggttggcggcgaatgcgatg

SEQ ID NO: 290281 - DNA, 75 bp, synthetic construct
  source 1..75: mol_type = other DNA
tggtcaactgaacgacaccctgaccgaagttgcggatggtacgctgcgcaacctcgggcatgatgtccgcatcgt

SEQ ID NO: 290282 - DNA, 75 bp, synthetic construct
  source 1..75: mol_type = other DNA
gtatctataaattcggtggtatctgtggcatgttaattggtggactgtctttacttgcattaaatgcagcattgc

SEQ ID NO: 290283 - DNA, 75 bp, synthetic construct
  source 1..75: mol_type = other DNA
cgtataaaacaaggattaatcgcaaaagcacctcttgaaggttggcattatggccctaaagaaatcgttaaaaaa

SEQ ID NO: 290284 - DNA, 75 bp, synthetic construct
  source 1..75: mol_type = other DNA
gtttttgtctgaaaacaatgtttctttaaatttagaaactgtcaatttttataaagcaattaataatatatacaa

SEQ ID NO: 290285 - DNA, 75 bp, synthetic construct
  source 1..75: mol_type = other DNA
gccaggctggtggatgggcgcgccgtggacagtgaaaaaatatattgatgatgtattcaccgaaggtcacgggac

SEQ ID NO: 290286 - DNA, 75 bp, synthetic construct
  source 1..75: mol_type = other DNA
acacctgcgaggactattgcgattacggtacgcagcattgggaaaaactttaccattcgctgcacatttcgagta

SEQ ID NO: 290287 - DNA, 75 bp, synthetic construct
  source 1..75: mol_type = other DNA
caaaaaacttcggtcgatgttcatcaatcatccctttgcagagaaaataaaggttaaaaattttcatgcttggtg

SEQ ID NO: 290288 - DNA, 75 bp, synthetic construct
  source 1..75: mol_type = other DNA
tcattattgatgcagcgagaacacgggataatagcgatgatttgagtgaggatataaagagactctatgtaggtt

SEQ ID NO: 290289 - DNA, 75 bp, synthetic construct
  source 1..75: mol_type = other DNA
aagtaaaaaccgtgatgaatttagtgtcgatgcaccaaccatcatttctatcctggatactcaacaggaacaact

SEQ ID NO: 290290 - DNA, 75 bp, synthetic construct
  source 1..75: mol_type = other DNA
ctgggtgcttccggcaatcgccagggggcgctgtatccgcttttaagtaaacacgatgaagcgctaaaccgtttt

SEQ ID NO: 290291 - DNA, 75 bp, synthetic construct
  source 1..75: mol_type = other DNA
acatgacggagctggaaaaacagttgctgagcgcattagagcagctacagcaggactactcgaaaaggctggacg

SEQ ID NO: 290292 - DNA, 75 bp, synthetic construct
  source 1..75: mol_type = other DNA
atcgagccgatcggccgcgcatcgatgcctggcagaccgtggtgaacggcagactggggctgcatgatccaaacg

SEQ ID NO: 290293 - DNA, 75 bp, synthetic construct
  source 1..75: mol_type = other DNA
ttatttcaccacctccgggcttcggtggtctcggctatacccctacagcgagagcttgtgttaacatttcaatac

SEQ ID NO: 290294 - DNA, 75 bp, synthetic construct
  source 1..75: mol_type = other DNA
aacgctttaatgtcaccacctctgcgcaatctatcgagcaactttccaccttcctgaacgaacgctggaaaggcg

SEQ ID NO: 290295 - DNA, 75 bp, synthetic construct
  source 1..75: mol_type = other DNA
tgctgctcgaccatgctgaacgcgatggtctggacggatttatcaccatcaccggtggcaaactgatgacctacc

SEQ ID NO: 290296 - DNA, 75 bp, synthetic construct
  source 1..75: mol_type = other DNA
caagaagagctgctcgggatcttcccatcagatctcatcatctgcaaagacgaaataaatgaattcatgtcaaaa

SEQ ID NO: 290297 - DNA, 75 bp, synthetic construct
  source 1..75: mol_type = other DNA
atccggtcactcgtccagaaaggactacctgtacgcatccagcaggcggcagatatctgtcgtattgtcggcaat

SEQ ID NO: 290298 - DNA, 75 bp, synthetic construct
  source 1..75: mol_type = other DNA
tgagttccgaatgtcaacatgctctcattgtggtgaagatgcctattggtatcagggcaacatgttgatccctgc

SEQ ID NO: 290299 - DNA, 75 bp, synthetic construct
  source 1..75: mol_type = other DNA
gccggaactggctccgtgggcagaacaacttcaggcgcagtggccaatgcccttgcccggttgccatcgtttatt

SEQ ID NO: 290300 - DNA, 75 bp, synthetic construct
  source 1..75: mol_type = other DNA
gtacgggcagcagccaacgggaagcggcaattatcggcggcggtattgccagcgcgttgttgtcgctggcgctgt

SEQ ID NO: 290301 - DNA, 75 bp, synthetic construct
  source 1..75: mol_type = other DNA
tggcgaacgggcatcaaattagccgtttcagccaaacatcgcctctgccggtgtattcagttgccggtcaggtta

SEQ ID NO: 290302 - DNA, 75 bp, synthetic construct
  source 1..75: mol_type = other DNA
gatacggcgtacagtgaggacgatcagcagcagaatcgccagcggttgattgattgtttcccgcaggcacagtgg

SEQ ID NO: 290303 - DNA, 75 bp, synthetic construct
  source 1..75: mol_type = other DNA
tagcaatacgctggcggcgttaaatccaaatcggttatgggtgcggaagttgttgaaagggaaagcggttaaggc

SEQ ID NO: 290304 - DNA, 75 bp, synthetic construct
  source 1..75: mol_type = other DNA
tctgtttaacgccatggcaaggctggcgcgtccgggcggcacgctggcgacatttacgtctgccggttttgtccg

SEQ ID NO: 290305 - DNA, 75 bp, synthetic construct
  source 1..75: mol_type = other DNA
gcaactgaggtttgcggataatcagcaagcgacacatagcgtggtggtactggcgaacgggcatcaaatcaaccg

SEQ ID NO: 290306 - DNA, 75 bp, synthetic construct
  source 1..75: mol_type = other DNA
agttttgagaaatttcccctcacccgtgcggatttagccttagcgcatcaacactggccggaactggctccgtgg

SEQ ID NO: 290307 - DNA, 75 bp, synthetic construct
  source 1..75: mol_type = other DNA
ccggggcttgcaggaagctggattcacgatgcaaaagcgtaagggttttgggcggaaacgggagatgctttgcgg

SEQ ID NO: 290308 - DNA, 75 bp, synthetic construct
  source 1..75: mol_type = other DNA
tatgacggttatctcacgccacaaaatccggcgaatcaacatcattgtattggtgccagttatcatcgcggcagc

SEQ ID NO: 290309 - DNA, 75 bp, synthetic construct
  source 1..75: mol_type = other DNA
atcagcagcagaatcgccagcggttgattgattgtttcccgcaggcacaatgggcaaaagaggttgatgtcagtg

SEQ ID NO: 290310 - DNA, 75 bp, synthetic construct
  source 1..75: mol_type = other DNA
atcagcagcagaatcgccagcggttgattgattgtttcccacacgcgcaatgggcaaaagaggttgatgtcagtg

SEQ ID NO: 290311 - DNA, 75 bp, synthetic construct
  source 1..75: mol_type = other DNA
gaagagacggcgtacagtgaagacaatcagcagcagaatcgccagcgattgattgattgtttcccacacgcacaa

SEQ ID NO: 290312 - DNA, 75 bp, synthetic construct
  source 1..75: mol_type = other DNA
tgaagtgcagtacgccgtagaaaatctaaacgttaatagcctgctggatttacgtcgccgtacccgtgtcggaat

SEQ ID NO: 290313 - DNA, 75 bp, synthetic construct
  source 1..75: mol_type = other DNA
ctttctgttgccagtgggttacaacgcattggtcgcgccggacatcaggttggcggtgtatctaaagggctgttt

SEQ ID NO: 290314 - DNA, 75 bp, synthetic construct
  source 1..75: mol_type = other DNA
atgcgcgtaaagccatctccgtcactgagcgtcagcgctacattctgcgcattcgcaccctaaccaaagcagtgg

SEQ ID NO: 290315 - DNA, 75 bp, synthetic construct
  source 1..75: mol_type = other DNA
accaaagcagtggcagaagcatactacgcttcccgtgaagccctcggcttcccgatgtgcaacaaagataagtaa

SEQ ID NO: 290316 - DNA, 75 bp, synthetic construct
  source 1..75: mol_type = other DNA
ctatcagcagcattacgctgccgtttgtcgaaaatgagagccgtgcacgggcagtgaaggatcagattgacgcaa

SEQ ID NO: 290317 - DNA, 75 bp, synthetic construct
  source 1..75: mol_type = other DNA
atgtttaaactcacgacccccaccagtcttccccttctcaacctgcccgcctccgcactggtggccctcagcaat

SEQ ID NO: 290318 - DNA, 75 bp, synthetic construct
  source 1..75: mol_type = other DNA
ctgatcaccacacccgaatcactctatctgatgctgacctcccgcgcgcgaaacgctacgcggcgtcgaaacggt

SEQ ID NO: 290319 - DNA, 75 bp, synthetic construct
  source 1..75: mol_type = other DNA
tgaagacaatgcacgagttaatgtcgccatgaaccagacccggatcaatcatcttgccgttcgtcggttaaccga

SEQ ID NO: 290320 - DNA, 75 bp, synthetic construct
  source 1..75: mol_type = other DNA
ccccggagccggtatctggcaggccgatgtgcctaatgaggtagattgcacaggccgtaagaaccaaaccacgac

SEQ ID NO: 290321 - DNA, 75 bp, synthetic construct
  source 1..75: mol_type = other DNA
gaagccactggttgctcaggtgaaaaggcatctctttccctatagccgctattttacgctgagtacggaaagtat

SEQ ID NO: 290322 - DNA, 75 bp, synthetic construct
  source 1..75: mol_type = other DNA
cttcctgttcacctgcttcgagcagtacgagaaagaagcgcagcaactgctggcgctggaaaatccgctgccgct

SEQ ID NO: 290323 - DNA, 75 bp, synthetic construct
  source 1..75: mol_type = other DNA
aagtcggcgcgggaacctctcacccaatgacctgtctgcgcgcgctggggccagaaccgatggcggctgcttatg

SEQ ID NO: 290324 - DNA, 75 bp, synthetic construct
  source 1..75: mol_type = other DNA
acccaccgagccggtatctggcaggcccgatgtgcctaatgaggtagattgcacaggccgtaagaaccaaaccac

SEQ ID NO: 290325 - DNA, 75 bp, synthetic construct
  source 1..75: mol_type = other DNA
aaagtgaaggtttttgtcaggatatcgttcaggcgctggttgccccgctacaacaagaaatgaagctggacccga

SEQ ID NO: 290326 - DNA, 75 bp, synthetic construct
  source 1..75: mol_type = other DNA
cccgtatccaacaagctgctgacatttgccgtatcgttggtaatcaggccgtgcatcccggagagattagccttg

SEQ ID NO: 290327 - DNA, 75 bp, synthetic construct
  source 1..75: mol_type = other DNA
tgatggtccacttgggcgagtcggggaaaaacattaacgacgacattaagtctctcgtggaaaaagggttacctc

SEQ ID NO: 290328 - DNA, 75 bp, synthetic construct
  source 1..75: mol_type = other DNA
atacccttctgctgacggggcaggaaaagcaatccatgatgagattaacctcgataacgcaagaaatagattgac

SEQ ID NO: 290329 - DNA, 75 bp, synthetic construct
  source 1..75: mol_type = other DNA
tctcactggcgaaaaacagtcgctacatgcccctgtcgtcgttaacgctgccgggatctgggggcaacatattgc

SEQ ID NO: 290330 - DNA, 75 bp, synthetic construct
  source 1..75: mol_type = other DNA
tatccttaccgctcatgaagtcacggggctgattcgtgaaggtgcgacggtgtgcggcgttcgtgtacgtaacca

SEQ ID NO: 290331 - DNA, 75 bp, synthetic construct
  source 1..75: mol_type = other DNA
aacgttttaacgtcacgacgtccgcgcaatctatcgagcaactttccaccttccttaacgaacgctggaaaggcg

SEQ ID NO: 290332 - DNA, 75 bp, synthetic construct
  source 1..75: mol_type = other DNA
cgttcaggcgctggttgccccgctacaacaagagatgaaactggacccaacgccgattgctcaccgtactcacgg

SEQ ID NO: 290333 - DNA, 75 bp, synthetic construct
  source 1..75: mol_type = other DNA
caacaagagatgaaactggacccgacgccgattgctcaccgtacccacggcctgaatcccaacaatctcaataaa

SEQ ID NO: 290334 - DNA, 75 bp, synthetic construct
  source 1..75: mol_type = other DNA
catttcgttgcgcaatctggaccaggctcaggtgatcctgctcggcgtttctcgctgtggtaaaacccccaccag

SEQ ID NO: 290335 - DNA, 75 bp, synthetic construct
  source 1..75: mol_type = other DNA
ttgagggtgaggcttttaattgtccatattgcggggtttatgctcggcaattttggcgtacattattcggtagta

SEQ ID NO: 290336 - DNA, 75 bp, synthetic construct
  source 1..75: mol_type = other DNA
tacctgtacgcatccagcaggcggcagatatctgtcgtattgtcggcaatcaggcggtccatcccggagagatta

SEQ ID NO: 290337 - DNA, 75 bp, synthetic construct
  source 1..75: mol_type = other DNA
cattgcggtgatgatgcttattggtatgacggcaatatgattattccggcggctggcaatgttgaactaccaaat

SEQ ID NO: 290338 - DNA, 75 bp, synthetic construct
  source 1..75: mol_type = other DNA
gataacggaacgcggttattccgttgccgaagtatccgaccgtctgggtgtttctgcgcacagcctctacaagtg

SEQ ID NO: 290339 - DNA, 75 bp, synthetic construct
  source 1..75: mol_type = other DNA
tgtcggcgcacagcctatataaatggctccgggctgttaagcctgacaacagtggacagcaggcacaggatttac

SEQ ID NO: 290340 - DNA, 75 bp, synthetic construct
  source 1..75: mol_type = other DNA
agcgggcatcaggcgcaggatttactggatgcgcggacggagattctcaggcttaaagcgcagcttaaacgtact

SEQ ID NO: 290341 - DNA, 75 bp, synthetic construct
  source 1..75: mol_type = other DNA
ttgcccacatctgcctgccgatgcgtgcgactgccgcaagccgaaggtgaaactggtagagcgctatctgctgga

SEQ ID NO: 290342 - DNA, 75 bp, synthetic construct
  source 1..75: mol_type = other DNA
gcctttggtcgcaccctacgccaggccatccgcgtggaaggcgacaccctgccctcgtcgaaaggagtgctgtaa

SEQ ID NO: 290343 - DNA, 75 bp, synthetic construct
  source 1..75: mol_type = other DNA
tgattttgacggtccgcataacctgatgatgcaaattttcacctctcagggcgtaacgtttgatgaggtattgat

SEQ ID NO: 290344 - DNA, 75 bp, synthetic construct
  source 1..75: mol_type = other DNA
cgggcattatagcctggtggtgctggatttaggtttacccgatgaagatgggctgcattttctcgcccgtatccg

SEQ ID NO: 290345 - DNA, 75 bp, synthetic construct
  source 1..75: mol_type = other DNA
cgctttccggcagggcggaaaactggcatcagattaactggcgtcagatacaccgtcaggtcagagggctacagg

SEQ ID NO: 290346 - DNA, 75 bp, synthetic construct
  source 1..75: mol_type = other DNA
cacccgaagcatctgggcggcggtgacgagcttgggaatctggtgatgctgcatccgggctgccacattcagttt

SEQ ID NO: 290347 - DNA, 75 bp, synthetic construct
  source 1..75: mol_type = other DNA
tgggttttgtatttggtgcaatctattttcttgtatacattgccatcgaatacccatggttgaaatatctctggg

SEQ ID NO: 290348 - DNA, 75 bp, synthetic construct
  source 1..75: mol_type = other DNA
tatatttggaataatatattttttaacatatattgccattgaatacccatggctgaaatacctcctgggggggat

SEQ ID NO: 290349 - DNA, 75 bp, synthetic construct
  source 1..75: mol_type = other DNA
ttggtggcagcatatttagcatgcgaggggttattgacttttcaagccgatgttgcgttggcaggtggggtcacc

SEQ ID NO: 290350 - DNA, 75 bp, synthetic construct
  source 1..75: mol_type = other DNA
tctcagcaccgaaatgatcgagcacttcttccgttcgctctcatacaccatgggcgtgacgctacacctgaaaac

SEQ ID NO: 290351 - DNA, 75 bp, synthetic construct
  source 1..75: mol_type = other DNA
attaacccctgcattgggcatatgaaggtagaggacgttaagccacgccacattgacgacatgttgaaaggtatc

SEQ ID NO: 290352 - DNA, 75 bp, synthetic construct
  source 1..75: mol_type = other DNA
aacccgtgatgaactcattcgtttttttcaggccatgcgcacagctaaaggattcagccgtgagaatgaactcac

SEQ ID NO: 290353 - DNA, 75 bp, synthetic construct
  source 1..75: mol_type = other DNA
gggatgaattcgacttagatggcgcgatttggcatctaccagaacaacgaactaaaaatggtgatgctatcgaca

SEQ ID NO: 290354 - DNA, 75 bp, synthetic construct
  source 1..75: mol_type = other DNA
aactagatcccattccgtcagcaatgattggtctgtcgctaaacactgccgcctatgctgccgaaacgctgcgcg

SEQ ID NO: 290355 - DNA, 75 bp, synthetic construct
  source 1..75: mol_type = other DNA
gtgcgctggctggcgcgtttttatatctctatttttcgtggtacgccgctcatcgcacaactgtttatgatctat

SEQ ID NO: 290356 - DNA, 75 bp, synthetic construct
  source 1..75: mol_type = other DNA
atcagtattttgatgagcgtaaagcagcactggcacagtgggcagatctgctggtggcactggaaagcggaaaag

SEQ ID NO: 290357 - DNA, 75 bp, synthetic construct
  source 1..75: mol_type = other DNA
agatttcgatggcccgcacaacctgatgatgcagatcttcacctcgcaaggcgtgcagtttgatgaagtgctgat

SEQ ID NO: 290358 - DNA, 75 bp, synthetic construct
  source 1..75: mol_type = other DNA
gaaaccctgaactggccgatgattggtgagcaactcactaaacgcgatcgttatgcccacgtagtgcgcaacact

SEQ ID NO: 290359 - DNA, 75 bp, synthetic construct
  source 1..75: mol_type = other DNA
gtggagagcctgttcaaagtctttggtcgtacgctgcgccaggcgatccgcgtggaaggcgatacccttccctcc

SEQ ID NO: 290360 - DNA, 75 bp, synthetic construct
  source 1..75: mol_type = other DNA
tgctatcctaaaaattacacaatgcccttctggcgattccgctataagtttgctggcaaacaacgggcgatggtt

SEQ ID NO: 290361 - DNA, 75 bp, synthetic construct
  source 1..75: mol_type = other DNA
atcagtatttcgatgaacggacttcggcgctggcgaaatggaccaatctgttagtgtcgctggaacgcggggaac

SEQ ID NO: 290362 - DNA, 75 bp, synthetic construct
  source 1..75: mol_type = other DNA
atattcaactggcggaaaacatgggcattaatggtttacgctacgaccgcgaaaccctgaactggccaatgattg

SEQ ID NO: 290363 - DNA, 75 bp, synthetic construct
  source 1..75: mol_type = other DNA
cccgaagtcgaacggcaagctgcgtccgctcggaataccgaccatgagagacagagccatgcaggcgttatacct

SEQ ID NO: 290364 - DNA, 75 bp, synthetic construct
  source 1..75: mol_type = other DNA
cgtgacctttgatggcgatcgcgaagaagcctttgccggagaagcgatcaccctggtgctgacggatgagatcga

SEQ ID NO: 290365 - DNA, 75 bp, synthetic construct
  source 1..75: mol_type = other DNA
atcctgatcgaccggatgacctcggccacggtcggcgcgggcatgatccatttctccctgcgccgcgcgcacaac

SEQ ID NO: 290366 - DNA, 75 bp, synthetic construct
  source 1..75: mol_type = other DNA
gcgcgtccaccgcggacctggcggtgatcctgatcgatgcgcgcaagggcgtgctgacccagacccgccggcaca

SEQ ID NO: 290367 - DNA, 75 bp, synthetic construct
  source 1..75: mol_type = other DNA
agtaaatacgctaaagccggaatgatatttcctctccccaaaaaagttggaagacgctggcgagtggatccgcaa

SEQ ID NO: 290368 - DNA, 75 bp, synthetic construct
  source 1..75: mol_type = other DNA
ttgccggtaagaagacgcgtgctcgtgttgatggcattcgttatcaggttgatatcaataaccttacccaacgcg

SEQ ID NO: 290369 - DNA, 75 bp, synthetic construct
  source 1..75: mol_type = other DNA
gaagcctttgccggagaagcgatcaccctggtgctgacggatgagatcgacatcagccgtggcgatctgctgctg

SEQ ID NO: 290370 - DNA, 75 bp, synthetic construct
  source 1..75: mol_type = other DNA
gcgaggctgtgacatcaaacgagacgaaaatcagagacgctatagccctgttcacagcctcgacagaggaatcgc

SEQ ID NO: 290371 - DNA, 75 bp, synthetic construct
  source 1..75: mol_type = other DNA
agggtaacccggaagaagtccgggaactcatcgatgccacgccatttgcgaagaaatacacgtccggtgttctgt

SEQ ID NO: 290372 - DNA, 75 bp, synthetic construct
  source 1..75: mol_type = other DNA
agtcagcaggtgcagcacttgagcgagcggacagaacgcttgagccagttatacagcgagaactggagataagag

SEQ ID NO: 290373 - DNA, 75 bp, synthetic construct
  source 1..75: mol_type = other DNA
tcaacaccctggagcacctcgccggcaagacgctgggcctgaatggcatcgccgtgtgcaacctgtccttcgacc

SEQ ID NO: 290374 - DNA, 75 bp, synthetic construct
  source 1..75: mol_type = other DNA
tacgggcatgatgttactggggatggtcattttcctgtttaccgcgagtggcgggacgctctggtatcttggcgg

SEQ ID NO: 290375 - DNA, 75 bp, synthetic construct
  source 1..75: mol_type = other DNA
tgcgttatcacgaggacagcaacgggcgttttcttgtgttgccgaaggggatgaaagccgaaacgaactggacgg

SEQ ID NO: 290376 - DNA, 75 bp, synthetic construct
  source 1..75: mol_type = other DNA
ttgaatttcatattaataaagttaacgaacattatcacgtgcctttgttactcagccaatatggatattcaacct

SEQ ID NO: 290377 - DNA, 75 bp, synthetic construct
  source 1..75: mol_type = other DNA
atgccagacctagaaataatgcccttacaaagtccagatttttataaaaaaaacaaaagagcaatatacgagggc

SEQ ID NO: 290378 - DNA, 75 bp, synthetic construct
  source 1..75: mol_type = other DNA
cttagttttgatacgtatctgcaggacaatgttaaatatagagtgataattaataatctttatggcagtgagttt

SEQ ID NO: 290379 - DNA, 75 bp, synthetic construct
  source 1..75: mol_type = other DNA
ttgaaaacgagttggtaacacgcaacacgttgaaaagtattttcgaagcggaaggctatgatgttttcgaagcga

SEQ ID NO: 290380 - DNA, 75 bp, synthetic construct
  source 1..75: mol_type = other DNA
ggcacatcaagataaaggcggaggctaacccttatctgcctgaatgggaaccgtactttgagcaacgccttgagc

SEQ ID NO: 290381 - DNA, 75 bp, synthetic construct
  source 1..75: mol_type = other DNA
gaaaaccaaatgggaggctatcttcgatatgaagagaaccggatatcaccctaaaccgctgcggcgggtgtatat

SEQ ID NO: 290382 - DNA, 75 bp, synthetic construct
  source 1..75: mol_type = other DNA
gcagcagcatctttttatagtaattttaatcttccatgtttacttattttctttggaacatcatgcttcaaatga

SEQ ID NO: 290383 - DNA, 75 bp, synthetic construct
  source 1..75: mol_type = other DNA
tggcttctcaccgtttcatgccggactgatgatgatcccgatggtgcttggcagcatggggatgaagcggattgt

SEQ ID NO: 290384 - DNA, 75 bp, synthetic construct
  source 1..75: mol_type = other DNA
aatattttctttaccgccatcgtgctgtttactctcggttcactgttttgcgcgctttccggcacgctgaacgaa

SEQ ID NO: 290385 - DNA, 75 bp, synthetic construct
  source 1..75: mol_type = other DNA
gcacccgtaccttttcgctgggtctggcggggagttttgccggacgtattggcagcggtatgttgccctttatga

SEQ ID NO: 290386 - DNA, 75 bp, synthetic construct
  source 1..75: mol_type = other DNA
gtagacgtgacgatccgccgtattcgtaaacatttcgaatctacgccggatacgccagaaatcatcgccaccatt

SEQ ID NO: 290387 - DNA, 75 bp, synthetic construct
  source 1..75: mol_type = other DNA
ggcgcatcgaaaaatctggctgaaagcatcgacaaggtgctgaggcccaccagccttaaatgtggtgggcgacct

SEQ ID NO: 290388 - DNA, 75 bp, synthetic construct
  source 1..75: mol_type = other DNA
ctgatgatgatcccgatggtgcttggcagcatgggaatgaagcgaattgtggtacaggtggtgaatcgctttggt

SEQ ID NO: 290389 - DNA, 75 bp, synthetic construct
  source 1..75: mol_type = other DNA
atgaaaattgaacaaatcggaatggcagccttccggcagcaggctgaaagcggtggcgtggatgagttcgtcgtg

SEQ ID NO: 290390 - DNA, 75 bp, synthetic construct
  source 1..75: mol_type = other DNA
aggaaggaaactttccagacagagtaaaaatagagccaagatgtgtcgcctttgtcgaaagtgagattgatgaat

SEQ ID NO: 290391 - DNA, 75 bp, synthetic construct
  source 1..75: mol_type = other DNA
ccgcagttttggtgaacgaatcacagacaaagatgccatgcaccaggctgttgttcagtatgcagagcgggccgc

SEQ ID NO: 290392 - DNA, 75 bp, synthetic construct
  source 1..75: mol_type = other DNA
cgtcaggcttaccgtgaactgcgattgttggctggtcaggcggcaaggcaacagggggacaaaaaatgcaggtgc

SEQ ID NO: 290393 - DNA, 75 bp, synthetic construct
  source 1..75: mol_type = other DNA
gaggtgaacgttggggcatcaaactcgcacatggaacaaaatggggaatacgcagcgttaaaaaactggatcgct

SEQ ID NO: 290394 - DNA, 75 bp, synthetic construct
  source 1..75: mol_type = other DNA
ggtgtcctattttctacaggaacgccgtggcgattacaagacgtggctgtctcttgaccgtgccgccgcgttcct

SEQ ID NO: 290395 - DNA, 75 bp, synthetic construct
  source 1..75: mol_type = other DNA
atggtatcccttatgttctggtgttactgggcgtgtgtacggggagtaaaagagttgagcgttatctgccggagg

SEQ ID NO: 290396 - DNA, 75 bp, synthetic construct
  source 1..75: mol_type = other DNA
gtggaaaagcttccattgcccacacaggacagccgggacattattgccgccgcatgcagagccttaaacgtaagc

SEQ ID NO: 290397 - DNA, 75 bp, synthetic construct
  source 1..75: mol_type = other DNA
atatcagtagtatttgggggtatttaattatctggttaattgtcgtcatgtttttctttaaagtcttaatggtaa

SEQ ID NO: 290398 - DNA, 75 bp, synthetic construct
  source 1..75: mol_type = other DNA
atttattcagtatcaataccgcaacactgggctataaaacgccgctacccgccattattgatgcctgcgctgcac

SEQ ID NO: 290399 - DNA, 75 bp, synthetic construct
  source 1..75: mol_type = other DNA
caaacagcgaattacagagtatcagcgtcagcagctcgtctatgagctgaagtccagaggatttgatggcagcga

SEQ ID NO: 290400 - DNA, 75 bp, synthetic construct
  source 1..75: mol_type = other DNA
atgaatcccgtgatcctgtccaacgcgaaatggagcaggataagctcattagccgggcaaagctggcgcatgagc

SEQ ID NO: 290401 - DNA, 75 bp, synthetic construct
  source 1..75: mol_type = other DNA
cggcaggcccaacccgaactggacaaatgcgacggtaagacaaagcagtgattatttggtcggcatgtttgctgc

SEQ ID NO: 290402 - DNA, 75 bp, synthetic construct
  source 1..75: mol_type = other DNA
ggcagcgagaaagaggtcgatttactccttcgcggcggcagtattccgtcaggagcaggcttgcgtatcttctat

SEQ ID NO: 290403 - DNA, 75 bp, synthetic construct
  source 1..75: mol_type = other DNA
caaacagcgaattacagaccatcagcgacagcagcttgtctatgaactgaagtccagaggatttgacggcagcga

SEQ ID NO: 290404 - DNA, 75 bp, synthetic construct
  source 1..75: mol_type = other DNA
tgaagccgaaaaggcgtaaagactacaaacagcgaattacagatcatcagcatcagcagctcgtctatgaactga

SEQ ID NO: 290405 - DNA, 75 bp, synthetic construct
  source 1..75: mol_type = other DNA
acagggggacaaaaaagcaggtgcggcggtactggataacccgcgcattgatgccatcctggctgctgctgatgc

SEQ ID NO: 290406 - DNA, 75 bp, synthetic construct
  source 1..75: mol_type = other DNA
cagaccaaacccgacctggacaaacgcgacggtaagacaaagtagcgattatctggtcggcatgtttgctgcatt

SEQ ID NO: 290407 - DNA, 75 bp, synthetic construct
  source 1..75: mol_type = other DNA
cggcagacccaacccgacctggacaaacgcgacggtaagacaaagtagcgattatctggtcggcatgtttgctgc

SEQ ID NO: 290408 - DNA, 75 bp, synthetic construct
  source 1..75: mol_type = other DNA
tgcgccgcgatgcactgagtgagcaggtctgggagcgttatttctttaatgaatctcgtgatcctgtccagcgcg

SEQ ID NO: 290409 - DNA, 75 bp, synthetic construct
  source 1..75: mol_type = other DNA
tgctggctggtcaggcggcaaggcagcagggtgacaaaaaagcaggtgcgccggtactggataacccgcgccttg

SEQ ID NO: 290410 - DNA, 75 bp, synthetic construct
  source 1..75: mol_type = other DNA
cgcggaaatgcgcggtgactgcgccgttttctacaccatcacctgtccgtcacgtttccattccacgctaaataa

SEQ ID NO: 290411 - DNA, 75 bp, synthetic construct
  source 1..75: mol_type = other DNA
ctgagccgcatcatgacggtactgtgcactggcatctcatgtgtttcatgcgtaaaaaagaccgccgcgccatca

SEQ ID NO: 290412 - DNA, 75 bp, synthetic construct
  source 1..75: mol_type = other DNA
ctatcatagtaacctttgccctgacctggtttatcgcctttaaagatacgcctgaagagcaagaagaggtcagcg

SEQ ID NO: 290413 - DNA, 75 bp, synthetic construct
  source 1..75: mol_type = other DNA
acatgggaaaaggtggctgcagaaaccctgcgactggatgtcataccgcctgcgtttgagcaactccgccggaaa

SEQ ID NO: 290414 - DNA, 75 bp, synthetic construct
  source 1..75: mol_type = other DNA
atgagcatgtgtcttgatgccgcttgtggtgatttgtacgcctccgatgatgttaagccagaagaaatccgcaag

SEQ ID NO: 290415 - DNA, 75 bp, synthetic construct
  source 1..75: mol_type = other DNA
ctgagctgataaacccgcgcaaaggaacaccgacaagctacatcgcgaaatacattagtaagaacattgacgggc

SEQ ID NO: 290416 - DNA, 75 bp, synthetic construct
  source 1..75: mol_type = other DNA
actccttcgcggcggcagtattccgtcaggagcaggcctgcgtatcttctatcggaaccagcgtttgcaggaaga

SEQ ID NO: 290417 - DNA, 75 bp, synthetic construct
  source 1..75: mol_type = other DNA
atgagcatgtgccttgatgcagcttgtggtgatttgtatgccaccgatgacattaagccagaagaaatccgcaaa

SEQ ID NO: 290418 - DNA, 75 bp, synthetic construct
  source 1..75: mol_type = other DNA
aggtgaaacgcctgtccaccctggtagctgcgcatatgagtatgtgccttgatgcagcttgtggtgatttgtatg

SEQ ID NO: 290419 - DNA, 75 bp, synthetic construct
  source 1..75: mol_type = other DNA
gggttgcgctggtatggcgtgcgggtgtcagtgtggtgttcatggcacaaacctacagccttgaatgaaggcttt

SEQ ID NO: 290420 - DNA, 75 bp, synthetic construct
  source 1..75: mol_type = other DNA
gtcaccgtgggtaaagccgatctccctggcacgctgcaagcgagccagaaaaagctggatgaactgatcgaacag

SEQ ID NO: 290421 - DNA, 75 bp, synthetic construct
  source 1..75: mol_type = other DNA
gaaagaggtcgatttactccttcgcggcggcagtattccatcaggagcaggcttgcgtatcttctatcggaacca

SEQ ID NO: 290422 - DNA, 75 bp, synthetic construct
  source 1..75: mol_type = other DNA
tatggagcaggcggacaacattgccgactgggtgatgatgtcgccaggtgctgcgctgccggtgaataaagcggt

SEQ ID NO: 290423 - DNA, 75 bp, synthetic construct
  source 1..75: mol_type = other DNA
tcactgcattactgcgtaagtttgccatccgtgaagaccgcgaggagctgggcaataacactgggccgcgcttta

SEQ ID NO: 290424 - DNA, 75 bp, synthetic construct
  source 1..75: mol_type = other DNA
acctacagccttgaatgaaggctttccccgcctgcggtttgtgtggttgtcggtacaaataccgcgcattgtttc

SEQ ID NO: 290425 - DNA, 75 bp, synthetic construct
  source 1..75: mol_type = other DNA
ccctgcgtctggatgtcatcccacctgcgtttgagcaactccgtcggaaaagaaaccgccgtaaacccgtgccct

SEQ ID NO: 290426 - DNA, 75 bp, synthetic construct
  source 1..75: mol_type = other DNA
tcagttacctgaatgaagatattgattttgtgctgaatgagctgaaagccaaaggcctgtgccgcgattttctcg

SEQ ID NO: 290427 - DNA, 75 bp, synthetic construct
  source 1..75: mol_type = other DNA
tccttcacggtaatacgcaggtgtcccgtgcgtaataaaaaagcccctcagaccgtctcagcgcgtcatgacgcc

SEQ ID NO: 290428 - DNA, 75 bp, synthetic construct
  source 1..75: mol_type = other DNA
gcgatggtctggacgggtttatcaccatcaccggtggcaaactgatgacctatcggctgatggcggaatgggcta

SEQ ID NO: 290429 - DNA, 75 bp, synthetic construct
  source 1..75: mol_type = other DNA
ctgcggatttgccctgccgaacacgccgctaccaccacgcgaggacatcaaagcctttgtcgaactgcatattga

SEQ ID NO: 290430 - DNA, 75 bp, synthetic construct
  source 1..75: mol_type = other DNA
gaatacggtgaatgtggtgccgggtaaaaccacgttcaccattgattgtcgtcataccgacgccgccgtgctgcg

SEQ ID NO: 290431 - DNA, 75 bp, synthetic construct
  source 1..75: mol_type = other DNA
ggcaagaacatttggccacctaatatatgatcataatagctacctaagttataggcagcatgataataatgtcgt

SEQ ID NO: 290432 - DNA, 75 bp, synthetic construct
  source 1..75: mol_type = other DNA
cggcaggcccaaccctacctggacaaacgcgacggtaagacaaagcagcgattatctggtcggcatgtttgctgc

SEQ ID NO: 290433 - DNA, 75 bp, synthetic construct
  source 1..75: mol_type = other DNA
gcaaatatcaccttatcagaacagcttatgaaattaacgaagagccgactgcttatggcgatcacggtattcgta

SEQ ID NO: 290434 - DNA, 75 bp, synthetic construct
  source 1..75: mol_type = other DNA
acaaggagttgcacgattacctgcacagtatgagcaaaaaagagcgccgggaactggcagcaaggttacgcctgg

SEQ ID NO: 290435 - DNA, 75 bp, synthetic construct
  source 1..75: mol_type = other DNA
ttactgcattgttgcgtaagtttgccatccgtgaagaccgtgaggaactgggcaataacacggggccacgcttta

SEQ ID NO: 290436 - DNA, 75 bp, synthetic construct
  source 1..75: mol_type = other DNA
agagggcaagatctgtactcatgcagtgaaatggaaaatggttcgtaaggccgttgacgttcaggaggcggcagc

SEQ ID NO: 290437 - DNA, 75 bp, synthetic construct
  source 1..75: mol_type = other DNA
aaggccattaacccttatctggatccggcggaagttgcgccggagtctgcactttcaaacctgatcactctgtac

SEQ ID NO: 290438 - DNA, 75 bp, synthetic construct
  source 1..75: mol_type = other DNA
gattcatatcaactttttgttaatgcatataagcctaaacttcctgcaagaaaaaataaaaaaactgaagaaaat

SEQ ID NO: 290439 - DNA, 75 bp, synthetic construct
  source 1..75: mol_type = other DNA
ctgtttgtcattaaccgcctgctgcggatgccgctggggcgtgcgtgggaagcgttgcgtgaagacgagatcgcc

SEQ ID NO: 290440 - DNA, 75 bp, synthetic construct
  source 1..75: mol_type = other DNA
agggctttgtcagcccggaatccttcacctttgccgaatcggcatttgtgctggcgatagtggtgctcggtggca

SEQ ID NO: 290441 - DNA, 75 bp, synthetic construct
  source 1..75: mol_type = other DNA
atcgcaggagcaagaagctggaaagagtttttgctgtttgcggattgataatcttgagtttatgagccgccatta

SEQ ID NO: 290442 - DNA, 75 bp, synthetic construct
  source 1..75: mol_type = other DNA
ccagacgttcgttatgctgtgtgcctgcgcaatattacgttggcagcttgggtcgcgttggcgttatggattaat

SEQ ID NO: 290443 - DNA, 75 bp, synthetic construct
  source 1..75: mol_type = other DNA
aaggaggggaaagactatatgattctgaatggacatgggtgtttgaaaaagatataagtcgatacgaaaagtatt

SEQ ID NO: 290444 - DNA, 75 bp, synthetic construct
  source 1..75: mol_type = other DNA
aactggtggtcgacacggcttcagacatccgttggcagtgggtgtttatcggcacggcggtggtctttttcttcc

SEQ ID NO: 290445 - DNA, 75 bp, synthetic construct
  source 1..75: mol_type = other DNA
tgtcgattcagcatgttatcgaaaattgccgatgatgaaacaccgtggaatcaggtgttcaccagtgcacattat

SEQ ID NO: 290446 - DNA, 75 bp, synthetic construct
  source 1..75: mol_type = other DNA
cttaacgcttgaagaagcaaccgatgagatgcagtcattagatgatatgcttatttttggtgaaccagtaacaag

SEQ ID NO: 290447 - DNA, 75 bp, synthetic construct
  source 1..75: mol_type = other DNA
taatgctcggtggtttgatggtgctgatgatgatctggcgtccgcagggcttgctgcccatgacgcgcccgcaac

SEQ ID NO: 290448 - DNA, 75 bp, synthetic construct
  source 1..75: mol_type = other DNA
cgttgctctctgccgcgatgttttttgtcctggcgggcgtctttatgggcgtacaactggagctggatggcacca

SEQ ID NO: 290449 - DNA, 75 bp, synthetic construct
  source 1..75: mol_type = other DNA
cggcccgaatggcattagtcagatcccgaaaccgaccttttttggcctcgaatttagtcgtactgcccgtgaagg

SEQ ID NO: 290450 - DNA, 75 bp, synthetic construct
  source 1..75: mol_type = other DNA
ttcgatttgcaggtgctggagtccctgttgaagtggctggcgactcacccttgccacaaaaaaggcccgcgcttt

SEQ ID NO: 290451 - DNA, 75 bp, synthetic construct
  source 1..75: mol_type = other DNA
tggctgaccgcaggttaacccagctttccggcggccagcgccagcgtgcgtttctggcgatggtgctggcacagg

SEQ ID NO: 290452 - DNA, 75 bp, synthetic construct
  source 1..75: mol_type = other DNA
tcagtccggggctgaagaatacgcaaaaagagctgtctgacctcagtgagtgccggaccacacactacagcgatt

SEQ ID NO: 290453 - DNA, 75 bp, synthetic construct
  source 1..75: mol_type = other DNA
caccctgcctgatggaatatcagtaagctctcatgacgacgggacggaaataacggtcgtcatggataacagtca

SEQ ID NO: 290454 - DNA, 75 bp, synthetic construct
  source 1..75: mol_type = other DNA
cgcctctggtcaccagattttaatggacggcaactcaggcgataaagcgccaagtccgatggaaatggtgttgat

SEQ ID NO: 290455 - DNA, 75 bp, synthetic construct
  source 1..75: mol_type = other DNA
gtttcgcgagcggtggatctctctgccgagaagtattgttcggtagcgctgatgctagagaaagccgtgaatatt

SEQ ID NO: 290456 - DNA, 75 bp, synthetic construct
  source 1..75: mol_type = other DNA
gttgcgcgtgcggtggatctctcagccgaaaagtattgctcggtggcgctaatgctggaaaaagcagtgaatatt

SEQ ID NO: 290457 - DNA, 75 bp, synthetic construct
  source 1..75: mol_type = other DNA
tccccactttgcgcagatattgtggcgcagggatatcgccccgtcgctgaacaaagagaaacgtgcatttacttt

SEQ ID NO: 290458 - DNA, 75 bp, synthetic construct
  source 1..75: mol_type = other DNA
ccgctaaagatatccacctttttcggcgatgcggatgccattttcacggtcgttgatttgctaagccttttcacc

SEQ ID NO: 290459 - DNA, 75 bp, synthetic construct
  source 1..75: mol_type = other DNA
agcagagaggagatggtttccgggcagaccactaaacaggtgctattgctgaataccattcgcacggcgggtgat

SEQ ID NO: 290460 - DNA, 75 bp, synthetic construct
  source 1..75: mol_type = other DNA
tgtggggaatttctttgattttccgctaaagatatctacctttttcggcgatgcggatgccattttcacggtcgt

SEQ ID NO: 290461 - DNA, 75 bp, synthetic construct
  source 1..75: mol_type = other DNA
acgcaacagcagcaagcgctattgcataaacttggggtgcaatatctgcaaggatatttaattggtcgcccgcag

SEQ ID NO: 290462 - DNA, 75 bp, synthetic construct
  source 1..75: mol_type = other DNA
ttacggcttaatgatgcgcgttcactgtatccgctcaatttgccgtacgctgctgccgttgatgcaggaaaacga

SEQ ID NO: 290463 - DNA, 75 bp, synthetic construct
  source 1..75: mol_type = other DNA
ctacaaagaagattaaacaccgttgatagtgaacttgaaaaactcactgagacgctgatacagcttcctaacatc

SEQ ID NO: 290464 - DNA, 75 bp, synthetic construct
  source 1..75: mol_type = other DNA
ggtggtactgaagcgtactggcgggaaaattgactggcaggaagggcgcgatctgtggtggcacgacctgattga

SEQ ID NO: 290465 - DNA, 75 bp, synthetic construct
  source 1..75: mol_type = other DNA
aacgtcgatgatgcgctgaaaaatccgaacgtcaccagcgtagaacatgtggtggtactgaagcgcactggcgga

SEQ ID NO: 290466 - DNA, 75 bp, synthetic construct
  source 1..75: mol_type = other DNA
taccgccatcatctgggaaggcgacgacgccagccagagcaaacatatcagctataaaacactgcaccgcgatgt

SEQ ID NO: 290467 - DNA, 75 bp, synthetic construct
  source 1..75: mol_type = other DNA
catctccgcgtttgcgctgaaagcttaccgtggctacatcttcctgcgtggcgaatatatcgaagcggcagtgaa

SEQ ID NO: 290468 - DNA, 75 bp, synthetic construct
  source 1..75: mol_type = other DNA
aggcgataaagcgatcgaaggcacctgtagattcaatctgtcaatgcaacacccctttcaattatctctttcggt

SEQ ID NO: 290469 - DNA, 75 bp, synthetic construct
  source 1..75: mol_type = other DNA
gaagaggtcaacgccgaagatcctctgtttattctttatacctccggttctaccggaaaaccgaaaggcgtgctg

SEQ ID NO: 290470 - DNA, 75 bp, synthetic construct
  source 1..75: mol_type = other DNA
gcaaaggaacgccgacaagctacatcgcgaaatatatcagtaagaacattgacggtcgtggtctggctggcgaga

SEQ ID NO: 290471 - DNA, 75 bp, synthetic construct
  source 1..75: mol_type = other DNA
tgctggctggtcaggtggcaaggcaacagggtgacaaaaaagcaggtgcgccagtactggataacccgcgtcttg

SEQ ID NO: 290472 - DNA, 75 bp, synthetic construct
  source 1..75: mol_type = other DNA
tgcgccgcgaggctctgagtgatcaggtatgggagcgttatttctttaatgaatcacgtgatcctgtccagcgcg

SEQ ID NO: 290473 - DNA, 75 bp, synthetic construct
  source 1..75: mol_type = other DNA
atgttttttccgggtatgtaaaaagagtcaagttcattgatgatgtgctttttaaagttttgtttattattggat

SEQ ID NO: 290474 - DNA, 75 bp, synthetic construct
  source 1..75: mol_type = other DNA
attgatacaaatgttattatgcgtactgaatttaaataccagcatcgtttaaatcctgattttttcagttttctt

SEQ ID NO: 290475 - DNA, 75 bp, synthetic construct
  source 1..75: mol_type = other DNA
tcagcaaggaaacgggtaaatctctgcgtgataacgctgaatacgtgaatgcctgggcgtctctgcatcgtgttc

SEQ ID NO: 290476 - DNA, 75 bp, synthetic construct
  source 1..75: mol_type = other DNA
gcgcgatgacaaacagccagtgtggctggacgaataccgcagcaaaaacggttacgaaggcgcgcgtaaggcgct

SEQ ID NO: 290477 - DNA, 75 bp, synthetic construct
  source 1..75: mol_type = other DNA
tttggttgaatgccatcattacagagaaagcgccgtttaacccgtatgatgcacggtgtgcctgtaaacacattg

SEQ ID NO: 290478 - DNA, 75 bp, synthetic construct
  source 1..75: mol_type = other DNA
atggtcagagaggcatatttcgacgcccctaatctggggcgtttgattcaggatgtctggagcaatccgggcttt

SEQ ID NO: 290479 - DNA, 75 bp, synthetic construct
  source 1..75: mol_type = other DNA
atgaccactcatgaccgcgttcgtcttcagttgcaggcgcttgaatcgttactgcgtgaacatcagcactggcga

SEQ ID NO: 290480 - DNA, 75 bp, synthetic construct
  source 1..75: mol_type = other DNA
aactggtcagcattaagcgttaaacacatcctgacttcacgaagtgtattaggttaccttcccgctaagatttct

SEQ ID NO: 290481 - DNA, 75 bp, synthetic construct
  source 1..75: mol_type = other DNA
ttttagattctctgtcaaaacagctttcagaaaagaattaccatgattttgaaggtgagctaagaagtattataa

SEQ ID NO: 290482 - DNA, 75 bp, synthetic construct
  source 1..75: mol_type = other DNA
ttcagtatatttacgaggaaaagcaggttgttggtatgaatgatcaatgggagatttattacgatgaagttgaat

SEQ ID NO: 290483 - DNA, 75 bp, synthetic construct
  source 1..75: mol_type = other DNA
acatggtgtcgctggtacgaaacctggaagagtttttcgcccgtgagtcttgcggctggtgtacgccgtgccgcg

SEQ ID NO: 290484 - DNA, 75 bp, synthetic construct
  source 1..75: mol_type = other DNA
cgggtctgtgggaactgccgttcggcaccaccgcgcgtgaaatccttgaagattacgctggtggtatgcgtgacg

SEQ ID NO: 290485 - DNA, 75 bp, synthetic construct
  source 1..75: mol_type = other DNA
gttaatcaggtaaaagacgctggtctgaaagggcgtggtggcgcgggcttttctaccggcctgaaatggagcctg

SEQ ID NO: 290486 - DNA, 75 bp, synthetic construct
  source 1..75: mol_type = other DNA
tccagctgcaggcgcttgaagcattactgcgtgaacatcagcactggcaaaacgatgaaccccagccgcatcaat

SEQ ID NO: 290487 - DNA, 75 bp, synthetic construct
  source 1..75: mol_type = other DNA
tttgatacttctgtttttgcagaaggtattacttatgccctggaccggataaggtcagaaaatcgccccggataa

SEQ ID NO: 290488 - DNA, 75 bp, synthetic construct
  source 1..75: mol_type = other DNA
catctccgcgtttgcgctgaaagcttaccgtggctatatcttcctgcgcggcgaatatatcgaagcggcagtgaa

SEQ ID NO: 290489 - DNA, 75 bp, synthetic construct
  source 1..75: mol_type = other DNA
ccgaaaccactggcacgtggagaataagctgcactggcgtctggacgtggtaatgaatgaagacgactgcagaat

SEQ ID NO: 290490 - DNA, 75 bp, synthetic construct
  source 1..75: mol_type = other DNA
tggtgatgtattggtcacgttgcaaaaatacacacctgttatcgttatcgataaaagtgatagaaaatggctata

SEQ ID NO: 290491 - DNA, 75 bp, synthetic construct
  source 1..75: mol_type = other DNA
ttcatattgtttgcgatgtccctgatgaacttattgatttcacgtttgaatggaaaggactgaagaaattatgcg

SEQ ID NO: 290492 - DNA, 75 bp, synthetic construct
  source 1..75: mol_type = other DNA
ggcaacgttctaccagatgcaggacaacggtaaacccgttgaaggtcacgcttcccagatgcactacgaactggc

SEQ ID NO: 290493 - DNA, 75 bp, synthetic construct
  source 1..75: mol_type = other DNA
ggcgcaaccggtcgtccggtagcgttgctggcacagttcctgttaaaccgcgccgggtttaacggcgaagagtaa

SEQ ID NO: 290494 - DNA, 75 bp, synthetic construct
  source 1..75: mol_type = other DNA
aggtttaaccttcgactccggcggtatctcgatcaagccttcagaaggcatggatgagatgaagtacgatatgtg

SEQ ID NO: 290495 - DNA, 75 bp, synthetic construct
  source 1..75: mol_type = other DNA
aaccgctggcacgtggagaataagctgcactggcgtctggacgtggtaatgaatgaagacgactgcaaaataaga

SEQ ID NO: 290496 - DNA, 75 bp, synthetic construct
  source 1..75: mol_type = other DNA
tcagtgaaaagagtcacggcagagaagaaatccgtcttcatattgtttgcgatgtccctgatgaacttattgatt

SEQ ID NO: 290497 - DNA, 75 bp, synthetic construct
  source 1..75: mol_type = other DNA
cagcgaatatttattggccgtgatccgtagcaaaccggatgccgtgatttgcctggcgaccggagccacgccatt

SEQ ID NO: 290498 - DNA, 75 bp, synthetic construct
  source 1..75: mol_type = other DNA
tgacagttacgcaatgagtgaaaagagtcacggcagagaagaaatccgtcttcatattgtttgcgatgtccctga

SEQ ID NO: 290499 - DNA, 75 bp, synthetic construct
  source 1..75: mol_type = other DNA
attcatgtcattagtgcgttctcaacaatgcacagtctggtcctcggacagatcaagacggatgagaaatacaat

SEQ ID NO: 290500 - DNA, 75 bp, synthetic construct
  source 1..75: mol_type = other DNA
ataaagacgttattgcaattgatggaacaacgctccggcactcttatgacaagagtcgctgcaggggagcgattc

SEQ ID NO: 290501 - DNA, 75 bp, synthetic construct
  source 1..75: mol_type = other DNA
gcgtaaccaccgttctggtgccgtcgcagctgcaggacaaaaacaacaaaggccagaccccggcacagaagaagg

SEQ ID NO: 290502 - DNA, 75 bp, synthetic construct
  source 1..75: mol_type = other DNA
cggctaaataaagccttcgaggaaaaatttccgctgaaagaattaaataatccagagcatgacagttacgcaatt

SEQ ID NO: 290503 - DNA, 75 bp, synthetic construct
  source 1..75: mol_type = other DNA
cagctctgctgatttaactgcagagaagttcgccacagcgatccgaaatcactggcacgtggaaaataagctgca

SEQ ID NO: 290504 - DNA, 75 bp, synthetic construct
  source 1..75: mol_type = other DNA
atggaaaaacgctccggcactattatgacaagagtcgccgcaggggagcgattcatgtcattagtgcgttctcaa

SEQ ID NO: 290505 - DNA, 75 bp, synthetic construct
  source 1..75: mol_type = other DNA
ttaacatgatggatattaaaggaaaaatcatcacaacggatgcgatggggtgccagaaagatattgcagaaaaaa

SEQ ID NO: 290506 - DNA, 75 bp, synthetic construct
  source 1..75: mol_type = other DNA
ctggatgcgtgactgccattcttcagatgataaagacgtcattgcaattgatggaaaaacgctccggcattctta

SEQ ID NO: 290507 - DNA, 75 bp, synthetic construct
  source 1..75: mol_type = other DNA
tattcaaggcagggttaagacgtaagatgcgaaaagcagccatggacagaaactatctggcgtcagtccttgcgg

SEQ ID NO: 290508 - DNA, 75 bp, synthetic construct
  source 1..75: mol_type = other DNA
atatttctattatccccgattacagacaagtctggaaagtggaacataaattgtcagatattctactgttgacta

SEQ ID NO: 290509 - DNA, 75 bp, synthetic construct
  source 1..75: mol_type = other DNA
gccttaatcttgtgcttgccagctcacttctggctgccagcattccggcatttgccgtaaccggagacactgatc

SEQ ID NO: 290510 - DNA, 75 bp, synthetic construct
  source 1..75: mol_type = other DNA
gccttaatcttgtgcttgccagctcacttctggccgccagtattccggcatttgccgttaccggagacactgacc

SEQ ID NO: 290511 - DNA, 75 bp, synthetic construct
  source 1..75: mol_type = other DNA
gcactcttatgacaagagtcgccgcaggggagcgattcatgtcattagtgcgttctcaacaatgcacagtctggt

SEQ ID NO: 290512 - DNA, 75 bp, synthetic construct
  source 1..75: mol_type = other DNA
aattatcacaactgatgcgatgggttgccagaaagatatcgcagagaagatacaaaaacagggcggtgattattt

SEQ ID NO: 290513 - DNA, 75 bp, synthetic construct
  source 1..75: mol_type = other DNA
aataatccagagcatgacagttacgcaattagtgaaaagagtcacggcagagaagaaatccgtcttcacattgtt

SEQ ID NO: 290514 - DNA, 75 bp, synthetic construct
  source 1..75: mol_type = other DNA
ggtattcaaggcagggttaagacgtaagatgcgaaatgcagctatggacagaaactatctggcgtcagtccttgc

SEQ ID NO: 290515 - DNA, 75 bp, synthetic construct
  source 1..75: mol_type = other DNA
acctttgccgatcgcgtgatgacgctggcctctcgcagccagcaggcaacgattccggggccggagtggcacctg

SEQ ID NO: 290516 - DNA, 75 bp, synthetic construct
  source 1..75: mol_type = other DNA
attaccggtagaagaaagcaacatccgctcattgcagaaagcgacccagctttttaatccacaggcagaagttaa

SEQ ID NO: 290517 - DNA, 75 bp, synthetic construct
  source 1..75: mol_type = other DNA
gcaattaccgatcgttgcccaggtcacctttgccgatcgcgtgatgacgctggcctctcgcagccagcaggcaac

SEQ ID NO: 290518 - DNA, 75 bp, synthetic construct
  source 1..75: mol_type = other DNA
ctcaacgaactggcagcgttattgagctgctcgcgtcgtcatatgcgtaccctgctcaacaccatgcaggatcgc

SEQ ID NO: 290519 - DNA, 75 bp, synthetic construct
  source 1..75: mol_type = other DNA
tatcccagaacttcttaacatgctggagattaaaggaaaaatcatcacaactgatgcgatgggttgccagaaaga

SEQ ID NO: 290520 - DNA, 75 bp, synthetic construct
  source 1..75: mol_type = other DNA
gttaaacgtgctgacaaaacagcattacagccagcaggaagtactgcgttggatcgatgtctgttcagggactca

SEQ ID NO: 290521 - DNA, 75 bp, synthetic construct
  source 1..75: mol_type = other DNA
tgacccggacctgttgcatgaactatcgcaatttactgcgctgggtgtgcggctgtgccatgttgaacaggatct

SEQ ID NO: 290522 - DNA, 75 bp, synthetic construct
  source 1..75: mol_type = other DNA
gatgtctttgaaatggttctgcgcaaaccgcaaaacggcgagtatctgccagataacacagaggaggggcggatt

SEQ ID NO: 290523 - DNA, 75 bp, synthetic construct
  source 1..75: mol_type = other DNA
ttccgcgatgacgtttctttccagttagtcaaaatggctcaggcctgcaaggaagggaatgtggccaacagcgaa

SEQ ID NO: 290524 - DNA, 75 bp, synthetic construct
  source 1..75: mol_type = other DNA
tggatctaaaagataaaaatgataataaaattaaagggataagtcctgagcgcttttatgcgcttacgcattccc

SEQ ID NO: 290525 - DNA, 75 bp, synthetic construct
  source 1..75: mol_type = other DNA
ctattggcgatacgattcgccgggcgattaacgaaggcgctgaaaagctcaccctgtggatgaccggcgcgccca

SEQ ID NO: 290526 - DNA, 75 bp, synthetic construct
  source 1..75: mol_type = other DNA
agatcgccccggtaaccggcctttccatgactggatgagcatagcggattttcaggatttcgctgatcagtggtt

SEQ ID NO: 290527 - DNA, 75 bp, synthetic construct
  source 1..75: mol_type = other DNA
atcaggatcacagtgagcatcgggtgattgccgggatcatgcagcagattctggcaagtcaccaggtcacgctgg

SEQ ID NO: 290528 - DNA, 75 bp, synthetic construct
  source 1..75: mol_type = other DNA
tgccagaaagatattgcagagaagatacaaaaacagggaggtgattatttattcgctgtaaaaggaaatcagcgt

SEQ ID NO: 290529 - DNA, 75 bp, synthetic construct
  source 1..75: mol_type = other DNA
actggtgcaactcgtcggtgataaaaccgctgtgcggcaaatgttggtttcccatctggggcgtagcttccgcca

SEQ ID NO: 290530 - DNA, 75 bp, synthetic construct
  source 1..75: mol_type = other DNA
ggggcggcacatcctgcgcgttctctactatcgtccgttgcgcaatctgctgcccggcagtgcattgcgccgttc

SEQ ID NO: 290531 - DNA, 75 bp, synthetic construct
  source 1..75: mol_type = other DNA
gtttgaatggaaagggctgaagaaattatgcgtggcagtctcctttcggtccataatagcagaacaaaagaaaga

SEQ ID NO: 290532 - DNA, 75 bp, synthetic construct
  source 1..75: mol_type = other DNA
aattatgcgtggcagtctcctttcggtccataatagcagagcaaaagaaagagccagaaatgacggtcatctgct

SEQ ID NO: 290533 - DNA, 75 bp, synthetic construct
  source 1..75: mol_type = other DNA
ttcggtcaataatagcagaacaaaagaaagagcccgaaatgacggtcagatattatatcagttctgctgatttaa

SEQ ID NO: 290534 - DNA, 75 bp, synthetic construct
  source 1..75: mol_type = other DNA
atgccatctgctcgtctgcaacaacagttcatccgcctgtggcaatgctgcgagggtaaatcgcaggacacgacg

SEQ ID NO: 290535 - DNA, 75 bp, synthetic construct
  source 1..75: mol_type = other DNA
gattgccaggatcatgcagcagattctggcgagtcatcaggtcacgatggaaatcaaagagatcagctacgatca

SEQ ID NO: 290536 - DNA, 75 bp, synthetic construct
  source 1..75: mol_type = other DNA
gttcgcgcacttgtgcgaggtgccgctgctccaacactgtattccgatcgactggcaagccgacgccgcccgctg

SEQ ID NO: 290537 - DNA, 75 bp, synthetic construct
  source 1..75: mol_type = other DNA
atgccatctgctcgtctgcaacaacagttcatccgcctgtggcaatgctgcgagggtaaatcgcaggagaccacg

SEQ ID NO: 290538 - DNA, 75 bp, synthetic construct
  source 1..75: mol_type = other DNA
ccactggctgatcattcaggggcaacgcagtatgcgcggcctgcgcatgaacaccctcggctggttcgattttaa

SEQ ID NO: 290539 - DNA, 75 bp, synthetic construct
  source 1..75: mol_type = other DNA
atgccatctgctcgtctgcaacaacagttcatccgcctgtggcaatgctgtgagggtaaatctcaggagacaacg

SEQ ID NO: 290540 - DNA, 75 bp, synthetic construct
  source 1..75: mol_type = other DNA
gaaacgcagcagaattattttcagggatacggcacattgctattagtcttttgacgaatgagcaggtattcaagg

SEQ ID NO: 290541 - DNA, 75 bp, synthetic construct
  source 1..75: mol_type = other DNA
tacttaaggattttcattaacggaagacactatgctgcacatagacttgcatggattatcactttcggtgttgag

SEQ ID NO: 290542 - DNA, 75 bp, synthetic construct
  source 1..75: mol_type = other DNA
atatgccggaccagtcacgggcacgtctgcataaagcggttggcgctgtcctgagtgaaagcaatccggcgtctg

SEQ ID NO: 290543 - DNA, 75 bp, synthetic construct
  source 1..75: mol_type = other DNA
tggagctgctgccgaagtacgccgcctgggcagagggtgtcctggctgtcggaggcgctcaacaggatgacgtgc

SEQ ID NO: 290544 - DNA, 75 bp, synthetic construct
  source 1..75: mol_type = other DNA
ccgccgtctcaagggcattcagtccacggtcaaaaaagcggaaatcaaagtggagctgctgccgaagtacgccgc

SEQ ID NO: 290545 - DNA, 75 bp, synthetic construct
  source 1..75: mol_type = other DNA
cgcattctctggtctgtattcccgccgcacggacgttatgccaaagcggcgattattcacgactggctgtacgac

SEQ ID NO: 290546 - DNA, 75 bp, synthetic construct
  source 1..75: mol_type = other DNA
accggcgttaccgttgaccgcgaagactggcactgggatcaggtgcccgatcacctgaaaattaccttccgcgtg

SEQ ID NO: 290547 - DNA, 75 bp, synthetic construct
  source 1..75: mol_type = other DNA
gctggggctgggcgatatcgccgcgttcccgtttgtcgaagcaccggataaacgcaatatccaggatggcgtgcg

SEQ ID NO: 290548 - DNA, 75 bp, synthetic construct
  source 1..75: mol_type = other DNA
atggcagatccccggtctgcgccgcgaactggtgattgctctgattaaatcgttgccgaaaccggtacgccgtaa

SEQ ID NO: 290549 - DNA, 75 bp, synthetic construct
  source 1..75: mol_type = other DNA
tatccaggatggcgtgcgtctgctcgaagaactgggcgcgatcaccacggatgaacaggccagcgcctataaact

SEQ ID NO: 290550 - DNA, 75 bp, synthetic construct
  source 1..75: mol_type = other DNA
atgctgcgcgacagactgcgtttttctcgccgtctgcatggtgttaagaaggttaaaaatcctgatgctcaacag

SEQ ID NO: 290551 - DNA, 75 bp, synthetic construct
  source 1..75: mol_type = other DNA
atgacagaacaacaaaaattgacctttacagccttgcagcagcggctggattcgctgatgctgcgcgacagactg

SEQ ID NO: 290552 - DNA, 75 bp, synthetic construct
  source 1..75: mol_type = other DNA
atcgcctgcgcgttcgggctgaacaggccgcccgcgagggcggcagcgttcgccacgcgtcgggctatgacctga

SEQ ID NO: 290553 - DNA, 75 bp, synthetic construct
  source 1..75: mol_type = other DNA
gtcatggctgggtgatgccactgggtaaccgcaatgtgcagaccgtgctggcagaggaaatgtcagacgccgcgc

SEQ ID NO: 290554 - DNA, 75 bp, synthetic construct
  source 1..75: mol_type = other DNA
taaccgcaacgtgcagaccgtgctggcagaggaaatggcagatgcagcgcagagcgcatgcttgccgccaccggc

SEQ ID NO: 290555 - DNA, 75 bp, synthetic construct
  source 1..75: mol_type = other DNA
tctgcataaagcggttggcgctgtcctgagtgaaagcaacccggcttccgcccttaatcatctcaaccatgcgtt

SEQ ID NO: 290556 - DNA, 75 bp, synthetic construct
  source 1..75: mol_type = other DNA
gattactggcatgaacaattcttcgggggcgacgagatatccctgtccttcccgatgataaacaggcttgtaaaa

SEQ ID NO: 290557 - DNA, 75 bp, synthetic construct
  source 1..75: mol_type = other DNA
ataatatagatatagattttgatgccattgatagaattattgacgaagaacaattagaagaaattaaagctcttt

SEQ ID NO: 290558 - DNA, 75 bp, synthetic construct
  source 1..75: mol_type = other DNA
tctgcataaagcgattggcgctgttctgagtgaaagcaatccggcttccgcccttaatcatctcaaccatgcgtt

SEQ ID NO: 290559 - DNA, 75 bp, synthetic construct
  source 1..75: mol_type = other DNA
cgcagacggttaatgtatcttgcagtaaggttgttcgggaaagggaaatacagcgacacgcagcagggaacctgt

SEQ ID NO: 290560 - DNA, 75 bp, synthetic construct
  source 1..75: mol_type = other DNA
aatgcgctccggacgaagaaagaagccgatctcatttttctggacggaatgcgggtactgggggtgccagagtgg

SEQ ID NO: 290561 - DNA, 75 bp, synthetic construct
  source 1..75: mol_type = other DNA
ggaggcgctcaacaggatgacgtgctgatgtatgtgatgctgtggcgcattgatgccggagattatgccggggcg

SEQ ID NO: 290562 - DNA, 75 bp, synthetic construct
  source 1..75: mol_type = other DNA
acagctcgatccccgctgtggcgtgaaaaaagacaaacagcagctggagcgcagattgcgcaatgacagtcgctg

SEQ ID NO: 290563 - DNA, 75 bp, synthetic construct
  source 1..75: mol_type = other DNA
cgtattctgtggtccgtatttccgccacacgggcgttatgccaaggcagcgattatccacgactggctgtacgac

SEQ ID NO: 290564 - DNA, 75 bp, synthetic construct
  source 1..75: mol_type = other DNA
tgctggagatgcttgacgattaccgttggcgactggtggaatcgtttgaattctggctgactgagagtccggacg

SEQ ID NO: 290565 - DNA, 75 bp, synthetic construct
  source 1..75: mol_type = other DNA
gaagcgtttttaggccgcgtcacaccgctggagttaccgttgctcgacagccttgagcgcgagttacggcggatg

SEQ ID NO: 290566 - DNA, 75 bp, synthetic construct
  source 1..75: mol_type = other DNA
cagaaagatattgcagagaagatacaaaaacagggaggtgattatttattcgcggtaaaaggaaaccaggggcgg

SEQ ID NO: 290567 - DNA, 75 bp, synthetic construct
  source 1..75: mol_type = other DNA
cggcttaataaagcccttgaggaaaaatttccactgaaagaattaaataatccagaacatgacagttacgcaatc

SEQ ID NO: 290568 - DNA, 75 bp, synthetic construct
  source 1..75: mol_type = other DNA
tgcagaaaagttcgccacagcaatccgaaaccactggcacgtggagaataagctgcactggcgtctggacgtggt

SEQ ID NO: 290569 - DNA, 75 bp, synthetic construct
  source 1..75: mol_type = other DNA
gataaggtattcaaggcagggttaagacgtaagatgcgaaaagcagccatggacagaaactacctggcgtcagtc

SEQ ID NO: 290570 - DNA, 75 bp, synthetic construct
  source 1..75: mol_type = other DNA
ctggcctttggcccctacccggagatctccctgttgcaggctcgccgcctgcgcgaaacagcacgcaataacatt

SEQ ID NO: 290571 - DNA, 75 bp, synthetic construct
  source 1..75: mol_type = other DNA
agagttgtatcctgtatcagtcctgcaaaatttcacgagtgctttattaactggatgcgtgactgccattcatca

SEQ ID NO: 290572 - DNA, 75 bp, synthetic construct
  source 1..75: mol_type = other DNA
tcaccaataatgagaatgaattcgatataactgttttcccctcaattgtggaaaagagcaaataccaagactcac

SEQ ID NO: 290573 - DNA, 75 bp, synthetic construct
  source 1..75: mol_type = other DNA
tgctttattaactggatgcgtgactgccattcttcagatgataaagacgtcattgcaattgatggaaaaacgctc

SEQ ID NO: 290574 - DNA, 75 bp, synthetic construct
  source 1..75: mol_type = other DNA
ggagttgtatcctgtattagtcctgcaaaatttcacgagtgctttattaactggatgcgtgactgccattcttca

SEQ ID NO: 290575 - DNA, 75 bp, synthetic construct
  source 1..75: mol_type = other DNA
acgtttgaatggaaaggactgaagaaattatgcgtggcagtctcctttcggtccataatagcagaacaaaagaaa

SEQ ID NO: 290576 - DNA, 75 bp, synthetic construct
  source 1..75: mol_type = other DNA
aagacggataagaaatccaatgagatcacagctatccctgaacttcttaacatgctggatattaaaggaaaaatc

SEQ ID NO: 290577 - DNA, 75 bp, synthetic construct
  source 1..75: mol_type = other DNA
ggagaaacacatctcgattttttgaagcaatatggtgattttgaaaatggtattcctattcacgataccattgcc

SEQ ID NO: 290578 - DNA, 75 bp, synthetic construct
  source 1..75: mol_type = other DNA
ataatagcagaacaaaagaaagagccagaaatgacggtcagatattatatcagttctgttgatttaaccgcagag

SEQ ID NO: 290579 - DNA, 75 bp, synthetic construct
  source 1..75: mol_type = other DNA
tacaaaaacagggaggtgattatttattcgcgataaaaggaaaccaggggcggctaaataaagcctttgaggaaa

SEQ ID NO: 290580 - DNA, 75 bp, synthetic construct
  source 1..75: mol_type = other DNA
gcggtaaaaggaaaccaggggcggctaaataaagccttcgaggaaaaatttccgctgaaagaattaaataatcca

SEQ ID NO: 290581 - DNA, 75 bp, synthetic construct
  source 1..75: mol_type = other DNA
aaccactggcacgtggagaataagctgcactggcgtctggacgtggtaatgaatgaagacgactgcagaataaga

SEQ ID NO: 290582 - DNA, 75 bp, synthetic construct
  source 1..75: mol_type = other DNA
cgcgaatggtactggaagcgcagaaacacggctgcgttcgtgaagcgatgattatcacttccgcgctctccattc

SEQ ID NO: 290583 - DNA, 75 bp, synthetic construct
  source 1..75: mol_type = other DNA
ggccgcccgtgagggcggcagtgttcgccacgcgtcgggctatgacctgatgctgcaactggcggaagaccgccg

SEQ ID NO: 290584 - DNA, 75 bp, synthetic construct
  source 1..75: mol_type = other DNA
ctgagtgaaaacaatccggcgttcgcccttaatcatctcaaccatgcgctacagctcgatccccgctgtggcgtg

SEQ ID NO: 290585 - DNA, 75 bp, synthetic construct
  source 1..75: mol_type = other DNA
tggaacccgtgggaagacccgttcggcagcggctatcagttgacgcaatcattgatggcgtttggtcgtggcgaa

SEQ ID NO: 290586 - DNA, 75 bp, synthetic construct
  source 1..75: mol_type = other DNA
atatttctattatccccgattacagacaagcctggaaaggggagcataaattatcggatattctactgttaacta

SEQ ID NO: 290587 - DNA, 75 bp, synthetic construct
  source 1..75: mol_type = other DNA
gaaaccaggggtggctaaataaagcctttgaggaaaaatttccgctgaaagaattaaataatccagagcatgaca

SEQ ID NO: 290588 - DNA, 75 bp, synthetic construct
  source 1..75: mol_type = other DNA
atatcagttctgctgatttagccgcagagaagttcgccacagcaatccgaaaccactggcacgtggagaataagc

SEQ ID NO: 290589 - DNA, 75 bp, synthetic construct
  source 1..75: mol_type = other DNA
aatggtattcttcgtcgcttttcgtgcgatgtcgattggccgtaaagcattagaaattgaccatcgtttttccgg

SEQ ID NO: 290590 - DNA, 75 bp, synthetic construct
  source 1..75: mol_type = other DNA
tggcgatgctgttcctggctggggcgaaattgtggcagttcatcgccattattggcatggggatttcagcggttg

SEQ ID NO: 290591 - DNA, 75 bp, synthetic construct
  source 1..75: mol_type = other DNA
actgcccggtgctctcgcaggtgaagttaattgctgaaccgtgggatattgctcctggtggttatcaggtgggaa

SEQ ID NO: 290592 - DNA, 75 bp, synthetic construct
  source 1..75: mol_type = other DNA
gcgccgttgtttaccgctatccagaactgcccggtgctctcgcaggtgaagttaattgctgaaccgtgggatatt

SEQ ID NO: 290593 - DNA, 75 bp, synthetic construct
  source 1..75: mol_type = other DNA
atccgccgctcgctgtcaccggggggatttcgtccggtctatttttatcagcacacatcagcggctaagaaataa

SEQ ID NO: 290594 - DNA, 75 bp, synthetic construct
  source 1..75: mol_type = other DNA
tgggcggcgatccacggctacaatcacccgcagcttaatgcggcgatgaagtcgcaaattgatgccatgtcgcat

SEQ ID NO: 290595 - DNA, 75 bp, synthetic construct
  source 1..75: mol_type = other DNA
gcgatgtcggtgtgcgatccggataactcaatgcacagcctgtggaaaggctatctgccagaaaacttgtttgct

SEQ ID NO: 290596 - DNA, 75 bp, synthetic construct
  source 1..75: mol_type = other DNA
ccagccccgcaaagccgcatggacggcgaatgggatgagcgcgatatggtgggctttgcgcgcctgatggcggcg

SEQ ID NO: 290597 - DNA, 75 bp, synthetic construct
  source 1..75: mol_type = other DNA
gataacgccgggggcagtaaagagatggtcgagggttttcgagcagccattgccggaagcccggtgcgtattgtc

SEQ ID NO: 290598 - DNA, 75 bp, synthetic construct
  source 1..75: mol_type = other DNA
cgttggcgtgccctggtttcagatgggttatcagccagggcgatatctggtgcaatggagccacggaaaaccact

SEQ ID NO: 290599 - DNA, 75 bp, synthetic construct
  source 1..75: mol_type = other DNA
tgacgccgaaaaatgccgaccgcgaacatatccgccgctcgctgtcaccggggggatttcgtccggtctattatt

SEQ ID NO: 290600 - DNA, 75 bp, synthetic construct
  source 1..75: mol_type = other DNA
aggcaattacaggggcaatcggtgtctgataatgtcagcccaccgattttagttctgacgccgaaaaatgccgac

SEQ ID NO: 290601 - DNA, 75 bp, synthetic construct
  source 1..75: mol_type = other DNA
ccactgaacgtgctgttgatgcccggacccgataatgccgggggcagtaaagagatggtcgagggttttcgcgca

SEQ ID NO: 290602 - DNA, 75 bp, synthetic construct
  source 1..75: mol_type = other DNA
acatatccgccgctcgctgtcaccagggggatttcgtccggtctatttttatcagcacacatcagcggctaagaa

SEQ ID NO: 290603 - DNA, 75 bp, synthetic construct
  source 1..75: mol_type = other DNA
gttttctgaccttccgcaatggttatcatggcgatacttttggcgcgatgtcggtatgcgatcctgacaactcta

SEQ ID NO: 290604 - DNA, 75 bp, synthetic construct
  source 1..75: mol_type = other DNA
ccagtatgagtttagccgcgccatgcgccataaagattgccagaacccgctgcgcgtctattctcacattgcgcc

SEQ ID NO: 290605 - DNA, 75 bp, synthetic construct
  source 1..75: mol_type = other DNA
ccagccgtaccgatcttaactatctacaaggcgtggatggcccgattggtcgttgctttacgctgattggcgagt

SEQ ID NO: 290606 - DNA, 75 bp, synthetic construct
  source 1..75: mol_type = other DNA
gatgatgaattcattgagcgttatggattaagcgccgggcattcactggtgattgaggatgacgtagccgaagcg

SEQ ID NO: 290607 - DNA, 75 bp, synthetic construct
  source 1..75: mol_type = other DNA
ccaaacattacttccccgtaaatgcacgcgatccgctgcttcagcaattccagccagaaaacgaaaccagcgctg

SEQ ID NO: 290608 - DNA, 75 bp, synthetic construct
  source 1..75: mol_type = other DNA
gctaaccgcgtcagctaccaggtgctgaatcagcattcgccacgcttaacgcgcggtctgccggagcgtgaagac

SEQ ID NO: 290609 - DNA, 75 bp, synthetic construct
  source 1..75: mol_type = other DNA
gcggaaagtattccggaagaagtgattgccggggcgtcagcgttggttttgacttcctatctggtgcgttgcaag

SEQ ID NO: 290610 - DNA, 75 bp, synthetic construct
  source 1..75: mol_type = other DNA
gcagccagccagactcttcagagcataattttcaggaaacagcgatgaaaaatgtcacatttttgctggcaggca

SEQ ID NO: 290611 - DNA, 75 bp, synthetic construct
  source 1..75: mol_type = other DNA
ccaccctatattattcgcccggaacagttacagcgcctgacggcagccgttaaccgagcggtgcaggatgaaaca

SEQ ID NO: 290612 - DNA, 75 bp, synthetic construct
  source 1..75: mol_type = other DNA
cttttatgggcaatccactggcctgcgcggcagcaaacgccagcctggccattatcgaatctggcgactggcagc

SEQ ID NO: 290613 - DNA, 75 bp, synthetic construct
  source 1..75: mol_type = other DNA
gattaagcgccgggcattcactggtgattgaggatgacgtagccgaagcgctttatcaggagctaaaacagaaaa

SEQ ID NO: 290614 - DNA, 75 bp, synthetic construct
  source 1..75: mol_type = other DNA
gctggtcgatattgaagcgaaagtggatgatgaattcattgagcgttatggattaagcgccgggcattcactggt

SEQ ID NO: 290615 - DNA, 75 bp, synthetic construct
  source 1..75: mol_type = other DNA
taatactttttctttcattttatgccgcagcacaaccacaaaagttggagtgtgtcagccgaaaggatggcacgg

SEQ ID NO: 290616 - DNA, 75 bp, synthetic construct
  source 1..75: mol_type = other DNA
caaaaagaacagccggaagcctttgttgccgaactctttgaacatattgctgattatagctggccgtggacgtag

SEQ ID NO: 290617 - DNA, 75 bp, synthetic construct
  source 1..75: mol_type = other DNA
gcacaaactggacgccctggcaggttggcgcgtaagccatcattttgatgaacgcgagcgggcggcgctggcatg

SEQ ID NO: 290618 - DNA, 75 bp, synthetic construct
  source 1..75: mol_type = other DNA
atattaaagaagaacttccggcgatgattggcaccgataagaagttgaaagaagttttagattttatccataaag

SEQ ID NO: 290619 - DNA, 75 bp, synthetic construct
  source 1..75: mol_type = other DNA
aactcagtttgtgcaggaacttccgcgtcaacaaaaagggatgagtatttccggttaccagcccaaattgcaatt

SEQ ID NO: 290620 - DNA, 75 bp, synthetic construct
  source 1..75: mol_type = other DNA
cgcagcagagatcagcgacttaacgtttgccatcgggctgatgaattgctttaaccgcctggcggtttccatgcg

SEQ ID NO: 290621 - DNA, 75 bp, synthetic construct
  source 1..75: mol_type = other DNA
cgtctcgcaaatcaacggctgcgcattttgtctggagatgcacagtaaagcattacgcaaatccggtgtgccgca

SEQ ID NO: 290622 - DNA, 75 bp, synthetic construct
  source 1..75: mol_type = other DNA
atgagcttagtcctgcggtgtatagcgccctggtacaggctaaaacagcgctggaaaatagcacgctggacatca

SEQ ID NO: 290623 - DNA, 75 bp, synthetic construct
  source 1..75: mol_type = other DNA
taaatcaaaaggaaaaccttctcaggcagggttattagacgatacgcaaagcgccatcaatgtggtgcgccatcg

SEQ ID NO: 290624 - DNA, 75 bp, synthetic construct
  source 1..75: mol_type = other DNA
atggcactgccagtgaacaaacgcgttctcaaaattctgtttattctctttgttgttgccttctgcgtttattta

SEQ ID NO: 290625 - DNA, 75 bp, synthetic construct
  source 1..75: mol_type = other DNA
gcgccatcaacgtggtgcgccatcgcagtgatgtaaacccgcagcgactggtactgtttggtcagagtattggcg

SEQ ID NO: 290626 - DNA, 75 bp, synthetic construct
  source 1..75: mol_type = other DNA
catcgataaaggagatgataaacctttactttctactcccgacgaagatattgactgggactctgtttcagaaga

SEQ ID NO: 290627 - DNA, 75 bp, synthetic construct
  source 1..75: mol_type = other DNA
atgggtaaagttggtatgccgctgcgtgtcgccgtaaccggtgcggggcagtctccagcactggatgttaccgtt

SEQ ID NO: 290628 - DNA, 75 bp, synthetic construct
  source 1..75: mol_type = other DNA
ggtcagtttcgccgatctcgacgggccgacctggctggcggtggatgtagaacgggcgcttcagttcacgaccgg

SEQ ID NO: 290629 - DNA, 75 bp, synthetic construct
  source 1..75: mol_type = other DNA
tcacacggatgatctcgctttcggccttcgtatctccggcaaagggcgcgcgcttcttgcacggtatatccagca

SEQ ID NO: 290630 - DNA, 75 bp, synthetic construct
  source 1..75: mol_type = other DNA
ctgcgattgagcgtgcactgtgtgaaaaattaggcgcggatgtgaactacagcggcctgatctgcaaaaatccgt

SEQ ID NO: 290631 - DNA, 75 bp, synthetic construct
  source 1..75: mol_type = other DNA
agcgattttattaccagcgacaccacgcttaccgtgcgcggcgtattgggcgcggcgctcggcgctaatgagttc

SEQ ID NO: 290632 - DNA, 75 bp, synthetic construct
  source 1..75: mol_type = other DNA
ctgcacgcggtcgcaagggcggttctaagtctaagcgcagcacagtagctacatctgcacgcacgctgaaaccgt

SEQ ID NO: 290633 - DNA, 75 bp, synthetic construct
  source 1..75: mol_type = other DNA
tattgccagtacacctcaaatattggctggctggattatgatccggtttgtgattgtcaggattttggcgatctg

SEQ ID NO: 290634 - DNA, 75 bp, synthetic construct
  source 1..75: mol_type = other DNA
ttccgactcttaccgccaggcggttaatgccttctataaaaccaccttcaagacggccaataatcccgatgaaga

SEQ ID NO: 290635 - DNA, 75 bp, synthetic construct
  source 1..75: mol_type = other DNA
ccgcgattgaacgtgcgttgtgtgaaaaactgggcgcagatgtaaactacagcggactgatttgcaaaaatccgt

SEQ ID NO: 290636 - DNA, 75 bp, synthetic construct
  source 1..75: mol_type = other DNA
aagaaaatttaccccatcgtccctaccacacggatgatctcgcttttggtcttcgcatctcccgcaaagggcgtg

SEQ ID NO: 290637 - DNA, 75 bp, synthetic construct
  source 1..75: mol_type = other DNA
atacccttgactggttagccgattacctcgaccttggcgcagccaatgaccgcgaaatcctgccggactacggtt

SEQ ID NO: 290638 - DNA, 75 bp, synthetic construct
  source 1..75: mol_type = other DNA
gcaaatgggcttacagggcgattcgtcagggctggccagcgttctcacagtggcttgaagcggtgaaccagcgtg

SEQ ID NO: 290639 - DNA, 75 bp, synthetic construct
  source 1..75: mol_type = other DNA
tcggttaaggcgctgaaatatgccgcagcggttgaacgttcgctgtgtgagaaaatttgtgctgatgtgaactac

SEQ ID NO: 290640 - DNA, 75 bp, synthetic construct
  source 1..75: mol_type = other DNA
ccggaacaggtcgccgccacgggcgctgcacggcagacggtaaaccttacggctgacgttatgaagcgcctcagt

SEQ ID NO: 290641 - DNA, 75 bp, synthetic construct
  source 1..75: mol_type = other DNA
cgctaaaggcgaagcctacgatgacaagcgtttcatggcgctatgtatgctggagaatggatattctcagaaagc

SEQ ID NO: 290642 - DNA, 75 bp, synthetic construct
  source 1..75: mol_type = other DNA
cgctgcgttatttgcaggcgattgaaaaacgactggaaaaactggcggttgatccgcatcgtgaccgtgctcaga

SEQ ID NO: 290643 - DNA, 75 bp, synthetic construct
  source 1..75: mol_type = other DNA
gtggcagatccccggtctgcgccgcgaactggtgattgctctgattaaatcgttgccgaaaccagtacgccgtaa

SEQ ID NO: 290644 - DNA, 75 bp, synthetic construct
  source 1..75: mol_type = other DNA
agcgcagatgggcgggctggtgtatcgcggttttgtcactggcaacggttttaaacggctgggcgacacgctgcg

SEQ ID NO: 290645 - DNA, 75 bp, synthetic construct
  source 1..75: mol_type = other DNA
gggaaacacatctcgattttttgaagcaatatggtgattttgaaaatggtattcctgttcacgataccattgcca

SEQ ID NO: 290646 - DNA, 75 bp, synthetic construct
  source 1..75: mol_type = other DNA
gatgataaagacgtcatcgcaattgatggaaaaatacaccggcattcttatgacaagagtcgccgtaagggagcg

SEQ ID NO: 290647 - DNA, 75 bp, synthetic construct
  source 1..75: mol_type = other DNA
tatacaactatcacttggagatcaaaagatctatggctgggtcaatcgttcctataccaaagcattaaatcacta

SEQ ID NO: 290648 - DNA, 75 bp, synthetic construct
  source 1..75: mol_type = other DNA
attcatgtcattagtgcgttctcaacaatgcacagtctggtcatcggacagatcaagacggatgagaaatccaat

SEQ ID NO: 290649 - DNA, 75 bp, synthetic construct
  source 1..75: mol_type = other DNA
atggtgattttgaaaatggtattcctgttcacgatactattgccagagttgtatcatgtatcagtcctgcaaaat

SEQ ID NO: 290650 - DNA, 75 bp, synthetic construct
  source 1..75: mol_type = other DNA
gataaggtattcaaggcagggttaagacgtaagatgcgaaaagcagctatggacagaaactatctggcgtcagtc

SEQ ID NO: 290651 - DNA, 75 bp, synthetic construct
  source 1..75: mol_type = other DNA
attttgacgaatgataaggtattcaaggcagggttaagacgtaagatgcgaaaagcagccatggacagaaactac

SEQ ID NO: 290652 - DNA, 75 bp, synthetic construct
  source 1..75: mol_type = other DNA
atcagtcctgcaaaatttcacgagtgctttattaactggatgcgtgactgccattcttcagatgataaagacgtc

SEQ ID NO: 290653 - DNA, 75 bp, synthetic construct
  source 1..75: mol_type = other DNA
cagaccgcgtgagcagtgaaagccgggcgtggcttgcgcagtgcgggctgacggtggagcaactggccagacagg

SEQ ID NO: 290654 - DNA, 75 bp, synthetic construct
  source 1..75: mol_type = other DNA
ggtcgtgtgtcagaagggatctgtattcgtctctattccgaagacgatttcctctcgcgcccggagtttaccgat

SEQ ID NO: 290655 - DNA, 75 bp, synthetic construct
  source 1..75: mol_type = other DNA
tgcctaacccgctaatgggttatatggcttctggggctgatgggcatgttttccagcaaagtctgggggaaggtg

SEQ ID NO: 290656 - DNA, 75 bp, synthetic construct
  source 1..75: mol_type = other DNA
tgattgtgggaaaccgggctcattccttgcttctccggtattccagcaaatgtttggctggaaggagtcaaacca

SEQ ID NO: 290657 - DNA, 75 bp, synthetic construct
  source 1..75: mol_type = other DNA
agatattgcagagaagatacaaaaacagggcggtgattatttattcgcggtaaaaggaaaccaggggcggcttaa

SEQ ID NO: 290658 - DNA, 75 bp, synthetic construct
  source 1..75: mol_type = other DNA
tagtcaaaatggatcaagcttgtcaggaagggaatgtggtcaacagtgaagagagctgggcaacggatgtgctgg

SEQ ID NO: 290659 - DNA, 75 bp, synthetic construct
  source 1..75: mol_type = other DNA
ccttcctgcaacagcggtggctctccgtttatcgcgatctcgtgacacaggagcgtgagtcgcagccgcaaacgc

SEQ ID NO: 290660 - DNA, 75 bp, synthetic construct
  source 1..75: mol_type = other DNA
ttggtactgggatccgctactgcttgtataacggaaatacagaagagctccacgcaaaaatgaaaacagtgcagg

SEQ ID NO: 290661 - DNA, 75 bp, synthetic construct
  source 1..75: mol_type = other DNA
aacgcaatatccaggatggcgtgcgtctgctcgaagaactgggcgcgatcaccacggatgaacaggccagcgcct

SEQ ID NO: 290662 - DNA, 75 bp, synthetic construct
  source 1..75: mol_type = other DNA
cgatggataaacagcaggcatcagacgaaaaacatcgccgcttccacgacaaagaatccgacttcctcgcgtttg

SEQ ID NO: 290663 - DNA, 75 bp, synthetic construct
  source 1..75: mol_type = other DNA
ttcgcgcaacaactcggtacgccgtatccgatttcggataagcgtattttgcaggcgatggagcagattagcggt

SEQ ID NO: 290664 - DNA, 75 bp, synthetic construct
  source 1..75: mol_type = other DNA
gataaggtattcaaggcagggttaagatgtaagatgcgaaaagcagccatggacagaaactatctggcgtcagtc

SEQ ID NO: 290665 - DNA, 75 bp, synthetic construct
  source 1..75: mol_type = other DNA
gctttggtgagtctgctccggcgaatgtgttgttcaaacactttggttttacgccggaaaatgtcctggcgcagg

SEQ ID NO: 290666 - DNA, 75 bp, synthetic construct
  source 1..75: mol_type = other DNA
accaggttgaggagagtgggtttgagtggcagatccccggtctgcgtcgtgagctgatcatcgccctgattaaat

SEQ ID NO: 290667 - DNA, 75 bp, synthetic construct
  source 1..75: mol_type = other DNA
attttttgaagcaatatggtgattttgaaaatggtattcctgttcacgataccattgccagagttgtatcctgta

SEQ ID NO: 290668 - DNA, 75 bp, synthetic construct
  source 1..75: mol_type = other DNA
ggctcgctcaccgccgcgcttgccagtaacgagacggcgcaaataagtatcgacggcggcacaacctggaccacg

SEQ ID NO: 290669 - DNA, 75 bp, synthetic construct
  source 1..75: mol_type = other DNA
cccgcgccagtgcgtgaggccttaaaactgaagccaggcctggacagcattcattacgaaattctgcctggtggg

SEQ ID NO: 290670 - DNA, 75 bp, synthetic construct
  source 1..75: mol_type = other DNA
aacattcaacaaggaaagaaacttgtcgctggcatggacgtcaacattgatgatgagattggcgacgacgaataa

SEQ ID NO: 290671 - DNA, 75 bp, synthetic construct
  source 1..75: mol_type = other DNA
aaaaaacgctggacattatctgtctggggcgtgtcgccgttgatttatatggtcaacaaatcgggtcacgtctgg

SEQ ID NO: 290672 - DNA, 75 bp, synthetic construct
  source 1..75: mol_type = other DNA
cgatgaacagctcatcgcagcagtgaaacaaaaataccgcacattgatcgactactggcgcgaatatcgtccggc

SEQ ID NO: 290673 - DNA, 75 bp, synthetic construct
  source 1..75: mol_type = other DNA
aacgatcgcgccggtaaccccggacaggccacgcacgccctgaccgtcgataccgttgcgccaacggtcaccatc

SEQ ID NO: 290674 - DNA, 75 bp, synthetic construct
  source 1..75: mol_type = other DNA
cgacaaaaactggagcaagatcccgcccgcccccgccatttcattactgaaaccggtattgggtatcggtttatg

SEQ ID NO: 290675 - DNA, 75 bp, synthetic construct
  source 1..75: mol_type = other DNA
tgtgcggctgattgggccaaactgcccaggagttatcacgccgggtgagtgcaaaatcgggattatgcctggtga

SEQ ID NO: 290676 - DNA, 75 bp, synthetic construct
  source 1..75: mol_type = other DNA
aaaaagaggttctttttatacttgtcagtttttgcgacaatccttggcattttttttactgcgatgacctcttat

SEQ ID NO: 290677 - DNA, 75 bp, synthetic construct
  source 1..75: mol_type = other DNA
gacggcggcagcggcaatcttcgcgcctcgtacactaatacagctggcgcgacagtgactgacttcatccggcgc

SEQ ID NO: 290678 - DNA, 75 bp, synthetic construct
  source 1..75: mol_type = other DNA
ggaaaaccccgtcagtgcttctccctcgccctgctgatcctgccactacttgaacatggcggctatgccatcacg

SEQ ID NO: 290679 - DNA, 75 bp, synthetic construct
  source 1..75: mol_type = other DNA
gatcagacgcctgacgccgccgcaccacgaccggttagccggtttctacaacgatgatgataaggaggcgctgtg

SEQ ID NO: 290680 - DNA, 75 bp, synthetic construct
  source 1..75: mol_type = other DNA
tgatcctgaacgtctgacagccctggtgatccttggtattaaagatcaggacaccttcccgctgatcttttatcg

SEQ ID NO: 290681 - DNA, 75 bp, synthetic construct
  source 1..75: mol_type = other DNA
tccgggcagataacgcgattgctgcggcctgctactttgccggtcatttcctcatcgtccgctcgctgtatctct

SEQ ID NO: 290682 - DNA, 75 bp, synthetic construct
  source 1..75: mol_type = other DNA
tccgggccgataacgccattgccgcagcttgttactttgccggtcacttcctcatcgtccgctcgctgtatctct

SEQ ID NO: 290683 - DNA, 75 bp, synthetic construct
  source 1..75: mol_type = other DNA
ttcttccgcccgaccgctccggccctttctgcgtttgtcggtgcttcgttactgtttatcagtaactttgtctgg

SEQ ID NO: 290684 - DNA, 75 bp, synthetic construct
  source 1..75: mol_type = other DNA
tttcctggttgtgtgagaaacgtcaaacctggcgtctatgctatttgttgggtgaggctggaagtggaaaaacct

SEQ ID NO: 290685 - DNA, 75 bp, synthetic construct
  source 1..75: mol_type = other DNA
gatcaagacggatgagaaatctaatgagattacagctatcccggaaattcttaacatgctggacattaaaggaaa

SEQ ID NO: 290686 - DNA, 75 bp, synthetic construct
  source 1..75: mol_type = other DNA
ttaacgccgccgaagcgggcagtgcgctgaccctgagcggcactggcactaatttcgcgacaggtacagtggtga

SEQ ID NO: 290687 - DNA, 75 bp, synthetic construct
  source 1..75: mol_type = other DNA
ctggtgactttgacacagaatcaggaaagggaaatttcactgatacggagctcacgaaaatcacaattggacaag

SEQ ID NO: 290688 - DNA, 75 bp, synthetic construct
  source 1..75: mol_type = other DNA
agaatataccggcgcacgtaacgcgcgtttctccatcttccccggttctggtttattcaaaaagccgccgaaatg

SEQ ID NO: 290689 - DNA, 75 bp, synthetic construct
  source 1..75: mol_type = other DNA
ccgtatggcaaagtgctggagctgatcgatgactgtatctcctgcggtgtggatcaactgatcgacgccaatggt

SEQ ID NO: 290690 - DNA, 75 bp, synthetic construct
  source 1..75: mol_type = other DNA
attagctatcttgtgctggcggggctgtgtgcctcactgctgggcgatgcgctaacgctattgccacgtcagcgt

SEQ ID NO: 290691 - DNA, 75 bp, synthetic construct
  source 1..75: mol_type = other DNA
cggcgcttcgttgctgtttatcagtaactttgtctggctgggtagccactatcgccgacgcttccgtgcggataa

SEQ ID NO: 290692 - DNA, 75 bp, synthetic construct
  source 1..75: mol_type = other DNA
caacgctgggtgtttaaaccgttaacccttcttctcctgctgttactggcctggcaagcgccgatgttcgacgcc

SEQ ID NO: 290693 - DNA, 75 bp, synthetic construct
  source 1..75: mol_type = other DNA
caaacagatcctataagacaggccgctaactggatgattgcaggagatttcaaccgttcacctgctatgttattt

SEQ ID NO: 290694 - DNA, 75 bp, synthetic construct
  source 1..75: mol_type = other DNA
caccgacagaaaataaatggaacacacatgttcgacaacttgtcacgggaagtggtgctgttgatatcctgatgg

SEQ ID NO: 290695 - DNA, 75 bp, synthetic construct
  source 1..75: mol_type = other DNA
gcgtctcaggaaaggaaaagcccctggcaagaaacgagcctctaagttctggggctgcacagcgtatcccgattg

SEQ ID NO: 290696 - DNA, 75 bp, synthetic construct
  source 1..75: mol_type = other DNA
taatcaccatgaccgcaatgcgctggcagataaactggatttgattgcacctgtattgtttgagcgtgatcccag

SEQ ID NO: 290697 - DNA, 75 bp, synthetic construct
  source 1..75: mol_type = other DNA
cattgatcaggctgaaagaagacatcagggatgagcggcagaaacttattgctgacgggaagtggtatccaccct

SEQ ID NO: 290698 - DNA, 75 bp, synthetic construct
  source 1..75: mol_type = other DNA
tgctgataccggcggtttcttttgccgatctaagtgattttaaagttgcaacctggaatttacaggggtcaagtg

SEQ ID NO: 290699 - DNA, 75 bp, synthetic construct
  source 1..75: mol_type = other DNA
aatatattgccgaggataaatacaggcaattaccagatttgttagcccataaatataaagaagaaccccataccg

SEQ ID NO: 290700 - DNA, 75 bp, synthetic construct
  source 1..75: mol_type = other DNA
aatcggggcacatcgggcgcaaaatggcggcaacgtttgccagcaccggtacaccttcatttttcgtccatcctg

SEQ ID NO: 290701 - DNA, 75 bp, synthetic construct
  source 1..75: mol_type = other DNA
atgtcgatgataaaaagctatgccgcaaaagaggctggcggcgaactggaagtttatgagtacgatcccggtgaa

SEQ ID NO: 290702 - DNA, 75 bp, synthetic construct
  source 1..75: mol_type = other DNA
tcgtgactgaggagaagttcaagcaaatcctcaaagacacagccggtttgggcactccggcaacacgcgcaagca

SEQ ID NO: 290703 - DNA, 75 bp, synthetic construct
  source 1..75: mol_type = other DNA
cagaatggacagtttgccgcccaatggataccaccagaagagtgcagtgacgagcaaggccggtgcgtcaataag

SEQ ID NO: 290704 - DNA, 75 bp, synthetic construct
  source 1..75: mol_type = other DNA
agtcaagcatcaagaaagcgctgagcaacgttaaggacggcaaggatacggtctcactctactatgccgctttgg

SEQ ID NO: 290705 - DNA, 75 bp, synthetic construct
  source 1..75: mol_type = other DNA
gaggacatacaatattatttggttaataaaaagctaaatttatatgcaacgcaggataagtattctgcatataaa

SEQ ID NO: 290706 - DNA, 75 bp, synthetic construct
  source 1..75: mol_type = other DNA
atcgccgatcgttgataaggaaatcgaagaatatctggcgacaaaacagctgaatttccgtgcaacgaccgataa

SEQ ID NO: 290707 - DNA, 75 bp, synthetic construct
  source 1..75: mol_type = other DNA
tgcgcgtaagcctaaggtggtcggcgtgtaccgtttgatcatgaaaagtggttccgataatttccgggcatcatc

SEQ ID NO: 290708 - DNA, 75 bp, synthetic construct
  source 1..75: mol_type = other DNA
aaagtcgtggtcatggggatgggaaaatcggggcacattggacgcaaaatggccgcaacgtttgccagcaccggt

SEQ ID NO: 290709 - DNA, 75 bp, synthetic construct
  source 1..75: mol_type = other DNA
atccaccgtctggtgatgaaagcgggttccgataacttccgatcctcagcgattcaggggatcatgaagcgcatc

SEQ ID NO: 290710 - DNA, 75 bp, synthetic construct
  source 1..75: mol_type = other DNA
agcggaggcgattaagcttttcgctaatacctacctggcaatgcgtgtcgcttacttcaacgaactggacagcta

SEQ ID NO: 290711 - DNA, 75 bp, synthetic construct
  source 1..75: mol_type = other DNA
cgggcgttttgccgcgttgctgcaggaaggtgcggttaaaaaagacattccgacgctgtttactgactcgactga

SEQ ID NO: 290712 - DNA, 75 bp, synthetic construct
  source 1..75: mol_type = other DNA
cgaacgtttcgctgatctgctgaaagaaggcgcgattaagcaggatatcccgaccctgtttaccgactctaccga

SEQ ID NO: 290713 - DNA, 75 bp, synthetic construct
  source 1..75: mol_type = other DNA
gagcaatttctacgcgaaaaaacactcaatttccgagcgacacaagatattgtcgaagcctatactggagcacaa

SEQ ID NO: 290714 - DNA, 75 bp, synthetic construct
  source 1..75: mol_type = other DNA
tattcagggcattatgaagcgcatcaaggcgaaaggtattccggttattatctatgaaccggtgatgcaggaaga

SEQ ID NO: 290715 - DNA, 75 bp, synthetic construct
  source 1..75: mol_type = other DNA
aacttttttcaactcgaaggtactaaccaatctgaatgagttcaaacagagttgtgatgttatcatagcaaatcg

SEQ ID NO: 290716 - DNA, 75 bp, synthetic construct
  source 1..75: mol_type = other DNA
taacaatccttcctttggctatggtggatattgtttaccaaaagataccaaacaactgctggccaattaccattc

SEQ ID NO: 290717 - DNA, 75 bp, synthetic construct
  source 1..75: mol_type = other DNA
tttgtgattattgcgacacctactgattatgatcctaaaaccaactatttcgacacctcaagcgttgagtcggtt

SEQ ID NO: 290718 - DNA, 75 bp, synthetic construct
  source 1..75: mol_type = other DNA
actgtgagcaaggtgcggtgccaacaattatgaatcgcggcggttttgccgagaagttgcgtgcagactggcaat

SEQ ID NO: 290719 - DNA, 75 bp, synthetic construct
  source 1..75: mol_type = other DNA
gcgtggggaacatctgtcgttcccccacggcggaacggctgctacgcagccatctgccgtcattgaccgtcgaat

SEQ ID NO: 290720 - DNA, 75 bp, synthetic construct
  source 1..75: mol_type = other DNA
aatatcacctgaggctagaggtaagacaatgctttttggtcattggctaaatcaacgtgatattcctgatccata

SEQ ID NO: 290721 - DNA, 75 bp, synthetic construct
  source 1..75: mol_type = other DNA
tcagaaattaaagctcagtatcatttttatcgtgcaaattatatatcatatcaagactttataataaatattatc

SEQ ID NO: 290722 - DNA, 75 bp, synthetic construct
  source 1..75: mol_type = other DNA
cagcagttttggcattgtgctggtgagcggtattttcaccgccttcctgctttcgccgctggcgatgcccgataa

SEQ ID NO: 290723 - DNA, 75 bp, synthetic construct
  source 1..75: mol_type = other DNA
agcgcggcgctacaggaaatctccagctattacccttgtggcattgcctgggttgatcgcaaaaacacctttgat

SEQ ID NO: 290724 - DNA, 75 bp, synthetic construct
  source 1..75: mol_type = other DNA
agcgttgccgccgagcacgcgatttcgctggaagggcactgcgcgcgacagatctctggccgtatgtgtcgtgag

SEQ ID NO: 290725 - DNA, 75 bp, synthetic construct
  source 1..75: mol_type = other DNA
cgttatcggggaattgacgaaacaaattcgtttatcagaaggtcacagtagagaagcagcacagataaaggctga

SEQ ID NO: 290726 - DNA, 75 bp, synthetic construct
  source 1..75: mol_type = other DNA
tcattcagcggctacgttcagcttactgagtggttaaactcgttgggatacccggtttcaaaatcatcagtgcat

SEQ ID NO: 290727 - DNA, 75 bp, synthetic construct
  source 1..75: mol_type = other DNA
aaatatcaaaatcaaatcacattactgtgattttcactcacaaccactgtctttccagaattgcaaaaaaaatga

SEQ ID NO: 290728 - DNA, 75 bp, synthetic construct
  source 1..75: mol_type = other DNA
taaatggcgttacccgtggtgttcgtggtgcatcaaatataattagtggcaataaaacatctgcacagagagcga

SEQ ID NO: 290729 - DNA, 75 bp, synthetic construct
  source 1..75: mol_type = other DNA
atgctgatgttgaagacacatcaagaaatttctcagcatacatgcagccaatcattctaactacttttgctttat

SEQ ID NO: 290730 - DNA, 75 bp, synthetic construct
  source 1..75: mol_type = other DNA
cgcaatggcactgaatgtgctgggcaaacaatttgataaattgcttaacatcactctctgttacccagaaaacaa

SEQ ID NO: 290731 - DNA, 75 bp, synthetic construct
  source 1..75: mol_type = other DNA
aaaattgctttagagcatgatatatcgctcgaaggacatatagccaaacaatttacttccacaatgtctagacat

SEQ ID NO: 290732 - DNA, 75 bp, synthetic construct
  source 1..75: mol_type = other DNA
ggctggcgtctgctgtggctgacgctgaaaaacggcgaaagcggcgtactggtgccggttgaaggggttaaaagt

SEQ ID NO: 290733 - DNA, 75 bp, synthetic construct
  source 1..75: mol_type = other DNA
ccagtaaacgcccggcgctgttatgggggatcatctgcctggtcatggcggcggcgttgctgatcctgctgccgc

SEQ ID NO: 290734 - DNA, 75 bp, synthetic construct
  source 1..75: mol_type = other DNA
ccgcaccattccactgaactccctggcgcggcaggaggaagatttacatctgctgaaaacggctgccccgacagt

SEQ ID NO: 290735 - DNA, 75 bp, synthetic construct
  source 1..75: mol_type = other DNA
gctgcgtaagctgatgcgctttgccgcccgcagcaaggttgcgccgaccaccgaactgttcccgatgtcgaaaat

SEQ ID NO: 290736 - DNA, 75 bp, synthetic construct
  source 1..75: mol_type = other DNA
aaccactgttgatgcaccatatcactgccaccagccgcgtcggcgtgattggtattggcgggctggggcatatcg

SEQ ID NO: 290737 - DNA, 75 bp, synthetic construct
  source 1..75: mol_type = other DNA
ccgaactgttcccgatgtcgaaaattaacgacgccattcagcatgtacgcgacggtaaggcgcgttaccgcgtgg

SEQ ID NO: 290738 - DNA, 75 bp, synthetic construct
  source 1..75: mol_type = other DNA
ggtcacggcattcatcaggatgtgccgccagaacatgctggcgtgtttgtggaggcagtgcatcggttatctgaa

SEQ ID NO: 290739 - DNA, 75 bp, synthetic construct
  source 1..75: mol_type = other DNA
gacagtggctggaagccatggcagaaaccggttgcgatgcgctgggcctcgactggacaacggacatcgccgatg

SEQ ID NO: 290740 - DNA, 75 bp, synthetic construct
  source 1..75: mol_type = other DNA
gcccaggcggtgatgattttcgacacctggggcggcgtgcttaccgggcgcgattatcaacagttctcgctctat

SEQ ID NO: 290741 - DNA, 75 bp, synthetic construct
  source 1..75: mol_type = other DNA
ggatggtgcacggcaacgacgtttcgccgtggcaaagcctggcgaaagtgcgcaatgccctgctgctggcgctgc

SEQ ID NO: 290742 - DNA, 75 bp, synthetic construct
  source 1..75: mol_type = other DNA
aatcacgactgaacagtagcgtgctggctatgttacccaaacaggcgatgggcgatattcccccagcgctgaatg

SEQ ID NO: 290743 - DNA, 75 bp, synthetic construct
  source 1..75: mol_type = other DNA
caggatgtgccgccagaacatgctggcgtgtttgtggaggcagtgcatcgactgtctgaacagtatcaccgctaa

SEQ ID NO: 290744 - DNA, 75 bp, synthetic construct
  source 1..75: mol_type = other DNA
tttgctggctgtattgtgttgttgcccatagcgaaatgctaaatgtcgaacaatccgggctgtttcgcgcgtggt

SEQ ID NO: 290745 - DNA, 75 bp, synthetic construct
  source 1..75: mol_type = other DNA
aagacgttccggtactgtgcggcaacggcttcggcatgtttgcgggtaaaaggaccgtcaggcagcccctgaagt

SEQ ID NO: 290746 - DNA, 75 bp, synthetic construct
  source 1..75: mol_type = other DNA
cgggggtagaacgccaggtgcgtaatctgctgtggaaagggaaatcgcaggcagagttttatcgtggtatggagt

SEQ ID NO: 290747 - DNA, 75 bp, synthetic construct
  source 1..75: mol_type = other DNA
acagaatatttacaacatcgggaaatttttcgtccttggggcagtcatgacactatagctgaagggcaacgcttt

SEQ ID NO: 290748 - DNA, 75 bp, synthetic construct
  source 1..75: mol_type = other DNA
tatcagatggcggttatctttggaatagtgggatgtttatgttcagagcatctgtatttatcgatgaactgaaaa

SEQ ID NO: 290749 - DNA, 75 bp, synthetic construct
  source 1..75: mol_type = other DNA
ccggtcgaatatccgctcgccgcacgctctctgctgcctcccgtatggccgcgcagcttacttcttttcgctatc

SEQ ID NO: 290750 - DNA, 75 bp, synthetic construct
  source 1..75: mol_type = other DNA
gcgccgcgcgtcaccggtcatgtggtctaccgtgcggttatcgatagtgctgatatgccggaagatttgcgtatt

SEQ ID NO: 290751 - DNA, 75 bp, synthetic construct
  source 1..75: mol_type = other DNA
ttgtgggaggcgggatcggcggtgcagcaactgcgctgtcactggcccgtcaggggatcaaggtagtgctgctgg

SEQ ID NO: 290752 - DNA, 75 bp, synthetic construct
  source 1..75: mol_type = other DNA
tatatggcgcaaggtgcctgtatggcgctggaagacgcggtaacgctgggtaaggcgctggcgcagtgtgagggt

SEQ ID NO: 290753 - DNA, 75 bp, synthetic construct
  source 1..75: mol_type = other DNA
ggcccttacgcggtgatccaccgcgttgatattcatgcctcggtgtgggaagcggtactgacgcatccggacgtg

SEQ ID NO: 290754 - DNA, 75 bp, synthetic construct
  source 1..75: mol_type = other DNA
ttaacccggtcaaagatgcactggagattttacctgaaaaaatcagggagagtatttcaaggcgaataaatgagg

SEQ ID NO: 290755 - DNA, 75 bp, synthetic construct
  source 1..75: mol_type = other DNA
ttggcgtcggcgacattgcccgccagcgcgcggtgtttaccgatcacatcaccatgatggatgcagtaaacgccg

SEQ ID NO: 290756 - DNA, 75 bp, synthetic construct
  source 1..75: mol_type = other DNA
ttattggtgccgtgggcgtaaaggatttggttgttgttgaaacgaaagatgcagtattagttgctcataaagata

SEQ ID NO: 290757 - DNA, 75 bp, synthetic construct
  source 1..75: mol_type = other DNA
gtatttcgtatatacatacctcgctggtcagtattaacatagctaccctgttgagcctgccaaatggcccccgaa

SEQ ID NO: 290758 - DNA, 75 bp, synthetic construct
  source 1..75: mol_type = other DNA
ggtcagtattaacgatagctaccctgttgagtcgccaaatggcccccgaactattgaattgattttaaatcatat

SEQ ID NO: 290759 - DNA, 75 bp, synthetic construct
  source 1..75: mol_type = other DNA
acagctacagaatgagatagcccagctcaggcaggcgctggagcaggaaaagaaacggggattctggtccaggtt

SEQ ID NO: 290760 - DNA, 75 bp, synthetic construct
  source 1..75: mol_type = other DNA
cgcagaaaaatacacacaccgtctcaggctcaagaagcaattacccgctggcctgccacttgttgcgatccgaca

SEQ ID NO: 290761 - DNA, 75 bp, synthetic construct
  source 1..75: mol_type = other DNA
cgcagaaaaatacacacaccgtctcaggctcaagaagcaattacccgctggactgccacttgttgcgatccgcca

SEQ ID NO: 290762 - DNA, 75 bp, synthetic construct
  source 1..75: mol_type = other DNA
gtatttcgtatatacatacctcgctggtcagtattaccatagctaccctgttgagactgccaaatggcccccgaa

SEQ ID NO: 290763 - DNA, 75 bp, synthetic construct
  source 1..75: mol_type = other DNA
cttgtgtgcgtttgctgctttaaaatatgcaaaaaatgatgaggatccattactacttgtattggctgctgatca

SEQ ID NO: 290764 - DNA, 75 bp, synthetic construct
  source 1..75: mol_type = other DNA
tgtttctgaaaatgaatcaacatatatacctgttggtgttccacatgccattgaaaatcctggcaagatcccgct

SEQ ID NO: 290765 - DNA, 75 bp, synthetic construct
  source 1..75: mol_type = other DNA
cgaaataattgaggttagatcaggagtctacctggaagaggatgatgttataagagtttcttcttctggagtagg

SEQ ID NO: 290766 - DNA, 75 bp, synthetic construct
  source 1..75: mol_type = other DNA
gtgcgttacaccgcaggtagcggcgatccgctggagcatgaatcagtcaaagctgtgaccgcagaagttgaagcg

SEQ ID NO: 290767 - DNA, 75 bp, synthetic construct
  source 1..75: mol_type = other DNA
gcgtgaaggtcttcgtcagggccagctgcgtggtggtgctgtgggtacattgatgagcaacatggggcttgaact

SEQ ID NO: 290768 - DNA, 75 bp, synthetic construct
  source 1..75: mol_type = other DNA
ttcagcatgtgaacaagcttttttatcgccatctaatgatctagattttattcgtgtggatcgtgataagttttc

SEQ ID NO: 290769 - DNA, 75 bp, synthetic construct
  source 1..75: mol_type = other DNA
gcagcaaaagctgccgcagaggcagatgatattttcggtgagctaagctctggtaagaatgcaccgaaaacgggg

SEQ ID NO: 290770 - DNA, 75 bp, synthetic construct
  source 1..75: mol_type = other DNA
ggttattgtctgccgaaagataccaagcagttactggcgaactatcagtctgtgccgaataacctgatctcggca

SEQ ID NO: 290771 - DNA, 75 bp, synthetic construct
  source 1..75: mol_type = other DNA
gtgaagcgtaagcgcaggaccgcaaagcagaagaaagagccggaagcgaagcagggcgattacctggtgggtacg

SEQ ID NO: 290772 - DNA, 75 bp, synthetic construct
  source 1..75: mol_type = other DNA
aagctgatgttattatttctaaccgtatgtctgccgatctggctgatgtagcagataaagtttatacgcgcgact

SEQ ID NO: 290773 - DNA, 75 bp, synthetic construct
  source 1..75: mol_type = other DNA
gaaccggatgatctctggtgacttctacccgcgcatggacataccgacactggatgggaacggggactgtcggtg

SEQ ID NO: 290774 - DNA, 75 bp, synthetic construct
  source 1..75: mol_type = other DNA
ttttatccggcttttttgttctatggcgtgaggcgaggggcaaagcgtcgtcgcagccatcatcgtggtgcatcc

SEQ ID NO: 290775 - DNA, 75 bp, synthetic construct
  source 1..75: mol_type = other DNA
atccgcgatgtgacagaaattaatcccaacgcggtaatggtgattaaatctacaattccggtaggtttcaccaaa

SEQ ID NO: 290776 - DNA, 75 bp, synthetic construct
  source 1..75: mol_type = other DNA
agaatctgatcttctctccggagtttttgcgcgaaggaagagcgctttatgataatctgcacccttcccgcattg

SEQ ID NO: 290777 - DNA, 75 bp, synthetic construct
  source 1..75: mol_type = other DNA
gctatgttggtctttccattgctgtattgctggcccaacaccatcaggttattgcactagatgttgtaccagaaa

SEQ ID NO: 290778 - DNA, 75 bp, synthetic construct
  source 1..75: mol_type = other DNA
atccatcgtctggttatgaaagcgggttctgataacttccgctcttccgccattcaggggattatgaagcgtata

SEQ ID NO: 290779 - DNA, 75 bp, synthetic construct
  source 1..75: mol_type = other DNA
aagccgacgtcattatctccaaccgtatggcagaagagcttaaggatgtggcagataaggtctacacccgcgatc

SEQ ID NO: 290780 - DNA, 75 bp, synthetic construct
  source 1..75: mol_type = other DNA
aagactttattgccgatgccattttgtcacgcaagccgcaagtggtgggtatttatcgtctgattatgaagagcg

SEQ ID NO: 290781 - DNA, 75 bp, synthetic construct
  source 1..75: mol_type = other DNA
tgagcgatgttattctctgtaatcgcatggcttctgaattagtcgatgtagctgaaaaggtttataccagagatc

SEQ ID NO: 290782 - DNA, 75 bp, synthetic construct
  source 1..75: mol_type = other DNA
cacgaaccgatctccatcgatgttactcaccgatctccttcacggtaatacgcagttatctattccacctcagtc

SEQ ID NO: 290783 - DNA, 75 bp, synthetic construct
  source 1..75: mol_type = other DNA
atgaccactattaccaaagaacgtattgaattatccattaaaaatccgcttgataacgggcttacccgtggcgaa

SEQ ID NO: 290784 - DNA, 75 bp, synthetic construct
  source 1..75: mol_type = other DNA
cgtcaaatcattgaaggtgtttgtcttgatccgcgtatcggcaatcattacaacaatccatcatttggttacggt

SEQ ID NO: 290785 - DNA, 75 bp, synthetic construct
  source 1..75: mol_type = other DNA
cgactctgtttactgattcaacagaagcagaggccattaaactgtttgccaatacttaccttgccatgcgcgtgg

SEQ ID NO: 290786 - DNA, 75 bp, synthetic construct
  source 1..75: mol_type = other DNA
taccgcatttcactggatgagcattacgaagatgggttgcgcattgatgagtcgcttcagctggttgaccgcctg

SEQ ID NO: 290787 - DNA, 75 bp, synthetic construct
  source 1..75: mol_type = other DNA
attccaaccgaagagacgatcaatggggcggctctcttgaaaaccgtatgcgtttcccactcagcgtcattgaga

SEQ ID NO: 290788 - DNA, 75 bp, synthetic construct
  source 1..75: mol_type = other DNA
atggatgttattctagaattgttaaagcttattgatctgtttatgaacgcctcattgaccacgcaaatacttgcg

SEQ ID NO: 290789 - DNA, 75 bp, synthetic construct
  source 1..75: mol_type = other DNA
attatcacgttgcgctggataacgcgcgtgagaaagcgcgtggcgcgaaagcgatcggcaccaccggtcgtggta

SEQ ID NO: 290790 - DNA, 75 bp, synthetic construct
  source 1..75: mol_type = other DNA
agtcaattgttcaacgcttaagccagcatgaagatttgttcggatttcagggagatgaagaatttctctacgata

SEQ ID NO: 290791 - DNA, 75 bp, synthetic construct
  source 1..75: mol_type = other DNA
tcttttccccgccttctctgtttatgacttgccagaaatcacatcaccttccctttgattattctctttttcctc

SEQ ID NO: 290792 - DNA, 75 bp, synthetic construct
  source 1..75: mol_type = other DNA
agcgtcgccgcagaacatcaactgtctctggaaggtcactgtgcacggcaaatcagccgccgcctgtgtcgcaac

SEQ ID NO: 290793 - DNA, 75 bp, synthetic construct
  source 1..75: mol_type = other DNA
agcgccatatcgaacgcttatgcgagatggcacctgagatgcgcggcaaagtgatgctgtttggtcactgggata

SEQ ID NO: 290794 - DNA, 75 bp, synthetic construct
  source 1..75: mol_type = other DNA
ccaacagcttgaacacgactattcgctactaagaaccaaaggccctaaaacaaaaacctctttagcattgccctg

SEQ ID NO: 290795 - DNA, 75 bp, synthetic construct
  source 1..75: mol_type = other DNA
agtgatagagataacgcctctccccaaaaaaaatcttattgtatcagcacctcaatccagaagagcttcgctttc

SEQ ID NO: 290796 - DNA, 75 bp, synthetic construct
  source 1..75: mol_type = other DNA
tcaattatattccagatcgcgacaacggttttcttttcaatttaaaagcatcttgcagtgaaactcttgatatga

SEQ ID NO: 290797 - DNA, 75 bp, synthetic construct
  source 1..75: mol_type = other DNA
tcgatgaagatttccaaatggaacagcaggccaatgctgaattcatcgctgcagccaatccggctaccgtcttgg

SEQ ID NO: 290798 - DNA, 75 bp, synthetic construct
  source 1..75: mol_type = other DNA
atcacatctacaggtaaaatgaatggtttctcattcgaatacgccgggattgctttcaaagcttcgcaattagct

SEQ ID NO: 290799 - DNA, 75 bp, synthetic construct
  source 1..75: mol_type = other DNA
tgtttgaactgaaagcatctgtcagagaaacatctgttagtgcaacttatgatatgaccataactacagatgctt

SEQ ID NO: 290800 - DNA, 75 bp, synthetic construct
  source 1..75: mol_type = other DNA
aaagcagaatcgactaccaacaggaacgtgataatgctttcctgtttaaactgaaatcaactgtcagagaaacat

SEQ ID NO: 290801 - DNA, 75 bp, synthetic construct
  source 1..75: mol_type = other DNA
cccaagcgaagctatgcagtgtcagcgttcaggtggttggaatacatcccctacctcgatgtaatttatcgtatg

SEQ ID NO: 290802 - DNA, 75 bp, synthetic construct
  source 1..75: mol_type = other DNA
acctaagtttagatggctagaaacaattccctatattgatgcagttattagtctactaaaaaacatcaaaatact

SEQ ID NO: 290803 - DNA, 75 bp, synthetic construct
  source 1..75: mol_type = other DNA
tctgcgggtaagatgaacggtttttcattcgaatatagggggattgctttcaaagcttcgcagctcggtaagggt

SEQ ID NO: 290804 - DNA, 75 bp, synthetic construct
  source 1..75: mol_type = other DNA
atgcttgaagccagagagttactttgcgagcgggatgaacgaaccttatttagtggtttatcatttacgctgaac

SEQ ID NO: 290805 - DNA, 75 bp, synthetic construct
  source 1..75: mol_type = other DNA
ggtcaagggtggcttggtgatgataccagcatccctgaatgcgatgtaatcaattggatgccgctaccagaacca

SEQ ID NO: 290806 - DNA, 75 bp, synthetic construct
  source 1..75: mol_type = other DNA
aattgtcggtgccgttcacgaatgccttaatgcaaaactggattccttagcggcaattattgagaagttttgcga

SEQ ID NO: 290807 - DNA, 75 bp, synthetic construct
  source 1..75: mol_type = other DNA
tggcagaaaaacgttcgccagaactcgccgggtggataaaagaacacgtcagttttccgggaaccatggtcgacc

SEQ ID NO: 290808 - DNA, 75 bp, synthetic construct
  source 1..75: mol_type = other DNA
tgggaagatatagaggattttggggaaacacatctcgattttttaaaacaatacggtaattttgaaaatggtatt

SEQ ID NO: 290809 - DNA, 75 bp, synthetic construct
  source 1..75: mol_type = other DNA
gcaaatcgcgatggatggcagccagaaattaccgcagcgtatgctggcaggcattcgcatacatctggcgcgcgg

SEQ ID NO: 290810 - DNA, 75 bp, synthetic construct
  source 1..75: mol_type = other DNA
tattattggagccgttcgcgagtgcctgaatgcaaaactggattccttagcggcgattattgagaagttttgcga

SEQ ID NO: 290811 - DNA, 75 bp, synthetic construct
  source 1..75: mol_type = other DNA
tcccgcagcatgtacactcgccccgctacgatcggcaacaattgaaatctcgtatcgttcattttggatttggag

SEQ ID NO: 290812 - DNA, 75 bp, synthetic construct
  source 1..75: mol_type = other DNA
ttatgacaagagtcgccgcaggggagcgattcatgtcattagtgcgttctcaacaatgcacagtctggtcatcgg

SEQ ID NO: 290813 - DNA, 75 bp, synthetic construct
  source 1..75: mol_type = other DNA
gcgttctcaacaatgcacagtctggtcatcggacagatcaggacggatgagaaatctaatgagattacagctatc

SEQ ID NO: 290814 - DNA, 75 bp, synthetic construct
  source 1..75: mol_type = other DNA
tctcctttcggtccataatagcagaacaaaagaaagagccagaaatgacggtcagatattatatcagttctgctg

SEQ ID NO: 290815 - DNA, 75 bp, synthetic construct
  source 1..75: mol_type = other DNA
acacatctcgattttttgaagcaatatggtgattttgaaaatggtattcctgttcacgataccattgccagagtt

SEQ ID NO: 290816 - DNA, 75 bp, synthetic construct
  source 1..75: mol_type = other DNA
gttatttctggtgcagaaagttgggaagatatagaggatttcggggaaacacatctcgatttcttgaagcaatat

SEQ ID NO: 290817 - DNA, 75 bp, synthetic construct
  source 1..75: mol_type = other DNA
gatatagaggattttggggaaacacatctcgatttcttgaagcaatatggtgattttgaaaatggtattcctgtt

SEQ ID NO: 290818 - DNA, 75 bp, synthetic construct
  source 1..75: mol_type = other DNA
tctgtcgaagcgcttcttccagaagctgttgcaactaacaaagaagcgatagcaaccgaagcgttaaaagtagcg

SEQ ID NO: 290819 - DNA, 75 bp, synthetic construct
  source 1..75: mol_type = other DNA
ttcgcgcaacagctcggcacgccatatccgatctctgataagcgtattttgcaggcgatggagcaggttaccgcc

SEQ ID NO: 290820 - DNA, 75 bp, synthetic construct
  source 1..75: mol_type = other DNA
ggcccggtctggacggaagaaggctttgctgcgctgcatgagaaagtgcgtgccgaactgaacgacacggtggta

SEQ ID NO: 290821 - DNA, 75 bp, synthetic construct
  source 1..75: mol_type = other DNA
cgcgagttacggcggatgaccggcgttaccgttgaccgcgaagactggcactgggatcaggtgcccgatcacctg

SEQ ID NO: 290822 - DNA, 75 bp, synthetic construct
  source 1..75: mol_type = other DNA
ggaataaactcagatgttaatgagtttgtgaaaaaacaaccacactccaacagattacagtggagtctggccagt

SEQ ID NO: 290823 - DNA, 75 bp, synthetic construct
  source 1..75: mol_type = other DNA
tcgaaccttatttgaaggtcaaaaggttaccttctctatagagagtggtgctaaaggtcctgcagcagcaaatgt

SEQ ID NO: 290824 - DNA, 75 bp, synthetic construct
  source 1..75: mol_type = other DNA
taaaatggtttaactctgacaaaggtttcggcttcattacgccagctgacggcagcaaagatgtttttgttcatt

SEQ ID NO: 290825 - DNA, 75 bp, synthetic construct
  source 1..75: mol_type = other DNA
gcgatgcgcagttttccctatgagttgaccgaaggtgaatgtcagaaagtgatgatagccattgcactggcgaat

SEQ ID NO: 290826 - DNA, 75 bp, synthetic construct
  source 1..75: mol_type = other DNA
attatcgaaccttatttgaaggtcaaaaggttaccttctctgtagagagtggtgctaaaggtcctgcggcagcaa

SEQ ID NO: 290827 - DNA, 75 bp, synthetic construct
  source 1..75: mol_type = other DNA
tccggattcggcggaagagattgcagagatgcttcttgaatttgtcgggacccctaggcttcggcaatcctttcc

SEQ ID NO: 290828 - DNA, 75 bp, synthetic construct
  source 1..75: mol_type = other DNA
gaaagatgcgctgaaaggcaaagtgcaggaaacgctgtctgcggtggcggatgacggtatcgagcagagcggact

SEQ ID NO: 290829 - DNA, 75 bp, synthetic construct
  source 1..75: mol_type = other DNA
cctgctgatgcagtatgacaccatcatcatcgatgaagcgcacgagcgtagcctgaacattgattttctgctcgg

SEQ ID NO: 290830 - DNA, 75 bp, synthetic construct
  source 1..75: mol_type = other DNA
ggcccggtctggacggaagaaggctttgctgcgctgcatgaaaaagtgcgtgccgaactgaacgacacggtggtg

SEQ ID NO: 290831 - DNA, 75 bp, synthetic construct
  source 1..75: mol_type = other DNA
aggtggattactgcgggatctgccattccgatctgtcgatgatcgataacgaatggggattttcacaatatccgc

SEQ ID NO: 290832 - DNA, 75 bp, synthetic construct
  source 1..75: mol_type = other DNA
gctgcaaaccgggaaacgattctggagaaaatccttcagcttgaagaaaaaattcgtctggaaagacaacaggaa

SEQ ID NO: 290833 - DNA, 75 bp, synthetic construct
  source 1..75: mol_type = other DNA
ccggcggaatcggagtacggacaaaatcatggtgttgggtgaagaagcgatttttaccacgcaaagtcgcgatcc

SEQ ID NO: 290834 - DNA, 75 bp, synthetic construct
  source 1..75: mol_type = other DNA
atctgcagactcagcaatatggggcgttacagcgccgttttgcattacctgagcagttagcgagagaagagtcgc

SEQ ID NO: 290835 - DNA, 75 bp, synthetic construct
  source 1..75: mol_type = other DNA
gatcaaggccattccaaatattgcttcaacagggaaaatgaacggcttatcattcgaatacagcggaatttcttt

SEQ ID NO: 290836 - DNA, 75 bp, synthetic construct
  source 1..75: mol_type = other DNA
gactatatgaagcgtatggacttctctgaaacgcatctacgtgcatacgtgcttcatgatgataaagatggtcaa

SEQ ID NO: 290837 - DNA, 75 bp, synthetic construct
  source 1..75: mol_type = other DNA
actacaatcctgaccacttagaagctatacgagcgaccaagaaggctatccctgctcctgctcctgctcctgctc

SEQ ID NO: 290838 - DNA, 75 bp, synthetic construct
  source 1..75: mol_type = other DNA
atacggtcggtgcggttctcacgccgctgtctgttccggcctttacgttaattgcgggcgaccgcagcatctctg

SEQ ID NO: 290839 - DNA, 75 bp, synthetic construct
  source 1..75: mol_type = other DNA
aaagcactggcggggcagtttgatctcattatcaacaccgtcaacgtcagcctcgactggcagccttattttgag

SEQ ID NO: 290840 - DNA, 75 bp, synthetic construct
  source 1..75: mol_type = other DNA
caaaaggtgacaaaggcgatccgggagtggctggaccagcaggtccggcaggtgcgccggggccgaaaggcgata

SEQ ID NO: 290841 - DNA, 75 bp, synthetic construct
  source 1..75: mol_type = other DNA
gttacagcgtcgttttgctttgccggagctattaacaagagaagagtctccgcagcaaaaccagaccaggggcga

SEQ ID NO: 290842 - DNA, 75 bp, synthetic construct
  source 1..75: mol_type = other DNA
gaaagaaatccagcagttcaatcagcttcagcgcgccatcaccattcttgataacgatctcctgcaacttgtcat

SEQ ID NO: 290843 - DNA, 75 bp, synthetic construct
  source 1..75: mol_type = other DNA
gcccgcagcaaggttgcgccgacaaccgaactgttcccgatgtcgaaaattaacgacgccattcagcatgtacgc

SEQ ID NO: 290844 - DNA, 75 bp, synthetic construct
  source 1..75: mol_type = other DNA
agatcgatgctatggcgcagcagataaagaagcgcaggccttctaaacagcgcagaagcggtgagttacaagaca

SEQ ID NO: 290845 - DNA, 75 bp, synthetic construct
  source 1..75: mol_type = other DNA
tgagtggtttgagttacaaattaattctcgaaacagcttacaagtaaaaagtagcgccaacacgaacgttgtagc

SEQ ID NO: 290846 - DNA, 75 bp, synthetic construct
  source 1..75: mol_type = other DNA
ggatgaagtgaatgtggcgtctctcactgatttactccgctgcgaattgaaacattgtcagctcattgtatcttc

SEQ ID NO: 290847 - DNA, 75 bp, synthetic construct
  source 1..75: mol_type = other DNA
aactgctcgcgactgaagatatcaccgccgaagaggcggcagtggcacgcagtaacgcgctggcggcgttgctgg

SEQ ID NO: 290848 - DNA, 75 bp, synthetic construct
  source 1..75: mol_type = other DNA
cgttgctggaccacgaaggcgtaatggcggatattcgtggcattacactgtcaaataatgctgccatgcgccttc

SEQ ID NO: 290849 - DNA, 75 bp, synthetic construct
  source 1..75: mol_type = other DNA
gtggataacggaacacaacattcccgcctaacaacgtttgccaactatttacgctggtatgctatgcatatctta

SEQ ID NO: 290850 - DNA, 75 bp, synthetic construct
  source 1..75: mol_type = other DNA
tacatcaataatcctgaacgcacggcaaaagctgcatctcttaaagaagagatatccaccctaaaggacacattg

SEQ ID NO: 290851 - DNA, 75 bp, synthetic construct
  source 1..75: mol_type = other DNA
ggttaccgtgacgaagcagaacgtatggctgatcagcaagcagaaattgttaagaagatggtgtttgaaaccctg

SEQ ID NO: 290852 - DNA, 75 bp, synthetic construct
  source 1..75: mol_type = other DNA
attctttggtgagcaccctatcagagggacaaaaaggcttaaggaggaaaaaccagacacaggctatctcacaca

SEQ ID NO: 290853 - DNA, 75 bp, synthetic construct
  source 1..75: mol_type = other DNA
catgatgctgttatgtctatgagttctggtcaagtatctgcactcagcctcgctttcttcttgtcgctcaacaag

SEQ ID NO: 290854 - DNA, 75 bp, synthetic construct
  source 1..75: mol_type = other DNA
tggacggatgggcgtcttgagtggtttgagtcacaaattaatgcccgaaacagcctacaagtaaaaagcagcgcc

SEQ ID NO: 290855 - DNA, 75 bp, synthetic construct
  source 1..75: mol_type = other DNA
tcgaaagattattgcccttctgccactcaaagccacgataaaaaccagagttcacaacgaggcaattgatgccga

SEQ ID NO: 290856 - DNA, 75 bp, synthetic construct
  source 1..75: mol_type = other DNA
gtggcacgcagtaacgcgctggcggcgttgctggaccacgaaggcgtaatggcggatatccggggtatcacgctg

SEQ ID NO: 290857 - DNA, 75 bp, synthetic construct
  source 1..75: mol_type = other DNA
tatcttgtgaaaaataataccgatctgttccgtgtgtattattatattgttttatctttccttttattactcatg

SEQ ID NO: 290858 - DNA, 75 bp, synthetic construct
  source 1..75: mol_type = other DNA
cttttgtatatacatttactacaagacttaatgacagaaaaaagcgtattgcatggtgctttacttatataatcc

SEQ ID NO: 290859 - DNA, 75 bp, synthetic construct
  source 1..75: mol_type = other DNA
atgaaaacagcgatatgggtggtggtgtatttcacgatgtgttttctgcttttcacaggctggattttcgccttt

SEQ ID NO: 290860 - DNA, 75 bp, synthetic construct
  source 1..75: mol_type = other DNA
gagcaaagccagccaggcggcgatgaacatcgtggtgaacgcgggaattccgctgcgcaccaacggtcgctacgc

SEQ ID NO: 290861 - DNA, 75 bp, synthetic construct
  source 1..75: mol_type = other DNA
acaattgagaccgcgcaacaggaaatccgtctgatgggctattccttcacctctccggaggtggccagggcacta

SEQ ID NO: 290862 - DNA, 75 bp, synthetic construct
  source 1..75: mol_type = other DNA
cagcctgtctttgtttgcaccttttccggttgtgtatgccgacagcatcgagacgggatattcgccggaaggaac

SEQ ID NO: 290863 - DNA, 75 bp, synthetic construct
  source 1..75: mol_type = other DNA
aagcccgtgaagagttggaggcctcgaagccgaagttctccgtcgtcagtttctggactgcggtcgagattttac

SEQ ID NO: 290864 - DNA, 75 bp, synthetic construct
  source 1..75: mol_type = other DNA
aacaatggtctggattttctggataaagcccgtgaagagttggaggcctcgaagccgaagttctccgtcgtcagt

SEQ ID NO: 290865 - DNA, 75 bp, synthetic construct
  source 1..75: mol_type = other DNA
cggaaaatacccgcacggcaatccattcctgcgatggcgaaatcaatctgaatgatttaattgccagggaagcca

SEQ ID NO: 290866 - DNA, 75 bp, synthetic construct
  source 1..75: mol_type = other DNA
tagtctgtccgcactcttaacttttgtgggttacatcatatatgcaaaatggttcactcataactggctgaaagg

SEQ ID NO: 290867 - DNA, 75 bp, synthetic construct
  source 1..75: mol_type = other DNA
atggctcaaaaaatcaacataaggagttttcgtgatccctggctggctggtttttttgtccactcaacgccacat

SEQ ID NO: 290868 - DNA, 75 bp, synthetic construct
  source 1..75: mol_type = other DNA
cagctctctgaaaagaatattcaaatcggtaactgcaatgagtgccatcagcatgcgacggtaacagggactgaa

SEQ ID NO: 290869 - DNA, 75 bp, synthetic construct
  source 1..75: mol_type = other DNA
tggagaagcgtttcggggaatctgtagatcgccgtagggcaaaaaatggcgatagagaatacatggcatgggata

SEQ ID NO: 290870 - DNA, 75 bp, synthetic construct
  source 1..75: mol_type = other DNA
tgcgtgaaaaggcagagaaagcaacgtgtggtgtgtggtcgctcgaatatggagaggaccgatttgatggtgatg

SEQ ID NO: 290871 - DNA, 75 bp, synthetic construct
  source 1..75: mol_type = other DNA
cgccagctcaatattaaaacctgtcaatgtcggaactacgaacgtcgtttcgagtttgaacccgactgcattaaa

SEQ ID NO: 290872 - DNA, 75 bp, synthetic construct
  source 1..75: mol_type = other DNA
tttgtaatactttttgccgcctgaaagcggcggcaaaacttgcatcgctgtgccagactggttataaggtgcgtt

SEQ ID NO: 290873 - DNA, 75 bp, synthetic construct
  source 1..75: mol_type = other DNA
ccgttccgtgaggtgaagcggttacgtgaagctgttacggaaatggcttttttgtccagtgaagagattacgcgg

SEQ ID NO: 290874 - DNA, 75 bp, synthetic construct
  source 1..75: mol_type = other DNA
agttttcagaaacagtattcactaactgcccggaatgttttggtgatgatgattgcgaaacttgtgactgcagcg

SEQ ID NO: 290875 - DNA, 75 bp, synthetic construct
  source 1..75: mol_type = other DNA
taatatgctcggcacgctataccgggagcaccttccggcgcggagctgcaacggttaagccgggtaacggtattg

SEQ ID NO: 290876 - DNA, 75 bp, synthetic construct
  source 1..75: mol_type = other DNA
ttcctcgcttatctgggctatctggctgggttcgcccacatcagcgactgtatgcaaaaccgcgtatttcgtcat

SEQ ID NO: 290877 - DNA, 75 bp, synthetic construct
  source 1..75: mol_type = other DNA
aacgcgtaaccgccctgctttccctgcgtgaagttttcggtgatgatctgccagataacccgcattttgtgcagg

SEQ ID NO: 290878 - DNA, 75 bp, synthetic construct
  source 1..75: mol_type = other DNA
aaacttacaagttgcacgagctatcgggcaactctccggtaactccggatggttggataagctgtagtgagcgaa

SEQ ID NO: 290879 - DNA, 75 bp, synthetic construct
  source 1..75: mol_type = other DNA
tccaatctatctggtgcatacaatatgttttctgagttctggaatgttgctgtctcagctgcgcctaaggtggat

SEQ ID NO: 290880 - DNA, 75 bp, synthetic construct
  source 1..75: mol_type = other DNA
gtgagcaagattgactatcaggcactgcgtgaagcggcagaaaaagcaacgtgtggtgagtggtcgctcgaatat

SEQ ID NO: 290881 - DNA, 75 bp, synthetic construct
  source 1..75: mol_type = other DNA
aatgaatgatccaagggttagccagattaatgctcgtttcatggctgcttatcgaagctcccgtttatctttggg

SEQ ID NO: 290882 - DNA, 75 bp, synthetic construct
  source 1..75: mol_type = other DNA
gtgggcctagtgaattacgttcggtcgggcagcgaatcatctggttaagcgagcgtctgtcatggctggagtccc

SEQ ID NO: 290883 - DNA, 75 bp, synthetic construct
  source 1..75: mol_type = other DNA
gcttttgccaatagcaatactgaaatggtgcaggccactcgctctgtagttttctcacgcgggcagcagctccag

SEQ ID NO: 290884 - DNA, 75 bp, synthetic construct
  source 1..75: mol_type = other DNA
gtggcccgagtgagttacgttcggttgggcagcgtattctttggttaagcgagcgcctgtcatggctggaatccc

SEQ ID NO: 290885 - DNA, 75 bp, synthetic construct
  source 1..75: mol_type = other DNA
tggttcaggtaacgggctatggcagccgtggcgaacgctggattattgatcgttacaacatcacgcagtcattgc

SEQ ID NO: 290886 - DNA, 75 bp, synthetic construct
  source 1..75: mol_type = other DNA
ggagcaacgaaaaagtgaactgcttgagcagcgggcagagccagttccttccagcagtgtgccggatggcgttaa

SEQ ID NO: 290887 - DNA, 75 bp, synthetic construct
  source 1..75: mol_type = other DNA
actgcttgattataaccgcaaacaggcagacggagcggtggaactggaagaggtcgatctcgcaccgctggtgga

SEQ ID NO: 290888 - DNA, 75 bp, synthetic construct
  source 1..75: mol_type = other DNA
ctgagtacctgcaggacgcggtaacgcttaatcctttacgcggtggcactgatgctctgagtgtccacacaatgt

SEQ ID NO: 290889 - DNA, 75 bp, synthetic construct
  source 1..75: mol_type = other DNA
gtcgatatgaagtggacgtcagacctgcagggcgcaacggaaagcgcatccgcaggaagttcgataagaaaagtg

SEQ ID NO: 290890 - DNA, 75 bp, synthetic construct
  source 1..75: mol_type = other DNA
cacacatgcactaaggcacagctttgccactcatttcatgattaatggaggaagtattatcacgctacaacggat

SEQ ID NO: 290891 - DNA, 75 bp, synthetic construct
  source 1..75: mol_type = other DNA
agttcacatggtgcgcgggtttatattgatgtcatcaatacaggcacgcccattccgcaagaggaacgcgccatg

SEQ ID NO: 290892 - DNA, 75 bp, synthetic construct
  source 1..75: mol_type = other DNA
ggctggcaatcgctggtactgtttttggtaagcctggtaatggtgctgcttttcacacggatgattatcggtccg

SEQ ID NO: 290893 - DNA, 75 bp, synthetic construct
  source 1..75: mol_type = other DNA
ttacctcgttgatagatgcagagctatttttcggtgaacaccctttcagaggtgttaagcgactgaaagaggaca

SEQ ID NO: 290894 - DNA, 75 bp, synthetic construct
  source 1..75: mol_type = other DNA
ttcagttaacactctctccggttccgttgcaggacgcaaacatcaatcgtcgtcgtatttatcgttctgtctcag

SEQ ID NO: 290895 - DNA, 75 bp, synthetic construct
  source 1..75: mol_type = other DNA
cagagtcagtttaatccgtcgtccattgtggcttactcatggcgtggtgagtacattgcctgttacacgaaacct

SEQ ID NO: 290896 - DNA, 75 bp, synthetic construct
  source 1..75: mol_type = other DNA
aacattcacaattaagccaaaaacaatttttcattaccgtgacgatttctggtttgcatggccggatgtggtgga

SEQ ID NO: 290897 - DNA, 75 bp, synthetic construct
  source 1..75: mol_type = other DNA
aaacgaaggcgaattgccagccgtacctattgagcctgttcacatttacgggaggaatagagaagatgaaaataa

SEQ ID NO: 290898 - DNA, 75 bp, synthetic construct
  source 1..75: mol_type = other DNA
gtttcggcggcagccaggaagtctggcgtcaccactctgcggtgaccggcacgccgatgactttttccgtgtttc

SEQ ID NO: 290899 - DNA, 75 bp, synthetic construct
  source 1..75: mol_type = other DNA
gcatgtgttgacctggttaacgatgttatgcgggtggtatcaggacaaaacatgtctgcgatcgccggagggagt

SEQ ID NO: 290900 - DNA, 75 bp, synthetic construct
  source 1..75: mol_type = other DNA
cggctggtaattatgccatgttcagcggggacatcactgccgacaatggtactgccgttagactaaattttggct

SEQ ID NO: 290901 - DNA, 75 bp, synthetic construct
  source 1..75: mol_type = other DNA
acaaaaagaattaacgtttaactgtactaatatttctgatggtgtccatatctatctgagtcttgaaggtacgcc

SEQ ID NO: 290902 - DNA, 75 bp, synthetic construct
  source 1..75: mol_type = other DNA
caacaggtaaagaatgtgatccagatcatccggaaacaggttgggttacaggaagtaaaggggagttaaaactat

SEQ ID NO: 290903 - DNA, 75 bp, synthetic construct
  source 1..75: mol_type = other DNA
tttgcctgatggctaatggtattgccgccgggtttgccggtaatgaagtgatgttttcggaagcgtatctgccgt

SEQ ID NO: 290904 - DNA, 75 bp, synthetic construct
  source 1..75: mol_type = other DNA
agctgcacttatacatgagagtgtcaataatgcaggtgccgaagctcatcaaatacaggcaaaaaaacttcgaga

SEQ ID NO: 290905 - DNA, 75 bp, synthetic construct
  source 1..75: mol_type = other DNA
ctgatgtttgataaatataatacatcatggaccggaaaaatcactgccctgaaaggtgatgcctcaatggttaat

SEQ ID NO: 290906 - DNA, 75 bp, synthetic construct
  source 1..75: mol_type = other DNA
aaacgaaggtgaattgccagccgtgccaattgagccagttcatatttacggacggagtaacgacaatgaagccta

SEQ ID NO: 290907 - DNA, 75 bp, synthetic construct
  source 1..75: mol_type = other DNA
ccgggtaaggtgagtactgaccctcagaatacatctcaggggaaggtgacaaaaacgataaacatatcctgccca

SEQ ID NO: 290908 - DNA, 75 bp, synthetic construct
  source 1..75: mol_type = other DNA
cgctgcttctgacatcggtcactgtactggctgatgtgcagattaacatcagaggaaatgtctttgttcccccat

SEQ ID NO: 290909 - DNA, 75 bp, synthetic construct
  source 1..75: mol_type = other DNA
tataacagtggaaatccgtggatcaaggtgaccggaagagtggataacaattcacttatgaccgatatgacaaat

SEQ ID NO: 290910 - DNA, 75 bp, synthetic construct
  source 1..75: mol_type = other DNA
tgttatccgcaggatcctgctgagttaaataaagagttaatgcttcgcggcctggaaataccaggccagtggttt

SEQ ID NO: 290911 - DNA, 75 bp, synthetic construct
  source 1..75: mol_type = other DNA
aagttgtgattaaacaaaatggctatgtcatttaccaaacatgggtatcagcagggccatttgaaattaaagact

SEQ ID NO: 290912 - DNA, 75 bp, synthetic construct
  source 1..75: mol_type = other DNA
gatctggaagtcaccatcaaagaaacaaatgggcaagaacacagttttattcaggccagttcaacggttccaatt

SEQ ID NO: 290913 - DNA, 75 bp, synthetic construct
  source 1..75: mol_type = other DNA
atgagataagaagcgttcatcaaaaaataaatcaattgtgtgatgttcataatattatatcgaaaaatgaaacgg

SEQ ID NO: 290914 - DNA, 75 bp, synthetic construct
  source 1..75: mol_type = other DNA
tgtttgtctcatctatatcaatagcgtcgatctcactcatgagatatatctggttgtttactaaatttagtaaat

SEQ ID NO: 290915 - DNA, 75 bp, synthetic construct
  source 1..75: mol_type = other DNA
atcagtttgccgttatcttgttcgaagataaaacaggcggcgcatggtgtaagaaagtcactggtgctgaagcac

SEQ ID NO: 290916 - DNA, 75 bp, synthetic construct
  source 1..75: mol_type = other DNA
cgccgcatatctatttatgttgcgatccggtgcgcccgtatgtttctgccgcgctgcctcatgcggtacgtcgct

SEQ ID NO: 290917 - DNA, 75 bp, synthetic construct
  source 1..75: mol_type = other DNA
tgcgcgcgttgagaatggcgctattgtcagccactgccgtattaaatgtttacagtctcaacaagggaagagtgg

SEQ ID NO: 290918 - DNA, 75 bp, synthetic construct
  source 1..75: mol_type = other DNA
tacgtgaagatgaatttgtcacatcattgcaggttctgaaagaggcagagtttaaggctggtttttctgcttttg

SEQ ID NO: 290919 - DNA, 75 bp, synthetic construct
  source 1..75: mol_type = other DNA
gaatttgcaaccagggcatgtaaataattatttcaaggttaatgattttttagatgttaccactaaggtttatgt

SEQ ID NO: 290920 - DNA, 75 bp, synthetic construct
  source 1..75: mol_type = other DNA
ggtcggtcaggtaattgaacgtaaactcaccagcaaaggcgtcacctttaccgtcgccattgaaccacagcatcg

SEQ ID NO: 290921 - DNA, 75 bp, synthetic construct
  source 1..75: mol_type = other DNA
tgaccggcaaaaccttcgaactggtgcccggcgatggcgagccacgtaaagagttcgtggttgtgccaggcgaaa

SEQ ID NO: 290922 - DNA, 75 bp, synthetic construct
  source 1..75: mol_type = other DNA
tctgattaccgcacgcaatgaagtacaggcaaaggcggtactttacccggaatatgtccagacctttgctcgcgg

SEQ ID NO: 290923 - DNA, 75 bp, synthetic construct
  source 1..75: mol_type = other DNA
aaagcccaggaaggcaaacacttcctgttactggaaagcgaaccgaaagagtggcgtgagtggggaactgcacta

SEQ ID NO: 290924 - DNA, 75 bp, synthetic construct
  source 1..75: mol_type = other DNA
tgccgggcgataaaggcgagatgaaagccagctatccgctgtatgccaatctggaaaaagccctggaaaacagcc

SEQ ID NO: 290925 - DNA, 75 bp, synthetic construct
  source 1..75: mol_type = other DNA
ctggttattatcctgcaattatagatgaaacaacattctacaaagtccagcaactatcatatgctcgttacggta

SEQ ID NO: 290926 - DNA, 75 bp, synthetic construct
  source 1..75: mol_type = other DNA
ctctgattatcacaggctttagcgatacaagaagcggtatatatcgctgtccttctcgaaatgaaaaccgttgca

SEQ ID NO: 290927 - DNA, 75 bp, synthetic construct
  source 1..75: mol_type = other DNA
agacaaacatcaatatatttgtgtgcgccataaagatactgataaagaccacatccatattgtagccaatcgcat

SEQ ID NO: 290928 - DNA, 75 bp, synthetic construct
  source 1..75: mol_type = other DNA
atgccaattcgctatctcggtattgatatcgggcaaatccagacgctggatctgattaccgcacgcaatgaagta

SEQ ID NO: 290929 - DNA, 75 bp, synthetic construct
  source 1..75: mol_type = other DNA
aactggaactgccgagtggggccggattaaccgccgactcgacgccattaatgtatcagggactggaagtcggac

SEQ ID NO: 290930 - DNA, 75 bp, synthetic construct
  source 1..75: mol_type = other DNA
gtggtgattgatgtcctgatcgagcggcgttttaccgatctggtgaaaaaaggtagccgtttctggaacgtttcc

SEQ ID NO: 290931 - DNA, 75 bp, synthetic construct
  source 1..75: mol_type = other DNA
cgaaagtcttttcccttccggaaagaacctcgttttcctgtctcagggtgaagtctccgacgccagagcgggtgg

SEQ ID NO: 290932 - DNA, 75 bp, synthetic construct
  source 1..75: mol_type = other DNA
gctgctgaaattgccaccaaaggagagggtaatttccctgcggcatcatatcgtctggggatccccgcaccgaca

SEQ ID NO: 290933 - DNA, 75 bp, synthetic construct
  source 1..75: mol_type = other DNA
ctccttttgtgctgaccgggacagagctgcgcggtggcagtacccgtgcagccgtggctccccgggggtatacca

SEQ ID NO: 290934 - DNA, 75 bp, synthetic construct
  source 1..75: mol_type = other DNA
ttgttggaaatggagcctggttctctgtacgacacggttaagcgtaccgcgaaaacaaccattaccgcctaccca

SEQ ID NO: 290935 - DNA, 75 bp, synthetic construct
  source 1..75: mol_type = other DNA
aacctctttttcctgtctcagggtgaagtctccgacgccagagcgggtgggaattactgtgctggcagatgatgt

SEQ ID NO: 290936 - DNA, 75 bp, synthetic construct
  source 1..75: mol_type = other DNA
tgacgggcgttttcctaaagtgacggatgcgactattgccacaaaaggggacgggaatcacccgacatcatcgta

SEQ ID NO: 290937 - DNA, 75 bp, synthetic construct
  source 1..75: mol_type = other DNA
ttaacgatatccagaataaattgcaggcgctgaataaatttgccaaagattcatgcaacgctacttattcgtttc

SEQ ID NO: 290938 - DNA, 75 bp, synthetic construct
  source 1..75: mol_type = other DNA
tgcggtggggaatatttccggtattgccagtgtcgatgatcaggtgaaaacggcgacaccagccactgccagcca

SEQ ID NO: 290939 - DNA, 75 bp, synthetic construct
  source 1..75: mol_type = other DNA
cgccaatctgtacaataaaatcttcgaagcgaataaaccgatgctaaaaagcccggataaaatttatccggggca

SEQ ID NO: 290940 - DNA, 75 bp, synthetic construct
  source 1..75: mol_type = other DNA
ggaccagcctcaattctgggatcgattaatggtcttattcctgattttggctcatcgatgacaaagtcacctgaa

SEQ ID NO: 290941 - DNA, 75 bp, synthetic construct
  source 1..75: mol_type = other DNA
catcaacgacgttcgtgtttcagatgatgaattacgcattatctcctatatcggcatcccgaccattatcgactc

SEQ ID NO: 290942 - DNA, 75 bp, synthetic construct
  source 1..75: mol_type = other DNA
caggaatgacactgagttgacacaagaccaacgtaaacttatcagtatgttaggtgttaataacatcattccgac

SEQ ID NO: 290943 - DNA, 75 bp, synthetic construct
  source 1..75: mol_type = other DNA
gatgctgcaaatcaggagggcgattttgcacaaaatgctgccattaacggtggtatcaatattggtgctcaaggc

SEQ ID NO: 290944 - DNA, 75 bp, synthetic construct
  source 1..75: mol_type = other DNA
atgaagcagattatggttgcacacaacggcgtcaggtttgaagtcgtcatggttttgactaagtaccgcaatgat

SEQ ID NO: 290945 - DNA, 75 bp, synthetic construct
  source 1..75: mol_type = other DNA
ccattacggtaaaatgatgctggaaaatccttcaccagagctgctcacggtgttgatccgtgaactgaccgggag

SEQ ID NO: 290946 - DNA, 75 bp, synthetic construct
  source 1..75: mol_type = other DNA
ttatagatgtaatggatgaagtgattgttgtagataatgaatcttcagatggtacattagatattttaattaaac

SEQ ID NO: 290947 - DNA, 75 bp, synthetic construct
  source 1..75: mol_type = other DNA
cactcgaacgaattgctcaacgtgaaaataaaagcccgacgaccatcagttctcttatccgcctgacaacctgtt

SEQ ID NO: 290948 - DNA, 75 bp, synthetic construct
  source 1..75: mol_type = other DNA
aattcggagaacacatttcagaaaattggtcagaaagtcggtaatgactccaacttattgatagtgttttatgtt

SEQ ID NO: 290949 - DNA, 75 bp, synthetic construct
  source 1..75: mol_type = other DNA
gtcgggtactgactatcgtccattccgactgtgcgttgctggagcgcgacggcaacatttcacttttatccttgc

SEQ ID NO: 290950 - DNA, 75 bp, synthetic construct
  source 1..75: mol_type = other DNA
caccgcttttctcgaacaagcgctagcgattgaatggcagcacggcgatctcacgctacgcggctgggtggctga

SEQ ID NO: 290951 - DNA, 75 bp, synthetic construct
  source 1..75: mol_type = other DNA
gacgatgtataacgcctacacacagcgatattgtactttacaggttacaagtcaatgtcggtgtataagcgctct

SEQ ID NO: 290952 - DNA, 75 bp, synthetic construct
  source 1..75: mol_type = other DNA
cagtcaaaaagttaacaaaaagatgtaccgcggcgcgctgaaaagcatcctgtccgaactggtacgtcaggatcg

SEQ ID NO: 290953 - DNA, 75 bp, synthetic construct
  source 1..75: mol_type = other DNA
ggtgagctggacgagaacctgttcctggctgcgcgcaacctgcacaaggttgacgtacgcgatgcaactggtatc

SEQ ID NO: 290954 - DNA, 75 bp, synthetic construct
  source 1..75: mol_type = other DNA
ccatttgtatatttaaggaaattaaattataaatactgtgatggtttgttatgggagtttttacattatgaacga

SEQ ID NO: 290955 - DNA, 75 bp, synthetic construct
  source 1..75: mol_type = other DNA
ttgtcgtcttattcgcggttttgttcatcatgacgtttgccgttaccagcatcaacgcacgcaaaaagggaaact

SEQ ID NO: 290956 - DNA, 75 bp, synthetic construct
  source 1..75: mol_type = other DNA
gctaacattgccttttgcatggcaatgacgccagaagctgaacaattattgcctgttttacagcgctatggcttc

SEQ ID NO: 290957 - DNA, 75 bp, synthetic construct
  source 1..75: mol_type = other DNA
cgcgtcatcaggtctggcagatcgaaatcttcgatgagaaagggcgtttgtgctgttcatcacgattgacgacgg

SEQ ID NO: 290958 - DNA, 75 bp, synthetic construct
  source 1..75: mol_type = other DNA
tttaacgcacgcacaaagggaaacgctcatagacaggatctgttatcccccaattagcacaacatccgagggcag

SEQ ID NO: 290959 - DNA, 75 bp, synthetic construct
  source 1..75: mol_type = other DNA
gtaaaatggcgggattttttgctgttcagctttgattatcaacaggcgcaggtaagcggtttgcatacgagatgg

SEQ ID NO: 290960 - DNA, 75 bp, synthetic construct
  source 1..75: mol_type = other DNA
ctgcattatgggctgctgtgcatggtctctctgaccattgtggcgacgctgaaagcagtaggtatcattctctcc

SEQ ID NO: 290961 - DNA, 75 bp, synthetic construct
  source 1..75: mol_type = other DNA
gccatacctgtcccgcctgctggaagaactgggccaggtagaaaaagctgtactgcgcattgcgctgtacgagct

SEQ ID NO: 290962 - DNA, 75 bp, synthetic construct
  source 1..75: mol_type = other DNA
aactggcgaaatcgttcggcgcagaagacagccataagttcgtcaacggcgtactcgataaagcagcacctgtga

SEQ ID NO: 290963 - DNA, 75 bp, synthetic construct
  source 1..75: mol_type = other DNA
gtggatgggggtaacaaagccggaacagccgcaaacgcttgaggaagtgattgcacactataaaggagactcacg

SEQ ID NO: 290964 - DNA, 75 bp, synthetic construct
  source 1..75: mol_type = other DNA
gccgcgcccagtgaaactcaccgataacgtgaccgcctttgatgcggtagagattaataactggctggctgagcg

SEQ ID NO: 290965 - DNA, 75 bp, synthetic construct
  source 1..75: mol_type = other DNA
aagagaatcccttgaattacaactttcagtattaaaaggagttaagggagaagttttcaccctaatcaatttata

SEQ ID NO: 290966 - DNA, 75 bp, synthetic construct
  source 1..75: mol_type = other DNA
cgaattctatccaatggaggccttaaagacaaatgtcattgggacagaaaacgtattgaatgctgcaattaataa

SEQ ID NO: 290967 - DNA, 75 bp, synthetic construct
  source 1..75: mol_type = other DNA
gcagtgccggaaggcgggcaaaaagaacggcgcttaggcgcgatttgtggcaccgcttttctcgaacaagcgctg

SEQ ID NO: 290968 - DNA, 75 bp, synthetic construct
  source 1..75: mol_type = other DNA
aatctggcagtaatggtgggccagccatcaccacgccgccaatagccggagaaagtagtgctgtaagcgcaggtt

SEQ ID NO: 290969 - DNA, 75 bp, synthetic construct
  source 1..75: mol_type = other DNA
caacccgggcagcagtccccggaccgaagggggacaggggggaacctggcgcacctggtgcagtggggcccgcag

SEQ ID NO: 290970 - DNA, 75 bp, synthetic construct
  source 1..75: mol_type = other DNA
tgttcgtctgacggcagaagaagaccaggaaatcagaaaaagggctgctgaatgcggcaagaccgtttccggttt

SEQ ID NO: 290971 - DNA, 75 bp, synthetic construct
  source 1..75: mol_type = other DNA
tactatcacgtctaaaaccggggcgatacaccttaccgcagcaacgcagataaagttgactgtcggaaaaagcac

SEQ ID NO: 290972 - DNA, 75 bp, synthetic construct
  source 1..75: mol_type = other DNA
gccaggaagtactggtggactttaaaaatggtgacccggatttaccgataatcatcgggcgcacctacaaccagg

SEQ ID NO: 290973 - DNA, 75 bp, synthetic construct
  source 1..75: mol_type = other DNA
gccatcgtcaccggcccggcggggcaggaaatctggacggataaatatggccgggtgaaggtgcagtttggctgg

SEQ ID NO: 290974 - DNA, 75 bp, synthetic construct
  source 1..75: mol_type = other DNA
agatgttcgggatgaaaaactaaaagcatgtcgggctggaaaaaaatcatttctcaattcttttcttgatggaat

SEQ ID NO: 290975 - DNA, 75 bp, synthetic construct
  source 1..75: mol_type = other DNA
atctggtcgggcatcaatattctggctggattgttgttgaggccgagcaggatcctaagaaatataacccattgg

SEQ ID NO: 290976 - DNA, 75 bp, synthetic construct
  source 1..75: mol_type = other DNA
acagcattgtgcttatttgcaggcaatacatgcatatgtcgccgttgtttctgaacaaacttatagtattcaagg

SEQ ID NO: 290977 - DNA, 75 bp, synthetic construct
  source 1..75: mol_type = other DNA
caggaaatcagaaaaagggctgctgaatgcggcaagaccgtttctggttttttacgggcggcagctctcggtaag

SEQ ID NO: 290978 - DNA, 75 bp, synthetic construct
  source 1..75: mol_type = other DNA
atcacgcaaagtggcttcaacgctggcaatggcaatcagcaaaggtcgtctgcttcgcgtaaatcagggcggtaa

SEQ ID NO: 290979 - DNA, 75 bp, synthetic construct
  source 1..75: mol_type = other DNA
gaagatctggcatcagtcagggaaaaattaaccaaaaaatcagccgcaggaaaagcatctgttcaggccagaaga

SEQ ID NO: 290980 - DNA, 75 bp, synthetic construct
  source 1..75: mol_type = other DNA
cccgttgtcagtctgctcagatttaccgccatgaggtgagctctaaaggccgtgagcgctttcgagactgccatc

SEQ ID NO: 290981 - DNA, 75 bp, synthetic construct
  source 1..75: mol_type = other DNA
ccaattataagctgggcggtgtacagcaacacgacagtgtacgcctcgatccgtgggtgtttatgttctcagcag

SEQ ID NO: 290982 - DNA, 75 bp, synthetic construct
  source 1..75: mol_type = other DNA
gttggggtgctattggtgccagaaccactgaatcacaaacgcatcgtcaacttgcgtctggtttacattgtccag

SEQ ID NO: 290983 - DNA, 75 bp, synthetic construct
  source 1..75: mol_type = other DNA
aaagatcctcgcttacttgtgattgttggtccatgctcaatccatgacgttcaggccgcagttgattatgcgaag

SEQ ID NO: 290984 - DNA, 75 bp, synthetic construct
  source 1..75: mol_type = other DNA
tacactcctgcgcccgcctcaggcagtcgtccggctgccccctggccgaatgcgcagccaggttaccagaaacag

SEQ ID NO: 290985 - DNA, 75 bp, synthetic construct
  source 1..75: mol_type = other DNA
ttatgatatctgggactcaatccaccagctacgattaaaagacggtgaccccaataacttaaaggccaccaatat

SEQ ID NO: 290986 - DNA, 75 bp, synthetic construct
  source 1..75: mol_type = other DNA
tacagaattcctcgatcctttccttactccctatattgctgatttaatatgttggggggctgttggtgccagaac

SEQ ID NO: 290987 - DNA, 75 bp, synthetic construct
  source 1..75: mol_type = other DNA
gcgcagcggacagtgggtgctgaatgatttcgactttatgaagccgcgttcactgctgaagagcaccgtggctaa

SEQ ID NO: 290988 - DNA, 75 bp, synthetic construct
  source 1..75: mol_type = other DNA
catcgtcaccggcccggcggggcaggaaatctggacggataaatatggccgggtgaaggtgcagtttggctggga

SEQ ID NO: 290989 - DNA, 75 bp, synthetic construct
  source 1..75: mol_type = other DNA
acgttatatcagcgggctggtgacggcggcacgcgtggctggtcatcaaggacgttcggtggtgtatgaactgcg

SEQ ID NO: 290990 - DNA, 75 bp, synthetic construct
  source 1..75: mol_type = other DNA
tcggagcgcgtaaaaacggacatcaataaaaacaattttaatgatgttctggcagatatcttcccgtctgtacat

SEQ ID NO: 290991 - DNA, 75 bp, synthetic construct
  source 1..75: mol_type = other DNA
atgagttttacagctacagattacccatccggcacactaattggatcgggtaagcataacgtgactttgagcggc

SEQ ID NO: 290992 - DNA, 75 bp, synthetic construct
  source 1..75: mol_type = other DNA
atgagttttgcagctactgattatccatccggcgcactagctggatcgggtacacataatgtgactttgagcggc

SEQ ID NO: 290993 - DNA, 75 bp, synthetic construct
  source 1..75: mol_type = other DNA
gatgacagggcttggtgattaccctgataatgtgaccaccatcgagccgctgacgccttatgaccgctggaatgg

SEQ ID NO: 290994 - DNA, 75 bp, synthetic construct
  source 1..75: mol_type = other DNA
gatgtgccagtcgatgaaaaggcgggatttgccgtttgccgtacagccacccttgacgggtggcgatatgtaaca

SEQ ID NO: 290995 - DNA, 75 bp, synthetic construct
  source 1..75: mol_type = other DNA
gaactgtcctggggcggtatcgctgtttaaatacgggatcaagagttaccgcgatttacccgttcgcctgtctga

SEQ ID NO: 290996 - DNA, 75 bp, synthetic construct
  source 1..75: mol_type = other DNA
ctaaaaaaggctactgtagattcaatctgtcaatgcaacacccctttcaattatctctttcggtgttttgaactt

SEQ ID NO: 290997 - DNA, 75 bp, synthetic construct
  source 1..75: mol_type = other DNA
gacaaaactggttatcaaaaaacatttatccggaagaataccatttttccggagccactttactctttcccgggc

SEQ ID NO: 290998 - DNA, 75 bp, synthetic construct
  source 1..75: mol_type = other DNA
ggtgacgaggccgggtgactatcctgataatgtgaccaccattgcaccaacaacaccttatgacgagtggagtgg

SEQ ID NO: 290999 - DNA, 75 bp, synthetic construct
  source 1..75: mol_type = other DNA
tattgaaaggtgcggcggcacaagcggtacagtgcgccaatattcgtttcggttatgcggaaacgcagtctctta

SEQ ID NO: 291000 - DNA, 75 bp, synthetic construct
  source 1..75: mol_type = other DNA
ggcagcgatttcaaacagcttttgtgaagttagcctgcaaccgtatggtgtctttacccatcgccaccagccgga

SEQ ID NO: 291001 - DNA, 75 bp, synthetic construct
  source 1..75: mol_type = other DNA
gggtgaccaggtggcgaagaatctgcaagcaaataactttgaacagttgggttatcaggccgagtccgccacctg

SEQ ID NO: 291002 - DNA, 75 bp, synthetic construct
  source 1..75: mol_type = other DNA
ccgtgaacagactctggcccgcattcctttcctgctgatcgttggcgatgcggaggagaatgcggcgcgtgtcac

SEQ ID NO: 291003 - DNA, 75 bp, synthetic construct
  source 1..75: mol_type = other DNA
ttagagatggaaaatggttagtaggaattgacaatgagttatctttaaaagagttaactcgtttacctaagaaca

SEQ ID NO: 291004 - DNA, 75 bp, synthetic construct
  source 1..75: mol_type = other DNA
cattacttgccgcctgaagcctggcgtgaaccaggcgcaagtggcgcaagcgttacagcgggcgtatgcccatca

SEQ ID NO: 291005 - DNA, 75 bp, synthetic construct
  source 1..75: mol_type = other DNA
agtggcatcgggttatttattgccttaatgggattaaaaaacaccggtgttattgtcgccaataaagatacgctg

SEQ ID NO: 291006 - DNA, 75 bp, synthetic construct
  source 1..75: mol_type = other DNA
ttggcctttctacaatgacaagatgggtcaaacaactgcgtgatgagcgtcagggcaaaacaccaaaagcctctc

SEQ ID NO: 291007 - DNA, 75 bp, synthetic construct
  source 1..75: mol_type = other DNA
cgcagagtttaaacgcgaatccgctcaactggttgttgaccagacatacacggtggcagatgccgccaaagctat

SEQ ID NO: 291008 - DNA, 75 bp, synthetic construct
  source 1..75: mol_type = other DNA
taaaaaaggctacttgtagattcaattggtcaacgcaacagttatgtgaaaacatggggttgcggaggttttttg

SEQ ID NO: 291009 - DNA, 75 bp, synthetic construct
  source 1..75: mol_type = other DNA
cgcattgaggccggactgagcacgtatgagaaagagctggcgctgatgggcgaggattatcaggacattttccgc

SEQ ID NO: 291010 - DNA, 75 bp, synthetic construct
  source 1..75: mol_type = other DNA
taaaaaaggctactgtagattcaattggtcaacgcaacagttatgtgaaaacatggggttgcggaggtttgaacc

SEQ ID NO: 291011 - DNA, 75 bp, synthetic construct
  source 1..75: mol_type = other DNA
gaggaacgagcgggaaaatcccccacagcttcaccaatgacgcctgagcaaattgaaatacgcgagctgaagaaa

SEQ ID NO: 291012 - DNA, 75 bp, synthetic construct
  source 1..75: mol_type = other DNA
ctgtggattatttttcggtgatgttcattttagcggtatctattccattccacccgatattagcggtgtcattgg

SEQ ID NO: 291013 - DNA, 75 bp, synthetic construct
  source 1..75: mol_type = other DNA
gatggggctgaacgccttcttcgcgtttgtcgtggtcggggcgatggggatctcctggcagaccgggatgggcgc

SEQ ID NO: 291014 - DNA, 75 bp, synthetic construct
  source 1..75: mol_type = other DNA
aatggggctgaacgccttctttgccttcgtggtcgtgggggcgatggggatctcctggcagaccgggatgggcgc

SEQ ID NO: 291015 - DNA, 75 bp, synthetic construct
  source 1..75: mol_type = other DNA
atacgatattaaaaaaggctactgtagattcaattggtcaacgcaacagttatgtgaaaacatggggttgcggag

SEQ ID NO: 291016 - DNA, 75 bp, synthetic construct
  source 1..75: mol_type = other DNA
tttaaacgcgaatccgctcaactggttgttgaccagaaccacacggtggcagatgccgccaaagctatggatgtt

SEQ ID NO: 291017 - DNA, 75 bp, synthetic construct
  source 1..75: mol_type = other DNA
agtttaaacgcgaatccgctcaacaggttgttgaccagaactacacggtggcagatgccgccaaagctatggata

SEQ ID NO: 291018 - DNA, 75 bp, synthetic construct
  source 1..75: mol_type = other DNA
ccaatatcacctttatcgaaggtgataccggcattatcgttatcgacccgctggtaaccgctaacgcggcaaaag

SEQ ID NO: 291019 - DNA, 75 bp, synthetic construct
  source 1..75: mol_type = other DNA
gggtgactaaggatgatatttcctttgactgccctataaaagatctgaatttcaaagcgaacataaaaaaatcat

SEQ ID NO: 291020 - DNA, 75 bp, synthetic construct
  source 1..75: mol_type = other DNA
ttcgttagtgaaaaagatgaaacctcggtcggtgagctgccttcgccgggtagcctgtattttcaacgttttggc

SEQ ID NO: 291021 - DNA, 75 bp, synthetic construct
  source 1..75: mol_type = other DNA
ccttcctcggtttctggaacatttctcacaaccttggcggtgcaggcgcagcaggtgtggcgctgttcggcgcaa

SEQ ID NO: 291022 - DNA, 75 bp, synthetic construct
  source 1..75: mol_type = other DNA
tggctcatatttatttgacccatgctttctaccttccaatttaaaaaatgcattcgtagtatctaccgaagactc

SEQ ID NO: 291023 - DNA, 75 bp, synthetic construct
  source 1..75: mol_type = other DNA
tcgtcgagggtggaaacagagccttcgagtgcaagatagaagatgttgaaataattgggaaaattataagtttaa

SEQ ID NO: 291024 - DNA, 75 bp, synthetic construct
  source 1..75: mol_type = other DNA
tatgcgtgatacttttcctgctgattgggtaatccagtgcgcccttgaaacgggcacctcgcttaattggctaac

SEQ ID NO: 291025 - DNA, 75 bp, synthetic construct
  source 1..75: mol_type = other DNA
tggcgggcgctacaacgtgatgggcggcgggcgtccggttgtcgcgctgtgtctgccaactcgttatctgcacgc

SEQ ID NO: 291026 - DNA, 75 bp, synthetic construct
  source 1..75: mol_type = other DNA
gttaacggaaaagcaacaaccgctgtcatttgatgagatgttcattgatattggcgcgaacagtcgcgaagaagc

SEQ ID NO: 291027 - DNA, 75 bp, synthetic construct
  source 1..75: mol_type = other DNA
atgaacattgagttactgcaacagttgtgcgaagtcagcggcgatgaacaggaagttcgcgacattctgataaac

SEQ ID NO: 291028 - DNA, 75 bp, synthetic construct
  source 1..75: mol_type = other DNA
gaacctgggttcatcacacggatgaacgaaaaatactcattagaactcatggagcgcctgagaggacagagatga

SEQ ID NO: 291029 - DNA, 75 bp, synthetic construct
  source 1..75: mol_type = other DNA
cgcatcatgtgtctgagtctgttctggcacttcctcgatgtggtgtggatctgtgtgttcactgttgtttatctg

SEQ ID NO: 291030 - DNA, 75 bp, synthetic construct
  source 1..75: mol_type = other DNA
ccaattttgcctgctggggcgaagataaagtggtcggcaaggcgctggataaccgcatcggctgcgcgatgatgg

SEQ ID NO: 291031 - DNA, 75 bp, synthetic construct
  source 1..75: mol_type = other DNA
ttaaaaatttcagacaatgatttatcatttgaatgtaaaatttcagatattgatgttattgcaaaatgcaatttt

SEQ ID NO: 291032 - DNA, 75 bp, synthetic construct
  source 1..75: mol_type = other DNA
aaattattggcaatggtgcgaaactggaagaaattattgcctgtctggataatttcgatttgtgggtgaatatcg

SEQ ID NO: 291033 - DNA, 75 bp, synthetic construct
  source 1..75: mol_type = other DNA
taagtggggatcacaagcagaagtactgtttatgccgcacacctggccggtctggggtaatcagcatatcaatga

SEQ ID NO: 291034 - DNA, 75 bp, synthetic construct
  source 1..75: mol_type = other DNA
cgacaattatcgcgccgacgcgatctatcaccaagacaggtgagaaactcaatatcgacgggctggatttcgaat

SEQ ID NO: 291035 - DNA, 75 bp, synthetic construct
  source 1..75: mol_type = other DNA
tgagcaggattgttattgcattaaccgccgccagcggcatattaataaatacggcttacgcaaaagacgtcgcac

SEQ ID NO: 291036 - DNA, 75 bp, synthetic construct
  source 1..75: mol_type = other DNA
ttaccgtttagcgatcgtcaggattttgacgatgcccagcgtggatttatcgccccgctgctggatgaaggtatt

SEQ ID NO: 291037 - DNA, 75 bp, synthetic construct
  source 1..75: mol_type = other DNA
tgatattaatgccgctgcgccggaaaccgtaaaccccagcctgtggcgtcagtcgcaaatcaacggtatttctgg

SEQ ID NO: 291038 - DNA, 75 bp, synthetic construct
  source 1..75: mol_type = other DNA
gcacaatgaaggcagcttagtatttgacaagtctctgctaccttcccgcctgaagaacccaattggaatctcagt

SEQ ID NO: 291039 - DNA, 75 bp, synthetic construct
  source 1..75: mol_type = other DNA
gccatattagcgagagtctaaaaacttcaataatgcaaaaccgtgggggacagaaagtaattgagcgtatacttg

SEQ ID NO: 291040 - DNA, 75 bp, synthetic construct
  source 1..75: mol_type = other DNA
tgcgccgtcctttgttacatgcgtttattcgtgcggaactggcgcgcggggaaattcctccgctgttaccagaca

SEQ ID NO: 291041 - DNA, 75 bp, synthetic construct
  source 1..75: mol_type = other DNA
ggcagcgatttcaaatagtttttgtgaagttagcctacaaccgtatggcgtctttacccatcgccatcaaccaga

SEQ ID NO: 291042 - DNA, 75 bp, synthetic construct
  source 1..75: mol_type = other DNA
gacctttccggcgcgtttcgtgttaacgacgccgccttctatgaaaaatattacggctttacccatcaatacccg

SEQ ID NO: 291043 - DNA, 75 bp, synthetic construct
  source 1..75: mol_type = other DNA
gcaattggattattgaaattgaaggaaaagtaagtttaagaaaattgacaagaattcctaatggaaaagtaaaaa

SEQ ID NO: 291044 - DNA, 75 bp, synthetic construct
  source 1..75: mol_type = other DNA
cagagcaaacttacgggctggctcggtgaaatggcgtcctattactcagctgcgcctgttcgcctgggtggggca

SEQ ID NO: 291045 - DNA, 75 bp, synthetic construct
  source 1..75: mol_type = other DNA
ggcggtggcagcggatttggtgggcagttgcgggcgtggaatccaccgggtgaaagtgtggatgcagccctgctg

SEQ ID NO: 291046 - DNA, 75 bp, synthetic construct
  source 1..75: mol_type = other DNA
ctacgatatcgagaacttgcaataatatcagaggttgcatcaattgttcaattgcaagctaatcaatcagtgaaa

SEQ ID NO: 291047 - DNA, 75 bp, synthetic construct
  source 1..75: mol_type = other DNA
cgggtatttatattaaaaatcatgctgacagtgttgaaaggattgattccgctgtttcagaacaattgtcatttg

SEQ ID NO: 291048 - DNA, 75 bp, synthetic construct
  source 1..75: mol_type = other DNA
acgcctggacacggtatggggaaccgttttctgcgggccggtgtggaggtcgatcgatatggccgtgccgttgcg

SEQ ID NO: 291049 - DNA, 75 bp, synthetic construct
  source 1..75: mol_type = other DNA
atgcaatgtgttctaccactttatgatccaagaaaaggcctgtttcctcgattaaaccatgatccgcgccacact

SEQ ID NO: 291050 - DNA, 75 bp, synthetic construct
  source 1..75: mol_type = other DNA
atggtagggcttctgtatcaagtaatctgaaccgccccgggtttcctggagagtgttttatctgtgaactcaggc

SEQ ID NO: 291051 - DNA, 75 bp, synthetic construct
  source 1..75: mol_type = other DNA
tgtagaaatccccgatcacagatatttcgagaacgatgatctaccaggggatgtgattcgaattattgatgagat

SEQ ID NO: 291052 - DNA, 75 bp, synthetic construct
  source 1..75: mol_type = other DNA
tttatcagtcgcaaaaactcgacataatgaagttgaggttaaggaagttggtttgatattaagcagtttatataa

SEQ ID NO: 291053 - DNA, 75 bp, synthetic construct
  source 1..75: mol_type = other DNA
gtaggatacttgatcatgcagaaacagctaccacagccacagataaatttagactcaaaagtcgtggcaacatca

SEQ ID NO: 291054 - DNA, 75 bp, synthetic construct
  source 1..75: mol_type = other DNA
atgatcataagatcgcttatagacatggattaaatgatcatgtgtttatttttgaagcagcattaagttcccctg

SEQ ID NO: 291055 - DNA, 75 bp, synthetic construct
  source 1..75: mol_type = other DNA
atgagacgggcaatcagctacatcagattttcaagtgaacgacaactgaaaggggactctgtacgccgacaatct

SEQ ID NO: 291056 - DNA, 75 bp, synthetic construct
  source 1..75: mol_type = other DNA
tgtacgcaatcaacggcggcgttgacgaaaaactgaaaatgcaggttggtccgaagtctgaaccgatcaaaggcg

SEQ ID NO: 291057 - DNA, 75 bp, synthetic construct
  source 1..75: mol_type = other DNA
gcgtctctgacttccgttgctaaactgccgtttgcttacgctaaagatggtatctcctacaccttctctatcgtt

SEQ ID NO: 291058 - DNA, 75 bp, synthetic construct
  source 1..75: mol_type = other DNA
ccggaatacgatgaactgttctctggcgacccgatctgggcaaccgaatctatcggtggtatgggcctcgacggt

SEQ ID NO: 291059 - DNA, 75 bp, synthetic construct
  source 1..75: mol_type = other DNA
tcattatcacgcttatctatataaattgcatggctctcttacatggtatcaggatgattttttaatagttaatga

SEQ ID NO: 291060 - DNA, 75 bp, synthetic construct
  source 1..75: mol_type = other DNA
gcaatcaacggcggcgttgacgaaaaactgaaaatgcaggttggtccgaagtctgaaccgatcaaaggcgatgtc

SEQ ID NO: 291061 - DNA, 75 bp, synthetic construct
  source 1..75: mol_type = other DNA
ttatccgcaccatggcgtgtggtatcgctggtctgtccgttgctgctgactccctgtctgcaatcaaatatgcga

SEQ ID NO: 291062 - DNA, 75 bp, synthetic construct
  source 1..75: mol_type = other DNA
cagccggtctgggatacggaaaccacgcagttattccgtacgcgttttaaagccgtgagtccgaaacgggtggac

SEQ ID NO: 291063 - DNA, 75 bp, synthetic construct
  source 1..75: mol_type = other DNA
ttggttgtatctgcctgatggcgatggtagcggtcatggaagaacgtaaaattcgccgtgagaaaaaggttcagc

SEQ ID NO: 291064 - DNA, 75 bp, synthetic construct
  source 1..75: mol_type = other DNA
cagcggctcggttagcctgttcctgatgattgccttctacgccttaagcggctttttccagagtaccggcggttc

SEQ ID NO: 291065 - DNA, 75 bp, synthetic construct
  source 1..75: mol_type = other DNA
tgaatacggtactgaatggcgatgactcagtaaccgataaattggttgtcgagggcgatactagcggcacgactg

SEQ ID NO: 291066 - DNA, 75 bp, synthetic construct
  source 1..75: mol_type = other DNA
tattgatggttataaatcaatgacgcttgagaataatagaaaatgtatggtatgggaggaaaataaacaagatct

SEQ ID NO: 291067 - DNA, 75 bp, synthetic construct
  source 1..75: mol_type = other DNA
cgcaggggcagaaggataatccgcttattaatattctggataagttctccacctggtatgacacgaataacgtga

SEQ ID NO: 291068 - DNA, 75 bp, synthetic construct
  source 1..75: mol_type = other DNA
cgcgtcttttccgtactcagttcaaaatggtcagtccgaagcgcgtcagcaatccgaataatatcggtgataccc

SEQ ID NO: 291069 - DNA, 75 bp, synthetic construct
  source 1..75: mol_type = other DNA
gtgaggccataaaccgtgatgctgatactccgtacccaccggagccgaagctgatgcagttccggcttaagggct

SEQ ID NO: 291070 - DNA, 75 bp, synthetic construct
  source 1..75: mol_type = other DNA
gtttatcaaattattgaaagcgatattcataaagactggaatcttagtatggtagccagttgtttatgccttagc

SEQ ID NO: 291071 - DNA, 75 bp, synthetic construct
  source 1..75: mol_type = other DNA
cctgatgccagacgtctttcgcgtcgctgcgcgatatagcatgtcgcccgctgatacagagtcggaaaaagaacg

SEQ ID NO: 291072 - DNA, 75 bp, synthetic construct
  source 1..75: mol_type = other DNA
gtcatgacatcattaaagattatctccgttttctgagtaaagatctctcgcaaataccggtgtggcaacgcagcg

SEQ ID NO: 291073 - DNA, 75 bp, synthetic construct
  source 1..75: mol_type = other DNA
acggctatcctggctggatgccgcagaaatggacatggatatgcgtgatgcactggatgcacgtaaatcccgtct

SEQ ID NO: 291074 - DNA, 75 bp, synthetic construct
  source 1..75: mol_type = other DNA
ccagtcctgcggttacaacagtacgtcttactttatttctgtttttaaagacttctatggtatgacgccgctgca

SEQ ID NO: 291075 - DNA, 75 bp, synthetic construct
  source 1..75: mol_type = other DNA
gtttgccgaggatgactgctgctgcattgggaaggctctccgacgttccttggcgacaaacgtattgaaggctcg

SEQ ID NO: 291076 - DNA, 75 bp, synthetic construct
  source 1..75: mol_type = other DNA
tgatgatccgcgagggtgtggccactcacgcgtttaacggtgaaacctgcgtacaaccggtctgggaaagcagta

SEQ ID NO: 291077 - DNA, 75 bp, synthetic construct
  source 1..75: mol_type = other DNA
tcagaacgctgacgctggtttcagttcgctggaaaaatcactcctgcgttacgttgccgctggcgtcggcgcgtc

SEQ ID NO: 291078 - DNA, 75 bp, synthetic construct
  source 1..75: mol_type = other DNA
gcggtccggtgcaaatctgctggcataaattcgctcgctactgggatgtggagctgcgcgagatccctatgcgcc

SEQ ID NO: 291079 - DNA, 75 bp, synthetic construct
  source 1..75: mol_type = other DNA
gccaccgacatcgtggtgatgcgcattatgtgtcgtcgcggcttcgaaatggactttgctgaactgttgctggaa

SEQ ID NO: 291080 - DNA, 75 bp, synthetic construct
  source 1..75: mol_type = other DNA
tcaaaacgatttccgctgcacgaaatgcgcgatgatgttgcatttcagattatcaatgatgaattatatcttgat

SEQ ID NO: 291081 - DNA, 75 bp, synthetic construct
  source 1..75: mol_type = other DNA
cgctgttacagattcaggaaatggcggcgaaatatggctttgatatctctcgtccagcgcagaatgcacaagaag

SEQ ID NO: 291082 - DNA, 75 bp, synthetic construct
  source 1..75: mol_type = other DNA
aggtgatgaatcttttctcgccgaagcgacgcctgccaccacggaattgtgggaaaaagtgatggaaggcatccg

SEQ ID NO: 291083 - DNA, 75 bp, synthetic construct
  source 1..75: mol_type = other DNA
taccgatctgcgtaaaacccataatcagggcgtatttgatgtttactcaccggatatgctgcgctgccgtaaatc

SEQ ID NO: 291084 - DNA, 75 bp, synthetic construct
  source 1..75: mol_type = other DNA
aagtgtttctttatccaagcccgctgcattaccgcattgtgccggagttggtgtatgaccgcagttgcaccgtgt

SEQ ID NO: 291085 - DNA, 75 bp, synthetic construct
  source 1..75: mol_type = other DNA
ccacgtgcccgtgaccgccgtaaaatcgcgggagaaatgctgcaccaaatcatgatggaagcacgcatggcggtg

SEQ ID NO: 291086 - DNA, 75 bp, synthetic construct
  source 1..75: mol_type = other DNA
aagaagcgctgccgcaggagctggtgttcaacgttgactacctcggtggtcagattggtactttcgccatcaact

SEQ ID NO: 291087 - DNA, 75 bp, synthetic construct
  source 1..75: mol_type = other DNA
gaagactacaaagcctccctgaaatatctcagcgaccacccgaaactgcagggtattgcccagcagaacagcttt

SEQ ID NO: 291088 - DNA, 75 bp, synthetic construct
  source 1..75: mol_type = other DNA
tgggataaagaaccgcctctgactgatttgacaaccgactacctctatgagggcgcacaggcctggtatcctcat

SEQ ID NO: 291089 - DNA, 75 bp, synthetic construct
  source 1..75: mol_type = other DNA
tatgacttctatcgtctacgctatgtggtggcaggcgcagaaaaactacaagaaagtaccaaacagctttggcag

SEQ ID NO: 291090 - DNA, 75 bp, synthetic construct
  source 1..75: mol_type = other DNA
tcgcgccgggcgctaacccgatgcacggtcgtgatcgcaaaggtgccgtggcctcattgacgtcggtggcgaaac

SEQ ID NO: 291091 - DNA, 75 bp, synthetic construct
  source 1..75: mol_type = other DNA
gtgttcaacgttgactacctgggtggtcaaattggtactttcgccatcaacttctcccgcccggcgggtcaggta

SEQ ID NO: 291092 - DNA, 75 bp, synthetic construct
  source 1..75: mol_type = other DNA
gactgtgacaaccgccccgtccagtgcggggcatcaccggagagatgagaatgagcgaatatttcagaatatttc

SEQ ID NO: 291093 - DNA, 75 bp, synthetic construct
  source 1..75: mol_type = other DNA
gggccgtatgagttcatctgtacgggtcgcccggacgaaggcatcccggcggtttgcttcaaactgaaagatggt

SEQ ID NO: 291094 - DNA, 75 bp, synthetic construct
  source 1..75: mol_type = other DNA
gcacaccgctgttgctcaatgcggtatgcaaacattacgcggataatatcgtcctgaaccacctggatttgcata

SEQ ID NO: 291095 - DNA, 75 bp, synthetic construct
  source 1..75: mol_type = other DNA
aagcaaacattacgcggaaaatatcgtcctgaaccaactggatttacatattccggcaggtcagtttgtggcggt

SEQ ID NO: 291096 - DNA, 75 bp, synthetic construct
  source 1..75: mol_type = other DNA
gacgaagaagcgctgccgcaggaactggtgttcaacgttgactacctgggtggtcaaattggtacttttgccatc

SEQ ID NO: 291097 - DNA, 75 bp, synthetic construct
  source 1..75: mol_type = other DNA
tatcggtggcgacggattccttatctgctatcaaatatgcccgtgtgaaaccgatccgtgacgaaaacggtctgg

SEQ ID NO: 291098 - DNA, 75 bp, synthetic construct
  source 1..75: mol_type = other DNA
tatggggcctgcaccggaacctaacctgactattctgtggtcggaagccttgccgattgccttcaaaaaatatgc

SEQ ID NO: 291099 - DNA, 75 bp, synthetic construct
  source 1..75: mol_type = other DNA
cagggcgtatttgatgtttactcaccggatatgctgcgctgccgtaaatctggtgtactgaccggtttaccagat

SEQ ID NO: 291100 - DNA, 75 bp, synthetic construct
  source 1..75: mol_type = other DNA
tcgaaatggactttgctgaactgttgctggaagactacaaagcctccctgaaatatctcagcgatcacccgaaac

SEQ ID NO: 291101 - DNA, 75 bp, synthetic construct
  source 1..75: mol_type = other DNA
tacgtaaaaccaaccttgtcggcctgctggatgggtatttccaccacgaagcggatgtcgaaggcggtcaacacc

SEQ ID NO: 291102 - DNA, 75 bp, synthetic construct
  source 1..75: mol_type = other DNA
cgggcagaaaacgggtaacacgccagacgggcgccgtgcgggtacgccattcgcgccgggcgctaacccgatgca

SEQ ID NO: 291103 - DNA, 75 bp, synthetic construct
  source 1..75: mol_type = other DNA
ttgataacttcgtgaaaagtcacggtattgaaaatcatcaagaggacacgcagttcgagctattttgtaataaag

SEQ ID NO: 291104 - DNA, 75 bp, synthetic construct
  source 1..75: mol_type = other DNA
gatacattgaatacctaaagggattcgaagacaaagttcccaatagcgaagatcctaactatcagaatccgaaag

SEQ ID NO: 291105 - DNA, 75 bp, synthetic construct
  source 1..75: mol_type = other DNA
gtttgatgagcaagcatggttgctcattgccattctgaagcctgaacctcataaactggctcgagataacaacca

SEQ ID NO: 291106 - DNA, 75 bp, synthetic construct
  source 1..75: mol_type = other DNA
tcagatagacgatatgcgcgtcaagcgctatcaggcgattaaaggtggaatgcttttgttggttgtgactgaaac

SEQ ID NO: 291107 - DNA, 75 bp, synthetic construct
  source 1..75: mol_type = other DNA
cagagccagtacttcctgcattacctacaactattctgcctgccatttccgaacttactgcatcattgggtatcc

SEQ ID NO: 291108 - DNA, 75 bp, synthetic construct
  source 1..75: mol_type = other DNA
ctagctgaatgcgttaaagatgacggaaatgatggagcgcatgaaggtattttggataaagctgctgctgaggat

SEQ ID NO: 291109 - DNA, 75 bp, synthetic construct
  source 1..75: mol_type = other DNA
cgatttaactgttccgcgtgcgctgagccgcattcaccgcatcacaaaattcacttttaaaaaagggcggcagag

SEQ ID NO: 291110 - DNA, 75 bp, synthetic construct
  source 1..75: mol_type = other DNA
cggatgagataacgattgtcttctgtggttcgaaaaagagcctggcgaatggtattccgatggcgaacattctgt

SEQ ID NO: 291111 - DNA, 75 bp, synthetic construct
  source 1..75: mol_type = other DNA
aggttgttgggcttaagcaaaacgcgttgtttgcctggttacgggagaacggcatcctgatagcgtccggtggac

SEQ ID NO: 291112 - DNA, 75 bp, synthetic construct
  source 1..75: mol_type = other DNA
atgctaaaaactaggcttatcaccgattatatcaattctttaataggtcaggagttcgttcaaggcgagaatgat

SEQ ID NO: 291113 - DNA, 75 bp, synthetic construct
  source 1..75: mol_type = other DNA
gccagaggcgatttcgtccccttctttgaaaatctgactaccgcagctattgccctgctgttctttatgcacggc

SEQ ID NO: 291114 - DNA, 75 bp, synthetic construct
  source 1..75: mol_type = other DNA
aaacgtcgatcccatgctctattccggctttctctatctttgcattctcccagccaccgtgcagtctgcaatcgc

SEQ ID NO: 291115 - DNA, 75 bp, synthetic construct
  source 1..75: mol_type = other DNA
cctttcaccattgctggttggtctggtgatgaatgttcacggtgcagggggcagccttgagcaggtcggtaaaat

SEQ ID NO: 291116 - DNA, 75 bp, synthetic construct
  source 1..75: mol_type = other DNA
aaacctttaggcgagaagaggaaatatattcttcttggggtaaacttgtctgtaatcatatcaaaaataagttga

SEQ ID NO: 291117 - DNA, 75 bp, synthetic construct
  source 1..75: mol_type = other DNA
aggccataaattcggtctggctccgctgggctgcggctgggttatctggcgtgacgaagaagcgctgccgcagga

SEQ ID NO: 291118 - DNA, 75 bp, synthetic construct
  source 1..75: mol_type = other DNA
gtggctgccatccataccggtatgcaaacagatcagtttcgccaggtgcgcgatgttctcaagtctctcatttga

SEQ ID NO: 291119 - DNA, 75 bp, synthetic construct
  source 1..75: mol_type = other DNA
tttcgacgcagatcttttgtcataacgattacccggaaacgattatcgattatgtaacgctgcggcaagggtcgg

SEQ ID NO: 291120 - DNA, 75 bp, synthetic construct
  source 1..75: mol_type = other DNA
gcgcggctggcaggttccggccttcactctcggcggtgaagccaccgacatcgtggtgatgcgcattatgtgtcg

SEQ ID NO: 291121 - DNA, 75 bp, synthetic construct
  source 1..75: mol_type = other DNA
ggcggatgaaatcgccaaactggggccgtatgagttcatctgtaccggtcgcccggacgaaggcatcccggcggt

SEQ ID NO: 291122 - DNA, 75 bp, synthetic construct
  source 1..75: mol_type = other DNA
cctctacgacctctctgaacgtctgcgcctgcgcggctggcaggttccggccttcaccctcggcggtgaagcgac

SEQ ID NO: 291123 - DNA, 75 bp, synthetic construct
  source 1..75: mol_type = other DNA
tgtgttagccggcaccacaccgctggctgagattcaggaagacacgcgaatgatgtttcaggatgcgcgtctgct

SEQ ID NO: 291124 - DNA, 75 bp, synthetic construct
  source 1..75: mol_type = other DNA
agtaccctgctgcgcctgctggcaggtctggaaacgccaaccgcaggcgacgtgttagcgggcaccacaccgctg

SEQ ID NO: 291125 - DNA, 75 bp, synthetic construct
  source 1..75: mol_type = other DNA
atggaaagtgcaaccattgccgcgcaaggatatcgtttccgcgtgccatacgggacactactgtgtgtttcagat

SEQ ID NO: 291126 - DNA, 75 bp, synthetic construct
  source 1..75: mol_type = other DNA
ccgattcctcttaccgtttactgtgcgaaaagccaaaacctggggtattacctttcaggtacaaccgcagatgcg

SEQ ID NO: 291127 - DNA, 75 bp, synthetic construct
  source 1..75: mol_type = other DNA
tttcgacgcaaatcttttgccataacgattatccggaaaccattacagactatgtcacactgcaacgaggctcgg

SEQ ID NO: 291128 - DNA, 75 bp, synthetic construct
  source 1..75: mol_type = other DNA
cttgaaagtcgtagagacattaaacgaagatgttttttcagaattggttcgagcgactaacagtcagactaaagt

SEQ ID NO: 291129 - DNA, 75 bp, synthetic construct
  source 1..75: mol_type = other DNA
ttctggttcatataccgatcggcgcaggcggttacgatctttcatggatcgaagcgatagggaccattgcaggtt

SEQ ID NO: 291130 - DNA, 75 bp, synthetic construct
  source 1..75: mol_type = other DNA
tggagtatctgatcctgacgtttattgctcttaacggcagccggatgtggatcaacagcgcacgcgaaagaggtt

SEQ ID NO: 291131 - DNA, 75 bp, synthetic construct
  source 1..75: mol_type = other DNA
cttcagggcgtttacgccatgtctctggagtacatcatcctgacctttattgcgctcaacggcagccggatgtgg

SEQ ID NO: 291132 - DNA, 75 bp, synthetic construct
  source 1..75: mol_type = other DNA
ggcgctcggcgctatcattgccgcgtcaatgggctccaccctgacagtacgcaaagagagcaaaataaaagaatt

SEQ ID NO: 291133 - DNA, 75 bp, synthetic construct
  source 1..75: mol_type = other DNA
tgtgtcgtcgcggcttcgaaatggactttgctgaactgttgctggaagactacaaagcctccctgaaatatctca

SEQ ID NO: 291134 - DNA, 75 bp, synthetic construct
  source 1..75: mol_type = other DNA
ttctggttcatataccgatcggtactggcggttacgatctctcatggatcgaagcggtagggacgatcgctgggt

SEQ ID NO: 291135 - DNA, 75 bp, synthetic construct
  source 1..75: mol_type = other DNA
tctcccgcccggcgggtcaggtgattgcacagtactatgaattcctgcgcctcggtcgtgaaggctataccaaag

SEQ ID NO: 291136 - DNA, 75 bp, synthetic construct
  source 1..75: mol_type = other DNA
agcctccctgaaatatctcagcgaccacccgaaactgcagggtattgcccagcagaacagctttaaacacacctg

SEQ ID NO: 291137 - DNA, 75 bp, synthetic construct
  source 1..75: mol_type = other DNA
agtactatgaattcctgcgcctcggtcgtgaaggctataccaaagtacagaacgcttcctaccaggttgccgctt

SEQ ID NO: 291138 - DNA, 75 bp, synthetic construct
  source 1..75: mol_type = other DNA
gcaagcattaggattacaggttgtgatgcctgaactgcaaccggacgctttcccgttctgggattcatgcatgat

SEQ ID NO: 291139 - DNA, 75 bp, synthetic construct
  source 1..75: mol_type = other DNA
gaaaaaaaccgctaccatctctatgtttcactcgcctgcccgtgggcacaccgcacgctgattatgcgtaaactc

SEQ ID NO: 291140 - DNA, 75 bp, synthetic construct
  source 1..75: mol_type = other DNA
cgcttgatgctctgggcgcgaaagcgggagattattatcctcctgcgctgcaaactaaaattgacgaacttaatg

SEQ ID NO: 291141 - DNA, 75 bp, synthetic construct
  source 1..75: mol_type = other DNA
ctgcgtctggcattaggaacgctgatcctcatcgcgttctttaagccatggcgactgcgctttgccaaagagcaa

SEQ ID NO: 291142 - DNA, 75 bp, synthetic construct
  source 1..75: mol_type = other DNA
aataaaaactggatcgacaaagaagaatatccgcaatccgcagccatcgacctgcgttgcgtaaatatggttgcc

SEQ ID NO: 291143 - DNA, 75 bp, synthetic construct
  source 1..75: mol_type = other DNA
ttctcccgcccggcgggtcaggtaattgcacagtactatgaattcctgcgcctcggtcgtgaaggctacaccaaa

SEQ ID NO: 291144 - DNA, 75 bp, synthetic construct
  source 1..75: mol_type = other DNA
tgcacgaaatgcgcgatgatgtcgcattccagattatcaatgatgagttatatcttgatggcaacgctcgtcaga

SEQ ID NO: 291145 - DNA, 75 bp, synthetic construct
  source 1..75: mol_type = other DNA
taccaggttgctgcttatctggcggatgaaatcgccaaactggggccgtatgagttcatctgtacgggtcgcccg

SEQ ID NO: 291146 - DNA, 75 bp, synthetic construct
  source 1..75: mol_type = other DNA
acgttgactacctcggcggtcagattggtactttcgccatcaacttctcccgcccggcgggtcaggtgattgcac

SEQ ID NO: 291147 - DNA, 75 bp, synthetic construct
  source 1..75: mol_type = other DNA
aagactacaaagcctccctgaaatatctcagcgaccacccgaaactgcagggtattgcccagcagaacagcttta

SEQ ID NO: 291148 - DNA, 75 bp, synthetic construct
  source 1..75: mol_type = other DNA
aatcggtgcgttacaggctggagaggctctctggcattggtcggttgttccattaggtttagctgtcgcaattct

SEQ ID NO: 291149 - DNA, 75 bp, synthetic construct
  source 1..75: mol_type = other DNA
tggcggtggcgctgttctcctctcgtcgcccggtagatttcgtttgggttttgctggcagtgctcggtctgtggt

SEQ ID NO: 291150 - DNA, 75 bp, synthetic construct
  source 1..75: mol_type = other DNA
gctcgttgccatggcgtctattcagggtggggcttcattagcaaaatcactttttccactggttggcgcgcctgg

SEQ ID NO: 291151 - DNA, 75 bp, synthetic construct
  source 1..75: mol_type = other DNA
cgcaagcgtatggaagccgcaggcaaacccacggataaaccaaacctggtgtgcggtccggtacaaatctgctag

SEQ ID NO: 291152 - DNA, 75 bp, synthetic construct
  source 1..75: mol_type = other DNA
gactacaaagcctccctgaaatatctcagcgatcacccgaaacttcagggtattgcccagcagaacagctttaaa

SEQ ID NO: 291153 - DNA, 75 bp, synthetic construct
  source 1..75: mol_type = other DNA
aagcctccctgaaatatctcagcgaccacccgaaactgcagggtattgcccagcagaacagctttaaacacacct

SEQ ID NO: 291154 - DNA, 75 bp, synthetic construct
  source 1..75: mol_type = other DNA
acctgggacgacgaaaatgtccataagttgatggatttatccattaacaaaaactggatcgacaaagaagaatat

SEQ ID NO: 291155 - DNA, 75 bp, synthetic construct
  source 1..75: mol_type = other DNA
gccgaggttttgcgcgtgaagcccgcctttttcgaagggcaggaacattctcctgttaatgaagagattgtacat

SEQ ID NO: 291156 - DNA, 75 bp, synthetic construct
  source 1..75: mol_type = other DNA
gcgtggattgttgtgctgttgattggctggatgtttaaacgccgccacgatcgtcagctggctgaaaaccagtaa

SEQ ID NO: 291157 - DNA, 75 bp, synthetic construct
  source 1..75: mol_type = other DNA
cgcttcgctgtcggcaattaacagtgacgtatttggcgtaggccgtatgctccacggtatggcagagcagggcag

SEQ ID NO: 291158 - DNA, 75 bp, synthetic construct
  source 1..75: mol_type = other DNA
ctgaaattccaagcaaaactgaaaggtggcaatactgaaggtgacttcaaatctgtagcatctttcgcagtggct

SEQ ID NO: 291159 - DNA, 75 bp, synthetic construct
  source 1..75: mol_type = other DNA
gataccggtatcgacatcgacatgcacatcgacgctgccagcggtggcttcctggcaccgttcgtcgccccggat

SEQ ID NO: 291160 - DNA, 75 bp, synthetic construct
  source 1..75: mol_type = other DNA
cctgactactgacggtctgcagttctcagccaaactgagaggcggtcaaactgaaggtgacttcaaatctgtagc

SEQ ID NO: 291161 - DNA, 75 bp, synthetic construct
  source 1..75: mol_type = other DNA
gagctggaagcggaagtgttgcaacgggtgatgcagcgtggtgaatctgaaactcgcctgagaaaacaggggtaa

SEQ ID NO: 291162 - DNA, 75 bp, synthetic construct
  source 1..75: mol_type = other DNA
ggatatcccccgtccgcgtcggttagggtcggttagggtcggtacgattagcagagctggaagcggaagtattgc

SEQ ID NO: 291163 - DNA, 75 bp, synthetic construct
  source 1..75: mol_type = other DNA
atgaatactgctcgtctgaaccagggcacaccattgttgctcaatgcagtaagcaaacattacgcagaaaatatc

SEQ ID NO: 291164 - DNA, 75 bp, synthetic construct
  source 1..75: mol_type = other DNA
tgtttgcctacggtggtatcgaaattattggtattactgccggtgaagcgaaagagccggagaaatctattccac

SEQ ID NO: 291165 - DNA, 75 bp, synthetic construct
  source 1..75: mol_type = other DNA
gggtcagtacggttagcggaactggaagcggaagtgttacagcgggtgatgcagcgagggcattctgaacaacca

SEQ ID NO: 291166 - DNA, 75 bp, synthetic construct
  source 1..75: mol_type = other DNA
gggtcggtgcgattagcggagctggaagcggaagtgttgcaacgggtaatgcagcgtggtgagtctgaaactcgc

SEQ ID NO: 291167 - DNA, 75 bp, synthetic construct
  source 1..75: mol_type = other DNA
gataaaccaaacctggtgtgcggtccggtacaaatctgctggcataaattcgcccgctactgggatgtggagctg

SEQ ID NO: 291168 - DNA, 75 bp, synthetic construct
  source 1..75: mol_type = other DNA
gatccgaactactcgattcacgttttggcgccaagccgatttcgactatcgcagaatcaaaacggtttccgctgc

SEQ ID NO: 291169 - DNA, 75 bp, synthetic construct
  source 1..75: mol_type = other DNA
gcacagtactatgaattcctgcgcctcggtcgtgaaggctatacaaaagtacagaacgcgtcccagcgcacgttc

SEQ ID NO: 291170 - DNA, 75 bp, synthetic construct
  source 1..75: mol_type = other DNA
gcacagtactatgaattcctgcgcctcggtcgtgaaggctatacaaaagtacagaacgcctccgagcgcacgttc

SEQ ID NO: 291171 - DNA, 75 bp, synthetic construct
  source 1..75: mol_type = other DNA
ggtccgaactactcgattcacgttttggcgctaagccgatttcgactatcgcagaatcaaaacgttttccgctgc

SEQ ID NO: 291172 - DNA, 75 bp, synthetic construct
  source 1..75: mol_type = other DNA
gttccgaactactcgattcacgttttggcgctaagccgatttcgactatcgcagaatcaaaacgatttccgctgc

SEQ ID NO: 291173 - DNA, 75 bp, synthetic construct
  source 1..75: mol_type = other DNA
gatccgaactactcgattcacgttttggcgcgaagccgatttcgactatcgcagaatcaaaacgctttccgctgc

SEQ ID NO: 291174 - DNA, 75 bp, synthetic construct
  source 1..75: mol_type = other DNA
acctggccactttctgccagacctgggacgacgagaaggtccataaattgatggatttctccataaagaaaaact

SEQ ID NO: 291175 - DNA, 75 bp, synthetic construct
  source 1..75: mol_type = other DNA
acctggccactttctgccagacctgggacgacgagaacgtccataaattgatggatttgtccataaagaaaaact

SEQ ID NO: 291176 - DNA, 75 bp, synthetic construct
  source 1..75: mol_type = other DNA
acctggccactttctgccagacctgggacgacgagaacgtccataaattgatggatttctcgataaagaaaaact

SEQ ID NO: 291177 - DNA, 75 bp, synthetic construct
  source 1..75: mol_type = other DNA
gcacagtactatgaattcctgcgcctcggtcgtgaaggctatacaaaagtacagaacgcctcccaccgcacgttc

SEQ ID NO: 291178 - DNA, 75 bp, synthetic construct
  source 1..75: mol_type = other DNA
gcacagtactatgaattcctgcgcctcggtcgtgaaggctatacaaaagtacagaacgcctccaaacgcacgttc

SEQ ID NO: 291179 - DNA, 75 bp, synthetic construct
  source 1..75: mol_type = other DNA
gcacagtactatgaattcctgcgcctcggtcgtgaaggctatacaaaagtacagaacgcatcccaacgcacgttc

SEQ ID NO: 291180 - DNA, 75 bp, synthetic construct
  source 1..75: mol_type = other DNA
gcgggctggtggtgatcaagcccagcggcgtcgcctacgaaaccatgaaagcagacgatatggtggtggtcgata

SEQ ID NO: 291181 - DNA, 75 bp, synthetic construct
  source 1..75: mol_type = other DNA
ccgcaactgaatcacatcgacagctatctcatgaataaacatttcatgcggaagcacggtcctaacgcctattac

SEQ ID NO: 291182 - DNA, 75 bp, synthetic construct
  source 1..75: mol_type = other DNA
cgggccgtttgcctgggggaaagatgcccacgatgcggtgcataacgcggtggtgatggaagaagtggcaaaaat

SEQ ID NO: 291183 - DNA, 75 bp, synthetic construct
  source 1..75: mol_type = other DNA
atatcccccaagcgcagcaatattaatattcacctgcaatgggtcgatatctggcttaaaaatattgtgtttctt

SEQ ID NO: 291184 - DNA, 75 bp, synthetic construct
  source 1..75: mol_type = other DNA
gatgtccaccaggggccaaaaggcaatcacgccagtgttattgtgcccgtcgaagtagaagcggcagtcgcatag

SEQ ID NO: 291185 - DNA, 75 bp, synthetic construct
  source 1..75: mol_type = other DNA
gtagaagttgaagcagaaaatgtggattctgagattgaagataaaatcaagattcttaccgaacaaataattaaa

SEQ ID NO: 291186 - DNA, 75 bp, synthetic construct
  source 1..75: mol_type = other DNA
ctgggcaacgccgagccgctgcatacgccgggaattgtggtgtatcagcacggaccgttcgcctgggggaaagat

SEQ ID NO: 291187 - DNA, 75 bp, synthetic construct
  source 1..75: mol_type = other DNA
gaatatatcgattcaagagggttttatcgttttcccagtccggttacaggaaacccttcatcaggatttggtcct

SEQ ID NO: 291188 - DNA, 75 bp, synthetic construct
  source 1..75: mol_type = other DNA
ttatgttaattctgattatattgcatgggcttccccgctggtatttgacggagatggaagagtattaaatatcgg

SEQ ID NO: 291189 - DNA, 75 bp, synthetic construct
  source 1..75: mol_type = other DNA
aacgcgggctggtggtgatcaagcccagcggtgtcgcctacgaaaccatgaaagcggacgatatggtggtggtcg

SEQ ID NO: 291190 - DNA, 75 bp, synthetic construct
  source 1..75: mol_type = other DNA
gcgacgcatctcgaactctaccgtcgttatccgtcgcttggtggcattgtccatacccactccactcatgccacc

SEQ ID NO: 291191 - DNA, 75 bp, synthetic construct
  source 1..75: mol_type = other DNA
gcgacgcatcttgaactctaccgtcgttatccgtcgcttggcggcattgtccatacccattccacgcatgccacc

SEQ ID NO: 291192 - DNA, 75 bp, synthetic construct
  source 1..75: mol_type = other DNA
ggttacagcatgggtgttgccacaacgtatgccttattcagcaatatcgactgggatgatgatcatcacgatcat

SEQ ID NO: 291193 - DNA, 75 bp, synthetic construct
  source 1..75: mol_type = other DNA
ccgtattactggtgagcatcttactgacaagaatatggcatggcagcacaatccaaactaccgcgatggtgtgcc

SEQ ID NO: 291194 - DNA, 75 bp, synthetic construct
  source 1..75: mol_type = other DNA
tagctgcggaggtgcgccaatatccgtcatccgccaatacattgaacaacagcaaacacctggtcaggtggaaaa

SEQ ID NO: 291195 - DNA, 75 bp, synthetic construct
  source 1..75: mol_type = other DNA
ccgtcatccgccaatacattgaacaacagcaaacacctggtcagatgaaaaaacgagccttatatccccgccctg

SEQ ID NO: 291196 - DNA, 75 bp, synthetic construct
  source 1..75: mol_type = other DNA
atggctacatacggcggtcagtttacgcttacctgtatcattgtgcagtgggatgcgaacagtaacggtatctgg

SEQ ID NO: 291197 - DNA, 75 bp, synthetic construct
  source 1..75: mol_type = other DNA
actgtatcattgtgcagtgggatgcgaacagtaacggtatctgggatcgcgaaccggtaaaagagtccgaccaga

SEQ ID NO: 291198 - DNA, 75 bp, synthetic construct
  source 1..75: mol_type = other DNA
tacatccagccccgtcattgcagagccagcacaaaccgttatttcgattgaacccgccaacccagatgtcgttta

SEQ ID NO: 291199 - DNA, 75 bp, synthetic construct
  source 1..75: mol_type = other DNA
gtttcatcaaaccgatgtcaacggcggaatgagcgccacgcagctacctgctccaacacgcgacagccagcgtca

SEQ ID NO: 291200 - DNA, 75 bp, synthetic construct
  source 1..75: mol_type = other DNA
gcgtgccttaccatgatcaggatatggcaaaacgttttcatcaaacaaacgtcaatggtggtatgagcaccacac

SEQ ID NO: 291201 - DNA, 75 bp, synthetic construct
  source 1..75: mol_type = other DNA
ccacaaatcggggagcaaccgacaccagttcctccagcaacgcctgcaccagaagtaacggcaaccctaccactt

SEQ ID NO: 291202 - DNA, 75 bp, synthetic construct
  source 1..75: mol_type = other DNA
agatcacgtccatttgttaactaactatcctcccaaactggcgatatccagtctggtaaacagcctcaaaggcgt

SEQ ID NO: 291203 - DNA, 75 bp, synthetic construct
  source 1..75: mol_type = other DNA
gccagatttttgaccatgacgcgacagaaaaactacgcacttacttttcaaatgtatgtgctgattttgaagctg

SEQ ID NO: 291204 - DNA, 75 bp, synthetic construct
  source 1..75: mol_type = other DNA
gtcgtcgcagaacctgcaccgaccgtaataaccattgagccagccaatccggatgtggtttatattccgaactac

SEQ ID NO: 291205 - DNA, 75 bp, synthetic construct
  source 1..75: mol_type = other DNA
ttaatgaaggctggcgtgatattacagtggaagaactcaggttatcttcggaatatgtcgattcaagaggttttt

SEQ ID NO: 291206 - DNA, 75 bp, synthetic construct
  source 1..75: mol_type = other DNA
cgatcgaagagacgctggaagccctgaacgacgtggtaaaagccgggaaagcgcgttatatcggcgcgtcatcca

SEQ ID NO: 291207 - DNA, 75 bp, synthetic construct
  source 1..75: mol_type = other DNA
aagaactgggtgcaacacgagcacaagttgcgctggcctggttgttgagtaaaccgggcattgccgcaccgatta

SEQ ID NO: 291208 - DNA, 75 bp, synthetic construct
  source 1..75: mol_type = other DNA
atcactttgaagccggaacagattgccgaactggaaacgccgtataaaccgcatcctgtcgtaggatttaaataa

SEQ ID NO: 291209 - DNA, 75 bp, synthetic construct
  source 1..75: mol_type = other DNA
tgatgagctgctgaacgcggtggatatcactttgaagccggaacagattgccgaactggaaacgccgtataaacc

SEQ ID NO: 291210 - DNA, 75 bp, synthetic construct
  source 1..75: mol_type = other DNA
agatgagttactgaatgcggtggatatcacgttgaagccggaacaaattgccgagctggaaacgccatataaacc

SEQ ID NO: 291211 - DNA, 75 bp, synthetic construct
  source 1..75: mol_type = other DNA
tgttatcaggagggcgtggcggtgattccgtggagcccgctggcgcgggggcgactgacgcgtccgtggggagaa

SEQ ID NO: 291212 - DNA, 75 bp, synthetic construct
  source 1..75: mol_type = other DNA
ttggtgagatgactttcgagaaagctggtgttgcgcgtaccgaagaagaagcaatggccttagttctggtagcac

SEQ ID NO: 291213 - DNA, 75 bp, synthetic construct
  source 1..75: mol_type = other DNA
actggcatatcggtaatagtgtcaatgaccggtgtctggctgtccttttttatcgacagcgcaccagctccgacg

SEQ ID NO: 291214 - DNA, 75 bp, synthetic construct
  source 1..75: mol_type = other DNA
tcatcatgacgtttaccgttaccagcatcaacgcacgtacaaaggggaacgcccatacacaggatctgttatcat

SEQ ID NO: 291215 - DNA, 75 bp, synthetic construct
  source 1..75: mol_type = other DNA
atgcaatacaaccccttaggaaaaaccgaccttcgcgtttcccgactttgcctcggctgtatgacctttggcgag

SEQ ID NO: 291216 - DNA, 75 bp, synthetic construct
  source 1..75: mol_type = other DNA
ttaattcgtaatacacgtaatgtttccatcactgaagcgggagaacagttgctcaacacgctgcgccccgcgtta

SEQ ID NO: 291217 - DNA, 75 bp, synthetic construct
  source 1..75: mol_type = other DNA
aacaacaacagcctgtttgccatccgtctgctgaaagacaccgagggtaactatctgtggcgtccggggctggaa

SEQ ID NO: 291218 - DNA, 75 bp, synthetic construct
  source 1..75: mol_type = other DNA
atgagttacgctgatacaaccaatccgaacgcgcccgtttcgctggttgagaaatgggataaaacttttgctgag

SEQ ID NO: 291219 - DNA, 75 bp, synthetic construct
  source 1..75: mol_type = other DNA
ttgaaagtatcattgatggctgcgaaagcgaaaaacggcgtgattggttgcggtccagacataccctggtccgcg

SEQ ID NO: 291220 - DNA, 75 bp, synthetic construct
  source 1..75: mol_type = other DNA
ggaagccaaaaaaaccagcgtcaatgccgagcaaggacgaattcaggcccggctgtatgcagactggctggaaaa

SEQ ID NO: 291221 - DNA, 75 bp, synthetic construct
  source 1..75: mol_type = other DNA
tctggcggcgcaaactgcccgttataccaacccggaagaactggatgtgctctggccggtcatcatcgagaaagt

SEQ ID NO: 291222 - DNA, 75 bp, synthetic construct
  source 1..75: mol_type = other DNA
cgctgccggcaaatcctcatccggtactgaaagagttctttgactactatcgcatgccgcgcggcttccacgaac

SEQ ID NO: 291223 - DNA, 75 bp, synthetic construct
  source 1..75: mol_type = other DNA
tctgcaatatctgaatgaacagcgctggaaggatgcgcagagcggaacgttcgctcacggtggtcatgatattaa

SEQ ID NO: 291224 - DNA, 75 bp, synthetic construct
  source 1..75: mol_type = other DNA
tggtcgtccgcttcagttaaaaagcaccgaaattattcgccgcttgtcacaggaattaaacggacgcttgccgat

SEQ ID NO: 291225 - DNA, 75 bp, synthetic construct
  source 1..75: mol_type = other DNA
atgcgacacatttttcaacgattattgccccgacggctatggctggcagggctgccatgtctggcattgctgggt

SEQ ID NO: 291226 - DNA, 75 bp, synthetic construct
  source 1..75: mol_type = other DNA
cagcgcggcggttgatttcttaggcctgcaaaaagaggtggatcgcaaccgtatcgggttgctcggcatctgcgg

SEQ ID NO: 291227 - DNA, 75 bp, synthetic construct
  source 1..75: mol_type = other DNA
ggtggctacccgcgaaacgtcgcatctccggatatcaacaccgaggatttcagcgcggcggttgatttcttaggc

SEQ ID NO: 291228 - DNA, 75 bp, synthetic construct
  source 1..75: mol_type = other DNA
tttaccagcatgatgccggaagccatcatcatgaaaatggatgcgctgcgtatccatggcaaccgtgccgcgcac

SEQ ID NO: 291229 - DNA, 75 bp, synthetic construct
  source 1..75: mol_type = other DNA
cggcgcagtggcggttttcatggcttgttatgactgtttttttgtacagtctatgcctcgggcatccaagcagca

SEQ ID NO: 291230 - DNA, 75 bp, synthetic construct
  source 1..75: mol_type = other DNA
aaccggctggcaatttctcgccggatacgccgcacgagagtgaaaatcccgcgccatctacccatgaggtcactc

SEQ ID NO: 291231 - DNA, 75 bp, synthetic construct
  source 1..75: mol_type = other DNA
ctaagaaaatggatgcgtattgtaataaaatcatcactgaaatgacaaagcatggtgataaaataaaagctactt

SEQ ID NO: 291232 - DNA, 75 bp, synthetic construct
  source 1..75: mol_type = other DNA
ctgttggcgcagagaaaaaacggtacgccgatgtctttaaccgcgttgagcatgggggatgaacgggcgttgcac

SEQ ID NO: 291233 - DNA, 75 bp, synthetic construct
  source 1..75: mol_type = other DNA
gcgaaacgccgcgggttgtttataattcgagaacggataagccgtggccggtggcgctttatttgacgcctgtga

SEQ ID NO: 291234 - DNA, 75 bp, synthetic construct
  source 1..75: mol_type = other DNA
ggcgggcgatgccgcgcacatcatgccggtgtggcaggggcagggctataacagtggtatgcgcgacgcctttaa

SEQ ID NO: 291235 - DNA, 75 bp, synthetic construct
  source 1..75: mol_type = other DNA
ggtggtggagaaactcgataagttgatcgactacccgcgtgcgattggtattgatgacgaggcgctgcgcaccat

SEQ ID NO: 291236 - DNA, 75 bp, synthetic construct
  source 1..75: mol_type = other DNA
gcagctatgttcttccgtcggccagatctttcatatagataccctaaaaaaatgtatgaattgttggctgagaaa

SEQ ID NO: 291237 - DNA, 75 bp, synthetic construct
  source 1..75: mol_type = other DNA
atgggatataaagtaaagaaattcatcatgagtaatggcgagcgaggatgcctgatccttgataaaaatagtaat

SEQ ID NO: 291238 - DNA, 75 bp, synthetic construct
  source 1..75: mol_type = other DNA
ccagctgtgttttctcgtctggtcatggataaagttggtcagttcgaaaaatcgctggtagttgatattggcggc

SEQ ID NO: 291239 - DNA, 75 bp, synthetic construct
  source 1..75: mol_type = other DNA
tgaggtctctaaactaaatctggtgctggataccattgatacagcgataaataaactgggcgagctagtgttgat

SEQ ID NO: 291240 - DNA, 75 bp, synthetic construct
  source 1..75: mol_type = other DNA
ggcaactcgattttcaccaataccgcgtcgttttcacctgcacagggcgtcggcgtacagttgacgcgcaacggt

SEQ ID NO: 291241 - DNA, 75 bp, synthetic construct
  source 1..75: mol_type = other DNA
ttcaaacacatatcaataaaagaaaaagaagttattgaaagggtttatgactctttaagaaaaataactaaggag

SEQ ID NO: 291242 - DNA, 75 bp, synthetic construct
  source 1..75: mol_type = other DNA
atgaatgcacaatacaatgaaattcttcgctttatacgcaatatgattcgcactggcattatcgtcgaaaccgac

SEQ ID NO: 291243 - DNA, 75 bp, synthetic construct
  source 1..75: mol_type = other DNA
cttcaagccgatgccgcaatattacggcggtgcgctggtacgtgagggcgaagcgaagcactctccggtcggcaa

SEQ ID NO: 291244 - DNA, 75 bp, synthetic construct
  source 1..75: mol_type = other DNA
cgcgccccgcgctcaatatcaaccctgttaacgatttcgacgacgtgtccgacgacgtgctcgccgctgacctca

SEQ ID NO: 291245 - DNA, 75 bp, synthetic construct
  source 1..75: mol_type = other DNA
ttcgctcaatggaagactatatcaactacatcacaccgcagttttctcgcacccacattaacttccagcgcgtcc

SEQ ID NO: 291246 - DNA, 75 bp, synthetic construct
  source 1..75: mol_type = other DNA
cggtaacaggatccagcggcgcgggaaccaccactaccagcctcgcgtttcgaaaaatcttcgcgcagttaaatc

SEQ ID NO: 291247 - DNA, 75 bp, synthetic construct
  source 1..75: mol_type = other DNA
caatatcctccagcctatcaaagaacattttaaattagttactgatgatttacaggacggcgatctattgatccg

SEQ ID NO: 291248 - DNA, 75 bp, synthetic construct
  source 1..75: mol_type = other DNA
cagtgtaatcgtgatgttcaacatcgccgattgcgaaggcgtcgaaaccctgccgctggaaaacttcacccccgg

SEQ ID NO: 291249 - DNA, 75 bp, synthetic construct
  source 1..75: mol_type = other DNA
ggaatgggaaaatattcctgactactgcttctgcggtgaatcgcctctccgcgccgccatgattgtatttctcat

SEQ ID NO: 291250 - DNA, 75 bp, synthetic construct
  source 1..75: mol_type = other DNA
atcgactacccgcgtgcgattggtattgatgacgaggcgctgcgcaccatgcagtcggtcggcctggtcgataat

SEQ ID NO: 291251 - DNA, 75 bp, synthetic construct
  source 1..75: mol_type = other DNA
ggggcgctggtgcgtgaaggcgacgcgaaaacttcaccggtcggcaagatgtttatccagccgaaggtgacgctg

SEQ ID NO: 291252 - DNA, 75 bp, synthetic construct
  source 1..75: mol_type = other DNA
tgctgccgaacccggacaacgtcgagctgatccgccagcgcgtgtatacccataatgctcgtctggccgaacgtt

SEQ ID NO: 291253 - DNA, 75 bp, synthetic construct
  source 1..75: mol_type = other DNA
cgtaaaatattcgcgcagttaaatctgcatgcagctgaggtggaaggcgacagttttcaccgttacacccgcccg

SEQ ID NO: 291254 - DNA, 75 bp, synthetic construct
  source 1..75: mol_type = other DNA
gaccaccaccaccagcctcgggtttcgtaaaatattcgcgcagttaaatctgcatgcatccgaggtggaaggcga

SEQ ID NO: 291255 - DNA, 75 bp, synthetic construct
  source 1..75: mol_type = other DNA
aacccaccgtacagcaatatcaggccgtgggtggaaaaagccgctgagcagtgcatacaacagcgacagacggta

SEQ ID NO: 291256 - DNA, 75 bp, synthetic construct
  source 1..75: mol_type = other DNA
tcagcaccccctatcaccagggactgtttaatgccggcaaagtttacaattacgtcgtggatgggaaaaaataca

SEQ ID NO: 291257 - DNA, 75 bp, synthetic construct
  source 1..75: mol_type = other DNA
tcgtgagtacattgcggagcagaacctgatagccgccattgaactggacgaacggattggttgttcagccagcct

SEQ ID NO: 291258 - DNA, 75 bp, synthetic construct
  source 1..75: mol_type = other DNA
ggaggcgatgttcctcgttatcctgattaactcgtttgcttatatgccaacgcttgggttaatcaacaccatctc

SEQ ID NO: 291259 - DNA, 75 bp, synthetic construct
  source 1..75: mol_type = other DNA
cattctgaccatcccgttcttcttaagccgctacggtattaagaacgtaatgatgatcagtatcgtggcgtggat

SEQ ID NO: 291260 - DNA, 75 bp, synthetic construct
  source 1..75: mol_type = other DNA
tgtggatggtgaatgtggtcttctccttcggccaccgtttgcttaatttccagtcagcgcgggtaacctattttg

SEQ ID NO: 291261 - DNA, 75 bp, synthetic construct
  source 1..75: mol_type = other DNA
ctttggccaccgtttgcttaacttccagtcagcgcgggtgacttattttgttaacgcatcgctgtttatctatct

SEQ ID NO: 291262 - DNA, 75 bp, synthetic construct
  source 1..75: mol_type = other DNA
gatagccaaaccgacgctgattattcacgccaaagacgatccgtttatggatcatcaggtgatcccgaaaccgga

SEQ ID NO: 291263 - DNA, 75 bp, synthetic construct
  source 1..75: mol_type = other DNA
tgtctttatggatacccccggatatgacccgatggcagtaaccggacaaatcgccggaggagccaacctgctgtg

SEQ ID NO: 291264 - DNA, 75 bp, synthetic construct
  source 1..75: mol_type = other DNA
ggggatagacagtcatcttccggaaaaggatgttcatcaggatacctttatggggatccgcagaaaagacggacg

SEQ ID NO: 291265 - DNA, 75 bp, synthetic construct
  source 1..75: mol_type = other DNA
caacttatgctttatgctaaaagtttatttgatattaacgaaggcgacttaatttcttcagataatcctatcaat

SEQ ID NO: 291266 - DNA, 75 bp, synthetic construct
  source 1..75: mol_type = other DNA
gcggtctttatgcctgctttgctggggattgtggccgacaaatggttaagtgcgaaatgggtatatgccatttgt

SEQ ID NO: 291267 - DNA, 75 bp, synthetic construct
  source 1..75: mol_type = other DNA
ggttctggccttcgcattcatggcgatgtttaaatacaaacacgttcgtgttccagccggaacacaaactgttag

SEQ ID NO: 291268 - DNA, 75 bp, synthetic construct
  source 1..75: mol_type = other DNA
tgctgctgggcgcggaactgcagattaccaacatgttcggtaataccttcctgcacagcttcgacaaagatccga

SEQ ID NO: 291269 - DNA, 75 bp, synthetic construct
  source 1..75: mol_type = other DNA
tttaatgacttcatccactcgttccgcatgcaggtatttttcgttatatccgggtacttttcctacatgcttttt

SEQ ID NO: 291270 - DNA, 75 bp, synthetic construct
  source 1..75: mol_type = other DNA
taccggcacgctggaagtacagaagggcgggacgatgcgtggcaacattgaacacaccggcggtgaactctcatc

SEQ ID NO: 291271 - DNA, 75 bp, synthetic construct
  source 1..75: mol_type = other DNA
gttgcttaactgactggcattaccccttctggggccgtttttttgttttcccaaagcaacttttccataaaccgg

SEQ ID NO: 291272 - DNA, 75 bp, synthetic construct
  source 1..75: mol_type = other DNA
gcgggaaattaacctctaacggtgtgcaggttgatgaccatgaccacggcaatgtgcagagcggtggaagttgga

SEQ ID NO: 291273 - DNA, 75 bp, synthetic construct
  source 1..75: mol_type = other DNA
gcgcacatggtgggcaccttccgtgggggaacaggtgctgattctggccgtgggcggtgaactcgacacggcgtt

SEQ ID NO: 291274 - DNA, 75 bp, synthetic construct
  source 1..75: mol_type = other DNA
catggtgaaagcgtcaacccgcatcaccctggacacaccggaggtggtctgcaccaacaggctgattaccggcac

SEQ ID NO: 291275 - DNA, 75 bp, synthetic construct
  source 1..75: mol_type = other DNA
aaatcgctcgggcgatccgcaaccttatccgcaccgacattgtgaccgacgtcgaccccgtcgaggggctttgtc

SEQ ID NO: 291276 - DNA, 75 bp, synthetic construct
  source 1..75: mol_type = other DNA
accctggacacaccggaggtggtctgcaccaacaggctgattaccggcacgctggaagtgcagaagggcgggacg

SEQ ID NO: 291277 - DNA, 75 bp, synthetic construct
  source 1..75: mol_type = other DNA
cgatgcagccgaaaaatccataaccggtatgaattcaacgacagagcatactgaacgcaaggagaatgaaaaatg

SEQ ID NO: 291278 - DNA, 75 bp, synthetic construct
  source 1..75: mol_type = other DNA
gtggggcaaaacctggtcgtagatctttcgacgcaaatcttttgccataacgattatccggaaaccattacagac

SEQ ID NO: 291279 - DNA, 75 bp, synthetic construct
  source 1..75: mol_type = other DNA
gcggtacgttcaaatcaaacggcgtgcaggtggatgaccacggccacggcggcgttaaaggcggggatgactgga

SEQ ID NO: 291280 - DNA, 75 bp, synthetic construct
  source 1..75: mol_type = other DNA
cactggcaaagtgattatcgaaacgctgggtgacgccgagccgctgcatacgccgggaattgtggtgtatcagca

SEQ ID NO: 291281 - DNA, 75 bp, synthetic construct
  source 1..75: mol_type = other DNA
ccgcagcttaatcccatcgacagctacctgatgaataaacacttcatgcgtaagcatggtcccaacgcctattac

SEQ ID NO: 291282 - DNA, 75 bp, synthetic construct
  source 1..75: mol_type = other DNA
atgaatattctcggctgtctggataaggccaccagcggcacctatcgcgtcgccggtcaggatgttgccacactg

SEQ ID NO: 291283 - DNA, 75 bp, synthetic construct
  source 1..75: mol_type = other DNA
gccgcgagcatttcggctttattgtgcacagaaaacccccagctaggctgggggttccggaaagctttcagcttt

SEQ ID NO: 291284 - DNA, 75 bp, synthetic construct
  source 1..75: mol_type = other DNA
cagcaaactttgataaatttaaggtctacgacgacacgatgcgtccggtgacaacggtggagtttcacgtcaaga

SEQ ID NO: 291285 - DNA, 75 bp, synthetic construct
  source 1..75: mol_type = other DNA
cacctggcgcattacccgttagcgtcggcgtagttgtcaataacgtccagaccgtgctgaatattgccagagccg

SEQ ID NO: 291286 - DNA, 75 bp, synthetic construct
  source 1..75: mol_type = other DNA
aaaaagtgacgctattgttacgccagcacatcggagccagcgcaattgcgtgtgtccaaaaaggcgatcgtgtcg

SEQ ID NO: 291287 - DNA, 75 bp, synthetic construct
  source 1..75: mol_type = other DNA
tgcttttacagcggatgttaggaaataccaccgctactttcagggaagggcaatgggaagccatagatgcagtgg

SEQ ID NO: 291288 - DNA, 75 bp, synthetic construct
  source 1..75: mol_type = other DNA
tgctgacagacgaagataatgaacccgttatggtttttaacggagagaggaatgtactggcagacagtctgaaac

SEQ ID NO: 291289 - DNA, 75 bp, synthetic construct
  source 1..75: mol_type = other DNA
tgggatggacgaaggtaccggagcacaggattgtagtatcacgctaataaataaaccgggtctggtgacctgctt

SEQ ID NO: 291290 - DNA, 75 bp, synthetic construct
  source 1..75: mol_type = other DNA
gaaagtgaaaaaaggcgaagccatgtccgttaccgtgacggtgaaagacagcgccgggaatacggtgccgaatgt

SEQ ID NO: 291291 - DNA, 75 bp, synthetic construct
  source 1..75: mol_type = other DNA
caataaaggctttctgaccgtcgatgaaattcgccgggttacgcgcgccttcgccagtttgggcaccgaaaaagt

SEQ ID NO: 291292 - DNA, 75 bp, synthetic construct
  source 1..75: mol_type = other DNA
ttacgccgcgactttaccgatatcatcgccgctgtgcgggaaaacgacgctatccgccagattgcggtcaccacc

SEQ ID NO: 291293 - DNA, 75 bp, synthetic construct
  source 1..75: mol_type = other DNA
gccccattcagctgcgttttatcgaactgatggaaacgggcgagggcagcgaactcttccgcaagcaccatattt

SEQ ID NO: 291294 - DNA, 75 bp, synthetic construct
  source 1..75: mol_type = other DNA
tttgtgaacaatgccgcttatgtaccgatctctgtccacgtcatttaatcggtcacgaactgtcaccacatttgt

SEQ ID NO: 291295 - DNA, 75 bp, synthetic construct
  source 1..75: mol_type = other DNA
ctcttcttcgtgattttgataatccgccctttaaaaaggtgccggcttactggtttcatccaggactgacttatc

SEQ ID NO: 291296 - DNA, 75 bp, synthetic construct
  source 1..75: mol_type = other DNA
acaaacgccgcgatgagcagtttgcggcgttttacgatgattgcatcaaaattgctcgcaggacctttgcgaata

SEQ ID NO: 291297 - DNA, 75 bp, synthetic construct
  source 1..75: mol_type = other DNA
aaagcaggggctgatgcagcgcattggtcgctgcatgggatatctgcagctggcggcagagattgaagcacttgc

SEQ ID NO: 291298 - DNA, 75 bp, synthetic construct
  source 1..75: mol_type = other DNA
agataaaaccacagataactgaagttatcacggattttatgaaccggctggagccggggcaggaattaattattt

SEQ ID NO: 291299 - DNA, 75 bp, synthetic construct
  source 1..75: mol_type = other DNA
gaacgcatccacaacgcagacggcaacgctggtcagtccgccggaaggcatcaacagcacggtgacgattaaatc

SEQ ID NO: 291300 - DNA, 75 bp, synthetic construct
  source 1..75: mol_type = other DNA
gcatcaaaattgctcgcaggacctttgcgaatattttgcaggaaaagtttttaccgaccgcattgtcagaaaagt

SEQ ID NO: 291301 - DNA, 75 bp, synthetic construct
  source 1..75: mol_type = other DNA
gtgattttgatcatccgccctttaaaaaagtgccggcttactggcttcatcccggactgacttatctgaaagtgc

SEQ ID NO: 291302 - DNA, 75 bp, synthetic construct
  source 1..75: mol_type = other DNA
tcatcctttgttgtatccggtgatgctgggaaaataaccatctcagaaaatgggaaagtaacacctccatcgcac

SEQ ID NO: 291303 - DNA, 75 bp, synthetic construct
  source 1..75: mol_type = other DNA
tattaagtgccggagcgcgaaatttactgcaacactacaattttccgggaaacgtgcgcgaactggaacatgcta

SEQ ID NO: 291304 - DNA, 75 bp, synthetic construct
  source 1..75: mol_type = other DNA
tcgtgatttcaatacgccaccctttaagaaagagcctgatggctggatccagccggggctgacttatctcaaatg

SEQ ID NO: 291305 - DNA, 75 bp, synthetic construct
  source 1..75: mol_type = other DNA
ctgcgtgattttgataatacgccctttaagaaagcacctgttgactggatgcagccggggatgacttatctgaaa

SEQ ID NO: 291306 - DNA, 75 bp, synthetic construct
  source 1..75: mol_type = other DNA
gttgtgcgggaggctcttcttcgtgagtttgacaacccgccctttaaaaaagtgccggcttactggtttcatcca

SEQ ID NO: 291307 - DNA, 75 bp, synthetic construct
  source 1..75: mol_type = other DNA
gaagtagcaaggcagccactattcaatgatttaagttcgttgtctgcgcgttatccgaataacacgtttgtcact

SEQ ID NO: 291308 - DNA, 75 bp, synthetic construct
  source 1..75: mol_type = other DNA
ctgggttctggacaacatcactattcctgttcatccgcgccagtacgaattctcgcgtctgaatctggaatacac

SEQ ID NO: 291309 - DNA, 75 bp, synthetic construct
  source 1..75: mol_type = other DNA
ctgttcagtgtaccgaatccaggcgctgcggatgatttcctgtcggtgattaaccaggattctctggtcattaaa

SEQ ID NO: 291310 - DNA, 75 bp, synthetic construct
  source 1..75: mol_type = other DNA
tctcgcgcctgaatctggaatacactgtgatgtccaagcgtaagctgaacctactggtgaccgacaagcacgttg

SEQ ID NO: 291311 - DNA, 75 bp, synthetic construct
  source 1..75: mol_type = other DNA
tcattccttaatgacttacccacccgaccaggggtgtatctgtttcatggcgaaagtgacaccatgccgctctat

SEQ ID NO: 291312 - DNA, 75 bp, synthetic construct
  source 1..75: mol_type = other DNA
gctggttgttctcaccagaaacactggcagcaccgcaaattcatctgctgtctggagcgaccatgctcggcgcat

SEQ ID NO: 291313 - DNA, 75 bp, synthetic construct
  source 1..75: mol_type = other DNA
cgccagtggtggtgatatgaacacactacgcttaggtattgatggcattagtcaggcgacaccgctggatacatt

SEQ ID NO: 291314 - DNA, 75 bp, synthetic construct
  source 1..75: mol_type = other DNA
catcagcgatgccctggaaggtattacgcactctctgtgtacgcttgagttccaggacaaccgtcgtctgtacga

SEQ ID NO: 291315 - DNA, 75 bp, synthetic construct
  source 1..75: mol_type = other DNA
tgaagatctggccagtggtcagcacaccacagtacacacccgtttcccgccggagccgaatggctatctgcatat

SEQ ID NO: 291316 - DNA, 75 bp, synthetic construct
  source 1..75: mol_type = other DNA
ggttacactgcggcttctattcgtgagttctgcaaacgaatcggcgtgaccaagcaggacaacaccattgagatg

SEQ ID NO: 291317 - DNA, 75 bp, synthetic construct
  source 1..75: mol_type = other DNA
acaccggaacagatccgcgaataccgcggcaccctgacgcagccgggtaaaaacagcccgtaccgcgaccgcagc

SEQ ID NO: 291318 - DNA, 75 bp, synthetic construct
  source 1..75: mol_type = other DNA
acgacgttgaatggttaggttttcactggtctggcaacatccgttactcctccgattattttgacaaactccatg

SEQ ID NO: 291319 - DNA, 75 bp, synthetic construct
  source 1..75: mol_type = other DNA
gaaccatccgaacaaaccggaaatgggtagccgtcaggtgccgtttagcggtgagatttggatcgaccgcgccga

SEQ ID NO: 291320 - DNA, 75 bp, synthetic construct
  source 1..75: mol_type = other DNA
agtcgcggtcgtgcgtgttttcgttcagcgctaaaacgttgcgccggagcatgctgcggtaaagagagccatgag

SEQ ID NO: 291321 - DNA, 75 bp, synthetic construct
  source 1..75: mol_type = other DNA
tatgacggtcagtattttgtttattctgccgattccggcggcattttttggcgcatggtttgccggacgtcccaa

SEQ ID NO: 291322 - DNA, 75 bp, synthetic construct
  source 1..75: mol_type = other DNA
atcggcggtctgctggatacgatgtggaactggcgcgcctgttatctctttttgttggtactttgtgccggtgtg

SEQ ID NO: 291323 - DNA, 75 bp, synthetic construct
  source 1..75: mol_type = other DNA
tggatgcgacctgctggttcagcgaagaatccaatgatgcggaaaccctcaaggccggaaaactgtatatcgact

SEQ ID NO: 291324 - DNA, 75 bp, synthetic construct
  source 1..75: mol_type = other DNA
ccgcgttcttctccggcaagctcgggatggcgatgctcagcaccggcgcgctgggctttatgcgtgagaacagca

SEQ ID NO: 291325 - DNA, 75 bp, synthetic construct
  source 1..75: mol_type = other DNA
atcatcattagatcctgactttcaggcatccgttagtctatcaggatttgaaaaaatatattataactacggtga

SEQ ID NO: 291326 - DNA, 75 bp, synthetic construct
  source 1..75: mol_type = other DNA
gcatactggatacaactaagctaaaaagcaaatcactactcgtaagactgattgctttatgtggtgatatgatga

SEQ ID NO: 291327 - DNA, 75 bp, synthetic construct
  source 1..75: mol_type = other DNA
attttagtaccgccagcgaagcgaaacgcaaagccagcggtgagtcgcttatgccttgccttagccgggtgcaac

SEQ ID NO: 291328 - DNA, 75 bp, synthetic construct
  source 1..75: mol_type = other DNA
cccggatgaagccgccatgctacggcaatcccgacgcatcagctggatatgtaccgccggtgaaatcggcgctct

SEQ ID NO: 291329 - DNA, 75 bp, synthetic construct
  source 1..75: mol_type = other DNA
gatcatgcgctacgtttgcgccagtctctggaacgtttacgagtcgtttgttggccgtggaaaggtgcggtggcg

SEQ ID NO: 291330 - DNA, 75 bp, synthetic construct
  source 1..75: mol_type = other DNA
gacgctggacagccagagcagttgcccctgtaaggcacggtttattgcgtcgatgatggatgatacgtatgagac

SEQ ID NO: 291331 - DNA, 75 bp, synthetic construct
  source 1..75: mol_type = other DNA
ctatcttgtcatgcttccttttagctgcttgtgaagacaaagtttatgatgtcagttactacgctgaacatcttg

SEQ ID NO: 291332 - DNA, 75 bp, synthetic construct
  source 1..75: mol_type = other DNA
atcgttaaaccgggcgattattccactcaagtcacagataacattgggtgataccgccacgcctggcgagatttt

SEQ ID NO: 291333 - DNA, 75 bp, synthetic construct
  source 1..75: mol_type = other DNA
atgaagtacgtgctgaggctcgcaacgagggtattaactataccgcaagccgtcttgctgctgctttcaatcacg

SEQ ID NO: 291334 - DNA, 75 bp, synthetic construct
  source 1..75: mol_type = other DNA
tgtaacgacaggccgaactatgaaattcaggccttattcatcggcccgccagtcccggtgacatcagaaggactg

SEQ ID NO: 291335 - DNA, 75 bp, synthetic construct
  source 1..75: mol_type = other DNA
agattacgcagaatatttctgcgacgcgttaggcactatccgtgacatcatcgaaccacgtggtgctaccatcgt

SEQ ID NO: 291336 - DNA, 75 bp, synthetic construct
  source 1..75: mol_type = other DNA
tctgaccggcaatggtcttgaaggcgcaattaaaggtgccgtaattggcggtacgggtggtgcaattctgggtaa

SEQ ID NO: 291337 - DNA, 75 bp, synthetic construct
  source 1..75: mol_type = other DNA
gattgatggcctgtctggtgaatatgcggagaaatcccttgaagaatgggcggaacagattcgcaaaggaagcag

SEQ ID NO: 291338 - DNA, 75 bp, synthetic construct
  source 1..75: mol_type = other DNA
atcacggatttatcaataagtctttgcgtgaagttttcgacgttacgcgcatgattctgtcagcgaaagaagagt

SEQ ID NO: 291339 - DNA, 75 bp, synthetic construct
  source 1..75: mol_type = other DNA
cacagggtaaagaagtgggttatgtaaataacggtggtattttgctgatgaaccttgaaacacacgatgaaggtg

SEQ ID NO: 291340 - DNA, 75 bp, synthetic construct
  source 1..75: mol_type = other DNA
tttatgctacccgggttgggtggtgttattgcaggagtgacatttgggtttgtgattgcaccaatgatggtctga

SEQ ID NO: 291341 - DNA, 75 bp, synthetic construct
  source 1..75: mol_type = other DNA
ttcgtttaaccgcattatgcagggcgcgctcggtcacgttgaccagttccagcaggtggcggagcagcagcaaac

SEQ ID NO: 291342 - DNA, 75 bp, synthetic construct
  source 1..75: mol_type = other DNA
tatcgcaaaaatgattcaaaaacagattggtaaagacgttgccgatgtccatgacattgcaaaaagcagcaaaga

SEQ ID NO: 291343 - DNA, 75 bp, synthetic construct
  source 1..75: mol_type = other DNA
taataaggaattttataagtcttttttcaatgttaaccgagaatgctataatattgaagaagaaagaaatagtca

SEQ ID NO: 291344 - DNA, 75 bp, synthetic construct
  source 1..75: mol_type = other DNA
caattatttttcatttagtttcaaaaaatgctcttgccgaggagtttaattacaatttcattcgtggtggaagca

SEQ ID NO: 291345 - DNA, 75 bp, synthetic construct
  source 1..75: mol_type = other DNA
gactttggcggttttcctcaggaattatacgaaacgcattatccggctccgggttcaccagcgttggcacagcga

SEQ ID NO: 291346 - DNA, 75 bp, synthetic construct
  source 1..75: mol_type = other DNA
aatggtttcattccgttcacgcattctgacgcaccgcttggcctggaagggattagtggaaagcgcattcctctg

SEQ ID NO: 291347 - DNA, 75 bp, synthetic construct
  source 1..75: mol_type = other DNA
gggagtgtcggttgatattcctccattccctgaatggaacagtggccattatatagaaattccaggtgagggcat

SEQ ID NO: 291348 - DNA, 75 bp, synthetic construct
  source 1..75: mol_type = other DNA
atgacccgaagtggtggtgattttcagacccgaccgctgaaacgcctgttcacagccaaccagtgctggacatcc

SEQ ID NO: 291349 - DNA, 75 bp, synthetic construct
  source 1..75: mol_type = other DNA
cgttatgcgcggcgcactgatagggcagttgatcaacaaggcgcttgataagcgtaatctgggggaaaatgttga

SEQ ID NO: 291350 - DNA, 75 bp, synthetic construct
  source 1..75: mol_type = other DNA
tctggcatgagtttgatggtctgaaatgggtcaaggacgcgacaaccaaatcctccgcgcttgatgtaaatcgat

SEQ ID NO: 291351 - DNA, 75 bp, synthetic construct
  source 1..75: mol_type = other DNA
tcctggagatgatccccgacacggatgattcaacactcaaatcggcaaacgtcctttgggataccttcctcaaag

SEQ ID NO: 291352 - DNA, 75 bp, synthetic construct
  source 1..75: mol_type = other DNA
ggcacggtgatagttcaccgtatccgtgggcgatgtcgtttaatgagtatgtgaaagcgaatctgacgtggcaag

SEQ ID NO: 291353 - DNA, 75 bp, synthetic construct
  source 1..75: mol_type = other DNA
tggcagcgctgcgagatgaaggaataatgttggtcgccagcggtaacgtggtgcataacctgcgcacagtgaagt

SEQ ID NO: 291354 - DNA, 75 bp, synthetic construct
  source 1..75: mol_type = other DNA
aatgttggtcgccagcggcaacgtggtgcataacctgcgtacagtgaagtggcacggtgatagttcaccgtatcc

SEQ ID NO: 291355 - DNA, 75 bp, synthetic construct
  source 1..75: mol_type = other DNA
gttcgtccgacgagaagaacaagacggatatcctcgtcgtgttacaggcgaaaaaagtcaggcgcgccagcgccg

SEQ ID NO: 291356 - DNA, 75 bp, synthetic construct
  source 1..75: mol_type = other DNA
agcggcgttatcctcgacgtgaagccgcaaatccggactgacaacattgaccttgtgattaagcagcagctttcc

SEQ ID NO: 291357 - DNA, 75 bp, synthetic construct
  source 1..75: mol_type = other DNA
ccggatatcgatgaacgggcatttattaagcgctatctcgtcaatatgaacattgcgatttataacaaacagggt

SEQ ID NO: 291358 - DNA, 75 bp, synthetic construct
  source 1..75: mol_type = other DNA
gccagcaggcgtcgctctctttctccgcgctggttcaggtgcgcaacaaaatcgccaccggatttaacgatctga

SEQ ID NO: 291359 - DNA, 75 bp, synthetic construct
  source 1..75: mol_type = other DNA
ttactaatcagctcattaaatccctgccccctaacacatccgatgcacgcagtaccgatgccgaatacagcgaca

SEQ ID NO: 291360 - DNA, 75 bp, synthetic construct
  source 1..75: mol_type = other DNA
caatcaggtcgctcctgagtccgggcaaattgcgcccgctctcgcacactttgggcaaaacgaaacaacgtcgcc

SEQ ID NO: 291361 - DNA, 75 bp, synthetic construct
  source 1..75: mol_type = other DNA
gctggaaaatatcgcgacctatcagcaatatggttccgttgaagcggcgctggcagccggtaagaccttccatat

SEQ ID NO: 291362 - DNA, 75 bp, synthetic construct
  source 1..75: mol_type = other DNA
gatgtttgaggttggaggcttttttggtgctatcgtagctggatggggatcagatattctgtttaagggcaatcg

SEQ ID NO: 291363 - DNA, 75 bp, synthetic construct
  source 1..75: mol_type = other DNA
ccgtcagggattatcatcattacgaccgggcagattgacccctcttatacttcagcacaacagccagcatcagtc

SEQ ID NO: 291364 - DNA, 75 bp, synthetic construct
  source 1..75: mol_type = other DNA
ggtttgggagaagcggcaaaacgggatgtgggtaacgggcaaaaccaaattcctgatatgtcagcgtgggagtgt

SEQ ID NO: 291365 - DNA, 75 bp, synthetic construct
  source 1..75: mol_type = other DNA
gtttttctaagctttggggaggggtcatttttttattccttaggtattcgcctggatgcctcaaccattgaaaca

SEQ ID NO: 291366 - DNA, 75 bp, synthetic construct
  source 1..75: mol_type = other DNA
aaaaccagcggcctgaccgttgagcagataaaaccgcagataactgacgttatcacggattttatgaaccgactg

SEQ ID NO: 291367 - DNA, 75 bp, synthetic construct
  source 1..75: mol_type = other DNA
attattatgccgtcagataatgtaaaagcagttgtcaatgaatccacatgggagtggctgcgtccggggagtatt

SEQ ID NO: 291368 - DNA, 75 bp, synthetic construct
  source 1..75: mol_type = other DNA
cggcaatcaccctggcagcgtactacatgggcattattccaccggtgaccaaatattgcaccgtggaccatgccc

SEQ ID NO: 291369 - DNA, 75 bp, synthetic construct
  source 1..75: mol_type = other DNA
tcagtatcgcgttccttctcggcattaattcccggctttattattctttccgtgatggggattattgcctgggcg

SEQ ID NO: 291370 - DNA, 75 bp, synthetic construct
  source 1..75: mol_type = other DNA
tctaagctttggggaggggtcatttttttattccttaggtattcgcctggatgcctcaaccattgaaacacttaa

SEQ ID NO: 291371 - DNA, 75 bp, synthetic construct
  source 1..75: mol_type = other DNA
gtctatggttggtttctattgatagtaaatatgttttttcgttattatttttcatcactggcttctttatctttg

SEQ ID NO: 291372 - DNA, 75 bp, synthetic construct
  source 1..75: mol_type = other DNA
gcgcatggtttgccggacgtcccaataaacgcttctccacgttaatgtggcagtcggttatctgctgcctgctgg

SEQ ID NO: 291373 - DNA, 75 bp, synthetic construct
  source 1..75: mol_type = other DNA
tgggcgcggtgttagggctgagcagtatgacggtcagtattttgtttattctgccgattccggcagcgttttttg

SEQ ID NO: 291374 - DNA, 75 bp, synthetic construct
  source 1..75: mol_type = other DNA
agcacaaaagacgacgctttccattcaattgcttcagtagcggctgctattatcacagctgattatctacagcat

SEQ ID NO: 291375 - DNA, 75 bp, synthetic construct
  source 1..75: mol_type = other DNA
agaagagactcaacaaatcagtgatgaagatgccgaacatcttgagcgtattttaagcatcagcacttttgagtg

SEQ ID NO: 291376 - DNA, 75 bp, synthetic construct
  source 1..75: mol_type = other DNA
gcaaaacattggttccggcgtactggcgtcgctctctgcgatgctgccgcaaaccggccagggaagtctggggct

SEQ ID NO: 291377 - DNA, 75 bp, synthetic construct
  source 1..75: mol_type = other DNA
tgggcgcggtgttagggctgagcagtatgacggtcagtattttgtttattctgccgattccggcggcattttttg

SEQ ID NO: 291378 - DNA, 75 bp, synthetic construct
  source 1..75: mol_type = other DNA
atgctttcgacacaatttaacagggataatcaacatcaagccatcatcaaaccgtcactccttgccggttgcata

SEQ ID NO: 291379 - DNA, 75 bp, synthetic construct
  source 1..75: mol_type = other DNA
atcgcgctggaatctgggcgacgcactcacggatatggcgctgttcgagcgtgtagaagtggtgcgtggcgcgac

SEQ ID NO: 291380 - DNA, 75 bp, synthetic construct
  source 1..75: mol_type = other DNA
ggtttaccgcgctggaatactgatggcagcagcaacagttacgatcgcgcacgcagtaccgcacctgactgggcg

SEQ ID NO: 291381 - DNA, 75 bp, synthetic construct
  source 1..75: mol_type = other DNA
aatgcgggagaaaatgtctgaagagaatcggatgcttattcgtaaacttcaggtagctagatttgctgatgtcag

SEQ ID NO: 291382 - DNA, 75 bp, synthetic construct
  source 1..75: mol_type = other DNA
gtattcccacctattttgaatcacgctggaatctgggcgatgcactcactgatatggcgttgttcgagcgtgtag

SEQ ID NO: 291383 - DNA, 75 bp, synthetic construct
  source 1..75: mol_type = other DNA
gcactggcactattaccttccgccgcttttgctgcaccagccactgaagaaacggtgattgttgagggttcagcc

SEQ ID NO: 291384 - DNA, 75 bp, synthetic construct
  source 1..75: mol_type = other DNA
ccgacactgctcgaagtgctggaaaccgtggagatccagcgagtggtggatgcccagccaatgcgcttcccggtg

SEQ ID NO: 291385 - DNA, 75 bp, synthetic construct
  source 1..75: mol_type = other DNA
cgtgacttttgatggtgatcgcgaagaagcctttgccggagaagcgatcaccctggtgctgacggatgagatcga

SEQ ID NO: 291386 - DNA, 75 bp, synthetic construct
  source 1..75: mol_type = other DNA
agggagttgggtcttatatcgaagtaataaaaaaacaatagataatagaattaatcccgtccttaatccggcggg

SEQ ID NO: 291387 - DNA, 75 bp, synthetic construct
  source 1..75: mol_type = other DNA
ggcggatttgctatggcgaccgcgcccgctatcgtcgcactggtgggcggcacggtggaagaagctattgatttc

SEQ ID NO: 291388 - DNA, 75 bp, synthetic construct
  source 1..75: mol_type = other DNA
ggatcaaacatctggtggtggcgatcaacaaaatggatctggtggactacagtgaggaggcatttacccgcattc

SEQ ID NO: 291389 - DNA, 75 bp, synthetic construct
  source 1..75: mol_type = other DNA
cacagttttatctccacgctgttggggatcaaacatctggtcgtggcgatcaacaaaatggatctggtggattac

SEQ ID NO: 291390 - DNA, 75 bp, synthetic construct
  source 1..75: mol_type = other DNA
tcagtggttaaacttcaggttccagccctggatggcgaacgtcatctggtggtgattaaagcaaataaaatttaa

SEQ ID NO: 291391 - DNA, 75 bp, synthetic construct
  source 1..75: mol_type = other DNA
ttgcccgaagaatatcaggtcgaatcagtggttaaacttcaggttccagccctggatggcgaacgtcatctggtg

SEQ ID NO: 291392 - DNA, 75 bp, synthetic construct
  source 1..75: mol_type = other DNA
cgcgtgcgtttccttcgtcaggtgcaacatgagcttaaactggagaatattgaaccagtacagagcagggtagaa

SEQ ID NO: 291393 - DNA, 75 bp, synthetic construct
  source 1..75: mol_type = other DNA
gattaaaaatcctgagcaatatgaactcgctgagcacggttatattgttaaaacggcgcaatctggtggtgccag

SEQ ID NO: 291394 - DNA, 75 bp, synthetic construct
  source 1..75: mol_type = other DNA
ccttgctgatatcaatgaatccatgctcaaaatgggccgcgagaagctgcgtaatatcggtgtgattggcaacgt

SEQ ID NO: 291395 - DNA, 75 bp, synthetic construct
  source 1..75: mol_type = other DNA
tcaggataccctgaaaaccatgatgcaggatgccggattcgaaagtgtcgactactacaatctgacggcaggggt

SEQ ID NO: 291396 - DNA, 75 bp, synthetic construct
  source 1..75: mol_type = other DNA
ggtcatgttaagcgcacggcgaaccgaccacttcccagcggcgcggtaacagagaaagaggcgcgcgcgctgttt

SEQ ID NO: 291397 - DNA, 75 bp, synthetic construct
  source 1..75: mol_type = other DNA
tcctgtttaatgagcatgatgatgccgaatatcgacaacaggcgctgaataaatcactgatgaaaaccgcgcctg

SEQ ID NO: 291398 - DNA, 75 bp, synthetic construct
  source 1..75: mol_type = other DNA
atgttttctacaaacttaatacagagtgattatggtgatttaaatattaaaagcctggctttcgactcttttaaa

SEQ ID NO: 291399 - DNA, 75 bp, synthetic construct
  source 1..75: mol_type = other DNA
gaaaacgccattcagcttatcgaagatggcctgcgagaagtgtcgtgcggctatgacgcggagtacgagcagacc

SEQ ID NO: 291400 - DNA, 75 bp, synthetic construct
  source 1..75: mol_type = other DNA
atgaaatattttttcaatacccggctgggggaaacccgctatcagctggctgacggctcgttgctgtgcaaagac

SEQ ID NO: 291401 - DNA, 75 bp, synthetic construct
  source 1..75: mol_type = other DNA
ccgacgtactggcttgcatgatgcagatccacgttaataccccatacctgctcaaccatgcgctggaaagattac

SEQ ID NO: 291402 - DNA, 75 bp, synthetic construct
  source 1..75: mol_type = other DNA
ttattcacttcacggattacgtggtagagcgcggcagcgacaaacatatcgcttatgccgccagcaaagcagcac

SEQ ID NO: 291403 - DNA, 75 bp, synthetic construct
  source 1..75: mol_type = other DNA
actctggcgcgtcaggtgacgctgaacgttgcaccgctgatgcgaaccgactcgccagatgaaaaacgcattcag

SEQ ID NO: 291404 - DNA, 75 bp, synthetic construct
  source 1..75: mol_type = other DNA
atccacttgataaacaaaatttaggtgccagcgttgcggaagccttattgagcaaagatgctcatcctctggagg

SEQ ID NO: 291405 - DNA, 75 bp, synthetic construct
  source 1..75: mol_type = other DNA
ggttggtcgattccaatggcttttgccgctgtgagtgaatcggtgccgttaagctgctggttaatgttcctcgcc

SEQ ID NO: 291406 - DNA, 75 bp, synthetic construct
  source 1..75: mol_type = other DNA
tggaagcgtttcacgatcgattgcagcggcgtacgccgtgggcagactgtactggatctggctggcggcaccggc

SEQ ID NO: 291407 - DNA, 75 bp, synthetic construct
  source 1..75: mol_type = other DNA
gacctgacagcgaaattctcccgcctggtcggagaaactggcaaagtggtccttgctgatatcaatgaatccatg

SEQ ID NO: 291408 - DNA, 75 bp, synthetic construct
  source 1..75: mol_type = other DNA
cattacgcctgctcatctctgactcttacgacccgtggtttaacctggcggtggaggagtgtatttttcgccaga

SEQ ID NO: 291409 - DNA, 75 bp, synthetic construct
  source 1..75: mol_type = other DNA
cggaaaaattaggatttaccgggcgtggggaagggattgcctgtgaagcggtggcgctactcattaaggcaacaa

SEQ ID NO: 291410 - DNA, 75 bp, synthetic construct
  source 1..75: mol_type = other DNA
gcgctgcctgaatcacagaatcaaaggtgttgaggggatttacaaccgctatcagtatttcgatgagaggaaaca

SEQ ID NO: 291411 - DNA, 75 bp, synthetic construct
  source 1..75: mol_type = other DNA
aacggcttatacctgcgttaccgtgaagccgacaaaacccccacatggagattccgctataaactcgcagggaag

SEQ ID NO: 291412 - DNA, 75 bp, synthetic construct
  source 1..75: mol_type = other DNA
catgaaactgatactttgcctttgttgccgaaaaatggagttgtgcgccgcgcagtgggatgaatttgatttaga

SEQ ID NO: 291413 - DNA, 75 bp, synthetic construct
  source 1..75: mol_type = other DNA
agctcttgagctttgggctgacttgctcgtatctctggaaagaggtgaaggctataacgtgatgccgttaagaaa

SEQ ID NO: 291414 - DNA, 75 bp, synthetic construct
  source 1..75: mol_type = other DNA
tccgtacatggattagaaacaatgagcactttgcgggtcgctctgacgggaatgggctatacatctgttttccag

SEQ ID NO: 291415 - DNA, 75 bp, synthetic construct
  source 1..75: mol_type = other DNA
tgcaatagccagtgggtgcttccagcaagaaagatgcagcaccggatgattcctcacattcaggaaagtacactc

SEQ ID NO: 291416 - DNA, 75 bp, synthetic construct
  source 1..75: mol_type = other DNA
aacggcctgtatctctgctatcccaaaaattacacaatgcccttctggcgattccgctataagtttgctggcaaa

SEQ ID NO: 291417 - DNA, 75 bp, synthetic construct
  source 1..75: mol_type = other DNA
cggcgcggaaaatgcagcacaggatgatcccccacattcaggagagcaccctacctgttgcgctggcaaaagtcc

SEQ ID NO: 291418 - DNA, 75 bp, synthetic construct
  source 1..75: mol_type = other DNA
ggtggcttataccttcgttaccggaaagaagaccagataccaacatggcgattccgctacaaattcgcaggaaaa

SEQ ID NO: 291419 - DNA, 75 bp, synthetic construct
  source 1..75: mol_type = other DNA
atgacgtggccggagaaaagcaggcccgaaaagcggcggcactggcacggattgaggaagaaaaaaacgcccttc

SEQ ID NO: 291420 - DNA, 75 bp, synthetic construct
  source 1..75: mol_type = other DNA
ttgatatcccactaccaccaccagcggtggcatggttgcgtgaattacacagcatttcaggcggtagccgctggg

SEQ ID NO: 291421 - DNA, 75 bp, synthetic construct
  source 1..75: mol_type = other DNA
aaaccacgacacgttgacgagatgctaaaagcaattgttgaccgtggagcgccaaccatagcaacggacgttctg

SEQ ID NO: 291422 - DNA, 75 bp, synthetic construct
  source 1..75: mol_type = other DNA
tgtaaaggtcacgttattgtctccggtatgggtaaatccgggcatgtcgggcgtaaaatgtccgccacgctcgcc

SEQ ID NO: 291423 - DNA, 75 bp, synthetic construct
  source 1..75: mol_type = other DNA
atggtggtggaaagcggtggtcagtttcaggtggtcataggtaaccatgtggccgatgtattcctggcggttaac

SEQ ID NO: 291424 - DNA, 75 bp, synthetic construct
  source 1..75: mol_type = other DNA
gatcaagccgctggtaacgttatcccattacgaaatgccatatgggctggtgaaaaactacggcggttgggctaa

SEQ ID NO: 291425 - DNA, 75 bp, synthetic construct
  source 1..75: mol_type = other DNA
aaacagcccgtaccgcgcccgcagcgttgaagagaacctggcgctgttcgagaaaatgcgtactggtggttttga

SEQ ID NO: 291426 - DNA, 75 bp, synthetic construct
  source 1..75: mol_type = other DNA
ccttacgaaaaagggctgctggcgcattctgatggcgacgtggcgctccatgcgttgaccgatgcattgcttggt

SEQ ID NO: 291427 - DNA, 75 bp, synthetic construct
  source 1..75: mol_type = other DNA
atgcgaattggacacggttttgacgtacacgcctttggcggtgaaggcccaattatcattggtggcgtacgcatt

SEQ ID NO: 291428 - DNA, 75 bp, synthetic construct
  source 1..75: mol_type = other DNA
ttgccgatggtgtggatattatggggtacaccagttgggggccaattgatttagtcagtgcatctcattcacaaa

SEQ ID NO: 291429 - DNA, 75 bp, synthetic construct
  source 1..75: mol_type = other DNA
aattaaaattgtcgccccgggtggtcttgatgtggttgcccctctggctgatttttctgagaaagtaaccattca

SEQ ID NO: 291430 - DNA, 75 bp, synthetic construct
  source 1..75: mol_type = other DNA
ttgagcttaatcctgacaccaggaaaattaaaattgtcgctccgggtggtcttgatgtggttgcccctctggctg

SEQ ID NO: 291431 - DNA, 75 bp, synthetic construct
  source 1..75: mol_type = other DNA
ctagtttctttattcatcctgcagaagctttccatggcgatctgggcatgattacgccttacgatcttctgatcc

SEQ ID NO: 291432 - DNA, 75 bp, synthetic construct
  source 1..75: mol_type = other DNA
gtagcggtgattgatatgtttacgctcaaacccgttgatcggatgttaattaaaaattatgccgaaaaaacagga

SEQ ID NO: 291433 - DNA, 75 bp, synthetic construct
  source 1..75: mol_type = other DNA
agacgcggtcgtatttatcgcattgtagaaataaccaacaccgtgaaggagattaaggatgatcgtattaagtaa

SEQ ID NO: 291434 - DNA, 75 bp, synthetic construct
  source 1..75: mol_type = other DNA
aacggcaagccaatcgatgatacgcacactcatggtggtgttcagcgtggtggaagcaataccgacggagtaaac

SEQ ID NO: 291435 - DNA, 75 bp, synthetic construct
  source 1..75: mol_type = other DNA
aatgctggcgtattccgggatcctggcaaatccgggacgatccccggaaatcatctgcggtctggtgtcccactg

SEQ ID NO: 291436 - DNA, 75 bp, synthetic construct
  source 1..75: mol_type = other DNA
gtatggggtaaagatacttcacaacaatgcgttgcgaaatatgaactgccgattaaggaaaaatcgtcaggtatt

SEQ ID NO: 291437 - DNA, 75 bp, synthetic construct
  source 1..75: mol_type = other DNA
ctttccctatcgacagggtacaatggtcgtattggtcgtgtaaattacagtattgcttacagttggaataaaagt

SEQ ID NO: 291438 - DNA, 75 bp, synthetic construct
  source 1..75: mol_type = other DNA
atggacggaaagaaccgggcagcatcccctcatctaatgttgggaaatcccccggcagatgaagagctgaatgat

SEQ ID NO: 291439 - DNA, 75 bp, synthetic construct
  source 1..75: mol_type = other DNA
tactgggcaactttgttctgggtacacgggtgcccgatctcagcggaaaattccagctcagtattaccagcctga

SEQ ID NO: 291440 - DNA, 75 bp, synthetic construct
  source 1..75: mol_type = other DNA
ctttgatttgtcaaatgtaacgctgcaaaactggcaacgtcgcaaggtggatattgaaccggatcagcaaaacag

SEQ ID NO: 291441 - DNA, 75 bp, synthetic construct
  source 1..75: mol_type = other DNA
gttgcgacaacggcgctgggaatgggctttgacaaaccggatttggggtttgttattcattaccagatgccaggt

SEQ ID NO: 291442 - DNA, 75 bp, synthetic construct
  source 1..75: mol_type = other DNA
taccgcgttgtgaagatgcctgttaccaaaggtgggaggctggaactgaccatcaccgaactgggagatgaatga

SEQ ID NO: 291443 - DNA, 75 bp, synthetic construct
  source 1..75: mol_type = other DNA
tggatgatgctcaggtcgttgattaccgcgttgtgaagatgcctgttaccaaaggtgggaggctggaactgacca

SEQ ID NO: 291444 - DNA, 75 bp, synthetic construct
  source 1..75: mol_type = other DNA
atgcgaagcggccttaaccttggggcatggcgtctgcgaaattacagtaactggagctatagtaacggcgagaag

SEQ ID NO: 291445 - DNA, 75 bp, synthetic construct
  source 1..75: mol_type = other DNA
aacgagcgagagctactatctgagcctgcgaagtggtttgaaccttggtgcgtggcgtctgcgtaattacagtaa

SEQ ID NO: 291446 - DNA, 75 bp, synthetic construct
  source 1..75: mol_type = other DNA
tcatctgtgagaacgtcattttaggtgatggctgtttcatcggtcatggcgtaacttttgctaatgatcttttta

SEQ ID NO: 291447 - DNA, 75 bp, synthetic construct
  source 1..75: mol_type = other DNA
gccgttcctattggttggtttatgcatgttaagaaaacaaactcattaaaggtcagtgatttatgtcgtggatgt

SEQ ID NO: 291448 - DNA, 75 bp, synthetic construct
  source 1..75: mol_type = other DNA
gaatgggatgaaagcgatcgcttgtggtctttcaatatttccgttccgctgggccgggcctggagtaactatcgc

SEQ ID NO: 291449 - DNA, 75 bp, synthetic construct
  source 1..75: mol_type = other DNA
cttaatcaccgataaacaaaatgaggtgagcagcatcgtcggtgaagaagggcagctctatattagcgggatgcc

SEQ ID NO: 291450 - DNA, 75 bp, synthetic construct
  source 1..75: mol_type = other DNA
atttaaatttaacgcagcaggattactggaacgacgcgggtaaacaaaactcgatatcagcgggttacaacggac

SEQ ID NO: 291451 - DNA, 75 bp, synthetic construct
  source 1..75: mol_type = other DNA
tggcggctgaactggctaagggccttaaaaccgaagctgatcttaaccagttttcccgtatgctgactaagctga

SEQ ID NO: 291452 - DNA, 75 bp, synthetic construct
  source 1..75: mol_type = other DNA
ttgcgactgaactggccaaaggccttaaaaccgaagccgacctcaaccagttttcatgcatgttgacaaagctta

SEQ ID NO: 291453 - DNA, 75 bp, synthetic construct
  source 1..75: mol_type = other DNA
gccgggcaattgttcctttcaaagcgcaattaacaatgggggatacggcgactgcgggggatatttttgatagcg

SEQ ID NO: 291454 - DNA, 75 bp, synthetic construct
  source 1..75: mol_type = other DNA
aggtggtgaatcgctttggttatcgtcgggtactggtagcgaccacgctgggtctgtcgctggtcaccctgttgt

SEQ ID NO: 291455 - DNA, 75 bp, synthetic construct
  source 1..75: mol_type = other DNA
ccgttcgtcctgtttttacaagggatggtcaactcgacgcgtttctcctccatgaacaccctgacgctgaaagat

SEQ ID NO: 291456 - DNA, 75 bp, synthetic construct
  source 1..75: mol_type = other DNA
ggtcggcagattgacggtgatgaaaatcgtaccgcgcgagcaatatatggcggcgatgacctttgtcacgttacc

SEQ ID NO: 291457 - DNA, 75 bp, synthetic construct
  source 1..75: mol_type = other DNA
gctcaactacagcgttcgcggcggcgtgatcgttcacagcgaaggcgtgacgctttcccaaccgctaggcgaaac

SEQ ID NO: 291458 - DNA, 75 bp, synthetic construct
  source 1..75: mol_type = other DNA
catcgcccttccggcgttcatctttgccagagtgccgaacgatacgcatcaaaacgtggctatttcgcggagaaa

SEQ ID NO: 291459 - DNA, 75 bp, synthetic construct
  source 1..75: mol_type = other DNA
cggcttctcaccctttcatgccggattgatgatgatcccaatggtgctcggcagcatggggatgaagcggatagt

SEQ ID NO: 291460 - DNA, 75 bp, synthetic construct
  source 1..75: mol_type = other DNA
cttcggtcagaagccgtacttcctgagcgatgagttcagcctggtcgattgctaccttgctccgctgctgtggcg

SEQ ID NO: 291461 - DNA, 75 bp, synthetic construct
  source 1..75: mol_type = other DNA
tcactgagaacggaacctgaacaggaaaatgttcattttcgtgccagtgccagcattgcatttcccctgcgggat

SEQ ID NO: 291462 - DNA, 75 bp, synthetic construct
  source 1..75: mol_type = other DNA
atcggtgacagcaagcatggcgatttacgccagaatcgcagtgcggctgaacactttggccttcaacggttaatg

SEQ ID NO: 291463 - DNA, 75 bp, synthetic construct
  source 1..75: mol_type = other DNA
gattatccactggtggaagaactggacaaaatcgctgataaatttgcccgcgaagataaaggcccgcagccagca

SEQ ID NO: 291464 - DNA, 75 bp, synthetic construct
  source 1..75: mol_type = other DNA
cgctggtagcgatactggtgccttttttattggtgggatgcgtcagcctggataaggcgcgcctgttttttgacg

SEQ ID NO: 291465 - DNA, 75 bp, synthetic construct
  source 1..75: mol_type = other DNA
tggataaggcgcgccagcttttcgataccgcgtctcaggtctgtcagcttattgatggtgttcggcagtgtatgc

SEQ ID NO: 291466 - DNA, 75 bp, synthetic construct
  source 1..75: mol_type = other DNA
atgagcagaaaacactggacacacagaacgccgcgaacagcggcgaaatgggcactggtagcgatactggtgcct

SEQ ID NO: 291467 - DNA, 75 bp, synthetic construct
  source 1..75: mol_type = other DNA
ttttaccaccggattttttattgcacgcgcctggttgctgcgcaagtattatgtatcactcaatcatgcttcaac

SEQ ID NO: 291468 - DNA, 75 bp, synthetic construct
  source 1..75: mol_type = other DNA
ctatgacgcggaatataaacaggctgagccgggtaaggctcagcaggtcgctattaccggaaaccatgtggctct

SEQ ID NO: 291469 - DNA, 75 bp, synthetic construct
  source 1..75: mol_type = other DNA
acgatcctgcatcctgaagatgaaaacggaaatgtgcggctggtcaaccccgagaactggaaagagcttgcggtc

SEQ ID NO: 291470 - DNA, 75 bp, synthetic construct
  source 1..75: mol_type = other DNA
attggggacagcaaacacggcgatttgcgccagaaccgcagcggggctgaacatttcggcctgcagaggttaatg

SEQ ID NO: 291471 - DNA, 75 bp, synthetic construct
  source 1..75: mol_type = other DNA
tcttgcccatttgcgtcatccaattattggcgacagcaaacatggcgatttacgccagaatcgcagcggtgctga

SEQ ID NO: 291472 - DNA, 75 bp, synthetic construct
  source 1..75: mol_type = other DNA
gaatgcgggatcaaaatcattggcacctttgaaactttctccccgacttttcctaccccagaaatcgccagtatt

SEQ ID NO: 291473 - DNA, 75 bp, synthetic construct
  source 1..75: mol_type = other DNA
gataaggcgcgcctgttttttgacgctgcttctcaggcctgccagttgattgatggcatccggcagtgtacgcag

SEQ ID NO: 291474 - DNA, 75 bp, synthetic construct
  source 1..75: mol_type = other DNA
gtgaatacttacgacatcacaataccctggcccccgagcaataaccgctagtaccgccataatcgcgggcgcact

SEQ ID NO: 291475 - DNA, 75 bp, synthetic construct
  source 1..75: mol_type = other DNA
gtgaatacttaccacatcacaattccctggcccccgagcaataaccgctagtaccgccataatcgcgggcgcacc

SEQ ID NO: 291476 - DNA, 75 bp, synthetic construct
  source 1..75: mol_type = other DNA
gtgaatacttacaacatcacaatgccctggcccccgagcaataaccgctagtaccgccataatcgcgggcgcact

SEQ ID NO: 291477 - DNA, 75 bp, synthetic construct
  source 1..75: mol_type = other DNA
gatgccgcacgtaagcaactgcgcgaagaactgctggcgattgcgccggtcttcggtcagaagccgtacttcctg

SEQ ID NO: 291478 - DNA, 75 bp, synthetic construct
  source 1..75: mol_type = other DNA
cgtggccaccgagtaataaccgctattaccgacacaatcgcgggcgtacgcacatcagcacggaagggcaggctt

SEQ ID NO: 291479 - DNA, 75 bp, synthetic construct
  source 1..75: mol_type = other DNA
gtgaatacttacgacatcacaattccctggcccccgagcaataaccgctagtaccgccataatcgcgggcgcacg

SEQ ID NO: 291480 - DNA, 75 bp, synthetic construct
  source 1..75: mol_type = other DNA
tggaaattgaacaacgttataaccacattccagataccagttcgctgagcattcgtacttccggcctgctggggg

SEQ ID NO: 291481 - DNA, 75 bp, synthetic construct
  source 1..75: mol_type = other DNA
atctgaatatgttcaacgatggcctcagctacatgggcgtcgttgagtccgtcaccctgccaaagctgacccgca

SEQ ID NO: 291482 - DNA, 75 bp, synthetic construct
  source 1..75: mol_type = other DNA
acatattctggcagtatgccgtaaacataagttcgatttggtgatttgcggtaaccataatcacagtttcttttc

SEQ ID NO: 291483 - DNA, 75 bp, synthetic construct
  source 1..75: mol_type = other DNA
gtgaatacttacaacatcacaattccctggcccccgagcaataaccgctagtaccgccataatcgcgggcgcaca

SEQ ID NO: 291484 - DNA, 75 bp, synthetic construct
  source 1..75: mol_type = other DNA
accgcgacagtgtcgccagaatcatcaaagactcaatgctggatatcggcctggctacacccgtgaaaatccgca

SEQ ID NO: 291485 - DNA, 75 bp, synthetic construct
  source 1..75: mol_type = other DNA
ttaactttattggtcgctttacttccaaaagtaatttttcccctagtaatctgttaatagaaaattgtgctcctg

SEQ ID NO: 291486 - DNA, 75 bp, synthetic construct
  source 1..75: mol_type = other DNA
aacgtcatcttctggaatactggaaagcagaagttatcatgcgggataagtttgtttttcaccggcttatcagga

SEQ ID NO: 291487 - DNA, 75 bp, synthetic construct
  source 1..75: mol_type = other DNA
ctgatacgggattttctgacgaccttaaccgcggagaaggtcaacgcgttcagccagttccgtcaggtgagctaa

SEQ ID NO: 291488 - DNA, 75 bp, synthetic construct
  source 1..75: mol_type = other DNA
atacccgctgaaactgggcgacgggccggggctgatgctgtttgataaacgctacttccccaaccagaaactggt

SEQ ID NO: 291489 - DNA, 75 bp, synthetic construct
  source 1..75: mol_type = other DNA
aaccgcattattaccgttggtcaccaacatcatctgaacgttgttggctggaatccaggtccggcgctttcagtc

SEQ ID NO: 291490 - DNA, 75 bp, synthetic construct
  source 1..75: mol_type = other DNA
tgtggttgagtaataacacgccgtttaaaaatggcgtcgccattcgcggcggcgtgccggtttgttggccgtggt

SEQ ID NO: 291491 - DNA, 75 bp, synthetic construct
  source 1..75: mol_type = other DNA
cctctcccgtcgtaaactggatgaactggaccttattgtggtcgatcatccccaggtaaaagcctcttttgcatt

SEQ ID NO: 291492 - DNA, 75 bp, synthetic construct
  source 1..75: mol_type = other DNA
tctggttttgccgtaacagcctttttgagaattaaagaccaggatattgcaactaatatacttaaccgtgaggga

SEQ ID NO: 291493 - DNA, 75 bp, synthetic construct
  source 1..75: mol_type = other DNA
atgcaatatgcattgtttgatggatttgaacgaaagtttttgctggatgctcttgaatttggtgttctgaaggac

SEQ ID NO: 291494 - DNA, 75 bp, synthetic construct
  source 1..75: mol_type = other DNA
gccgatccttttgccccaggtgaacggatgtaccgtaccggagacgttgcccgctggctggataacggcgcggtg

SEQ ID NO: 291495 - DNA, 75 bp, synthetic construct
  source 1..75: mol_type = other DNA
ccaccatgaaaaccggtgcgacggatggcgggcgctacaacgtaatgggcggcgggcgtccggttgttgcgctgt

SEQ ID NO: 291496 - DNA, 75 bp, synthetic construct
  source 1..75: mol_type = other DNA
cattatttcaaaaattgcttcatattctggttttgccgtaacagcctttttgagaattaaagaccaggatatcgc

SEQ ID NO: 291497 - DNA, 75 bp, synthetic construct
  source 1..75: mol_type = other DNA
tcttgaatttggtattctgaaggactggaaagaaaatcaggtaaaagaacttcctgatattgatgaatttgttca

SEQ ID NO: 291498 - DNA, 75 bp, synthetic construct
  source 1..75: mol_type = other DNA
cgggaagcgatgaaatatatcaacctgctggacattcgtaagcgtcaacggagcaccgtattgacgcttatttat

SEQ ID NO: 291499 - DNA, 75 bp, synthetic construct
  source 1..75: mol_type = other DNA
tctcctttatgctgatcaacctatttgattcatcaggaacattaattggtgtgactgataaagctggcttaatag

SEQ ID NO: 291500 - DNA, 75 bp, synthetic construct
  source 1..75: mol_type = other DNA
agctgtctccgtatgacaccgaagagatgcttgaggctatgcgtatttttctggaagaacagggaggcgagcaaa

SEQ ID NO: 291501 - DNA, 75 bp, synthetic construct
  source 1..75: mol_type = other DNA
gcgaggcggcggaacaggcaacgcaagatgaatgggtagcatatattttgccgggccaaaacggcacttatcctg

SEQ ID NO: 291502 - DNA, 75 bp, synthetic construct
  source 1..75: mol_type = other DNA
tattgaaagtacttcaggtgtggctgtcggtggtcgcacggggctgacggctgtcgtggtcggcgttatgttcct

SEQ ID NO: 291503 - DNA, 75 bp, synthetic construct
  source 1..75: mol_type = other DNA
tgataaagctggcttaatagatagtaacggtaaattccccaatatgaataaggcgctgtatgttgatagcgtcag

SEQ ID NO: 291504 - DNA, 75 bp, synthetic construct
  source 1..75: mol_type = other DNA
ttcgtggtcgtgggggcgatgggcatctcctggcagaccgggatgggcgcgatattctggggcgcagttgggcta

SEQ ID NO: 291505 - DNA, 75 bp, synthetic construct
  source 1..75: mol_type = other DNA
gagcaggggctggatttaggtaacagccggatacagggacaacatactgagctgaatgcaaccagtggaaatctg

SEQ ID NO: 291506 - DNA, 75 bp, synthetic construct
  source 1..75: mol_type = other DNA
ccgcccacgtttctgaaaccgtttgtggctggtgtctgtgcggcattgctggcggtcagcgtggctattccggga

SEQ ID NO: 291507 - DNA, 75 bp, synthetic construct
  source 1..75: mol_type = other DNA
atagacgaactgctggagcgtaaacagcgagcgggggaggcggaatatggtccgcgtcgtcctttgttacatgcg

SEQ ID NO: 291508 - DNA, 75 bp, synthetic construct
  source 1..75: mol_type = other DNA
gcgtgtgggcgagcagcagaagctgaaagagttcgatcttagtaacccgctagttcaggcaaagctcaaagaacg

SEQ ID NO: 291509 - DNA, 75 bp, synthetic construct
  source 1..75: mol_type = other DNA
cagcaggaaactctcggggaaattgtgactgagattttgaaagatggacgtaatctgggtgatgctgccaactta

SEQ ID NO: 291510 - DNA, 75 bp, synthetic construct
  source 1..75: mol_type = other DNA
ctttgcaaaagctaacttgcctactcagcaggaaactctcggggaaattgtgactgagattttgaaagatggacg

SEQ ID NO: 291511 - DNA, 75 bp, synthetic construct
  source 1..75: mol_type = other DNA
ggattgcgcgcacgtggatattatttctccggagtattttaaagaaatagggccattaataaatacactaattaa

SEQ ID NO: 291512 - DNA, 75 bp, synthetic construct
  source 1..75: mol_type = other DNA
ctcgctatgcagcaattctttgccgaatatggcgtaacgaccacgcactttgtgccgtcgatgctggcggcgttt

SEQ ID NO: 291513 - DNA, 75 bp, synthetic construct
  source 1..75: mol_type = other DNA
ggattgtgcgcatgtggatattatctctccggtggcgtttgaaaaaattgggccgattattcgtgcgacgctaaa

SEQ ID NO: 291514 - DNA, 75 bp, synthetic construct
  source 1..75: mol_type = other DNA
gcgctggctggaaaatggcgcagtggagtacctcgggcgcagtgacgatcagctaaaaattcgcggtcagcggat

SEQ ID NO: 291515 - DNA, 75 bp, synthetic construct
  source 1..75: mol_type = other DNA
agcgcagttaagtcgacagtttgctcgtcaggtgacgccggggcaggtgatggtcgcgtcaaccgtcgccaaact

SEQ ID NO: 291516 - DNA, 75 bp, synthetic construct
  source 1..75: mol_type = other DNA
gatgcgcattaccagttcagctatcgggaaatgcgcgagcaggtggtggcgctggcgaatctgctgcgtgagcgc

SEQ ID NO: 291517 - DNA, 75 bp, synthetic construct
  source 1..75: mol_type = other DNA
atgcaggcggatttacagcaaaatctacgtgccgacagcggcaaaccgctggtctttcatcagctcattcaggtg

SEQ ID NO: 291518 - DNA, 75 bp, synthetic construct
  source 1..75: mol_type = other DNA
tgtgccgtcgatgctggcagcatttgttgcatcgctgactccgcaaaccgctcgtcagaattgcgcgacgttgaa

SEQ ID NO: 291519 - DNA, 75 bp, synthetic construct
  source 1..75: mol_type = other DNA
gccacagttaccacttagcgccaacggtaagctggatcgcaaagccttaccgttgccggaactgaaggcacaagt

SEQ ID NO: 291520 - DNA, 75 bp, synthetic construct
  source 1..75: mol_type = other DNA
gctatcttagcgttgtcaccaagcataacggcatatttatgcgctgcgatgatagcttgtctttcgactcctggt

SEQ ID NO: 291521 - DNA, 75 bp, synthetic construct
  source 1..75: mol_type = other DNA
ccgcacagcccggcatctggatggcagaaaaactgtcagatttaccctccgcctggagcgtggcgcattacgttg

SEQ ID NO: 291522 - DNA, 75 bp, synthetic construct
  source 1..75: mol_type = other DNA
actgcccatagtgttccgtttgatggaaaagcgacgctgtttgttgccgaacgcacgcttcaggaggggatgact

SEQ ID NO: 291523 - DNA, 75 bp, synthetic construct
  source 1..75: mol_type = other DNA
gggaattccgccagctggctacgcaactttcaggtgtgcagcgtaccgatttagcccttgcgctggcagccttgt

SEQ ID NO: 291524 - DNA, 75 bp, synthetic construct
  source 1..75: mol_type = other DNA
tcgttggctggaaaatggcgcggtggaatacctcgggcgcagtgacgatcagctaaaaattcgtggtcagcgtat

SEQ ID NO: 291525 - DNA, 75 bp, synthetic construct
  source 1..75: mol_type = other DNA
cgccctcatggccccatgcagacagcgacgaacctggatgaagtctgcgaagcgcatctggcaacgttacttgaa

SEQ ID NO: 291526 - DNA, 75 bp, synthetic construct
  source 1..75: mol_type = other DNA
gcagcgcaagaaacgctgccgcaactggcaatccggctggcagggcagttgaaaaagatgcgccgccatcaacgt

SEQ ID NO: 291527 - DNA, 75 bp, synthetic construct
  source 1..75: mol_type = other DNA
tacgctggcgcagggcattgcggcgcgactgcgtgcccgtggcgaacaggtggcatttcttggcttgctggatac

SEQ ID NO: 291528 - DNA, 75 bp, synthetic construct
  source 1..75: mol_type = other DNA
atgcaggctgatttacaacaaaacctgcgtatcgatagtggtaatcagctggtttttcataagcttatacaggtg

SEQ ID NO: 291529 - DNA, 75 bp, synthetic construct
  source 1..75: mol_type = other DNA
ccggggcaggtgatggtggcatcaaccgtcgctaaactggcaatgattattgatggcggagcagaaaacgcccag

SEQ ID NO: 291530 - DNA, 75 bp, synthetic construct
  source 1..75: mol_type = other DNA
gctgttttgtttccatccggcgtccggttttgcctggcagtttagcgtgctctcgcgttatctcgatccacaatg

SEQ ID NO: 291531 - DNA, 75 bp, synthetic construct
  source 1..75: mol_type = other DNA
ttatcgacctgcgaaccaacattgatccgcacggtactgcgcaggcattaatgcaggcggatttgcaacaagatt

SEQ ID NO: 291532 - DNA, 75 bp, synthetic construct
  source 1..75: mol_type = other DNA
attggttatccggtgtggaatacgggcctgcgtattcttgatgcgatgatgcatccggtgccgccgggtgtggcg

SEQ ID NO: 291533 - DNA, 75 bp, synthetic construct
  source 1..75: mol_type = other DNA
atccggcttttggcgaggaactggcacaggtgcgcggcagcagtgtgccgattggttatccggtgtggaatacgg

SEQ ID NO: 291534 - DNA, 75 bp, synthetic construct
  source 1..75: mol_type = other DNA
gaaaagcaacgttatttgttgctgagcgcacacttcaggaaggtatgagtcccgaacgtgcctggtcgccgtgga

SEQ ID NO: 291535 - DNA, 75 bp, synthetic construct
  source 1..75: mol_type = other DNA
cgccggatttatctttatgcgtcgactgggctcggcggcgctgacggctaccggacccgtgctcaacgttttgcc

SEQ ID NO: 291536 - DNA, 75 bp, synthetic construct
  source 1..75: mol_type = other DNA
acccgatctgaccgccagccgctttattgccgatccttttgcccctggcgaacggatgtaccgtaccggagacgt

SEQ ID NO: 291537 - DNA, 75 bp, synthetic construct
  source 1..75: mol_type = other DNA
aggcaaaacaacctgttcactctgctctcgtctgcgtcgcggcattctttaccgtacagcaacagaactgggcgc

SEQ ID NO: 291538 - DNA, 75 bp, synthetic construct
  source 1..75: mol_type = other DNA
gatgaaaggtatgcctccgaaactgatgagcgatgatggcaaacatatcgtgattcgtccgctggcctactgccg

SEQ ID NO: 291539 - DNA, 75 bp, synthetic construct
  source 1..75: mol_type = other DNA
agaaagagatatacaacctgaacaaattacaaaaacgtctgcgtcgtaacgtgggcgaagccattgctgacttca

SEQ ID NO: 291540 - DNA, 75 bp, synthetic construct
  source 1..75: mol_type = other DNA
gacagggccgacttttcggcctttatggatagcagtggctattatgatgacgagtcgatgcaggatgatattctt

SEQ ID NO: 291541 - DNA, 75 bp, synthetic construct
  source 1..75: mol_type = other DNA
atcattaatgattcgcaaatatcgtcattattcgatgaacacgcggttgctgttgagcatcaactccgtagctgg

SEQ ID NO: 291542 - DNA, 75 bp, synthetic construct
  source 1..75: mol_type = other DNA
atgaaagatttaacactcaaatttgcagacagggacgacttttcggcctttatggatagtacgggctattatgat

SEQ ID NO: 291543 - DNA, 75 bp, synthetic construct
  source 1..75: mol_type = other DNA
tgcagcgtctgcgcagttcgggagaattacccacggcactgcggacatcactcggcattcagctcgctcctgcgc

SEQ ID NO: 291544 - DNA, 75 bp, synthetic construct
  source 1..75: mol_type = other DNA
tgggctacaccgacgccggtctggtgtttttaggcgcaggcgttttctcatggctaagccttgaacctgtgatct

SEQ ID NO: 291545 - DNA, 75 bp, synthetic construct
  source 1..75: mol_type = other DNA
cagacagggccgacttttcggcctttatggagagaattggctattatgatgacgagtcgatgcaggatgatattc

SEQ ID NO: 291546 - DNA, 75 bp, synthetic construct
  source 1..75: mol_type = other DNA
tgttcgatttcaaaggcattacccacggttctgaagtggttaacgggggtgatctggcgtttgatcgcgaagaga

SEQ ID NO: 291547 - DNA, 75 bp, synthetic construct
  source 1..75: mol_type = other DNA
gtatcgtgaaagagaagattccagagggcaaaaccacttgctcactgtgttctcgccttcgtcgcggtatccttt

SEQ ID NO: 291548 - DNA, 75 bp, synthetic construct
  source 1..75: mol_type = other DNA
tcccactacagccagcgggctggcagcctgaagaagatgagaatcagctggatgaattacggctgaatgtggttg

SEQ ID NO: 291549 - DNA, 75 bp, synthetic construct
  source 1..75: mol_type = other DNA
gacagggccgacttttcggcctttatggacaggattggctattatgatgacgagtcgatgcaggatgatattctt

SEQ ID NO: 291550 - DNA, 75 bp, synthetic construct
  source 1..75: mol_type = other DNA
ccgttcacgcgatcggtaagacccgcagtatcgagcgtatcaacaaagcgctggcttttattgcggaacgcgaaa

SEQ ID NO: 291551 - DNA, 75 bp, synthetic construct
  source 1..75: mol_type = other DNA
ctggtgaaactgctgggcgaacgctgcaagacgctgaaagagatggcacagagctgccgttatttctacgaagat

SEQ ID NO: 291552 - DNA, 75 bp, synthetic construct
  source 1..75: mol_type = other DNA
acacctgcagatttagaacaaaaccagcaagcgcgttactggcaggcaaaaatcgatgccagccaggggcgtcct

SEQ ID NO: 291553 - DNA, 75 bp, synthetic construct
  source 1..75: mol_type = other DNA
tgggtatgggtaaagttggtatgccgctgcgtgtcgccgtaaccggtgcggggcagtctccagcactggatgtta

SEQ ID NO: 291554 - DNA, 75 bp, synthetic construct
  source 1..75: mol_type = other DNA
aaacctgcgggtgaagaagaagttctgtggttgagtaacaacacaccgttcaaaaatggcgtcgctattcgcggt

SEQ ID NO: 291555 - DNA, 75 bp, synthetic construct
  source 1..75: mol_type = other DNA
ccggtagcgcgtcagccgctggaagtggttcgtgacaaactggccgcgattactgactggaccgctgaaaacgtt

SEQ ID NO: 291556 - DNA, 75 bp, synthetic construct
  source 1..75: mol_type = other DNA
aacccaaaatgccaatatgcaagcaagtactgtagcactcctccaagaaatttatgctctgtataatttgggatt

SEQ ID NO: 291557 - DNA, 75 bp, synthetic construct
  source 1..75: mol_type = other DNA
acatggggttgcggaggttatatcagagttctcaatatatttccagtatttaatggagtgtacagatatatatct

SEQ ID NO: 291558 - DNA, 75 bp, synthetic construct
  source 1..75: mol_type = other DNA
cgacgctggttgctgcggtacagatggatgacacgggtactacccgtatcggtaaattcgtcttcaaccatccgt

SEQ ID NO: 291559 - DNA, 75 bp, synthetic construct
  source 1..75: mol_type = other DNA
acttgatgcgccgttacgtgcagaaatagacgaattactggaacgtaaacagcgcgcaggagaagcggaatatgg

SEQ ID NO: 291560 - DNA, 75 bp, synthetic construct
  source 1..75: mol_type = other DNA
gccgactggcagaaacgttatccgaacaacccgggcgcgaaaatgctgccaacgcagttggttaacgtaaaagcg

SEQ ID NO: 291561 - DNA, 75 bp, synthetic construct
  source 1..75: mol_type = other DNA
cggctgcggcggggagtttcaaaaggaaacataccaatgctggctggcgcaggacgcaaacgcgcttaaccttta

SEQ ID NO: 291562 - DNA, 75 bp, synthetic construct
  source 1..75: mol_type = other DNA
atgaaagatttaacactcaaatttgccgacagggccgacttttcggcctttatggagagcattggctattatgat

SEQ ID NO: 291563 - DNA, 75 bp, synthetic construct
  source 1..75: mol_type = other DNA
gattatctctaccaaagccggatacgatatgtggcccggcccgtacggctctggcggctcacgtaaatacctgct

SEQ ID NO: 291564 - DNA, 75 bp, synthetic construct
  source 1..75: mol_type = other DNA
caaaaaatggtcgagttgctgcgcgagtggaaaattccgctgttaattcatcaaccttcgtacaatttactgaac

SEQ ID NO: 291565 - DNA, 75 bp, synthetic construct
  source 1..75: mol_type = other DNA
atcgtcttactcgccagagcgaacgcaaaaaatggtcgagttgctacacgagtggaaaattccgctgctaattca

SEQ ID NO: 291566 - DNA, 75 bp, synthetic construct
  source 1..75: mol_type = other DNA
agtttaaacgcgaatccgctcaactggtcgttgaccagatatacactgtggcagatgccgccaaagctatggatg

SEQ ID NO: 291567 - DNA, 75 bp, synthetic construct
  source 1..75: mol_type = other DNA
agtttaaacgcgaatccgctcaactggtcgttgaccagaaatacacagtggcagatgccgccaaagctatggatg

SEQ ID NO: 291568 - DNA, 75 bp, synthetic construct
  source 1..75: mol_type = other DNA
agtttaaacgcgaatccgctcaactggtagttgaccagacatacacagtggcagatgccgccaaagctatggatg

SEQ ID NO: 291569 - DNA, 75 bp, synthetic construct
  source 1..75: mol_type = other DNA
tggatggttttctgaaaggtaaatgcatcccacgagatttaatggttaacgaaacaaacgctgaatatctggtgc

SEQ ID NO: 291570 - DNA, 75 bp, synthetic construct
  source 1..75: mol_type = other DNA
ctgtggattatttttcggtgatgttcattttagcggtgtctattccattccgcctgatattagcggcgtcattgg

SEQ ID NO: 291571 - DNA, 75 bp, synthetic construct
  source 1..75: mol_type = other DNA
ccgccggagcgttaatcttcgttggcgtattgatgacatcgagcctggcacgcgttaactgggatgattttaccg

SEQ ID NO: 291572 - DNA, 75 bp, synthetic construct
  source 1..75: mol_type = other DNA
atctcaacggcattccgcaagattcacggatgcatcgtgaagggaataaagttcgtggcctgacgccgaaaatgc

SEQ ID NO: 291573 - DNA, 75 bp, synthetic construct
  source 1..75: mol_type = other DNA
acgtgagctgaggaaaaagctacaacgcattgaaatggagaatgaaatattaaaaaaggctgttgtagattcaat

SEQ ID NO: 291574 - DNA, 75 bp, synthetic construct
  source 1..75: mol_type = other DNA
aaatgcaacggtgcggctttttctgctgaagaatacccggaactggcaaaggcttacccgacaaataaattgcct

SEQ ID NO: 291575 - DNA, 75 bp, synthetic construct
  source 1..75: mol_type = other DNA
agtttaaacgcgaatccgctcaactggtcgttgaccagacatacaccgtggcagatgccgccaaagctatggatg

SEQ ID NO: 291576 - DNA, 75 bp, synthetic construct
  source 1..75: mol_type = other DNA
gaaacggtagtttcaccacaagccgttttcgacgcgccacaactcaccacagtcgccaaagagtggccgctgttt

SEQ ID NO: 291577 - DNA, 75 bp, synthetic construct
  source 1..75: mol_type = other DNA
gcttgatgcacctttacgtgcagaaatagacgaattactggaacgtaaacagcgtgcgggggaggcggagtatgg

SEQ ID NO: 291578 - DNA, 75 bp, synthetic construct
  source 1..75: mol_type = other DNA
ccgacagggccgacttttcggcctttatggatagcactggctattatgatgacgagtcgatgcaggatgatattc

SEQ ID NO: 291579 - DNA, 75 bp, synthetic construct
  source 1..75: mol_type = other DNA
atgaaagatttaacactcaaatttgccgacagggccgacttttcggcctttatggagagtgctggctattatgat

SEQ ID NO: 291580 - DNA, 75 bp, synthetic construct
  source 1..75: mol_type = other DNA
ctacggcaaaaatattccgcttgaggaaacggtggtctcgccacaagccgttttcgatgcgccacaactcaccac

SEQ ID NO: 291581 - DNA, 75 bp, synthetic construct
  source 1..75: mol_type = other DNA
gcctgctggtttccgcaccagcccttgcctggcaaccgcaaaccggcgacatcatctttcaaatttctcgctcgt

SEQ ID NO: 291582 - DNA, 75 bp, synthetic construct
  source 1..75: mol_type = other DNA
tattaagcgtggctcctgtgcctgtttttatcgcgatggaaattgcatatctgtgcgcagcaaggatttccgatg

SEQ ID NO: 291583 - DNA, 75 bp, synthetic construct
  source 1..75: mol_type = other DNA
agtttaaacgcgaatccgctcaactggtggttgaccagacatacacggtggcagatgccgccaaagctatggatg

SEQ ID NO: 291584 - DNA, 75 bp, synthetic construct
  source 1..75: mol_type = other DNA
agtttaaacgcgaatccgctcaactggtcgttgaccagagatacacggtggcagatgccgccaaagctatggatg

SEQ ID NO: 291585 - DNA, 75 bp, synthetic construct
  source 1..75: mol_type = other DNA
cagggcaaaacaccaaaagcctctccgataacaccagaacaaatcgaaatacgtgagttgaggaaaaagctacaa

SEQ ID NO: 291586 - DNA, 75 bp, synthetic construct
  source 1..75: mol_type = other DNA
gacagctactacctcatacgggcttttgaaagtgaagaacagatggaaagcattcttgatgatttctatgcgagt

SEQ ID NO: 291587 - DNA, 75 bp, synthetic construct
  source 1..75: mol_type = other DNA
gtcacaaaaccgaggggcaagtgctaatctatgacaggaaggttaaagtttcaccaacacttgatgtcccgttac

SEQ ID NO: 291588 - DNA, 75 bp, synthetic construct
  source 1..75: mol_type = other DNA
agacggtggtatggcacccaccggcgatgcaccggctgcaccggatgaaaagtgtctgaccgctgctcgtgctgc

SEQ ID NO: 291589 - DNA, 75 bp, synthetic construct
  source 1..75: mol_type = other DNA
gcatggaggacgaacagttttccgtcaagcattacgaagcacgagtgaaagacggcgtagtgcagctacgtggtt

SEQ ID NO: 291590 - DNA, 75 bp, synthetic construct
  source 1..75: mol_type = other DNA
atcacagcgaccaggtgtttgctatcagcaatatcgatccgttcttcgaatccagcgtactgtcacgcgggctga

SEQ ID NO: 291591 - DNA, 75 bp, synthetic construct
  source 1..75: mol_type = other DNA
caccgtttcctactgcagtcgttgtttttaaaaaagaaccacgtaagcatgaaattacacagatggtttgctgtg

SEQ ID NO: 291592 - DNA, 75 bp, synthetic construct
  source 1..75: mol_type = other DNA
cccattaagtgcattgcagatgctctcagaatgcctctgagcacgtcatacaggattgctcaaaggttgagctaa

SEQ ID NO: 291593 - DNA, 75 bp, synthetic construct
  source 1..75: mol_type = other DNA
ctgtacgccttccttgaccccgcatgcatcaactgccgtctgctggaacccgcgcttaagcaactggcccgggaa

SEQ ID NO: 291594 - DNA, 75 bp, synthetic construct
  source 1..75: mol_type = other DNA
cgtattccattaagtcatggttatcttggtcaggaaaccaacggcgcgggcggtctgtttaaaggtctgcgtacc

SEQ ID NO: 291595 - DNA, 75 bp, synthetic construct
  source 1..75: mol_type = other DNA
agcgggcgcagctcattgccgaaagacttgaaaaagcgcaaatacctggggcgctggaaggcgcgcaacgactgg

SEQ ID NO: 291596 - DNA, 75 bp, synthetic construct
  source 1..75: mol_type = other DNA
agcatcatttatgggcatcacaaggatctgattttcatcagccatgcccgtggatcgaactgggtcgtaaactct

SEQ ID NO: 291597 - DNA, 75 bp, synthetic construct
  source 1..75: mol_type = other DNA
aaatcgatgacatcctgcctgaaaccggcgtctgcgcgctgttaggtgacgagcaggtagcaattttccgcccgt

SEQ ID NO: 291598 - DNA, 75 bp, synthetic construct
  source 1..75: mol_type = other DNA
gctaccccctcacctgaatcacactgtgccattaaatgaaggcattcaactcccggttcccccgaaaaaagacgt

SEQ ID NO: 291599 - DNA, 75 bp, synthetic construct
  source 1..75: mol_type = other DNA
acaccatcaaaggctttgagattgccgccagtaatgccgcacttagcggtgagtttaacgatgtattgctggcgc

SEQ ID NO: 291600 - DNA, 75 bp, synthetic construct
  source 1..75: mol_type = other DNA
ggaaacatcatgggggttctgattactggagaactccatttcttatattccgcaatttgcaccgtgagtttattt

SEQ ID NO: 291601 - DNA, 75 bp, synthetic construct
  source 1..75: mol_type = other DNA
acaggtgctggctgattcaattgcggaagcgcagtttgaaaccatcgacagtccactgacgcctgcgaacgtgaa

SEQ ID NO: 291602 - DNA, 75 bp, synthetic construct
  source 1..75: mol_type = other DNA
gccgccgatggaagacctgacgctgtaccagacgttcacggatgagtatttcgactccgcttttgcaacgctggg

SEQ ID NO: 291603 - DNA, 75 bp, synthetic construct
  source 1..75: mol_type = other DNA
cgcctgtgccaccacttgaagatctgactctgcatcagacctttacggatgaattctttggtcctgcatttgctt

SEQ ID NO: 291604 - DNA, 75 bp, synthetic construct
  source 1..75: mol_type = other DNA
caatgggtaaatctcgcctggctggctggcggcgtgtggttgctatggcagaaagcgattcgctggcatattccc

SEQ ID NO: 291605 - DNA, 75 bp, synthetic construct
  source 1..75: mol_type = other DNA
cagcagccgccgcgctcactacgctgatgcacgcgcttattgatatttctgttattgctgacagggcgcataaac

SEQ ID NO: 291606 - DNA, 75 bp, synthetic construct
  source 1..75: mol_type = other DNA
gatgcacgcgcttattgatattgaatgcacggcagagcttgcgcagggagaagaacagaaagaccggacacagtt

SEQ ID NO: 291607 - DNA, 75 bp, synthetic construct
  source 1..75: mol_type = other DNA
attggttaccgcccgcgtattctggcggctcccggccttgataccgaagctgtcacatctgccctgtgcgtcatt

SEQ ID NO: 291608 - DNA, 75 bp, synthetic construct
  source 1..75: mol_type = other DNA
tggtgcgtgtggcagaagccggagaggaaggtgagacacaggatcagcttgtcatcggtggctcgcaggctgacg

SEQ ID NO: 291609 - DNA, 75 bp, synthetic construct
  source 1..75: mol_type = other DNA
ctcaatgccctggtcaccgccggaaaactcatcggtgcggagtgctggtatgacgtgctggacaacggcacgacg

SEQ ID NO: 291610 - DNA, 75 bp, synthetic construct
  source 1..75: mol_type = other DNA
gatttcacggtgtgcgcgtcagggaaaacaccgatctggtgacggcaattaatgacgttgattccagcgtcattg

SEQ ID NO: 291611 - DNA, 75 bp, synthetic construct
  source 1..75: mol_type = other DNA
tttctggtcgttacaggccgaggacagtgacgccaacagcctcaacaacaaggaaatcaccaccatcattcgccg

SEQ ID NO: 291612 - DNA, 75 bp, synthetic construct
  source 1..75: mol_type = other DNA
acgaatttacgtcaggggcgtgtgcgtattcgctacaaatatacgcctgttcccccgctggaagacatggagctt

SEQ ID NO: 291613 - DNA, 75 bp, synthetic construct
  source 1..75: mol_type = other DNA
atgcttaacaatgaaactggtgagcagtttttgtgtccaacatacgatcatgccgctagtttaggaagggagatg

SEQ ID NO: 291614 - DNA, 75 bp, synthetic construct
  source 1..75: mol_type = other DNA
tgaaagcggtggcgcaggcatttaaaaagatgcatagcgttaatcgtcagcatggttgctgttatgttcgccata

SEQ ID NO: 291615 - DNA, 75 bp, synthetic construct
  source 1..75: mol_type = other DNA
gtttaagaaaatgcatagcgttaatcgtcagcatggctgttgttatgttcgccatatctatgtgaaaacagaagg

SEQ ID NO: 291616 - DNA, 75 bp, synthetic construct
  source 1..75: mol_type = other DNA
gaaaattgatggcgaatggcgtgcgttactggtgactgaagatatggcgggttttgtcagtattgctgactggta

SEQ ID NO: 291617 - DNA, 75 bp, synthetic construct
  source 1..75: mol_type = other DNA
atgagcacaaaaacagaattgctggcgcgcattgacgatctgagcgctcagctcggtcgcgaattaccgcgcagc

SEQ ID NO: 291618 - DNA, 75 bp, synthetic construct
  source 1..75: mol_type = other DNA
ttgttgctgctggccgggaaattgttgttgattcaccggaggttgcagacctcatcgcagctgatcacgtttacg

SEQ ID NO: 291619 - DNA, 75 bp, synthetic construct
  source 1..75: mol_type = other DNA
cgagaatcgacgatctgagcgcacagctcggtcgcgaattaccgcgtagcgggactactgcggaacttgaatcaa

SEQ ID NO: 291620 - DNA, 75 bp, synthetic construct
  source 1..75: mol_type = other DNA
tgttgcccaggagttcgaaaactggatggctgggcgtggtctgtcaggtcgctcgcttaataaagtcacttctga

SEQ ID NO: 291621 - DNA, 75 bp, synthetic construct
  source 1..75: mol_type = other DNA
caccttgcagatcccgatgacaggggagcaggaggctgcttatgaagagcttcgtaagcgtgctcaggagttaag

SEQ ID NO: 291622 - DNA, 75 bp, synthetic construct
  source 1..75: mol_type = other DNA
gaagtcgcgaaaatccagacaggtgataacccacttcgtatttcagaggcagaaggttttctccgtgcattgttt

SEQ ID NO: 291623 - DNA, 75 bp, synthetic construct
  source 1..75: mol_type = other DNA
cgccggcgactggtcgctgggcttatcagatgccattctgttcgcaaaaaatgactacaaattgctcccggaaag

SEQ ID NO: 291624 - DNA, 75 bp, synthetic construct
  source 1..75: mol_type = other DNA
ttcctggatgcgggcggtctgcgcgatatcgaggttgaggcagtcaccaaaatgctggcctgcggcacgcggata

SEQ ID NO: 291625 - DNA, 75 bp, synthetic construct
  source 1..75: mol_type = other DNA
gctgttgaatgacgtgtgccgtctggcggtggagaatctgctgtatgccgcccgaaaacgggggctggaacccgg

SEQ ID NO: 291626 - DNA, 75 bp, synthetic construct
  source 1..75: mol_type = other DNA
gtaatacactgactcatgtatttaaacacgaagtgtttgagccgaccgtcgatgtattaggtagcgttgctttat

SEQ ID NO: 291627 - DNA, 75 bp, synthetic construct
  source 1..75: mol_type = other DNA
atgccatttgagcgactaacgatcattatcgaaaacgttggtttaattggtaaatcaaatcgtcgtaatcgtaga

SEQ ID NO: 291628 - DNA, 75 bp, synthetic construct
  source 1..75: mol_type = other DNA
taaagcgctggagaataaaacgcaggagtataaaaaacagctcgaagaacaacagaaagccgaagagaaatcaca

SEQ ID NO: 291629 - DNA, 75 bp, synthetic construct
  source 1..75: mol_type = other DNA
actcattagagatgaagataaggagatgggcagagcaggaggaagatggaaaaaaacaaacgaaagccagagctt

SEQ ID NO: 291630 - DNA, 75 bp, synthetic construct
  source 1..75: mol_type = other DNA
acgagaaaatccatccacctgtaagtggctatgatttaaaagatttaaacgcaggagatgttttttgcggttact

SEQ ID NO: 291631 - DNA, 75 bp, synthetic construct
  source 1..75: mol_type = other DNA
gcattagtgaagtgtctcgaacttttgcgattgaaatggttttagaaaacagaagaaggttgcttgaagatgaat

SEQ ID NO: 291632 - DNA, 75 bp, synthetic construct
  source 1..75: mol_type = other DNA
cactacgtttatttcagatatcattcaatctgagcggacttcaacgctggattttcaactggttaaatccagcgt

SEQ ID NO: 291633 - DNA, 75 bp, synthetic construct
  source 1..75: mol_type = other DNA
agaagtaaacatcaaccccggtggcagtatgctcgttgtttttcgaggattctgtcaggacgctgggcactctat

SEQ ID NO: 291634 - DNA, 75 bp, synthetic construct
  source 1..75: mol_type = other DNA
ctgccgaactttatcggtgttgagcgtgatgcgctcaagtgcagttggggagaacctggcactgtggcgttcctt

SEQ ID NO: 291635 - DNA, 75 bp, synthetic construct
  source 1..75: mol_type = other DNA
ttgttctgttaattattgataaaacatcaggttattcgtttacttttgatgcttcattgcaaagtttattaatgc

SEQ ID NO: 291636 - DNA, 75 bp, synthetic construct
  source 1..75: mol_type = other DNA
ttgatgccatgcagaccacgccagcgtttgtttatctggtgccaatcgtcatgctgtttggtatcggcaacgtgc

SEQ ID NO: 291637 - DNA, 75 bp, synthetic construct
  source 1..75: mol_type = other DNA
gctctgtccgcatcaccggagaacgatttaccgcgctcatggtggcggcgtcttttacagagaggtacccggtca

SEQ ID NO: 291638 - DNA, 75 bp, synthetic construct
  source 1..75: mol_type = other DNA
ggcaggcgtccagaaagccacgacatctctaccctttataaaagacggtgataaatggatcgtcgtcatgcctgt

SEQ ID NO: 291639 - DNA, 75 bp, synthetic construct
  source 1..75: mol_type = other DNA
gtcagccgggtgctgctgatgctgcggatcacgggctggctgagtctgtgcaaacgggtgcgtgatgagaaaggg

SEQ ID NO: 291640 - DNA, 75 bp, synthetic construct
  source 1..75: mol_type = other DNA
ggcgtcacctgaaacggtgagcaacattgtcgcagaattccgtgccagcctgaaacgtgcaaatgctgcccgtct

SEQ ID NO: 291641 - DNA, 75 bp, synthetic construct
  source 1..75: mol_type = other DNA
tcacatcggccagttcaacagcccggaggaagtcaaacgctatctgtccggtcgcaccggctgtatccgtgtcgc

SEQ ID NO: 291642 - DNA, 75 bp, synthetic construct
  source 1..75: mol_type = other DNA
ctggatacgcgtctttcaccgctggacaagatggcatggatgatgatccggctgtatgcgcagaataatgagggg

SEQ ID NO: 291643 - DNA, 75 bp, synthetic construct
  source 1..75: mol_type = other DNA
tacagaacccatttcagcagaacgtctgagtggcattgtggcagggttacgggcctccctgcgcaaccgttctgc

SEQ ID NO: 291644 - DNA, 75 bp, synthetic construct
  source 1..75: mol_type = other DNA
ccatcatgctgaccagtcagttgcaggcgttgccggaagcgctggcacagggggtgctggaaagcctgtcaggga

SEQ ID NO: 291645 - DNA, 75 bp, synthetic construct
  source 1..75: mol_type = other DNA
agcgccattatcaatagcggatatgaatatccggcgaaaaaaatcactattaaccttgcacctgccgatctgccg

SEQ ID NO: 291646 - DNA, 75 bp, synthetic construct
  source 1..75: mol_type = other DNA
ggacgcacagtggctggaagaaacgctaatccatctggggttatcgattcgtgcctggcagcggttactgaaagt

SEQ ID NO: 291647 - DNA, 75 bp, synthetic construct
  source 1..75: mol_type = other DNA
tctcaaccggctctcgggccctttctcgaccgcttcgatctctcactggagatcccattaccaccccccggcatt

SEQ ID NO: 291648 - DNA, 75 bp, synthetic construct
  source 1..75: mol_type = other DNA
attatgttgaaacacgaatctccctcgatcagcagctaatcagtcagcccgcagcgacttatttcatgcgggcat

SEQ ID NO: 291649 - DNA, 75 bp, synthetic construct
  source 1..75: mol_type = other DNA
aatggtttcaggatccagatatgttagatgttgaactgagtgttgaagagattgcatgctatttgatggttcgat

SEQ ID NO: 291650 - DNA, 75 bp, synthetic construct
  source 1..75: mol_type = other DNA
ctgatccatctgggattatctattcgtgcctggcagcggttactgaaagtatcaagaaccatagctgatattgat

SEQ ID NO: 291651 - DNA, 75 bp, synthetic construct
  source 1..75: mol_type = other DNA
ggatcacgggctggctgagcctgtgtaaacgggtacgtgatgataaaggccgggttcggggaaacatttacgccc

SEQ ID NO: 291652 - DNA, 75 bp, synthetic construct
  source 1..75: mol_type = other DNA
ccacgccgctggagcgctcacttgggcgcattgccggggtcagtgaaatgacctccagcagttcgctcggcagca

SEQ ID NO: 291653 - DNA, 75 bp, synthetic construct
  source 1..75: mol_type = other DNA
tccggtgattatggtcagcgcctcgctgcccggtgcgtcaccggaaacaatggcgtcttccgttgccacgccgct

SEQ ID NO: 291654 - DNA, 75 bp, synthetic construct
  source 1..75: mol_type = other DNA
ccattattcccgccgttgcggtgcccgtttcgctgattggtacgtttgcggcgatgtatctgtgcggattcagtc

SEQ ID NO: 291655 - DNA, 75 bp, synthetic construct
  source 1..75: mol_type = other DNA
ggtgaatcatcagggattatcggcggcctcgaccatctcgttcaacctgccgaccgggaaatcgctctcggacgc

SEQ ID NO: 291656 - DNA, 75 bp, synthetic construct
  source 1..75: mol_type = other DNA
tggaaaaaatgttcgttatcaataacgaaggaaaagcgatcccgctgtcgtatttcgctaaatggcaaccggcga

SEQ ID NO: 291657 - DNA, 75 bp, synthetic construct
  source 1..75: mol_type = other DNA
ccgctgaatatcagccgctgattattcattacaacaacggcggcgcggttcgtctgggcgatgtggcgacggtga

SEQ ID NO: 291658 - DNA, 75 bp, synthetic construct
  source 1..75: mol_type = other DNA
cgccgatgacgtggattatgtccgctttgactgcaaagtgaccggcagcgaagcacgtaagctgattgcccgttg

SEQ ID NO: 291659 - DNA, 75 bp, synthetic construct
  source 1..75: mol_type = other DNA
gtctggaactctacttaccgaaagatcagccagaagcgatgaaagccgacgtggtggtcgctaacatccttgcag

SEQ ID NO: 291660 - DNA, 75 bp, synthetic construct
  source 1..75: mol_type = other DNA
gataatttccacccgatgcgctttggtgaacgactgtggatctgcccaagctggcgtgatgtgccggacgaaaac

SEQ ID NO: 291661 - DNA, 75 bp, synthetic construct
  source 1..75: mol_type = other DNA
acattgcccgtcatctggaagcggggatgaaaccactacaggccgcactgcaaggtactcgcgaagtcggtttta

SEQ ID NO: 291662 - DNA, 75 bp, synthetic construct
  source 1..75: mol_type = other DNA
tttgcagtttgattttgaccgggatatcaacggcgcggcgcgcgatgtgcaggcggcgatcaacgccgcacaaag

SEQ ID NO: 291663 - DNA, 75 bp, synthetic construct
  source 1..75: mol_type = other DNA
gcaaatcgacggtgtcggtgatgtcgatgttggcggcagctcactgcccgccgtacgcgtcgggctgaatccgca

SEQ ID NO: 291664 - DNA, 75 bp, synthetic construct
  source 1..75: mol_type = other DNA
caccagagcaaacgctgcgttatctcaaccgactctctggtccctttcttgaccgattcgacctctcactggaga

SEQ ID NO: 291665 - DNA, 75 bp, synthetic construct
  source 1..75: mol_type = other DNA
cagctgccgaagctatcagaacgctgatgcacacgctgattgatatttcatgcacggcagcaaccgcagaaaaac

SEQ ID NO: 291666 - DNA, 75 bp, synthetic construct
  source 1..75: mol_type = other DNA
tgaaacgggaatttgatggcgcaccggaagatacatcgggcgcattgttgagcgttgctgacatgatgaaagctg

SEQ ID NO: 291667 - DNA, 75 bp, synthetic construct
  source 1..75: mol_type = other DNA
gatgcacgcgctgattgatatttctgttattgctgacatggcgcataagcacgccaccagtgaaacagaatatgc

SEQ ID NO: 291668 - DNA, 75 bp, synthetic construct
  source 1..75: mol_type = other DNA
ctattatgacatcgcaagggacgtgggttagtgctttagaacgcctagagcgtgcgcttaggctgtgttgttttt

SEQ ID NO: 291669 - DNA, 75 bp, synthetic construct
  source 1..75: mol_type = other DNA
aatcagggcgagattatcactttgattacaggcagagatattgatttttcaaaggtctatacacttaaatacaga

SEQ ID NO: 291670 - DNA, 75 bp, synthetic construct
  source 1..75: mol_type = other DNA
caaaagttcgatttattcaacaaagccattgacgctgaactgaaggatgcttttatggccctgcaaaaagcatgg

SEQ ID NO: 291671 - DNA, 75 bp, synthetic construct
  source 1..75: mol_type = other DNA
cagcagccgccgcgctcactacgctgatgcatgcgctgattgatatttctgttattgctgacagggcgcataagc

SEQ ID NO: 291672 - DNA, 75 bp, synthetic construct
  source 1..75: mol_type = other DNA
ggaaactgattggcgcggagtgctggtatgacatcgaggataacagcaccacgaatttacgtcaggggcgtgtgc

SEQ ID NO: 291673 - DNA, 75 bp, synthetic construct
  source 1..75: mol_type = other DNA
aacgaaacgttccccgcgcctgcttatgcgtgcggccttcgtgcgtacattgaccatgagcagggctggcacaaa

SEQ ID NO: 291674 - DNA, 75 bp, synthetic construct
  source 1..75: mol_type = other DNA
gatgcacgcgctgattgatatttctgttatcgcagacaaggcgcataagcgcgccaccagcgaaacagaatatgc

SEQ ID NO: 291675 - DNA, 75 bp, synthetic construct
  source 1..75: mol_type = other DNA
agcgatattctcaatattgcgtcggactatgcggaatatgtggcagaggcacgttacagaagaaaattaccggag

SEQ ID NO: 291676 - DNA, 75 bp, synthetic construct
  source 1..75: mol_type = other DNA
cggcgttcctgatgatgcggctgatgcgctttcgtcaatgccagaacttattagagcggcttttttcttactttc

SEQ ID NO: 291677 - DNA, 75 bp, synthetic construct
  source 1..75: mol_type = other DNA
gtaaaaccgcaatcccgattgcgaataggtgctgtgacagagatacacagtttgaattctggcggcttcttgccg

SEQ ID NO: 291678 - DNA, 75 bp, synthetic construct
  source 1..75: mol_type = other DNA
tcccatggcagcgcaggctgcggaaattacgttagtcccgtcagtaaaattacagataggcgatcgtgataatcg

SEQ ID NO: 291679 - DNA, 75 bp, synthetic construct
  source 1..75: mol_type = other DNA
ggatgtctgagaatgattttacattattattttttttcatctgcatgtattattgttctttcttcatgacctaca

SEQ ID NO: 291680 - DNA, 75 bp, synthetic construct
  source 1..75: mol_type = other DNA
gatttgctcaactatgtgaaggctaatggcgaattgagcaacgtgccaaacggaatgcacgccgtagtgtctgcc

SEQ ID NO: 291681 - DNA, 75 bp, synthetic construct
  source 1..75: mol_type = other DNA
cccgatcactgttgaggtacatatcagtaaaggtctacccggcttaacgatggtgggcttaccagaaacaacggt

SEQ ID NO: 291682 - DNA, 75 bp, synthetic construct
  source 1..75: mol_type = other DNA
tagacaactatctggaattgctccggaaatgcgcatggcaaatatcatacgggctgggatacagaaacgaaaatg

SEQ ID NO: 291683 - DNA, 75 bp, synthetic construct
  source 1..75: mol_type = other DNA
catcttggggcgatggagagcatttcggctatctatctcgacaagatcgaaagtccggactctgtaccgacgagc

SEQ ID NO: 291684 - DNA, 75 bp, synthetic construct
  source 1..75: mol_type = other DNA
gtggcgtctaatgatatcaggcaaactcataacgctggcgaagaccatctgtgtgattgtcggcgtttcattttc

SEQ ID NO: 291685 - DNA, 75 bp, synthetic construct
  source 1..75: mol_type = other DNA
gtgtctggaaatataggggcaaatccaccttatccgctgcgactcctgcaactcgatatcgactgtaaagtgagt

SEQ ID NO: 291686 - DNA, 75 bp, synthetic construct
  source 1..75: mol_type = other DNA
aaaatagtctgagatatgtggctaaaattaaaggtgaggaaccatcgcagcttcacggggacggttcgcaagagc

SEQ ID NO: 291687 - DNA, 75 bp, synthetic construct
  source 1..75: mol_type = other DNA
gaggtgaaggaagataaggatctggacagcctcttctgcagcggaaagaccaccgcgttggtcaatactatcgtc

SEQ ID NO: 291688 - DNA, 75 bp, synthetic construct
  source 1..75: mol_type = other DNA
tgtcgttccactgctcgctcacgcagcgaacggatgtgatgagttttaacgaaattttcgagcggctctctttac

SEQ ID NO: 291689 - DNA, 75 bp, synthetic construct
  source 1..75: mol_type = other DNA
tgagtactgaatttattcgggcaacggcatttgccattcgcattgtggcaattgcggttctaatccgggaaatcc

SEQ ID NO: 291690 - DNA, 75 bp, synthetic construct
  source 1..75: mol_type = other DNA
tactgcctggcagtatgtaaactcatcacaaaaaacagtacaaaccgaacaaaaggcaccggagcgaaaggtact

SEQ ID NO: 291691 - DNA, 75 bp, synthetic construct
  source 1..75: mol_type = other DNA
tgaactaccatatccgcggtcgcatcatccaggtgccgtcaaactacgacccggaaaaacgcacttacagcggta

SEQ ID NO: 291692 - DNA, 75 bp, synthetic construct
  source 1..75: mol_type = other DNA
ggtgtggccgtacaccaacagcgatgtggtggtggatgataacggcgtggggtttcgctacagcttcagcgccct

SEQ ID NO: 291693 - DNA, 75 bp, synthetic construct
  source 1..75: mol_type = other DNA
gtggtggtggatgataacggccgtggggttccgctacagcttcagcgccctgaaggagccgccacacggcggtgg

SEQ ID NO: 291694 - DNA, 75 bp, synthetic construct
  source 1..75: mol_type = other DNA
gttttcgaaagagtggaaagacgccaacgataaatggaatgccatgtggggcgtcaaaattgagcagaccgaaga

SEQ ID NO: 291695 - DNA, 75 bp, synthetic construct
  source 1..75: mol_type = other DNA
aaaaagcgtgctgctgaacagtacgtcggtgctggacagtgatgggatgatcttacccagcaatagtggacacgc

SEQ ID NO: 291696 - DNA, 75 bp, synthetic construct
  source 1..75: mol_type = other DNA
cctgacggcgttgccgagtacagcgtgtgggggctgaagctgccgacgctgcgccagcgcctgttccgctgtgtg

SEQ ID NO: 291697 - DNA, 75 bp, synthetic construct
  source 1..75: mol_type = other DNA
tttcccccgggactcccgtgcaccggagcggtggccatcagggaccattaccgtcagggtttatgacgatcagcc

SEQ ID NO: 291698 - DNA, 75 bp, synthetic construct
  source 1..75: mol_type = other DNA
aactgcatctggctcaggggctatgggagctgatagacaacagccagcttgcggatgagatggcggagatgaaga

SEQ ID NO: 291699 - DNA, 75 bp, synthetic construct
  source 1..75: mol_type = other DNA
ccggggcggaaaccgcactgggtgtggaggtgacgaaggcaaagccggtgacgcgcaccatcacgtcagcgaaca

SEQ ID NO: 291700 - DNA, 75 bp, synthetic construct
  source 1..75: mol_type = other DNA
cgctggggaactacaggctgactgtccgggcggtaaatgcgtggggacagcagggcgatccggaatcggtatcgt

SEQ ID NO: 291701 - DNA, 75 bp, synthetic construct
  source 1..75: mol_type = other DNA
ggggaaagcctttccccggaataacagttatgccagcgggacggtaaccgtcacagtttacgatgaccagggctt

SEQ ID NO: 291702 - DNA, 75 bp, synthetic construct
  source 1..75: mol_type = other DNA
ggattgaggatgctgatggccagcccctgagcaatatactgctgcaggcggaccgtatcgcgatgattaacccgg

SEQ ID NO: 291703 - DNA, 75 bp, synthetic construct
  source 1..75: mol_type = other DNA
gacatctggacagagtgcttcctgcatgttgatcagaacggacgccggatttattcaggcaggtcagtgacagag

SEQ ID NO: 291704 - DNA, 75 bp, synthetic construct
  source 1..75: mol_type = other DNA
atctggcacaggcgaaatgggacacgccgcgggtggtgaagggtgtgcgcttcagtctgcgcctgaccagtggaa

SEQ ID NO: 291705 - DNA, 75 bp, synthetic construct
  source 1..75: mol_type = other DNA
tctgggacggcagcctgaaaccggcatacagcaacaaccctgcctggtgcctgtgggacatgctgacccacccgc

SEQ ID NO: 291706 - DNA, 75 bp, synthetic construct
  source 1..75: mol_type = other DNA
gtgaacaccgttggcaaatcggcatttgtggaggccgtcggccagccgagtgatgatgcatccggctatctggat

SEQ ID NO: 291707 - DNA, 75 bp, synthetic construct
  source 1..75: mol_type = other DNA
ccgctgtgtctccgtccgggaaaacacggacggcacctttgccatcacggcggtgcagcacgtaccggaaaaaga

SEQ ID NO: 291708 - DNA, 75 bp, synthetic construct
  source 1..75: mol_type = other DNA
ggtgtgcgcttcagtctgcgcctgaccagtggaagcggtcaggacagccgtctggtgaccaccgccatcaccgcg

SEQ ID NO: 291709 - DNA, 75 bp, synthetic construct
  source 1..75: mol_type = other DNA
gcattccctatgtggccgggattggtgcagggattgaggatactgatggccagccactgagcaacatactgctgc

SEQ ID NO: 291710 - DNA, 75 bp, synthetic construct
  source 1..75: mol_type = other DNA
gtattttctcaggaacaggacggcattaaatcgcacacccacagcgccagcgcatccagtactgatttggggacg

SEQ ID NO: 291711 - DNA, 75 bp, synthetic construct
  source 1..75: mol_type = other DNA
acggtggaggtgagcgcggctgacggccagtatctggcacaggcgaaatgggacacgccgcgggtggtgaagggg

SEQ ID NO: 291712 - DNA, 75 bp, synthetic construct
  source 1..75: mol_type = other DNA
tattgatatgcctagtggtggtggtagcgtcactctggagtttaagattttccagaaaggcaatcagggggcagg

SEQ ID NO: 291713 - DNA, 75 bp, synthetic construct
  source 1..75: mol_type = other DNA
gcggcggacaggattgcgatgattaatcctgcaaatggcaacacaaagccgatgtttgttggtcagggtgatcag

SEQ ID NO: 291714 - DNA, 75 bp, synthetic construct
  source 1..75: mol_type = other DNA
aggcccgcctggctgaggagaaacgtaaagccgatgagcaggctcgccgcgaagccgacgttaagcaccgcaaag

SEQ ID NO: 291715 - DNA, 75 bp, synthetic construct
  source 1..75: mol_type = other DNA
gcgggtatcggtgccggtattgagaacacccctgacggcatgcagagtcaggtgcttctggctgctgaccggatt

SEQ ID NO: 291716 - DNA, 75 bp, synthetic construct
  source 1..75: mol_type = other DNA
gtattgtctcaggaacaggacggcattaaatcgcaaacccacagcgccagcgcatccagtacggatttggggacg

SEQ ID NO: 291717 - DNA, 75 bp, synthetic construct
  source 1..75: mol_type = other DNA
tcctccggcattttccctgacaccggatgggcggctgacggcgaaaaatgccgatatcagcggtaacgtgaatgc

SEQ ID NO: 291718 - DNA, 75 bp, synthetic construct
  source 1..75: mol_type = other DNA
ggcctggtgtctgtgggacatgctgacacacccgcgctacgggatgggaaaacgactgggggccgcggacgtgga

SEQ ID NO: 291719 - DNA, 75 bp, synthetic construct
  source 1..75: mol_type = other DNA
gtattctctcaggaacaggacggcattaaatcgcagacccacagcgccagcgcatccagtacagatttggggacg

SEQ ID NO: 291720 - DNA, 75 bp, synthetic construct
  source 1..75: mol_type = other DNA
caccggacgggcggctgacggcgaaaaatgccgatatcagcggtagcgtgaatgcgaactccgggacgctcaaca

SEQ ID NO: 291721 - DNA, 75 bp, synthetic construct
  source 1..75: mol_type = other DNA
cgcgaaccagattgaaggcgatctcgttaaaacagtgggcaaagctttcccccgtgactcccgtgcaccggagcg

SEQ ID NO: 291722 - DNA, 75 bp, synthetic construct
  source 1..75: mol_type = other DNA
cgatccggggagcggaaataacccaggaggcacgcgatacacgggttatggttttgaagttcgcaaaaacggcgt

SEQ ID NO: 291723 - DNA, 75 bp, synthetic construct
  source 1..75: mol_type = other DNA
ctgctaaaaatgcggatatcagtggcagtgtgaatgcgaactccgggacgctcaacaacgtcacgattaatgaga

SEQ ID NO: 291724 - DNA, 75 bp, synthetic construct
  source 1..75: mol_type = other DNA
tgcagagtcaggtgctgctggcggcagacaggattgcgatgattaatcctgcaaatggcaacacaaaaccgatgt

SEQ ID NO: 291725 - DNA, 75 bp, synthetic construct
  source 1..75: mol_type = other DNA
gaggagaaatcgggaagacacatctggcacaggggatgtgggagctgattgataacagccagcttgatgatgaga

SEQ ID NO: 291726 - DNA, 75 bp, synthetic construct
  source 1..75: mol_type = other DNA
cgacgttttccctgacgccggagggcaggctgaccgcaagaaatgctgatatcagcggtaacgtgaatgcgaatt

SEQ ID NO: 291727 - DNA, 75 bp, synthetic construct
  source 1..75: mol_type = other DNA
ccacctcacagttcctcgcttcggtgattctggataatctgcctccccgtccctttaacatccggatggtccggg

SEQ ID NO: 291728 - DNA, 75 bp, synthetic construct
  source 1..75: mol_type = other DNA
gcgatattgtcaaaacggtcagcaagtctttcccccgcacgaacagttatgccagtggcaccatcacggtaagaa

SEQ ID NO: 291729 - DNA, 75 bp, synthetic construct
  source 1..75: mol_type = other DNA
ggccgggccataattattatttttacgttcgcagtgtgaacaccgttggcaaatcggcattcgtggaggctgttg

SEQ ID NO: 291730 - DNA, 75 bp, synthetic construct
  source 1..75: mol_type = other DNA
tgaaggtgcagaaaacgaaaaacggcattccgtatgttgccggtattggtgcggggattgaggatgctgatggcc

SEQ ID NO: 291731 - DNA, 75 bp, synthetic construct
  source 1..75: mol_type = other DNA
gggcaaccctgccagtggtcgggccgtattgtctcaggaacaggacggcattaaatcgcacacccacagcgccag

SEQ ID NO: 291732 - DNA, 75 bp, synthetic construct
  source 1..75: mol_type = other DNA
gcctggctggtaaatggctggtatcccacagcaagtatcagcgatttactggttgtggtgatgaagaaatcaaca

SEQ ID NO: 291733 - DNA, 75 bp, synthetic construct
  source 1..75: mol_type = other DNA
aatattccgccggatacgtttgccagtgatgtacaggttcttgtgatgaaaaagggggcatcaggtatcagtatc

SEQ ID NO: 291734 - DNA, 75 bp, synthetic construct
  source 1..75: mol_type = other DNA
cgggaaacatcatcggggatcttatcaagggcgggagtggcgctttcccgcgtcagaatgagggcagtgtgaact

SEQ ID NO: 291735 - DNA, 75 bp, synthetic construct
  source 1..75: mol_type = other DNA
acgacgtcagaacgggagttttggcagttcacgtatcagtaaccttcaggcgatagtggtgaagaaaaacagcgc

SEQ ID NO: 291736 - DNA, 75 bp, synthetic construct
  source 1..75: mol_type = other DNA
ccacggtgaacctgattaacggcagcggtaagccggtgagcgtggccatcactgcacaccccgcgccggaccgga

SEQ ID NO: 291737 - DNA, 75 bp, synthetic construct
  source 1..75: mol_type = other DNA
caagatacacgggttatggttttgaagttcgcaaaaacggtgtattaatcgcatccagagaaactaaaggggcca

SEQ ID NO: 291738 - DNA, 75 bp, synthetic construct
  source 1..75: mol_type = other DNA
agaatggcaacaccacgccgctgtttgtggcgcaggggaatcagctgttcatgaacgacgtgttcctgaagcgac

SEQ ID NO: 291739 - DNA, 75 bp, synthetic construct
  source 1..75: mol_type = other DNA
tcattcccccggtgctgtttcgcgggacgaaacaccagaatttcaacagtccgaatcagcagtcgtactggtatt

SEQ ID NO: 291740 - DNA, 75 bp, synthetic construct
  source 1..75: mol_type = other DNA
gggcaagcctgccagtggtcgggccgtattctctcaggaacaggacggcattaaatcgcacacccacagcgccag

SEQ ID NO: 291741 - DNA, 75 bp, synthetic construct
  source 1..75: mol_type = other DNA
actgtcggattctgggaaaactgtctgccaaccagattgaaggtgatattgtcaaaacggtgggaaaagcctttc

SEQ ID NO: 291742 - DNA, 75 bp, synthetic construct
  source 1..75: mol_type = other DNA
aaaatgccgatatcagcggtaacgtgaatgcgaactccgggacgctcaacaacgtcacgataaatgagaactgtc

SEQ ID NO: 291743 - DNA, 75 bp, synthetic construct
  source 1..75: mol_type = other DNA
gggcaagcctgccagtggtcgggccgtattatctcaggaacaggacggcattaaatcgcaaacccacagcgccag

SEQ ID NO: 291744 - DNA, 75 bp, synthetic construct
  source 1..75: mol_type = other DNA
agaaactaaaggggccattcccggtagttacagtgcagttattgatatgccgagtggcaggggaagcgtcactct

SEQ ID NO: 291745 - DNA, 75 bp, synthetic construct
  source 1..75: mol_type = other DNA
agctatggccagcagggtgaacctgccaccaccaccttccggattgccgcaccggcagcaccgtcgcggattgag

SEQ ID NO: 291746 - DNA, 75 bp, synthetic construct
  source 1..75: mol_type = other DNA
gtattatctcaggaacaggacggcattaaatcgcagacccacagcgccagcgcatccagtaccgatttggggacg

SEQ ID NO: 291747 - DNA, 75 bp, synthetic construct
  source 1..75: mol_type = other DNA
gggcaagcctgccagtggtcgggccgtattgtctcaggaacaggacggcattaaatcgcagacccacagcgccag

SEQ ID NO: 291748 - DNA, 75 bp, synthetic construct
  source 1..75: mol_type = other DNA
gtgccgggtgatgttattgaaatctgcgatgatgactatgcggggatcagcatcggcgggcgcgtgctggctgtg

SEQ ID NO: 291749 - DNA, 75 bp, synthetic construct
  source 1..75: mol_type = other DNA
gccagccgcaccctgacgctggaccgtgaggtgacactgccggagacaggtacatcgacggtgaacctgattaac

SEQ ID NO: 291750 - DNA, 75 bp, synthetic construct
  source 1..75: mol_type = other DNA
gtaacgtgaacgcgaactccgggacgctcaacaacgtcacgattaatcagaactgtcggattctgggaaaactgt

SEQ ID NO: 291751 - DNA, 75 bp, synthetic construct
  source 1..75: mol_type = other DNA
acggtaaatgaaaactgtacgattaagggcatgctggaggcgactcaggtcagaggtgacttcgttaaagctgta

SEQ ID NO: 291752 - DNA, 75 bp, synthetic construct
  source 1..75: mol_type = other DNA
agaaaggcaatcagtgggcaggcaatatcaccgactgtacggtgattgtgaccaaaaaagccgcttccggcatca

SEQ ID NO: 291753 - DNA, 75 bp, synthetic construct
  source 1..75: mol_type = other DNA
cggctgacggcgaaaaatgccgatatcagcggtaacgtgaatgcgaactccgggacgctcaataaggtcacgatt

SEQ ID NO: 291754 - DNA, 75 bp, synthetic construct
  source 1..75: mol_type = other DNA
tcattcatctggctgaaaaccagggcaaagcgctggcgctcaaaacgggcgcggccgctgcgcgcagcgattacc

SEQ ID NO: 291755 - DNA, 75 bp, synthetic construct
  source 1..75: mol_type = other DNA
gtatcgtcgggctggtgctgaaagagtggaacaatacaggacgccgtccggtaacggtgttgagcctcggttgtg

SEQ ID NO: 291756 - DNA, 75 bp, synthetic construct
  source 1..75: mol_type = other DNA
tgagctgaatgccatgtatatgctgaaggtgcagaaaacgaagaagggtattccgtatgtggccgggattggcgc

SEQ ID NO: 291757 - DNA, 75 bp, synthetic construct
  source 1..75: mol_type = other DNA
cctcataacagatggctctgggaataccattctaaataccccgctcgttggctccgtgcttaacggtggaataaa

SEQ ID NO: 291758 - DNA, 75 bp, synthetic construct
  source 1..75: mol_type = other DNA
atgctaccatctatttcaatcaacaataccagcgcaacttacccagaatccatcaatgaaaataacaatgatgaa

SEQ ID NO: 291759 - DNA, 75 bp, synthetic construct
  source 1..75: mol_type = other DNA
acacacctcgtgaggcgaaggataatctcaaatccacgcagatgatgagcgtgattgatgccattggtgagggac

SEQ ID NO: 291760 - DNA, 75 bp, synthetic construct
  source 1..75: mol_type = other DNA
catcatcaccaataagaaagaaacggcgcaaaaatatagcgcatgagtctgaatcagacagattcgcaccatgtg

SEQ ID NO: 291761 - DNA, 75 bp, synthetic construct
  source 1..75: mol_type = other DNA
gttaaaacagtgggcaaagctttccccccgggactcccgtgcaccggagcggtggccatcaggaaccattaccgt

SEQ ID NO: 291762 - DNA, 75 bp, synthetic construct
  source 1..75: mol_type = other DNA
acgctcaacaacgtcacgattaacgagaactgccgggttctgggaaaactgtccgcgaaccagattgaaggcgat

SEQ ID NO: 291763 - DNA, 75 bp, synthetic construct
  source 1..75: mol_type = other DNA
gctattgcgtgccagcttcagaaaatggggatgacgccggagcagattaagcaggctaccgggctttccgatgac

SEQ ID NO: 291764 - DNA, 75 bp, synthetic construct
  source 1..75: mol_type = other DNA
aacaaattgctgaaattttacagcagtcaaaagagggggcgtctaataaggagctatgtgaacactatcaattta

SEQ ID NO: 291765 - DNA, 75 bp, synthetic construct
  source 1..75: mol_type = other DNA
acggtagagttaggcagatggccgacgaagcaattattatctgcaggcgatacgacagcacttattccattcagc

SEQ ID NO: 291766 - DNA, 75 bp, synthetic construct
  source 1..75: mol_type = other DNA
tttgttggtcagggagatcagatattcatgaatgaagtgttcctgaaatatctgacggctcccaccattaccagt

SEQ ID NO: 291767 - DNA, 75 bp, synthetic construct
  source 1..75: mol_type = other DNA
ttgaaaccacagcccgctatcttggcacggcgctgtactggatagctgccagtatcaatattaagccgggccatg

SEQ ID NO: 291768 - DNA, 75 bp, synthetic construct
  source 1..75: mol_type = other DNA
ttctgggaaaactgtccgcgaaccagattgaaggcgatattgttaaaacagtgggcaaagctttcccccgggact

SEQ ID NO: 291769 - DNA, 75 bp, synthetic construct
  source 1..75: mol_type = other DNA
gaaggtgaaagtgagccgtgttcctgacggcgttgctgaatacagcgtgtgggggctgaagttgccgacgttgcg

SEQ ID NO: 291770 - DNA, 75 bp, synthetic construct
  source 1..75: mol_type = other DNA
gttgaatttttttgctaattacattgcgttagcaagtggtgttcaggccggggcggcgaaagcagatgcgacgtt

SEQ ID NO: 291771 - DNA, 75 bp, synthetic construct
  source 1..75: mol_type = other DNA
tttacgtcattaaaattgctgttcgtggtgtcagtcctatggtctggcgtcggctgaggattgcagccgatacat

SEQ ID NO: 291772 - DNA, 75 bp, synthetic construct
  source 1..75: mol_type = other DNA
ctgaacagcatgtgggccgtgaaactgcagcagatgaaggacggacgcctttatattgcgggtatcggagccggt

SEQ ID NO: 291773 - DNA, 75 bp, synthetic construct
  source 1..75: mol_type = other DNA
cggtgctgaaatttataaccgtaccgcgctggataatacgctgatttacagtggtgttattgatatgcctgccgg

SEQ ID NO: 291774 - DNA, 75 bp, synthetic construct
  source 1..75: mol_type = other DNA
agaccagagtgcagcaatccagcagatacagaaggttcaggttgatacaaataataacctgaacagcatgtgggc

SEQ ID NO: 291775 - DNA, 75 bp, synthetic construct
  source 1..75: mol_type = other DNA
gcgggcagacggtccgtatcacatatagtgaaacggatggtcgctttctggcgagtgggggcaataacagtgagg

SEQ ID NO: 291776 - DNA, 75 bp, synthetic construct
  source 1..75: mol_type = other DNA
acctggctgcactctacatgctgaaggtacagaaaacgaaagacggtattccctatgtggccgggataggtgcgg

SEQ ID NO: 291777 - DNA, 75 bp, synthetic construct
  source 1..75: mol_type = other DNA
ccagtatctggcgcaggctaaatgggacacgccgcgggtggtgaagggcgtgcgcttcagtctgcgcctgaccag

SEQ ID NO: 291778 - DNA, 75 bp, synthetic construct
  source 1..75: mol_type = other DNA
cggtgtatgacccgacggtacagtttgaattctggttctcagaaaaacgcatcacgaacacagcacaggtggaaa

SEQ ID NO: 291779 - DNA, 75 bp, synthetic construct
  source 1..75: mol_type = other DNA
aataccacaccgaaccattcacggaagacaaccaccgccagttagtccaggcactgctggaagttaaccgtaagc

SEQ ID NO: 291780 - DNA, 75 bp, synthetic construct
  source 1..75: mol_type = other DNA
tatggtaacaatgatacaaagcactatattcaaatgataattcagaaaaggcgtgatagttttgtaacatcacac

SEQ ID NO: 291781 - DNA, 75 bp, synthetic construct
  source 1..75: mol_type = other DNA
ggggcagtcactggtggagaccacctcaaagggtgaccgtaacccgacgtctgtccgcctgctgattcagcttga

SEQ ID NO: 291782 - DNA, 75 bp, synthetic construct
  source 1..75: mol_type = other DNA
taatgagaactgtcagattaaggggaaactgtcagccaaccagattgaaggcgatatagtcaaaacagtgggtaa

SEQ ID NO: 291783 - DNA, 75 bp, synthetic construct
  source 1..75: mol_type = other DNA
ccgtcagcatccacgacagacacggtagcacacgaggtgaacgcctccggcgacctgcaactgacctgcggtccg

SEQ ID NO: 291784 - DNA, 75 bp, synthetic construct
  source 1..75: mol_type = other DNA
ccaccgtgccggactgtgggtgataaagaccggactgctggaaacgcagacggtggatttcacgctcgggtcgca

SEQ ID NO: 291785 - DNA, 75 bp, synthetic construct
  source 1..75: mol_type = other DNA
ccacctcgcagttcctggcgtcggtgattctggagaatctgccgccccggccctttaacatccggatggtcaggg

SEQ ID NO: 291786 - DNA, 75 bp, synthetic construct
  source 1..75: mol_type = other DNA
atattcaaatgataattcagaaaaggcgtgatagttttgtaacatcacacttaatgccactgctgaatgaaatta

SEQ ID NO: 291787 - DNA, 75 bp, synthetic construct
  source 1..75: mol_type = other DNA
aaggacgctaacgataaatggaatgccatgtggggcgtcaaaattgagcagaccaaagacggcaaacattatgtc

SEQ ID NO: 291788 - DNA, 75 bp, synthetic construct
  source 1..75: mol_type = other DNA
acccggaccatcacgtctgcaaacatcgaccgtctgcgttttaccttcggcgtgcaggcactggtggaaaccacc

SEQ ID NO: 291789 - DNA, 75 bp, synthetic construct
  source 1..75: mol_type = other DNA
ggcggaagtccggggcatggtggcggcagttacagacctgtttacagcacaatctggatcagggtgttcaggctt

SEQ ID NO: 291790 - DNA, 75 bp, synthetic construct
  source 1..75: mol_type = other DNA
ggtgacatcattgaaatctgtgataacgactacgccgggaccctgaccggcggacgcatcctgtccatcgatgcc

SEQ ID NO: 291791 - DNA, 75 bp, synthetic construct
  source 1..75: mol_type = other DNA
gcggatatcaacccagacctgatccgcctttatcgtgaggtgaagagcaatcctgagctggttattgaccttgcc

SEQ ID NO: 291792 - DNA, 75 bp, synthetic construct
  source 1..75: mol_type = other DNA
taacgtgccgtttggcaagtataagagcgtctactttcctgaaaatgaaatccgcctgtttgccgaaaaggccaa

SEQ ID NO: 291793 - DNA, 75 bp, synthetic construct
  source 1..75: mol_type = other DNA
ctgtatgccatcggacagtactgtgaccagccggtgccggatggtttcggggggactgaaccgcggatgaccttt

SEQ ID NO: 291794 - DNA, 75 bp, synthetic construct
  source 1..75: mol_type = other DNA
cgtcaacctggtggggaaatctgcgtttgtggaagccagtggccgggcgagcaatgatgcggaagggtatctggg

SEQ ID NO: 291795 - DNA, 75 bp, synthetic construct
  source 1..75: mol_type = other DNA
gggtacgctcaacaatgtgacgataaaccaggactgtgtgattaagggcaatttatccgcggcacagataaccgg

SEQ ID NO: 291796 - DNA, 75 bp, synthetic construct
  source 1..75: mol_type = other DNA
cattgaactgataccgggatattttcagataacggcggtcccgaaactggccatttatgacccgacggtgcagtt

SEQ ID NO: 291797 - DNA, 75 bp, synthetic construct
  source 1..75: mol_type = other DNA
gtgaggtgacgcttccggaaaccggcacatccacggtgaacctgattaacggcagcggtaagccggtaagtgtgg

SEQ ID NO: 291798 - DNA, 75 bp, synthetic construct
  source 1..75: mol_type = other DNA
gcacgctcaataatgtcaccattaacgagaactgtgtcatcagagggaaactgtctgcaaaccagattgaaggcg

SEQ ID NO: 291799 - DNA, 75 bp, synthetic construct
  source 1..75: mol_type = other DNA
atcgcagacacatctcaggtggaaacctctgcccgttatctggggaccggcagtcagtggagtgtatccggcccg

SEQ ID NO: 291800 - DNA, 75 bp, synthetic construct
  source 1..75: mol_type = other DNA
gctgctggggaaggcactgaaagagcgtattgatgcgtcagccctgcgtactgaggtcacgcaactggaagaaga

SEQ ID NO: 291801 - DNA, 75 bp, synthetic construct
  source 1..75: mol_type = other DNA
tgagcggctggacgcgctgaaggatgaagtacggcgcccgctcacagaatgggaagccgagcaggaacgcattaa

SEQ ID NO: 291802 - DNA, 75 bp, synthetic construct
  source 1..75: mol_type = other DNA
caccgtttcagtggcctgccgctcggggaatacaccctgacggtcagggcgattaacagctatggccagcagggc

SEQ ID NO: 291803 - DNA, 75 bp, synthetic construct
  source 1..75: mol_type = other DNA
gtggcgaaagtgccgctgctgggcgatatcccattgattggtaacctgtttaaatcgacggcggataaaaaagaa

SEQ ID NO: 291804 - DNA, 75 bp, synthetic construct
  source 1..75: mol_type = other DNA
cggcatgcagagtcaggtgctgctggcggcagacaggattgcgatgattaatcctgcaaatggcaacacaaaacc

SEQ ID NO: 291805 - DNA, 75 bp, synthetic construct
  source 1..75: mol_type = other DNA
tacagtatgaattctggttctcagaaaaacgcatcacggacacggcacaggtggaaacctctgcccgttatctgg

SEQ ID NO: 291806 - DNA, 75 bp, synthetic construct
  source 1..75: mol_type = other DNA
tcgcaagttcaaaaaatataatgacatggcaagatgtaatggaaaaaacctcattaatctataaaaatatggtaa

SEQ ID NO: 291807 - DNA, 75 bp, synthetic construct
  source 1..75: mol_type = other DNA
agctgttgtttactcgtcacgcgacaggcaagcctgttcaaaaaacaggcttgccgtacaataattctctatatc

SEQ ID NO: 291808 - DNA, 75 bp, synthetic construct
  source 1..75: mol_type = other DNA
ggaaaaaataggaaaactgcatctggctcgtaagcgtgcagcaagaaccgtattgacggggatgtgttattcagt

SEQ ID NO: 291809 - DNA, 75 bp, synthetic construct
  source 1..75: mol_type = other DNA
gtaattatcatctgcgcggacgcattctgcaggtgccgtcgaattacgacccggaaaaacgcacatacagcggta

SEQ ID NO: 291810 - DNA, 75 bp, synthetic construct
  source 1..75: mol_type = other DNA
aagagatgttggtgctaaatttacaatggcacctgaaatgagaaggacagcatccactgcagatggaaatattgc

SEQ ID NO: 291811 - DNA, 75 bp, synthetic construct
  source 1..75: mol_type = other DNA
gtatgcgatggcgggtgtagcttacagccgtgtgtcgactttctccggggattatcttcgcgtaactgacaacaa

SEQ ID NO: 291812 - DNA, 75 bp, synthetic construct
  source 1..75: mol_type = other DNA
gctgtatatgacccgacggtgcagtttgagttctggttctcggaaaagcggattatcgatatcaggcaggttgaa

SEQ ID NO: 291813 - DNA, 75 bp, synthetic construct
  source 1..75: mol_type = other DNA
aatgcggatatcagtggcagtgtgaatgcgaactcagggacgctcaacaacgtcacgattaatgagaactgtcag

SEQ ID NO: 291814 - DNA, 75 bp, synthetic construct
  source 1..75: mol_type = other DNA
gcgtggctggtaaatgactggtatcccacagccagtatcagcgatttgctggttgtggtgatgaagaaatccaca

SEQ ID NO: 291815 - DNA, 75 bp, synthetic construct
  source 1..75: mol_type = other DNA
aaatcccagaccgtgatttcaaaccccagcgcatcgaaagcggtgttatttgggagtatttgatagaaggagcgc

SEQ ID NO: 291816 - DNA, 75 bp, synthetic construct
  source 1..75: mol_type = other DNA
aatatcaggtgctggcgcgctgggacacgccgaaggtggtgaagggggtgagttttatgcttcgcctgaccgtgg

SEQ ID NO: 291817 - DNA, 75 bp, synthetic construct
  source 1..75: mol_type = other DNA
ttccagaaaggcaatcagggggcaggcaatatcaccgactgtacggtgattgtgaccaaaaaagcggcttccggc

SEQ ID NO: 291818 - DNA, 75 bp, synthetic construct
  source 1..75: mol_type = other DNA
cacggtggaggtgagtgcctcagacggccagtatctggcgctggcgaaatgggacacgccgcgggtggtgaaggg

SEQ ID NO: 291819 - DNA, 75 bp, synthetic construct
  source 1..75: mol_type = other DNA
cacatcaggccggggaaggatttctggttttatgtgcgcagcgtcaatctggtggggaaatctgcgtttgtggaa

SEQ ID NO: 291820 - DNA, 75 bp, synthetic construct
  source 1..75: mol_type = other DNA
tttgtggaggctgttggccagccgagtgatgatgcatccggctatctgaattttttcaaaggagagatagggaaa

SEQ ID NO: 291821 - DNA, 75 bp, synthetic construct
  source 1..75: mol_type = other DNA
ccagattgaaggcgatattgtcaaaacagtgggtaaggctttcccgcgggactcccgggcaccggagcggtggcc

SEQ ID NO: 291822 - DNA, 75 bp, synthetic construct
  source 1..75: mol_type = other DNA
ggcccaccgtgccggactgtgggtgataaagaccgaactgctggaaacacagacggtggatttcacactcgggtc

SEQ ID NO: 291823 - DNA, 75 bp, synthetic construct
  source 1..75: mol_type = other DNA
tggccatcgcgcaggtgagtcagcaggtggaccgggtgagcagtgaaatcacacagaccgtcagccagagcacgg

SEQ ID NO: 291824 - DNA, 75 bp, synthetic construct
  source 1..75: mol_type = other DNA
gccagcgggcaggccagcaatgatggtgaagggtatctggaaattttccgtgggctgatagacgaggcgctgctg

SEQ ID NO: 291825 - DNA, 75 bp, synthetic construct
  source 1..75: mol_type = other DNA
cacgccgaaggtggtgaagggcgtgagcttcctgcttcgtctgaccgtgacagcagaagacggcagtgagcggct

SEQ ID NO: 291826 - DNA, 75 bp, synthetic construct
  source 1..75: mol_type = other DNA
gcaaaccaatggtcaggtttctggcgtgcaaattgatgtgccaattgaattaaaagattgtgatactaccgtaac

SEQ ID NO: 291827 - DNA, 75 bp, synthetic construct
  source 1..75: mol_type = other DNA
agccatattgaaggcgatattgtcaaaacggtgggtaaggctttcccgcgaaatggaagttatgccagtggcacg

SEQ ID NO: 291828 - DNA, 75 bp, synthetic construct
  source 1..75: mol_type = other DNA
ccaccattaccagtggtggcaatcctccggcattttccctgacaccggacgggcgactgacggcgagaaatgcgg

SEQ ID NO: 291829 - DNA, 75 bp, synthetic construct
  source 1..75: mol_type = other DNA
accggccggatcagaaggacaatcgctggcgcctggtactgacccgtgatgacctcaatccggataagccccgca

SEQ ID NO: 291830 - DNA, 75 bp, synthetic construct
  source 1..75: mol_type = other DNA
ggaggtcacgcaactggaagaagacatccgtcagcggatggacacggatatcgcagaagtgacccggaaaatcgg

SEQ ID NO: 291831 - DNA, 75 bp, synthetic construct
  source 1..75: mol_type = other DNA
taaaaagctgggtgaccaggccgtgaccatacagcaaatccagcgggttcagtcagacacgcgcaatgagctgaa

SEQ ID NO: 291832 - DNA, 75 bp, synthetic construct
  source 1..75: mol_type = other DNA
gaactacaggctgacagtccgggcggtaaatgcgtggggacagcagggcgatcctgccaccaccaccttccggat

SEQ ID NO: 291833 - DNA, 75 bp, synthetic construct
  source 1..75: mol_type = other DNA
ccggtgctggacagtgaggggaataccaatatatccggcgtcacggtggtgttccgggcaggtgagcaggagcag

SEQ ID NO: 291834 - DNA, 75 bp, synthetic construct
  source 1..75: mol_type = other DNA
gaccacggataaaaaactgggtgaccaggccgtgaccatacagcaaatccagcgggttcagtcagacacgcgcga

SEQ ID NO: 291835 - DNA, 75 bp, synthetic construct
  source 1..75: mol_type = other DNA
cgtcagtacgtggacaaaaagcaaagtgaaatcaagcagacagtcagccagggccagtcagaaaacgcccggcag

SEQ ID NO: 291836 - DNA, 75 bp, synthetic construct
  source 1..75: mol_type = other DNA
caatgatggtgaagggtatctggggctgtttcgggaaaaaataggaaaactgcatctggctcaggggctgtggga

SEQ ID NO: 291837 - DNA, 75 bp, synthetic construct
  source 1..75: mol_type = other DNA
ggtcatgataccgccagtgttattccgcggtggtaagcatgagaatttcaacagtaataaccaacagtcatactg

SEQ ID NO: 291838 - DNA, 75 bp, synthetic construct
  source 1..75: mol_type = other DNA
gcgagcgatgatgcggaaggttacctggattttttcaaaggagaaatcgggaaaacacatctggcccaggagctg

SEQ ID NO: 291839 - DNA, 75 bp, synthetic construct
  source 1..75: mol_type = other DNA
ccaggggcagtcagaaaacgcccgacagatagcacaggtccgccagtacgtggataaaaaagggagtgaaattac

SEQ ID NO: 291840 - DNA, 75 bp, synthetic construct
  source 1..75: mol_type = other DNA
cagataacggcggtcccgcgtcttgcggtgtatgacccgacggtacagtttgagttctggttttcggagacaaaa

SEQ ID NO: 291841 - DNA, 75 bp, synthetic construct
  source 1..75: mol_type = other DNA
ctgcctgatggtgtggagacatacggtgtgtggggactctccctgccgtcactgcgtcgtcgcctgttccgctgt

SEQ ID NO: 291842 - DNA, 75 bp, synthetic construct
  source 1..75: mol_type = other DNA
tgtgaatgcgaattctgggacgctcaacaacgtcacgattaatgagaactgtcagattaaggggaaactgtcagc

SEQ ID NO: 291843 - DNA, 75 bp, synthetic construct
  source 1..75: mol_type = other DNA
ctacggcatgggaaaacgcctgggggccgcggatgttgacaagtgggcgctgtatgccatcgggcagtactgcga

SEQ ID NO: 291844 - DNA, 75 bp, synthetic construct
  source 1..75: mol_type = other DNA
tccggcagtgcagcacctgacggtggaggtgagtgcagctgacggccagtatctggcgcaggcgaaatgggacac

SEQ ID NO: 291845 - DNA, 75 bp, synthetic construct
  source 1..75: mol_type = other DNA
ctaaatgggacacgccgcgggtggtgaagggcgtgcgcttcagtctgcgcctgaccagtggtaagggaacggatg

SEQ ID NO: 291846 - DNA, 75 bp, synthetic construct
  source 1..75: mol_type = other DNA
tatcggcatggctggtaaatggcgggtatcccacagcaagtatcagcgatttgctggttgtggtgatgaagaagc

SEQ ID NO: 291847 - DNA, 75 bp, synthetic construct
  source 1..75: mol_type = other DNA
cagacgctgagcagtattctgctgcaggctgaccgtatcgcgatgattaccccggagaatggcaacaccacgccg

SEQ ID NO: 291848 - DNA, 75 bp, synthetic construct
  source 1..75: mol_type = other DNA
cagataacggcggtcccgcgtcttgcggtgtatgacccgacggtacagtttgaattctggttttcggaggcaaaa

SEQ ID NO: 291849 - DNA, 75 bp, synthetic construct
  source 1..75: mol_type = other DNA
gccgccagccgcaccctgacgctggaccgtgaggtgaccctgccggaaacaggtaccgccactgttaatctgatt

SEQ ID NO: 291850 - DNA, 75 bp, synthetic construct
  source 1..75: mol_type = other DNA
ccagagcgccaccatacagcagatacagcgcgtgcagacggacacaaatgatgacctggctgcactctacatgct

SEQ ID NO: 291851 - DNA, 75 bp, synthetic construct
  source 1..75: mol_type = other DNA
ctggctcaggggctgtgggaactgatagataacagccagcttgcagatgagatggcggagatgaagaccagcatc

SEQ ID NO: 291852 - DNA, 75 bp, synthetic construct
  source 1..75: mol_type = other DNA
ccgggaaaaaataggaaaactgcatctggctcaggggctgtgggaactgatagataacagccagcttgcagatga

SEQ ID NO: 291853 - DNA, 75 bp, synthetic construct
  source 1..75: mol_type = other DNA
agggcgatcagatattcatgaacgaagtgttcctgaaatatctgacggctcccaccattaccagcggtggcaatc

SEQ ID NO: 291854 - DNA, 75 bp, synthetic construct
  source 1..75: mol_type = other DNA
atccgcagtgtgaacaccgttggcaaatcggcatttgtggaggctgttggccagccgagtgatgatgcatccggc

SEQ ID NO: 291855 - DNA, 75 bp, synthetic construct
  source 1..75: mol_type = other DNA
ggacggcgctggctgagtctcaggtgtattcaggggtgattgatatgcctgcaggaagggggcatatgacgctgg

SEQ ID NO: 291856 - DNA, 75 bp, synthetic construct
  source 1..75: mol_type = other DNA
atcagcggtaacgtgaatgcgaactccgggacgctcaacaacgtcacgattaacgagaactgccgggttctggga

SEQ ID NO: 291857 - DNA, 75 bp, synthetic construct
  source 1..75: mol_type = other DNA
tttccagaaaggcaatcagggggcaggcaatatcaccgactgtacggtgattgtgaccaaaaaagctgcttccgg

SEQ ID NO: 291858 - DNA, 75 bp, synthetic construct
  source 1..75: mol_type = other DNA
ggactcccggggcaccggagcggtggccatcagggaccattaccgtcagggtttatgacgatcagccttttgaca

SEQ ID NO: 291859 - DNA, 75 bp, synthetic construct
  source 1..75: mol_type = other DNA
cgggacgctcaacaacgtcacgattaacgagaactgtcgggttctgggaaaactgtccgcgaaccagattgaagg

SEQ ID NO: 291860 - DNA, 75 bp, synthetic construct
  source 1..75: mol_type = other DNA
gcaggggaagcgtcactctggagtttaagattttccagaaaggcaatcagggggcaggcaatatcaccgactgta

SEQ ID NO: 291861 - DNA, 75 bp, synthetic construct
  source 1..75: mol_type = other DNA
cggcaaattgttattccggctgtggcattcagtggcgctaagcatgagagagagcatactgatatttactcctca

SEQ ID NO: 291862 - DNA, 75 bp, synthetic construct
  source 1..75: mol_type = other DNA
aacgtcacgattaatgagaactgtcagattaaggggaaactgtcagccaaccagattgaaggtgatattgtcaaa

SEQ ID NO: 291863 - DNA, 75 bp, synthetic construct
  source 1..75: mol_type = other DNA
ggggactatccctgccgtcactgcgccgtcgcctgttccgctgtgtctccgtccgggaaaacacggacggcacct

SEQ ID NO: 291864 - DNA, 75 bp, synthetic construct
  source 1..75: mol_type = other DNA
ggtatcccacagcaagtatcagcgatctgctggttgtggtgatgaaaaaatccacagcaggcatcagtatcagct

SEQ ID NO: 291865 - DNA, 75 bp, synthetic construct
  source 1..75: mol_type = other DNA
agattgaaggcgatctcgttaaaacagtgggcaaagctttcccccgtgactcccgtgcaccggaacggtggccat

SEQ ID NO: 291866 - DNA, 75 bp, synthetic construct
  source 1..75: mol_type = other DNA
ggttatgattattacttttatatccgcagcgtgaacaccgttggtaaatcggcatttgtggaggccgttggtcgg

SEQ ID NO: 291867 - DNA, 75 bp, synthetic construct
  source 1..75: mol_type = other DNA
ccaaacgggacggttacagtcaccatcagcgatgatcataactttgaccgtcaaatcattattccgcccattatc

SEQ ID NO: 291868 - DNA, 75 bp, synthetic construct
  source 1..75: mol_type = other DNA
ttgaccgtctgcgttttactttcggcgtgcagacactggtggaaaccacctcaaagggggacaggaatccgtcgg

SEQ ID NO: 291869 - DNA, 75 bp, synthetic construct
  source 1..75: mol_type = other DNA
atgccgatatcagcggtaacgtgaatgcgaactccgggacgctcaacaacgtcacgattaacgagaactgtcggg

SEQ ID NO: 291870 - DNA, 75 bp, synthetic construct
  source 1..75: mol_type = other DNA
gccatgattattatttttatatccgcagtgtgaatactgttggcaaatcggcattcgtggaggctgtcggtcggg

SEQ ID NO: 291871 - DNA, 75 bp, synthetic construct
  source 1..75: mol_type = other DNA
caatgaaatcacgcagacggtcagtaaaacgctggaggaccagaacgccaccatacagcaaatccagcgtgtgca

SEQ ID NO: 291872 - DNA, 75 bp, synthetic construct
  source 1..75: mol_type = other DNA
aggacgctaacgataagtggaatgccatgtggggcgtcaaaattgagcagaccaaagacggcaaacattatgtcg

SEQ ID NO: 291873 - DNA, 75 bp, synthetic construct
  source 1..75: mol_type = other DNA
cgaacggctctggataatactctgatttacacgggtgttattgatatgcctgcaggcagtggcgtaatgacactg

SEQ ID NO: 291874 - DNA, 75 bp, synthetic construct
  source 1..75: mol_type = other DNA
attaatcgcatccagagaaactaaaggggccattcccggtagctacagtgcggttattgatatgccgagtggcag

SEQ ID NO: 291875 - DNA, 75 bp, synthetic construct
  source 1..75: mol_type = other DNA
aaagacatcaccattaaaggcaaaaccacctcacagtatctggcctcggtggtggtgggtaacctgccgccgcgc

SEQ ID NO: 291876 - DNA, 75 bp, synthetic construct
  source 1..75: mol_type = other DNA
cgcctgatagtgaagaaaaacggtgctgaaatttataaccgtaccgcgctggataatacgctgatttacagtggt

SEQ ID NO: 291877 - DNA, 75 bp, synthetic construct
  source 1..75: mol_type = other DNA
ggtaaggctttcccgcgaaatggaagttatgccagtggcacgataaccgtcacggtttatgatgatcagggattc

SEQ ID NO: 291878 - DNA, 75 bp, synthetic construct
  source 1..75: mol_type = other DNA
ccgtgccgggctgtgggtgataaagaccggactgctggaaacgcagacggtggatttcacgctcgggtcacaggg

SEQ ID NO: 291879 - DNA, 75 bp, synthetic construct
  source 1..75: mol_type = other DNA
ctaaaaatgcggatatcagtggcagtgtgaatgcgaactccgggacgctcaacaacgtcacgattaatgagaact

SEQ ID NO: 291880 - DNA, 75 bp, synthetic construct
  source 1..75: mol_type = other DNA
caaagccgatgtttgttgggcagggcgatcagatattcatgaacgaagtgttcctgaaatatctgacggctccca

SEQ ID NO: 291881 - DNA, 75 bp, synthetic construct
  source 1..75: mol_type = other DNA
cacccgcgctacggcatgggaaaacgtctgggggcggcggatgtggacaagtgggcgctgtatgccatcgggcag

SEQ ID NO: 291882 - DNA, 75 bp, synthetic construct
  source 1..75: mol_type = other DNA
caaaggagagatagggaaaacccatctggctcaggagttgtggactcagattgataacggtcagcttgcgcctga

SEQ ID NO: 291883 - DNA, 75 bp, synthetic construct
  source 1..75: mol_type = other DNA
aaggatgtcaccattaacggcaagaccacctcacagttcctggcctcggtgattctggataatctgcctccccgg

SEQ ID NO: 291884 - DNA, 75 bp, synthetic construct
  source 1..75: mol_type = other DNA
tgagctgacaccgggctattttcagataacagcggtcccgcgtcttgcggtgtatgacccgacggtacagtttga

SEQ ID NO: 291885 - DNA, 75 bp, synthetic construct
  source 1..75: mol_type = other DNA
gagttctggttctcggaaaaacggattgctggtatcaggcaggttgaaaccacagcgcgctatcttggcacggcg

SEQ ID NO: 291886 - DNA, 75 bp, synthetic construct
  source 1..75: mol_type = other DNA
cgtccataacggatgtcagcaatgaaataacacagaccgtcaataagaaactggaagaccagagtgcagcgatcc

SEQ ID NO: 291887 - DNA, 75 bp, synthetic construct
  source 1..75: mol_type = other DNA
tggcgcaggggaatcagctgttcatgaacgacgtgttcctgaaacgactgtttgcggtgagtatcacgtcatccg

SEQ ID NO: 291888 - DNA, 75 bp, synthetic construct
  source 1..75: mol_type = other DNA
tgaccttgctgcactttacatgctgaaggtacagaaaacaaaaaatggcataccctatgttgccggtattggagc

SEQ ID NO: 291889 - DNA, 75 bp, synthetic construct
  source 1..75: mol_type = other DNA
ggcagcggtaagccggtgagcgtggccatcactgcacaccccgcgccggaccggatacaggtcagtaccctgccg

SEQ ID NO: 291890 - DNA, 75 bp, synthetic construct
  source 1..75: mol_type = other DNA
caccgtttcagcggcctgcctctcggggaatacaccctgacggtgcgggcgataaacagctatggccagcagggt

SEQ ID NO: 291891 - DNA, 75 bp, synthetic construct
  source 1..75: mol_type = other DNA
ggtatcccacagcaagtatcagcgatttgctggttgtggtgatgaagaaatccacagcaggtatcagtatcagct

SEQ ID NO: 291892 - DNA, 75 bp, synthetic construct
  source 1..75: mol_type = other DNA
aacaacgtcacgataaatgagaactgtcagattaaggggaaactgtcagccaaccagattgaaggcgatattgtc

SEQ ID NO: 291893 - DNA, 75 bp, synthetic construct
  source 1..75: mol_type = other DNA
gccggagaaggaggccatcgtggataatggtgccacctttgagccgttgcccggttcgctgaacagtatcacacc

SEQ ID NO: 291894 - DNA, 75 bp, synthetic construct
  source 1..75: mol_type = other DNA
gaggcacgcgatacacggggtatggttttgaagttcgcaaaaacggcgtattaatcgcatccagagaaactaaag

SEQ ID NO: 291895 - DNA, 75 bp, synthetic construct
  source 1..75: mol_type = other DNA
gaaaacacggacggcacctttgccatcacggcggtgcagcacgtgccggaaaaagaagccatcgtggataacggg

SEQ ID NO: 291896 - DNA, 75 bp, synthetic construct
  source 1..75: mol_type = other DNA
cgacggtacagtttgagttctggttctcggaaaagcggattaccgatatcaggcaggttgaaaccacagcccgct

SEQ ID NO: 291897 - DNA, 75 bp, synthetic construct
  source 1..75: mol_type = other DNA
gatgtttgttggtcagggcgatcagatattcatgaatgaagtgttcctgaaacgcttgacggcccccaccattac

SEQ ID NO: 291898 - DNA, 75 bp, synthetic construct
  source 1..75: mol_type = other DNA
cattcaggtgccgtcaaactatgacccggaaaaacgcacctacagcggtatctgggacggtagtctgaaaccggc

SEQ ID NO: 291899 - DNA, 75 bp, synthetic construct
  source 1..75: mol_type = other DNA
gagaattgctgatacgggtttttcaggtcgttttgacagaaatggcaatgctgttaacacgtacaccaacctcgg

SEQ ID NO: 291900 - DNA, 75 bp, synthetic construct
  source 1..75: mol_type = other DNA
tgtggcgcaggggaatcagttgttcctgaatgatgttctgatgaaatcgctgattgttgattttgccagtattac

SEQ ID NO: 291901 - DNA, 75 bp, synthetic construct
  source 1..75: mol_type = other DNA
ctcccgcgcaccggagcggtggccatcggggaccattaccgtcaggatttatgacgatcagccttttgaccggca

SEQ ID NO: 291902 - DNA, 75 bp, synthetic construct
  source 1..75: mol_type = other DNA
actcccgggcaccggagcggtggccatcagggaccgttaccgtcaggatttatgacgatcagccttttgaccggc

SEQ ID NO: 291903 - DNA, 75 bp, synthetic construct
  source 1..75: mol_type = other DNA
accaaacgggacggttacagtcaccatcagcgatgatcataactttgaccgtcaaatcattattccgcccattat

SEQ ID NO: 291904 - DNA, 75 bp, synthetic construct
  source 1..75: mol_type = other DNA
gggaaactgtcagccaaccagattgaaggtgatattgtcaaaacggtcagcaagtctttcccccgcacgaacagt

SEQ ID NO: 291905 - DNA, 75 bp, synthetic construct
  source 1..75: mol_type = other DNA
ggcggagggactgcgtcacacgcctggcgatatcattgaaatcagtgataatgcgtatgccggtactgtgatcgg

SEQ ID NO: 291906 - DNA, 75 bp, synthetic construct
  source 1..75: mol_type = other DNA
ggaggtgacaaaggcaaaaccggtgacacgcactatcacgtcagcgaacattgaccgtctgcgtgtcaccttcgg

SEQ ID NO: 291907 - DNA, 75 bp, synthetic construct
  source 1..75: mol_type = other DNA
gtgagcatcacgtcatccggcaatcctcctacgttttccctgacgccggatggcaggctgacagcccgcaatgcg

SEQ ID NO: 291908 - DNA, 75 bp, synthetic construct
  source 1..75: mol_type = other DNA
gtggtggataacctgccgccgcgcccgtttaatactccggatgcgcagaatgacgccggacagcaccacagacca

SEQ ID NO: 291909 - DNA, 75 bp, synthetic construct
  source 1..75: mol_type = other DNA
gtcacagattgagctgacaccgggctattttcagataacggcggtcccgaaactggctgtatatgacccgacggt

SEQ ID NO: 291910 - DNA, 75 bp, synthetic construct
  source 1..75: mol_type = other DNA
gcatggctggtaaataacaggtatcccacagcaagtatcagcgatctgctggttgtggtgatgaaaaaatccaca

SEQ ID NO: 291911 - DNA, 75 bp, synthetic construct
  source 1..75: mol_type = other DNA
ctggacgccgacaacgtacatcagtgatttactggttgtggtcatgaaaaaatccacggcagggatcagtatcag

SEQ ID NO: 291912 - DNA, 75 bp, synthetic construct
  source 1..75: mol_type = other DNA
cgcagaccgtggacttcagcgtgggtgccgaagggcttcgccatgtgccgggcgatgtcattgaaatctgtgatg

SEQ ID NO: 291913 - DNA, 75 bp, synthetic construct
  source 1..75: mol_type = other DNA
caggttccctgaacagcgtcatcccaccggcagtgcagcacctgacggtggaggtgagcgcagctgacggccagt

SEQ ID NO: 291914 - DNA, 75 bp, synthetic construct
  source 1..75: mol_type = other DNA
cagcgcgtgcagaaggacacaaatgatgacctggctgcgctgtacatgctgaaggttcaaaaaacgaaagacggc

SEQ ID NO: 291915 - DNA, 75 bp, synthetic construct
  source 1..75: mol_type = other DNA
ccagcaggaatgcagagtcaggtgctgctggcggcagacaggattgcgatgattaatcctgcgaatggcaacaca

SEQ ID NO: 291916 - DNA, 75 bp, synthetic construct
  source 1..75: mol_type = other DNA
tggctggtaaataactggtatcccacagcaagtatcagcgatttgctggttgtggtgatgaagaaagccactgca

SEQ ID NO: 291917 - DNA, 75 bp, synthetic construct
  source 1..75: mol_type = other DNA
aaggatgtcaccattaacggtaagaccacctcgcagtacctgacgtcggtgattctgaataatctgcctgagcgc

SEQ ID NO: 291918 - DNA, 75 bp, synthetic construct
  source 1..75: mol_type = other DNA
ttgaccgcctgagggtcaccttcggggtacagtcactggtggagaccacctccaggggcgaccgtaatccggctt

SEQ ID NO: 291919 - DNA, 75 bp, synthetic construct
  source 1..75: mol_type = other DNA
aatcgcatccagagaaactaaaggggccattcccggtagttacagtgcagttattgatatgcctagtggtggtgg

SEQ ID NO: 291920 - DNA, 75 bp, synthetic construct
  source 1..75: mol_type = other DNA
atcagacggaaagctgaccgctaaaaatgcggatatcagtggtagtgtgaatgcgaactcaggaacgctcaacaa

SEQ ID NO: 291921 - DNA, 75 bp, synthetic construct
  source 1..75: mol_type = other DNA
ggaacggccagacgctgacgttcgttcaggaccgcccgtcggatgtggtgtggccgtacaccaacagcgatgtgg

SEQ ID NO: 291922 - DNA, 75 bp, synthetic construct
  source 1..75: mol_type = other DNA
ggcgaaccggccaccaccaccttccggattaacgcgccagcaaaacccgccaccattgaactgacgccggggtat

SEQ ID NO: 291923 - DNA, 75 bp, synthetic construct
  source 1..75: mol_type = other DNA
ccatgtggggcgtcaaaattgagcagaccgaagacggcaggcattatgtcgcggggcttggccttagtatggagg

SEQ ID NO: 291924 - DNA, 75 bp, synthetic construct
  source 1..75: mol_type = other DNA
cagtgtgaatgcgaactccgggacgctcaacaacgttacgataaatgagaactgtcagattaaagggaaactgtc

SEQ ID NO: 291925 - DNA, 75 bp, synthetic construct
  source 1..75: mol_type = other DNA
atccgggaaaacacggacggcacctttgccatcacggcagtgcagcatgtgccggagaaagaagccatcgtggat

SEQ ID NO: 291926 - DNA, 75 bp, synthetic construct
  source 1..75: mol_type = other DNA
gataatacgctgatttacagtggcgttattgatatgcctgccggtcacggtcacatgacgctggagttttcggta

SEQ ID NO: 291927 - DNA, 75 bp, synthetic construct
  source 1..75: mol_type = other DNA
ggctgacggcccgcaatgcggacatcagcggacatatcagtgcgaactcgggcacgctgaataatgtcgtgatag

SEQ ID NO: 291928 - DNA, 75 bp, synthetic construct
  source 1..75: mol_type = other DNA
gtgcagcacctcacggtggaggtgagtgcctcagacggccagtatctggcgctggcgaaatgggacacgccgcgg

SEQ ID NO: 291929 - DNA, 75 bp, synthetic construct
  source 1..75: mol_type = other DNA
ccgtacaccaacagcgatgtggtggtggatgataacggcgtggggttccgctacagcttcagtgccctgaaggac

SEQ ID NO: 291930 - DNA, 75 bp, synthetic construct
  source 1..75: mol_type = other DNA
ggagcggtggccatcagggaccattaccgtcagggtttatgacgatcagccgtttgaccggcaaattgttattcc

SEQ ID NO: 291931 - DNA, 75 bp, synthetic construct
  source 1..75: mol_type = other DNA
ctgaccgcagaagtcaccgcagacagcggggaataccaggtgctggcccgctgggatacgccgaaggtggtgaag

SEQ ID NO: 291932 - DNA, 75 bp, synthetic construct
  source 1..75: mol_type = other DNA
taccgccacggtgaacctgattaacggcagcggtaagccggtgagtgtggacatcacggcacaaccggcccctgc

SEQ ID NO: 291933 - DNA, 75 bp, synthetic construct
  source 1..75: mol_type = other DNA
tggagtttaagattttccagaaaggcaatcagggcgcaggtaacatcacagactgtacggtgattgtgaccaaaa

SEQ ID NO: 291934 - DNA, 75 bp, synthetic construct
  source 1..75: mol_type = other DNA
gaaccagattgaaggcgatctcgttaaaacagtgggcaaagctttcccccgggactcccgtgcaccggagcggtg

SEQ ID NO: 291935 - DNA, 75 bp, synthetic construct
  source 1..75: mol_type = other DNA
atctggcgcaggcgaaatgggacacgccgaaggtggtgaagggcgtgagcttcctgcttcgcctgaccgtgacag

SEQ ID NO: 291936 - DNA, 75 bp, synthetic construct
  source 1..75: mol_type = other DNA
gagcggggattgaggatactgatggccagcccctgagcaacatactgctgctggctgaccgtattgcgatgatta

SEQ ID NO: 291937 - DNA, 75 bp, synthetic construct
  source 1..75: mol_type = other DNA
caccgtttcagcggtctgccgccgggggaatacaccctgacggtcagggcgattaacagttatggccagcagggg

SEQ ID NO: 291938 - DNA, 75 bp, synthetic construct
  source 1..75: mol_type = other DNA
gcgtaacggtaactgggtgacggaaaaggatgtcaccattaacggcaagaccacctcacagttcctcgcttcggt

SEQ ID NO: 291939 - DNA, 75 bp, synthetic construct
  source 1..75: mol_type = other DNA
gaaaacaaaaaacggtattccctatgtggccgggattggtgcggggattgaggatgttgatggtcagacgctgag

SEQ ID NO: 291940 - DNA, 75 bp, synthetic construct
  source 1..75: mol_type = other DNA
gaaaaacggtgctgaaatttataaccgtaccgcgttggataatacgctggtttacagtggtgttattgatatgcc

SEQ ID NO: 291941 - DNA, 75 bp, synthetic construct
  source 1..75: mol_type = other DNA
ggtaaggctttcccccgtgactcccgtgcaccgcagcgttggccatcaggaaccattaccgtcagggtttatgac

SEQ ID NO: 291942 - DNA, 75 bp, synthetic construct
  source 1..75: mol_type = other DNA
ccgtcaataaaaaactggaagaccagagtgcagcgatccagcagatacagaaggttcaggttgatacaaataata

SEQ ID NO: 291943 - DNA, 75 bp, synthetic construct
  source 1..75: mol_type = other DNA
gggcaatcctgccagtggtcgggccgtattttctcaggaacaggacggcattaaatcgcaaacccacagcgccag

SEQ ID NO: 291944 - DNA, 75 bp, synthetic construct
  source 1..75: mol_type = other DNA
ttaacgcaccggcagcgcctgccggtgttgaactgacgccggggtattttcagataacggcagtcccgaaactga

SEQ ID NO: 291945 - DNA, 75 bp, synthetic construct
  source 1..75: mol_type = other DNA
gtttgagttctggttttcggaggcaaaaattgcagacgccgcacaggtggaaacctctgcccgttatctggggac

SEQ ID NO: 291946 - DNA, 75 bp, synthetic construct
  source 1..75: mol_type = other DNA
ctcaacaacgtcacgattaatgaaaactgtcgggttctgggaaaactgtctgcgaaccagattgaaggcgatctc

SEQ ID NO: 291947 - DNA, 75 bp, synthetic construct
  source 1..75: mol_type = other DNA
gaaggcggaaaacagcctcacgcagctggttgcgaaaaagaatgaggatcagacactggccatcgcgcaggtgag

SEQ ID NO: 291948 - DNA, 75 bp, synthetic construct
  source 1..75: mol_type = other DNA
atcacgcagaccgtcaataaaaaactggaagaccagagcgcggcaatccagcagatacagaaagttcaggttgat

SEQ ID NO: 291949 - DNA, 75 bp, synthetic construct
  source 1..75: mol_type = other DNA
acccgcaccatcacgtcggcaaacatcgatcgtctgcgctttactttcggtgtgcaggcactgcgggaaaccacc

SEQ ID NO: 291950 - DNA, 75 bp, synthetic construct
  source 1..75: mol_type = other DNA
gggcaaacctgccagtggtcgggccgtattgtctcaggaacaggacggcattaaatcgcaaacccacagcgccag

SEQ ID NO: 291951 - DNA, 75 bp, synthetic construct
  source 1..75: mol_type = other DNA
ctgattaaaactgaactgctggagacgcagaccgtggatttcagcgtgggggcggaagggcttcgccatgtaccg

SEQ ID NO: 291952 - DNA, 75 bp, synthetic construct
  source 1..75: mol_type = other DNA
ctgattaaaactgaactgctggagacgcagaccgtggatttcagcgtcggggccgaagggcttcgccatgtaccg

SEQ ID NO: 291953 - DNA, 75 bp, synthetic construct
  source 1..75: mol_type = other DNA
taccacgctgataagcctggttgacggccagggaactccggtcagcgtggaggtacagtccgtcaccgacggcgt

SEQ ID NO: 291954 - DNA, 75 bp, synthetic construct
  source 1..75: mol_type = other DNA
taccacgctgataagcctggttgacggtcagggcattccggtcagcgtggaggtacagtccgtcaccgacggcgt

SEQ ID NO: 291955 - DNA, 75 bp, synthetic construct
  source 1..75: mol_type = other DNA
taccacgctgataagcctggttgacggacagggcagtccggtcagcgtggaggtacagtccgtcaccgacggcgt

SEQ ID NO: 291956 - DNA, 75 bp, synthetic construct
  source 1..75: mol_type = other DNA
ctgattaaaactgaactgctggagacgcagaccgtggatttcagcgttggtgcggaagggcttcgccatgtaccg

SEQ ID NO: 291957 - DNA, 75 bp, synthetic construct
  source 1..75: mol_type = other DNA
ctgattaaaactgaactgctggagacgcagaccgtggatttcagcgtaggggcagaagggcttcgccatgtaccg

SEQ ID NO: 291958 - DNA, 75 bp, synthetic construct
  source 1..75: mol_type = other DNA
ctgattaaaactgaactgctggagacgcagaccgtggatttcagcgtaggagcggaagggcttcgccatgtaccg

SEQ ID NO: 291959 - DNA, 75 bp, synthetic construct
  source 1..75: mol_type = other DNA
taccacgctgataagcctggttgacgggcagggcaatccggtcagcgtggaggtacagtccgtcaccgacggcgt

SEQ ID NO: 291960 - DNA, 75 bp, synthetic construct
  source 1..75: mol_type = other DNA
cagtcagtggagtgtctccggcccgcacattaagcccggaaaggatttctggttttatgtgcgcagcgtcaacct

SEQ ID NO: 291961 - DNA, 75 bp, synthetic construct
  source 1..75: mol_type = other DNA
ccctttaacatccggatggtcagggagacggcggacagcaccacggaccagttgcagaacagaacgctctggtca

SEQ ID NO: 291962 - DNA, 75 bp, synthetic construct
  source 1..75: mol_type = other DNA
acagtgggcaaagctttcccccgggactcccgtgcaccggagcggtggccatcagggaccattaccgtcagggtt

SEQ ID NO: 291963 - DNA, 75 bp, synthetic construct
  source 1..75: mol_type = other DNA
agggacagagccgcggatgacctttaatgcgtacctgtcacaacagcgtaaggcgtgggacgttctcagtgattt

SEQ ID NO: 291964 - DNA, 75 bp, synthetic construct
  source 1..75: mol_type = other DNA
cacgccgcgggtggtgaagggggtgcgcttcagtctgcgcctgaccagcggaagcggagaagacagccgtctggt

SEQ ID NO: 291965 - DNA, 75 bp, synthetic construct
  source 1..75: mol_type = other DNA
atttaatttattgacataccatccagatggtagagtagagcctaagcaggggctgtctgccggactaactgcgca

SEQ ID NO: 291966 - DNA, 75 bp, synthetic construct
  source 1..75: mol_type = other DNA
acacgcaccattacgtcagcgaacattgaccgcctgcgggtgaccttcggggtgcagtcactggtggagaccacc

SEQ ID NO: 291967 - DNA, 75 bp, synthetic construct
  source 1..75: mol_type = other DNA
acaaagccgatgtttgttggtcagggcgagcagatattcatgaatgaagtgttcctgaaacgcctgacggccccc

SEQ ID NO: 291968 - DNA, 75 bp, synthetic construct
  source 1..75: mol_type = other DNA
tcaccgccggagggatttgaatcatcaggttctgagacggtactgggtacggaagtgaaatacgacacgccgatc

SEQ ID NO: 291969 - DNA, 75 bp, synthetic construct
  source 1..75: mol_type = other DNA
gtgcagcacctgaccgcagaagtcaccgcagacagcggggaataccaggtgctggcccgctgggacacgccgaag

SEQ ID NO: 291970 - DNA, 75 bp, synthetic construct
  source 1..75: mol_type = other DNA
aggagctgtggacgcagattgataacggtcagcttgcgcctgacctgactgaaatcaggacgtccataacggatg

SEQ ID NO: 291971 - DNA, 75 bp, synthetic construct
  source 1..75: mol_type = other DNA
cagtccgactgctgattcagttacagcgtaacggtaactgggtgacggaaaaggatgtcaccattaacggcaaga

SEQ ID NO: 291972 - DNA, 75 bp, synthetic construct
  source 1..75: mol_type = other DNA
ttattccgcccattatctttaacggaatagcgtatagcgatccgggaagtggtaataacccgggaggtacaagat

SEQ ID NO: 291973 - DNA, 75 bp, synthetic construct
  source 1..75: mol_type = other DNA
agccagcttgcggatgagatggcggagatgaagaccaccatcaccgaaacccgcaatgaaatcacacagacggtc

SEQ ID NO: 291974 - DNA, 75 bp, synthetic construct
  source 1..75: mol_type = other DNA
ctgacggctcccaccattaccagcggcggtaatcctccggcattttccctgacaccggacgggcggctgacggcg

SEQ ID NO: 291975 - DNA, 75 bp, synthetic construct
  source 1..75: mol_type = other DNA
gcaatgaaatcacacagacggtcagtaaaacactggagaaccagagcgccaccattcagcagatacagcgcgtgc

SEQ ID NO: 291976 - DNA, 75 bp, synthetic construct
  source 1..75: mol_type = other DNA
caacagtcatactggtattcaacctgccggttaagagtgacccgcaatggtcaggagatttttaatcagtccacg

SEQ ID NO: 291977 - DNA, 75 bp, synthetic construct
  source 1..75: mol_type = other DNA
tccgacggtacagtttgagttctggttctcggaaacgcggattaccgatatcaggcaggttgaaaccacagcccg

SEQ ID NO: 291978 - DNA, 75 bp, synthetic construct
  source 1..75: mol_type = other DNA
catctgggatataaggtgtgttctgaaatggcgcacgaagcataccatacaggcaaatccctccatcagatagtg

SEQ ID NO: 291979 - DNA, 75 bp, synthetic construct
  source 1..75: mol_type = other DNA
ggtgataaagaccggactgctggaaacgcagacggtggatttctcgctcgggtccacagggactgcgtcacacac

SEQ ID NO: 291980 - DNA, 75 bp, synthetic construct
  source 1..75: mol_type = other DNA
gtcctcatctcaattgggcaatggtttatattaccaaccagtttatttaagccattgcttattggttttttgtgt

SEQ ID NO: 291981 - DNA, 75 bp, synthetic construct
  source 1..75: mol_type = other DNA
tgaccggcaggtcatgataccgccagtgttattccgcggtggtaagcatgagaatttcaacagtaataaccaaca

SEQ ID NO: 291982 - DNA, 75 bp, synthetic construct
  source 1..75: mol_type = other DNA
agatttttaatcagtccacgacggatgctcagggcgtattttcctcagttatagatatgcctgccggacagggga

SEQ ID NO: 291983 - DNA, 75 bp, synthetic construct
  source 1..75: mol_type = other DNA
tgtgaagctgcagcagatgcaggacggacgcctttatatcgcgggtattggtgccggtgttgagaatactccctg

SEQ ID NO: 291984 - DNA, 75 bp, synthetic construct
  source 1..75: mol_type = other DNA
agcacaggtccgccagtacgtggataaaaaagggagtgaaattacctcgaccacggataaaaagctgggtgacca

SEQ ID NO: 291985 - DNA, 75 bp, synthetic construct
  source 1..75: mol_type = other DNA
ccggtgcgaacaactggacgccgacaacgtacatcagtgatttactggttgtggtcatgaaaaaatccacggcag

SEQ ID NO: 291986 - DNA, 75 bp, synthetic construct
  source 1..75: mol_type = other DNA
cggtcccgcgtcttgcggtgtatgacccgacggtacagtttgagttctggttttcggaggcaaaaatcgcagaca

SEQ ID NO: 291987 - DNA, 75 bp, synthetic construct
  source 1..75: mol_type = other DNA
ggcgttattgatatgcctgccggtcacggtcacatgacactggagttttcggtgtcagcatggctggtaaataac

SEQ ID NO: 291988 - DNA, 75 bp, synthetic construct
  source 1..75: mol_type = other DNA
agagcgccaccatacagcagatacagcgcgtgcagaaggacacaaatgatgaccttgctgcactttacatgctga

SEQ ID NO: 291989 - DNA, 75 bp, synthetic construct
  source 1..75: mol_type = other DNA
aattttggtggtttatattcacatcatcaacaattacgagagaaaataacattaaaactcccgaataaaaaaata

SEQ ID NO: 291990 - DNA, 75 bp, synthetic construct
  source 1..75: mol_type = other DNA
tcgcctccatgcgtctgtttgcccgcttatccctggatagcgccctgccggagcgcaccaccatcatgaatttcc

SEQ ID NO: 291991 - DNA, 75 bp, synthetic construct
  source 1..75: mol_type = other DNA
tcgcctccatgcgactgtttgcccgcttatccctggatagcgccctgccggatcgcaccaccatcatgaatttcc

SEQ ID NO: 291992 - DNA, 75 bp, synthetic construct
  source 1..75: mol_type = other DNA
tggatgatgccgataccgtaacgcttaaggaagtgacagatgcgctgctgcattgtgcagaacagcttcgtatat

SEQ ID NO: 291993 - DNA, 75 bp, synthetic construct
  source 1..75: mol_type = other DNA
tgcgaatggcggcagaaaatgcaacccctggcgaatggtgttctgatgactactatggggtaattgctgattccg

SEQ ID NO: 291994 - DNA, 75 bp, synthetic construct
  source 1..75: mol_type = other DNA
gtgatgagcgtttcagtactactgaggttcagtatgattattattattcactggatgacaggactgttctggcct

SEQ ID NO: 291995 - DNA, 75 bp, synthetic construct
  source 1..75: mol_type = other DNA
taacctgacggcctctggcgaagcattcgatccgacacagttgacggcggcccatccaacgcttccgatccccag

SEQ ID NO: 291996 - DNA, 75 bp, synthetic construct
  source 1..75: mol_type = other DNA
cgctttcattcggcatcacagtgcagaactggatgcgcatattaaaaacggtggtgagcagttcgacgaaaaatc

SEQ ID NO: 291997 - DNA, 75 bp, synthetic construct
  source 1..75: mol_type = other DNA
tgcggggctgaataaatttatcgcacagagttgctacgtgtttgatggcgagcaggatgaactatctgatgcgta

SEQ ID NO: 291998 - DNA, 75 bp, synthetic construct
  source 1..75: mol_type = other DNA
agcggaggggaaagttttcacgcaggttcagtgggagcagaaattcgcccgtcacgtaaatcacgtcagggcgca

SEQ ID NO: 291999 - DNA, 75 bp, synthetic construct
  source 1..75: mol_type = other DNA
gttcagtgggagcagaaattcgcccgtcacgtaaatcacgtcagggcgcaggttaagccagtcagcaagggggta

SEQ ID NO: 292000 - DNA, 75 bp, synthetic construct
  source 1..75: mol_type = other DNA
atgagtcacgacgtgtcacgcatctgtcacgacaagtcacgacagataaagatacagataaagatacagatacag

SEQ ID NO: 292001 - DNA, 75 bp, synthetic construct
  source 1..75: mol_type = other DNA
gggcagccaattgcaacagtgatggcagtgtatatccaccttctggtgagcgcgtcacgaaatgtcacgacatgt

SEQ ID NO: 292002 - DNA, 75 bp, synthetic construct
  source 1..75: mol_type = other DNA
gagccggaatttacaccagctgaacttgccgccttccgggactactgggcagcggagggcaaagtgttcacgcag

SEQ ID NO: 292003 - DNA, 75 bp, synthetic construct
  source 1..75: mol_type = other DNA
gcgtcgttgcagacagccgaacctgaatacctggacggcctgagcgaaccgatcgggaaatttccgatgactgga

SEQ ID NO: 292004 - DNA, 75 bp, synthetic construct
  source 1..75: mol_type = other DNA
attgaccaaaaaatcagccgccggaaaagcatctgttcaggccagaagaagcagaaaggaagcatatgttcaaac

SEQ ID NO: 292005 - DNA, 75 bp, synthetic construct
  source 1..75: mol_type = other DNA
ggatgccaccatcattgaggcacccaactctaccaagaacaaagagcagcaacgcaatccggagatgcatcagac

SEQ ID NO: 292006 - DNA, 75 bp, synthetic construct
  source 1..75: mol_type = other DNA
aagtgcgcttgatgtgacggaagacgtgattgattcaattttgcatgcaatgcaggggcgagttctggatggtga

SEQ ID NO: 292007 - DNA, 75 bp, synthetic construct
  source 1..75: mol_type = other DNA
caagtgcgcttgatgtgacggaagacgtaattgattcaattttgcatgcaatgcaggggcgggttctggatggtg

SEQ ID NO: 292008 - DNA, 75 bp, synthetic construct
  source 1..75: mol_type = other DNA
tggaaggcctgagcgaacccatcgggaaatttccgatgaccgatggctggcatccgtcgccggattttcgacggc

SEQ ID NO: 292009 - DNA, 75 bp, synthetic construct
  source 1..75: mol_type = other DNA
gattttcagagagaaacaaatcactggactccagagcaagtagtttcattactaaagagttttgtcacaggtgat

SEQ ID NO: 292010 - DNA, 75 bp, synthetic construct
  source 1..75: mol_type = other DNA
ggaaaaatcatcttcggcacgctgctcgcattcatcgacaacgtgctggatgccacgctcacttcactgaacatc

SEQ ID NO: 292011 - DNA, 75 bp, synthetic construct
  source 1..75: mol_type = other DNA
agtacctactgataaagcagtggttaggatgccgttcgatactatcaaggtaaaacgctatctgctgcaagtgag

SEQ ID NO: 292012 - DNA, 75 bp, synthetic construct
  source 1..75: mol_type = other DNA
tggactaaaaatcttgatgcgaccaaaactggccttcgtttaagctggtcacggcaggatgaagaataccaggat

SEQ ID NO: 292013 - DNA, 75 bp, synthetic construct
  source 1..75: mol_type = other DNA
tgccggtcgttcgctggtcgcctgggcgcagcctgatccccaacagaccatgccgctgttatatttactcacctc

SEQ ID NO: 292014 - DNA, 75 bp, synthetic construct
  source 1..75: mol_type = other DNA
ggtcagaaggtctggcgatgccggaatcgttgtcacatatcacgacggaatcacagtggagaagcctggtgctga

SEQ ID NO: 292015 - DNA, 75 bp, synthetic construct
  source 1..75: mol_type = other DNA
tttgaaatgacctcctttgacagcatttcctgggcccccacatccacgtttggtcagggggctgaagccgtcaac

SEQ ID NO: 292016 - DNA, 75 bp, synthetic construct
  source 1..75: mol_type = other DNA
aagggactggtgaagatgccggagaacgtggactgggactacgggaccagtgcatttcgcgtgaactataacgcg

SEQ ID NO: 292017 - DNA, 75 bp, synthetic construct
  source 1..75: mol_type = other DNA
gctgcaggtctgcctgacgatgacagtgatatggatggtgcggtgtttgcagcgtcatacggttatggtctggag

SEQ ID NO: 292018 - DNA, 75 bp, synthetic construct
  source 1..75: mol_type = other DNA
gcatcagagaggagctggagcgatctgggccagactatcaacttcccctggagcagcttatccagaagatcgcca

SEQ ID NO: 292019 - DNA, 75 bp, synthetic construct
  source 1..75: mol_type = other DNA
tccgtgcctttcacgttatttgatcgtaagtacaacagtagtacttcagtgtcccgtaataaaggtagtggaaca

SEQ ID NO: 292020 - DNA, 75 bp, synthetic construct
  source 1..75: mol_type = other DNA
cgtggttgccgggctgagttaccttggtgcggtatcggttgatggcgcttatgccacagcgaagtatcgtgatgg

SEQ ID NO: 292021 - DNA, 75 bp, synthetic construct
  source 1..75: mol_type = other DNA
gaaagccaatatcgggcactgggtggtaagttcttcggccacggccagcacgggtgacagtggtggaaactccgc

SEQ ID NO: 292022 - DNA, 75 bp, synthetic construct
  source 1..75: mol_type = other DNA
actggtcatcactggcggggatgagtggccagcaccatgcggcggatgtttcgaaccgcagcgaagcgcaaaaac

SEQ ID NO: 292023 - DNA, 75 bp, synthetic construct
  source 1..75: mol_type = other DNA
tagatgcgccgggtgatatcactttgggccagtgccggatacctgcggcaaaactgcaggatactgagaaactac

SEQ ID NO: 292024 - DNA, 75 bp, synthetic construct
  source 1..75: mol_type = other DNA
agcctgtggggggactgttcagtctgtcggtttccggctggcagcggagctattacccggcacagaggacaggcc

SEQ ID NO: 292025 - DNA, 75 bp, synthetic construct
  source 1..75: mol_type = other DNA
gataaacatgtttacggccacccgggccatccgcgcactgagtgcggacctggcggtcgggaaaacatccaccgg

SEQ ID NO: 292026 - DNA, 75 bp, synthetic construct
  source 1..75: mol_type = other DNA
ggtttaagcgcagcggaaatcgttgagttaatccgcgaagaagcagcggcgatttgcagcaaaggaggtgcagca

SEQ ID NO: 292027 - DNA, 75 bp, synthetic construct
  source 1..75: mol_type = other DNA
ggacctgaaagccaatatcgggcactgggtggtgagttcttctgccacggccagcggcggtgacagcggggataa

SEQ ID NO: 292028 - DNA, 75 bp, synthetic construct
  source 1..75: mol_type = other DNA
tccatcacggatgtgccgctgtacaccagtggggatgtgaccatgaaaatcaccggcgaggacggtcgtgagcag

SEQ ID NO: 292029 - DNA, 75 bp, synthetic construct
  source 1..75: mol_type = other DNA
ctgagcacacagattaagggtgtcagtcttaacctgggctggtccggttcacggaacacccggggggaaaacaac

SEQ ID NO: 292030 - DNA, 75 bp, synthetic construct
  source 1..75: mol_type = other DNA
atgacaggaagtcaggtcattgatgctgaagaggacaggcataaactggttgtagagtataaggatgctctgcaa

SEQ ID NO: 292031 - DNA, 75 bp, synthetic construct
  source 1..75: mol_type = other DNA
ctgtaaactcctatattcccaatactgttaattacaatgtgattttcactacgctcaccagtccggatgcggttg

SEQ ID NO: 292032 - DNA, 75 bp, synthetic construct
  source 1..75: mol_type = other DNA
caccgggtgatatcaccttggggcagtgccggatacctgcagcgaaaatgcaggatacagagaaactacaggaga

SEQ ID NO: 292033 - DNA, 75 bp, synthetic construct
  source 1..75: mol_type = other DNA
cagtgtcggtgtggttgccgggctgggttacctgggggcggtgtctgctgacggtgcttatgccacggcaaaata

SEQ ID NO: 292034 - DNA, 75 bp, synthetic construct
  source 1..75: mol_type = other DNA
agctatgcgccggggcgttatctggttgacctgtccctgaacgggaaggaggccgggaaacagatactggatgtg

SEQ ID NO: 292035 - DNA, 75 bp, synthetic construct
  source 1..75: mol_type = other DNA
atgaacactgaaaatctccttaaaaacaataacgtagaccacgaagagatcgctaaatttgaagccgtcgcctcc

SEQ ID NO: 292036 - DNA, 75 bp, synthetic construct
  source 1..75: mol_type = other DNA
tcgttggcagcatagagaccagtatcaaaacagtgatgaatctgccaccggaaagcgtggaagggctgcgggtgc

SEQ ID NO: 292037 - DNA, 75 bp, synthetic construct
  source 1..75: mol_type = other DNA
tactatctgattcgcgcctttgacagtgctgaaagcatggctacgattcttgaaactttttacgcaagcgatgac

SEQ ID NO: 292038 - DNA, 75 bp, synthetic construct
  source 1..75: mol_type = other DNA
cagttcaaagcggaagctccctgtgagaaatgggtgacagatatcaccgaattcagggctggcggacaaaaactg

SEQ ID NO: 292039 - DNA, 75 bp, synthetic construct
  source 1..75: mol_type = other DNA
ggcatatgaccgggctgcattacaaccctatcactaattcctttaagctcggccccggcgtggatgtgaactata

SEQ ID NO: 292040 - DNA, 75 bp, synthetic construct
  source 1..75: mol_type = other DNA
atgttcccgatccgcaatcagtcgtcagagcctgtgcgcaactggtgaagccaggtggcgatgtctttttctcta

SEQ ID NO: 292041 - DNA, 75 bp, synthetic construct
  source 1..75: mol_type = other DNA
atgagtaaattaagcagtgaaatgaaggcgctggcgaagaaagcgggtgtagattcaattggtcaacgcaacagt

SEQ ID NO: 292042 - DNA, 75 bp, synthetic construct
  source 1..75: mol_type = other DNA
ggtttgagtattgcttttgttgttaacctgatccttaccagcagtttttccgtgtggttagcgagtattttgact

SEQ ID NO: 292043 - DNA, 75 bp, synthetic construct
  source 1..75: mol_type = other DNA
ctgaactggaacaattctcaccgcacgacgatcgcaggccagaagttgttgccgccgcgttgaccgcccagggct

SEQ ID NO: 292044 - DNA, 75 bp, synthetic construct
  source 1..75: mol_type = other DNA
atggcccagtccgatttaccttatattgctatcaacaatggagccgtccagaggcgacacggagataatgctttg

SEQ ID NO: 292045 - DNA, 75 bp, synthetic construct
  source 1..75: mol_type = other DNA
tttcagggacagataacgcatttgaacagacaatccactgctactcaattacagcaaaaaagtgcttcgctcagc

SEQ ID NO: 292046 - DNA, 75 bp, synthetic construct
  source 1..75: mol_type = other DNA
attatccgcaccaaaaaacagagtccgttaaaaaagactctgacctttctgaaaagccggagggtctggaaatga

SEQ ID NO: 292047 - DNA, 75 bp, synthetic construct
  source 1..75: mol_type = other DNA
aagtctcctgtgcgcctgaagaaataccggtcttaccggggaaatatgggactcgctgcagaaaatatccttcag

SEQ ID NO: 292048 - DNA, 75 bp, synthetic construct
  source 1..75: mol_type = other DNA
ggaaagccttgcaggaggagaaaaaccgctgctccacagtgatcaagggtggcattaccggataaaaagttatca

SEQ ID NO: 292049 - DNA, 75 bp, synthetic construct
  source 1..75: mol_type = other DNA
acaaatgacgtactggcgctggagccggaagcactggcgatggcagacagtcagggcgtggaagcggcgctgggc

SEQ ID NO: 292050 - DNA, 75 bp, synthetic construct
  source 1..75: mol_type = other DNA
atgagtgaactgttgcaaaagctgacccgtagttgttttgccgaccgggacgcactggactcggcgcgaacacag

SEQ ID NO: 292051 - DNA, 75 bp, synthetic construct
  source 1..75: mol_type = other DNA
aaattgacgccctgtttggcgttccggcccctgccaagtggcatccggaaatcgacaccggtattcacaccttaa

SEQ ID NO: 292052 - DNA, 75 bp, synthetic construct
  source 1..75: mol_type = other DNA
aaggacgctggttacgtgaagcgtgggaagtagcgcagtcagtaccaacaaaggcggttgttgacgcgggattta

SEQ ID NO: 292053 - DNA, 75 bp, synthetic construct
  source 1..75: mol_type = other DNA
tcgtggcgtgggaaactgcctgcaggcctacagaggagctggtgaagcggatgttaaataaggggctggaaagcc

SEQ ID NO: 292054 - DNA, 75 bp, synthetic construct
  source 1..75: mol_type = other DNA
atcaggcgctggccaaggcgggcgcaccgtgggacagatggacagcggttatccgtcaggacctggcgctgctgc

SEQ ID NO: 292055 - DNA, 75 bp, synthetic construct
  source 1..75: mol_type = other DNA
gaaaagaggtcttaagttcagtggcaaaacggtgcgaaaactgatgcaacagctcggcctgaagtctcctgtgcg

SEQ ID NO: 292056 - DNA, 75 bp, synthetic construct
  source 1..75: mol_type = other DNA
gattccttatgtggctcaagagcttatttctatttataaagacttgcttggaaagtattcatttggtgatatatg

SEQ ID NO: 292057 - DNA, 75 bp, synthetic construct
  source 1..75: mol_type = other DNA
ccgaaaaatggatgccctgctgggtacactggtggcaatcaatccggtgcgggcggcggtactgtgtgatacgca

SEQ ID NO: 292058 - DNA, 75 bp, synthetic construct
  source 1..75: mol_type = other DNA
tggctgaggggctggcgctgctggccggactggtggaacacttcggtacgcaactgctgccctcgcgcccggcaa

SEQ ID NO: 292059 - DNA, 75 bp, synthetic construct
  source 1..75: mol_type = other DNA
gcagaaaatatccttcagcgacagttcaaagcggaagctccctgtgagaaatgggtgacagatatcaccgaattc

SEQ ID NO: 292060 - DNA, 75 bp, synthetic construct
  source 1..75: mol_type = other DNA
gacaactggactgggacgacatccgcctgcgtatcaacggcaaaacggctgctgacgtagagcgggcgctaaatg

SEQ ID NO: 292061 - DNA, 75 bp, synthetic construct
  source 1..75: mol_type = other DNA
tcgcctccatgcggctgtttgcccgtttatccctggatagcgccgtgccggagcgcaccaccatcatgaatttcc

SEQ ID NO: 292062 - DNA, 75 bp, synthetic construct
  source 1..75: mol_type = other DNA
tcgcctccatgcggctgtttgcccgattatccctggatagcgccgtgccggatcgcaccaccatcatgaatttcc

SEQ ID NO: 292063 - DNA, 75 bp, synthetic construct
  source 1..75: mol_type = other DNA
tcgcctccatgcggctgtttgcccgattatccctggatagcgccttgccggagcgcaccaccatcatgaatttcc

SEQ ID NO: 292064 - DNA, 75 bp, synthetic construct
  source 1..75: mol_type = other DNA
ggtggcgcgcgtaaaaaccattttgcgtcgctgcaaaccgcagcgcgagttgcagcaacaagatgccgaaagccc

SEQ ID NO: 292065 - DNA, 75 bp, synthetic construct
  source 1..75: mol_type = other DNA
ccgggaaaagtattctcccgcgagcaattactcaatcatctttatgacgattaccgcgtggtaaccgaccgcacc

SEQ ID NO: 292066 - DNA, 75 bp, synthetic construct
  source 1..75: mol_type = other DNA
tactgaagcagcagaaagagcaactggcactggccggtcagaatacggagctggcgaagctgaagtaccagacag

SEQ ID NO: 292067 - DNA, 75 bp, synthetic construct
  source 1..75: mol_type = other DNA
tgctgaggggaaagtgtttacgcagattcagtgggagcagaaattcgcccgtcacgtaaatcacgtcagggcgca

SEQ ID NO: 292068 - DNA, 75 bp, synthetic construct
  source 1..75: mol_type = other DNA
aagtgcgcttgatgtgacggaagacgtaattgattcaattttgcatgcaatgcaggggcgggttctggatggtga

SEQ ID NO: 292069 - DNA, 75 bp, synthetic construct
  source 1..75: mol_type = other DNA
aaccaactggcgatgttattcaccctggccaacctgtttcgggtggaccaaatgatacgtcagtgggagatatct

SEQ ID NO: 292070 - DNA, 75 bp, synthetic construct
  source 1..75: mol_type = other DNA
gagcacccgtttcgcatcatcaagcggcagttcggcttcgtgaaagccagatatcggggatccggacgcaccgca

SEQ ID NO: 292071 - DNA, 75 bp, synthetic construct
  source 1..75: mol_type = other DNA
gcaccatcgacagccacattaaaaacctgcgccgcaagctggaatctctcgacgccgaacagtcatttatccgcg

SEQ ID NO: 292072 - DNA, 75 bp, synthetic construct
  source 1..75: mol_type = other DNA
tatgtaaaatccttaggcgacagcgtgcgtctggtgctaggtaatcacgatctgcatctgctggcggtattcgcc

SEQ ID NO: 292073 - DNA, 75 bp, synthetic construct
  source 1..75: mol_type = other DNA
cgtggtttaccattccagggccagttagcgaagagtacagcattgtgtttggtcactgggcatcgctggaaggaa

SEQ ID NO: 292074 - DNA, 75 bp, synthetic construct
  source 1..75: mol_type = other DNA
ggtacattaacctgcctgcgctgggaagataaacagtattttgtccagccgtcgaaccggcataaggatttgggt

SEQ ID NO: 292075 - DNA, 75 bp, synthetic construct
  source 1..75: mol_type = other DNA
cgccgagttaaagcaacttggtctggatggggtgatggtttatcaggagacatatcacgaggcgacatatgcccg

SEQ ID NO: 292076 - DNA, 75 bp, synthetic construct
  source 1..75: mol_type = other DNA
aagcgcaaaacgctggatgaagcggatattgccagggaaagcgccgctatacgggagatgggctttgaacatctg

SEQ ID NO: 292077 - DNA, 75 bp, synthetic construct
  source 1..75: mol_type = other DNA
cgcggggacaaatctgggatcgctggaagaacaactggcacaaaaagcggatgagatgggcgcaaaatctttccg

SEQ ID NO: 292078 - DNA, 75 bp, synthetic construct
  source 1..75: mol_type = other DNA
atgaccgagttaccaatcgacgaaaacacgccacgtattttgatcgtggaagatgaaccgaagctggggcagttg

SEQ ID NO: 292079 - DNA, 75 bp, synthetic construct
  source 1..75: mol_type = other DNA
gctatgcgccaacgttgattagccacggcgatcaggtactgccgtatgtgcgccagacaccaccggatctgatcc

SEQ ID NO: 292080 - DNA, 75 bp, synthetic construct
  source 1..75: mol_type = other DNA
gtttttgcttcccgaacggtcaactggatatgtacagcaaagaatcgccggaagaggcccctgccccactgaaac

SEQ ID NO: 292081 - DNA, 75 bp, synthetic construct
  source 1..75: mol_type = other DNA
gatggcccacgcagggatcacgccgcagtgggatctgcagaccgccaaagagtgcgcgcgcgatgtagaagcggt

SEQ ID NO: 292082 - DNA, 75 bp, synthetic construct
  source 1..75: mol_type = other DNA
aaatcgacgaagagaaaaaactggtgatggcccatgcggggatcacgccgcaatgggacttagagaccgccaaag

SEQ ID NO: 292083 - DNA, 75 bp, synthetic construct
  source 1..75: mol_type = other DNA
gcccgtcttacttgaagctaagcaagcttatctggcctacaaagcacatagagtcctacaggctcgcatgcacct

SEQ ID NO: 292084 - DNA, 75 bp, synthetic construct
  source 1..75: mol_type = other DNA
gcccgtcatacttgaagctaggcaggcttatcttggacaagaagatcgcttggcctcgcgcgcagatcagttgga

SEQ ID NO: 292085 - DNA, 75 bp, synthetic construct
  source 1..75: mol_type = other DNA
caggttcagcgcgaactggttaacagctatttccgaactcacgcgccgctgacggaaatggagatgatcgctgca

SEQ ID NO: 292086 - DNA, 75 bp, synthetic construct
  source 1..75: mol_type = other DNA
cgcgaaaaaagaatacggccaacattgccaaagaacggctacaaattattgtcgctgaacgccgtcgtagcgatg

SEQ ID NO: 292087 - DNA, 75 bp, synthetic construct
  source 1..75: mol_type = other DNA
gtcccgcatttggtacagcgcagcaactggtaaaatcgcgccgaaggatgtcgctgccaactgggcaatggaaca

SEQ ID NO: 292088 - DNA, 75 bp, synthetic construct
  source 1..75: mol_type = other DNA
actcacaaccggattgggcaggcgacgagcggaatgtagtgcttactttgtctcgcatttggtacagcgcagcaa

SEQ ID NO: 292089 - DNA, 75 bp, synthetic construct
  source 1..75: mol_type = other DNA
aaatggttgctgcaatggcgcttgaagctgttcgccaacaaagacgtcttgagcaggtggaagagaaagtcaccc

SEQ ID NO: 292090 - DNA, 75 bp, synthetic construct
  source 1..75: mol_type = other DNA
atcattgttgtcgcacagctttgccctgaattcaccgcccgtctggtagaccgctggcgcgaactggaagaacaa

SEQ ID NO: 292091 - DNA, 75 bp, synthetic construct
  source 1..75: mol_type = other DNA
atgaataccgcaatttttaccgataaagcatccatgaccagcgttgagatcgcagagttggtgggtaagcgtcat

SEQ ID NO: 292092 - DNA, 75 bp, synthetic construct
  source 1..75: mol_type = other DNA
attccgccagatgatgtcagaagctaaaccgcgcggcacacgctggtatcacccgaagatggggcttttccaggt

SEQ ID NO: 292093 - DNA, 75 bp, synthetic construct
  source 1..75: mol_type = other DNA
tcgctggcgcgaactggaagaacagatccgtaagccaatgagcgaaatcgaaatggttgctgcgatggctcttga

SEQ ID NO: 292094 - DNA, 75 bp, synthetic construct
  source 1..75: mol_type = other DNA
aaatggttgctgcaatggcacttgaagccgttcgtcaacaaagacgtcttgagcaggtggaagagaaagtcaccc

SEQ ID NO: 292095 - DNA, 75 bp, synthetic construct
  source 1..75: mol_type = other DNA
atgatgttgctactatatgtatggaaccaaaatatatttttgatgaattacttgcttttttaggacagcggcgta

SEQ ID NO: 292096 - DNA, 75 bp, synthetic construct
  source 1..75: mol_type = other DNA
ctcgggccggtgattatcccggtttacgaaatgctcggcgctaacccatcgatgttcgccggaacactgctggcg

SEQ ID NO: 292097 - DNA, 75 bp, synthetic construct
  source 1..75: mol_type = other DNA
agcagatggatacccgcggcaaagtgatcaactgtgccttcgccgtttccgctgcctttgccctgggcgaccact

SEQ ID NO: 292098 - DNA, 75 bp, synthetic construct
  source 1..75: mol_type = other DNA
cgtcgttatctggcgctcggcgtgctggcgggcattgtgaccattccgattggctgtatcgctggtggtctggta

SEQ ID NO: 292099 - DNA, 75 bp, synthetic construct
  source 1..75: mol_type = other DNA
tgcttgccggaatgtcatcaaccgaatatgccgactggcgtcatttttaccgcacgcatttttttcaggatacgc

SEQ ID NO: 292100 - DNA, 75 bp, synthetic construct
  source 1..75: mol_type = other DNA
ttggtcccaccagttcgcgtcattgaacggcgctcaacagattatcgctcgctgaccgatcccgccgttattcag

SEQ ID NO: 292101 - DNA, 75 bp, synthetic construct
  source 1..75: mol_type = other DNA
acatcatgatgttctttatgctgatagcggccatagacaggatcttgtcgcagttcggcggttctgctcgtttcc

SEQ ID NO: 292102 - DNA, 75 bp, synthetic construct
  source 1..75: mol_type = other DNA
atgcctgcagaaaaactcagtgttgttgtatacaccaacacatgtgaaaagaaagtcatctgtatcccggcaaca

SEQ ID NO: 292103 - DNA, 75 bp, synthetic construct
  source 1..75: mol_type = other DNA
atcaggatcatggcccagagcacagcgaattttggatttctttgccacctataaagcgacgttgcccgcgattgg

SEQ ID NO: 292104 - DNA, 75 bp, synthetic construct
  source 1..75: mol_type = other DNA
accagaacaatacacctggatactaaaattgctgaaaactcgcaaaccgggcgaaatccagccgtataagcgcaa

SEQ ID NO: 292105 - DNA, 75 bp, synthetic construct
  source 1..75: mol_type = other DNA
gctgctgactcgctggtttgaaaaaccgctgatgagcgtcggtaaactactgaatatgaacaacattgcggcagc

SEQ ID NO: 292106 - DNA, 75 bp, synthetic construct
  source 1..75: mol_type = other DNA
cgtattcccggaagctgtagtgaatggaaagaggtggcattaccccttaaagccaggtcccggataaaattataa

SEQ ID NO: 292107 - DNA, 75 bp, synthetic construct
  source 1..75: mol_type = other DNA
ccacgagatattatctccgggaatgtaggtgacaatgatgtctatggtgcacagcaacatgcacctttattaaat

SEQ ID NO: 292108 - DNA, 75 bp, synthetic construct
  source 1..75: mol_type = other DNA
gaacaggagcgtctcaatttgctgggtatgaagaggaaataagattattaaaggaaaagaaatatacgaacaaac

SEQ ID NO: 292109 - DNA, 75 bp, synthetic construct
  source 1..75: mol_type = other DNA
gtacgctgaatgattttctcggtgccatgacggaagatgatgtcatgccggaagcattgcgtcgttttgaggaaa

SEQ ID NO: 292110 - DNA, 75 bp, synthetic construct
  source 1..75: mol_type = other DNA
acaactgagaaatattacggtcagctttatatgcaaacttataaagcgtcgacaagtacttacgtttctagtgtg

SEQ ID NO: 292111 - DNA, 75 bp, synthetic construct
  source 1..75: mol_type = other DNA
ttccttttacggttctttgtgaggtacataagaactggtataaaacgccaaatgcagcaccgcgtgtttttcata

SEQ ID NO: 292112 - DNA, 75 bp, synthetic construct
  source 1..75: mol_type = other DNA
ataacgatgcctggcgacaagattgttaagtttaaacgtgcatcgaaagcaacctatattaataaatctggtgtg

SEQ ID NO: 292113 - DNA, 75 bp, synthetic construct
  source 1..75: mol_type = other DNA
cagcgaagaccagcgaaacgaatgccaaagccagcgaaactgcggcgaaaagcagtcaggatgcagcagctgaaa

SEQ ID NO: 292114 - DNA, 75 bp, synthetic construct
  source 1..75: mol_type = other DNA
caatttggtttcatccctgtgaccgatatttatgaagaagatggtatcccacacattgggatggcacgcgaggta

SEQ ID NO: 292115 - DNA, 75 bp, synthetic construct
  source 1..75: mol_type = other DNA
gactgcatcggcaaactccgcgacagcagccaaaaaatcagaaaccaacgcgaaaaatagcgagacagccgcaaa

SEQ ID NO: 292116 - DNA, 75 bp, synthetic construct
  source 1..75: mol_type = other DNA
tttgataaatatgacggtagcgcaacaacttttcttggtgatgcgtatattgatacacaaacgcttgaaattaat

SEQ ID NO: 292117 - DNA, 75 bp, synthetic construct
  source 1..75: mol_type = other DNA
tccggatgaagccgggcgttatagcatggacgttgagtacggtcagtacagcgttattctgttggtggaaggatt

SEQ ID NO: 292118 - DNA, 75 bp, synthetic construct
  source 1..75: mol_type = other DNA
tggacgttacagaaacaggcacagatagtttcggttttaattatggccggtttgtcgtacaggattcgattgttg

SEQ ID NO: 292119 - DNA, 75 bp, synthetic construct
  source 1..75: mol_type = other DNA
gcgtcaccctgctggttgaaggttttccaccttcacatgccgggaccattaccgtctatgaaggttccagaccag

SEQ ID NO: 292120 - DNA, 75 bp, synthetic construct
  source 1..75: mol_type = other DNA
caaaaagcagcaaaaaccagtgaaaccaacgcaaaggtgagcgaaacagcggctgcgaactcagcgaaagcatcg

SEQ ID NO: 292121 - DNA, 75 bp, synthetic construct
  source 1..75: mol_type = other DNA
tggatggccgggcgacattaattacgagtggttatccccgtgtaatcagtgttgatgcaaatgaatcagttacac

SEQ ID NO: 292122 - DNA, 75 bp, synthetic construct
  source 1..75: mol_type = other DNA
gccggggcgctggtggcctcattgattgttgcctttaccggcagccagggcggcgggcagttaagtccggtgcgt

SEQ ID NO: 292123 - DNA, 75 bp, synthetic construct
  source 1..75: mol_type = other DNA
cttgccggggcgttgatgcaaaccctcacccgaaacccacttgccgaccccggcttgcttggcgtgaacgccgga

SEQ ID NO: 292124 - DNA, 75 bp, synthetic construct
  source 1..75: mol_type = other DNA
gttgttaagtttaaacgcgcatcaactgccacatatatcaataaatcaggcgtatttagtgttgctaaaattgat

SEQ ID NO: 292125 - DNA, 75 bp, synthetic construct
  source 1..75: mol_type = other DNA
ttacacctgaaatagttcgagagtggaaagaaccaaatgagatgtctgtaagacaacacttgacagtattaatta

SEQ ID NO: 292126 - DNA, 75 bp, synthetic construct
  source 1..75: mol_type = other DNA
ttcttagtggattcattgtcacggcaaattatgcgcgtgcaagcattgtcatcagtggtacgcgtataatctatc

SEQ ID NO: 292127 - DNA, 75 bp, synthetic construct
  source 1..75: mol_type = other DNA
atatgatgcagccaaaggcgtgggccgtattcagcaggatgaccaacagtttgtgatgcatggtaacctgaatgg

SEQ ID NO: 292128 - DNA, 75 bp, synthetic construct
  source 1..75: mol_type = other DNA
atattaaaaaatctggtgtgctgacagaggctgccattgacgagccacgatttgaacgtgatggcctgcttattg

SEQ ID NO: 292129 - DNA, 75 bp, synthetic construct
  source 1..75: mol_type = other DNA
tgattcgctggatatgattacgggctattctccgggttataaaaaagtgaagattggtgataatgtggttcaggt

SEQ ID NO: 292130 - DNA, 75 bp, synthetic construct
  source 1..75: mol_type = other DNA
tatgtgaacgatgacggaacaagcaacacactggttgctgagtcatatatagattgcggcaccggagaaatatta

SEQ ID NO: 292131 - DNA, 75 bp, synthetic construct
  source 1..75: mol_type = other DNA
aggaaatggtggaagaagcggcacgcaacgccgaagccgcctctcagagcgcagcggcggcaaagaaatccgaaa

SEQ ID NO: 292132 - DNA, 75 bp, synthetic construct
  source 1..75: mol_type = other DNA
taaggttctgcctggcgtggtgggattgggtaattgttgggtttgcattcttactaagcaattatttggtgtttg

SEQ ID NO: 292133 - DNA, 75 bp, synthetic construct
  source 1..75: mol_type = other DNA
cgttcttaatacgtacaccggaagccagatcgtcaagctgggtatgcgattattgattctgacagggctccggcc

SEQ ID NO: 292134 - DNA, 75 bp, synthetic construct
  source 1..75: mol_type = other DNA
tgttgattcttacaggactccgcccaggtgaattacggcaggcagagtggcaggagattgattttgataatcgtc

SEQ ID NO: 292135 - DNA, 75 bp, synthetic construct
  source 1..75: mol_type = other DNA
cgctacgccatcgtgacaggcagagccgagtataatcccgcgccagatctcaccagtaccatgcaagggcatgag

SEQ ID NO: 292136 - DNA, 75 bp, synthetic construct
  source 1..75: mol_type = other DNA
atgaagcttaatgcgcgacaggtagacgctgctaaacccaaagagaaagcctataagctggcagatggtgctggc

SEQ ID NO: 292137 - DNA, 75 bp, synthetic construct
  source 1..75: mol_type = other DNA
taccagcgcgatgtcagggcatgaatcgaagcattatcccttccttaccgttgaggagttacctgatttctttaa

SEQ ID NO: 292138 - DNA, 75 bp, synthetic construct
  source 1..75: mol_type = other DNA
gttctcgatactggcggatgaaatatcgcttcaatggaaaagagaaacgtatggcttttggtgtctatccggcag

SEQ ID NO: 292139 - DNA, 75 bp, synthetic construct
  source 1..75: mol_type = other DNA
tcgctatgccggtaaacccaagatgatctcgcttggcgtttacccaacgatcacccttgccgatgctcgttcccg

SEQ ID NO: 292140 - DNA, 75 bp, synthetic construct
  source 1..75: mol_type = other DNA
tcgtgtagctggtaaagagaagctgttagcactaggtgtgtatcctgaggtcaccttagctgatgctcctgcaaa

SEQ ID NO: 292141 - DNA, 75 bp, synthetic construct
  source 1..75: mol_type = other DNA
gtgcattggagaaaatgcgcaaagtgcggcaacgttgctcagaggtttttcgatatgctattgctaccggaagag

SEQ ID NO: 292142 - DNA, 75 bp, synthetic construct
  source 1..75: mol_type = other DNA
gaaaatgcgtcgtcctcatatcatcccgctatctacccaagcgttagccattatcgaaaagatcagagcaatgac

SEQ ID NO: 292143 - DNA, 75 bp, synthetic construct
  source 1..75: mol_type = other DNA
gaaacccaactggcccatgttgataagaatgctatccgtggcacctacaaccatgcgcaatatctcgatggcaga

SEQ ID NO: 292144 - DNA, 75 bp, synthetic construct
  source 1..75: mol_type = other DNA
ctccagcgctctcgaagtacaccaatccaatcatttcccattcctaaaagctgatgagatacctgattttctacg

SEQ ID NO: 292145 - DNA, 75 bp, synthetic construct
  source 1..75: mol_type = other DNA
gagcattagaaaaaatgcgcaaagttcggcagcgatgctcagaagttttccgctatgccattgctactggaaggg

SEQ ID NO: 292146 - DNA, 75 bp, synthetic construct
  source 1..75: mol_type = other DNA
aatcaataacaatcgggggccgcagatgattatcgcgcctcacatcgtccataagttgcaacaacaagggaatct

SEQ ID NO: 292147 - DNA, 75 bp, synthetic construct
  source 1..75: mol_type = other DNA
agcgcggactggaacagcttaaaaagattcgccgcaaatacttcaataccagtagtgaggctgctgactggtggg

SEQ ID NO: 292148 - DNA, 75 bp, synthetic construct
  source 1..75: mol_type = other DNA
atggcgctaaacccagagagaaagcctacaagctggccgatggtgctggcctgtatcttgaggttgtccccagcg

SEQ ID NO: 292149 - DNA, 75 bp, synthetic construct
  source 1..75: mol_type = other DNA
aacgcgatctgataaagcggcatcggaaatccttggcaccttcggtggcatcactatcgaatccttccccagatg

SEQ ID NO: 292150 - DNA, 75 bp, synthetic construct
  source 1..75: mol_type = other DNA
gtaatcctgacgggcaatgtgccgtcgccatcgacaatattggcgcgggaaccggggagtggcagttccgcccgc

SEQ ID NO: 292151 - DNA, 75 bp, synthetic construct
  source 1..75: mol_type = other DNA
atggtggaaatgattgatccacaaggtaatcctgacgggcaatgcgccgtcgccatcgacaatattggcgcggga

SEQ ID NO: 292152 - DNA, 75 bp, synthetic construct
  source 1..75: mol_type = other DNA
tggaagcactgcgggttatggatgcgattgatcgtcgtggcagttttgcggcggcggcggatgagctgggacgcg

SEQ ID NO: 292153 - DNA, 75 bp, synthetic construct
  source 1..75: mol_type = other DNA
ccgctatctacccaagcgttagccattatcgaaaagatcagagcaatgacgggacaattccctttgctgtttccg

SEQ ID NO: 292154 - DNA, 75 bp, synthetic construct
  source 1..75: mol_type = other DNA
ctcgctattggcgtttaccccgatgtttctttagctgaagccagaagcaagcgagaggatgctaaaaggacatta

SEQ ID NO: 292155 - DNA, 75 bp, synthetic construct
  source 1..75: mol_type = other DNA
aatttatagcagcagcggggtgcagatggtgattgcacctcatattgtccagaagttacagcaacaggggaatca

SEQ ID NO: 292156 - DNA, 75 bp, synthetic construct
  source 1..75: mol_type = other DNA
tgagtgaagcgagtattaatcaggtttttaagcggattggatatacggggagggtaacggggcatggtttccgtc

SEQ ID NO: 292157 - DNA, 75 bp, synthetic construct
  source 1..75: mol_type = other DNA
cgctatgccattgctactggaagggctgagtttaaccctgctgcggatctttcaagcgccctcaatgtacaccaa

SEQ ID NO: 292158 - DNA, 75 bp, synthetic construct
  source 1..75: mol_type = other DNA
atggaaaaggtgattgaaattaccgcccgccgtgagggttttcgccgctgcggtgtggcacacagtgcaaccacg

SEQ ID NO: 292159 - DNA, 75 bp, synthetic construct
  source 1..75: mol_type = other DNA
cttctctggcaccgatgcgcctgattggtttaaccggcggcgtgtttaacttcgccggtggtctgggcggcatca

SEQ ID NO: 292160 - DNA, 75 bp, synthetic construct
  source 1..75: mol_type = other DNA
gaccgcctgacacccttcgtgcatgaagatgacgccatgctgatgacggtatcagaaggtatcgcaggaggtgtc

SEQ ID NO: 292161 - DNA, 75 bp, synthetic construct
  source 1..75: mol_type = other DNA
tgctgatctggattcaggagatgttgagctggcactgggtgttcattgtcaccggtggtatcggcattatctggt

SEQ ID NO: 292162 - DNA, 75 bp, synthetic construct
  source 1..75: mol_type = other DNA
gttgaagcacaaaaatgtaatgtaccatgtttggtttctgatacaatcacaaaagagtgtgacattggaatggca

SEQ ID NO: 292163 - DNA, 75 bp, synthetic construct
  source 1..75: mol_type = other DNA
actactggtttttatgtagtttatacttgcttcgttagttccactactattgatggcgacaaagatgaagtagta

SEQ ID NO: 292164 - DNA, 75 bp, synthetic construct
  source 1..75: mol_type = other DNA
gcaggtagtaaagacgaagtagtgactaaggcatttacactagctgtagatggtggtccaatccaatccggtatt

SEQ ID NO: 292165 - DNA, 75 bp, synthetic construct
  source 1..75: mol_type = other DNA
cccctcatgaactgcgtcctgatatttaccccaatccaaatgatggattaaccgcaatgcgtcgaatgtttatca

SEQ ID NO: 292166 - DNA, 75 bp, synthetic construct
  source 1..75: mol_type = other DNA
cccgtcggaacgagttttacaactttgtgagctggggaactggtccgtaaccccccatgagctgcgtcctgatat

SEQ ID NO: 292167 - DNA, 75 bp, synthetic construct
  source 1..75: mol_type = other DNA
atttgcgtgattcaggaagcattgaacaggacgcagactcaatcatcatgctctatcgtgaggcggtatatgacg

SEQ ID NO: 292168 - DNA, 75 bp, synthetic construct
  source 1..75: mol_type = other DNA
tgctgaaaaaagcccagtcagagggatatgcagtccccgctttcaatattcataaccttgaaacattgcaggttg

SEQ ID NO: 292169 - DNA, 75 bp, synthetic construct
  source 1..75: mol_type = other DNA
cctggttcccgaactatttaacccaggaaaaaggaatcacggcgctgaaagcaggctttatgaccacggtgccat

SEQ ID NO: 292170 - DNA, 75 bp, synthetic construct
  source 1..75: mol_type = other DNA
aggatcaagcagttacccgtgacatcgtgttagcagttactggcggttctatcgattctggtattactactggcg

SEQ ID NO: 292171 - DNA, 75 bp, synthetic construct
  source 1..75: mol_type = other DNA
aacaacaaaacagacaataatcagggcagcagtaatcagagtcagaacaggaggaaaaagagaataatcaaaggg

SEQ ID NO: 292172 - DNA, 75 bp, synthetic construct
  source 1..75: mol_type = other DNA
ataggcacagcacatggcttgtacacgaatgaaccacgtctagactttgcccggctggaacaaattcgtcagtta

SEQ ID NO: 292173 - DNA, 75 bp, synthetic construct
  source 1..75: mol_type = other DNA
gaaagaacatgaactgacagcgaaaagtctctgtattgagatcactgaaactgtgattgagcgaattagtgaaca

SEQ ID NO: 292174 - DNA, 75 bp, synthetic construct
  source 1..75: mol_type = other DNA
gagaatatctggattgcgcgcaatatccgtcacgccatggaaaaaggcgagctattcctggtttatcaaccgatt

SEQ ID NO: 292175 - DNA, 75 bp, synthetic construct
  source 1..75: mol_type = other DNA
aggctttgtgccgttggatctcagaggaacgagggattatctcacccttaaaatttatcactattgctgaagata

SEQ ID NO: 292176 - DNA, 75 bp, synthetic construct
  source 1..75: mol_type = other DNA
actcattgtcgagcggacacgcgccggactggaagcggccagagccaaaggtcgtattggtggcagacgtccgaa

SEQ ID NO: 292177 - DNA, 75 bp, synthetic construct
  source 1..75: mol_type = other DNA
tcccaaaccaacgtttatgaaaatgcagagataacgggcaagtggcatcatctccggtttttattcagggggatg

SEQ ID NO: 292178 - DNA, 75 bp, synthetic construct
  source 1..75: mol_type = other DNA
tttcattattatcgtattgctggtggtttacttaatgaccacccgtgtgttccgtcgacaattttccgaaatgac

SEQ ID NO: 292179 - DNA, 75 bp, synthetic construct
  source 1..75: mol_type = other DNA
ttggcagaagtatgaaacaccttatcacgcttatagaggagttgcgggaaaaaggtgttaatttccgtagtctga

SEQ ID NO: 292180 - DNA, 75 bp, synthetic construct
  source 1..75: mol_type = other DNA
ccgtgcccggtggtcagcatataaagtctgggattcagacaagcaaaagtggacagcctgcacccttgcttttca

SEQ ID NO: 292181 - DNA, 75 bp, synthetic construct
  source 1..75: mol_type = other DNA
accagggctgaaaaaactgctcaggacactaacggcaggagacactctggttgtctggaagctggacaggttggg

SEQ ID NO: 292182 - DNA, 75 bp, synthetic construct
  source 1..75: mol_type = other DNA
catgagtgttttaccaccatcatgaaagaaaatggcctgaaggcgaacagcctctgtgttgagatcactgaaacc

SEQ ID NO: 292183 - DNA, 75 bp, synthetic construct
  source 1..75: mol_type = other DNA
aagcggttttattaaaaatatggcgattattgagtccaacaataatcagtatctggctgtggggatcatcaaact

SEQ ID NO: 292184 - DNA, 75 bp, synthetic construct
  source 1..75: mol_type = other DNA
actgattgttgaacgaacaaaagctggactggaagctgctcgcgtacagggacgaattggtggacgtcgtcccaa

SEQ ID NO: 292185 - DNA, 75 bp, synthetic construct
  source 1..75: mol_type = other DNA
gggccctggctgaaatggagcgcgaactgatagttgaacgtaccagggcggggctggctgcagctcgcgccaaag

SEQ ID NO: 292186 - DNA, 75 bp, synthetic construct
  source 1..75: mol_type = other DNA
ggtgattaatttccagatccctcatttgcatcagcaggtactgaaagcggcgcccattgtcgcccagccgacacc

SEQ ID NO: 292187 - DNA, 75 bp, synthetic construct
  source 1..75: mol_type = other DNA
acggcaatcagtatgggacaatccgcaggtgcgatggtggtgaataaaccgtcttctggcggtcccgtgccttca

SEQ ID NO: 292188 - DNA, 75 bp, synthetic construct
  source 1..75: mol_type = other DNA
cgacgtgaagattactacgctgccgccagctaaacgcgtgtacggtggcgaagcggatgcagccgataagaagga

SEQ ID NO: 292189 - DNA, 75 bp, synthetic construct
  source 1..75: mol_type = other DNA
caacaaatgaccagaacactgatttgcaacgtaatgcactgaactgcgcgggatgtgagcggatttttgaggata

SEQ ID NO: 292190 - DNA, 75 bp, synthetic construct
  source 1..75: mol_type = other DNA
cagtatagatacctcaacaccaatggggcgctttttctttcatgtcatgggggcgcttgccgagatggaaagaga

SEQ ID NO: 292191 - DNA, 75 bp, synthetic construct
  source 1..75: mol_type = other DNA
ggatgtgagctgatttttgaggacaaaatcagcggcacgaagtccgacagaccggggctgaaaaaactgctcaga

SEQ ID NO: 292192 - DNA, 75 bp, synthetic construct
  source 1..75: mol_type = other DNA
cttgcagacggatgcgctacgcaaggcaggctgcgagcgcgttttcgaggacacggcttccggggccaaggccga

SEQ ID NO: 292193 - DNA, 75 bp, synthetic construct
  source 1..75: mol_type = other DNA
gttgaccaccgaacagtgggcacagattgggcgtttactcgaggccggagaatcaagacagcgtattgcactgat

SEQ ID NO: 292194 - DNA, 75 bp, synthetic construct
  source 1..75: mol_type = other DNA
gcgcagtatgcggcatcttgttacgctgatagaagagttacccgcgaacctgcgaagaaagaaagcaccacggtg

SEQ ID NO: 292195 - DNA, 75 bp, synthetic construct
  source 1..75: mol_type = other DNA
attaattgtagagcgtacactggccgggctggcagcagcacgcgcacaaggacgcattggcggacgtcgcccgaa

SEQ ID NO: 292196 - DNA, 75 bp, synthetic construct
  source 1..75: mol_type = other DNA
gtgctacggccaggcgatacggttattgtctggaagctggaccgaatggggcgttctctgattcatcttgttgat

SEQ ID NO: 292197 - DNA, 75 bp, synthetic construct
  source 1..75: mol_type = other DNA
tatcaacaatcgaccagaatagcgatttacagcgtaatgcgctcacaagcgcaaactgtgaccgcatttttgaag

SEQ ID NO: 292198 - DNA, 75 bp, synthetic construct
  source 1..75: mol_type = other DNA
tttttttgtggttcgggaagttatgacgcatgttccggaataattcattattgtggtcagaacccttcaaagccg

SEQ ID NO: 292199 - DNA, 75 bp, synthetic construct
  source 1..75: mol_type = other DNA
cctctgaactggcggacgcgatccgcaagatggatatttcacacctgaacgccgacgatactctgctactggcca

SEQ ID NO: 292200 - DNA, 75 bp, synthetic construct
  source 1..75: mol_type = other DNA
ggactggaagcggccagagccaaagggcgtattggtggcagacgtccgaagctcaccgcgagtgagtgggaacag

SEQ ID NO: 292201 - DNA, 75 bp, synthetic construct
  source 1..75: mol_type = other DNA
ggatggttgtattaaagaccaagggtttacttcaaagcctattattattggaaataatgtttggattggttcaag

SEQ ID NO: 292202 - DNA, 75 bp, synthetic construct
  source 1..75: mol_type = other DNA
acgttatcagaaggagatacgctcgttgtctggaagctggataggctgggcagaagcatgaaacaccttatcact

SEQ ID NO: 292203 - DNA, 75 bp, synthetic construct
  source 1..75: mol_type = other DNA
ttgtctggaagctggacaggttggggcgcagtatgcgacatcttgttacgctgatagaagagttgcgccagcgtg

SEQ ID NO: 292204 - DNA, 75 bp, synthetic construct
  source 1..75: mol_type = other DNA
aatcacgtcaacgcgtggcactgatttttgatattggcctgtccacgctctataaaaaattccccgcctccgtga

SEQ ID NO: 292205 - DNA, 75 bp, synthetic construct
  source 1..75: mol_type = other DNA
ccgtgcgcagcgcgatgactggctgaagaaagagatacagcgcgtatacgataaaaatcaccaggtatacggtgt

SEQ ID NO: 292206 - DNA, 75 bp, synthetic construct
  source 1..75: mol_type = other DNA
aagaaagagatactgcgcgtatacgatgagaatcatcaggtatacagtgtacgtaaagtctggcgtcagttgtta

SEQ ID NO: 292207 - DNA, 75 bp, synthetic construct
  source 1..75: mol_type = other DNA
agatacagcgcgtatacgatgaaaatcatcaggtgtacggtgtgcgtaaagtctggcgccagttgttacgcgaag

SEQ ID NO: 292208 - DNA, 75 bp, synthetic construct
  source 1..75: mol_type = other DNA
actaacaccagaacaatgggcgcaggcgggtagattaatagcggcaggagaatctcgccggagggttgctataat

SEQ ID NO: 292209 - DNA, 75 bp, synthetic construct
  source 1..75: mol_type = other DNA
caacaaatgaccagaacactgctttgcaacgtgatgcactggaacgctcaggatgtgagctaatttttgaagaca

SEQ ID NO: 292210 - DNA, 75 bp, synthetic construct
  source 1..75: mol_type = other DNA
cagcgataaaggctctcagtatgtgtcactggcctatacggagcgactaaaagaagccggattactggcatcaac

SEQ ID NO: 292211 - DNA, 75 bp, synthetic construct
  source 1..75: mol_type = other DNA
cctgaaacttatttaaacttacctaaacggtatcaacagttaattgggactctgtgtgttgtattgtttttagtt

SEQ ID NO: 292212 - DNA, 75 bp, synthetic construct
  source 1..75: mol_type = other DNA
gtggatcacttttcatccgtcgttgacactttacaacgaaacgcccttgaaagcgcaggatgtgagctaattttt

SEQ ID NO: 292213 - DNA, 75 bp, synthetic construct
  source 1..75: mol_type = other DNA
ctctggcggttcatccggcagtggtggctccggctcgggttccggcggctcatccggcagtggtggttcaggttc

SEQ ID NO: 292214 - DNA, 75 bp, synthetic construct
  source 1..75: mol_type = other DNA
tgctattgataccagcacaccaatggggcgctttttctttcatgtgatgggtgccctagctgaaatggagcgaga

SEQ ID NO: 292215 - DNA, 75 bp, synthetic construct
  source 1..75: mol_type = other DNA
cgacatcccgttttgccgcttctcccaattgaacgtttatgaaaatgcagagataacggctaactggcatcatct

SEQ ID NO: 292216 - DNA, 75 bp, synthetic construct
  source 1..75: mol_type = other DNA
tcgcgacataccaaatgcggacatgtccgggagttgattattaccggttccgacatcccgttttgccgcttctcc

SEQ ID NO: 292217 - DNA, 75 bp, synthetic construct
  source 1..75: mol_type = other DNA
accctgtcaccgggagatacgttggttgtctggaagcttgatcgacttgggcgcagtatgcggcatctggtggtt

SEQ ID NO: 292218 - DNA, 75 bp, synthetic construct
  source 1..75: mol_type = other DNA
cagcatagacacatcttctccaatggggcgttttttcttccacgttatgggggctctggctgaaatggaacgaga

SEQ ID NO: 292219 - DNA, 75 bp, synthetic construct
  source 1..75: mol_type = other DNA
cgccttcaaaaaggtgacacgctggttgtctggaaactggatcgcctcgggcgaagcatgaaacatttgatttct

SEQ ID NO: 292220 - DNA, 75 bp, synthetic construct
  source 1..75: mol_type = other DNA
gaattaatttccggagtctcactgactctatcgacaccagtacaccaatggggcgctttttctttcacgtaatgg

SEQ ID NO: 292221 - DNA, 75 bp, synthetic construct
  source 1..75: mol_type = other DNA
atgcggcgattgctggagaatggcatcccccgtaagcaggttgcaatcatctatgatgtggctgtttccacgctt

SEQ ID NO: 292222 - DNA, 75 bp, synthetic construct
  source 1..75: mol_type = other DNA
gacgaattggcggtcgccgtcccaaactttcaccagaacaatgggcgcagtccgggcgactaattgcatcaggag

SEQ ID NO: 292223 - DNA, 75 bp, synthetic construct
  source 1..75: mol_type = other DNA
gtgaagggtatctggaaattttccgggggctgatagatgagacgcttctgggccaggcactgaaagagcgcattg

SEQ ID NO: 292224 - DNA, 75 bp, synthetic construct
  source 1..75: mol_type = other DNA
gggaaagacactttattcaccgatgaggcgcaggctcatttatacggtcaggtggccggtattgctcgcgctttt

SEQ ID NO: 292225 - DNA, 75 bp, synthetic construct
  source 1..75: mol_type = other DNA
tgcgaccagacggtcccggatggtttcggggggacagagccgcggatgacctttaatgcgtacctggcacaacag

SEQ ID NO: 292226 - DNA, 75 bp, synthetic construct
  source 1..75: mol_type = other DNA
cacgcccggcgatgtgcaccagcggagtcgtgcggcttcgtggtgagaacgccggaaggggaaagatattttccc

SEQ ID NO: 292227 - DNA, 75 bp, synthetic construct
  source 1..75: mol_type = other DNA
agcagacggaatacaaaaccgtgcgcggcttaacccgcggtctaatgttattaaatatgttaaataaacttgatg

SEQ ID NO: 292228 - DNA, 75 bp, synthetic construct
  source 1..75: mol_type = other DNA
cagatggcacaatcaccatccgggacagggacaatcagaagcagaatctggcgaacctgagccgtgaccctgcgc

SEQ ID NO: 292229 - DNA, 75 bp, synthetic construct
  source 1..75: mol_type = other DNA
gcactcgacggccagctcgaccacgacaccggaaagcctctgaaagataccgccgcagccgtaaccgcatgggcg

SEQ ID NO: 292230 - DNA, 75 bp, synthetic construct
  source 1..75: mol_type = other DNA
taacggcggtcccgcgtcttgcggtgtatgacccgacggtacagtttgaattctggttctcagaaaaacgcatca

SEQ ID NO: 292231 - DNA, 75 bp, synthetic construct
  source 1..75: mol_type = other DNA
ggcggcagacgtggacaaatgggcgctgtatgccatcgggcagtaccgtgaccagcgtgttccggatggtttcgg

SEQ ID NO: 292232 - DNA, 75 bp, synthetic construct
  source 1..75: mol_type = other DNA
gattgaaggtgatattgtcaaaacggtcagcaagtctttcccccgcacgagcacttatgccagtggcaccatcac

SEQ ID NO: 292233 - DNA, 75 bp, synthetic construct
  source 1..75: mol_type = other DNA
aatcggttatcaaacgggaatgtggccgactgctgctgttgctggagcagaaacaggacgaggcgcgggaggctg

SEQ ID NO: 292234 - DNA, 75 bp, synthetic construct
  source 1..75: mol_type = other DNA
ggctgatggtgaaatgtaacggcagggtgctttttgaaaggacggcgctggctgagtctcaggtgtattcagggg

SEQ ID NO: 292235 - DNA, 75 bp, synthetic construct
  source 1..75: mol_type = other DNA
tcctcctacgttttccctgacgccggatggcaggctgacagcccgcaatgcggatatcagtggagccatcacggc

SEQ ID NO: 292236 - DNA, 75 bp, synthetic construct
  source 1..75: mol_type = other DNA
atgacgacccgttatatcggtatgaacagggagaccgggtgcgccatcactgacgccgatcatatccgtcagagt

SEQ ID NO: 292237 - DNA, 75 bp, synthetic construct
  source 1..75: mol_type = other DNA
atatccgggccagtaccggatggagcgacagccagcttaaaaaccactgtgtgcgcctggtggaaatggaatacc

SEQ ID NO: 292238 - DNA, 75 bp, synthetic construct
  source 1..75: mol_type = other DNA
attgataatgcgctagttataacaacgggtaatggaagttacgggtatccgttgcaggagagggtagcaagttaa

SEQ ID NO: 292239 - DNA, 75 bp, synthetic construct
  source 1..75: mol_type = other DNA
ggtgggtaatgcatatgctggacagtttattcagcatgaagataaggagcatgcgcttaaaataggcagtgtaaa

SEQ ID NO: 292240 - DNA, 75 bp, synthetic construct
  source 1..75: mol_type = other DNA
tgaactaccatatccgcggtcgcatcatccaggtaccgtcaaactatgacccggaaaaacgcacgtacagcggta

SEQ ID NO: 292241 - DNA, 75 bp, synthetic construct
  source 1..75: mol_type = other DNA
tggtctggaaactggatcgactcggtcgcagcatgcggcatcttgtcgttttggtggaggagcttcgggaaaagg

SEQ ID NO: 292242 - DNA, 75 bp, synthetic construct
  source 1..75: mol_type = other DNA
gcgttaattttcgcagcctgacagatgctattgataccagcacgccgatggggcgttttttctttcatgtgatgg

SEQ ID NO: 292243 - DNA, 75 bp, synthetic construct
  source 1..75: mol_type = other DNA
ggatgtgagctgatttttgaggataaaatcagcggctcgaagtccgacaggccggggctgaaaaaactgctcagg

SEQ ID NO: 292244 - DNA, 75 bp, synthetic construct
  source 1..75: mol_type = other DNA
ggattaattttcgcagtctgaccgacaacatagacacatcttctccaatggggcgttttttcttccacgttatgg

SEQ ID NO: 292245 - DNA, 75 bp, synthetic construct
  source 1..75: mol_type = other DNA
ggcgtttctaccatttatagaaaatttccggcaaataagatcaatgaatccccctgggcactgttgcaaagttag

SEQ ID NO: 292246 - DNA, 75 bp, synthetic construct
  source 1..75: mol_type = other DNA
ttttgatgtaggcgtttctaccatttatagaaaatttccggcaaataagatcaatgaatccccctgggcactgtt

SEQ ID NO: 292247 - DNA, 75 bp, synthetic construct
  source 1..75: mol_type = other DNA
agtcccgtaaacaaatcgcactgatatttgatattggcctgtccaccctttatcgttattttcctgcctcaccgg

SEQ ID NO: 292248 - DNA, 75 bp, synthetic construct
  source 1..75: mol_type = other DNA
ttgtctggaagctggatcggctagggcgtagtatgcggcatctggtcattctggttgaggagttgcgcgaacgtg

SEQ ID NO: 292249 - DNA, 75 bp, synthetic construct
  source 1..75: mol_type = other DNA
atgcttattggctatgtccgcgtatcaacaaatgaccagaacacggaattgcagcgtaacgcgctggagtgtgcg

SEQ ID NO: 292250 - DNA, 75 bp, synthetic construct
  source 1..75: mol_type = other DNA
cagtattgataccagcaccccaatgggacgttttttctttcatgtgatgggtgccctggctgaaatggaacgaga

SEQ ID NO: 292251 - DNA, 75 bp, synthetic construct
  source 1..75: mol_type = other DNA
gggcgctttttctttcatgtcatgggggcgcttgccgagatggaaagagagcttattgttgagcgaacacgggct

SEQ ID NO: 292252 - DNA, 75 bp, synthetic construct
  source 1..75: mol_type = other DNA
aaactgacgaaggagcagcatgagcagatcgcaagattgctccagaaagggtatgacagaaagcggctggcaatt

SEQ ID NO: 292253 - DNA, 75 bp, synthetic construct
  source 1..75: mol_type = other DNA
atagcaaggctgattaaaaacgggcacgacagaaaacaactggcaataatttacggcattggtacatcgacgatt

SEQ ID NO: 292254 - DNA, 75 bp, synthetic construct
  source 1..75: mol_type = other DNA
atgttagtcgccctgatcgtcatctgtattaccgtcgtagtgacggcactggtaacgaggaaagacctatgcgag

SEQ ID NO: 292255 - DNA, 75 bp, synthetic construct
  source 1..75: mol_type = other DNA
agaaaagacctctgtgaggttcacatccgaactggccagacggaggttgctgttcgcgggggagtgacccccgcc

SEQ ID NO: 292256 - DNA, 75 bp, synthetic construct
  source 1..75: mol_type = other DNA
cttacgtgccgaaaggcaaggagaagcaggctatgaagcagcaaaaggcgatgttaatcgcccttatcgtcatct

SEQ ID NO: 292257 - DNA, 75 bp, synthetic construct
  source 1..75: mol_type = other DNA
aggaaagacctctgcgaggtacgaatccgtaccggccagacggaggttgctgtcttcacagcttacgaatctgag

SEQ ID NO: 292258 - DNA, 75 bp, synthetic construct
  source 1..75: mol_type = other DNA
gcaggctatgaagcagcaaaaggcgatgttagtcgcactgattgtcatctgtttaaccgtcatagtgacggcact

SEQ ID NO: 292259 - DNA, 75 bp, synthetic construct
  source 1..75: mol_type = other DNA
ggtaacgaggaaagacctctgtgaggtacgaatccgaaccggccagacggaggtcgctgtcttcacagcttacga

SEQ ID NO: 292260 - DNA, 75 bp, synthetic construct
  source 1..75: mol_type = other DNA
ctggcaaaactgcgtgatacgccggaatacaaaaaggaacaggaaaagtatggcactggcagtgagattcagcga

SEQ ID NO: 292261 - DNA, 75 bp, synthetic construct
  source 1..75: mol_type = other DNA
gaatacaaaaaggaacaggaaaagtatggtaccggtagcgatatgcagcggggtatccaggccgcgacagccgcg

SEQ ID NO: 292262 - DNA, 75 bp, synthetic construct
  source 1..75: mol_type = other DNA
atgcttattggctatgtttgcgtatcaacaaatgaccagaaaatcgatctacaacgtaatgcgtttaactgtgca

SEQ ID NO: 292263 - DNA, 75 bp, synthetic construct
  source 1..75: mol_type = other DNA
gacctctgcgaggtacgagtccgaaccggccagacggaggtcgctgtcttcacagcttacgaacctgaggagtaa

SEQ ID NO: 292264 - DNA, 75 bp, synthetic construct
  source 1..75: mol_type = other DNA
gtttaaccgtcattgtgacggcactggtaacgaggaaagacctctgcgaggtacgaatccgaaccggccagacgg

SEQ ID NO: 292265 - DNA, 75 bp, synthetic construct
  source 1..75: mol_type = other DNA
gcaggctatgaagcagcaaaaggcgatgttaatcgccctgatcgtcatctgtttaaccgtcattgtgacggcact

SEQ ID NO: 292266 - DNA, 75 bp, synthetic construct
  source 1..75: mol_type = other DNA
tgtggcgttcatcattgatgtgtttaccggatacatcgtggggtggcgggtatcatcgtccatggaaacgacatt

SEQ ID NO: 292267 - DNA, 75 bp, synthetic construct
  source 1..75: mol_type = other DNA
acgtattaccactgtcagcaacagcgacatcatcctgataaacgcggtccacatgctcagcgcgatgactggctg

SEQ ID NO: 292268 - DNA, 75 bp, synthetic construct
  source 1..75: mol_type = other DNA
acgtattaccactgtcagcaacagcgacatcatcctgataaacgcggttcacatgcccagcgcgatgactggctg

SEQ ID NO: 292269 - DNA, 75 bp, synthetic construct
  source 1..75: mol_type = other DNA
cagaagtggaactggccacactcacgtgggtggactggtataacaatcgaagattgctggaaaggcggggccata

SEQ ID NO: 292270 - DNA, 75 bp, synthetic construct
  source 1..75: mol_type = other DNA
gtataacaatcgacgattgctggaaaggctgggtcatatccctccggtagaagcagaaaaagcttattatgcttc

SEQ ID NO: 292271 - DNA, 75 bp, synthetic construct
  source 1..75: mol_type = other DNA
acgcgtggcgttggtgaagacatttctgatggcggtaacgcgatttctggcgcagcaacgaaagcgcagcaataa

SEQ ID NO: 292272 - DNA, 75 bp, synthetic construct
  source 1..75: mol_type = other DNA
cagtgaactacatattgccccgtcaacgtattaccactgtcagcagcagcggcatcatcctgataaacgctgtac

SEQ ID NO: 292273 - DNA, 75 bp, synthetic construct
  source 1..75: mol_type = other DNA
gccgtccgtccggcaccatccatcacagcgataaaggctctcagtatgtgtcactggcctatacggagcgactaa

SEQ ID NO: 292274 - DNA, 75 bp, synthetic construct
  source 1..75: mol_type = other DNA
acaatagacgattgctgggaagggtgggccatactcctccggcagaagcagaaaaagctcattatgcttccatcg

SEQ ID NO: 292275 - DNA, 75 bp, synthetic construct
  source 1..75: mol_type = other DNA
acgtattaccactgtcagcaacagcgacatcatcctgataaacgctgtccacatgcacagcgcgatgactggctg

SEQ ID NO: 292276 - DNA, 75 bp, synthetic construct
  source 1..75: mol_type = other DNA
acgtattaccactgtcagcaacagcgacatcatcctgataaacgctgtacacatgcccagcgcgatgactggctg

SEQ ID NO: 292277 - DNA, 75 bp, synthetic construct
  source 1..75: mol_type = other DNA
cacagtgataaaggttctcagtatgtatcgctggcctacacacagcggcttaaggaagccggattactggcatca

SEQ ID NO: 292278 - DNA, 75 bp, synthetic construct
  source 1..75: mol_type = other DNA
cagaagtggaactggccacactcacgtgggtggactggtataacaatcgatgattgctggaaaggctgggccata

SEQ ID NO: 292279 - DNA, 75 bp, synthetic construct
  source 1..75: mol_type = other DNA
agctgtacggggtcggaccggtatgcagtgaacttcatattgccccgtcaacgtattaccactgtcagcagcagc

SEQ ID NO: 292280 - DNA, 75 bp, synthetic construct
  source 1..75: mol_type = other DNA
gaccagctgtgggtggctgattttacttacggtgtgcccggagttcagggcgggcatggatgcttaaatgaaccg

SEQ ID NO: 292281 - DNA, 75 bp, synthetic construct
  source 1..75: mol_type = other DNA
cagcgataaaggctctcagtatgtgtcactggcctatacggagcgattaaaagaagcaaaactgctggcatcaac

SEQ ID NO: 292282 - DNA, 75 bp, synthetic construct
  source 1..75: mol_type = other DNA
tcagttcgtggcagaacgccctgaccagctgtggggggctgattttacttacgtcagcacatggcagggcttcgt

SEQ ID NO: 292283 - DNA, 75 bp, synthetic construct
  source 1..75: mol_type = other DNA
ggggtggcgggtctcatcgtccatggaaacgacattcgtgccggatgcactggagcaggcgttatgggcccgtcg

SEQ ID NO: 292284 - DNA, 75 bp, synthetic construct
  source 1..75: mol_type = other DNA
gctgggaaggctgggtcatatccctccggcagaagcagaaaaagcttattatgcttccatcagaaacgatgatct

SEQ ID NO: 292285 - DNA, 75 bp, synthetic construct
  source 1..75: mol_type = other DNA
cagaagtggaactggccacactcacgtgggtggactggtataacaatcgaggattgctggcaaggccgggccata

SEQ ID NO: 292286 - DNA, 75 bp, synthetic construct
  source 1..75: mol_type = other DNA
cagaagtggaactggccacactcacgtgggtggactggtataacaatcgaggattgctggaaaggcagggccata

SEQ ID NO: 292287 - DNA, 75 bp, synthetic construct
  source 1..75: mol_type = other DNA
cagaagtggaactggccacactcacgtgggtggactggtataacaatcgacgattgctggcaaggcggggccata

SEQ ID NO: 292288 - DNA, 75 bp, synthetic construct
  source 1..75: mol_type = other DNA
gcttactggtaaggctgggccacatccctccgtcagaggcagaaaaagcgtattatgcttccatcggaaatgatg

SEQ ID NO: 292289 - DNA, 75 bp, synthetic construct
  source 1..75: mol_type = other DNA
gcatcaatggtctttacaaagcggaggtaatacaccgtaagagctggaaaaaggggatgcggacgatttcctgga

SEQ ID NO: 292290 - DNA, 75 bp, synthetic construct
  source 1..75: mol_type = other DNA
cagaagtggaactggccacactcacgtgggtggactggtataacaatcgaggattgctgggaaggcggggccata

SEQ ID NO: 292291 - DNA, 75 bp, synthetic construct
  source 1..75: mol_type = other DNA
aaaggacccggcttcatggcacgcctgtttataagatttgtgggcgttgcaatggaaaccggtttagccgtttac

SEQ ID NO: 292292 - DNA, 75 bp, synthetic construct
  source 1..75: mol_type = other DNA
gtcggccgtccggcacaatccatcacagtgataaaggttctcagtatgtatcgctggcctacacgcagcgggctt

SEQ ID NO: 292293 - DNA, 75 bp, synthetic construct
  source 1..75: mol_type = other DNA
cctgctagcttggtgtcctactgagactatccgtgacatcgttcttcttgctgcgggtctgaacagccaacaaca

SEQ ID NO: 292294 - DNA, 75 bp, synthetic construct
  source 1..75: mol_type = other DNA
ctcggaacaaggtaaaatattccattcgcagatccgccatctgttgcaacagttagagagcaaccttgcagaact

SEQ ID NO: 292295 - DNA, 75 bp, synthetic construct
  source 1..75: mol_type = other DNA
ctgtgttctcgcagaaccagacggtgaggcgtgccatggagcagctccgggagattggctatctggattacactg

SEQ ID NO: 292296 - DNA, 75 bp, synthetic construct
  source 1..75: mol_type = other DNA
gaacgtcctgaccagctgtgggggggtggtttttctttcgtcagcaccatggaggggttcgtctatgtgggggtt

SEQ ID NO: 292297 - DNA, 75 bp, synthetic construct
  source 1..75: mol_type = other DNA
tatgggacttgccggtgttctccgggggaaaaaggtccgtactaccgtccacccggaaaccgtttccgcaggcga

SEQ ID NO: 292298 - DNA, 75 bp, synthetic construct
  source 1..75: mol_type = other DNA
ctgtgcgcctgaagaaataccggtcttaccggggaaatatgggactcgctgcagaaaatatccttcagcgactgt

SEQ ID NO: 292299 - DNA, 75 bp, synthetic construct
  source 1..75: mol_type = other DNA
aaggcgtggagattcgcgaagagttgacccgacgccggattgcggcggtagccagctggaaggaacaacgttgcc

SEQ ID NO: 292300 - DNA, 75 bp, synthetic construct
  source 1..75: mol_type = other DNA
gcaaccttatgccacgatctcggaaaagggctgacgccgccagaactttggccgcgccatcatggtcacggtccg

SEQ ID NO: 292301 - DNA, 75 bp, synthetic construct
  source 1..75: mol_type = other DNA
ttctggtcggtaatctcggttctgacccggaaattcgctacatgccaagcggaactgccgttgccaacttcaacg

SEQ ID NO: 292302 - DNA, 75 bp, synthetic construct
  source 1..75: mol_type = other DNA
gtgatcaagggtggcattaccggataaaaagttatcagtctgccctggcggacagagggttagtgcagagcatgt

SEQ ID NO: 292303 - DNA, 75 bp, synthetic construct
  source 1..75: mol_type = other DNA
ggcctacagaggagctggtgaagcggatgttaaataagggtctggaaagccttgctgaaggggagaaaccgctgc

SEQ ID NO: 292304 - DNA, 75 bp, synthetic construct
  source 1..75: mol_type = other DNA
attttgacgagcctttgctggaaaaattacgcgccaaaggcgtggagatggcgtttgtgacgttgcacgttggtg

SEQ ID NO: 292305 - DNA, 75 bp, synthetic construct
  source 1..75: mol_type = other DNA
ttcgaagctccaggagcatgcggcactggtctacaaaattttctgcgctccagaaaagagtgacgcccgcgagtg

SEQ ID NO: 292306 - DNA, 75 bp, synthetic construct
  source 1..75: mol_type = other DNA
gcaggcgaccgcgtaaaccgtcagtttgtggcagaacgttctgaccagttgtgggtggctgattttacttacggt

SEQ ID NO: 292307 - DNA, 75 bp, synthetic construct
  source 1..75: mol_type = other DNA
ccgtaaccctgaccgtcaacgggaaaagccattcagtaaccgtcggtagcgacggaacctggcaagtgacgctgc

SEQ ID NO: 292308 - DNA, 75 bp, synthetic construct
  source 1..75: mol_type = other DNA
gaagtggaactggccacactcacgtgggtggactggtataacaatcgacgattgctgggaaggctgggccatact

SEQ ID NO: 292309 - DNA, 75 bp, synthetic construct
  source 1..75: mol_type = other DNA
ggtaaaaaggtccgtacgaccatcagccggaaagccgttgccgcaggcgaccacgtaaaccgtcagttcgtggca

SEQ ID NO: 292310 - DNA, 75 bp, synthetic construct
  source 1..75: mol_type = other DNA
ggtaaaaaggtccgtacgaccatcagccggaaagccattgccgcaggcgaccgcgtaaaccgtcagttcgtggca

SEQ ID NO: 292311 - DNA, 75 bp, synthetic construct
  source 1..75: mol_type = other DNA
caggttgccctcgacggatgtggaattgcctggctaccggagtacgccatacaacaagaaattcgcagcgggcag

SEQ ID NO: 292312 - DNA, 75 bp, synthetic construct
  source 1..75: mol_type = other DNA
tctgtctacatggctattaaccatgatggccagtaccggtcaggtgtcatttgcctgtatgccggttattgtggg

SEQ ID NO: 292313 - DNA, 75 bp, synthetic construct
  source 1..75: mol_type = other DNA
atgtacgtggtatcgacaaagcagatgctgaacaacgcgcagcgcggcggttatgcggttccggcattcaatatt

SEQ ID NO: 292314 - DNA, 75 bp, synthetic construct
  source 1..75: mol_type = other DNA
gggtaggggtgattcattcctttgcccgccataaggttatcggcgataaagttgagctgccgtttgtcgagttcg

SEQ ID NO: 292315 - DNA, 75 bp, synthetic construct
  source 1..75: mol_type = other DNA
ttaaatcactgaagaacagcaaaaaaaacacgctttcccggactgatgcgacggaagaactgacgcgcctgtctc

SEQ ID NO: 292316 - DNA, 75 bp, synthetic construct
  source 1..75: mol_type = other DNA
ccgccataacgtgattggtgacaaagttgaactgccttttgtcgagtttgcaaaactgtgtggtataccttcaag

SEQ ID NO: 292317 - DNA, 75 bp, synthetic construct
  source 1..75: mol_type = other DNA
atcattgatgtgtttgccggatacatcgtgtgcggatggcgggtctcatcgtctatggaaacgacattcgtgctg

SEQ ID NO: 292318 - DNA, 75 bp, synthetic construct
  source 1..75: mol_type = other DNA
acaagaaattcgcagcgggcagctcgttgtgctgaatcgggacgaactggtgatcccgattcaggcctacgcata

SEQ ID NO: 292319 - DNA, 75 bp, synthetic construct
  source 1..75: mol_type = other DNA
tgaatccagttgccaaccgccattatcccagaccagatcaaacgttagcggctcctcatcatggtacagcatcat

SEQ ID NO: 292320 - DNA, 75 bp, synthetic construct
  source 1..75: mol_type = other DNA
atgcagcgaactgcatattggcccccgtcaacgtattaccattgtcagcaacagcgacatcatccggataaacgc

SEQ ID NO: 292321 - DNA, 75 bp, synthetic construct
  source 1..75: mol_type = other DNA
ccgttgccgcaggcgaccgcgtaaaccgtcagtttgtggcagaacgtcctgaccagttgtgggtggctgatttta

SEQ ID NO: 292322 - DNA, 75 bp, synthetic construct
  source 1..75: mol_type = other DNA
gtccgcactaccgtcagccggaaagccgttgccgcaggcgaccgcgtaaaccgtcagtttgtggcagaacgtcct

SEQ ID NO: 292323 - DNA, 75 bp, synthetic construct
  source 1..75: mol_type = other DNA
atggcttttcaggtaaaaattcatcaaattcgtgcttttgttgaagtggctcgtcagggcagcattcgcggagcg

SEQ ID NO: 292324 - DNA, 75 bp, synthetic construct
  source 1..75: mol_type = other DNA
tataacaatcgacgattgctggaaaggctgggccatatcccaccggcagaagcagaaaaagcttattatgcgtaa

SEQ ID NO: 292325 - DNA, 75 bp, synthetic construct
  source 1..75: mol_type = other DNA
ggaaaaaccgtgcagaagtggaactggccacactcacgtgggtggactggtataacaatcgacgattgctggaaa

SEQ ID NO: 292326 - DNA, 75 bp, synthetic construct
  source 1..75: mol_type = other DNA
aaagagatacagcgcgtatacgatgaaaatcacaaggtatacggtgtgcgtaaagtctggcgtcagttgttacgg

SEQ ID NO: 292327 - DNA, 75 bp, synthetic construct
  source 1..75: mol_type = other DNA
tctggcgtcagttgttacgggaaggtatcagagtggccagatgcactgtggcacgtctcatggcggttatgggac

SEQ ID NO: 292328 - DNA, 75 bp, synthetic construct
  source 1..75: mol_type = other DNA
acagtccatcacagtgataaaggttctcagtatgtatcgctggcctacacacagcggcttaaggaagccggatta

SEQ ID NO: 292329 - DNA, 75 bp, synthetic construct
  source 1..75: mol_type = other DNA
cgggaaggaatcagggtggccagatgtactgtggcacgtctcatggcggctatgggacttgccggtgttctccgg

SEQ ID NO: 292330 - DNA, 75 bp, synthetic construct
  source 1..75: mol_type = other DNA
tcagcggggctgtatattttcgccaaccgtaaagcctatgcctggcgctatgtctatccgggaatggccggaatg

SEQ ID NO: 292331 - DNA, 75 bp, synthetic construct
  source 1..75: mol_type = other DNA
aactgctggcatcaacagggagtacaggtgactcgtatgacaacgcgatggcggagagcatcaatggtctttaca

SEQ ID NO: 292332 - DNA, 75 bp, synthetic construct
  source 1..75: mol_type = other DNA
cagcgcgatgactggctgaagaaagagatacagcgcgtatacgatgaaaatcacaaggtatacggtgtggcgtaa

SEQ ID NO: 292333 - DNA, 75 bp, synthetic construct
  source 1..75: mol_type = other DNA
ccgcgtaaaccgtcagttcgtggcagaacgtcctgaccagctgtgggtggctgattttacttacggtgtgcccgg

SEQ ID NO: 292334 - DNA, 75 bp, synthetic construct
  source 1..75: mol_type = other DNA
actaccgtcagccggaaaaccgttgccgcaggtgaccgcgtaaactgtcagttcgtggcagaacgtcctgaccag

SEQ ID NO: 292335 - DNA, 75 bp, synthetic construct
  source 1..75: mol_type = other DNA
tacgctgaccaataaccagagcggcgtgaaatatcgtccgaataaccaaattggtttttaccagtctattaccgc

SEQ ID NO: 292336 - DNA, 75 bp, synthetic construct
  source 1..75: mol_type = other DNA
gtttttgatgatgccaatgtacaaaaccgaaagctcagtgactgggatggagtctggcaatccgtttatccttta

SEQ ID NO: 292337 - DNA, 75 bp, synthetic construct
  source 1..75: mol_type = other DNA
tataattgcaccgcgcaaatcatctcattttcatattttcatgggtaacgattcacaacaatctttattgaatga

SEQ ID NO: 292338 - DNA, 75 bp, synthetic construct
  source 1..75: mol_type = other DNA
atggaaaactggccaacgtattatccatatcagttgagtagcgaagaagtggtcgaggagatgatgtctcattga

SEQ ID NO: 292339 - DNA, 75 bp, synthetic construct
  source 1..75: mol_type = other DNA
aacaatcgacgattgctggaaaggctgggccatattcctccggcagaagcagaaaaagcttattatgcttccatc

SEQ ID NO: 292340 - DNA, 75 bp, synthetic construct
  source 1..75: mol_type = other DNA
caatcgacgattgctgggaaggctgggtcatatccctccggcagaagcagaaaaagcttattatgcttccatcag

SEQ ID NO: 292341 - DNA, 75 bp, synthetic construct
  source 1..75: mol_type = other DNA
cgttgtgggcccgtcggccgtccggcacaatccaccacagtgataaaggttctcagtatgtatcgctggcctaca

SEQ ID NO: 292342 - DNA, 75 bp, synthetic construct
  source 1..75: mol_type = other DNA
ggcatcaacagggagtacaggcgactcgtatgacaacgcgatggctgagagcatcaatggtctttacaaagcgga

SEQ ID NO: 292343 - DNA, 75 bp, synthetic construct
  source 1..75: mol_type = other DNA
tcgacgattgctggaaaggctgggccatattcctccggcagaagcagaaaaagcttattatgcttccatcggaaa

SEQ ID NO: 292344 - DNA, 75 bp, synthetic construct
  source 1..75: mol_type = other DNA
gaacgtcctgaccagttgtgggtggctgattctacttacgtcagcacatggcagggggtcgtctatgtggcgttc

SEQ ID NO: 292345 - DNA, 75 bp, synthetic construct
  source 1..75: mol_type = other DNA
tcctgaccagctgtgggtggctgattttacttacggtgtgcccggagttcagggcgggcatggatgcttaaatga

SEQ ID NO: 292346 - DNA, 75 bp, synthetic construct
  source 1..75: mol_type = other DNA
gcagcggtagaagagaaatatcgcttttttagttacggtgatgtgatgtttatcacgtacaatccgcaggcaatt

SEQ ID NO: 292347 - DNA, 75 bp, synthetic construct
  source 1..75: mol_type = other DNA
ggatgctcgacgacaaacgcattcttgcgcatattcgcgcctcgaaagcgccaaaacctggcgcagaactgctgc

SEQ ID NO: 292348 - DNA, 75 bp, synthetic construct
  source 1..75: mol_type = other DNA
ataaggcagtaatcgctgcgtgcagtaacggacaggcagccagcgcagcttgtgccggtgaaagactgaaggtta

SEQ ID NO: 292349 - DNA, 75 bp, synthetic construct
  source 1..75: mol_type = other DNA
atgccactgctggataagctgcgtgagcgggacgggggcggaccggtatgcagcgaactgcatattgccccgtca

SEQ ID NO: 292350 - DNA, 75 bp, synthetic construct
  source 1..75: mol_type = other DNA
ggccacactcacgtgggtggactggtataacaatcgacgattgctgggaaggctggtcatatccctccggcagaa

SEQ ID NO: 292351 - DNA, 75 bp, synthetic construct
  source 1..75: mol_type = other DNA
gtcaacgtattaccactgtcagcaacagcgacatcatcctgataaacgcagtgcccgtgctcagcgcgatgactg

SEQ ID NO: 292352 - DNA, 75 bp, synthetic construct
  source 1..75: mol_type = other DNA
tgattttacttacgtcagcacatggcagggcttcgtctatgtggcgttcatcattgatgtgtttgccggatacat

SEQ ID NO: 292353 - DNA, 75 bp, synthetic construct
  source 1..75: mol_type = other DNA
cagtgaactgcatattgccccgtcaacgtattaccattgtcagcagcagcggcatcatcctgataaacgcagtgc

SEQ ID NO: 292354 - DNA, 75 bp, synthetic construct
  source 1..75: mol_type = other DNA
ggtagccagatgtacagtggcgcgcctcatggcggttatgggacttgccggtgttctccggggtaaaaaggtccg

SEQ ID NO: 292355 - DNA, 75 bp, synthetic construct
  source 1..75: mol_type = other DNA
gactctgcgtgtctgggttcgccagcatgagcgggataccgggggcggtgatggagggctcaccaccgctgaacg

SEQ ID NO: 292356 - DNA, 75 bp, synthetic construct
  source 1..75: mol_type = other DNA
actgctggcatcaacaggaagtacaggcgactcgtatgacaacgcgatggcggagagcatcaatggcctttacaa

SEQ ID NO: 292357 - DNA, 75 bp, synthetic construct
  source 1..75: mol_type = other DNA
actcctggcatcaacaggcagtacgggcgactcgtatgacaacgcgatggcggagagcatcaatggcctttacaa

SEQ ID NO: 292358 - DNA, 75 bp, synthetic construct
  source 1..75: mol_type = other DNA
acttctggcatcaacaggtagtacgggcgactcgtatgacaacgcgatggcggagagcatcaatggcctttacaa

SEQ ID NO: 292359 - DNA, 75 bp, synthetic construct
  source 1..75: mol_type = other DNA
gcactaccgtcagccggaaagccgttgccgcaggcgaccgcgtaaaccgtcagtttgtggcagaacgttctgacc

SEQ ID NO: 292360 - DNA, 75 bp, synthetic construct
  source 1..75: mol_type = other DNA
actgctggcatcaacagggagtacgggcgactcgtatgacaacgcgatggcggagagcatcaatggcctttacaa

SEQ ID NO: 292361 - DNA, 75 bp, synthetic construct
  source 1..75: mol_type = other DNA
actgctggcatcaacaggcagtaccggcgactcgtatgacaacgcgatggcggagagcatcaatggcctttacaa

SEQ ID NO: 292362 - DNA, 75 bp, synthetic construct
  source 1..75: mol_type = other DNA
ctcatcgtctatggaaacgacattcgtgctggatgctctggagcaggcgttttgggcccgacgaccgtccggcac

SEQ ID NO: 292363 - DNA, 75 bp, synthetic construct
  source 1..75: mol_type = other DNA
ctcatcgtctatggaaacgacattcgtgctggatgcactggagcaggcgttttgggcccgtcgaccgtccggcac

SEQ ID NO: 292364 - DNA, 75 bp, synthetic construct
  source 1..75: mol_type = other DNA
gtgttggatgctctggagcaggcgttatgggtccgtcgaccgtccggcacagtccatcacagtgataaaggttct

SEQ ID NO: 292365 - DNA, 75 bp, synthetic construct
  source 1..75: mol_type = other DNA
actactggcatcaacaggaagtacgggcgactcgtatgacaacgcgatggcggagagcatcaatggcctttacaa

SEQ ID NO: 292366 - DNA, 75 bp, synthetic construct
  source 1..75: mol_type = other DNA
ctcatcgtctatggaaacgacattcgtgctggatgcgctggagcaggcgttttgggcccgccgtccgtccggcac

SEQ ID NO: 292367 - DNA, 75 bp, synthetic construct
  source 1..75: mol_type = other DNA
ctcatcgtctatggaaacgacattcgtgctggatgccctggagcaggcgttttgggcccggcgtccgtccggcac

SEQ ID NO: 292368 - DNA, 75 bp, synthetic construct
  source 1..75: mol_type = other DNA
ttgttcctcaaaacctcgagcacagtgaacgagccgtcattttttctccaagtagtagtcgaccttgtcttaatg

SEQ ID NO: 292369 - DNA, 75 bp, synthetic construct
  source 1..75: mol_type = other DNA
tgccgcaagaacgttcagtctggtcacgctggggcgtgataaggatacgttgaaaaaaggtgaccgggtatgggt

SEQ ID NO: 292370 - DNA, 75 bp, synthetic construct
  source 1..75: mol_type = other DNA
tcctgctgggaagcctgttcagccttagcgcctgtgtgcagcagagcgaagtgcgacagatgaaacacagcgtca

SEQ ID NO: 292371 - DNA, 75 bp, synthetic construct
  source 1..75: mol_type = other DNA
gtggcgcgtctgcagatattgcaaacgctatatggcaaaagcttcccccaggaccttcaatggtcggtaacacgg

SEQ ID NO: 292372 - DNA, 75 bp, synthetic construct
  source 1..75: mol_type = other DNA
gatgattgtcagacatggaaatctaaagggaagtcactaattgactggagtggcgagatctgtggtcctgacggg

SEQ ID NO: 292373 - DNA, 75 bp, synthetic construct
  source 1..75: mol_type = other DNA
gctacctgtgctccgtaaatttcgtttccatcaatctcgctgtactttcggtaccgaattagcccgtctggctct

SEQ ID NO: 292374 - DNA, 75 bp, synthetic construct
  source 1..75: mol_type = other DNA
cgctggctaaagggaaggggaatgacgagaaaaactggtatctgaccagtaaatgggacggcgtaacgccaccgg

SEQ ID NO: 292375 - DNA, 75 bp, synthetic construct
  source 1..75: mol_type = other DNA
atgaataaagtaaaatgttatgttttatttacggcgttactatcctctctatgtgcacacggagctccccagtct

SEQ ID NO: 292376 - DNA, 75 bp, synthetic construct
  source 1..75: mol_type = other DNA
ggcggatgctggagaaattataacgagttttggtgagttcgttattggagatagcctggtagttggttttgttat

SEQ ID NO: 292377 - DNA, 75 bp, synthetic construct
  source 1..75: mol_type = other DNA
gatggataagctgccaaaagcgcaatttgccgattataaatccgcgaccaacaacgccatctgcaacaccaatcc

SEQ ID NO: 292378 - DNA, 75 bp, synthetic construct
  source 1..75: mol_type = other DNA
acgatctgggaaattttatatttatcccggtcatcttcctgatactgatgaagatacttggccgtcctctttcag

SEQ ID NO: 292379 - DNA, 75 bp, synthetic construct
  source 1..75: mol_type = other DNA
tgctggtcgcccgtctgactgactgtgttaacgttgatgttttcaaccttcatcaaaatgcgtcaatgggggcaa

SEQ ID NO: 292380 - DNA, 75 bp, synthetic construct
  source 1..75: mol_type = other DNA
ctgaagcgtaaattgaacggaggaccggtcagccatgaagaacgcgaatttttgaaacgcctcacaatgatcgag

SEQ ID NO: 292381 - DNA, 75 bp, synthetic construct
  source 1..75: mol_type = other DNA
aattaccttatgatttaaccgagagagagtttaaattactgcagaaggaagctgaagataaatatgattcgaaaa

SEQ ID NO: 292382 - DNA, 75 bp, synthetic construct
  source 1..75: mol_type = other DNA
cctgattctgaaatcagatctgcttttgtttctgcatgggaagcgttatttccccaacgcgtcgttcctgacaat

SEQ ID NO: 292383 - DNA, 75 bp, synthetic construct
  source 1..75: mol_type = other DNA
ttactggaaaaatggtgcggtatcccgggacctgctgctccgtggctgcttactgctctggcagccgatctggtc

SEQ ID NO: 292384 - DNA, 75 bp, synthetic construct
  source 1..75: mol_type = other DNA
gtcgcttacctggcaaagaacaacaccaaacatttaagttccggtaaccggaacttaggcacaagtcagataacg

SEQ ID NO: 292385 - DNA, 75 bp, synthetic construct
  source 1..75: mol_type = other DNA
agggctggtgaacctgcattacccgcttatatctgggcccgagaacgtaataccagcgaacatccccactaccac

SEQ ID NO: 292386 - DNA, 75 bp, synthetic construct
  source 1..75: mol_type = other DNA
gtggcctatctgagcaaagactacagcaaagacttctatgacggttatcgcaactttggcacaagccagcttatg

SEQ ID NO: 292387 - DNA, 75 bp, synthetic construct
  source 1..75: mol_type = other DNA
atgttagcacttcggatcgccacggggatggcccgcgttattacccgccaggtaaatgaaatccgtcatgccagc

SEQ ID NO: 292388 - DNA, 75 bp, synthetic construct
  source 1..75: mol_type = other DNA
atgttagcgcttagggtagccacaggtatggcccgtgttatcaccaaccaggttaatgaaattcgtcattccaac

SEQ ID NO: 292389 - DNA, 75 bp, synthetic construct
  source 1..75: mol_type = other DNA
tttgaaacgcctcacaatgatcgaaaaagacctacacatgcagttagccagtatcgggtgtgacgtaggcgagta

SEQ ID NO: 292390 - DNA, 75 bp, synthetic construct
  source 1..75: mol_type = other DNA
gttggcaccttcagtaaaagtctggcctcgattggcggtttttctgtcggttcggaagcgatggaagtgctgcgc

SEQ ID NO: 292391 - DNA, 75 bp, synthetic construct
  source 1..75: mol_type = other DNA
tatatttttaccgcctctccttctccgtcctgcattgcgaccgtgcgctcgtcgttaagaactattgccacacaa

SEQ ID NO: 292392 - DNA, 75 bp, synthetic construct
  source 1..75: mol_type = other DNA
ctcacgaaaaacatagcccagggcgcgcccgccaccgccgaggaaagggggtttgtgaaaaaggtaaaaatgatt

SEQ ID NO: 292393 - DNA, 75 bp, synthetic construct
  source 1..75: mol_type = other DNA
ctgaccgtaatcgaacagatcacctatctaatgtattctcggatgctggatactcaggaacaacgcgacgagaag

SEQ ID NO: 292394 - DNA, 75 bp, synthetic construct
  source 1..75: mol_type = other DNA
tgaaattggctataattaaacatcaacacgaaaacatgctgttaaataaaaaatatcaagaaaacaaaccaatga

SEQ ID NO: 292395 - DNA, 75 bp, synthetic construct
  source 1..75: mol_type = other DNA
tgtatcagccttccgaaatgcgctccagttagggaccgctgcaacacgagatgttggagcagataatgcctcgaa

SEQ ID NO: 292396 - DNA, 75 bp, synthetic construct
  source 1..75: mol_type = other DNA
acacctccaacggggtggctgaaatgcaacggtgcagcattttcttctgaaagtatcccaaactggcaaaggcta

SEQ ID NO: 292397 - DNA, 75 bp, synthetic construct
  source 1..75: mol_type = other DNA
agacggtgagggtgagaagccgtcggttggccatgcaggccacttgcaatatgagtcgcgcgcacgggcaactga

SEQ ID NO: 292398 - DNA, 75 bp, synthetic construct
  source 1..75: mol_type = other DNA
gaagacggcgacacgattctggtcgttttgattacaccaaatgtgcttaattccggctccagtgcagtaataaaa

SEQ ID NO: 292399 - DNA, 75 bp, synthetic construct
  source 1..75: mol_type = other DNA
atgaactttccattaattgcgaacatcgtggtgttcgttgtactgctgtttgcgctggctcagacccgccataaa

SEQ ID NO: 292400 - DNA, 75 bp, synthetic construct
  source 1..75: mol_type = other DNA
ccagcagttgcgcgagcgtgacggcgaaagcaaaaccatcctcagcgcccatttgtcgctgattcaggatgatga

SEQ ID NO: 292401 - DNA, 75 bp, synthetic construct
  source 1..75: mol_type = other DNA
tgtcacaggggtattatcttgatgtcagcttactggacaatgtgacgctttatgacagttttgtgccggttgaat

SEQ ID NO: 292402 - DNA, 75 bp, synthetic construct
  source 1..75: mol_type = other DNA
ctcaacggcgatccggaccagccgatcattatggggcgcacctaccaccaggaaaaccgcacacccggcagcctg

SEQ ID NO: 292403 - DNA, 75 bp, synthetic construct
  source 1..75: mol_type = other DNA
gcccatgtcgtcaccgggaagtatgcagaccatctgccgttataccgccagtcagaaatataccgtcgtcagggt

SEQ ID NO: 292404 - DNA, 75 bp, synthetic construct
  source 1..75: mol_type = other DNA
ggaaagcaagcggcagacgctacgctcactgctctagcggcactagctaccgcagcagataaactcccttatttc

SEQ ID NO: 292405 - DNA, 75 bp, synthetic construct
  source 1..75: mol_type = other DNA
tggtaatacgggagttatcagatgggggaacacaaacgatgcaggattgccagcccctaattatggaacttttaa

SEQ ID NO: 292406 - DNA, 75 bp, synthetic construct
  source 1..75: mol_type = other DNA
gcctttctgctacacgttctaagaattatgaaaggcgatgaggtcgaagacgaaggcctgcttgacgacaagcgc

SEQ ID NO: 292407 - DNA, 75 bp, synthetic construct
  source 1..75: mol_type = other DNA
ttattgtgagttctgtaatacaccgcaaaaaaagaaaatgaaatatcatatgatgattgttttttgtcgtgtaat

SEQ ID NO: 292408 - DNA, 75 bp, synthetic construct
  source 1..75: mol_type = other DNA
aacacacgcctacaacgaacaggggctggcaaaccgcgtcacgccggacggtctgccgccggtggagtggctgac

SEQ ID NO: 292409 - DNA, 75 bp, synthetic construct
  source 1..75: mol_type = other DNA
aggaaattgcgacagaggttatctggatatcctccgaaaatgtcgcaaaaaatatgacaaatacaaaagagcgta

SEQ ID NO: 292410 - DNA, 75 bp, synthetic construct
  source 1..75: mol_type = other DNA
cctcattaggggtgaaagatatcgtcctgcctggtgatatgaaaaatatcctcgcgcagctggttgaggcagaga

SEQ ID NO: 292411 - DNA, 75 bp, synthetic construct
  source 1..75: mol_type = other DNA
taagcgcttttattttgagcgctgctatggaacgcgccgaaagtgtgcttgataaccaacgtcgccgtgagcttt

SEQ ID NO: 292412 - DNA, 75 bp, synthetic construct
  source 1..75: mol_type = other DNA
gctatggaacgcgccgaaagtgtgcttgataaccaacgtcgccgtgagctttcgaatcaaagctgggaaactgat

SEQ ID NO: 292413 - DNA, 75 bp, synthetic construct
  source 1..75: mol_type = other DNA
tgaggagtctgtttccctgtggctggctacctgtattgacggtgtggtgaagccttatgccaccggtgctcacgc

SEQ ID NO: 292414 - DNA, 75 bp, synthetic construct
  source 1..75: mol_type = other DNA
cacggacaattatctgattcctatttatcaacggaactatgcttggcgggccgaacagattgagcaacttatcag

SEQ ID NO: 292415 - DNA, 75 bp, synthetic construct
  source 1..75: mol_type = other DNA
tcgatggcttcatcttgaagcgtcaattcacggcgaacatcggtgacgatggcgattggtctctccagcgattga

SEQ ID NO: 292416 - DNA, 75 bp, synthetic construct
  source 1..75: mol_type = other DNA
ggatgaagctgggcggaacaccgctggtcgagtacacgcgggaccggctgcaccgtgagacggtgcgcagcttcg

SEQ ID NO: 292417 - DNA, 75 bp, synthetic construct
  source 1..75: mol_type = other DNA
gccacggcgtacaccctcacagggcagctacagagcaggcacctgaaccttccgcagcttgactgtgactatacg

SEQ ID NO: 292418 - DNA, 75 bp, synthetic construct
  source 1..75: mol_type = other DNA
ttactgaaaatattctttgtgtctgtctgtattatttattattactcagtgttatcaactggaattgtatcaggg

SEQ ID NO: 292419 - DNA, 75 bp, synthetic construct
  source 1..75: mol_type = other DNA
atgccttataacgttcccgcactgcgcaaacttattactgacggcgaaaaagatattgcctttgaactggggctg

SEQ ID NO: 292420 - DNA, 75 bp, synthetic construct
  source 1..75: mol_type = other DNA
aaacctttatatatgatttgcttcgcagagatgatgcagaatcgttcatggacaaatttgggcgagttttcgaaa

SEQ ID NO: 292421 - DNA, 75 bp, synthetic construct
  source 1..75: mol_type = other DNA
ttaattctgatgtagtaaatgagatgggaataaaaatggttgactcagttctggaaaaaatttcccaaaatgaaa

SEQ ID NO: 292422 - DNA, 75 bp, synthetic construct
  source 1..75: mol_type = other DNA
ccacgccagagcagcgtctgctggtcgatgcgttgtttggcggtaaagatcgtctgaacgtggatgcgcgtacgt

SEQ ID NO: 292423 - DNA, 75 bp, synthetic construct
  source 1..75: mol_type = other DNA
attgtcagcctttcacctgtaggtaaagatcactggggggaggagtttatttcactatgggaaaaagaaggaata

SEQ ID NO: 292424 - DNA, 75 bp, synthetic construct
  source 1..75: mol_type = other DNA
ctgcatggggtgccgaaaattctgtttaccgaccccggctctgcgctggtctcggcctcgctgctcaatatgtgc

SEQ ID NO: 292425 - DNA, 75 bp, synthetic construct
  source 1..75: mol_type = other DNA
caaatttcctccagtgtataaacgtttcttaatagaagaaattaaagatagtgaggcctatgaaataactaataa

SEQ ID NO: 292426 - DNA, 75 bp, synthetic construct
  source 1..75: mol_type = other DNA
gatcagccaggcactccgcaggggtttggtcagacgcagccggcggataattcgttaggcctggcgttcaacaat

SEQ ID NO: 292427 - DNA, 75 bp, synthetic construct
  source 1..75: mol_type = other DNA
ggccgacgcatcaactgagtttgatgttggtcagcaacatctgtcactctccgttccgcaaatttatgttggcag

SEQ ID NO: 292428 - DNA, 75 bp, synthetic construct
  source 1..75: mol_type = other DNA
gccctgaaccccttgatcgcgcaggccgtcatgggtggcggccagcatgtgcgcatcagcatggacgaggtgcgg

SEQ ID NO: 292429 - DNA, 75 bp, synthetic construct
  source 1..75: mol_type = other DNA
aggtggataccgaacatctgctgctggcgctcgccgacagcgacgtggtcaagaccatcctgggtcagttcaaga

SEQ ID NO: 292430 - DNA, 75 bp, synthetic construct
  source 1..75: mol_type = other DNA
gatttttgaatatggtctttatagccgccatagtgcggcgcatccaccgcgctatggcgatcaaattgaggagcg

SEQ ID NO: 292431 - DNA, 75 bp, synthetic construct
  source 1..75: mol_type = other DNA
cgcacccattaagcaggcgcttgcgcatggattattattacacttaaaaaatatctaccctgtttttcctgaatc

SEQ ID NO: 292432 - DNA, 75 bp, synthetic construct
  source 1..75: mol_type = other DNA
ggtagaggttatatacatatgggtattggagcctgttatgtccttatgccttccttcttcaaatattttgatgaa

SEQ ID NO: 292433 - DNA, 75 bp, synthetic construct
  source 1..75: mol_type = other DNA
ccgccggggacgggtaaatctaccttaactaccttctgggaatatctcgcgcaacaagacccggaactgcccgct

SEQ ID NO: 292434 - DNA, 75 bp, synthetic construct
  source 1..75: mol_type = other DNA
atgtctggcctggaagggtttgggaccggcttccggagttatgttcaggcccaggggacgctggtaaataatacc

SEQ ID NO: 292435 - DNA, 75 bp, synthetic construct
  source 1..75: mol_type = other DNA
attagtgactaacgaagtgggaatggggattgtgccggagagtcgtctggcacgacattttcgtgatattgccgg

SEQ ID NO: 292436 - DNA, 75 bp, synthetic construct
  source 1..75: mol_type = other DNA
atgcacgattaaatgaatggatatctaatagagtgcaggaattaggtgacagatattatcctgtaaataagcacg

SEQ ID NO: 292437 - DNA, 75 bp, synthetic construct
  source 1..75: mol_type = other DNA
cgaaggagtgtgatcgtattactgagcgatataccaagaagcgcataaatctgcatgtcctcgaagcaatgcgcg

SEQ ID NO: 292438 - DNA, 75 bp, synthetic construct
  source 1..75: mol_type = other DNA
gcgacacaccaagaagcgcacaaatctgcatgtcctcgaagcaatgcgcgatttgaaagcaatttgccccaccag

SEQ ID NO: 292439 - DNA, 75 bp, synthetic construct
  source 1..75: mol_type = other DNA
caagtgggccaacatattcaatttcggtgcgccttatttgcgccactacagagtcggtcaactcggcactattgc

SEQ ID NO: 292440 - DNA, 75 bp, synthetic construct
  source 1..75: mol_type = other DNA
ttagccctgcgctggtggtgctggcggtgctttcgcaatacgtacgccagccagcattgaaagctaaggccgaag

SEQ ID NO: 292441 - DNA, 75 bp, synthetic construct
  source 1..75: mol_type = other DNA
cgcgcctgtttcatgggatgagttgacgcttgcgtccggggaatactggagcggcgagattgcggcggcaaagct

SEQ ID NO: 292442 - DNA, 75 bp, synthetic construct
  source 1..75: mol_type = other DNA
ggtgggggttttgttgtcaccgtctggacgcgtggcggtaaccagctccgttatccgggaaagtaccgggttgtg

SEQ ID NO: 292443 - DNA, 75 bp, synthetic construct
  source 1..75: mol_type = other DNA
gggagcccaggcttacgcagccgggttagtggtaaatgataacgatctgcgaaatgaccttgcctggctttccga

SEQ ID NO: 292444 - DNA, 75 bp, synthetic construct
  source 1..75: mol_type = other DNA
gtggtcggtgcgtttttagccggcgaaaacgagggtattgtgatcaagcttctggcaattcctgtctttatgatt

SEQ ID NO: 292445 - DNA, 75 bp, synthetic construct
  source 1..75: mol_type = other DNA
gctgtatgtcagcgatcatggcgaaagtctgggtgagaacggtgtctatctacatggtatgccaaatgcctttgc

SEQ ID NO: 292446 - DNA, 75 bp, synthetic construct
  source 1..75: mol_type = other DNA
cccctgagcaactggaagacgccaagcgtcttaaaagcattttcatcgctaaaaagaaagagttaggcttgtcac

SEQ ID NO: 292447 - DNA, 75 bp, synthetic construct
  source 1..75: mol_type = other DNA
aggtgatgattattcaatctttagcctgctatgaacctccatcaagaattgtcgaacttgtaaaacaagattttg

SEQ ID NO: 292448 - DNA, 75 bp, synthetic construct
  source 1..75: mol_type = other DNA
attaaaacagatatcgacaaataaaaatatcagtttttttaagaatgatgaggtatcgattatcacaacacaaag

SEQ ID NO: 292449 - DNA, 75 bp, synthetic construct
  source 1..75: mol_type = other DNA
aggttgcgcgcaacctacatccgtgacgcccggtgaaaatggtcacggttgcggacacaatttgctgggaaccgc

SEQ ID NO: 292450 - DNA, 75 bp, synthetic construct
  source 1..75: mol_type = other DNA
ggttgattctatattactgcaatttgtgaaggacaatattgatgttttcccgtgtcgccataacagacacgagtt

SEQ ID NO: 292451 - DNA, 75 bp, synthetic construct
  source 1..75: mol_type = other DNA
cactccaactgacgccactggccattcattacggtagttgggacgctcaaagcggctatctggcgacgttacaga

SEQ ID NO: 292452 - DNA, 75 bp, synthetic construct
  source 1..75: mol_type = other DNA
caatattagcagtagtggcggattttctgaaagcaacagcacgaaaaaaaactcccttgcgtgggctgcaggtgc

SEQ ID NO: 292453 - DNA, 75 bp, synthetic construct
  source 1..75: mol_type = other DNA
gatttcagtcccagcctggcaaaatctattgcagaaatggcgctcgcaattgaagagccattaactcgtgtcccc

SEQ ID NO: 292454 - DNA, 75 bp, synthetic construct
  source 1..75: mol_type = other DNA
aggcgcagaaaatcgcgacggacaacgacgatatcgtctgtctgttcctcgacgttgacccttacagttccgtgt

SEQ ID NO: 292455 - DNA, 75 bp, synthetic construct
  source 1..75: mol_type = other DNA
gatgacatattcaaaatgcttataatacattgtgaccaacttgcaagagaggttgattctatattactgcaattt

SEQ ID NO: 292456 - DNA, 75 bp, synthetic construct
  source 1..75: mol_type = other DNA
aacggcaaaggactggcgcaaaaatgggtggacatgttcaacgccacccgcgaacgcttccagagtgaaatctcc

SEQ ID NO: 292457 - DNA, 75 bp, synthetic construct
  source 1..75: mol_type = other DNA
ttattggctcgatgatgcatgtcgggattattgagttgcgacgctgccagtcagaaaaatgccagcaagagttga

SEQ ID NO: 292458 - DNA, 75 bp, synthetic construct
  source 1..75: mol_type = other DNA
cctgaacaatcatcattagctggtgactggttactgacccctaaagataaaaccagaggattaacgggtagcatt

SEQ ID NO: 292459 - DNA, 75 bp, synthetic construct
  source 1..75: mol_type = other DNA
aagctctccggcaccgatgcggcgcactgggagcagggtcaggcgaagctgaaagcgcttatccccaacatcaaa

SEQ ID NO: 292460 - DNA, 75 bp, synthetic construct
  source 1..75: mol_type = other DNA
cggtaagcttctacggacagatgatcggtgaggatgagtcgggttttcttccatcgtctaatatgttcctgggag

SEQ ID NO: 292461 - DNA, 75 bp, synthetic construct
  source 1..75: mol_type = other DNA
gagggagataactcagggagacggtaagtatcatcgatgtgaacacaaggagaactataaagctgatataaataa

SEQ ID NO: 292462 - DNA, 75 bp, synthetic construct
  source 1..75: mol_type = other DNA
tctgatgcggcagttaccttcaatggattccattcaacttacggttttacgcaagggtgcgcgccacgacatttc

SEQ ID NO: 292463 - DNA, 75 bp, synthetic construct
  source 1..75: mol_type = other DNA
gcagcaaaaagtgctgctgcagagtcatcaaaaagcgcggcagctaccagcgccagtgccgcgaaaacgtcagaa

SEQ ID NO: 292464 - DNA, 75 bp, synthetic construct
  source 1..75: mol_type = other DNA
acggggcttggcattatcggtgcagttgatggcgatgatccggcagtattcagaccaatacaaaaatacatcaat

SEQ ID NO: 292465 - DNA, 75 bp, synthetic construct
  source 1..75: mol_type = other DNA
acaggcaaagacaatactgggacaaaggacgagccagggaatcagttggcaggttttgactttaaattcaaactc

SEQ ID NO: 292466 - DNA, 75 bp, synthetic construct
  source 1..75: mol_type = other DNA
actgaagagattgacccgtccaccacgatgcaggagcagctccgcccgatgctgcgcctgattctcgacaacgaa

SEQ ID NO: 292467 - DNA, 75 bp, synthetic construct
  source 1..75: mol_type = other DNA
gttccggcgataaaatgaccggagaactgaaaattggcacggtgaatgcgctgcgaattttcaatgataccttcg

SEQ ID NO: 292468 - DNA, 75 bp, synthetic construct
  source 1..75: mol_type = other DNA
gacagggaacgaataatacccaaatcgcaagcacggctttcgttatggctgcgattgccgcccttgtagattcgt

SEQ ID NO: 292469 - DNA, 75 bp, synthetic construct
  source 1..75: mol_type = other DNA
atgagccggttacctctggccacactggagcgtcttctgagcctgctgtcggcctttgaggtcgtggtatggatg

SEQ ID NO: 292470 - DNA, 75 bp, synthetic construct
  source 1..75: mol_type = other DNA
aggacggttgtggcgcacgtattcggtgaacgcactctggccacactggagcgtcttctgagcctgctgtcggcc

SEQ ID NO: 292471 - DNA, 75 bp, synthetic construct
  source 1..75: mol_type = other DNA
acgcctgaagggaaagctgcacgttatcagcaagcgttacactcagcgcattgagcgacataatctgaatctgag

SEQ ID NO: 292472 - DNA, 75 bp, synthetic construct
  source 1..75: mol_type = other DNA
gcacctggcaaggctgggacggaagtcactgtcgttctcaaaatcggtggagcggcatgacaaggtcatcgggca

SEQ ID NO: 292473 - DNA, 75 bp, synthetic construct
  source 1..75: mol_type = other DNA
atctgaatctgagacaacatctggcaaggctgggacggaagtcactgtcgttctcaaaatcgctggagctgcatg

SEQ ID NO: 292474 - DNA, 75 bp, synthetic construct
  source 1..75: mol_type = other DNA
agcaagcgttacactcagcgcattgagcgacataacctgaatctgagactacatctggcaaggctgggcaggaag

SEQ ID NO: 292475 - DNA, 75 bp, synthetic construct
  source 1..75: mol_type = other DNA
ctggccgctgtatgaatcacgcctgaagggaaagctgcacgttatcagcaagcgttacactcagcgcattgagcg

SEQ ID NO: 292476 - DNA, 75 bp, synthetic construct
  source 1..75: mol_type = other DNA
gatgtgattgtctgcgctgaaatggacgaacattggggctacgtcggtgctaaatcacgtcagcgctggctgttt

SEQ ID NO: 292477 - DNA, 75 bp, synthetic construct
  source 1..75: mol_type = other DNA
ctatctggttgatgccccatcctttacctaatagccgcagtaccttgcgctctgaaagagtgagaatgacggagc

SEQ ID NO: 292478 - DNA, 75 bp, synthetic construct
  source 1..75: mol_type = other DNA
acggaagtcacactcgttctacttcccggtggagctgcatgacaaggtcatcgggcattatctgaacataaaaca

SEQ ID NO: 292479 - DNA, 75 bp, synthetic construct
  source 1..75: mol_type = other DNA
acggctgtcacaacaaaagctggatgccattgagcgtctggagacccgccccgttgatcgcctgtttacgggtat

SEQ ID NO: 292480 - DNA, 75 bp, synthetic construct
  source 1..75: mol_type = other DNA
ctggctgttttacgcgtatgacaggatacggaggtcggttgtggcgcacgtcttcggtgaacgcactctggccac

SEQ ID NO: 292481 - DNA, 75 bp, synthetic construct
  source 1..75: mol_type = other DNA
tcagggagaaccaaaagccctgacacaaaccatggccggacgcagctttctgatgaccagtccacacgaggcaac

SEQ ID NO: 292482 - DNA, 75 bp, synthetic construct
  source 1..75: mol_type = other DNA
tattggtattagcaggtaccgaagctcgcgactccacggttggcaagggtggggcaatgcaaaacctgggtcagg

SEQ ID NO: 292483 - DNA, 75 bp, synthetic construct
  source 1..75: mol_type = other DNA
ttggtttacgggcagtggcttttgttgaaaatgagatagaagaatggattcaatcagcaatcgaaggaagcagaa

SEQ ID NO: 292484 - DNA, 75 bp, synthetic construct
  source 1..75: mol_type = other DNA
tattcccattcacatatcggttttgatcgcggaggacatggcagtgtgggcagttattctctgggcggctatgcc

SEQ ID NO: 292485 - DNA, 75 bp, synthetic construct
  source 1..75: mol_type = other DNA
tgttttacgcgtatggcaggatacggaggactgttgtggcgcacgtcttcggtgaacgcactctggccacactgg

SEQ ID NO: 292486 - DNA, 75 bp, synthetic construct
  source 1..75: mol_type = other DNA
gagcgacataatctgagacaacatctggcaaggctgggacggaagtcactgtcgttctcaaaatcggtggagctg

SEQ ID NO: 292487 - DNA, 75 bp, synthetic construct
  source 1..75: mol_type = other DNA
cagcaagcgttacactcagcgcattgagcgacataatctgagacaacatctggcaaggctgggacggaagtcact

SEQ ID NO: 292488 - DNA, 75 bp, synthetic construct
  source 1..75: mol_type = other DNA
aaagcttaattcgtttaccagaagtcttgaaacgaactggtttcggcaaagcctgggtctatcgtctgatcaaag

SEQ ID NO: 292489 - DNA, 75 bp, synthetic construct
  source 1..75: mol_type = other DNA
ctcccggggcgatcaactggtcgtcaacaacaacgccactggtaattttaaaatctttgttcaggataccggcgt

SEQ ID NO: 292490 - DNA, 75 bp, synthetic construct
  source 1..75: mol_type = other DNA
atgcacacgcaggaactgaatcgcactgaaacggcgcgggaagtccagagaccgagcattgatgctcaccttctg

SEQ ID NO: 292491 - DNA, 75 bp, synthetic construct
  source 1..75: mol_type = other DNA
tcgttcgagtcgttagtgatagtgacaatatgagtattgtcggtgatgatggagttgtatatctaactgcaatga

SEQ ID NO: 292492 - DNA, 75 bp, synthetic construct
  source 1..75: mol_type = other DNA
tgctttttgttcttccattttttattaagaatgctcattctaaaagagtaacttttgaagatggttttattgatg

SEQ ID NO: 292493 - DNA, 75 bp, synthetic construct
  source 1..75: mol_type = other DNA
agcggcggctgtagcttttgccgggctcaatttcctgacggggggcggaataaaaatgcctggttctcctgcagg

SEQ ID NO: 292494 - DNA, 75 bp, synthetic construct
  source 1..75: mol_type = other DNA
aactttgctttaatgtcagaacagccgggatataaaactgggcagttaaaaaacgaacaggactttgctgcaatg

SEQ ID NO: 292495 - DNA, 75 bp, synthetic construct
  source 1..75: mol_type = other DNA
agaactgggtacatgtaaaaataataaattcacaccaagcggggcgagactcttaattcgcgtcgggtcactacg

SEQ ID NO: 292496 - DNA, 75 bp, synthetic construct
  source 1..75: mol_type = other DNA
ttgtagcggctctgcgcgagctacaggagcgccgcaaggctgatagtgtgcctgtagaaatcaacgacgacatgg

SEQ ID NO: 292497 - DNA, 75 bp, synthetic construct
  source 1..75: mol_type = other DNA
ttttgcctgcgcggccacgtaaaccgaaagataaagccaaagcagaagttggcgttcaggttgttgaacgctgga

SEQ ID NO: 292498 - DNA, 75 bp, synthetic construct
  source 1..75: mol_type = other DNA
ggattactttttttataccaataaaaatgaagactattcattctataataaaaaaacgattacggcgtatctctg

SEQ ID NO: 292499 - DNA, 75 bp, synthetic construct
  source 1..75: mol_type = other DNA
ttggcattttttttattctaccctttattgttaagcatgcacatgctaagaaaatagtttttgaagatgatttta

SEQ ID NO: 292500 - DNA, 75 bp, synthetic construct
  source 1..75: mol_type = other DNA
cctgtggcgtggcgatcgctttattacgagaatcacggccttctgacagattcaaaaaatgtcctggcatcctgg

SEQ ID NO: 292501 - DNA, 75 bp, synthetic construct
  source 1..75: mol_type = other DNA
cgtgtgtgtttgttgatgatgtgtatctggagccccttccaccagaaccgggcaaaccgcactttacatactgct

SEQ ID NO: 292502 - DNA, 75 bp, synthetic construct
  source 1..75: mol_type = other DNA
cacgatctggacgacgcgcgtccgatcctcgactggcaacaggcgatccgccagaaggcggtagtctatgtcggg

SEQ ID NO: 292503 - DNA, 75 bp, synthetic construct
  source 1..75: mol_type = other DNA
agaacagtttttattcatctcgaataattttacttgggaaaaatcctatactcaactattaaatggattaaacaa

SEQ ID NO: 292504 - DNA, 75 bp, synthetic construct
  source 1..75: mol_type = other DNA
ttgatgcttttgataaaaatggcggagatacttatcagttacaaatgtatatgaagtattttcatcagtatggtc

SEQ ID NO: 292505 - DNA, 75 bp, synthetic construct
  source 1..75: mol_type = other DNA
caaccatgctgaaaccattggcaacaatcagatgattgcggttaccaacaatcagatacagacggtgggtgttaa

SEQ ID NO: 292506 - DNA, 75 bp, synthetic construct
  source 1..75: mol_type = other DNA
agtggtggcgcaactggcggagcgcgttaacgacaaaaacgcgccgcgccatatgcagggccgcgatcctcacgt

SEQ ID NO: 292507 - DNA, 75 bp, synthetic construct
  source 1..75: mol_type = other DNA
ggcagggctggcaaatcgtacgctaccagcgtaacctcctgcgcctgccgcgctacgcgctgaccagccggaaaa

SEQ ID NO: 292508 - DNA, 75 bp, synthetic construct
  source 1..75: mol_type = other DNA
gggaactgacacctgttgccattacagcggtcaccttcccgttactgattgatgctgcgggtaatggtgccaact

SEQ ID NO: 292509 - DNA, 75 bp, synthetic construct
  source 1..75: mol_type = other DNA
acgcatccgcgatattcgcgccagcatgcgccgagtttatttacaggtgattttccccccccctgctgactctca

SEQ ID NO: 292510 - DNA, 75 bp, synthetic construct
  source 1..75: mol_type = other DNA
atggacgatgagcggctgaagaatccgcctgtcggttcttctgtcctcgaacgcatccgcgatattcacgccagt

SEQ ID NO: 292511 - DNA, 75 bp, synthetic construct
  source 1..75: mol_type = other DNA
tgctgtcacggaaataccctgaactggtgatgccggatgcgctggcagcagaaggaagcagtaaacgggaatgga

SEQ ID NO: 292512 - DNA, 75 bp, synthetic construct
  source 1..75: mol_type = other DNA
ctttacgacccgctgggccgcagggtggcaaaacgggtatggcgacgtgaacgggacctgacgggctggatgtcg

SEQ ID NO: 292513 - DNA, 75 bp, synthetic construct
  source 1..75: mol_type = other DNA
catcactggtgctcggactggcgttaatgggcaatgcacaggcagtgacgaccattccgttttggaactctatgg

SEQ ID NO: 292514 - DNA, 75 bp, synthetic construct
  source 1..75: mol_type = other DNA
gatggctggccgctgtatgaatcacgcctgaagggaaagctgcacgttatcagtaagcgttacactcagcgcatt

SEQ ID NO: 292515 - DNA, 75 bp, synthetic construct
  source 1..75: mol_type = other DNA
gtggagctgcatgacaaagtcatcgggcattatctgaacataaaacacggtgatgctgccaacttactgatttag

SEQ ID NO: 292516 - DNA, 75 bp, synthetic construct
  source 1..75: mol_type = other DNA
gtggcgcacgtcttcggtgaacgcactctggccacactggagcgtcttctgagcctgctgtcaccctttgacgtg

SEQ ID NO: 292517 - DNA, 75 bp, synthetic construct
  source 1..75: mol_type = other DNA
gaatctgagacaacatctggcaaggctgggacggaagttactgtcgttctcaaaatcggtggagttgcatgacaa

SEQ ID NO: 292518 - DNA, 75 bp, synthetic construct
  source 1..75: mol_type = other DNA
agctgcacgttatcagcaagcgttacactcagcgcattgagcgacataacctgaatctgagacaacatctggcaa

SEQ ID NO: 292519 - DNA, 75 bp, synthetic construct
  source 1..75: mol_type = other DNA
gtgaacgcactctggcgacgctggggcgtcttctgagcctgctgtcggcctttgaggtggtggtatggatgacgg

SEQ ID NO: 292520 - DNA, 75 bp, synthetic construct
  source 1..75: mol_type = other DNA
tcttcggtgaacgcactctggccacactggagcgtcttctgagcctgctgtcggcctttgaggtcgtggtatgga

SEQ ID NO: 292521 - DNA, 75 bp, synthetic construct
  source 1..75: mol_type = other DNA
atgtcgcgccagtgcacgcattatgggcgttggcctcgaacaggttttacgtcacttaaaaaactcaggccgcag

SEQ ID NO: 292522 - DNA, 75 bp, synthetic construct
  source 1..75: mol_type = other DNA
gtggcgcacgtattcggtgaacgcacgctggccacgctggagcgtcttcttggcctgctgtcggcctttgaggtc

SEQ ID NO: 292523 - DNA, 75 bp, synthetic construct
  source 1..75: mol_type = other DNA
acattaaaagtaacttttttgaaattagagataatattggcacagaaaatatattcagttcgtttagtgatttct

SEQ ID NO: 292524 - DNA, 75 bp, synthetic construct
  source 1..75: mol_type = other DNA
gtggcgcacgtcttcggtgaacgcactctggccacactggagcgtcttctgagcctgctatcggcctttgaggtc

SEQ ID NO: 292525 - DNA, 75 bp, synthetic construct
  source 1..75: mol_type = other DNA
tatcaacaggatgctctggaaatgagaccggtatcactttcaggattaacttttccgtggcactctttatctgtg

SEQ ID NO: 292526 - DNA, 75 bp, synthetic construct
  source 1..75: mol_type = other DNA
gcattgtaaagcaattggttaaggtggctgagagcaaaaagagtcgtttttctggggctattgaaaagctcaatg

SEQ ID NO: 292527 - DNA, 75 bp, synthetic construct
  source 1..75: mol_type = other DNA
gaaacgaaaattgattgcgaatattcaaggcaatgaagaacaaatcagcattcagtttttcaaccctaatgtttc

SEQ ID NO: 292528 - DNA, 75 bp, synthetic construct
  source 1..75: mol_type = other DNA
ttgatgagcaaaatggtgtcattgagatattgcttttcgttagtactaagcaagaccttgagaaaatgctttatc

SEQ ID NO: 292529 - DNA, 75 bp, synthetic construct
  source 1..75: mol_type = other DNA
atgcctctatccataaaatcaaatagttataatttaattttggagaatgtttttttttcagcgtcctttgatctg

SEQ ID NO: 292530 - DNA, 75 bp, synthetic construct
  source 1..75: mol_type = other DNA
ggttccggtcagtctcactgagcaaatatccccctttcatcgctgtatgcgcggcaccagtcagaaaaatcccag

SEQ ID NO: 292531 - DNA, 75 bp, synthetic construct
  source 1..75: mol_type = other DNA
ctacctgatgaaaaaactataaattatggggtggaaatagaaacaccatctggcaaaagaattcgcttatcaaat

SEQ ID NO: 292532 - DNA, 75 bp, synthetic construct
  source 1..75: mol_type = other DNA
ttataaccgcacaacaaataccgacgatgttaaaacgccagacacaccgaagtggccttgtgataattgggaaga

SEQ ID NO: 292533 - DNA, 75 bp, synthetic construct
  source 1..75: mol_type = other DNA
catttcacataatacatacaaagcaacaattaaaaatattgagtcaggattatttatcgaagcaaaatcaggatt

SEQ ID NO: 292534 - DNA, 75 bp, synthetic construct
  source 1..75: mol_type = other DNA
tctggtgaaaacttcggcgataaaaacagtccgcaagtaagttatttacgctcgctgcaatcctgggaccatcat

SEQ ID NO: 292535 - DNA, 75 bp, synthetic construct
  source 1..75: mol_type = other DNA
ccgtaacgcttatgcgtcgttactccgtcgccatcatccattttgatgcttcaggtgaactactgcccggcttta

SEQ ID NO: 292536 - DNA, 75 bp, synthetic construct
  source 1..75: mol_type = other DNA
atatatataacaaatcaaacaacataaagtgtgatttcattttctttagcaaaacatatgctttttcctcaagat

SEQ ID NO: 292537 - DNA, 75 bp, synthetic construct
  source 1..75: mol_type = other DNA
gcccaccgctggcttatgccttagcgatgggtttcagctttacggtaatgtatctgagcgcagcggtagcattta

SEQ ID NO: 292538 - DNA, 75 bp, synthetic construct
  source 1..75: mol_type = other DNA
gcactacacgcggacacaatatgcagagccgctggtcgaaagccgctatctttacgacccgctgggccgcagggt

SEQ ID NO: 292539 - DNA, 75 bp, synthetic construct
  source 1..75: mol_type = other DNA
gcgtcgtgttggctggtatgaagatgaagtgctggcctggctgaaagagcgcgaggaagaagcgcgcggaacggc

SEQ ID NO: 292540 - DNA, 75 bp, synthetic construct
  source 1..75: mol_type = other DNA
gttggctggtatgaagatgaggtgctggcctggctgaaagaacgcgaggaagaagcgcgcggaacggctgcgtaa

SEQ ID NO: 292541 - DNA, 75 bp, synthetic construct
  source 1..75: mol_type = other DNA
ctttccggtattcaatatgaggagttgggtaatttatcacagcacatcaagattagctattcgaataaagttaat

SEQ ID NO: 292542 - DNA, 75 bp, synthetic construct
  source 1..75: mol_type = other DNA
acgccgtcggggatggtatgaggatgacgtaatcgcctggatgaaagaacgcgaacaggaagcgcgcgtaacggc

SEQ ID NO: 292543 - DNA, 75 bp, synthetic construct
  source 1..75: mol_type = other DNA
acgccgtcgcggatggtatgaggatgatgtgttggcctggcagaaagaacgcgaacaggaagcacgcggaacggc

SEQ ID NO: 292544 - DNA, 75 bp, synthetic construct
  source 1..75: mol_type = other DNA
tttttaccttactggtaacgctctggcctttatgtgcatttcactctgcccaagcggctgatattaacattaatg

SEQ ID NO: 292545 - DNA, 75 bp, synthetic construct
  source 1..75: mol_type = other DNA
tccaaacccttgcatcaaaaccgggttccacaatctcaagcatcccatcaaaaagacggatattgattaatcatt

SEQ ID NO: 292546 - DNA, 75 bp, synthetic construct
  source 1..75: mol_type = other DNA
tgacaccgcacgggcgctgcatatcagcattaatgccgttgtgcgcacattaaaaactcgcaccacgatgtgtaa

SEQ ID NO: 292547 - DNA, 75 bp, synthetic construct
  source 1..75: mol_type = other DNA
ttcgataaagcacatgctcttcttgtgaaactccccaatgaaggaagaaagtttagacaagttctgttatataaa

SEQ ID NO: 292548 - DNA, 75 bp, synthetic construct
  source 1..75: mol_type = other DNA
ctaaatatcaccgctgattatgcggaatatgtggcagaagtcgatttaagaaaaatcccgaattgtcgcggcatt

SEQ ID NO: 292549 - DNA, 75 bp, synthetic construct
  source 1..75: mol_type = other DNA
tgaaacaggaattttccggcgtatctgatgatgcgagtgatgcgctttcgtcaatatccgaactgataagagcgg

SEQ ID NO: 292550 - DNA, 75 bp, synthetic construct
  source 1..75: mol_type = other DNA
ttcccgttgttcgtatatacagccaacaaaccaaagaaagtgaatggtgcaattgaggtgagagttgatgcaaat

SEQ ID NO: 292551 - DNA, 75 bp, synthetic construct
  source 1..75: mol_type = other DNA
gacctacctgaccatgcaggtacgcaagggcgagagtgatgtacgcaccatggtggtcggcatcgcgcccggtgc

SEQ ID NO: 292552 - DNA, 75 bp, synthetic construct
  source 1..75: mol_type = other DNA
cctgcgagccttactagagctcgcccagccccggggcaatttactgcaacagcgacgataactgttgagattgtg

SEQ ID NO: 292553 - DNA, 75 bp, synthetic construct
  source 1..75: mol_type = other DNA
cagttatcgaacatattaacgacaacatgaatgatgccacccggcagattgcggcgtttcagtcacaggtgcagg

SEQ ID NO: 292554 - DNA, 75 bp, synthetic construct
  source 1..75: mol_type = other DNA
gtctgtaaaatcaaaaaaaataagagcagttgaagcgtggggattggttgttaatgaagctattcagtataagaa

SEQ ID NO: 292555 - DNA, 75 bp, synthetic construct
  source 1..75: mol_type = other DNA
aggtgctaaagaaaataatatagctatagtgccaaatgcagtccctgatttttaccctttatcaaaaagtcataa

SEQ ID NO: 292556 - DNA, 75 bp, synthetic construct
  source 1..75: mol_type = other DNA
gtttgacggtctacacccgggcacagatggaagacatcctcgtcggcaagctgatcgccacctcggccaagcaga

SEQ ID NO: 292557 - DNA, 75 bp, synthetic construct
  source 1..75: mol_type = other DNA
acgcaatggacgtcgctggatatacgcaggctaagctggcgaaagatgttggtatggctcagtccagcgtaaata

SEQ ID NO: 292558 - DNA, 75 bp, synthetic construct
  source 1..75: mol_type = other DNA
cctcaatcaggcgagtgtccagattgccgcttttcagtcccgtgttcaggttcagcaggacgccttgcttgtggt

SEQ ID NO: 292559 - DNA, 75 bp, synthetic construct
  source 1..75: mol_type = other DNA
tctccgggcagtgatatcgttcctgcgatggggcaggcaccgtggtgccgtaagataacgctgaataaggtggag

SEQ ID NO: 292560 - DNA, 75 bp, synthetic construct
  source 1..75: mol_type = other DNA
aagtaatgacggtcgatggcgacagcatgtgtccaactatacagtctggtgacagattgtttttcgatatttctg

SEQ ID NO: 292561 - DNA, 75 bp, synthetic construct
  source 1..75: mol_type = other DNA
gcgcaatgaatgaggcgggttatacacagggcaagctagctaaggcagttggcatggcacagtcaagtgttaaca

SEQ ID NO: 292562 - DNA, 75 bp, synthetic construct
  source 1..75: mol_type = other DNA
ggccagcaaatatcataaagatgataacagttgatggcgacagcatggctcctactctgtgtgcaggagatcagg

SEQ ID NO: 292563 - DNA, 75 bp, synthetic construct
  source 1..75: mol_type = other DNA
aaggggatgccagtgaaggagtatggattgaaatgcttgatacatatcttcccaaacgctatcaggcagctaatg

SEQ ID NO: 292564 - DNA, 75 bp, synthetic construct
  source 1..75: mol_type = other DNA
cgttatttgcgttgccttttatggcaagcgcaactgcttctgaattatccattggtgctggtgcagcttataatg

SEQ ID NO: 292565 - DNA, 75 bp, synthetic construct
  source 1..75: mol_type = other DNA
cccatctctcgtcatcaaggtgaaacattcaatctgcccagtaagataacaagcgtgcaagctctatgtactaac

SEQ ID NO: 292566 - DNA, 75 bp, synthetic construct
  source 1..75: mol_type = other DNA
cgctcacagttatattttttgcgatgcattaaaaagtatttctgatatccgctctgaacaagaagaaccggggtt

SEQ ID NO: 292567 - DNA, 75 bp, synthetic construct
  source 1..75: mol_type = other DNA
acagaaatggtgcagacatacattcaagagcagaagaaaagacagaaaagttctattagcgcacaaatcaaaaca

SEQ ID NO: 292568 - DNA, 75 bp, synthetic construct
  source 1..75: mol_type = other DNA
acttggctcatgttccgtcaatgccggagaaacaatcgaggtcgatctgggcgacgtatttgcggctaactttcg

SEQ ID NO: 292569 - DNA, 75 bp, synthetic construct
  source 1..75: mol_type = other DNA
tatttacaggcctgctgacttttatgaaaatgtgtgcaggctttatcgttagcaaggttgttgcaatatatatag

SEQ ID NO: 292570 - DNA, 75 bp, synthetic construct
  source 1..75: mol_type = other DNA
aggaaaaaaaataagtgttcaacacttgacgtgtttaacacctcgatttaaattggtgttcaacaccttatttag

SEQ ID NO: 292571 - DNA, 75 bp, synthetic construct
  source 1..75: mol_type = other DNA
ccaggtttcatttctatcggtattagttggatattcagaggattagccagttcggcttcaaggcgagcacaggtt

SEQ ID NO: 292572 - DNA, 75 bp, synthetic construct
  source 1..75: mol_type = other DNA
gttgaggctgtccaaaaagaattcgggatcaagatcacccgccagcaggctgaatctcacgaccccacgaaggcc

SEQ ID NO: 292573 - DNA, 75 bp, synthetic construct
  source 1..75: mol_type = other DNA
tatacgcttactgcgtttagtgcgtgaaaaactacccacaagcggcgtcattatggttacacatcaacccggtgt

SEQ ID NO: 292574 - DNA, 75 bp, synthetic construct
  source 1..75: mol_type = other DNA
agaaaaagactgcagccccttccgggcagaaggcatctgattcgccggttaatccgtctgataaggcagataaaa

SEQ ID NO: 292575 - DNA, 75 bp, synthetic construct
  source 1..75: mol_type = other DNA
aaattaagcaacgccccgcagtgctcgcaacacatgcagggcgtctaaccaccaacgatagagaaagtatcgagg

SEQ ID NO: 292576 - DNA, 75 bp, synthetic construct
  source 1..75: mol_type = other DNA
ggtaatatcgatcttggcgtcgtcggtgtgggatattttgccggtaatacctctgctgaagaccatcaacctagc

SEQ ID NO: 292577 - DNA, 75 bp, synthetic construct
  source 1..75: mol_type = other DNA
ggatatttgcaagcattactctgagcttattattattcagcacgttttctatagccatcacggataacattggcc

SEQ ID NO: 292578 - DNA, 75 bp, synthetic construct
  source 1..75: mol_type = other DNA
ctgcagactgttctcaatggcggaaatgtctccgggactctcattagcggaggtgagcagagcatttccagcggt

SEQ ID NO: 292579 - DNA, 75 bp, synthetic construct
  source 1..75: mol_type = other DNA
agataatgaggaaaagacgcggcaggcacttgatgagcaaaacaggttaattgacgagcagaaaagtaagattaa

SEQ ID NO: 292580 - DNA, 75 bp, synthetic construct
  source 1..75: mol_type = other DNA
cgaaagcaccacttgggttggccttatttctggcaaaagttggtgttcaggaccctcagtttgcgattgaaggcc

SEQ ID NO: 292581 - DNA, 75 bp, synthetic construct
  source 1..75: mol_type = other DNA
aacgccatcgatctgtcgaacgcggtacgcgccaaaatggccgagctggccacccgcttcccggaagatatgcaa

SEQ ID NO: 292582 - DNA, 75 bp, synthetic construct
  source 1..75: mol_type = other DNA
gggaagtgctgcccggacactccggcggggagatgcctatcagcgcgctgtggccaaaaagccgccaactgctgc

SEQ ID NO: 292583 - DNA, 75 bp, synthetic construct
  source 1..75: mol_type = other DNA
tggccaaaaagccgccaactgctgcccaaaatccgctatgtagtggataccctggtcagggctgcggaagacggc

SEQ ID NO: 292584 - DNA, 75 bp, synthetic construct
  source 1..75: mol_type = other DNA
gctttatcaaaacaaacaatttctttgtctgcatatatggcaactactgataaagcagcagatacgactggctct

SEQ ID NO: 292585 - DNA, 75 bp, synthetic construct
  source 1..75: mol_type = other DNA
gatacccgcaagggctatcaaatcatgggggttattcgcctggcagatggtagtcacccaccactggggattagc

SEQ ID NO: 292586 - DNA, 75 bp, synthetic construct
  source 1..75: mol_type = other DNA
tctctgaatgccagttggaatggttcattcacggcgactcgtcacggagccgctttccatgactatagtggtagt

SEQ ID NO: 292587 - DNA, 75 bp, synthetic construct
  source 1..75: mol_type = other DNA
gtaatatcaccctatgccgtctagaggcgcaacacgggtttgaatatgctttaagtgtgctattatctaaaaagc

SEQ ID NO: 292588 - DNA, 75 bp, synthetic construct
  source 1..75: mol_type = other DNA
tgaaaatctccggtgccagtacggctgaggcgggttcggtgatcacccagttcagccaggcgctggcacagggtg

SEQ ID NO: 292589 - DNA, 75 bp, synthetic construct
  source 1..75: mol_type = other DNA
tgaagacgctgaagcgtaaagcaggctggatctccgatatcctccgttcagataagtcagaaatggagaacgccg

SEQ ID NO: 292590 - DNA, 75 bp, synthetic construct
  source 1..75: mol_type = other DNA
gacgtgatattgaatatacatggactgaaaattataatactttgcatctcacctccaacaaaataaataaattcg

SEQ ID NO: 292591 - DNA, 75 bp, synthetic construct
  source 1..75: mol_type = other DNA
ctgatgagtggaattcagtaaacgcccgtcttaagcaggcatcatcttcagctgatgattttgctgcctctcagc

SEQ ID NO: 292592 - DNA, 75 bp, synthetic construct
  source 1..75: mol_type = other DNA
gccggaattgctcagcatgcgcaagaatcatgtggagatattgcagagaattaacacggttcttgccgggcgcac

SEQ ID NO: 292593 - DNA, 75 bp, synthetic construct
  source 1..75: mol_type = other DNA
ggcaatggacgcagcaagcgcgcgcatcgcagcagaacgggaagccaatctgaatcatgcagtcgccgcgctgac

SEQ ID NO: 292594 - DNA, 75 bp, synthetic construct
  source 1..75: mol_type = other DNA
ctattttcggtacccatgagttccgggcgtcagattatgagatcaccacagcacagtttggcaccattggcattt

SEQ ID NO: 292595 - DNA, 75 bp, synthetic construct
  source 1..75: mol_type = other DNA
ggtaatgaactgctgcaacagcgtcagggactggcgagtgtaccgctgcgactgccacaggccactctggatgat

SEQ ID NO: 292596 - DNA, 75 bp, synthetic construct
  source 1..75: mol_type = other DNA
gtgcgctggggctggttggtggcgtacccggactggtgatgctgggggctgcagcatggtacacgctgtaccaga

SEQ ID NO: 292597 - DNA, 75 bp, synthetic construct
  source 1..75: mol_type = other DNA
cggaagcacagttcaggggaacgcagattgccacggcgcgggcaagggcagccgtgtaccgtgctcagcaggccg

SEQ ID NO: 292598 - DNA, 75 bp, synthetic construct
  source 1..75: mol_type = other DNA
gattttttcaggatccttcgacctcgttgaatccccgtcaacgtatctcgcaaattctggattttccactgcgcc

SEQ ID NO: 292599 - DNA, 75 bp, synthetic construct
  source 1..75: mol_type = other DNA
acctcggttttgtgggtgatccgtatcaggaggcgagacaacgttatatcagtaatgccctggaagcctggcgca

SEQ ID NO: 292600 - DNA, 75 bp, synthetic construct
  source 1..75: mol_type = other DNA
cgatcagtgataattaccaaccacaaacatcatgttcgttttccgtgtcttgacatcctccacgccctgaatgac

SEQ ID NO: 292601 - DNA, 75 bp, synthetic construct
  source 1..75: mol_type = other DNA
cgaaacgcttgaggattttgatgaactgcttgcatccgaggagagagagaatgcatttttaccgcaggaagctgg

SEQ ID NO: 292602 - DNA, 75 bp, synthetic construct
  source 1..75: mol_type = other DNA
aaaaacagcggggcgaccatcaaacgtaagcgtgcagcaagaaccgtattgacggggatgtgttattcagtcggc

SEQ ID NO: 292603 - DNA, 75 bp, synthetic construct
  source 1..75: mol_type = other DNA
gagccggagaagcacattatgctctggcaggtttgcctaacaccgttctggcaagcgaatataagatgcaactac

SEQ ID NO: 292604 - DNA, 75 bp, synthetic construct
  source 1..75: mol_type = other DNA
gacgccacgctggatatgctttccgggcgctatccctctggcgatttttctgcttttcgccccaaactggtctgg

SEQ ID NO: 292605 - DNA, 75 bp, synthetic construct
  source 1..75: mol_type = other DNA
cagtggcaaccttgagcaacagatagccagtacttcacagcaaatcgggtctctgctcgccgaagatatgaacag

SEQ ID NO: 292606 - DNA, 75 bp, synthetic construct
  source 1..75: mol_type = other DNA
atgagcaccatcaaccatcaggaactacgtgaactggcgactgccgtgcaaagaatgtctacccaaaaatcactg

SEQ ID NO: 292607 - DNA, 75 bp, synthetic construct
  source 1..75: mol_type = other DNA
cggtgcatgttgacgctgtaaacaatggtggcgaaggcgacggtatacaggcttatacggcgattaaggaaattt

SEQ ID NO: 292608 - DNA, 75 bp, synthetic construct
  source 1..75: mol_type = other DNA
gtagacttcctcaacggcgatccggaccagccgatcattatggggcgcacctaccaccaggaaaaccgcaccccc

SEQ ID NO: 292609 - DNA, 75 bp, synthetic construct
  source 1..75: mol_type = other DNA
ctaaagcgaattttatagttacggctgtacgcggtgagatcgcccggcgccaggcagaaggaagtggagaaaatc

SEQ ID NO: 292610 - DNA, 75 bp, synthetic construct
  source 1..75: mol_type = other DNA
gtaatcgtatgtattttaaagatgatactgactatacatatttccttcctaatgaatattttttacacggggtga

SEQ ID NO: 292611 - DNA, 75 bp, synthetic construct
  source 1..75: mol_type = other DNA
aacgccgttcagtaaaactatttaaacgtgattataaaatatctaatagcactattagagaaatgatttcagcag

SEQ ID NO: 292612 - DNA, 75 bp, synthetic construct
  source 1..75: mol_type = other DNA
ggaaatcttctgcgacgaacatggtcgcgtgcgggtgaggttcaactgggaccgttataacccggcagaccaaga

SEQ ID NO: 292613 - DNA, 75 bp, synthetic construct
  source 1..75: mol_type = other DNA
ggtggtggagcggatcttgatgtcagcgtgaaagaggcggacggttcggtaaccacctatctggtgccttatgca

SEQ ID NO: 292614 - DNA, 75 bp, synthetic construct
  source 1..75: mol_type = other DNA
agcggcgctggaggcatgccgcctgcgtctgcgcccgatcgtgatgacctccatcgcctttatcgccgggaccat

SEQ ID NO: 292615 - DNA, 75 bp, synthetic construct
  source 1..75: mol_type = other DNA
taggtagtgttttttatccaaggattaataatctatggaagttcaacagaaatggggcatatgatattttaagga

SEQ ID NO: 292616 - DNA, 75 bp, synthetic construct
  source 1..75: mol_type = other DNA
tattttattgccttttggatataggaaatattttagttacattccagttattactgcctttatgcatttctttta

SEQ ID NO: 292617 - DNA, 75 bp, synthetic construct
  source 1..75: mol_type = other DNA
cgccgcgcagaaatggaagccacgacgaacgccctgaatgaggagtggcgcacgctgtttcgtgaaagtcggggc

SEQ ID NO: 292618 - DNA, 75 bp, synthetic construct
  source 1..75: mol_type = other DNA
gtagaaacatattatgctgctattaatgcaatcagccaaagcctgagttttagtgctgatgaactaaaaacgtat

SEQ ID NO: 292619 - DNA, 75 bp, synthetic construct
  source 1..75: mol_type = other DNA
ttaaatacaagttgagcaaagctaacatcatggatttattaaaaggagctacagcacagggacccctgcattata

SEQ ID NO: 292620 - DNA, 75 bp, synthetic construct
  source 1..75: mol_type = other DNA
atgagtgcacgtgaagcatatcggcagtatcgagaagcggtgactgcttgcaaagacatttttgcccgaggtggt

SEQ ID NO: 292621 - DNA, 75 bp, synthetic construct
  source 1..75: mol_type = other DNA
aaggagcaaaaacagcaactgaataacgcagtcagcatcgacaacgtgaaacctggtgtcactacagactggaaa

SEQ ID NO: 292622 - DNA, 75 bp, synthetic construct
  source 1..75: mol_type = other DNA
cacaaaaattggtggagtggtttttaacgccgcaggggcagagcctggtggaagatgtaggttatgtgccgatgt

SEQ ID NO: 292623 - DNA, 75 bp, synthetic construct
  source 1..75: mol_type = other DNA
agatcgcctgctgaacgtgctcctgggtgataccgaaaacaaccccttcctgatcaagcaacgcccctatgagaa

SEQ ID NO: 292624 - DNA, 75 bp, synthetic construct
  source 1..75: mol_type = other DNA
cgagcaaattgaccgcctgacccgtctgagtaacagtgactggattacgctgaaaaagcagatagaacaacacga

SEQ ID NO: 292625 - DNA, 75 bp, synthetic construct
  source 1..75: mol_type = other DNA
ccgggtcaccggctacacttcaaccgatcagccgggcactccgcaggggtttggtcagacacagccggcggataa

SEQ ID NO: 292626 - DNA, 75 bp, synthetic construct
  source 1..75: mol_type = other DNA
tagcgcatgtcgaatcggcgatcaacaaggatggttacaccgtaaaggggctacgccggatgacaacggtctggt

SEQ ID NO: 292627 - DNA, 75 bp, synthetic construct
  source 1..75: mol_type = other DNA
gaactgtttgcactggcaggtctggatgcgcagcatctgcaactgctggttcatagcggctcgagggggttgggg

SEQ ID NO: 292628 - DNA, 75 bp, synthetic construct
  source 1..75: mol_type = other DNA
aacttttggctagctacggtaatgatgatgaatttcgttctgttgctgaacgaatcataaatgaagaagaaaaaa

SEQ ID NO: 292629 - DNA, 75 bp, synthetic construct
  source 1..75: mol_type = other DNA
gcaaatatgttcctcggcggggttgaaggacaccacggatggggaaaagatgccgtaaactggtacctggaagcg

SEQ ID NO: 292630 - DNA, 75 bp, synthetic construct
  source 1..75: mol_type = other DNA
ccagatccgctcacacgtgatgaattcgttcgcttcatagatgcctgcaagcatcagcaaacgaaaaacctgtgg

SEQ ID NO: 292631 - DNA, 75 bp, synthetic construct
  source 1..75: mol_type = other DNA
acacgggccgaccggaaatccgttaccgttacgacagcgacgggcgggtgacagaacagctaaacccggcaggct

SEQ ID NO: 292632 - DNA, 75 bp, synthetic construct
  source 1..75: mol_type = other DNA
atgaagtatgtctttattgaaaaacatcaggctgtgttcaacatcaaggcaatgtgccatgtgctccaggaaggc

SEQ ID NO: 292633 - DNA, 75 bp, synthetic construct
  source 1..75: mol_type = other DNA
atgcttcgcgaagcgcctgaaatgaagtatgtctttattgaaaaacatcaggctgagttcagcatcaaggctatg

SEQ ID NO: 292634 - DNA, 75 bp, synthetic construct
  source 1..75: mol_type = other DNA
acttatcagaccgggccagaagggcagtatgtcagcagtattttgctgtgcgaaaacatctatccggtacgctag

SEQ ID NO: 292635 - DNA, 75 bp, synthetic construct
  source 1..75: mol_type = other DNA
cggtaagattgggcttattacagaagataatcagcgctggagcacgcgtttggtatacgccaaagttaacccgga

SEQ ID NO: 292636 - DNA, 75 bp, synthetic construct
  source 1..75: mol_type = other DNA
atggcgaaacgggtatggcggcgggagcgtgacctgacggggtggatgtctctgtcgcgtaaaccggaggagaca

SEQ ID NO: 292637 - DNA, 75 bp, synthetic construct
  source 1..75: mol_type = other DNA
atcaaccagaaatggaaatggaaacaaagaaaaagagatctaaatctcatactaaaccaaaagtagtaccatcaa

SEQ ID NO: 292638 - DNA, 75 bp, synthetic construct
  source 1..75: mol_type = other DNA
gaaaaaatgcaagttggacgctgggaactggtatttagccaacggtcttcagatccttatccagtattaaagcat

SEQ ID NO: 292639 - DNA, 75 bp, synthetic construct
  source 1..75: mol_type = other DNA
gcagaatctggcgaacctgagccgtgaccctgtgcacgctaatgacagtatcagcccgatatttgacaaggagaa

SEQ ID NO: 292640 - DNA, 75 bp, synthetic construct
  source 1..75: mol_type = other DNA
aattaaccgaatgcaaagcttctggcggagactgcaaatctgttgttcagaagtatctggatattagtaacaaaa

SEQ ID NO: 292641 - DNA, 75 bp, synthetic construct
  source 1..75: mol_type = other DNA
ggagtaattaaaaaagttgatttgaacacaaatgaagcggaaattaaaaaaaaagaggggggggcagtgagtttt

SEQ ID NO: 292642 - DNA, 75 bp, synthetic construct
  source 1..75: mol_type = other DNA
taacgcgcagtactacgcaacgggtgtggctactgcaggcgatgttacttctacagttaattacaccatcgctta

SEQ ID NO: 292643 - DNA, 75 bp, synthetic construct
  source 1..75: mol_type = other DNA
taaaagcaggttctaacccgacggaaaccctggaggcaatgaaagcgctgtttaacagcggcgatatcttgggtt

SEQ ID NO: 292644 - DNA, 75 bp, synthetic construct
  source 1..75: mol_type = other DNA
gtggcctggtgttggcatcaccggcgtttaaggtcaaattgtatgtgccgtttgctcgccaggggctggaattga

SEQ ID NO: 292645 - DNA, 75 bp, synthetic construct
  source 1..75: mol_type = other DNA
tggtacaacctaacaggatttaagtttaattattacaaatgtaatttaccattgcccattatgagcgcaatatat

SEQ ID NO: 292646 - DNA, 75 bp, synthetic construct
  source 1..75: mol_type = other DNA
ccgctgttaaaactgcttccgtgtctctggttgttgataacaccaaaccgctgaccatgtcttctcgtcagattg

SEQ ID NO: 292647 - DNA, 75 bp, synthetic construct
  source 1..75: mol_type = other DNA
gctggtaaaggttataatccaaccgtgacatggaatgcagtaggcggttattatcaaggagaaataagtggagat

SEQ ID NO: 292648 - DNA, 75 bp, synthetic construct
  source 1..75: mol_type = other DNA
cggagctggcgaacatcatcggtcatcacgcgggtattgatgacaatacagcggcaaaagccattgctcacgcta

SEQ ID NO: 292649 - DNA, 75 bp, synthetic construct
  source 1..75: mol_type = other DNA
ttgggctacgtcattcccaatacccgcgacattatgaccgcgctgaaggtacagaacttaagcggcaactttcgt

SEQ ID NO: 292650 - DNA, 75 bp, synthetic construct
  source 1..75: mol_type = other DNA
ttgatatgtcgggtgaaaaacctgaagataaatttaacattagatccaatcaggtttatattgatattgatacta

SEQ ID NO: 292651 - DNA, 75 bp, synthetic construct
  source 1..75: mol_type = other DNA
cggtgaaaacatcggtgatctgtttgaggaataccggaacaaggtttttgacgatgataatggtgccacggacaa

SEQ ID NO: 292652 - DNA, 75 bp, synthetic construct
  source 1..75: mol_type = other DNA
gaaggagcagacggcgcagtcaaggggcatatggcgctgtcaaatctccgtagtgttctgagttcgtccattgat

SEQ ID NO: 292653 - DNA, 75 bp, synthetic construct
  source 1..75: mol_type = other DNA
gaagtaaaacccacgtatcagatacgggcggaatttaacatcacccagaagcccggcgaggatgccggacaactg

SEQ ID NO: 292654 - DNA, 75 bp, synthetic construct
  source 1..75: mol_type = other DNA
acagtcagctaaatcaatcatcacaccaggtatgcgtgaggctcatctttatcacttcctgagcgagattgtatt

SEQ ID NO: 292655 - DNA, 75 bp, synthetic construct
  source 1..75: mol_type = other DNA
ggttgaatttctttttgaccgattgctgcaggtgaaggatgaacaaaaggctgccgggatggcggatgcattgtt

SEQ ID NO: 292656 - DNA, 75 bp, synthetic construct
  source 1..75: mol_type = other DNA
gaaatctgtggacagctggggaaagagctggcaccgaatattcagcaggtcacggacgacctggcggactggttt

SEQ ID NO: 292657 - DNA, 75 bp, synthetic construct
  source 1..75: mol_type = other DNA
tatcgcaattcgttctctcccttcgccttacttattatttggcggtacagcggtcattggcggtgggttgcatta

SEQ ID NO: 292658 - DNA, 75 bp, synthetic construct
  source 1..75: mol_type = other DNA
ctccctaagtggggcatggctatctggaacgcttcgggggaactggtgctaactaatgaatcaagaatattaacg

SEQ ID NO: 292659 - DNA, 75 bp, synthetic construct
  source 1..75: mol_type = other DNA
cctgtaatggtattcgtaaaaacaagtataggcggtgtcacagcaagcgttagcagggccaactctgggcagata

SEQ ID NO: 292660 - DNA, 75 bp, synthetic construct
  source 1..75: mol_type = other DNA
gcgaaagcagtatgaaaagctgggcagaaaaattcatgatgccaccggggagcaggacaaatttaaccgtaagct

SEQ ID NO: 292661 - DNA, 75 bp, synthetic construct
  source 1..75: mol_type = other DNA
cgagaggaccggcgagaggtgctggaatatctggcaaaaatggggtcgcctgagctggcgagagcggtggcgcag

SEQ ID NO: 292662 - DNA, 75 bp, synthetic construct
  source 1..75: mol_type = other DNA
gttgatggactgaagcacggattatcaggggcaacacaggaagtggctcgcctgacacgccagcaggacgtactg

SEQ ID NO: 292663 - DNA, 75 bp, synthetic construct
  source 1..75: mol_type = other DNA
gaacctggatatccgcatcccgtatgccacggacccggcgggcaaccgcctgcccgacccggagctgcacccgga

SEQ ID NO: 292664 - DNA, 75 bp, synthetic construct
  source 1..75: mol_type = other DNA
ttttggtcaggttccgcagtggtgggggcctggatatgaagggagcctgatccgcggagatgcgatgcggccgat

SEQ ID NO: 292665 - DNA, 75 bp, synthetic construct
  source 1..75: mol_type = other DNA
tagatctggctaaaacgaacttttatcttttcagtatcaatgctcatggcaaacccgcaggaaagatcaaacttt

SEQ ID NO: 292666 - DNA, 75 bp, synthetic construct
  source 1..75: mol_type = other DNA
tgggggattgggtttatcgcgcaggatgttaagaaaatcttcccccaggcagtaactgagggaggtgatcgtcaa

SEQ ID NO: 292667 - DNA, 75 bp, synthetic construct
  source 1..75: mol_type = other DNA
tcactgtggtataccaacgctaacaacagcgacagcgatgacgttggggccagtgcagggatagagataccgttt

SEQ ID NO: 292668 - DNA, 75 bp, synthetic construct
  source 1..75: mol_type = other DNA
actgtacaaggtgcgatttatgctttacaacaaatagcagcaagtgaaggtgatattgaattggtgcgttctatt

SEQ ID NO: 292669 - DNA, 75 bp, synthetic construct
  source 1..75: mol_type = other DNA
atttgtattatgctcagcgttaactgtaatcttctttatgctttcaatagaaagagattcagcatgggcttctgt

SEQ ID NO: 292670 - DNA, 75 bp, synthetic construct
  source 1..75: mol_type = other DNA
ctccaacaatactggaattactggcatagccggtgaacatgatcagttaaattatggggtaatgactccaactta

SEQ ID NO: 292671 - DNA, 75 bp, synthetic construct
  source 1..75: mol_type = other DNA
tgacgctgggtttactttcctcattgggagcccaggctttcgcggctgggttagtggtaaatgataacgatctgc

SEQ ID NO: 292672 - DNA, 75 bp, synthetic construct
  source 1..75: mol_type = other DNA
ttacgacccgctgggccgcagggtggcaaaacgggtatggcggcgtgaacgggacctgacgggctggatgtcgct

SEQ ID NO: 292673 - DNA, 75 bp, synthetic construct
  source 1..75: mol_type = other DNA
cgttgcggcagcgttgcatcatgaagcgattctggcactaatgaacgaactcagtgaattacgagaagaagtgaa

SEQ ID NO: 292674 - DNA, 75 bp, synthetic construct
  source 1..75: mol_type = other DNA
cgggtttgactttaaattcaaactggaaccgacccttggctggcctgtgagtttttacggacagatgatcggcga

SEQ ID NO: 292675 - DNA, 75 bp, synthetic construct
  source 1..75: mol_type = other DNA
aaggtcaccacagttggggtaaggatgcggtaaactggtacctggaagcgcatgatactcgtacaaatatgagcc

SEQ ID NO: 292676 - DNA, 75 bp, synthetic construct
  source 1..75: mol_type = other DNA
ctgaataacggtgggcccatcagtaacgccattaccagcaacatgaacgttaaacgaacgccgagggggcagggc

SEQ ID NO: 292677 - DNA, 75 bp, synthetic construct
  source 1..75: mol_type = other DNA
gcagacctgaacaacggcggcccaatcagtaacgccattaccagcaacatgaacgttaaacgcacgccaaggggg

SEQ ID NO: 292678 - DNA, 75 bp, synthetic construct
  source 1..75: mol_type = other DNA
aagaagaacaacaagacgaaattaacaacactactcaagaaagtactaccgacagtcaagccaccactaaaacag

SEQ ID NO: 292679 - DNA, 75 bp, synthetic construct
  source 1..75: mol_type = other DNA
cgggcgctcattaccgttacccagggcggaaaaccggtgccgtttggatcactggtacgggaaaacagtatcgga

SEQ ID NO: 292680 - DNA, 75 bp, synthetic construct
  source 1..75: mol_type = other DNA
acaacggcagggtgatcagcaataaggacatggcttcgggtggaggtggcggcgctccgattctcaacatctaca

SEQ ID NO: 292681 - DNA, 75 bp, synthetic construct
  source 1..75: mol_type = other DNA
tgctttaaccggtatgcgttacaatggcggcccggtgaatgcaggaggtctttatcaggtcggtgagcgagggaa

SEQ ID NO: 292682 - DNA, 75 bp, synthetic construct
  source 1..75: mol_type = other DNA
ggatactggcggcataaaaccccatgagcgtaagcgggctgtagctcacctgacactgtctgagcgcgaggtgtc

SEQ ID NO: 292683 - DNA, 75 bp, synthetic construct
  source 1..75: mol_type = other DNA
cgctatcttgccccggctagagcacagccgcgtgctattcagcccctgagcgccaactaccagcaggagaatccc

SEQ ID NO: 292684 - DNA, 75 bp, synthetic construct
  source 1..75: mol_type = other DNA
gatgaccaaagccgagagcatgcgaaacatggcgctggcagcatcactgatggagcaggccgctaaagaggtcgg

SEQ ID NO: 292685 - DNA, 75 bp, synthetic construct
  source 1..75: mol_type = other DNA
aaacgaacaagataaaacttacgaggatattacagaaagtactaccgacaatacaaccgccgaagatacagaaaa

SEQ ID NO: 292686 - DNA, 75 bp, synthetic construct
  source 1..75: mol_type = other DNA
cgaacaaaataccgagtgcattattggtagcgccttttgtctgatcatccacaataatgacgtcagatttgccgt

SEQ ID NO: 292687 - DNA, 75 bp, synthetic construct
  source 1..75: mol_type = other DNA
aaactacatagggaatttgacaggaatctataatgccaacaaattgggtaagttttatcaaaaaagattggtcac

SEQ ID NO: 292688 - DNA, 75 bp, synthetic construct
  source 1..75: mol_type = other DNA
aggatttttactcaccaatagctctatttgtatatgatcgactagcgcatacgaaaaagacaatacattatttac

SEQ ID NO: 292689 - DNA, 75 bp, synthetic construct
  source 1..75: mol_type = other DNA
tttagcccctctggatgaaaatgaagttagtggaatagctaagagcattgctaaatggacatacaaaaacttctc

SEQ ID NO: 292690 - DNA, 75 bp, synthetic construct
  source 1..75: mol_type = other DNA
ataagaaacaaattcagcgaagaagaatggttgaatttattccacaaacatttccatatagagctccaacgatgg

SEQ ID NO: 292691 - DNA, 75 bp, synthetic construct
  source 1..75: mol_type = other DNA
tcaagatacaaaacccatccgatagggatgccaaaacattaataagtctgatggcatcaagtgaagagaacctcg

SEQ ID NO: 292692 - DNA, 75 bp, synthetic construct
  source 1..75: mol_type = other DNA
ttggcggtgctgttgtaatcccattattcatcaagacatatgatggtagtggtagtaaacacatcaaaataaacc

SEQ ID NO: 292693 - DNA, 75 bp, synthetic construct
  source 1..75: mol_type = other DNA
acatcaaacgtgaaggtcactaataataacatctctactcttttagatggtatagacatactaacttctggttcc

SEQ ID NO: 292694 - DNA, 75 bp, synthetic construct
  source 1..75: mol_type = other DNA
aggagggggaaggccaaagattgtcggaagcccttggcttgatttagggatcagtcgttctaaatggtatagaga

SEQ ID NO: 292695 - DNA, 75 bp, synthetic construct
  source 1..75: mol_type = other DNA
aataatgaagttattgtgagtagatcctttaatctctacacgggggctacttcgaatgataacgaaaaaaacagg

SEQ ID NO: 292696 - DNA, 75 bp, synthetic construct
  source 1..75: mol_type = other DNA
gctaaagatgattccagaaataaaagtgtagaagaagtgagggaatacatcaaaacaattactggttttaaatca

SEQ ID NO: 292697 - DNA, 75 bp, synthetic construct
  source 1..75: mol_type = other DNA
agattaacaataaagtgactgataaaaaaatggctcatcaggcccttgcttattctttaggcaataaaaaagctg

SEQ ID NO: 292698 - DNA, 75 bp, synthetic construct
  source 1..75: mol_type = other DNA
tttaacactaaagatatgaggcttggaattgggttgcatcttattgattttataagaaagagtaaagatcaagga

SEQ ID NO: 292699 - DNA, 75 bp, synthetic construct
  source 1..75: mol_type = other DNA
agcaggaagtttttaacctgttgggcaagaaaaaaacagccgtttggagattacggaaagaacatggttttccac

SEQ ID NO: 292700 - DNA, 75 bp, synthetic construct
  source 1..75: mol_type = other DNA
gttattcaagtgatagctcagttaggttgtgataatattatttttaagcgtgtttcggaaaaggttttatctggt

SEQ ID NO: 292701 - DNA, 75 bp, synthetic construct
  source 1..75: mol_type = other DNA
ggtgcttcagcaggcctgttatatccttctcatggatggttgcgtttcggctaccaggacggcgcaccacaagat

SEQ ID NO: 292702 - DNA, 75 bp, synthetic construct
  source 1..75: mol_type = other DNA
agaggattgtatgcaagtggtgctgtcagttacatcgaagtgctggatgcagaacgttccctcttcgctacccag

SEQ ID NO: 292703 - DNA, 75 bp, synthetic construct
  source 1..75: mol_type = other DNA
gatggcaataataactacacattgagaatccctaagatgggtctggataagatcgcgaataaaacgacagaatct

SEQ ID NO: 292704 - DNA, 75 bp, synthetic construct
  source 1..75: mol_type = other DNA
caaccagcgtctctaaaaatataaacaatttaaaacaagcatgtacatatatatcagaggaatatattcgagaca

SEQ ID NO: 292705 - DNA, 75 bp, synthetic construct
  source 1..75: mol_type = other DNA
cagaagcccccacacctcaccgactagaaaaagcgcgggaagaggggcaaatcccgcgttcccgcgaactgactt

SEQ ID NO: 292706 - DNA, 75 bp, synthetic construct
  source 1..75: mol_type = other DNA
aagttcagcacttcaaaaatatcagaggggtaaacctgcagtatcggtatgaatgggactccccgatcagtatta

SEQ ID NO: 292707 - DNA, 75 bp, synthetic construct
  source 1..75: mol_type = other DNA
aaattatggggtagaaatagaaacaccaattggcaaaagaattcgcttatcaaatcattaccagaatataatccc

SEQ ID NO: 292708 - DNA, 75 bp, synthetic construct
  source 1..75: mol_type = other DNA
ataaatttcactgacgcaaatttatttaacactattttttcacacaaggaaaatcccatccccaaactacataaa

SEQ ID NO: 292709 - DNA, 75 bp, synthetic construct
  source 1..75: mol_type = other DNA
tggggaatctgggcgtttctcgctgggtaagaccaatggttgtcgatactggtgcaggtgacgataccatcgtga

SEQ ID NO: 292710 - DNA, 75 bp, synthetic construct
  source 1..75: mol_type = other DNA
accgcagcggtacgcagatgcgccactttacttacgatgataaataccggggccggatggtggggctccgttatg

SEQ ID NO: 292711 - DNA, 75 bp, synthetic construct
  source 1..75: mol_type = other DNA
taacgacacgacttgataaagctacgatgatattatcgctaagtgttccccaggcatggttaaaataccaggcaa

SEQ ID NO: 292712 - DNA, 75 bp, synthetic construct
  source 1..75: mol_type = other DNA
gcaatgcttgattaagccgataactgacacctatccaacaaagcgcgatgcaattcgcgcctggaatcggaggcc

SEQ ID NO: 292713 - DNA, 75 bp, synthetic construct
  source 1..75: mol_type = other DNA
gtggttttttttcgttttttataaagagtcatgtacaggggttaaagtcatcagttttcaactcagggctgtttg

SEQ ID NO: 292714 - DNA, 75 bp, synthetic construct
  source 1..75: mol_type = other DNA
gattatacgccgcaatggaaaataatcaccctttgtgtgtcacacggttcctctctaaaattaatggcatcgcct

SEQ ID NO: 292715 - DNA, 75 bp, synthetic construct
  source 1..75: mol_type = other DNA
actggccatgacaataccggaacggataacgaacctggtaaccagctggccggatttgactttaagtttaaactc

SEQ ID NO: 292716 - DNA, 75 bp, synthetic construct
  source 1..75: mol_type = other DNA
tatttctggaagcagaagaacgaatcctcgtaccagacggtgtacggcagctacaaaaacaaacggaaaagaata

SEQ ID NO: 292717 - DNA, 75 bp, synthetic construct
  source 1..75: mol_type = other DNA
acgatgactttggtattgaaacaccctcagcgttagataactttactcaggccatccagtcacaaattttaggtg

SEQ ID NO: 292718 - DNA, 75 bp, synthetic construct
  source 1..75: mol_type = other DNA
gttagataactttactcaggccatccagtcacaaattttaggtgggctactgtcgaatattaataccggtaaacc

SEQ ID NO: 292719 - DNA, 75 bp, synthetic construct
  source 1..75: mol_type = other DNA
aattgataaatcatcaccaaatagacattgaccgcatgggctttccagccgactggcaagcgcggccaatttggc

SEQ ID NO: 292720 - DNA, 75 bp, synthetic construct
  source 1..75: mol_type = other DNA
attcggcagatcgcaaaggagaacatccgcagcaccacctggcaaagtatcagggcgtgctgcaggctgatgcct

SEQ ID NO: 292721 - DNA, 75 bp, synthetic construct
  source 1..75: mol_type = other DNA
gccgggtgaaggaagccgggtgcctggcccacgcccgccgaaaaatccatgacgaggatgtgcgccgtccgacag

SEQ ID NO: 292722 - DNA, 75 bp, synthetic construct
  source 1..75: mol_type = other DNA
gataatattgggcagtctttagtttttcccgtaaccgcattcacttctgggctaaattatttgcctgaacttaca

SEQ ID NO: 292723 - DNA, 75 bp, synthetic construct
  source 1..75: mol_type = other DNA
agctatgaaatggcacttagattgtcgaaggtcgtaggccgctctgcagagtcgtgggtaaacatgcagacccaa

SEQ ID NO: 292724 - DNA, 75 bp, synthetic construct
  source 1..75: mol_type = other DNA
atcctggtgagtttatcagagaaatgttcatggaaccgttcgaaatacctgccgcagagttagccgataaacttg

SEQ ID NO: 292725 - DNA, 75 bp, synthetic construct
  source 1..75: mol_type = other DNA
aatagacaacaacatcggtgaaaacgcgttacgctcggtggcggttggaagaaaaaattatctcttcttcggctc

SEQ ID NO: 292726 - DNA, 75 bp, synthetic construct
  source 1..75: mol_type = other DNA
caggtggctgatgcgcttccggagtctgtattgtgtcgttcactgggattaccggtggaaaaaatccgctccgta

SEQ ID NO: 292727 - DNA, 75 bp, synthetic construct
  source 1..75: mol_type = other DNA
cgttaccgttgatccggagtctccggaatctttcatgaggcgacctaaacgtcgccgttgggtaaatgagaaata

SEQ ID NO: 292728 - DNA, 75 bp, synthetic construct
  source 1..75: mol_type = other DNA
gagagcgacatcgtgccgggagagcagactgccaccagcatgctgaagcagcgcacaaaaaatattgcgccgctg

SEQ ID NO: 292729 - DNA, 75 bp, synthetic construct
  source 1..75: mol_type = other DNA
agcgacatcgtgccgggagagcagaccgccaccagcatactgaagcagcgcacaaaaaatattgcgctaccgcct

SEQ ID NO: 292730 - DNA, 75 bp, synthetic construct
  source 1..75: mol_type = other DNA
cacagcgggaagagatgcccgtatacacgcgctgggtaaaaacgcagaaatgcatgacttgtggcaatcaggcag

SEQ ID NO: 292731 - DNA, 75 bp, synthetic construct
  source 1..75: mol_type = other DNA
ctgctgggcttctgtaaatgatgtagtggatgccatgaccgaaaatatggcgcgtcgaatcctgaagcttccggg

SEQ ID NO: 292732 - DNA, 75 bp, synthetic construct
  source 1..75: mol_type = other DNA
cgatattttcacgctaccgctgtgtcgggagcatcacaacgagcttcatgcggatccgctggcgttcgaagaaaa

SEQ ID NO: 292733 - DNA, 75 bp, synthetic construct
  source 1..75: mol_type = other DNA
ctgccagtggcctcatggtgactaccatcacagcgaaaccgtcatacatcgttatggtgctggcgcgatggtgtt

SEQ ID NO: 292734 - DNA, 75 bp, synthetic construct
  source 1..75: mol_type = other DNA
tggtaccggaactcgggctggtggtccttaagcccgggcgcgaatcactgccggtttttcatcacagcagggtgc

SEQ ID NO: 292735 - DNA, 75 bp, synthetic construct
  source 1..75: mol_type = other DNA
taggccgggccgtgaatccatgcaagtatttcataaccctcgagtgctggtggagcctgaaccgaaaagcatgcg

SEQ ID NO: 292736 - DNA, 75 bp, synthetic construct
  source 1..75: mol_type = other DNA
cgcgaccagacatcagaatcactcgatcaacttgctcagcagaatctggcagcctggatgattgatgtcatacgt

SEQ ID NO: 292737 - DNA, 75 bp, synthetic construct
  source 1..75: mol_type = other DNA
aaacacggcagccaactgttgttgctgattcgttttttaatgcacgcgagaaattcgggtgttttgaagtggaaa

SEQ ID NO: 292738 - DNA, 75 bp, synthetic construct
  source 1..75: mol_type = other DNA
cgtgaccagacatcagaatcacttgaacaacttgctcatcaaaacctggcagcatggatgattgacgtcatccgt

SEQ ID NO: 292739 - DNA, 75 bp, synthetic construct
  source 1..75: mol_type = other DNA
gtcgggagcatcacaacgagcttcatgcggatcctctggcgttcgaagaaaagcatggttctcaggttgatttaa

SEQ ID NO: 292740 - DNA, 75 bp, synthetic construct
  source 1..75: mol_type = other DNA
gggaattatctttggctgaattatcctggtgggcggtctgcaatcaggtggtggatgcactacctgaggctgtat

SEQ ID NO: 292741 - DNA, 75 bp, synthetic construct
  source 1..75: mol_type = other DNA
tcatgcggatctgctggcgttcgaagaaaaccatggttcccagattgatttaatttttcgttttcttgatcacgc

SEQ ID NO: 292742 - DNA, 75 bp, synthetic construct
  source 1..75: mol_type = other DNA
gatcagttcacggaacgtctggaatcaatggcaacggataactgtgcccgctgggtgttgtccgtagtccgtcgt

SEQ ID NO: 292743 - DNA, 75 bp, synthetic construct
  source 1..75: mol_type = other DNA
agcggaaaaaatccgctccgtataccgtgagagtgacatcgtaccgggagaacagacagccatcagcatactgaa

SEQ ID NO: 292744 - DNA, 75 bp, synthetic construct
  source 1..75: mol_type = other DNA
gcatgcggatactgtggcatttgaagaaaagtatggctcccagctggagctgatatttcgttttatcgatcgtgc

SEQ ID NO: 292745 - DNA, 75 bp, synthetic construct
  source 1..75: mol_type = other DNA
gcgcacaaaaaatattgcgctgccacctcacgtccaccagcaacaaatcccaccacaggaaaaggcggtggtcag

SEQ ID NO: 292746 - DNA, 75 bp, synthetic construct
  source 1..75: mol_type = other DNA
gccacacggcgattatcatcacagcgaaaccgtcattcaccgttatggtaccggcgcaatggtgttgtgctggca

SEQ ID NO: 292747 - DNA, 75 bp, synthetic construct
  source 1..75: mol_type = other DNA
cagcaacgaacgggtgattcgcgctgctggtggtgttggtgcgctgtctgactggctgttacgccatgttaaatc

SEQ ID NO: 292748 - DNA, 75 bp, synthetic construct
  source 1..75: mol_type = other DNA
cggtaccggaactcgggctggtggtccttaagccggggcgtgaatccatgcaggtatttcataaccctcgagtgc

SEQ ID NO: 292749 - DNA, 75 bp, synthetic construct
  source 1..75: mol_type = other DNA
gaaaagcatggttcccaggttgatttaatttttcgttttcttgatcacgcttttgcaaccggcgtgctcgggtaa

SEQ ID NO: 292750 - DNA, 75 bp, synthetic construct
  source 1..75: mol_type = other DNA
tacttcgacctgttccggtaccggaacttgggttggtggtccttaaaccaggccgtgaatccatgcaggtattcc

SEQ ID NO: 292751 - DNA, 75 bp, synthetic construct
  source 1..75: mol_type = other DNA
ctgccagtggccacacggcgattatcaccacagtgaaaccgtcattcaccgttatggcgctggcgcgatggtgtt

SEQ ID NO: 292752 - DNA, 75 bp, synthetic construct
  source 1..75: mol_type = other DNA
ggaaaaaatccgctccttgtaccgcgaaagcgacatcgtaccgggagagcagaccgccaccagcatactgaagca

SEQ ID NO: 292753 - DNA, 75 bp, synthetic construct
  source 1..75: mol_type = other DNA
gcggaatgggaacaaaatcccacgatattttcacgctaccgctgtgtcgggagcatcacaacgagcttcatgcgg

SEQ ID NO: 292754 - DNA, 75 bp, synthetic construct
  source 1..75: mol_type = other DNA
cgccgggcgcaatccgtctgtgctggcactgcgataaccagctgcgcgatcagttcacggaacggctggaatcaa

SEQ ID NO: 292755 - DNA, 75 bp, synthetic construct
  source 1..75: mol_type = other DNA
cgttaccgttgatccggagtcccctgaatctttcatgaagcggcccaaacgtcgccgctgggtaaatgagaaata

SEQ ID NO: 292756 - DNA, 75 bp, synthetic construct
  source 1..75: mol_type = other DNA
agcatggatgattgacgtcatcggtcacgcaataagcggtacgcaggagcgggaattatctttggctgaattatc

SEQ ID NO: 292757 - DNA, 75 bp, synthetic construct
  source 1..75: mol_type = other DNA
gcgcacaaaaaattttgcgtcgttgcctcgcgcccaccagcaaccgaacccaccacaggaaaagacggttgtaag

SEQ ID NO: 292758 - DNA, 75 bp, synthetic construct
  source 1..75: mol_type = other DNA
cgcctgcttattttaagagtgaaattaagtggtttcttaaggtccattaaaatcaaactctcaaagttattatga

SEQ ID NO: 292759 - DNA, 75 bp, synthetic construct
  source 1..75: mol_type = other DNA
tgattcgtgctgctggtggtgctggtgcattgtctgactggctgttgcgccatattaaatcctgccagtggcctc

SEQ ID NO: 292760 - DNA, 75 bp, synthetic construct
  source 1..75: mol_type = other DNA
caggtattccataacggcagagtgctggttgaaccggagccaaaaagcatgcgcggtctgccgtccggggtcgtt

SEQ ID NO: 292761 - DNA, 75 bp, synthetic construct
  source 1..75: mol_type = other DNA
gggtgttgtctgttgtgcgtcgggatctcggttttgatgacagtcacgttgtgacaatgccggaactgtgctggt

SEQ ID NO: 292762 - DNA, 75 bp, synthetic construct
  source 1..75: mol_type = other DNA
gtcgggagcatcacaacgaacttcatgctgatccgctggcatttgaagaaaagcatggttcccaggttgatttaa

SEQ ID NO: 292763 - DNA, 75 bp, synthetic construct
  source 1..75: mol_type = other DNA
cgcgaccagacttcagaatcactcgggcaacttgctcaacaaaacctgacatcctggatgattgacgtcatccgc

SEQ ID NO: 292764 - DNA, 75 bp, synthetic construct
  source 1..75: mol_type = other DNA
gaaaatattaattttattagccgctttgtcagcgaagaagataaagggatttatgatgccatgaataaagcgatt

SEQ ID NO: 292765 - DNA, 75 bp, synthetic construct
  source 1..75: mol_type = other DNA
gttaagacacagccttgcgcgtgttgtggtaagccagccgacgatccacatcacctgattggccatggtcagggt

SEQ ID NO: 292766 - DNA, 75 bp, synthetic construct
  source 1..75: mol_type = other DNA
ccaccagcattatccaggataaagcgaaaaaggtgctggcgctgaaagtggatccggagtcgccggagtctttta

SEQ ID NO: 292767 - DNA, 75 bp, synthetic construct
  source 1..75: mol_type = other DNA
cgcctggatgattgacatcatccgtcacgcaatgaatggcgcacaggagcgtgaattatctctggctgaattatc

SEQ ID NO: 292768 - DNA, 75 bp, synthetic construct
  source 1..75: mol_type = other DNA
tggtaccggaactcgggctggtggtccttaagcctggtcgtgaatccatgcaggtatttcataatcctcgagtgc

SEQ ID NO: 292769 - DNA, 75 bp, synthetic construct
  source 1..75: mol_type = other DNA
gggagcatcacaacgaacttcatgctgatccgctggcatttgaagaaaagcatggttcccagattgatttaattt

SEQ ID NO: 292770 - DNA, 75 bp, synthetic construct
  source 1..75: mol_type = other DNA
agactgccaccagcattctgaagcagcgcactaaaaatattgtgctgccgcataacgcccaccagcaacagaacc

SEQ ID NO: 292771 - DNA, 75 bp, synthetic construct
  source 1..75: mol_type = other DNA
tgtgcgtgttgtggtaagccagccgacgatccccatcacctgattggtcacggtcagggagggatgggaacaaag

SEQ ID NO: 292772 - DNA, 75 bp, synthetic construct
  source 1..75: mol_type = other DNA
agcgcacaaaaaatattgcgctaccgcctcacacccaccagcaacagaacccaccacaggaaaagacggtggtca

SEQ ID NO: 292773 - DNA, 75 bp, synthetic construct
  source 1..75: mol_type = other DNA
gcattgccgttgatcctgagtctccggaatctttcatgaaacgacctaaacgtcgccgctgggttaacgagaaat

SEQ ID NO: 292774 - DNA, 75 bp, synthetic construct
  source 1..75: mol_type = other DNA
cagcgatgagcgggtgattcgtgctgccggcggcgctggtgcactgtctgactggctcctgcgtcatgttaaatc

SEQ ID NO: 292775 - DNA, 75 bp, synthetic construct
  source 1..75: mol_type = other DNA
ggaatggggacaaaatctcacgatattttcacgctaccgctgtgtcgggagcatcacaacgagcttcatgcggat

SEQ ID NO: 292776 - DNA, 75 bp, synthetic construct
  source 1..75: mol_type = other DNA
tcatccgtcacgcaataagcggtacgcaggagcgggaattatctttggctgaattatcctggtgggcggtctgca

SEQ ID NO: 292777 - DNA, 75 bp, synthetic construct
  source 1..75: mol_type = other DNA
ttaccggcctcacttccccgtgaaacccgggttatccggccggaagaggaatgctgtcctgcctgtggtggtgaa

SEQ ID NO: 292778 - DNA, 75 bp, synthetic construct
  source 1..75: mol_type = other DNA
gaaaagatcgaagaggaggagcgggaaacagaacatctgagggcccagatagaaaaactgcgccggatgctgttc

SEQ ID NO: 292779 - DNA, 75 bp, synthetic construct
  source 1..75: mol_type = other DNA
gtcccgccgcgatagagcgtggtatcgcgggccccggattacttgcccgcgtgtttacgggaaaatactgcgaac

SEQ ID NO: 292780 - DNA, 75 bp, synthetic construct
  source 1..75: mol_type = other DNA
tgccgcctgtctgatgacgtacagtcatcacgcctgtcgtacggaatgttatgccatgacggtccattattaccg

SEQ ID NO: 292781 - DNA, 75 bp, synthetic construct
  source 1..75: mol_type = other DNA
ggctccgtccttactcccgtggtattcagtgttccggagggggcattatcgtcgccgaagattgggctttctggt

SEQ ID NO: 292782 - DNA, 75 bp, synthetic construct
  source 1..75: mol_type = other DNA
acactggcgcagtatttgatggatactgagggatgccatccctgcatcatttttatgcaggggaacgcagacttt

SEQ ID NO: 292783 - DNA, 75 bp, synthetic construct
  source 1..75: mol_type = other DNA
aacagcgcatcagcttctggccgcagcactttggcctcattccacagtgggtgaccctggagccccgtatcttcg

SEQ ID NO: 292784 - DNA, 75 bp, synthetic construct
  source 1..75: mol_type = other DNA
gacacgaaggcggagctgaaggaagcccgggaggacggccgccagcttcagaccgaactgctggctctggcccgc

SEQ ID NO: 292785 - DNA, 75 bp, synthetic construct
  source 1..75: mol_type = other DNA
gcaagggaagccgcttttaaggcgttcccgtttctgtctgacatgcagaaaactgagtgcgaacagggcccggac

SEQ ID NO: 292786 - DNA, 75 bp, synthetic construct
  source 1..75: mol_type = other DNA
gattatctgggggaagtcagtgcagaacaactggaactggtgagcagcgctctgaaagtgatccgcacagaacgg

SEQ ID NO: 292787 - DNA, 75 bp, synthetic construct
  source 1..75: mol_type = other DNA
gcttcgtgcagtctgtctcggaaagaaaaattacgtgttcttcggtagcgatcacggcggcgagcgtggtgcact

SEQ ID NO: 292788 - DNA, 75 bp, synthetic construct
  source 1..75: mol_type = other DNA
aaatagaacatctgcgggctcagatagaaaaactgcgccggatgctgttcggaacccgttctgaaaaactgcgtc

SEQ ID NO: 292789 - DNA, 75 bp, synthetic construct
  source 1..75: mol_type = other DNA
gatgctgaagatggctgttttttacgggatgaacggtgaactgtatcgggcaacatacgatgccatacatggccc

SEQ ID NO: 292790 - DNA, 75 bp, synthetic construct
  source 1..75: mol_type = other DNA
tggaccgtctgtgcgaagactactgcggaggtatctggaatctgtacaccctgaacaacgggggggcatttatgg

SEQ ID NO: 292791 - DNA, 75 bp, synthetic construct
  source 1..75: mol_type = other DNA
tggaccgtctgtgcgaagactactgcggaggtatctggaatctgtacaccctgaacaacggcggcgcatttatgg

SEQ ID NO: 292792 - DNA, 75 bp, synthetic construct
  source 1..75: mol_type = other DNA
tggaccgtctgtgcgaagactactgcggaggtatctggaatctgtacaccctgaacaacggtggtgcatttatgg

SEQ ID NO: 292793 - DNA, 75 bp, synthetic construct
  source 1..75: mol_type = other DNA
ccatgacggttcattattatcggctgcgggattatgccctgcagcatccggaatgcagcgccattatgcgcatca

SEQ ID NO: 292794 - DNA, 75 bp, synthetic construct
  source 1..75: mol_type = other DNA
tacactctgaacaacggcggggcatttatggcccccgaaccggatgacgatgatgacgaaacatgggtactgttc

SEQ ID NO: 292795 - DNA, 75 bp, synthetic construct
  source 1..75: mol_type = other DNA
ctactgcggtggtatctggaatctgtacaccctgaacaacggtggcgcatttatagcacctgaaccggatgaaga

SEQ ID NO: 292796 - DNA, 75 bp, synthetic construct
  source 1..75: mol_type = other DNA
tgagtatgttttgatgttagtaaatattagggctgaaaaggaatttgaagaagactatcaaaagttaatgcttgg

SEQ ID NO: 292797 - DNA, 75 bp, synthetic construct
  source 1..75: mol_type = other DNA
ccgtaccgggtgcttaccgggctggcagaccgcttcgggcggacgctgacgtaccggcgtgaggccgccggtgac

SEQ ID NO: 292798 - DNA, 75 bp, synthetic construct
  source 1..75: mol_type = other DNA
ggagtatgatgaatggggcaaccagcttaatgaggagaacccgcatcatgtgtatcagccgtaccgtctgccagg

SEQ ID NO: 292799 - DNA, 75 bp, synthetic construct
  source 1..75: mol_type = other DNA
tggaccgtctgtgcgaagactactgcggaggtatctggaatctgtacaccctgaacaacggaggagcatttatgg

SEQ ID NO: 292800 - DNA, 75 bp, synthetic construct
  source 1..75: mol_type = other DNA
gacggtcgttttgccggggaacaactggcagacggcggcttgtcacctatgctgggtcaggacgcacaagggcca

SEQ ID NO: 292801 - DNA, 75 bp, synthetic construct
  source 1..75: mol_type = other DNA
gcacgaaagagcattttttgtattaataaaatcatattatcaagacaggaaaaagctaaataaattatattctgc

SEQ ID NO: 292802 - DNA, 75 bp, synthetic construct
  source 1..75: mol_type = other DNA
ctactcaccagacaggcagggaaaacatccggtacaacaccttcgtcccttccggggtatcctgcaggcggatgc

SEQ ID NO: 292803 - DNA, 75 bp, synthetic construct
  source 1..75: mol_type = other DNA
taggtgtgctgggtagcctggtatttggcctgctgacgtacctgacaaacctttatttcaagattaaagaagata

SEQ ID NO: 292804 - DNA, 75 bp, synthetic construct
  source 1..75: mol_type = other DNA
tggtctgctgacatatctgactaacctgtatttcaaaattaaagaagaccggcgtaaggcggcccgggaagagta

SEQ ID NO: 292805 - DNA, 75 bp, synthetic construct
  source 1..75: mol_type = other DNA
ctggcatcgcctatggtgcatcagcgactaacgctggttactggagcctgcagttgcttgaccaggtgtcaccat

SEQ ID NO: 292806 - DNA, 75 bp, synthetic construct
  source 1..75: mol_type = other DNA
cggcgcgacgccagatcaggtttacgccgcactgctggtagctgaccagtacggtcagcgtttcctgcaagagtg

SEQ ID NO: 292807 - DNA, 75 bp, synthetic construct
  source 1..75: mol_type = other DNA
aataggtgtgctgggtagcttggtatttggcctgctgacgtacctgacaaacctttatttcaagattaaagaaga

SEQ ID NO: 292808 - DNA, 75 bp, synthetic construct
  source 1..75: mol_type = other DNA
aagataagcgtaagtggatttgcccctatatttccagacatctgttatcacttaacccattacaagcccgctgcc

SEQ ID NO: 292809 - DNA, 75 bp, synthetic construct
  source 1..75: mol_type = other DNA
cccgattattgggatgaacatcttaaaaatgaaaggaccattaaaaactggtttgattgtattagtcagggagag

SEQ ID NO: 292810 - DNA, 75 bp, synthetic construct
  source 1..75: mol_type = other DNA
agtagtattcatgacctctatttagaggcgagatttactaatagtacaaaaaataaatggggggggtatggcatc

SEQ ID NO: 292811 - DNA, 75 bp, synthetic construct
  source 1..75: mol_type = other DNA
ctgtttggcctgctgacgtatctgactaacctgtatttcaaaatcagggaggaccgccgtaagacggcgcgggga

SEQ ID NO: 292812 - DNA, 75 bp, synthetic construct
  source 1..75: mol_type = other DNA
tggcgataggtgtgctggggagtctgctgtttggcctgctgacgtatctgactaacctgtatttcaaaatcagag

SEQ ID NO: 292813 - DNA, 75 bp, synthetic construct
  source 1..75: mol_type = other DNA
gggtagcctggtatttggcctgctgacgtacctgacaaacctttatttcaagattaaagaagacaagcgtaaggc

SEQ ID NO: 292814 - DNA, 75 bp, synthetic construct
  source 1..75: mol_type = other DNA
gtcctgaagggctggtattttctgttaataaacttcacaaacagctttcttacgaacagttcggaaacatcgtga

SEQ ID NO: 292815 - DNA, 75 bp, synthetic construct
  source 1..75: mol_type = other DNA
cggtgacggagacatacatcagatggaaaaaatcacaacaggtgtgtcatacaccacgtcagcggtggggacggg

SEQ ID NO: 292816 - DNA, 75 bp, synthetic construct
  source 1..75: mol_type = other DNA
gtctggcactgggctttctgacttatctgacgaatctgtacttcaagataaaagagggctgtcgcaaggcggcga

SEQ ID NO: 292817 - DNA, 75 bp, synthetic construct
  source 1..75: mol_type = other DNA
tggaagccttgtgttgggttttctcacctatctgacaaatctgtatttcaaaatcagagaagacagaagaaaggc

SEQ ID NO: 292818 - DNA, 75 bp, synthetic construct
  source 1..75: mol_type = other DNA
tggacaaagtctctccgtcccagtgggtggcgataggtgtgctggggagtctgctgtttggcctgctgacgtatc

SEQ ID NO: 292819 - DNA, 75 bp, synthetic construct
  source 1..75: mol_type = other DNA
actgacgacacaccggtaaaagtgctgacaccgggcagaaaaaaggcaaaaacaggacgcatctggacgtatgtc

SEQ ID NO: 292820 - DNA, 75 bp, synthetic construct
  source 1..75: mol_type = other DNA
gcactgaagcgtataccggtcatgaagtgcaggatattcccggcgtgctggctgtatttgcagaacgccgtaagg

SEQ ID NO: 292821 - DNA, 75 bp, synthetic construct
  source 1..75: mol_type = other DNA
catacaccacgtcagcggtgggaacgggatactggttactgcagctgctggacaaagtctctccgtcccagtggg

SEQ ID NO: 292822 - DNA, 75 bp, synthetic construct
  source 1..75: mol_type = other DNA
ctggggagtctgctgtttggcctgctgacgtatctgactaacctgtatttcaaaatcagagaggaccgtcgtaag

SEQ ID NO: 292823 - DNA, 75 bp, synthetic construct
  source 1..75: mol_type = other DNA
atgtaccagatggaaaaaattacaacaggtgtgtcatacaccacgtcagcggcgggaacggggtactggttgctg

SEQ ID NO: 292824 - DNA, 75 bp, synthetic construct
  source 1..75: mol_type = other DNA
cgtgctggggagtctgctgtttggtctgctgacgtacctgacgaacctgtatttcaaaatcagagaagaccggcg

SEQ ID NO: 292825 - DNA, 75 bp, synthetic construct
  source 1..75: mol_type = other DNA
ataggcgtgctgggaagtctgctgtttgggctgctgacatatctgactaacctgtatttcaaaatcagagaggac

SEQ ID NO: 292826 - DNA, 75 bp, synthetic construct
  source 1..75: mol_type = other DNA
gctgtttggcctgctgacgtatctgacaaacctttatttcaagattaaagaagatcggcgtaaggcggcgcgggg

SEQ ID NO: 292827 - DNA, 75 bp, synthetic construct
  source 1..75: mol_type = other DNA
gctgtttggcctgctgacgtatctgacaaatctttatttcaagattaaagaagataagcgtaaggctgcacgggg

SEQ ID NO: 292828 - DNA, 75 bp, synthetic construct
  source 1..75: mol_type = other DNA
gagtggaaagatgccaacgataaatggaatgccatgtggggcgtcaaaattgagcagaccgaagacggcaggcat

SEQ ID NO: 292829 - DNA, 75 bp, synthetic construct
  source 1..75: mol_type = other DNA
cctgaaatcatcccagatgctgagcgtgatagacgccatcagtgaagggccgattgaaggtccggtggacggatt

SEQ ID NO: 292830 - DNA, 75 bp, synthetic construct
  source 1..75: mol_type = other DNA
atcacggtaagaatcagtgatgatcagaaatttgaccggcaggtcatgataccgccagtgttattccgcggtggt

SEQ ID NO: 292831 - DNA, 75 bp, synthetic construct
  source 1..75: mol_type = other DNA
acaacgtcacgattaatgagaactgtcagattaaggggaaactgtcagccaatcagattgaaggcgatattgtca

SEQ ID NO: 292832 - DNA, 75 bp, synthetic construct
  source 1..75: mol_type = other DNA
gacgtgttcctgaaacgactgtttgcggtgagcatcacgtcatccggcaatcctccggcattttccctgacgccg

SEQ ID NO: 292833 - DNA, 75 bp, synthetic construct
  source 1..75: mol_type = other DNA
gatttattgggtaacagcgctcaggttcgcgctgtacttgaatatttcctcacaagtcagttgcactgtacctta

SEQ ID NO: 292834 - DNA, 75 bp, synthetic construct
  source 1..75: mol_type = other DNA
ctggctgataacgttcatccgctcacagctggggttcaacgaagaccatcaactgacgatccccgagttgtgctg

SEQ ID NO: 292835 - DNA, 75 bp, synthetic construct
  source 1..75: mol_type = other DNA
ggtgtattaatcgcatccagagaaactaaaggggccattcccggtagctacagtgcagttattgatatgccgagt

SEQ ID NO: 292836 - DNA, 75 bp, synthetic construct
  source 1..75: mol_type = other DNA
taatctgccgtccggggtcgttcctgccgttcgccagccgctgggggatgaaaaatcatttctgccttttttcag

SEQ ID NO: 292837 - DNA, 75 bp, synthetic construct
  source 1..75: mol_type = other DNA
taatctgccgtccggggtcgttcctgccgttcgccagccgctgggggatgaaaaaacatttctgccatttttcag

SEQ ID NO: 292838 - DNA, 75 bp, synthetic construct
  source 1..75: mol_type = other DNA
gtggcatttgaagataagtatggctcccaactggagctgatatttcgttttatcgatcgcgcgctggcaattggc

SEQ ID NO: 292839 - DNA, 75 bp, synthetic construct
  source 1..75: mol_type = other DNA
taatctgccgtccggggtcgttcctgccgttcgccagccgctgggggatgataaaacatttctgccttttttcag

SEQ ID NO: 292840 - DNA, 75 bp, synthetic construct
  source 1..75: mol_type = other DNA
taatctgccgtccggggtcgttcctgccgttcgccagccgctgggggatgaaaaagcatttctgccgtttttcag

SEQ ID NO: 292841 - DNA, 75 bp, synthetic construct
  source 1..75: mol_type = other DNA
taatctgccgtccggggtcgttcctgccgttcgccagccgctgggggatgaaaaaccatttctgccctttttcag

SEQ ID NO: 292842 - DNA, 75 bp, synthetic construct
  source 1..75: mol_type = other DNA
gggggctgaagttgccgacgctgcgccagcgcctgttccgctgtgtgagtatccgtgagaacgatgacggcacgt

SEQ ID NO: 292843 - DNA, 75 bp, synthetic construct
  source 1..75: mol_type = other DNA
ccaatatctccggtgtcacggtggtgttccgggcaggtgagcaggagcagacaccgccggagggatttgaatcct

SEQ ID NO: 292844 - DNA, 75 bp, synthetic construct
  source 1..75: mol_type = other DNA
cacagaccgtcaataagaaactggaagaccagagtgcagcgatccagcagatacagaaggttcaggttgatacaa

SEQ ID NO: 292845 - DNA, 75 bp, synthetic construct
  source 1..75: mol_type = other DNA
ggcaacttgctcaacaaaacctgacatcctggatgattgacgtcatccgccacgcaataaacggtacacaggagc

SEQ ID NO: 292846 - DNA, 75 bp, synthetic construct
  source 1..75: mol_type = other DNA
gtgaaagcgacatcgtaccgggagagcagaccgccaccagcatactgaagcagcgcacaaaaaatattgcgctac

SEQ ID NO: 292847 - DNA, 75 bp, synthetic construct
  source 1..75: mol_type = other DNA
tcaccgttatggtaccggcgcaatggtgttgtgttggcactgcgacaaccaactgcgtgaccagacatcggaatc

SEQ ID NO: 292848 - DNA, 75 bp, synthetic construct
  source 1..75: mol_type = other DNA
gcaggggaatcagctgttcatgaacgacgtgttcctgaaacgactgtttgcggtgagcatcacgtcatccggcaa

SEQ ID NO: 292849 - DNA, 75 bp, synthetic construct
  source 1..75: mol_type = other DNA
aacctgctgaagatggatgcgttcggttgcaccagtcgcggtcaggcccaccgtgccgggctgtgggtgataaag

SEQ ID NO: 292850 - DNA, 75 bp, synthetic construct
  source 1..75: mol_type = other DNA
cgaaacaccagaatttcaacagcccgaatcagcagtcgtactggtattccacctgtaagctgcaggtgctgaaga

SEQ ID NO: 292851 - DNA, 75 bp, synthetic construct
  source 1..75: mol_type = other DNA
caggcttttgaccgtcagatagtagtcccccccgttctgtttcgtgggggtaagcatgaaaacttcaacagcaac

SEQ ID NO: 292852 - DNA, 75 bp, synthetic construct
  source 1..75: mol_type = other DNA
gcgatgataaatccggagagcggcaacagcactccgttatttgtggcgcaggggaatcagctgttcatgaacgac

SEQ ID NO: 292853 - DNA, 75 bp, synthetic construct
  source 1..75: mol_type = other DNA
gcagatgcaggacggacgcctttatatcgcgggtattggtgccggtattgagaacacccctgacggcatgcagag

SEQ ID NO: 292854 - DNA, 75 bp, synthetic construct
  source 1..75: mol_type = other DNA
gcaccggaacggtggccatcagggaccattaccgtcaggatttatgacgatcagccgtttgaccggcagattgtt

SEQ ID NO: 292855 - DNA, 75 bp, synthetic construct
  source 1..75: mol_type = other DNA
actccgggacgctcaacaacgtcacgattaacgagaactgccgggttctgggaaaactgtccgcgaaccagattg

SEQ ID NO: 292856 - DNA, 75 bp, synthetic construct
  source 1..75: mol_type = other DNA
ggcaacacaaggccgatgtttgttggtcagggcgatcagatattcatgaacgaagtgttcctgaaatatctgacg

SEQ ID NO: 292857 - DNA, 75 bp, synthetic construct
  source 1..75: mol_type = other DNA
atatcgcgggtattggtgccggtattgagaacacccctgacggcatgcagagtcaggtgctgctggcggcggaca

SEQ ID NO: 292858 - DNA, 75 bp, synthetic construct
  source 1..75: mol_type = other DNA
tgggtaaatggctggtatcccacagcaagtatcagcgatttgctggttgtggtgatgaagaaagccaccgcaggc

SEQ ID NO: 292859 - DNA, 75 bp, synthetic construct
  source 1..75: mol_type = other DNA
acacaccgcgtgaggcaaaggataacctgaagtccacgcagatgatgagcgtgattgatgccattggtgaagggc

SEQ ID NO: 292860 - DNA, 75 bp, synthetic construct
  source 1..75: mol_type = other DNA
ttcagtggcgctaagcatgagagagagcatactgatatttactcctcatgccgtctgatagtgcggaaaaacggt

SEQ ID NO: 292861 - DNA, 75 bp, synthetic construct
  source 1..75: mol_type = other DNA
ctgtatccaaatcattcccgaaacaggctggtacgtggggtaacacggaaacaccaaacgggacggttacagtca

SEQ ID NO: 292862 - DNA, 75 bp, synthetic construct
  source 1..75: mol_type = other DNA
tgagcatcacgtcatccggcaatcctccggcattttccctgacgccggacgggcgactgacggcgaaaaatgcgg

SEQ ID NO: 292863 - DNA, 75 bp, synthetic construct
  source 1..75: mol_type = other DNA
ggtgatgtgcgggttgaaattacattcaggtatgaagcagatgtgcttttttacatgggtggttcaatacttcat

SEQ ID NO: 292864 - DNA, 75 bp, synthetic construct
  source 1..75: mol_type = other DNA
tctggagtttaaggttttccataaaggcaatcagtgggcaggtaatatcaccgactgtacggtgattgtgaccaa

SEQ ID NO: 292865 - DNA, 75 bp, synthetic construct
  source 1..75: mol_type = other DNA
gaccgtcaataagaaactggaagaccagagtgcggcaattcagcagatacagaaggttcaggttgatacaaataa

SEQ ID NO: 292866 - DNA, 75 bp, synthetic construct
  source 1..75: mol_type = other DNA
ttcagcggcgctaaacatgagcgggagaataacgatatttattcgtcatgccgcctgatagtacggaaaaacggt

SEQ ID NO: 292867 - DNA, 75 bp, synthetic construct
  source 1..75: mol_type = other DNA
atcccaccggcagtacagcacctgacggtggaggtgagcgcagctgacggccagtatctggcgcaggctaaatgg

SEQ ID NO: 292868 - DNA, 75 bp, synthetic construct
  source 1..75: mol_type = other DNA
acgcgcaccattacgtccgcgaacattgaccgcctgcgggtcaccttcggggtgcagtcactggtgcagaccacc

SEQ ID NO: 292869 - DNA, 75 bp, synthetic construct
  source 1..75: mol_type = other DNA
atgaacgatgtgttcctgaagcgactgtttgcggtgagtatcacctcgtccggcaatcccccgacgttttccctg

SEQ ID NO: 292870 - DNA, 75 bp, synthetic construct
  source 1..75: mol_type = other DNA
gacgagctgcatgcggataccgtggcatttgaagagaagtatggctcccagctggagctgatatttcgttttatc

SEQ ID NO: 292871 - DNA, 75 bp, synthetic construct
  source 1..75: mol_type = other DNA
ccccaaacgtcgccgctgggttaatgaaaagtacacgcgctgggttaagacgcagccgtgtgcatgttgtggaaa

SEQ ID NO: 292872 - DNA, 75 bp, synthetic construct
  source 1..75: mol_type = other DNA
ctggcactgcgataaccagctgcgcgatcaattcacggaacggctggaatcaatggcaacggataactgtgcccg

SEQ ID NO: 292873 - DNA, 75 bp, synthetic construct
  source 1..75: mol_type = other DNA
tggtggagccggaaccgaaaagcatgcgtaatatgccgtccggggtcgttcctgccgttcgccagccgctggtgg

SEQ ID NO: 292874 - DNA, 75 bp, synthetic construct
  source 1..75: mol_type = other DNA
agtctccggaatctttcatgaaacgacctaaacgtcgccgctgggttaacgagaaatacacacgctgggtgaaga

SEQ ID NO: 292875 - DNA, 75 bp, synthetic construct
  source 1..75: mol_type = other DNA
cattgccgttgatccggactctccggaatctttcatgaggcgacctaaacgtcgccgttgggtaaatgagaaata

SEQ ID NO: 292876 - DNA, 75 bp, synthetic construct
  source 1..75: mol_type = other DNA
tgctggtggcgtggaatgtcttgaaagctggttacttcgtgaaaagggctgtcagtggcctcattccaactggca

SEQ ID NO: 292877 - DNA, 75 bp, synthetic construct
  source 1..75: mol_type = other DNA
gcggacgcactaccggaggctgtattacgccgctcactgggattaccggcggagaaaatccgctcgctttatcgc

SEQ ID NO: 292878 - DNA, 75 bp, synthetic construct
  source 1..75: mol_type = other DNA
agtcgaagcgttcataaaacgctggcatctgctaaagaaattttacagggaaggggggttgattcggtctctatt

SEQ ID NO: 292879 - DNA, 75 bp, synthetic construct
  source 1..75: mol_type = other DNA
ggaatgggtacaaaagcgcatgacctcttcgtgttgcctttgtgcagaaagcatcacgacgagctgcatgcggat

SEQ ID NO: 292880 - DNA, 75 bp, synthetic construct
  source 1..75: mol_type = other DNA
cccaacgcgcccatcccgcacataccagcaacggatctggaggtaacgtgcggatattacttcgacctgttctgg

SEQ ID NO: 292881 - DNA, 75 bp, synthetic construct
  source 1..75: mol_type = other DNA
tggtggagccggaaccgaaaagcatgcgtaatctgccgtccgggggcgttcctgccgctcgccagccgctggtgg

SEQ ID NO: 292882 - DNA, 75 bp, synthetic construct
  source 1..75: mol_type = other DNA
taatctgccgtccggggtcgttcctgccgttcgccagccgctggaggaagataaagcattgctgccttttttcag

SEQ ID NO: 292883 - DNA, 75 bp, synthetic construct
  source 1..75: mol_type = other DNA
gttctcgcggtttgtgttctgccccgctgtgtgccgagattctggcggcgcagatgagcgacgaaccgattccga

SEQ ID NO: 292884 - DNA, 75 bp, synthetic construct
  source 1..75: mol_type = other DNA
ggagtcttttatgttacgcccaaaacgtcgccgctgggttaatgaaaagtacacgcgctgggttaagacacagcc

SEQ ID NO: 292885 - DNA, 75 bp, synthetic construct
  source 1..75: mol_type = other DNA
tacgccccaaacgtcgccgctgggttaatgaaaagtacacgcgctgggttaagacgcagccgtgcgcatgttgtg

SEQ ID NO: 292886 - DNA, 75 bp, synthetic construct
  source 1..75: mol_type = other DNA
ccttaaaccaggccgtgaatccatgcaggtattccataaccctcgagtgcttgtggagccggaaccgaaaagcat

SEQ ID NO: 292887 - DNA, 75 bp, synthetic construct
  source 1..75: mol_type = other DNA
gagtggccagccatccgggatcgttcctgtcgttcgccagccgctggctgaggataaatcattactgccattttt

SEQ ID NO: 292888 - DNA, 75 bp, synthetic construct
  source 1..75: mol_type = other DNA
gaaaagcatggctcccagattgatttaatttttcgttttcttgatcgcgcctttgcaaccggcgtgctcgggtaa

SEQ ID NO: 292889 - DNA, 75 bp, synthetic construct
  source 1..75: mol_type = other DNA
tggtaccggaactcgggctggtggtccttaggccgggctgtgaatccatgcaagtatttcataaccctcgagtgc

SEQ ID NO: 292890 - DNA, 75 bp, synthetic construct
  source 1..75: mol_type = other DNA
taatctgccgtccggggtcgttcctgccgttcgccagccgctggaggaggataaagcattactgccttttttcag

SEQ ID NO: 292891 - DNA, 75 bp, synthetic construct
  source 1..75: mol_type = other DNA
taatctgccgtccggggtcgttcctgccgttcgccagccgctggaggatgataaagcatttctgccttttttcag

SEQ ID NO: 292892 - DNA, 75 bp, synthetic construct
  source 1..75: mol_type = other DNA
atgggaacaaaagcgcatgacctctttgtgttgcctttgtgcagaaagcatcacgacgagctgcatgcggatacc

SEQ ID NO: 292893 - DNA, 75 bp, synthetic construct
  source 1..75: mol_type = other DNA
gcgacaaccagctgcgtgaccagacatccgaatcactcgagcaacttgctcatcaaaacctgtcagcatggatga

SEQ ID NO: 292894 - DNA, 75 bp, synthetic construct
  source 1..75: mol_type = other DNA
gttatggtaccggcgcaatggtgttgtgctggcactgcgacaaccagttgtgtgaccagacctcagaatcacttg

SEQ ID NO: 292895 - DNA, 75 bp, synthetic construct
  source 1..75: mol_type = other DNA
gatcagttcacggagcggctggaatcaatggcaacggataactgtgcccattgggtgttgtctgtagtccgtcgg

SEQ ID NO: 292896 - DNA, 75 bp, synthetic construct
  source 1..75: mol_type = other DNA
attcgtgctgctggtggcgctggcgcattgtctgactggttactgcgccatgttaaatcctgccagtggccacac

SEQ ID NO: 292897 - DNA, 75 bp, synthetic construct
  source 1..75: mol_type = other DNA
cgacagccaccagcatactgaagcagcgcacaaaaaatattgcgctaccaccttacgcccaccagcaacataacc

SEQ ID NO: 292898 - DNA, 75 bp, synthetic construct
  source 1..75: mol_type = other DNA
gaatctttcatgaagcgacctaaacgtcgccgttgggtaaatgagaaatatacgcgctgggtgaagacacagccg

SEQ ID NO: 292899 - DNA, 75 bp, synthetic construct
  source 1..75: mol_type = other DNA
gctggtgaatgactggtatcccacggcaagcatcagcgatttgctggttgtggtgatgaagaaatccacagccgg

SEQ ID NO: 292900 - DNA, 75 bp, synthetic construct
  source 1..75: mol_type = other DNA
tgcgaactccgggacgctcaacaacgtcacgattaacgagaactgtcgggttctgggaaaactgtccgcgaacca

SEQ ID NO: 292901 - DNA, 75 bp, synthetic construct
  source 1..75: mol_type = other DNA
atccgcatcacctgattggtcatggtcaggggggaatggggacaaaggcccacgatattttcacgttaccgttgt

SEQ ID NO: 292902 - DNA, 75 bp, synthetic construct
  source 1..75: mol_type = other DNA
taatctgccgtccggggtcgttcctgccgttcgccagccgctgggggatgagaaaacatttctgccgtttttcag

SEQ ID NO: 292903 - DNA, 75 bp, synthetic construct
  source 1..75: mol_type = other DNA
taatctgccgtccggggtcgttcctgccgttcgccagccgctgggggatgacaaaacatttctgccctttttcag

SEQ ID NO: 292904 - DNA, 75 bp, synthetic construct
  source 1..75: mol_type = other DNA
taatctgccgtccggggtcgttcctgccgttcgccagccgctgggggatgataaatcatttctgccgtttttcag

SEQ ID NO: 292905 - DNA, 75 bp, synthetic construct
  source 1..75: mol_type = other DNA
agaccgccaccagcatactgaagcagcgcacaaaaaatattgcgccaccacctcatgcccaccagcaacagaacc

SEQ ID NO: 292906 - DNA, 75 bp, synthetic construct
  source 1..75: mol_type = other DNA
ctggtgggcggtctgcaatcaagtggcggacgcgcttccggaggcagtattacgtcgttctctggggttacgtgc

SEQ ID NO: 292907 - DNA, 75 bp, synthetic construct
  source 1..75: mol_type = other DNA
cacacgctgggttaagacacagccgtgtgcttgctgcggtatgccagccgacgatccgcatcatctgattggtca

SEQ ID NO: 292908 - DNA, 75 bp, synthetic construct
  source 1..75: mol_type = other DNA
ggacgcctttatatcgcgggtattggtgccggtattgagaacacctctgacggcatgcagagtcaggtgctgctg

SEQ ID NO: 292909 - DNA, 75 bp, synthetic construct
  source 1..75: mol_type = other DNA
atgtaatgtccaccctgaaaggccgacaccaacattttgacagattatacagtcagtattgctcgcttgaacgcc

SEQ ID NO: 292910 - DNA, 75 bp, synthetic construct
  source 1..75: mol_type = other DNA
gatctcggttttgatgatagtcacgttgtgacaataccggaactgtgctggtggctggttcgtaatgacctggcg

SEQ ID NO: 292911 - DNA, 75 bp, synthetic construct
  source 1..75: mol_type = other DNA
gctgatgcccctgtttatgcaggggcgtgtcctgctggagcctgagccggaacgttattcatctttcgccagtgg

SEQ ID NO: 292912 - DNA, 75 bp, synthetic construct
  source 1..75: mol_type = other DNA
tgctggagcctgagccggagcgttattcatctttcgccagtggtgccgttccggcggcatcacaaccgctggcgg

SEQ ID NO: 292913 - DNA, 75 bp, synthetic construct
  source 1..75: mol_type = other DNA
tggcaccgatgaccggggtagtgatatttcgcccaggcagtgaactgatgcatctgttcagacgtgggcgtgttc

SEQ ID NO: 292914 - DNA, 75 bp, synthetic construct
  source 1..75: mol_type = other DNA
tccggaatccttcatgaaacgacctaaacgtcgccgctgggtaaatgagaaatacacacgctgggtaaagacaca

SEQ ID NO: 292915 - DNA, 75 bp, synthetic construct
  source 1..75: mol_type = other DNA
cttcacgtccaccagcaacaaaatccaccacagaaaaaaacggttgtcagtatcgccgttgatccggagtctcct

SEQ ID NO: 292916 - DNA, 75 bp, synthetic construct
  source 1..75: mol_type = other DNA
tcagggcggaatgggaacaaaatcccacgatattttcacgctaccgctgtgtcgggagcatcacaacgagcttca

SEQ ID NO: 292917 - DNA, 75 bp, synthetic construct
  source 1..75: mol_type = other DNA
aaaagggggcacccgttaacttcagattatttcagacgatacagatggacaccagtgctcacagctgccggactc

SEQ ID NO: 292918 - DNA, 75 bp, synthetic construct
  source 1..75: mol_type = other DNA
ctggtggctgattcgtaatgatctggcggatgccttaccggaaagtgcagcccgtaaggcactgagattaccgaa

SEQ ID NO: 292919 - DNA, 75 bp, synthetic construct
  source 1..75: mol_type = other DNA
caccacaggaaaagacggtggtcagcattgccgttgatcctgaggctccggaatctttcatgaaacgacctaaac

SEQ ID NO: 292920 - DNA, 75 bp, synthetic construct
  source 1..75: mol_type = other DNA
ccacaccttctgtttccgtaaccactgcatcagggaataacccacctcagttggttgccactcccgtccctgatg

SEQ ID NO: 292921 - DNA, 75 bp, synthetic construct
  source 1..75: mol_type = other DNA
ccccgtatcttcggctggatggaccgtctttgcgaaaactactgcggtggtatcgggaatctgtacaccctgaac

SEQ ID NO: 292922 - DNA, 75 bp, synthetic construct
  source 1..75: mol_type = other DNA
atgtgacgcgatgactgagcactattatcgcttacgtgactacgcgctaaaccatccggaatgcagtgccattat

SEQ ID NO: 292923 - DNA, 75 bp, synthetic construct
  source 1..75: mol_type = other DNA
gcccggctgtgggtctacgtccgtgatgaccgtaacgccggttcacagatgcctccggcggtctggttcgcgtac

SEQ ID NO: 292924 - DNA, 75 bp, synthetic construct
  source 1..75: mol_type = other DNA
cccatgttgtcaccgggaaatatgcagaccatctgccgttataccgccagtcagaaatataccgtcgccagggcg

SEQ ID NO: 292925 - DNA, 75 bp, synthetic construct
  source 1..75: mol_type = other DNA
ctgtacaccctgaacaacggtggcgcatttatagcacctgaaccggatgaagatgatggagaaacctggatactg

SEQ ID NO: 292926 - DNA, 75 bp, synthetic construct
  source 1..75: mol_type = other DNA
ctgatgacgtacagtcatcacgcctgtcgtacggagaattatgccatgacggtccattattatcggttgcgggat

SEQ ID NO: 292927 - DNA, 75 bp, synthetic construct
  source 1..75: mol_type = other DNA
aggatattgagccgatgcaactgctggaagtaatccgcagatttgaagatcgcggtgcaattgaagtggtcaaca

SEQ ID NO: 292928 - DNA, 75 bp, synthetic construct
  source 1..75: mol_type = other DNA
atgacaacctcttcgcataattccaccgcaccttctgtttccgtaacaactgcatcagggaataaccagtctcaa

SEQ ID NO: 292929 - DNA, 75 bp, synthetic construct
  source 1..75: mol_type = other DNA
agagaataatccgcctcagctggttgccagcctcgtccctgatgaacagcgcatcagcttctggccgcagcattt

SEQ ID NO: 292930 - DNA, 75 bp, synthetic construct
  source 1..75: mol_type = other DNA
tgcatcagggaataacccgcctcagctggttgccagcctcgtccctgatgaacagcgcatcagcttctggccgca

SEQ ID NO: 292931 - DNA, 75 bp, synthetic construct
  source 1..75: mol_type = other DNA
atgccatgacggtccattattatcggttgcgggattatgccctgcagcatccggaatgcagcgccattatgcgca

SEQ ID NO: 292932 - DNA, 75 bp, synthetic construct
  source 1..75: mol_type = other DNA
ggcgtgaggatgacccactggttccccgccagttgcgacagtcgcgccatcgtcgtccgttaccggcacatctcc

SEQ ID NO: 292933 - DNA, 75 bp, synthetic construct
  source 1..75: mol_type = other DNA
cattccacagtgggtaaccctggagccccgtgtcttcggctggatggaccgtctatgcgaaaactactgcggtgg

SEQ ID NO: 292934 - DNA, 75 bp, synthetic construct
  source 1..75: mol_type = other DNA
gcttctggccgcagcattttggcctcattccacagtgggtgaccctggacccccgtgtcttcggctggatggacc

SEQ ID NO: 292935 - DNA, 75 bp, synthetic construct
  source 1..75: mol_type = other DNA
atgaaaatcatcacccgtggtgaagccatgcgtattcaccaacagcatcctgcatcccgtctttttccgttctgc

SEQ ID NO: 292936 - DNA, 75 bp, synthetic construct
  source 1..75: mol_type = other DNA
cattccacagtgggtgaccctggaaccccgtgtcttcggctggatggaccgtctatgcgaaaactactgcggtgg

SEQ ID NO: 292937 - DNA, 75 bp, synthetic construct
  source 1..75: mol_type = other DNA
cattccacagtgggtcaccctggagccccgtgtcttcggctggatggaccgtctctgcgaaaactactgcggtgg

SEQ ID NO: 292938 - DNA, 75 bp, synthetic construct
  source 1..75: mol_type = other DNA
cattccacagtgggttaccctggagccccgtgtcttcggctggatggaccgtctttgcgaaaactactgcggtgg

SEQ ID NO: 292939 - DNA, 75 bp, synthetic construct
  source 1..75: mol_type = other DNA
tcgcagagctggaaagattgctctctgagcaggctgaagccctccgtcagaaagaccagcaactgagtctggttg

SEQ ID NO: 292940 - DNA, 75 bp, synthetic construct
  source 1..75: mol_type = other DNA
ttcgcatacctactgaaacagtggaaggccctgaacgtgtactgcagtaatggctgggtggaaatcgacaacaac

SEQ ID NO: 292941 - DNA, 75 bp, synthetic construct
  source 1..75: mol_type = other DNA
gatgttcagcagaacagcgtctggcggcaagaaaagcaagagccgcgccactgatgcagtcactgtatgaccgga

SEQ ID NO: 292942 - DNA, 75 bp, synthetic construct
  source 1..75: mol_type = other DNA
atcagtgggacgccctctgttattacagtgatgatggtttggcagaagcggacaataacacagcggaaagagcgc

SEQ ID NO: 292943 - DNA, 75 bp, synthetic construct
  source 1..75: mol_type = other DNA
accggtaaataccgctggcacggcagtgctgagacgtataccggtcgtgaagtgcaggatattcccggcgtgctg

SEQ ID NO: 292944 - DNA, 75 bp, synthetic construct
  source 1..75: mol_type = other DNA
agtggaaggccctgaacgtgtactgcagtaatggctgggtggaaatcgacaacaacatcgctgaaaatgccttgc

SEQ ID NO: 292945 - DNA, 75 bp, synthetic construct
  source 1..75: mol_type = other DNA
gcatcagggaatgaccagtctcagctggttgccaccatagtccctgatgaacagcgcatcagcttctggccgcag

SEQ ID NO: 292946 - DNA, 75 bp, synthetic construct
  source 1..75: mol_type = other DNA
gtgagctggattatctgggggaagtcagcgctgaacagctggaactggtgagcagtgccctgaaagtgatccgca

SEQ ID NO: 292947 - DNA, 75 bp, synthetic construct
  source 1..75: mol_type = other DNA
tgacgtcatagccgactggccgataaaccgggtcggcgaactgctcccctggcgcgtagcactgccgactgaata

SEQ ID NO: 292948 - DNA, 75 bp, synthetic construct
  source 1..75: mol_type = other DNA
actcgctgatcggcacatgccgtctgaacaatgtggagccagaaaagtggctgcgttacgtcattgagcatatcc

SEQ ID NO: 292949 - DNA, 75 bp, synthetic construct
  source 1..75: mol_type = other DNA
gtgaagttgaactggctgaggctctgctgaaacaacgtgaacaggacagcgatcgttacagtgggcgggaagacg

SEQ ID NO: 292950 - DNA, 75 bp, synthetic construct
  source 1..75: mol_type = other DNA
aatgccatgaacggtaaccgcgctgaaatgagcccggaagccgccggcattgccgcctgtctgatgacgtacagt

SEQ ID NO: 292951 - DNA, 75 bp, synthetic construct
  source 1..75: mol_type = other DNA
ctggttgccaccatagtccctgatgaacagcgcatcagcttctggccgcagcattttggcctcattccacagtgg

SEQ ID NO: 292952 - DNA, 75 bp, synthetic construct
  source 1..75: mol_type = other DNA
tgcgttcgcaggttacgatcggctgttcagtgccgaacgtgaaggcggcgcgttgacggaagcaggatgctgggc

SEQ ID NO: 292953 - DNA, 75 bp, synthetic construct
  source 1..75: mol_type = other DNA
gcatcccgtctttttccgttctgtaccggcaaataccgctggcacggcagtgctgaagcgtataccggtcgtgaa

SEQ ID NO: 292954 - DNA, 75 bp, synthetic construct
  source 1..75: mol_type = other DNA
tgacgacacaccagtaaaagtgctggcagcgggcagaaaaaaggcaaaaacaggacgcatctggacgtatgtccg

SEQ ID NO: 292955 - DNA, 75 bp, synthetic construct
  source 1..75: mol_type = other DNA
gatgtatacatcagcagcaaaagtgcgacggcagaagaagccctgaagcgaatcagtgaactgtacgccatcgag

SEQ ID NO: 292956 - DNA, 75 bp, synthetic construct
  source 1..75: mol_type = other DNA
tctggcggaggtggacaataacacagcagaaagagcgcttcgtgccgtctgtctagggaaaaagaatcttatgac

SEQ ID NO: 292957 - DNA, 75 bp, synthetic construct
  source 1..75: mol_type = other DNA
aacgcctggcggtcaggcaaatgcagagtaaaccgctactgacttccctgtataagctgatgcaggagaaagaac

SEQ ID NO: 292958 - DNA, 75 bp, synthetic construct
  source 1..75: mol_type = other DNA
gccattgaggatgaaatacggggcttaccggagtctgaacgtcttgcagccaggcagcagcgaagcaaagcgtta

SEQ ID NO: 292959 - DNA, 75 bp, synthetic construct
  source 1..75: mol_type = other DNA
gcactgaagcacataccggtcgtgaagtgcaggatattcccggcgtgctggccgtgtttgccgaacgccataagg

SEQ ID NO: 292960 - DNA, 75 bp, synthetic construct
  source 1..75: mol_type = other DNA
atctgcgccatattctgagcgtactgccggaatggccctccaaccgggttgatgaactcctgccatggaacgtag

SEQ ID NO: 292961 - DNA, 75 bp, synthetic construct
  source 1..75: mol_type = other DNA
atataatcccggtactgccatccgccctgcgacagtcttcagcccgtaaaccgttaccggcctcacttccccgtg

SEQ ID NO: 292962 - DNA, 75 bp, synthetic construct
  source 1..75: mol_type = other DNA
tacaccctgaacaacggtggcgcatttatggcgcccgaaccggatgaagatgatggagaaacctgggtactgttc

SEQ ID NO: 292963 - DNA, 75 bp, synthetic construct
  source 1..75: mol_type = other DNA
tctggttcgcgtactcaccggaccggaaaggtatccatccacaaaatcatctggccggttacagcggtgtgtttc

SEQ ID NO: 292964 - DNA, 75 bp, synthetic construct
  source 1..75: mol_type = other DNA
accggtaagtaccgctggcacggcagtgctgagacgtataccggtcgtgaagtgcaggatatccccggtgtgctg

SEQ ID NO: 292965 - DNA, 75 bp, synthetic construct
  source 1..75: mol_type = other DNA
ggattatctgggggaagtcagcgctgaacagctggaactggtgagcagtgccctgaaagtgatccgcacagaacg

SEQ ID NO: 292966 - DNA, 75 bp, synthetic construct
  source 1..75: mol_type = other DNA
caggcagcagcgaagcaaagtgttactgacgtcgctgcatgaatggatggtggagaagaatggcacgctgtcgaa

SEQ ID NO: 292967 - DNA, 75 bp, synthetic construct
  source 1..75: mol_type = other DNA
aactgtacgccatcgaggatgaaatacggggcttaccggagtctgaacgtcttgcagtcaggcagcagcgaagca

SEQ ID NO: 292968 - DNA, 75 bp, synthetic construct
  source 1..75: mol_type = other DNA
gttgcgatactgcagcgcatgcagctcggtaaaagctcagaaaaacttcgcgcaaaaaccgaacggcagatacag

SEQ ID NO: 292969 - DNA, 75 bp, synthetic construct
  source 1..75: mol_type = other DNA
cttcgtcccttccggggtatcctgcaggcggatgcgttcagcggttacgatcggctgttcagtgcagaacgtgaa

SEQ ID NO: 292970 - DNA, 75 bp, synthetic construct
  source 1..75: mol_type = other DNA
ggaatggccctccaaccgtgttgacgaactcctgccatggaacgtagtactcaccaataataagcgtcaatacgg

SEQ ID NO: 292971 - DNA, 75 bp, synthetic construct
  source 1..75: mol_type = other DNA
agagcacacaccgctgtatcgtcagtcagaaatatacgatcgccagggcgtggagctgagtcgctcactgctgtc

SEQ ID NO: 292972 - DNA, 75 bp, synthetic construct
  source 1..75: mol_type = other DNA
aaagaattacatgttcttcggcagcgatcatggaggcgatcgcggagctctgctgtacggactaatcgggagctg

SEQ ID NO: 292973 - DNA, 75 bp, synthetic construct
  source 1..75: mol_type = other DNA
aggcggacaataacacagcggaaagagcgcttcgtgcagtctgtctcggaaagaaaaattcttatgacctttgtc

SEQ ID NO: 292974 - DNA, 75 bp, synthetic construct
  source 1..75: mol_type = other DNA
gcggcgcgttgacggaagcaggatgctgggctcatgcgcggcgcaaaatccacgatgtatatatcagtaccaaaa

SEQ ID NO: 292975 - DNA, 75 bp, synthetic construct
  source 1..75: mol_type = other DNA
agcatctgcgggcccagatagaaaaactgcgccggatgctgttcggtacccgttctgaaaaacttcagcgtaagg

SEQ ID NO: 292976 - DNA, 75 bp, synthetic construct
  source 1..75: mol_type = other DNA
gatggtgagtctggggcgaaaaaactacctgttcttcggttcagatcatggaggtgagcggggagcgttgctgta

SEQ ID NO: 292977 - DNA, 75 bp, synthetic construct
  source 1..75: mol_type = other DNA
atgaaaaccctgtcgcgtcactcggatacggcgaaagcgttcgcatacctgctgaaacagtgggaggccctgaac

SEQ ID NO: 292978 - DNA, 75 bp, synthetic construct
  source 1..75: mol_type = other DNA
aaaaactggatgttcgcgggttccgacagcggtggtgaacatgcggcggtgttgtactcgctgatcggcacatgc

SEQ ID NO: 292979 - DNA, 75 bp, synthetic construct
  source 1..75: mol_type = other DNA
gaacagcgcatcagcttctggccgcagcactttggcctcattccacagtgggtgaccctggagccccgtgtcttc

SEQ ID NO: 292980 - DNA, 75 bp, synthetic construct
  source 1..75: mol_type = other DNA
tgttgccaggcaataagaaaacgaagaccgggcggttatggacctacgttcgtgacgaccgtaacgccgggtcaa

SEQ ID NO: 292981 - DNA, 75 bp, synthetic construct
  source 1..75: mol_type = other DNA
cgactgtgggtctacgtccgtgatgaccgtaacgcagattcggaaatgcctacggcggtctggttcgcgtacagc

SEQ ID NO: 292982 - DNA, 75 bp, synthetic construct
  source 1..75: mol_type = other DNA
atgacgtcctgcgccagtatgtgctgatgcccggtaaagtccatgctgatgatatccccgtcccggtccaggagc

SEQ ID NO: 292983 - DNA, 75 bp, synthetic construct
  source 1..75: mol_type = other DNA
ctattcgatcacggattggcatcgaagtccgatcagcgattcgcatccattcgatcaaccgggaacttaactttt

SEQ ID NO: 292984 - DNA, 75 bp, synthetic construct
  source 1..75: mol_type = other DNA
agcaggatgctgggctcatgcgcggcgcaaaatccacgatgtatatatcagtaccaaaagcgcgacggcggaaga

SEQ ID NO: 292985 - DNA, 75 bp, synthetic construct
  source 1..75: mol_type = other DNA
ttgacggaagcaggatgctgggctcatgcacggcgcaaaatccacgatgtatatatcagtaccaaaagcgcgacg

SEQ ID NO: 292986 - DNA, 75 bp, synthetic construct
  source 1..75: mol_type = other DNA
gtcatctcctccagcggtctggttcgcgtactcgccgaaccggcaggggaaacacccggagcaacacctccgccc

SEQ ID NO: 292987 - DNA, 75 bp, synthetic construct
  source 1..75: mol_type = other DNA
agaagcactgaaactaatcggtgaactgtacgccatcgagcacgatatacgcgggttaccggtgtctgaacgcct

SEQ ID NO: 292988 - DNA, 75 bp, synthetic construct
  source 1..75: mol_type = other DNA
gcagcgaagcaaagtgttactgacgtcgctgcatgaatggatggtggagaagaatggtacgctgtcgaaaaaatc

SEQ ID NO: 292989 - DNA, 75 bp, synthetic construct
  source 1..75: mol_type = other DNA
aggttgttcagtgcagaacgtgaaggtggtgcactgacagaagttgcgtgctgggcccatgcccggcgaaaaatc

SEQ ID NO: 292990 - DNA, 75 bp, synthetic construct
  source 1..75: mol_type = other DNA
cgaactgagccgtgccttactctccaactgggttgatgcgtgctgccagttaatgacgccgctgaatgatgccct

SEQ ID NO: 292991 - DNA, 75 bp, synthetic construct
  source 1..75: mol_type = other DNA
gcacggatacatataccggccgtgaagtgcaggatattcccggtgtgctggccgtatttgcagaacgtcgtaagg

SEQ ID NO: 292992 - DNA, 75 bp, synthetic construct
  source 1..75: mol_type = other DNA
ctaccttcgccatgtgcttggcgtcatagcagactggccggtcaaccgggtcagcgaactgcttccgtggcgcat

SEQ ID NO: 292993 - DNA, 75 bp, synthetic construct
  source 1..75: mol_type = other DNA
aaagctgttgcccggagtgtggcggtgagctggattatctgggggaagtcagcgcagaacaactggaactggtga

SEQ ID NO: 292994 - DNA, 75 bp, synthetic construct
  source 1..75: mol_type = other DNA
gaaagagcgcttcgtgcagtctgtctcggaaagaaaaattacgtgttcttcggtagcgatcacggcggcgagcgt

SEQ ID NO: 292995 - DNA, 75 bp, synthetic construct
  source 1..75: mol_type = other DNA
tgcccgccgaaaaatccacgacgtgtacatcagcagccagagcgccacggcggaggaagcgctgaaacgcatcgg

SEQ ID NO: 292996 - DNA, 75 bp, synthetic construct
  source 1..75: mol_type = other DNA
tacaccctgaataacggcggcgcatttatggcgcccgaaccggatgaagatgatggagaaacctgggtgctgttc

SEQ ID NO: 292997 - DNA, 75 bp, synthetic construct
  source 1..75: mol_type = other DNA
atgaacggtaaccgcgcagaaatgagctcggaagccgccggtattgccgcctgtctgatgacgtacagtcatcat

SEQ ID NO: 292998 - DNA, 75 bp, synthetic construct
  source 1..75: mol_type = other DNA
cagcggcggtaatcctccggcattttccctgacaccggacgggcgactgacggcgaaaaatgcggatatcagtgg

SEQ ID NO: 292999 - DNA, 75 bp, synthetic construct
  source 1..75: mol_type = other DNA
tgaaatgagcccggaagccgccggtattgccgcctgtctgatgacgtacagccatcatgcctgtcgtacggagaa

SEQ ID NO: 293000 - DNA, 75 bp, synthetic construct
  source 1..75: mol_type = other DNA
cattccacagtgggtgaccctggagccccgtgtcttcggctggatggaccgtctgtgcgaaaactactgcggtgg

SEQ ID NO: 293001 - DNA, 75 bp, synthetic construct
  source 1..75: mol_type = other DNA
cattccacagtgggtgaccctggacccccgtgtcttcggctggatggaccgtctctgcgaaaactactgcggtgg

SEQ ID NO: 293002 - DNA, 75 bp, synthetic construct
  source 1..75: mol_type = other DNA
ccttgacgtcatagccgactggccgataaaccgggtcggcgaactactcccctggcgcgtagcactgccgactga

SEQ ID NO: 293003 - DNA, 75 bp, synthetic construct
  source 1..75: mol_type = other DNA
tatgactggatacagcaacagatgaaaacactgtcgcgtcactcagatacggcaaaagcgttcgcatacctgctg

SEQ ID NO: 293004 - DNA, 75 bp, synthetic construct
  source 1..75: mol_type = other DNA
gccatcatgcctgtcgtacggagaattatgccatgacggtccattattaccggttgcgggattacgccctgcagc

SEQ ID NO: 293005 - DNA, 75 bp, synthetic construct
  source 1..75: mol_type = other DNA
taaataactggtatcccacagcaagtatcagcgatttgctggttgtggtgatgaagaaagccaccgcaggcatca

SEQ ID NO: 293006 - DNA, 75 bp, synthetic construct
  source 1..75: mol_type = other DNA
tgtactgcagtaatggctgggtggaaatcgacaacaacatcgcagagaacgccttacggggagtgaccgtaggcc

SEQ ID NO: 293007 - DNA, 75 bp, synthetic construct
  source 1..75: mol_type = other DNA
gtcacggtaaatgaaaactgtacgattaagggcatgctggaggcgactcaggtcagaggggatttcgttaaagct

SEQ ID NO: 293008 - DNA, 75 bp, synthetic construct
  source 1..75: mol_type = other DNA
accggcaaattgttatcccggcggtggcattcagtggcgctaaacatgagcaagatcatactgatatctactcct

SEQ ID NO: 293009 - DNA, 75 bp, synthetic construct
  source 1..75: mol_type = other DNA
ccctttatatcgccagtcagaaatatacgcgcgacagggcgtggagctgagccgcaataccctggtgcgctgggt

SEQ ID NO: 293010 - DNA, 75 bp, synthetic construct
  source 1..75: mol_type = other DNA
catcatgtacttgatgtcatcgccgactggcctgtgaaccgggtgggtgctctgctcccgtggcgggttactctg

SEQ ID NO: 293011 - DNA, 75 bp, synthetic construct
  source 1..75: mol_type = other DNA
aacatctgccactgtatcgtcagagcgaaatctttgcccgccagggtgtcgaactgagccgggccttactctcca

SEQ ID NO: 293012 - DNA, 75 bp, synthetic construct
  source 1..75: mol_type = other DNA
agcggattgcggatatcaggcaggttgaaaccacagcccgctatcttggcacggcgctgtactggatagctgcca

SEQ ID NO: 293013 - DNA, 75 bp, synthetic construct
  source 1..75: mol_type = other DNA
ggaagacccggaagccatactgcgctacgggcgcaatctgctgaagatggacgcgttcggctgtaccagccgcgg

SEQ ID NO: 293014 - DNA, 75 bp, synthetic construct
  source 1..75: mol_type = other DNA
gcctgtcgtacagagaattatgccatgacagttcattattaccggctgcgggattatgccctgcagcatccggaa

SEQ ID NO: 293015 - DNA, 75 bp, synthetic construct
  source 1..75: mol_type = other DNA
gcaccgggcaggaagaaggcgaaaacaggatatatctggacgtatgtccgggatgaccgaaatgccggttcgcca

SEQ ID NO: 293016 - DNA, 75 bp, synthetic construct
  source 1..75: mol_type = other DNA
atcgaagaagatgaacgggaaatagaacatctgcgggctcagatagaaaaactgagccggatgctgttcggtacc

SEQ ID NO: 293017 - DNA, 75 bp, synthetic construct
  source 1..75: mol_type = other DNA
gccatattctgagcgtactgccggaatggccttccaaccgtgttgacgaactcctgccatggaacgtagttctca

SEQ ID NO: 293018 - DNA, 75 bp, synthetic construct
  source 1..75: mol_type = other DNA
tggcctcattccacagtgggtcaccctggagccccgtatcttcggctggatggaccgtctgtgtgaagactactg

SEQ ID NO: 293019 - DNA, 75 bp, synthetic construct
  source 1..75: mol_type = other DNA
ggcattgctgcctgtctgatggcgtacagtcatcacgcctgtcgtacagagaattatgccatgacggtccattat

SEQ ID NO: 293020 - DNA, 75 bp, synthetic construct
  source 1..75: mol_type = other DNA
agcgtatactggtcgtgaagtgcaggatattcccggcgttcttgccgtgtttgcagaacgccgtaaggacagttt

SEQ ID NO: 293021 - DNA, 75 bp, synthetic construct
  source 1..75: mol_type = other DNA
agtaaaccgctactgacttccctgtataagctgatgcaggagaaaggtaagcgtgcagcaagaaccgtattgacg

SEQ ID NO: 293022 - DNA, 75 bp, synthetic construct
  source 1..75: mol_type = other DNA
tacagtgggcgtgagaatgacccgcaggttccccgccagttgcgacagtcacgtcatcgtcgtccgttaccagca

SEQ ID NO: 293023 - DNA, 75 bp, synthetic construct
  source 1..75: mol_type = other DNA
ttggttgccactcccgtccctgatgaacaccgtatcagcttctggccgcagcattttggcctcattccacagtgg

SEQ ID NO: 293024 - DNA, 75 bp, synthetic construct
  source 1..75: mol_type = other DNA
atgttcttcggcagcgatcacggcggcgagcgtggagcactgctgtacgggctgatcggcacctgccgtctgaac

SEQ ID NO: 293025 - DNA, 75 bp, synthetic construct
  source 1..75: mol_type = other DNA
tcaccaacagcatcctgcatcccgtctttttccgttctgtaccggtaaataccgctggcacggtagcacggatac

SEQ ID NO: 293026 - DNA, 75 bp, synthetic construct
  source 1..75: mol_type = other DNA
ggctgactacaaccgtcggtttgcaaagccgcctcgtcatgatttcgacgttcaccgtccgcttgagaataatga

SEQ ID NO: 293027 - DNA, 75 bp, synthetic construct
  source 1..75: mol_type = other DNA
gatgtgcatgcaagagcgccaaccgatatcaccacggaagccctgcagcgtatcggtgaactgtatgccatcgag

SEQ ID NO: 293028 - DNA, 75 bp, synthetic construct
  source 1..75: mol_type = other DNA
ggggagtggccgtaggccggaaaaactggctcttcgcgggttccgacagcggtggcgaacatgcggtggtgttgt

SEQ ID NO: 293029 - DNA, 75 bp, synthetic construct
  source 1..75: mol_type = other DNA
actgtcgcgtcactcggatacggcaaaagcgttcgcatacctactgaaacagtggaaggccctgaacgtgtactg

SEQ ID NO: 293030 - DNA, 75 bp, synthetic construct
  source 1..75: mol_type = other DNA
tctcaatgaacgatgtaaaccgactcaggatcctccaggacgttatcgaccgacgcctcactacacgtctcgcag

SEQ ID NO: 293031 - DNA, 75 bp, synthetic construct
  source 1..75: mol_type = other DNA
gaacgatggctgggtggaaatcgacaacaacatcgctgaaaatgccctgcgggcggtaagtctgggtcgtaaaaa

SEQ ID NO: 293032 - DNA, 75 bp, synthetic construct
  source 1..75: mol_type = other DNA
cccggcggtctggttcgcgtacagcccggaccggaaaggcatccatccacaaaatcacctggccggttacagcgg

SEQ ID NO: 293033 - DNA, 75 bp, synthetic construct
  source 1..75: mol_type = other DNA
gtatctggaatctgtacaccctgaacaacggcggggcatttatggcgcccgaaccggatgacgatgatgtcgaaa

SEQ ID NO: 293034 - DNA, 75 bp, synthetic construct
  source 1..75: mol_type = other DNA
gtatctggaatctgtacactctgaacaacggcggggcatttatggcccccgaaccggatgacgatgatgacgaaa

SEQ ID NO: 293035 - DNA, 75 bp, synthetic construct
  source 1..75: mol_type = other DNA
gtatctggaatctgtacactctgaacaacggcggggcatttatggcacccgaaccggatgacgatgatgccgaaa

SEQ ID NO: 293036 - DNA, 75 bp, synthetic construct
  source 1..75: mol_type = other DNA
atgagtaggaaatacctcattcgtatcactgagctggaaaggctgctctctgagcaggctgaagccctccgtcag

SEQ ID NO: 293037 - DNA, 75 bp, synthetic construct
  source 1..75: mol_type = other DNA
tcagcagcgcctttaaggttatcgaaacacaacgtccgaaacaggcctgttgccggtgcgaccatatcgtgcagg

SEQ ID NO: 293038 - DNA, 75 bp, synthetic construct
  source 1..75: mol_type = other DNA
gtatctggaatctgtacacgctgaacaacggcggggcatttatggctcccgaaccggatgacgatgatgccgaaa

SEQ ID NO: 293039 - DNA, 75 bp, synthetic construct
  source 1..75: mol_type = other DNA
aggctgtgggtctacgtccgtgatgaccgcaacgccggttcacagatgcccccggcggtctggttcgcgtacagc

SEQ ID NO: 293040 - DNA, 75 bp, synthetic construct
  source 1..75: mol_type = other DNA
gtcagcatcctgcatcccgtctttttccgttctgtaccggtaaataccgctggcacggtagcacggatacatata

SEQ ID NO: 293041 - DNA, 75 bp, synthetic construct
  source 1..75: mol_type = other DNA
gcggattaaagaacctgaaacagtcagactgtatcttggattttacaaactcttattcggggattttagccccat

SEQ ID NO: 293042 - DNA, 75 bp, synthetic construct
  source 1..75: mol_type = other DNA
gattattccaggtacaaagatgggattgtttacaacgagccatgtgttcttgccagatgccgcgtaaacgcctta

SEQ ID NO: 293043 - DNA, 75 bp, synthetic construct
  source 1..75: mol_type = other DNA
aaaatacaagcggaatgtttataaaatgatgttggaatgtaaaaacgaggagatcaaatccggagataaaagcga

SEQ ID NO: 293044 - DNA, 75 bp, synthetic construct
  source 1..75: mol_type = other DNA
gtacccgttctgaaaaactgcgtcgtgaagttgaactggctgaggctctgctgaaacaacgtgaacaggacagcg

SEQ ID NO: 293045 - DNA, 75 bp, synthetic construct
  source 1..75: mol_type = other DNA
tctggcggaggcggacaataacacagcagaaagagcgcttcgtgccgtctgtctcgggaaaaagaattcttatga

SEQ ID NO: 293046 - DNA, 75 bp, synthetic construct
  source 1..75: mol_type = other DNA
agtgggaggccctgaacgtgtactgcagtaatggctgggtggaaatcgacaacaacatcgcagagaacgccttac

SEQ ID NO: 293047 - DNA, 75 bp, synthetic construct
  source 1..75: mol_type = other DNA
gcccatgttgtcgctggaaaatatgcagaccatctgccgttataccgccagtcagaaatataccgtcgtcaggga

SEQ ID NO: 293048 - DNA, 75 bp, synthetic construct
  source 1..75: mol_type = other DNA
aatgctatgaacggtaaccgcgctgaaatgagcccggaagccgccggtattgctgcctgtctgatgacgtacagc

SEQ ID NO: 293049 - DNA, 75 bp, synthetic construct
  source 1..75: mol_type = other DNA
tggacgtatgtccgggatgaccggaatgccggttcgccagaacctccggcggtctggttcgcctactcaccggac

SEQ ID NO: 293050 - DNA, 75 bp, synthetic construct
  source 1..75: mol_type = other DNA
gctgatgcaggagaaagaacacacgttatcgaagaaatgtcgtctgggagatgcgttccggtatatccggaagca

SEQ ID NO: 293051 - DNA, 75 bp, synthetic construct
  source 1..75: mol_type = other DNA
atcgaagaagatgaacgggaaatagaacatctgcgggctcagatagaaaaactgcgccggatgctgttcggtccc

SEQ ID NO: 293052 - DNA, 75 bp, synthetic construct
  source 1..75: mol_type = other DNA
gacctggcctgatctggatggcggcagccgcatgctgccgaattaccttgaggatctgcaaaatccgctgtggct

SEQ ID NO: 293053 - DNA, 75 bp, synthetic construct
  source 1..75: mol_type = other DNA
actggacatttgcattgaggtttgtcctattagtaatcgtttgacaggtgcagtctctgatgtcgatcctcatcc

SEQ ID NO: 293054 - DNA, 75 bp, synthetic construct
  source 1..75: mol_type = other DNA
gaacggtaaccgcgctgaaatgagcccggaatccgccggtattgccgcctgtctgatgacgtacagtcatcatgc

SEQ ID NO: 293055 - DNA, 75 bp, synthetic construct
  source 1..75: mol_type = other DNA
ttttaaacaaaaatgggtttataaaaaatggtaacaatgatttttataaagttcatgataagtttgtaaattgta

SEQ ID NO: 293056 - DNA, 75 bp, synthetic construct
  source 1..75: mol_type = other DNA
tacggcaaaagcgttcgcatacctgctgaaacagtggaaggccctgaacgtgtattgcagtaatggccaggtgga

SEQ ID NO: 293057 - DNA, 75 bp, synthetic construct
  source 1..75: mol_type = other DNA
agaatagccggagagcagccacttctggagggaaaaaagacagctttcctctagccaataggggggtacgtatgc

SEQ ID NO: 293058 - DNA, 75 bp, synthetic construct
  source 1..75: mol_type = other DNA
agctatctgtcgctgggcggcgtttcgatgggtatcgccggttccattgttgatcacaacttctttgaatcctgg

SEQ ID NO: 293059 - DNA, 75 bp, synthetic construct
  source 1..75: mol_type = other DNA
gtggacaataacacagcggaaagagcgcttcgtgcagtctgtctcggaagaaaattacgtgtcttcggtagcgat

SEQ ID NO: 293060 - DNA, 75 bp, synthetic construct
  source 1..75: mol_type = other DNA
ttatcggcacttgccttctgaacgacattgatccggaagcgtatctgcgccatatcctgagcttactgccggaat

SEQ ID NO: 293061 - DNA, 75 bp, synthetic construct
  source 1..75: mol_type = other DNA
gtggcgaacatgcggcggtgttgtactcgctgatcggcacatgccgtctgaacaatgtggaaccagaaaaatggc

SEQ ID NO: 293062 - DNA, 75 bp, synthetic construct
  source 1..75: mol_type = other DNA
gaaagccagctccgtcagaaagaccagcaactgagtctggttgaagagacggaggccttcctgcgctctgcactg

SEQ ID NO: 293063 - DNA, 75 bp, synthetic construct
  source 1..75: mol_type = other DNA
aaagatcgaagaagatgaacgggaaatagaatatctgcgggctcaggcacgctgtcgaaaaaatccaggctgggc

SEQ ID NO: 293064 - DNA, 75 bp, synthetic construct
  source 1..75: mol_type = other DNA
caggcaccagtaccttcaaaacccattgcacgcagttatgccggagcggggcttctggctcatatcgtcaccggg

SEQ ID NO: 293065 - DNA, 75 bp, synthetic construct
  source 1..75: mol_type = other DNA
ttgacgcgtgctgccagttaatgacaccggtgaatgatgccctgtaccgttatgtaatgaacacccgcaaggttc

SEQ ID NO: 293066 - DNA, 75 bp, synthetic construct
  source 1..75: mol_type = other DNA
ttgacgcgtgctgccagttaatgatgccgctgaatgatgccctgtaccgttatgtgatgaatacccgcaagcttc

SEQ ID NO: 293067 - DNA, 75 bp, synthetic construct
  source 1..75: mol_type = other DNA
aacgatggctgggtggaaatcgacaacaacatcgctgaaaatgccctgcgggcggtaagtctgggtcgtaaaaac

SEQ ID NO: 293068 - DNA, 75 bp, synthetic construct
  source 1..75: mol_type = other DNA
gcactgaaacgtataccggtcgtgaagtgcaggatattcccggtgtgctggctgtgtttgctgaacgccgtaagg

SEQ ID NO: 293069 - DNA, 75 bp, synthetic construct
  source 1..75: mol_type = other DNA
gtgtccgttaaactcaggctacctcaaaactttatgttctttggcagcgatcacggcggcgagcgtggagcactg

SEQ ID NO: 293070 - DNA, 75 bp, synthetic construct
  source 1..75: mol_type = other DNA
gcgtactcgccgaaccggcaggggaaacacccggagcaacacctccgccccttccggggtatcctgcaggcggat

SEQ ID NO: 293071 - DNA, 75 bp, synthetic construct
  source 1..75: mol_type = other DNA
acggaagcaggatgctgggctcatgcacggcgcaaaatccacgatgtatatatcagtaccaaaaagcgcgacggc

SEQ ID NO: 293072 - DNA, 75 bp, synthetic construct
  source 1..75: mol_type = other DNA
gtagcgatcacggcggcgagcgtggtgcactgctgtacgggctgatcggcacctgccgtctgaacggtatcgatc

SEQ ID NO: 293073 - DNA, 75 bp, synthetic construct
  source 1..75: mol_type = other DNA
cccgcccgatagagcgtggtatcgcgggccccggattacttgcccgcgtgttaacaggaaaatactgcgaacacc

SEQ ID NO: 293074 - DNA, 75 bp, synthetic construct
  source 1..75: mol_type = other DNA
ggagtgtggcggtgaactggattatctgggggaagtcagcgctgaacagctggaactggtgagcagtgccctgaa

SEQ ID NO: 293075 - DNA, 75 bp, synthetic construct
  source 1..75: mol_type = other DNA
gagcgtggagcactgctgtacgggctgatcggcacctgccgtctgaacggtatcgatccggaagcgtatctgcgc

SEQ ID NO: 293076 - DNA, 75 bp, synthetic construct
  source 1..75: mol_type = other DNA
gtctttgcgaaaactactgcggtggtatctggaatctgtacaccctgaacaacggtggcgcatttatggcacccg

SEQ ID NO: 293077 - DNA, 75 bp, synthetic construct
  source 1..75: mol_type = other DNA
gtggtgagcggggagcgctactgtacagcctgatagggacgtgcaaactgaatgacgtggatccagaaagctacc

SEQ ID NO: 293078 - DNA, 75 bp, synthetic construct
  source 1..75: mol_type = other DNA
gccatatcctgaacgtactgccggaatggccttccaaccgagttgatgaactcctgccatggaacgtagtactca

SEQ ID NO: 293079 - DNA, 75 bp, synthetic construct
  source 1..75: mol_type = other DNA
cgtacggagaattatgccatgacggtccattattaccggttgcgggattacgccctgcagcatccggaatacgac

SEQ ID NO: 293080 - DNA, 75 bp, synthetic construct
  source 1..75: mol_type = other DNA
ttgagctgcttaaagccatgttgcgtaagcaacagagtcggcttcgccagtatgcctgtcaggtcgcgggctatg

SEQ ID NO: 293081 - DNA, 75 bp, synthetic construct
  source 1..75: mol_type = other DNA
tgatggagaaacatgggtactgttcaatgccatgaacggtaaccgcgctgaaatgagcccggaagctgccggtat

SEQ ID NO: 293082 - DNA, 75 bp, synthetic construct
  source 1..75: mol_type = other DNA
tatctggaatctgtacacactgaacaacggtggcgcatttatggcccccgaaccggatgacgatgatggcgaaaa

SEQ ID NO: 293083 - DNA, 75 bp, synthetic construct
  source 1..75: mol_type = other DNA
atgaaaatcgtttctcagaacacaactgctctttcttcagccacagcaccagggaataaccagtctcaactggtt

SEQ ID NO: 293084 - DNA, 75 bp, synthetic construct
  source 1..75: mol_type = other DNA
tgccgtcaggcagcagcgaagcaaagtgttactgacgtcgctgcatgaatggatggtggagaagaatggtacgct

SEQ ID NO: 293085 - DNA, 75 bp, synthetic construct
  source 1..75: mol_type = other DNA
aatccgccggtattgccgcctgtctgatgacgtacagtcatcatgcctgtcgtacggagaattatgccatgacgg

SEQ ID NO: 293086 - DNA, 75 bp, synthetic construct
  source 1..75: mol_type = other DNA
atgggtactgttcaatgccaagaacggtaaccgcgctgaaatgagcccggaagccgccggcattgctgcctgtct

SEQ ID NO: 293087 - DNA, 75 bp, synthetic construct
  source 1..75: mol_type = other DNA
gttgcgtcagacccgcccccgtaagccgttccctgaatcactaccccgtgacgaaaagcgactgttgccggcggc

SEQ ID NO: 293088 - DNA, 75 bp, synthetic construct
  source 1..75: mol_type = other DNA
ctgtgatgacggtctggcggaggcggacaataacacagcggaaagagcgcttcgtgcagtctgtctcggaaagaa

SEQ ID NO: 293089 - DNA, 75 bp, synthetic construct
  source 1..75: mol_type = other DNA
atgttctctacacctgaagagatcgcccgcctggcagtagaaaatgacgttcacgtagtgggcgcatcctcactg

SEQ ID NO: 293090 - DNA, 75 bp, synthetic construct
  source 1..75: mol_type = other DNA
atgagtcagaaatacctcattcgcattgcagaactggaaaggttgctctctgagcaggctgaagccctccgtcag

SEQ ID NO: 293091 - DNA, 75 bp, synthetic construct
  source 1..75: mol_type = other DNA
cagagtgaaatctttgcccgccagggcatcgaactgagccgggcattactctccaactgggttgacgcatgttgc

SEQ ID NO: 293092 - DNA, 75 bp, synthetic construct
  source 1..75: mol_type = other DNA
acgaagcctgaatcaggacgacatgctggaagccctgcagcaactccagacaagaagcgaagaaatctttggtaa

SEQ ID NO: 293093 - DNA, 75 bp, synthetic construct
  source 1..75: mol_type = other DNA
ctgggggaagtcagtgcagaacaactggaactggtgagcagcgccctgaaagtgatccgcactgttcgggtaaaa

SEQ ID NO: 293094 - DNA, 75 bp, synthetic construct
  source 1..75: mol_type = other DNA
gccatgcgtattcaccaacaacatccgacatcccgtctttttccgttctgtaccggtaaataccgctggcacggc

SEQ ID NO: 293095 - DNA, 75 bp, synthetic construct
  source 1..75: mol_type = other DNA
gtgatcgccagcgcctattccgatctcggtttcgacgtagatttaagcccgatgttctctacacctgaagagatc

SEQ ID NO: 293096 - DNA, 75 bp, synthetic construct
  source 1..75: mol_type = other DNA
ccgcaaggttcacactgacgacacaccagtaaaagtgctggcaccgggcagaaaaaaggcaaaaacaggacgcat

SEQ ID NO: 293097 - DNA, 75 bp, synthetic construct
  source 1..75: mol_type = other DNA
cgtgaagtgcaggatattcccggtgtgctggccgtgtttgcagaacgccgtaaggacagttttggtccgtatgtc

SEQ ID NO: 293098 - DNA, 75 bp, synthetic construct
  source 1..75: mol_type = other DNA
agtacaggatattcccggtgtgctggccgtgtttgcagaacaccgtaaggacagttttggtccgtatgtccggct

SEQ ID NO: 293099 - DNA, 75 bp, synthetic construct
  source 1..75: mol_type = other DNA
gaagtcagcgcagaacaactggaactgggtaagcgtaaactgaccgccgtatgtagccatcagacgagaattggt

SEQ ID NO: 293100 - DNA, 75 bp, synthetic construct
  source 1..75: mol_type = other DNA
aagagacggaagccttcctgcgctttgcactgacacgtgccgaagaaaagatcgaagaagatgaacgggaaatag

SEQ ID NO: 293101 - DNA, 75 bp, synthetic construct
  source 1..75: mol_type = other DNA
atcggcacctgccgtctgaacggtatcgatccggaagcgtatctgcgccatattctgagcgtactgccggaatgg

SEQ ID NO: 293102 - DNA, 75 bp, synthetic construct
  source 1..75: mol_type = other DNA
ggtaagtatcgctggcacggtagcgctgaggcgtataccggtcgcgaagtacaggatattcccggcgttcttgcc

SEQ ID NO: 293103 - DNA, 75 bp, synthetic construct
  source 1..75: mol_type = other DNA
tgaagcaccggcgccgtcccgcccggtagagcgtggtatcgcgggccccggattacttgcccgcgtgttaacggg

SEQ ID NO: 293104 - DNA, 75 bp, synthetic construct
  source 1..75: mol_type = other DNA
actggatacagcaacagatgaaaacactgtcgcgtcactcagatacggcaaaagcgttcgcatacctgctgaaac

SEQ ID NO: 293105 - DNA, 75 bp, synthetic construct
  source 1..75: mol_type = other DNA
agccgtgcattactctccaactgggttgacgcgtgctgccagttaatgacgccgctgaatgatgccctgtaccgt

SEQ ID NO: 293106 - DNA, 75 bp, synthetic construct
  source 1..75: mol_type = other DNA
ttgctgcacgcttacgtttcgcataattccaccacaccttctgtttccgtaaccactgcatcagggaataaccca

SEQ ID NO: 293107 - DNA, 75 bp, synthetic construct
  source 1..75: mol_type = other DNA
acggggcttaccggagtctgaacgtcttgcagccaggcagcagcgaagcaaagcgttactgacgtcgctgcatga

SEQ ID NO: 293108 - DNA, 75 bp, synthetic construct
  source 1..75: mol_type = other DNA
ggcgaagcgttcagctatgtactgaatcagtgggatgccctctgttattacagtgatgacggtctggcggaggcg

SEQ ID NO: 293109 - DNA, 75 bp, synthetic construct
  source 1..75: mol_type = other DNA
aagctgccggcattgccgcctgtctgatgacgtacagccatcatgcctgtcgtacggagaattatgccatgacgg

SEQ ID NO: 293110 - DNA, 75 bp, synthetic construct
  source 1..75: mol_type = other DNA
aggagaaagaacacacgttatcgaagaaatgtcgtctgggagatgcgttccggtatatccggaagcactgggctg

SEQ ID NO: 293111 - DNA, 75 bp, synthetic construct
  source 1..75: mol_type = other DNA
agcactttcgtcccttccggggtatcctgcaggcagatgcgtttaatggttacgatcggctgttcagtgccggac

SEQ ID NO: 293112 - DNA, 75 bp, synthetic construct
  source 1..75: mol_type = other DNA
atcctgggtgtactgccggaatggccttccaaccgtgttgacgagctcctgccatggaacgtagcactcaccaat

SEQ ID NO: 293113 - DNA, 75 bp, synthetic construct
  source 1..75: mol_type = other DNA
tccctgatgaacagcgcatcagcttctggccgcagcattttggcctcattccacagtgggtgaccctggagcccc

SEQ ID NO: 293114 - DNA, 75 bp, synthetic construct
  source 1..75: mol_type = other DNA
tcgcaccgaatgcgatgccatgactgaacactattaccgactgcgggattacgctctgcagcaccctgaatccca

SEQ ID NO: 293115 - DNA, 75 bp, synthetic construct
  source 1..75: mol_type = other DNA
cgctacagctgtacccgatgaacaacgtatcggcttctggccacaacactttggttctattgcgcagtggataac

SEQ ID NO: 293116 - DNA, 75 bp, synthetic construct
  source 1..75: mol_type = other DNA
actccacaagtggaaggtggatcaagtgcttcgtcatttattgtaactgatacaactgcaagcacccgcgcaagc

SEQ ID NO: 293117 - DNA, 75 bp, synthetic construct
  source 1..75: mol_type = other DNA
actcgataggcagtggcagcaccattggtggcattttgtggtgggcggtgaggcgtacatttgccagcacggaac

SEQ ID NO: 293118 - DNA, 75 bp, synthetic construct
  source 1..75: mol_type = other DNA
ttatgcctatctggatatcggttttaactcgttaatttccaatattcgcaactacaaaaataaagttggtttact

SEQ ID NO: 293119 - DNA, 75 bp, synthetic construct
  source 1..75: mol_type = other DNA
gtggcacaacaccatattaccgccgatgaagcgcaacggatcatcgcccgcgaaggcgaaggtgaaaacctgatt

SEQ ID NO: 293120 - DNA, 75 bp, synthetic construct
  source 1..75: mol_type = other DNA
attcaggccgtaaacgataaacaaaatatcgcctcagcggtcgccagtatgatgggcttagggattggccttacg

SEQ ID NO: 293121 - DNA, 75 bp, synthetic construct
  source 1..75: mol_type = other DNA
ttggctccagttccggctgcgacatgctgtatggcatggccgatggttgtgcgctgagccaaacctacggaggga

SEQ ID NO: 293122 - DNA, 75 bp, synthetic construct
  source 1..75: mol_type = other DNA
atatcgcgtcagcggtcgctaatatgattgggttagggattggtctgacgccttcagccgatgattatttaacag

SEQ ID NO: 293123 - DNA, 75 bp, synthetic construct
  source 1..75: mol_type = other DNA
ccattcgctataaatctaagaacaggtgctatatatgtcagccacggggccaaaattgaaggaggtctagctatt

SEQ ID NO: 293124 - DNA, 75 bp, synthetic construct
  source 1..75: mol_type = other DNA
cgatgaatgcgctgcgaatttttaatgatgccttcggtcttattttccgccgttcagaagagtcccttcatttca

SEQ ID NO: 293125 - DNA, 75 bp, synthetic construct
  source 1..75: mol_type = other DNA
atgttccggttcgcctgaatgcgtttcatgcccacggcgtgtatggcgaggcgcaaagctgggcgagcgccacgc

SEQ ID NO: 293126 - DNA, 75 bp, synthetic construct
  source 1..75: mol_type = other DNA
atgaagtggttatttttttctgccgtgatttgtccgttatttttcgcccttcccgctgaggctgtcgccacaaac

SEQ ID NO: 293127 - DNA, 75 bp, synthetic construct
  source 1..75: mol_type = other DNA
tcgggatcaaaatggaaacaggtcttgttcgctggggtgctccactggcgatcgcccttctgattccggtattca

SEQ ID NO: 293128 - DNA, 75 bp, synthetic construct
  source 1..75: mol_type = other DNA
atgtttttcggaattcttatcatcggatacgggatgctttattggtggcacagaagaaattcatattactggtaa

SEQ ID NO: 293129 - DNA, 75 bp, synthetic construct
  source 1..75: mol_type = other DNA
gcggcagaaataataccacgttattaagtgccataacgctggaagccgcattacaacaacgctgccgggaaaata

SEQ ID NO: 293130 - DNA, 75 bp, synthetic construct
  source 1..75: mol_type = other DNA
tcaccggcaaaatagatctccgcaactggaccgcccccatcgccaaaacggaagcacccacggaggccagcgcat

SEQ ID NO: 293131 - DNA, 75 bp, synthetic construct
  source 1..75: mol_type = other DNA
gtgacgctgacgttttttatccgggtgaccattctggtgctctctgtgccgctgtttgttatggtgctgatagtg

SEQ ID NO: 293132 - DNA, 75 bp, synthetic construct
  source 1..75: mol_type = other DNA
ggtaccgggctggatttccgtggcgtatcagtggctgtttgtggaaagtggtatgcagtcatggctgcagtcgca

SEQ ID NO: 293133 - DNA, 75 bp, synthetic construct
  source 1..75: mol_type = other DNA
attgctcattttctcgaccacgaaaccgcaaaaatcgataacctaatcgagaaacaacaacaacttattgaacta

SEQ ID NO: 293134 - DNA, 75 bp, synthetic construct
  source 1..75: mol_type = other DNA
gacaaggcattttggaccgtcgatacaatgtattacacggaagtatttgattgcattatagagaaatatttatat

SEQ ID NO: 293135 - DNA, 75 bp, synthetic construct
  source 1..75: mol_type = other DNA
agtgaccaaagggctaaatcctgatgtgccgatgaaagattctggggttgagtggttggacgaaatccctgaaca

SEQ ID NO: 293136 - DNA, 75 bp, synthetic construct
  source 1..75: mol_type = other DNA
taattggcggtgtactggttggcggcgcactgggggcgatcaacggctgcctggtcaactggacggggctacacc

SEQ ID NO: 293137 - DNA, 75 bp, synthetic construct
  source 1..75: mol_type = other DNA
catgggcgagtttttcgctatcctggtcgctggtatcgacctctcggttggcgcgattctggcgctttccggtat

SEQ ID NO: 293138 - DNA, 75 bp, synthetic construct
  source 1..75: mol_type = other DNA
atatcgcctcagcggtcgccagtatgatggggttagggattggccttacgccatcagccgacgattatttaacag

SEQ ID NO: 293139 - DNA, 75 bp, synthetic construct
  source 1..75: mol_type = other DNA
atagcgttcttctggccggaagcgggggcagcccacagcgaggcggtgatgaataccgaactgggctggctgtcg

SEQ ID NO: 293140 - DNA, 75 bp, synthetic construct
  source 1..75: mol_type = other DNA
tgcagtgcaatcgcgcatttaccgaaatgtttggttactgcattagcgaagccagcggtatgcagccgatacact

SEQ ID NO: 293141 - DNA, 75 bp, synthetic construct
  source 1..75: mol_type = other DNA
tgttgccgatcttgattactactggctacaggagaggggcagcatgtgtcagccagcatatatggtacttgatcg

SEQ ID NO: 293142 - DNA, 75 bp, synthetic construct
  source 1..75: mol_type = other DNA
ggggagtgcgtgccacagtgtccgcatcaggcattgcagattgttaatggcaaagtggagtggaacgctgtagtc

SEQ ID NO: 293143 - DNA, 75 bp, synthetic construct
  source 1..75: mol_type = other DNA
tgtcgcaagtcacagaattatttgaaaaaccattactggatctgctgttcgaagcgcagcaggttcaccgtcagc

SEQ ID NO: 293144 - DNA, 75 bp, synthetic construct
  source 1..75: mol_type = other DNA
cggcgcgcaaagcgaaagcggctggatcgacacgtttctgcatgggcgcggcgtggaagaatccccacgaacgcg

SEQ ID NO: 293145 - DNA, 75 bp, synthetic construct
  source 1..75: mol_type = other DNA
aggctgctaacgccgttcaaaagacaggcgataccttgtccggtggacttacttttgaaaacgactcaatccttg

SEQ ID NO: 293146 - DNA, 75 bp, synthetic construct
  source 1..75: mol_type = other DNA
cgcaggccgtgggctttaatcgcgacatcacctatttaatgccgtttaaacagccggtcggcctgatggcaggcg

SEQ ID NO: 293147 - DNA, 75 bp, synthetic construct
  source 1..75: mol_type = other DNA
tattccgctttcagaatggagtggctattgcttttaaaaacattcaggcaggtgatagtaaaaagttctcgctat

SEQ ID NO: 293148 - DNA, 75 bp, synthetic construct
  source 1..75: mol_type = other DNA
tggcagtcttggagttggtacaacgaatgcgttaggtggtagctcaattgttcttggtgataatgataccggatt

SEQ ID NO: 293149 - DNA, 75 bp, synthetic construct
  source 1..75: mol_type = other DNA
agcgtcgacaaagcggtgaaaatgttcccggcgatcgagcgatttttgcgccaggagatgcgcgaacccgcctcc

SEQ ID NO: 293150 - DNA, 75 bp, synthetic construct
  source 1..75: mol_type = other DNA
acatcagcaatccgcccgcgcgttaaagcaaaactacgccgcctacatggagatcaaaccgctgatcccgctcgg

SEQ ID NO: 293151 - DNA, 75 bp, synthetic construct
  source 1..75: mol_type = other DNA
ggtggccgcgatgaacgttcacggatttcgtacatatgcgtcctgtcaggggcatggtttccctgttacgaaact

SEQ ID NO: 293152 - DNA, 75 bp, synthetic construct
  source 1..75: mol_type = other DNA
atatttcaaatggagaagcaaacaaagcaccacaacaaaagacctgatgacgctgaaatgggatgcactaaatat

SEQ ID NO: 293153 - DNA, 75 bp, synthetic construct
  source 1..75: mol_type = other DNA
atggccatgcttctggctgttcttgaatggggtgttgaagacgaggagttggcggaactggctaagaaagtagcc

SEQ ID NO: 293154 - DNA, 75 bp, synthetic construct
  source 1..75: mol_type = other DNA
cctaaatcgaattgctgtacgtggtcagcgaaaggttgccgacgcgttagggattaatgaatcgcaaatttcgcg

SEQ ID NO: 293155 - DNA, 75 bp, synthetic construct
  source 1..75: mol_type = other DNA
actggtcgaaagcgcaggcaacagcgaaagcgcgggatcgatgaccgccatctacaccgtgctggcggaaggtga

SEQ ID NO: 293156 - DNA, 75 bp, synthetic construct
  source 1..75: mol_type = other DNA
gggagcgaatgtcatcaacaattaaccggacgcgataatcagcagattaagcgcagcatctgtttgctggcagag

SEQ ID NO: 293157 - DNA, 75 bp, synthetic construct
  source 1..75: mol_type = other DNA
tgcagattgttaatggcaaagtggagtggaacgctgtagtctgcgagcagtgcgatacctgcctgaagatgtgtc

SEQ ID NO: 293158 - DNA, 75 bp, synthetic construct
  source 1..75: mol_type = other DNA
gacgatgggacgctgcaatgactgcggggagtgcgtgccacagtgtccgcatcaggcgttgcagattgttgacgg

SEQ ID NO: 293159 - DNA, 75 bp, synthetic construct
  source 1..75: mol_type = other DNA
gacagtaacggtatgttgagcgaaaccggctgggaaaaattgctcccggtgtgcgacggcgcaatgctcgatctc

SEQ ID NO: 293160 - DNA, 75 bp, synthetic construct
  source 1..75: mol_type = other DNA
cagtgctgtttatcgaagggataacggtgagtggcggcgaagccacgacccaactgccgtttgtggtggcgctgt

SEQ ID NO: 293161 - DNA, 75 bp, synthetic construct
  source 1..75: mol_type = other DNA
gcagatcaagcgcagcattagtctgcttgccgagcgcggcaaactggcagaactgcgtttgctggtaatcccagg

SEQ ID NO: 293162 - DNA, 75 bp, synthetic construct
  source 1..75: mol_type = other DNA
cgcaagttgcgtctagtggcgatatttatggttcagtgtggggaaacaactggttaagcacatggctgcataatc

SEQ ID NO: 293163 - DNA, 75 bp, synthetic construct
  source 1..75: mol_type = other DNA
aaaacggtgatatcggcccattaaggccattcgctataaatctaagaacaggtgctatatatgtcagccacgggg

SEQ ID NO: 293164 - DNA, 75 bp, synthetic construct
  source 1..75: mol_type = other DNA
aagggcttgtccattcgcaatggacaggggtatccaggtgcggtcagctttggttatttactaactgaacaaatg

SEQ ID NO: 293165 - DNA, 75 bp, synthetic construct
  source 1..75: mol_type = other DNA
cggcggaagatttaaatctacaggaattcattaataaagcaaataatgccgttcagcgttcaggcgatatcttgt

SEQ ID NO: 293166 - DNA, 75 bp, synthetic construct
  source 1..75: mol_type = other DNA
taaaattgccggggtatcagcacagcgtacagcacgtgaaaatctggatatctatgatgccagcctgaacaaaaa

SEQ ID NO: 293167 - DNA, 75 bp, synthetic construct
  source 1..75: mol_type = other DNA
atgaccggagaactgaaaattggaacgatgaatgcgctgcgaatttttaatgatgccttcggtcttattttccgc

SEQ ID NO: 293168 - DNA, 75 bp, synthetic construct
  source 1..75: mol_type = other DNA
ctctctaaatactatcacagttaatttggaggctaaacgcgatatgactaaagaacaaatcgaagaaatcaaaga

SEQ ID NO: 293169 - DNA, 75 bp, synthetic construct
  source 1..75: mol_type = other DNA
taacgaccgtggtccggctggtctggttaagcaactggtagacggtggtcgcgttgagaagaaagctgctttctc

SEQ ID NO: 293170 - DNA, 75 bp, synthetic construct
  source 1..75: mol_type = other DNA
cgtctggtgccgaaaaaagtcgatattcgccagcgtatctggcagcccactcaactggaaggaaaacaattatga

SEQ ID NO: 293171 - DNA, 75 bp, synthetic construct
  source 1..75: mol_type = other DNA
aaagacatgacgccggaagcattccgcactaaggcactaaataatctcgtcaatgctcaacgtaataacgaacaa

SEQ ID NO: 293172 - DNA, 75 bp, synthetic construct
  source 1..75: mol_type = other DNA
taataacgctccattgctgttcaatcataatttcgataatcatttaggtgtagtctgcgacgctcgaatcgatgc

SEQ ID NO: 293173 - DNA, 75 bp, synthetic construct
  source 1..75: mol_type = other DNA
cccaagtgtcggtcggttattccgttttagaaggtgaagccgatttagaatctggtgtgtattacgtgactcgct

SEQ ID NO: 293174 - DNA, 75 bp, synthetic construct
  source 1..75: mol_type = other DNA
tttagccggtgatgaacttggtttcccggggagtctgttcctttctcacttcaatcgcgcacgtgatgcgggttg

SEQ ID NO: 293175 - DNA, 75 bp, synthetic construct
  source 1..75: mol_type = other DNA
tattgccgcacctgctgcaggattatcccgcgagcaaattcgccaggcacaaatcaacggtctggagatggcttt

SEQ ID NO: 293176 - DNA, 75 bp, synthetic construct
  source 1..75: mol_type = other DNA
gcgtgatgcgggctggcatattaccgtccatgcaggcgaagctgccgggccggaaagcatctggcaggcgattcg

SEQ ID NO: 293177 - DNA, 75 bp, synthetic construct
  source 1..75: mol_type = other DNA
ccggtcgattccatcgaacgtattgaagtggtccgtggcccgatgtcgtcgctgtacggttccgatgcgctcggc

SEQ ID NO: 293178 - DNA, 75 bp, synthetic construct
  source 1..75: mol_type = other DNA
ataaccgtaagggcgttagtattcgtggtctggacagcagctacaccctgattctcgtcgacggtaaacgcgtta

SEQ ID NO: 293179 - DNA, 75 bp, synthetic construct
  source 1..75: mol_type = other DNA
tgacgcagcgaagcataccgcagatcttgccgctgccgtcagaggcaaaacaaccaaaaccgccgaaggaatgct

SEQ ID NO: 293180 - DNA, 75 bp, synthetic construct
  source 1..75: mol_type = other DNA
accgtgcacagtctgcaatcgttccgcgtatctgggtagatctggattacgttgtaacccagccggaagctctga

SEQ ID NO: 293181 - DNA, 75 bp, synthetic construct
  source 1..75: mol_type = other DNA
gggcaggcaccatgtccggcggtgagcagcagatgctggcgattggtcgcgcgctgatgagcaacccgcgtttgc

SEQ ID NO: 293182 - DNA, 75 bp, synthetic construct
  source 1..75: mol_type = other DNA
attttcgacaccatcgagcaactgcgcgagcaggggatgactatcttcctcgtcgagcagaacgccaaccaggcg

SEQ ID NO: 293183 - DNA, 75 bp, synthetic construct
  source 1..75: mol_type = other DNA
tggcgcagttttttaatatcacgcccaatcatctgtcaaaactgtttgctcagcatggaacgatgcgttttatcg

SEQ ID NO: 293184 - DNA, 75 bp, synthetic construct
  source 1..75: mol_type = other DNA
gttgatcaaaccgttcagttaggtcaggttcgtaccgcttcgctggaccaggatggagcgaccagctctgctgtc

SEQ ID NO: 293185 - DNA, 75 bp, synthetic construct
  source 1..75: mol_type = other DNA
atcctggacagaacgggtgctgcgctgacgctggacggtgcgacattcagtgagcaaacaaccctgaataacggt

SEQ ID NO: 293186 - DNA, 75 bp, synthetic construct
  source 1..75: mol_type = other DNA
cgtctgcatgagcgccgtgttcagcgagcgggcactatgtccggcggtgaacagcagatgctggcgattggtcgc

SEQ ID NO: 293187 - DNA, 75 bp, synthetic construct
  source 1..75: mol_type = other DNA
ctctgttgcacgcacggttctgcgtgccgtccgtgactctgtggtctctgttgcccgcgctgtatggaactggat

SEQ ID NO: 293188 - DNA, 75 bp, synthetic construct
  source 1..75: mol_type = other DNA
ctctgttgcacgcacggttctgcgagccgtccgtgactctgtggtctctgttgcccgcgcggtatggaactggat

SEQ ID NO: 293189 - DNA, 75 bp, synthetic construct
  source 1..75: mol_type = other DNA
gccttactcactttcccgtcacatcctggaacatctgcgcaaactcaccagccacgaacccgtgcctggcattat

SEQ ID NO: 293190 - DNA, 75 bp, synthetic construct
  source 1..75: mol_type = other DNA
attacgaatgatcttcccaatgtttcacccggttttgagcctgatgcaggatcactctgcgattactgcctggcg

SEQ ID NO: 293191 - DNA, 75 bp, synthetic construct
  source 1..75: mol_type = other DNA
atgcgtaagatcattaaactggtgctggcgggtttacttagcgtctctacgattgcggttgctgcagaatcctcg

SEQ ID NO: 293192 - DNA, 75 bp, synthetic construct
  source 1..75: mol_type = other DNA
ctctgttgcacgcacggttctgcgggccgtccgtgactctgtggtctctgttgcccgcgcagtatggaactggat

SEQ ID NO: 293193 - DNA, 75 bp, synthetic construct
  source 1..75: mol_type = other DNA
tgaatcttgtctgacctcaaatattcagaccagcaccgtagcgtctctggcggcacatccgctgaaaacgttcct

SEQ ID NO: 293194 - DNA, 75 bp, synthetic construct
  source 1..75: mol_type = other DNA
agcggtgcgttgcttctttccctgtgcggcggctggctgggtgcgcgactggttaaggggaaggcactgttcagg

SEQ ID NO: 293195 - DNA, 75 bp, synthetic construct
  source 1..75: mol_type = other DNA
cggctgacggcaatcaatggcaaagcgacagaaggcaatgaggatgaagcgcttaatcgcgagctgaatctcacc

SEQ ID NO: 293196 - DNA, 75 bp, synthetic construct
  source 1..75: mol_type = other DNA
atgagaaatggttgttaccccagcttaaacccgaacaacgctggtacggtctggaacaggacgaaggcgcgctgg

SEQ ID NO: 293197 - DNA, 75 bp, synthetic construct
  source 1..75: mol_type = other DNA
agctattgccttccttggtaccgcaattgatggaaatcatcctaacgtattggctctgcagagttctgctgcagg

SEQ ID NO: 293198 - DNA, 75 bp, synthetic construct
  source 1..75: mol_type = other DNA
cgctgttgccttcttaggtacggcaattgatgctacgcatactgatgtactggctctgcagagttctgctgcggg

SEQ ID NO: 293199 - DNA, 75 bp, synthetic construct
  source 1..75: mol_type = other DNA
cgactatttttgtcgcgttttccggcgtcagtttggtctgacgccgggagagtacagcgcccgttttcagggcta

SEQ ID NO: 293200 - DNA, 75 bp, synthetic construct
  source 1..75: mol_type = other DNA
caccttgcggattgccggagaagtgattcaggaaccggattccggttttaaccccttccagatggctccgcgtct

SEQ ID NO: 293201 - DNA, 75 bp, synthetic construct
  source 1..75: mol_type = other DNA
attgcgtgggggtcaaaaagggcagggaattacaggtgccgatcatttctggtttgggcatacgccattacgtca

SEQ ID NO: 293202 - DNA, 75 bp, synthetic construct
  source 1..75: mol_type = other DNA
ccttatctccgccgccgtcaccggcaaaatagatctccgcaactggaccacgcccatccccgaagcggaaacact

SEQ ID NO: 293203 - DNA, 75 bp, synthetic construct
  source 1..75: mol_type = other DNA
cacgccgcaactggcgaacgtcaaagcggttgatgatatctacccgatgtatggcgagctacagaccaatccttc

SEQ ID NO: 293204 - DNA, 75 bp, synthetic construct
  source 1..75: mol_type = other DNA
atggcgggcgatcgggcgttgcgcagttcgcgcgaagtaccgccagcgtggctggaagaggcgcaaaagcgcggc

SEQ ID NO: 293205 - DNA, 75 bp, synthetic construct
  source 1..75: mol_type = other DNA
caggtaagtcgggcgctggaggtgatggtggtgctggtcaccgcctgcggtatgttgctgttgctggcacaggtg

SEQ ID NO: 293206 - DNA, 75 bp, synthetic construct
  source 1..75: mol_type = other DNA
actaacaccattccgttccaggcgcgttattatgcaaccggtgtcgcaaccccaggtgctgctaatgcggatgcg

SEQ ID NO: 293207 - DNA, 75 bp, synthetic construct
  source 1..75: mol_type = other DNA
agcagcagcgcctgaactggctggttaacgaaggttactatgatgaaagcgttcttaatcgctactctcgcgact

SEQ ID NO: 293208 - DNA, 75 bp, synthetic construct
  source 1..75: mol_type = other DNA
aagacaatatggagtcgattggtcgggcggttaattccgcactgcaactgtcaaaacgcggcggcggcgtggcgt

SEQ ID NO: 293209 - DNA, 75 bp, synthetic construct
  source 1..75: mol_type = other DNA
gcaaccgaaaacggcgaaagttggcgagttgtttgctcgtagcagcatcacgttacctacccgcgaaatgtgggc

SEQ ID NO: 293210 - DNA, 75 bp, synthetic construct
  source 1..75: mol_type = other DNA
aaagagaatgcgcagatggcactgttttcgccttatgacgttgagcgggtttacggcaagccgtttgctgatatc

SEQ ID NO: 293211 - DNA, 75 bp, synthetic construct
  source 1..75: mol_type = other DNA
ggcgcaagggtatcaaaacgctctattacatccgcctgcgtcagatggcgctggaaggcactgaaattgaaggct

SEQ ID NO: 293212 - DNA, 75 bp, synthetic construct
  source 1..75: mol_type = other DNA
ttttaccaatctctatttctacaccatcacctggcacgccctgcgcacttcgatgttgctggcgcgcgaacgtgg

SEQ ID NO: 293213 - DNA, 75 bp, synthetic construct
  source 1..75: mol_type = other DNA
acaccagctatacgttgaagacattcgacggtaagcgttatctggaagattttgccgatcgagtcacgatggtgg

SEQ ID NO: 293214 - DNA, 75 bp, synthetic construct
  source 1..75: mol_type = other DNA
tttcaccctatgacgttgagcgagtttatggcaagccgtttgccgatatcgccatcagtgaatactatgacgaac

SEQ ID NO: 293215 - DNA, 75 bp, synthetic construct
  source 1..75: mol_type = other DNA
aggcgcgttattttgcaaccggggccgcaaccccgggtgctgctaatgcggatgcgaccttcaaggttcagtatc

SEQ ID NO: 293216 - DNA, 75 bp, synthetic construct
  source 1..75: mol_type = other DNA
ccggaaatgccgcctcacacgccatcgggctggggcagatgaatttacacggttatctggcgcgagaaggcatcg

SEQ ID NO: 293217 - DNA, 75 bp, synthetic construct
  source 1..75: mol_type = other DNA
ggttaacagcgcctcagagtatgacgagaatctcgactatgcccgcacaggccatgatatctcctgcaatttagg

SEQ ID NO: 293218 - DNA, 75 bp, synthetic construct
  source 1..75: mol_type = other DNA
gcaggttaacagcgcctcagagtatgacgagaatctcgactatgcccgtacaggccatgatatttcctgcaattt

SEQ ID NO: 293219 - DNA, 75 bp, synthetic construct
  source 1..75: mol_type = other DNA
tcccagcgggcgattacgctgctcaaccaggcgattgttgccgcaggtgggccggaaaacttactggttactgtg

SEQ ID NO: 293220 - DNA, 75 bp, synthetic construct
  source 1..75: mol_type = other DNA
cctcgctggcagcggaagagcgtgacgggcagacactgcaggataccgggcgtctgatggggtcagtatcaaccg

SEQ ID NO: 293221 - DNA, 75 bp, synthetic construct
  source 1..75: mol_type = other DNA
gctgccacagacctggagcccgcgatgcgcaaaattgccggaaccctgctggcggaaacacagtttaactttctt

SEQ ID NO: 293222 - DNA, 75 bp, synthetic construct
  source 1..75: mol_type = other DNA
attcaccagttcgggggaaaaacgggacgtcatgagtccgttgagcttcctgcccgcccgtatttaccactgacc

SEQ ID NO: 293223 - DNA, 75 bp, synthetic construct
  source 1..75: mol_type = other DNA
cgtcactggctgccactgagcgtgacggacagacacttcaggacaccgggcgtctgatggggtcagtctcaaccg

SEQ ID NO: 293224 - DNA, 75 bp, synthetic construct
  source 1..75: mol_type = other DNA
ggcggaaacacagtttaattttcttgatgaggggcgtccggggtggatgccttcgctggcagcggaagaacgtga

SEQ ID NO: 293225 - DNA, 75 bp, synthetic construct
  source 1..75: mol_type = other DNA
ccgcatgatccgagtaaaacggtagaaggctatcctgcgcctaaacgcgcggtgttgattgcgcgtaagccgtaa

SEQ ID NO: 293226 - DNA, 75 bp, synthetic construct
  source 1..75: mol_type = other DNA
ttccggcactgaaagcctttgataccgtcttttcgatgggcgtgctttaccatcgtcgttcaccgctggagcatc

SEQ ID NO: 293227 - DNA, 75 bp, synthetic construct
  source 1..75: mol_type = other DNA
atcactggccgattttctcgatccgcatgatccgggcaaaacggtggaaggttatcctgcgcctaaacgcgcggt

SEQ ID NO: 293228 - DNA, 75 bp, synthetic construct
  source 1..75: mol_type = other DNA
tgctggtgttgcgtggcgatctgctcgaccgctggcaacagcagctaccgccagaaagcccgaactactttttaa

SEQ ID NO: 293229 - DNA, 75 bp, synthetic construct
  source 1..75: mol_type = other DNA
gagcgcaactgcgtaagctaatcgtcggtcagtggttgatggtgctggcgctttcagccgttaccggcggggcga

SEQ ID NO: 293230 - DNA, 75 bp, synthetic construct
  source 1..75: mol_type = other DNA
atcgctggccgatttcctcgacccacatgatccgggtaaaacggtggaaggttatccggcacctaaacgcgcggt

SEQ ID NO: 293231 - DNA, 75 bp, synthetic construct
  source 1..75: mol_type = other DNA
tgtccgtggtgcagcgcggttttctttaagcaggtaaaaggcgcgaaggtaaaagccagtgcagttattcagaat

SEQ ID NO: 293232 - DNA, 75 bp, synthetic construct
  source 1..75: mol_type = other DNA
ggcgcttactggtaaatctgaaacgccgtgcgacgtccggttgcgcaatattgagattaaggaaataggaagggt

SEQ ID NO: 293233 - DNA, 75 bp, synthetic construct
  source 1..75: mol_type = other DNA
ggtaatgtgcgccagttggtcaacgtgattgaacagtgcgtggcgctgacctcatctccggtgattagcgatgca

SEQ ID NO: 293234 - DNA, 75 bp, synthetic construct
  source 1..75: mol_type = other DNA
ccagccacagacgaacgctggagtgaggcgattgttacccgcagtccactgatgttgcgtttgctggaacaggcg

SEQ ID NO: 293235 - DNA, 75 bp, synthetic construct
  source 1..75: mol_type = other DNA
agctgattgcctataccgactggaatgaaacgcagcagaaacagccggacggaagctgggttaattacaactacg

SEQ ID NO: 293236 - DNA, 75 bp, synthetic construct
  source 1..75: mol_type = other DNA
actggatgtttaagccgggtgccatgaagcaggtggcggaatatgccgacggtattggccccgattaccatatgg

SEQ ID NO: 293237 - DNA, 75 bp, synthetic construct
  source 1..75: mol_type = other DNA
gctttgatgctgatgagctgaaacgcattaaaaatgagctggaaccgaaaatgggcatgaatctcaatctggttc

SEQ ID NO: 293238 - DNA, 75 bp, synthetic construct
  source 1..75: mol_type = other DNA
tattggttgatgacgaccctgggttactgaaattacttggtcttcgcttgatcagcgagggctacagcgtggtca

SEQ ID NO: 293239 - DNA, 75 bp, synthetic construct
  source 1..75: mol_type = other DNA
aggctggtggcgcagtcagatgttagcgttttgattaacggtcagagcggtaccgggaaagagatttttgcccag

SEQ ID NO: 293240 - DNA, 75 bp, synthetic construct
  source 1..75: mol_type = other DNA
gatgctgcgtttgctggaacaggcgcggctggtggcgcaatcagacgttagcgttttgattaacggccagagcgg

SEQ ID NO: 293241 - DNA, 75 bp, synthetic construct
  source 1..75: mol_type = other DNA
tgattgaacagtgcgtggcgctgacctcatctccggtgattagtgatgcgctggtggagcaggcgctggagggcg

SEQ ID NO: 293242 - DNA, 75 bp, synthetic construct
  source 1..75: mol_type = other DNA
aatgttgcgtttgctggaacaggcgcggctggtggcgcagtcagatgttagcgttttgattaatggtcagagcgg

SEQ ID NO: 293243 - DNA, 75 bp, synthetic construct
  source 1..75: mol_type = other DNA
gcgatccacaacgccagcccacgcaacaacaaaccgtttattgccattaactgtggcgcattgcctgaacagttg

SEQ ID NO: 293244 - DNA, 75 bp, synthetic construct
  source 1..75: mol_type = other DNA
attaaacgcattgaaaccctgatgcgcaacctgatgccgtggcgcaaagggccgttctcgctgtatggcgttaac

SEQ ID NO: 293245 - DNA, 75 bp, synthetic construct
  source 1..75: mol_type = other DNA
caatcggcctcgcttgccgaaatatcagcgacatctcccgttgctgataacatcaaaaatgaaaacggtgaacag

SEQ ID NO: 293246 - DNA, 75 bp, synthetic construct
  source 1..75: mol_type = other DNA
ctaacgcgcttgtctattctcacggcgaagatgtttatagttatgaaagtggcgctcatagtgattttgacagta

SEQ ID NO: 293247 - DNA, 75 bp, synthetic construct
  source 1..75: mol_type = other DNA
attcgcaccgtaataagaccggcctggatctggaatacatggaatcagacggggcttgaattaggctggttttag

SEQ ID NO: 293248 - DNA, 75 bp, synthetic construct
  source 1..75: mol_type = other DNA
aacactggaggctttccataaattcacatcgaaacacgccccaggcgttcactcttcagagggcatcccgtggaa

SEQ ID NO: 293249 - DNA, 75 bp, synthetic construct
  source 1..75: mol_type = other DNA
cccgcatagcgttgaaggttatcaggtaacgaccaataccaaccgctgcttgcagtgccacggtgtcgaaagcta

SEQ ID NO: 293250 - DNA, 75 bp, synthetic construct
  source 1..75: mol_type = other DNA
tacattaatattcttgataacgaattgtcgaatttcaattttaatgataacagcaaagacgaatttatggccggg

SEQ ID NO: 293251 - DNA, 75 bp, synthetic construct
  source 1..75: mol_type = other DNA
agcgccgtctggagatcgcccgctgcatggtgacgcagccggagattttaatgctcgacgaaccggcggcaggtc

SEQ ID NO: 293252 - DNA, 75 bp, synthetic construct
  source 1..75: mol_type = other DNA
caaacggtacgccggagcaaatccgtaataacccggacgtgatccgtgcctatttaggtgaggcatcagaaggaa

SEQ ID NO: 293253 - DNA, 75 bp, synthetic construct
  source 1..75: mol_type = other DNA
ttaacccgaaagaaacgaaagagctggatgagctgattgccgaactgcgtaaccatcacaacaccactatcttgt

SEQ ID NO: 293254 - DNA, 75 bp, synthetic construct
  source 1..75: mol_type = other DNA
agctgactcgctgattaaaatttcgcggatctgggccgatttttttcccgcaaacacatcgaatcagcctattta

SEQ ID NO: 293255 - DNA, 75 bp, synthetic construct
  source 1..75: mol_type = other DNA
aacgcgaggttttttacccttcgcaccagaggcagacttctgggtcggcaaacataaactcccgcaatatgagat

SEQ ID NO: 293256 - DNA, 75 bp, synthetic construct
  source 1..75: mol_type = other DNA
tagggctgtttgatatgtccttaagccgtgatgatgtcgatgtttactctcgtgatttttcgggtgatgctgcca

SEQ ID NO: 293257 - DNA, 75 bp, synthetic construct
  source 1..75: mol_type = other DNA
cggataaccctcgatacattgcggagaaaaattatatggaagctttactcaaaaaagcatctccccataccgtac

SEQ ID NO: 293258 - DNA, 75 bp, synthetic construct
  source 1..75: mol_type = other DNA
tgcacgatcacggcagtattgtctgggacgaatttattggtatgtggattacgctcatggcgctgccgaccaatg

SEQ ID NO: 293259 - DNA, 75 bp, synthetic construct
  source 1..75: mol_type = other DNA
tgcacgatcacggcagcattgtctgggacgaatttattggtatgtggatcacgctcatggcgctgccgaccaatg

SEQ ID NO: 293260 - DNA, 75 bp, synthetic construct
  source 1..75: mol_type = other DNA
atgtcgcgaaaagtcgcctgaagatgagtaatccgtggcatctgcttgctgtcggattcggaagtggattaagcc

SEQ ID NO: 293261 - DNA, 75 bp, synthetic construct
  source 1..75: mol_type = other DNA
ttccggcactgaaagcctttgataccgtcttttcgatgggcgtgctttatcatcgccgttcaccactggagcatc

SEQ ID NO: 293262 - DNA, 75 bp, synthetic construct
  source 1..75: mol_type = other DNA
caagtacccgcaccagaacaagccgcgacgccaacgatacaggaacaatcagggagaaatattaccagtgcaaca

SEQ ID NO: 293263 - DNA, 75 bp, synthetic construct
  source 1..75: mol_type = other DNA
attgtcgccggggtgatctccgcaggcatcctgtactttatcggtcatcactggccgctgggtattctgtcgtag

SEQ ID NO: 293264 - DNA, 75 bp, synthetic construct
  source 1..75: mol_type = other DNA
actcttcagaaggtatcccgtggcatgagctgccagcttcacacaggggaaacaatcagatgagtttgcctttat

SEQ ID NO: 293265 - DNA, 75 bp, synthetic construct
  source 1..75: mol_type = other DNA
catccgcacgtatccgcaccagtcgcaatgaaaatgattcaggcacagttcgcctgaagtactaccagtgcaata

SEQ ID NO: 293266 - DNA, 75 bp, synthetic construct
  source 1..75: mol_type = other DNA
atctggaatgcggcgtatgcttctcaacactggaagctttccataaattcacatcaaaacacgcctccggcgttc

SEQ ID NO: 293267 - DNA, 75 bp, synthetic construct
  source 1..75: mol_type = other DNA
gcgaaaacgcgcccgctcgaggcatttattcaactgctggatgtgcctgactcggcaagacagggatatcaatga

SEQ ID NO: 293268 - DNA, 75 bp, synthetic construct
  source 1..75: mol_type = other DNA
actgccatcgacgggataccggtataccgcgaggaactgatgatcgtcacgccacaaggacatgcgccagtaacc

SEQ ID NO: 293269 - DNA, 75 bp, synthetic construct
  source 1..75: mol_type = other DNA
tcgtggtgcgaaaacgcgtccgcttgaggcatttattcaactgctggatgtgcctgactcggcaaaacagggtta

SEQ ID NO: 293270 - DNA, 75 bp, synthetic construct
  source 1..75: mol_type = other DNA
tatgggaaagacggcaacggcgaagatatattgctccctactccgaacaaagataaatgcatgtttagcgcagaa

SEQ ID NO: 293271 - DNA, 75 bp, synthetic construct
  source 1..75: mol_type = other DNA
acttgcaggtgagagcaattcactctcgtcattagagaaaatcgcgcaaatccctgatagcagttggttatggag

SEQ ID NO: 293272 - DNA, 75 bp, synthetic construct
  source 1..75: mol_type = other DNA
aacaaagtccggataaccggctggatgttgaaatacgacgacgagctgcgtcagttgggcattcggtggatggca

SEQ ID NO: 293273 - DNA, 75 bp, synthetic construct
  source 1..75: mol_type = other DNA
attccacaagatatggtggagctgattgaggtgatgcgcgccgatttcgaagagcataaagatgaagtggactgg

SEQ ID NO: 293274 - DNA, 75 bp, synthetic construct
  source 1..75: mol_type = other DNA
accgttccggctcagacgcgtttagtcgaatctttgcaacggcgtgaaattactcgtgagtatgaagcggtggca

SEQ ID NO: 293275 - DNA, 75 bp, synthetic construct
  source 1..75: mol_type = other DNA
tcattttactcatgcgatgcccgttcaacttcaatttatctgactgtatctggcagaagggttagctggtattca

SEQ ID NO: 293276 - DNA, 75 bp, synthetic construct
  source 1..75: mol_type = other DNA
ccttatccacctggcgtgctttgcgtggtacccggggaagtctgggggggggggcggttcaacgttatttccttg

SEQ ID NO: 293277 - DNA, 75 bp, synthetic construct
  source 1..75: mol_type = other DNA
tttcattggcggtattgatgcgcactgttttaatgaagagtatctgcgccagcaaattcgcgacgttgtgccaga

SEQ ID NO: 293278 - DNA, 75 bp, synthetic construct
  source 1..75: mol_type = other DNA
gaacggatcgatcaccaggaataccgacaaattctggcagaaacagagcaggaagctcatctgaaaaaattacgg

SEQ ID NO: 293279 - DNA, 75 bp, synthetic construct
  source 1..75: mol_type = other DNA
aactgtataccgacagtgccggttacccggtaaaaattgttcgctacataaacaacaccgtgttgtacagaagaa

SEQ ID NO: 293280 - DNA, 75 bp, synthetic construct
  source 1..75: mol_type = other DNA
cgacgattctggcgcactatctgcgtgagaacggcattgtgccggagaagtgcgatctcaattccattctgttct

SEQ ID NO: 293281 - DNA, 75 bp, synthetic construct
  source 1..75: mol_type = other DNA
ctggcctgcaccgcagcgaaaccaaaacagttgatatgatggttaagcagttaccagatagttggtttggctatg

SEQ ID NO: 293282 - DNA, 75 bp, synthetic construct
  source 1..75: mol_type = other DNA
ctttctgcccccaactgacctgttccacaccatggctcagcgtgtagcgaaagatcagaaaggcgcaggagaagg

SEQ ID NO: 293283 - DNA, 75 bp, synthetic construct
  source 1..75: mol_type = other DNA
agaacgcgcaaaacaaaccgttgacggtatacctatcgcgctcgatcctttgctgcagtcaattcgagcaccgga

SEQ ID NO: 293284 - DNA, 75 bp, synthetic construct
  source 1..75: mol_type = other DNA
gaatttattagtaaacaggttgcagtagatgaacccaactaccaaatcctgtgtggtcaaagtctgcttggagat

SEQ ID NO: 293285 - DNA, 75 bp, synthetic construct
  source 1..75: mol_type = other DNA
aatagcacatctaacaaggatactattgctttgccgataagtgcagaagcttctttagaagccataaacagccat

SEQ ID NO: 293286 - DNA, 75 bp, synthetic construct
  source 1..75: mol_type = other DNA
gcacaattaatgaaaaccaagaggattggatttccatagttctggaaagcaatagcacatctaacaaggatacta

SEQ ID NO: 293287 - DNA, 75 bp, synthetic construct
  source 1..75: mol_type = other DNA
ctcaccccatacggagctggtgtatcactcatgtctttaagtaacggtttttcaaaagaagaaacattttcacat

SEQ ID NO: 293288 - DNA, 75 bp, synthetic construct
  source 1..75: mol_type = other DNA
tattggtaatgaacttatgattgatgagggtatgctaagtgttgcaactaaagctcttcagcgacagattcagca

SEQ ID NO: 293289 - DNA, 75 bp, synthetic construct
  source 1..75: mol_type = other DNA
ctggcttggttgttactgatagccaaggatcgatggaaatcgatacgctaattattactgctgaccggctgctat

SEQ ID NO: 293290 - DNA, 75 bp, synthetic construct
  source 1..75: mol_type = other DNA
aaggctcgagagctctgccatacgaaaggaatggaactggatacagtacgtattggtaatgaacttatgattgat

SEQ ID NO: 293291 - DNA, 75 bp, synthetic construct
  source 1..75: mol_type = other DNA
ccaattggcgagttagtatcggagtgcttttacgctcaagatatcggtaaactgcattcatcgaggaaagtctcg

SEQ ID NO: 293292 - DNA, 75 bp, synthetic construct
  source 1..75: mol_type = other DNA
gttcgtgcattattggctccattctctgaattacatagcctaggtatcggccattgtgatattgacccgcacaat

SEQ ID NO: 293293 - DNA, 75 bp, synthetic construct
  source 1..75: mol_type = other DNA
taaactgcgaacacaagaaattattaactcaatattcgatgacagcttgctgaaaactcttgtctatgatgaaac

SEQ ID NO: 293294 - DNA, 75 bp, synthetic construct
  source 1..75: mol_type = other DNA
cgggggtatcgcgggaaatgttaattctcgcaacgctgttactgttttgcgcggtgctgctgatcgtactggtgg

SEQ ID NO: 293295 - DNA, 75 bp, synthetic construct
  source 1..75: mol_type = other DNA
tattgcgatagtaatgatgtctttagccatgatcatcacttatttttacacggatgtatttggtctgaaacccgt

SEQ ID NO: 293296 - DNA, 75 bp, synthetic construct
  source 1..75: mol_type = other DNA
cgccctgaatcgcgcgttgcgtgatgcccccctggtctgcgctttgttatttacgcatccctggcatggaaatgc

SEQ ID NO: 293297 - DNA, 75 bp, synthetic construct
  source 1..75: mol_type = other DNA
agttatctggtattctcttttattgtcaattatatggctgtactggcaacccgtcagagagcggtagtcagacgc

SEQ ID NO: 293298 - DNA, 75 bp, synthetic construct
  source 1..75: mol_type = other DNA
atgaaatcaatgaatattgccgccagtagtgaactggtatcccgactttctactcatcgccgcgtggtggcgttg

SEQ ID NO: 293299 - DNA, 75 bp, synthetic construct
  source 1..75: mol_type = other DNA
ggtgcgttctttaaaaagcatcctgccggacgccatttttacgatttctttggtgagaacgtctttcgcgccgat

SEQ ID NO: 293300 - DNA, 75 bp, synthetic construct
  source 1..75: mol_type = other DNA
aagcgtaagcagcagacagagctacgagctatcaagcacggtacaattgaccacgacatcattgatgaaaggcag

SEQ ID NO: 293301 - DNA, 75 bp, synthetic construct
  source 1..75: mol_type = other DNA
tgcaccgcagggatttgaaattgtacgcaaaccggatacccgcccggacagccgaatcacgcagctctggcagcg

SEQ ID NO: 293302 - DNA, 75 bp, synthetic construct
  source 1..75: mol_type = other DNA
gaagacagcgcccgcgaaaatggttttgaccttcagggcggccctgccgccccttggactcgtggcaataactgt

SEQ ID NO: 293303 - DNA, 75 bp, synthetic construct
  source 1..75: mol_type = other DNA
caatattaaacttaccggaatggtgaaagacgcgcagcagaataagttggttgtgcatccttataccgtgcggtc

SEQ ID NO: 293304 - DNA, 75 bp, synthetic construct
  source 1..75: mol_type = other DNA
tcacggatgatccacaagagcgattgagcgccaatggttatcgttttgttatgacaaaaattgccatgttcgccg

SEQ ID NO: 293305 - DNA, 75 bp, synthetic construct
  source 1..75: mol_type = other DNA
gttgatgttcaccacacctaataccgattattcagttaagcttttatgggcctgggctacctatgtgttacttac

SEQ ID NO: 293306 - DNA, 75 bp, synthetic construct
  source 1..75: mol_type = other DNA
ataaagttgctctggcttcaactgcgctttttgtttctgcaagttcttttgcggctgaaggcgctacaggtggta

SEQ ID NO: 293307 - DNA, 75 bp, synthetic construct
  source 1..75: mol_type = other DNA
atgacgacacacaccctgtcgtgcctgctccttttcatctgttttcttttgcttccggcacacacgcaggctgcc

SEQ ID NO: 293308 - DNA, 75 bp, synthetic construct
  source 1..75: mol_type = other DNA
gatcgttacgcttttcgtttgtatgtacaaagcggtgtgcgctggatctgggggggaggattgttgatgattgcg

SEQ ID NO: 293309 - DNA, 75 bp, synthetic construct
  source 1..75: mol_type = other DNA
gctggaacggcatccatgactggtatgcggtcatgggtgaaaaaaccggagcggatcgttacgcttttcgcttgt

SEQ ID NO: 293310 - DNA, 75 bp, synthetic construct
  source 1..75: mol_type = other DNA
cacagtttgtctctgactcgtcggcagggaattttccgccactggtcgctgttgctggcgatagttacgctgatg

SEQ ID NO: 293311 - DNA, 75 bp, synthetic construct
  source 1..75: mol_type = other DNA
gctggaacggcatccatgactggtatgcggtcatgggagagaaaaccggagcggatcgttacgcttttcgtttgt

SEQ ID NO: 293312 - DNA, 75 bp, synthetic construct
  source 1..75: mol_type = other DNA
gaacgctctatccgatgatttacggcctgctgggctggggacgtctctccgttggcgcgccgtatttcaatcgtg

SEQ ID NO: 293313 - DNA, 75 bp, synthetic construct
  source 1..75: mol_type = other DNA
catcagtgaattcaacaaccattttgaacatattgaccatcaggaatttcgccagatacagacagaactggagca

SEQ ID NO: 293314 - DNA, 75 bp, synthetic construct
  source 1..75: mol_type = other DNA
agatatacaccgatagcgccggctatccagtaaaaatcattcgtagtactgatcactcagtgttcttcaagagga

SEQ ID NO: 293315 - DNA, 75 bp, synthetic construct
  source 1..75: mol_type = other DNA
ctgatgcaggtgaactcatcccatatcccgctcctgaaacagaaagggattatccgcagctggcaggatctgttc

SEQ ID NO: 293316 - DNA, 75 bp, synthetic construct
  source 1..75: mol_type = other DNA
atgtcagttgatgcagctggcacgcatcccgattactacaccctggctcccgaaaaagggaaaaatgcgttgggc

SEQ ID NO: 293317 - DNA, 75 bp, synthetic construct
  source 1..75: mol_type = other DNA
tactacaccctggctcccgaaaaagggaaaaatacgctgggcattgatgcggtacgtgaggtcaccgaaaagctg

SEQ ID NO: 293318 - DNA, 75 bp, synthetic construct
  source 1..75: mol_type = other DNA
cggcactgaaccacgaacaagctccggcgcgtctgcactggttggcaactttgttgatggatgcgctcaaacgcc

SEQ ID NO: 293319 - DNA, 75 bp, synthetic construct
  source 1..75: mol_type = other DNA
ttctgcggaaagtcttcgacggcgagctggattttgccctcagactggcgcgtgagatgggaggcctgactggcg

SEQ ID NO: 293320 - DNA, 75 bp, synthetic construct
  source 1..75: mol_type = other DNA
tggtggcgatgtccctgtggcataaccatccacagaaaacgcagtcaccgtcaatgaatgaggctgtgatgcaga

SEQ ID NO: 293321 - DNA, 75 bp, synthetic construct
  source 1..75: mol_type = other DNA
tactgatattactgaagtggcgaaaaataacgcgctgactgatgatgatttttctgcgggaaagtcttcgacggc

SEQ ID NO: 293322 - DNA, 75 bp, synthetic construct
  source 1..75: mol_type = other DNA
tacctgccttgctggcgttaggattaatatcaacaaatgctaatgcatctgacccttgcgcttcggtactttgct

SEQ ID NO: 293323 - DNA, 75 bp, synthetic construct
  source 1..75: mol_type = other DNA
caatggaccattacgcagcctctaacccactgaataaagaagtggttcgtgaagctggcgcatggctggttaact

SEQ ID NO: 293324 - DNA, 75 bp, synthetic construct
  source 1..75: mol_type = other DNA
atgtttctgaaaacagaacaatttgaatataacggtgtatccgtcacgctttctgagctgtctgcgctgcagcgt

SEQ ID NO: 293325 - DNA, 75 bp, synthetic construct
  source 1..75: mol_type = other DNA
agttcggtgtaccgacggtgactgacatcatcaaagaactggaaaagccaggtcgcgatccgcgtccagaattta

SEQ ID NO: 293326 - DNA, 75 bp, synthetic construct
  source 1..75: mol_type = other DNA
aaacaaccgcccggcagccaaaccacgcggtcgtgaagcgcagcctgccggtaacagcgcgatgatggacgcgct

SEQ ID NO: 293327 - DNA, 75 bp, synthetic construct
  source 1..75: mol_type = other DNA
ctgcgtgccacgatgggcctcgatccgggtctgcgtactggggtaaaagtggcggtggtcgatgccactggcaaa

SEQ ID NO: 293328 - DNA, 75 bp, synthetic construct
  source 1..75: mol_type = other DNA
tcgacccgctaataaatgatgcgttgatttatataagagatgagtttattgatgagcgaaaattacgaggtgaat

SEQ ID NO: 293329 - DNA, 75 bp, synthetic construct
  source 1..75: mol_type = other DNA
tgtctgcgctgcagcgtattgagcatcttgccctcctgaaacggcgggcagaagaggctgaagccagcggcaacc

SEQ ID NO: 293330 - DNA, 75 bp, synthetic construct
  source 1..75: mol_type = other DNA
gtatgtctgagtttgtggtgaatgatgctcctgaacaggcagaggacgccgggcctgcagagcctgtttctgcgg

SEQ ID NO: 293331 - DNA, 75 bp, synthetic construct
  source 1..75: mol_type = other DNA
atgaaaaggatatgcaaaggtctaatcgtaatttttactgtgtcctgttttatagcgccaacgtatgccgctgat

SEQ ID NO: 293332 - DNA, 75 bp, synthetic construct
  source 1..75: mol_type = other DNA
tccgtccacaggccaggtggttgaatccatgctgaaagccaaaccccatccggagctggcttaccgtgcagtcct

SEQ ID NO: 293333 - DNA, 75 bp, synthetic construct
  source 1..75: mol_type = other DNA
catgaataacaggcaatggcccggtaaagcggtgctgggacgtctgacagaagcggagaaggagcaatacaatct

SEQ ID NO: 293334 - DNA, 75 bp, synthetic construct
  source 1..75: mol_type = other DNA
tgccttgccgctgcgtccggtgatggtcttcatcccgagcaaaaacggcaaattgtcgcccaatttcggcaaaac

SEQ ID NO: 293335 - DNA, 75 bp, synthetic construct
  source 1..75: mol_type = other DNA
ccgcaattacgcgtggagtacctcggttctttctggcaattgctgacaccgttcccattactgtgtggtttgctc

SEQ ID NO: 293336 - DNA, 75 bp, synthetic construct
  source 1..75: mol_type = other DNA
gcaatcaggtctggttgatcctcgcaggtggggcattatttgccgcctggcccagagtgtatgcagcggcgtttt

SEQ ID NO: 293337 - DNA, 75 bp, synthetic construct
  source 1..75: mol_type = other DNA
ggtacataactcacacagagtggtccttcagggagagtccctgaggaaaaatcccccgacagtggaaagcagcga

SEQ ID NO: 293338 - DNA, 75 bp, synthetic construct
  source 1..75: mol_type = other DNA
cagcagtcaacagtgacagtccagcagggcggtgtgttgattctcgacggaagtacggtaaaaggtgacgatgtc

SEQ ID NO: 293339 - DNA, 75 bp, synthetic construct
  source 1..75: mol_type = other DNA
tggaacgggcacatcaacgtggttatcaggccggcatcgccggacgctcaaaagaaatgtgtccctatcagacgc

SEQ ID NO: 293340 - DNA, 75 bp, synthetic construct
  source 1..75: mol_type = other DNA
atgactggaaaaaatagagtggttttacctgccttgctggcgttaggattaatatcaataaatgctaatgccgct

SEQ ID NO: 293341 - DNA, 75 bp, synthetic construct
  source 1..75: mol_type = other DNA
atgaactacaaccacccttacacttttaccgcgcaaaaggcagtgatagcgatccccatcacgccacaggtgacg

SEQ ID NO: 293342 - DNA, 75 bp, synthetic construct
  source 1..75: mol_type = other DNA
aaagacgctgcgtgcgcagctcactgaagcgcaggccaacaccacccaggtttcagcggagcgcgaccgtctgtt

SEQ ID NO: 293343 - DNA, 75 bp, synthetic construct
  source 1..75: mol_type = other DNA
ctcaacgcttgccactgttaatggtcgccatcctgaaggtgagtttagcgttgatcaaggctatgcctgcggttt

SEQ ID NO: 293344 - DNA, 75 bp, synthetic construct
  source 1..75: mol_type = other DNA
ggcaaactggtggcgaccgataccatttacccgcacaccggacaagccgcaaaagcagcgatgactgttgctgcg

SEQ ID NO: 293345 - DNA, 75 bp, synthetic construct
  source 1..75: mol_type = other DNA
tcaaccttttgaaccacaccagctacaggcattaataaaagaggcaggtagcgagatacgagacgtaatcataat

SEQ ID NO: 293346 - DNA, 75 bp, synthetic construct
  source 1..75: mol_type = other DNA
cgtatagcaaaggcgcggggatgcaagaattatcgagacttgttgagttagtcaaatatgatgcgataacatgct

SEQ ID NO: 293347 - DNA, 75 bp, synthetic construct
  source 1..75: mol_type = other DNA
tatttcttgagagcgccaatcaaccggacattgccttagaaaggataggccgtcgcctggtgactgagttcctcg

SEQ ID NO: 293348 - DNA, 75 bp, synthetic construct
  source 1..75: mol_type = other DNA
aaccggaattcgccgccgcgaaagatggctacacctttgtttctcaccagcaggaagtgggtactggctacttcg

SEQ ID NO: 293349 - DNA, 75 bp, synthetic construct
  source 1..75: mol_type = other DNA
accgcgttgggaaggcattacccgtccgtacagcgcggaagatgtggtgaaattacgcggttcggtcaatccgga

SEQ ID NO: 293350 - DNA, 75 bp, synthetic construct
  source 1..75: mol_type = other DNA
gtgagtcgaaaaaaggctacatcaacagcctcggcgcactgactggcggtcaggcgctgcaacaggcgaaagcgg

SEQ ID NO: 293351 - DNA, 75 bp, synthetic construct
  source 1..75: mol_type = other DNA
cttgatgagatcgccagcattaaacgggatgagattgtaatgttggagggtgtcagatgtttctttgtcagcaag

SEQ ID NO: 293352 - DNA, 75 bp, synthetic construct
  source 1..75: mol_type = other DNA
tctgtcttgaatgaggatatgcttgaatggtcgagagataggaacataacgttctctgtttcgcttgatggtgag

SEQ ID NO: 293353 - DNA, 75 bp, synthetic construct
  source 1..75: mol_type = other DNA
acgttgcgaccatacctgcaagtattgtcaggtcagtagagcttcagtgaacgcctctggttatgatctagatcc

SEQ ID NO: 293354 - DNA, 75 bp, synthetic construct
  source 1..75: mol_type = other DNA
ggaagtctatacgagttcgccaaacgtcgatatgacgcaatcccagacagtaacccgtttcacggtcacaacctc

SEQ ID NO: 293355 - DNA, 75 bp, synthetic construct
  source 1..75: mol_type = other DNA
aacgagcctggagaaagtccaccgggacgaaggatatcgacaaggcgcgacacttcagaaatcacatgctgattg

SEQ ID NO: 293356 - DNA, 75 bp, synthetic construct
  source 1..75: mol_type = other DNA
cagtctaataacatcattcggaaggatggcaagcgaggtccgtggtacagtcaaaagttcacccggctgcgtgac

SEQ ID NO: 293357 - DNA, 75 bp, synthetic construct
  source 1..75: mol_type = other DNA
acttcgaagatcagctggcgtcagtgaagaaatgcggtcacatgggcggcaaagttttggtgccaactcaggaag

SEQ ID NO: 293358 - DNA, 75 bp, synthetic construct
  source 1..75: mol_type = other DNA
ttgcttcagaagaaaaaccttaactttactatctctgataactgccaggtttatctaagtgccaatgaaaatgaa

SEQ ID NO: 293359 - DNA, 75 bp, synthetic construct
  source 1..75: mol_type = other DNA
tactctcttgtaaaactccaaaagacattcaggcttgcattaatgcaggctccgatattaatacactggattcgt

SEQ ID NO: 293360 - DNA, 75 bp, synthetic construct
  source 1..75: mol_type = other DNA
cgctcttttatcaaaaaaatccagaaatactgaagaaactgattgaactgggtttagacacctcgcatacggata

SEQ ID NO: 293361 - DNA, 75 bp, synthetic construct
  source 1..75: mol_type = other DNA
cgaacaagtttgtggaagatccgcataccgtggtgaaagcgggcgacattgtgaaggtgaaagtgctggaagtgg

SEQ ID NO: 293362 - DNA, 75 bp, synthetic construct
  source 1..75: mol_type = other DNA
gaccttgtcagaaccggggcgtttctggtggcgatgtccctgtggcataaccatccacagaaaacggagtcaccg

SEQ ID NO: 293363 - DNA, 75 bp, synthetic construct
  source 1..75: mol_type = other DNA
tcgaacaggaggtgctcaccacctggcctgccgatgccattgccctggcggaagatgtggtattacgtctgtccg

SEQ ID NO: 293364 - DNA, 75 bp, synthetic construct
  source 1..75: mol_type = other DNA
ggtggagtcggtggcgattacggtgataggcgcgaacctggtcgataaaattctcacagcggtgattgtctggct

SEQ ID NO: 293365 - DNA, 75 bp, synthetic construct
  source 1..75: mol_type = other DNA
atgatcgtgcaaaaagagctggtcgctatttacaattatgaggtccctgtacctgaagatccgttttccttcagg

SEQ ID NO: 293366 - DNA, 75 bp, synthetic construct
  source 1..75: mol_type = other DNA
accggatctggaactggcacgtcgctttgcggaagctatccacgcgaaatacccgggcaaactgttggcctataa

SEQ ID NO: 293367 - DNA, 75 bp, synthetic construct
  source 1..75: mol_type = other DNA
tacaaaatccgtcgagaacagaaagaaatctccaggcatttaaaacctgctaaaagtatatctgcaacagtcaaa

SEQ ID NO: 293368 - DNA, 75 bp, synthetic construct
  source 1..75: mol_type = other DNA
aaaacgatttttctctggctgaaagaatgctggctgcagatgatcgttaccggaccgggtcgcggtttacatttt

SEQ ID NO: 293369 - DNA, 75 bp, synthetic construct
  source 1..75: mol_type = other DNA
ggtgattgtctggcttctactgcgtcagctgccgattcgcaccacacgacatttcccggcaatggctgccgtgcg

SEQ ID NO: 293370 - DNA, 75 bp, synthetic construct
  source 1..75: mol_type = other DNA
atgatgcgaaccgccggttcgctgaaactgggcaccattcatgcttcagaactcattcgctctttgctgaaaagc

SEQ ID NO: 293371 - DNA, 75 bp, synthetic construct
  source 1..75: mol_type = other DNA
cgctgggacatcccactgatggacataaaggcgtgcaacagctggcggtccaactggataaaacctggaaagccg

SEQ ID NO: 293372 - DNA, 75 bp, synthetic construct
  source 1..75: mol_type = other DNA
gcatggttgcttcaaaataaggtattactgcccggagcaaccacactagtacgtctcatcagtgaaattcgtgaa

SEQ ID NO: 293373 - DNA, 75 bp, synthetic construct
  source 1..75: mol_type = other DNA
gcattggctttaaccgcagctattatctggcctccttcatttttgccgctggctgtgccggccttggcctgatga

SEQ ID NO: 293374 - DNA, 75 bp, synthetic construct
  source 1..75: mol_type = other DNA
caagggatggacaaacgcgcgagattgcctcgtatctggcttcggaattgaaagaactggggagccaggcggatg

SEQ ID NO: 293375 - DNA, 75 bp, synthetic construct
  source 1..75: mol_type = other DNA
caaaccggagaagcgtactccacagaccaacagctacgcgcggaagtttctgatgaactcgcaatggcgtcccga

SEQ ID NO: 293376 - DNA, 75 bp, synthetic construct
  source 1..75: mol_type = other DNA
agacaggttgctgcacgtcttggcgaaaatgaggctgtcgaactcgatgtttctggcccgaagccccggttgaca

SEQ ID NO: 293377 - DNA, 75 bp, synthetic construct
  source 1..75: mol_type = other DNA
ggtgattaacaaggaaaaacatatcacccgaaggggatacacgctctgctttctcagtaaactgcaggatagtct

SEQ ID NO: 293378 - DNA, 75 bp, synthetic construct
  source 1..75: mol_type = other DNA
cgggttactcgttgtgtctgctggagcgacttcaggatgcgctacgccgtcgtgacatctggttggaaaacagcg

SEQ ID NO: 293379 - DNA, 75 bp, synthetic construct
  source 1..75: mol_type = other DNA
atttggtgattttccatggtctttccgcctgaagcgtctgctatatacccgggcgtggctcagtaatgagcgacc

SEQ ID NO: 293380 - DNA, 75 bp, synthetic construct
  source 1..75: mol_type = other DNA
gaattaccttcgtgcagaaacgctggtcagcgccaatgcccgcctggttgattttcagtccacactggagcttgc

SEQ ID NO: 293381 - DNA, 75 bp, synthetic construct
  source 1..75: mol_type = other DNA
actcaggcaatcattgaagtggggcgcatcaacaaaacgctgtatctgcttaattatattgatgatgaagattac

SEQ ID NO: 293382 - DNA, 75 bp, synthetic construct
  source 1..75: mol_type = other DNA
attcatttagctgatttatctccaacggcggttaatcaaatcggtaaaaaaggcggtgccgaccttactatttca

SEQ ID NO: 293383 - DNA, 75 bp, synthetic construct
  source 1..75: mol_type = other DNA
gatgacgcgctggttaactccggggatgatactggtagtcagaatgttgattctgacattggcgatattgctgat

SEQ ID NO: 293384 - DNA, 75 bp, synthetic construct
  source 1..75: mol_type = other DNA
gcgcagattatccagcaggcaggtaactccgtgctgtccaaagctaaccaggttccgcagcaggttctgtctctg

SEQ ID NO: 293385 - DNA, 75 bp, synthetic construct
  source 1..75: mol_type = other DNA
caacgtacagaccccagctggcgaagcaacagaaatctatgttgtctcttctggttctgacaactactcagtatc

SEQ ID NO: 293386 - DNA, 75 bp, synthetic construct
  source 1..75: mol_type = other DNA
gtgtaaaggttctggccgaaaataaaactctcagcattcaggttggtgcgaatgacaatgaagttattaaaatta

SEQ ID NO: 293387 - DNA, 75 bp, synthetic construct
  source 1..75: mol_type = other DNA
tctaaaaatgctctcgaaactagcgaagcgatcactcagttgccgaacggtgagaatgccccaatcgctgtgaag

SEQ ID NO: 293388 - DNA, 75 bp, synthetic construct
  source 1..75: mol_type = other DNA
tcgtgaactgaccgttcaggccactaccggtactaactctgattctgacctatcttcaatccaggacgaaatcaa

SEQ ID NO: 293389 - DNA, 75 bp, synthetic construct
  source 1..75: mol_type = other DNA
aaacggtggcatcacgttttgatcgcaataccgccgtggacatctgcaatgaaggtaaacatccttcgctgacca

SEQ ID NO: 293390 - DNA, 75 bp, synthetic construct
  source 1..75: mol_type = other DNA
gtgtacgatgctgacggtcggatacagcgagcaggttactcgttgtgtctgctggagcgacttcaggatgcgcta

SEQ ID NO: 293391 - DNA, 75 bp, synthetic construct
  source 1..75: mol_type = other DNA
aatctggcccgttacgcaggcatggcgtcggtaaaatatatcgcgcgaatgccacagcagagaaagctggccgta

SEQ ID NO: 293392 - DNA, 75 bp, synthetic construct
  source 1..75: mol_type = other DNA
gcgtgagttgaccgttcaggcgacgaccgggactaactctgattctgacctgtcttcaatccaggacgaaatcaa

SEQ ID NO: 293393 - DNA, 75 bp, synthetic construct
  source 1..75: mol_type = other DNA
tgtcaccgttgatgcacgggcatatcaatatgctggggcattacacattcacgctgccggaggatattctgaagg

SEQ ID NO: 293394 - DNA, 75 bp, synthetic construct
  source 1..75: mol_type = other DNA
tccacgcatcggagcttatccgttctctgctcagaagtacccgcccgtcagggctggcgcaggcgatcatggagg

SEQ ID NO: 293395 - DNA, 75 bp, synthetic construct
  source 1..75: mol_type = other DNA
cctgccatacagctccgcaacctggcacgctatgccggaatggcatcggtgaaatatatcagcagaatgccagaa

SEQ ID NO: 293396 - DNA, 75 bp, synthetic construct
  source 1..75: mol_type = other DNA
cgttccagtgggagcctgggggattcagtatctgggttatgcaaggccacgtaacattgcatttaactacatcgt

SEQ ID NO: 293397 - DNA, 75 bp, synthetic construct
  source 1..75: mol_type = other DNA
ttttcataaacgttggtttgggagaaggctctgtattacccgttggtgtgcctgttccgtggccttcagccacac

SEQ ID NO: 293398 - DNA, 75 bp, synthetic construct
  source 1..75: mol_type = other DNA
ttcttctgaaaagtatccaaaactggcaaaggcttacccaacgttaaaattaccggatttacggggcgaatttat

SEQ ID NO: 293399 - DNA, 75 bp, synthetic construct
  source 1..75: mol_type = other DNA
acgttatggtgaaattagtggaaatgtaggtacagaaactcgtcctcgtaacatcgcttttaattatattgtgag

SEQ ID NO: 293400 - DNA, 75 bp, synthetic construct
  source 1..75: mol_type = other DNA
cctgttccgtggccttcagccactccgccaacaggatggctgaaatgcaatggtgcggctttttctgctgaagaa

SEQ ID NO: 293401 - DNA, 75 bp, synthetic construct
  source 1..75: mol_type = other DNA
gttttgatccaacgggaggtcggttcgtagttacggctgatgctttcggggaacttattacggcaaattcaattt

SEQ ID NO: 293402 - DNA, 75 bp, synthetic construct
  source 1..75: mol_type = other DNA
tgtagctaacgatgggtatgacacaaaggatgaatgggagttggccacaattttcaaaaaaacatattcacaagg

SEQ ID NO: 293403 - DNA, 75 bp, synthetic construct
  source 1..75: mol_type = other DNA
agaaagttgaaaacgctaaacccaaagaaacagactacaaactgacggatgggggaagcctgtatcttttagtta

SEQ ID NO: 293404 - DNA, 75 bp, synthetic construct
  source 1..75: mol_type = other DNA
ctgtgggacagcacctccagtcagctgacgttgagcattatgttagtaattgtgctgatatttttgcctattgtg

SEQ ID NO: 293405 - DNA, 75 bp, synthetic construct
  source 1..75: mol_type = other DNA
gatggcgtcattgatgcaatttggcgtaattttcacggcaggcatcacgctgttcccttttgtcatgccttcgag

SEQ ID NO: 293406 - DNA, 75 bp, synthetic construct
  source 1..75: mol_type = other DNA
atccagtaaaggtgcccaaaaatatgactggtgggcttatgtatcagctcgtccgcgtaatattgcatttaatta

SEQ ID NO: 293407 - DNA, 75 bp, synthetic construct
  source 1..75: mol_type = other DNA
tggcaaaggcttatccgaccaataaattaccggatttacggggcgaatttatccgtggctgggatgacggacgag

SEQ ID NO: 293408 - DNA, 75 bp, synthetic construct
  source 1..75: mol_type = other DNA
acatacggtgatggcgggattgttaaaacagatgagtcaggtgtaaaagttccatcttcactacgtgctattggc

SEQ ID NO: 293409 - DNA, 75 bp, synthetic construct
  source 1..75: mol_type = other DNA
tcgctcatgccaacgtgcgcattgccggaagcgatatcatgatgagcgatgctataccgtcaggaaaagccagct

SEQ ID NO: 293410 - DNA, 75 bp, synthetic construct
  source 1..75: mol_type = other DNA
cgctggtttgacaatcttgccgctaacggaaaaatcgaaatggcctggcaggaaactttctgggcgcatggcttt

SEQ ID NO: 293411 - DNA, 75 bp, synthetic construct
  source 1..75: mol_type = other DNA
ccaccagaactgattacgcctaaggcagcctggaagagaagcaagcaatttccgggcataagaacccacgacaga

SEQ ID NO: 293412 - DNA, 75 bp, synthetic construct
  source 1..75: mol_type = other DNA
gagggtcattggtgaaatccgtgagcgtgcgacccgccgcttatggcgaaaattggccgcgctgccaaaccgttg

SEQ ID NO: 293413 - DNA, 75 bp, synthetic construct
  source 1..75: mol_type = other DNA
ccctgataaagcataatattcccgcgcttactcgccatcgtctgagctgggttaaacaaaattatctcagggcag

SEQ ID NO: 293414 - DNA, 75 bp, synthetic construct
  source 1..75: mol_type = other DNA
atgccgttaagtccctacctctcttttgccggtaactgtgccgacgcgattgcttattatcaacgcacattgggc

SEQ ID NO: 293415 - DNA, 75 bp, synthetic construct
  source 1..75: mol_type = other DNA
cccctgattatttggatgtttttgataaagtgtatatagttacacatccagagtatgcaagtaaatattgtgctt

SEQ ID NO: 293416 - DNA, 75 bp, synthetic construct
  source 1..75: mol_type = other DNA
ttttattggcgatcctgattatgcgtttagccatcgaagcaaacgcaccgtggcgctcgatatcaaacaaacggg

SEQ ID NO: 293417 - DNA, 75 bp, synthetic construct
  source 1..75: mol_type = other DNA
attttcattgcttccctgctaccggtaaccattccgggcagcatcatcgggatgctgatcctgtttgtcctgctg

SEQ ID NO: 293418 - DNA, 75 bp, synthetic construct
  source 1..75: mol_type = other DNA
gatttatgcctgcctgtatgcaggcattttcattgcttccctgctaccggtaaccattccgggcagcatcatcgg

SEQ ID NO: 293419 - DNA, 75 bp, synthetic construct
  source 1..75: mol_type = other DNA
atgaacggttatctcaattgcgaagatttaatcgatccggtggtgacctttgccaacagcccggaaagctacatg

SEQ ID NO: 293420 - DNA, 75 bp, synthetic construct
  source 1..75: mol_type = other DNA
cgcgaatgcggcgatcaattcttgcgttattttctgcgtggactggctgcgcgccagcatgtgaagaaaaactaa

SEQ ID NO: 293421 - DNA, 75 bp, synthetic construct
  source 1..75: mol_type = other DNA
ctgctaaaattgcattattaggtctaaaaaaaatattggatgctaataaaatacagttttttttagttagcggaa

SEQ ID NO: 293422 - DNA, 75 bp, synthetic construct
  source 1..75: mol_type = other DNA
aaactaacgccgtttccaatctggtggtggataattttagacaagatgaatacaaagacaatgaaagtggaaaaa

SEQ ID NO: 293423 - DNA, 75 bp, synthetic construct
  source 1..75: mol_type = other DNA
aataaaaaaaacaccccacaagcaaggagaaggtaaaccctcctgggttgcaggagaaaaactaaaccaaactat

SEQ ID NO: 293424 - DNA, 75 bp, synthetic construct
  source 1..75: mol_type = other DNA
gcgggcttcttgcgcattaaccatggtgataacccgctggacgcctctaccgttcacccggaagcctatccggtg

SEQ ID NO: 293425 - DNA, 75 bp, synthetic construct
  source 1..75: mol_type = other DNA
gaaaccgcaggaaacgtttgagagcgggattcataaaacggtggaatggtacctgtccaatacaaaatgggttga

SEQ ID NO: 293426 - DNA, 75 bp, synthetic construct
  source 1..75: mol_type = other DNA
catttagttcgcgcgtggctgcgcacgtatggcatgccaacgatggtgactaactgctcgaacaactatggcccg

SEQ ID NO: 293427 - DNA, 75 bp, synthetic construct
  source 1..75: mol_type = other DNA
ctggcggccagcatgtatccggatcagtcgctctatccggcaaactcggtgccagctgtggtggagcggatcaac

SEQ ID NO: 293428 - DNA, 75 bp, synthetic construct
  source 1..75: mol_type = other DNA
caatgccccggcggatagctggcgcaaaggcgtggtgagctggacgtggcgcatcaaggtgctgatgcatctgga

SEQ ID NO: 293429 - DNA, 75 bp, synthetic construct
  source 1..75: mol_type = other DNA
aaatcgatccgaaatctatcggcgtaggtcagtatcagcatgacgtcagccagacgcaactggcccgcaaactgg

SEQ ID NO: 293430 - DNA, 75 bp, synthetic construct
  source 1..75: mol_type = other DNA
gacactttgtttgaagaacaaactaatatccgttataccgtttttataaaagacagtgtatttgatgaatactct

SEQ ID NO: 293431 - DNA, 75 bp, synthetic construct
  source 1..75: mol_type = other DNA
ggcagtatcgatctgggcagtacgggggatattccgccaatctttgcccaggctgccggagccgatctggtgtac

SEQ ID NO: 293432 - DNA, 75 bp, synthetic construct
  source 1..75: mol_type = other DNA
ttatgaaaatcatctgctgccgaaaaaagtcgatattcgccagcgcatctggcaccccactcaactggaaggaaa

SEQ ID NO: 293433 - DNA, 75 bp, synthetic construct
  source 1..75: mol_type = other DNA
tcaaactcattttattcaaagtcttaatgttgataatattgacgatctccgtaatgtattttctgatagcttcac

SEQ ID NO: 293434 - DNA, 75 bp, synthetic construct
  source 1..75: mol_type = other DNA
atgaagccagtgctgaccatcaataggaggtttttacaatatggtaatgatccggctcataccgccacaggcagc

SEQ ID NO: 293435 - DNA, 75 bp, synthetic construct
  source 1..75: mol_type = other DNA
tacaagtcggggacctttgcgacggaggcaatccgctggcctgaaagtgtggatgaacacaaaaaggccaacgcc

SEQ ID NO: 293436 - DNA, 75 bp, synthetic construct
  source 1..75: mol_type = other DNA
attcaggacgtactggaaaccttcaccgaggccgatgcgttaactcgcagtcaacgcgaacagagtatcgccttg

SEQ ID NO: 293437 - DNA, 75 bp, synthetic construct
  source 1..75: mol_type = other DNA
tagccatttggcctcatacacagcaaacccagaactatataatcttgggttcggacttgggggaagttatttagc

SEQ ID NO: 293438 - DNA, 75 bp, synthetic construct
  source 1..75: mol_type = other DNA
atttatcaatcagtaaaactacaactattgtcaggggggtataatgttacctatctattcagccagttaataata

SEQ ID NO: 293439 - DNA, 75 bp, synthetic construct
  source 1..75: mol_type = other DNA
cgtatttccagtcatcaatgacatttcattacaggattatcaattcttactgaaagttgccgaagaagcagataa

SEQ ID NO: 293440 - DNA, 75 bp, synthetic construct
  source 1..75: mol_type = other DNA
attatcgcccagctaccggaaggccagtttaccgaaagcctggtcgcgcagctgatggaaaaagtgatgaaggaa

SEQ ID NO: 293441 - DNA, 75 bp, synthetic construct
  source 1..75: mol_type = other DNA
tctgaaactagtaagcatatttctcgaggctgaagatgacgctcaaataatttttgaaacattaaatggcagagg

SEQ ID NO: 293442 - DNA, 75 bp, synthetic construct
  source 1..75: mol_type = other DNA
cttaaggataaatgggatgagggtgaaatcctggagcggggtaaaaagttgggggaaattgcattgaaagtatgg

SEQ ID NO: 293443 - DNA, 75 bp, synthetic construct
  source 1..75: mol_type = other DNA
gtgccgggtttattggctcggcgctggtgcgttatatcatcaacgaaacgagcgacgcggtggtagtggtcgata

SEQ ID NO: 293444 - DNA, 75 bp, synthetic construct
  source 1..75: mol_type = other DNA
atggatggtaaagcctggaagcagttgaagcgttttaaaaaattctggacggcactggatacgcgccgtggctca

SEQ ID NO: 293445 - DNA, 75 bp, synthetic construct
  source 1..75: mol_type = other DNA
atgagtcgtttatcccacctatcggaacatagcgccgatgttgtgtgcatagggccatcaaacctgaatacgcgt

SEQ ID NO: 293446 - DNA, 75 bp, synthetic construct
  source 1..75: mol_type = other DNA
tgttttgccccgcgtaaatgagaaggtcctgatggttaatctggcggcaaatgtggaaattgtggggcgtttcgt

SEQ ID NO: 293447 - DNA, 75 bp, synthetic construct
  source 1..75: mol_type = other DNA
tttgcaggttccggcgttggtaaaagtacgcttttggggatgatttgtaatggcgcatctgcggatattattgtc

SEQ ID NO: 293448 - DNA, 75 bp, synthetic construct
  source 1..75: mol_type = other DNA
ttgtttgtctacaaaggacaatacatcgatccagagacaggcactgaaaagcgttatatgccggatagcacgatg

SEQ ID NO: 293449 - DNA, 75 bp, synthetic construct
  source 1..75: mol_type = other DNA
cgacagagtcttgttgattatatcgactcgcttcaacccggcactttcaatcatgagagcttcaatcatgagaaa

SEQ ID NO: 293450 - DNA, 75 bp, synthetic construct
  source 1..75: mol_type = other DNA
ggaaaatgccctttcagtaaactgtcagtgccggatgctcacccgtgtccggcgcacgcactccacctcacccgt

SEQ ID NO: 293451 - DNA, 75 bp, synthetic construct
  source 1..75: mol_type = other DNA
caaacaaccctgaataacggtaccaacaccattccgttccaggcgcgttattatgcaatcggcgaggcaaccccg

SEQ ID NO: 293452 - DNA, 75 bp, synthetic construct
  source 1..75: mol_type = other DNA
cgcttcgccaggtgtgcaagctgtcggcgcgtaaacaaaggcaggtgcaggagtttattggggtgattgcgggta

SEQ ID NO: 293453 - DNA, 75 bp, synthetic construct
  source 1..75: mol_type = other DNA
gggcactttcaaccctgagagcttcaatcatgagaaagagcatgttaaatctgtaattaattctcttgttttgaa

SEQ ID NO: 293454 - DNA, 75 bp, synthetic construct
  source 1..75: mol_type = other DNA
agaacccccgccatacttaccgccgcgccatttcgcggagtgccacaaccggaagcgcacggtcgacgaaaattt

SEQ ID NO: 293455 - DNA, 75 bp, synthetic construct
  source 1..75: mol_type = other DNA
cattggttattctgaatgctctggaaggtaaagcattacctatttatggtaaaggggatcaaattcgcgattggt

SEQ ID NO: 293456 - DNA, 75 bp, synthetic construct
  source 1..75: mol_type = other DNA
aaaagctgagcaatcgcggccgtttcgcctggcaatcattcagttaggaacctatgacggcactgtctataacgc

SEQ ID NO: 293457 - DNA, 75 bp, synthetic construct
  source 1..75: mol_type = other DNA
gatgaatccccaggatgcgcatagcgcctatattcgtggtgaagtggagttagtgcgtattcgtgatgccgaagg

SEQ ID NO: 293458 - DNA, 75 bp, synthetic construct
  source 1..75: mol_type = other DNA
gacgtcgcagatccataaaaaagataaccatatccgcggacaggcgcgtttttgcccgcataagcggttgaataa

SEQ ID NO: 293459 - DNA, 75 bp, synthetic construct
  source 1..75: mol_type = other DNA
gaccgtcgctacgccattgatgccagcaaaatgagccacgagctgaactggcagccgcaggagaccttcgagtcc

SEQ ID NO: 293460 - DNA, 75 bp, synthetic construct
  source 1..75: mol_type = other DNA
ctggaagaaggcgtgaatttgttgccgggattttcgccggagttgcaaggtgtctatagcgaaaccgatgcggat

SEQ ID NO: 293461 - DNA, 75 bp, synthetic construct
  source 1..75: mol_type = other DNA
cctatgatggcactatctacaacgcccgccaggtgatcgataccattgggcatctgtgtgattacattctgtttg

SEQ ID NO: 293462 - DNA, 75 bp, synthetic construct
  source 1..75: mol_type = other DNA
gtggccataacgagaagaaaaatctcgatgttgtacataccatctgcgacctgctggatgagatcgtacctaaag

SEQ ID NO: 293463 - DNA, 75 bp, synthetic construct
  source 1..75: mol_type = other DNA
cctatggcctgccgaccatcgtcaccaactgctccaacaactacggcccgtatcacttccctgagaagctgatcc

SEQ ID NO: 293464 - DNA, 75 bp, synthetic construct
  source 1..75: mol_type = other DNA
ggcatccgcaaaaccgtgcagtggtatctggataaccagcagtgggtcaacaacgtgaaaagcggcagttatcag

SEQ ID NO: 293465 - DNA, 75 bp, synthetic construct
  source 1..75: mol_type = other DNA
agatatgtctttgagcatgcggacatttgcgacaagagtgccatggatcgtatctttgctgagcataagccggat

SEQ ID NO: 293466 - DNA, 75 bp, synthetic construct
  source 1..75: mol_type = other DNA
ccggctttatcggctcagcagtggtacgacatattattaaaaatacccaggatgaagtcgtcaatgtggataaac

SEQ ID NO: 293467 - DNA, 75 bp, synthetic construct
  source 1..75: mol_type = other DNA
cgctattcttttgagcatgcagatatatgtgacttagaagctatggtgcgaatcttcaatgaatatcaacctgat

SEQ ID NO: 293468 - DNA, 75 bp, synthetic construct
  source 1..75: mol_type = other DNA
tgaaaaatgaaaagggcgataaacttggttcagtgacagtaaatgcatcttatgccggtgcggttatggttggta

SEQ ID NO: 293469 - DNA, 75 bp, synthetic construct
  source 1..75: mol_type = other DNA
gttgtcatccggagagaagcatcttttgcgggcatttgagactggcgatattcccttgtatcttgctgtggaaat

SEQ ID NO: 293470 - DNA, 75 bp, synthetic construct
  source 1..75: mol_type = other DNA
actgaaccggtatggggtggtgtcggtgttatcgagtgcatcgctcccgcgaaagacagcgttaacggggcggtt

SEQ ID NO: 293471 - DNA, 75 bp, synthetic construct
  source 1..75: mol_type = other DNA
gctgaaaaatggcacgattggtattaccggcctgatgcagggatgcccgaatggtgtacagacgctcctgggcag

SEQ ID NO: 293472 - DNA, 75 bp, synthetic construct
  source 1..75: mol_type = other DNA
gcgtacgacaaagtgatcgtcacggttggtgctgacggcaatgccaccggagccagcgttgaatttatcggaaaa

SEQ ID NO: 293473 - DNA, 75 bp, synthetic construct
  source 1..75: mol_type = other DNA
ggtagcgacattaatggatttaataattcattaaagaatatgactgaaaataaaaccaaactgaccattactgta

SEQ ID NO: 293474 - DNA, 75 bp, synthetic construct
  source 1..75: mol_type = other DNA
ccgaggagctaaaacgccttggcgcggaaattgttgatctggggaaaaacgcgctggataagatcccgttagatg

SEQ ID NO: 293475 - DNA, 75 bp, synthetic construct
  source 1..75: mol_type = other DNA
ctgatccgcaacgcgaagaaagagaaagaagggaataagccgccgaaatccgcgcgacagattttccagtatctg

SEQ ID NO: 293476 - DNA, 75 bp, synthetic construct
  source 1..75: mol_type = other DNA
atgattccctcactcagggaaacggcatcagcgcaggctctccagcatcgtttctgccatcacccacaatgcgcg

SEQ ID NO: 293477 - DNA, 75 bp, synthetic construct
  source 1..75: mol_type = other DNA
gaaagtggatattaagctgctgatggtttcagttgacggaaacctgacggtgaaaaaagaggatggcggtaacgt

SEQ ID NO: 293478 - DNA, 75 bp, synthetic construct
  source 1..75: mol_type = other DNA
gtttcagttgacggaaacctgacggtgaaaaaagaggacggcggtaacgttgtctgggaaatcggtaagccgtgc

SEQ ID NO: 293479 - DNA, 75 bp, synthetic construct
  source 1..75: mol_type = other DNA
tgagctcgcccagcgtattaagatggaaggtcgtcgccgccagttgcagctcatcggtaagatgctgcgccagcg

SEQ ID NO: 293480 - DNA, 75 bp, synthetic construct
  source 1..75: mol_type = other DNA
agattgaatgctgggtcaaagccggttctcagcagtactttacaagggatatagctcttggccccgacacaaaac

SEQ ID NO: 293481 - DNA, 75 bp, synthetic construct
  source 1..75: mol_type = other DNA
ccaattcgctggggcgaggcgcgcaactgctgcaacttagccacctgcgcttgcgactgttaccggaaaaggcgg

SEQ ID NO: 293482 - DNA, 75 bp, synthetic construct
  source 1..75: mol_type = other DNA
ggctgagcgattgacgggcagtgataaacacggccatgaggcggcggaagtgtcggattacctgctattgcaaat

SEQ ID NO: 293483 - DNA, 75 bp, synthetic construct
  source 1..75: mol_type = other DNA
ccagaggggcgggttgatattgacgaagatttgatcccgccggtggtgaactatcaggcaagttcactgatatgt

SEQ ID NO: 293484 - DNA, 75 bp, synthetic construct
  source 1..75: mol_type = other DNA
acagattgcctaatggacgggtttttataagcaacctcgcaggctttcatcacttcattaatgagcaagagctgc

SEQ ID NO: 293485 - DNA, 75 bp, synthetic construct
  source 1..75: mol_type = other DNA
tacggtagtgatgaaagtcgtatgcttcagaaagtaaacccggaagcagatttcagtgcaggtggatttgcccct

SEQ ID NO: 293486 - DNA, 75 bp, synthetic construct
  source 1..75: mol_type = other DNA
ttgagcactcggctgctattcatctcaagcgaattttcaatccaggcttcagtggttatgcagatctaaaatcgc

SEQ ID NO: 293487 - DNA, 75 bp, synthetic construct
  source 1..75: mol_type = other DNA
tgtttaaaggcgggatgaaacgtgagcttgaggaacaaatcaagacacaggtcagccaactggaaaaggccgagc

SEQ ID NO: 293488 - DNA, 75 bp, synthetic construct
  source 1..75: mol_type = other DNA
tgaaaacggtcattcagggagaggaaaggcttgctcgtttaggggatgccaatcccaatgcgctcaaagaacata

SEQ ID NO: 293489 - DNA, 75 bp, synthetic construct
  source 1..75: mol_type = other DNA
aatatcatcccttcggctatagcattacttgtgggattcactgacgcagtgaccggaggattccttacttatttc

SEQ ID NO: 293490 - DNA, 75 bp, synthetic construct
  source 1..75: mol_type = other DNA
ggagtgaaggacaatttttgctgccacagatgtttcagcagcaggaacgctatctggaacatgtcattcattatc

SEQ ID NO: 293491 - DNA, 75 bp, synthetic construct
  source 1..75: mol_type = other DNA
attcgcactgttacagcttatttccggcagtctgtttttttcttcccttcaccatagccagaagagctttgtggt

SEQ ID NO: 293492 - DNA, 75 bp, synthetic construct
  source 1..75: mol_type = other DNA
agggagattgatgcgcgtattctggagcaaaaaagtgtgctggaaaccgctgaacatgaaaggaatgaattcagg

SEQ ID NO: 293493 - DNA, 75 bp, synthetic construct
  source 1..75: mol_type = other DNA
tgagcagactgtcattcgcgcaccaagcaatggctacgttactcaggtactgatccgcccaggtacatacgcagc

SEQ ID NO: 293494 - DNA, 75 bp, synthetic construct
  source 1..75: mol_type = other DNA
aagggtcttatcgcgatcaaattatctacgttactgaccgtcctgggcacgatcgccgctatgcgattgatgcat

SEQ ID NO: 293495 - DNA, 75 bp, synthetic construct
  source 1..75: mol_type = other DNA
gcgatcatttagtccgcgcgtggaaacgtacctatggtttaccgaccattgtgactaactgttcgaataactacg

SEQ ID NO: 293496 - DNA, 75 bp, synthetic construct
  source 1..75: mol_type = other DNA
acgaagtatatggcgacttaccccatcctgatgaagtaaatagtaatgaagcgttaccgctatttacggaaatga

SEQ ID NO: 293497 - DNA, 75 bp, synthetic construct
  source 1..75: mol_type = other DNA
tgtatgtggaagaccatgcacgtgcgctatataccgtcgtcaccgaaggtaaagtcggtgaaacctataacatcg

SEQ ID NO: 293498 - DNA, 75 bp, synthetic construct
  source 1..75: mol_type = other DNA
gacagtgttgttaatgtcgataaattgacttacgccggaaacctggaatcactcgctgaagtttctgattctgaa

SEQ ID NO: 293499 - DNA, 75 bp, synthetic construct
  source 1..75: mol_type = other DNA
cgtgcgttatataccgtcgtaaccgaaggtaaagcgggtgaaacttataacattggtggacacaacgaaaagaaa

SEQ ID NO: 293500 - DNA, 75 bp, synthetic construct
  source 1..75: mol_type = other DNA
atggtgacgaaaaccatcactgaacagcgtgcggaagtacgtatttttgccggtaatgatccggctcacactgcc

SEQ ID NO: 293501 - DNA, 75 bp, synthetic construct
  source 1..75: mol_type = other DNA
ccactgagtcgctggtctggcctggttcggtggatgcggtgaaaaaagccaacgcatttgtgggaagtgccatca

SEQ ID NO: 293502 - DNA, 75 bp, synthetic construct
  source 1..75: mol_type = other DNA
taaccttagcgtaaaccgttccgttcagaatgctgtatttctgaaaaaacgtgatgctctcatcgtccacaccaa

SEQ ID NO: 293503 - DNA, 75 bp, synthetic construct
  source 1..75: mol_type = other DNA
gcgcgacaaggttgatcacgagctaacaggcaaagacggcggcgcaatccagattgaaacatcaccgatgagcac

SEQ ID NO: 293504 - DNA, 75 bp, synthetic construct
  source 1..75: mol_type = other DNA
gccgcatccgtactcagggtcttggcccggctaatccgatcgccagcaacagcaccgctgaaggtaaggcgcaaa

SEQ ID NO: 293505 - DNA, 75 bp, synthetic construct
  source 1..75: mol_type = other DNA
acgaaaaccatcactgaacagcgtgcggaagtacgtatttttgccggtaatgatccggctcataccgccacaggc

SEQ ID NO: 293506 - DNA, 75 bp, synthetic construct
  source 1..75: mol_type = other DNA
attgttggcacttacgtccttttagaagccgctcgtaattactggtctgcgttggaggatgaaaagaaaaaaagg

SEQ ID NO: 293507 - DNA, 75 bp, synthetic construct
  source 1..75: mol_type = other DNA
tatcaggttcgtcatgtgaccgggatggcggtaaattaccggaaatatgagatctcccgtcttaaccttgattta

SEQ ID NO: 293508 - DNA, 75 bp, synthetic construct
  source 1..75: mol_type = other DNA
ggtggtgaaccaggacggcgagctggatgtcagcggcggtggtcacggggttgatatcaccggcgacagcgcaac

SEQ ID NO: 293509 - DNA, 75 bp, synthetic construct
  source 1..75: mol_type = other DNA
tcgtcaacaacgacgggacagcacgatccttgatggcggcaccggaacccgcattacgggtgatgatgcgacggc

SEQ ID NO: 293510 - DNA, 75 bp, synthetic construct
  source 1..75: mol_type = other DNA
caaactgaccagtattttacctgtcgtgccaggcggttcttatcaggcgcagggggtattgcaatcattaacggt

SEQ ID NO: 293511 - DNA, 75 bp, synthetic construct
  source 1..75: mol_type = other DNA
gttatgattttatatgtttttataagtttaaatctccaaaatgctgttatcaacgcttacatgaaaaatgaagtt

SEQ ID NO: 293512 - DNA, 75 bp, synthetic construct
  source 1..75: mol_type = other DNA
aagattttataaattattttttaggcgatctttttgtcaaaggatttatgtttatctcgctacctctactttcga

SEQ ID NO: 293513 - DNA, 75 bp, synthetic construct
  source 1..75: mol_type = other DNA
gagtccataaaaaagggtaaggccgtcgctgatgcagaagttagtgatcgtctttatcaacgcgctatgggcttc

SEQ ID NO: 293514 - DNA, 75 bp, synthetic construct
  source 1..75: mol_type = other DNA
gcgagagaagcaggacgtcaaccatacatctgatgacggctccatgactccaaaagctccagtgtataacattgt

SEQ ID NO: 293515 - DNA, 75 bp, synthetic construct
  source 1..75: mol_type = other DNA
gtcgcccatcggcttacaaaccagagtatgccgagcaggcgagaaaactttgtctgttagggcatacagatgcgg

SEQ ID NO: 293516 - DNA, 75 bp, synthetic construct
  source 1..75: mol_type = other DNA
ggcattcagatcgacggcgacaaggcggtcgtgaacaacgacggtgacagtgccatcagtaacggcggcaccggc

SEQ ID NO: 293517 - DNA, 75 bp, synthetic construct
  source 1..75: mol_type = other DNA
tttctggcgttataaagaagacagcaaaggtaagccgaagaaagaagaagacgccgtcgttgacgacctgctggc

SEQ ID NO: 293518 - DNA, 75 bp, synthetic construct
  source 1..75: mol_type = other DNA
ttgcgacggaggcaatccactggcctgaaagtgtggatgaacacaaaaaggccaacgcctttgctggcagtgccc

SEQ ID NO: 293519 - DNA, 75 bp, synthetic construct
  source 1..75: mol_type = other DNA
gagagtccacgcgtccaggtgcagcggaagtgagtgttgaagaagagttgcaacgtgttattccggtggttgagg

SEQ ID NO: 293520 - DNA, 75 bp, synthetic construct
  source 1..75: mol_type = other DNA
tgcggtcattgccgcaatgcaaggcgcgcacatcattcgtgttcatgacgtcaaagaaaccgtagaaacgatgcg

SEQ ID NO: 293521 - DNA, 75 bp, synthetic construct
  source 1..75: mol_type = other DNA
ctgttggtgggtatgtcacgaaaatcgatgattgggcagctgctgaacgtggggccgtccgagcgcctgagcggt

SEQ ID NO: 293522 - DNA, 75 bp, synthetic construct
  source 1..75: mol_type = other DNA
ctggcggataattttcatattcctgccaccaacatgaatccagtaatctttgcgggcgataaaccagggcaaaat

SEQ ID NO: 293523 - DNA, 75 bp, synthetic construct
  source 1..75: mol_type = other DNA
aaacagttccgctgttgcccttgcctcgtcaccttcaccgcttaatcctggtactaacgttgccagacttgcaga

SEQ ID NO: 293524 - DNA, 75 bp, synthetic construct
  source 1..75: mol_type = other DNA
cgccatcatcatgctcgatcgcatagatacgctggaaagttgcgatgatgaccgtattgaggcggttaaggctgt

SEQ ID NO: 293525 - DNA, 75 bp, synthetic construct
  source 1..75: mol_type = other DNA
ggtcagccggaactcgcactgagcgatctcacgcgctcaatcaatattgcgccttctgccaacgcttacgttgcg

SEQ ID NO: 293526 - DNA, 75 bp, synthetic construct
  source 1..75: mol_type = other DNA
tgggtagatgagctggataatagtttcccatatttcacagagaacacatgcccagtatgcaggaagaacggaata

SEQ ID NO: 293527 - DNA, 75 bp, synthetic construct
  source 1..75: mol_type = other DNA
atttatggctgaaaacagagcgaagatgcccgctcaccgttttgctattaatctgtcgccaacctcggtatgtca

SEQ ID NO: 293528 - DNA, 75 bp, synthetic construct
  source 1..75: mol_type = other DNA
tttgcggcctgttctggctgcgagttcgtgtttccctggcgcgcgctgaacgtaaaataaagcgactggaaaacc

SEQ ID NO: 293529 - DNA, 75 bp, synthetic construct
  source 1..75: mol_type = other DNA
caacaggtaacatttaattatctgttagcgcaaggggagtatcgtatctctactttgctggcggtattgtttgct

SEQ ID NO: 293530 - DNA, 75 bp, synthetic construct
  source 1..75: mol_type = other DNA
taacaataatgtcggcggcgcagcgccagggaaaagctatcgtagctacggacaactggaagccgagtaccgcat

SEQ ID NO: 293531 - DNA, 75 bp, synthetic construct
  source 1..75: mol_type = other DNA
caggcattgagtgccgtttgcttattgttcgctctaaacagttctgctgttgcgttagcctcttcaccttcaccg

SEQ ID NO: 293532 - DNA, 75 bp, synthetic construct
  source 1..75: mol_type = other DNA
catcctttcagcagggaaagaattgtacaagaaatgattgttggcagatcacaatgtcattttgatgagaaaaat

SEQ ID NO: 293533 - DNA, 75 bp, synthetic construct
  source 1..75: mol_type = other DNA
ttgaatgcccgataacgctatgcataccaaaacaaggcatttttgtcaagaacgcactgaactcaaacatttgct

SEQ ID NO: 293534 - DNA, 75 bp, synthetic construct
  source 1..75: mol_type = other DNA
caagaagcacactacctgaaaatgaactagaggccttacgttatatcgtgcgacataatcaaaatgatgtcgtaa

SEQ ID NO: 293535 - DNA, 75 bp, synthetic construct
  source 1..75: mol_type = other DNA
atagttcttcctgctccgaaggtgttcagttctgaatcattgccgcacaattttaatatggctgctgtcggtgtg

SEQ ID NO: 293536 - DNA, 75 bp, synthetic construct
  source 1..75: mol_type = other DNA
ttactgcccgctctgtgccggataaaaccgtatccgatgattttatgcatgctgttctcagtaactgtaccacaa

SEQ ID NO: 293537 - DNA, 75 bp, synthetic construct
  source 1..75: mol_type = other DNA
ccctgatccctatcgtaaaagccaggacgcatttgaacatgtttacggcatgttggagcgcgccagtcaggaatg

SEQ ID NO: 293538 - DNA, 75 bp, synthetic construct
  source 1..75: mol_type = other DNA
ataagctgtagtgagcgaatgccccctcaagatgattggattttaatttattcaaagcacggcgagtatatggca

SEQ ID NO: 293539 - DNA, 75 bp, synthetic construct
  source 1..75: mol_type = other DNA
ctacgtaattgcgatgtaatcagatggatgccgattcctgaaccaccgcagcaggatgtgaatgatgccgccagt

SEQ ID NO: 293540 - DNA, 75 bp, synthetic construct
  source 1..75: mol_type = other DNA
gatatacaaatgtcgaaaactatataccactccgccagcgccgatagcgttagaggccattgaaaacgcaattga

SEQ ID NO: 293541 - DNA, 75 bp, synthetic construct
  source 1..75: mol_type = other DNA
ttcttatttatcgcctttatcgcctcgcatgtggtttatatctgggccgatgccaacttctatcgcccgatcacc

SEQ ID NO: 293542 - DNA, 75 bp, synthetic construct
  source 1..75: mol_type = other DNA
cagatcaaccgcgtgctcaatgcactgcgtgattctggcaaactggacaatacggtggtgattatcactgccggg

SEQ ID NO: 293543 - DNA, 75 bp, synthetic construct
  source 1..75: mol_type = other DNA
actggcagctaatgttcatcagtgtgccggttattttattgcttgaactggtgtttgcgacgtggagctggcaaa

SEQ ID NO: 293544 - DNA, 75 bp, synthetic construct
  source 1..75: mol_type = other DNA
tattattattatcattctttgctggggaggttacagagtctttactccccggcgtaacaacgtttcacacggcga

SEQ ID NO: 293545 - DNA, 75 bp, synthetic construct
  source 1..75: mol_type = other DNA
tcagtattgcgcagtatatgccgacgctgtggctgggcgcggggcgttttccgacgctcaccactgaggcggtgg

SEQ ID NO: 293546 - DNA, 75 bp, synthetic construct
  source 1..75: mol_type = other DNA
gcagcgtagcggcgcttctggccataacggtaaaaataacgaaggaggtatgttctctggccttcgtggcaacat

SEQ ID NO: 293547 - DNA, 75 bp, synthetic construct
  source 1..75: mol_type = other DNA
tcccggtacagaccggccttcacctggtgttttctgctgcgttaatccgccgtgcactgattgttgcagcggtct

SEQ ID NO: 293548 - DNA, 75 bp, synthetic construct
  source 1..75: mol_type = other DNA
tccctgtgcagaccggccttcaccttgtattttctgctgcgttaatccgccgtgcactgattgttgcagcggtct

SEQ ID NO: 293549 - DNA, 75 bp, synthetic construct
  source 1..75: mol_type = other DNA
ggaagaggcgcgatgctgcgcggcggcaatgattcgtcgggctatcatcgttgcagccgtctgcctttccgtcgc

SEQ ID NO: 293550 - DNA, 75 bp, synthetic construct
  source 1..75: mol_type = other DNA
ggtactgcgttactgcatgcggattcatgagctggaagttccgcaccttacaggaaggcatcaagtgggctttcg

SEQ ID NO: 293551 - DNA, 75 bp, synthetic construct
  source 1..75: mol_type = other DNA
aaatagtaacgtaccttaacgattatttagtagaagccgtaagctgtcatcttggtgtgttctctctatcaaaaa

SEQ ID NO: 293552 - DNA, 75 bp, synthetic construct
  source 1..75: mol_type = other DNA
tgaggatgattacagcaaactgctttccccggagtttaaacagttctttagccaatacagtattgctgtgggatc

SEQ ID NO: 293553 - DNA, 75 bp, synthetic construct
  source 1..75: mol_type = other DNA
caggctgccgagggactgaaaaaggttcgtgagcagatggacgaagttatcggacgtcagcaactgattagcaag

SEQ ID NO: 293554 - DNA, 75 bp, synthetic construct
  source 1..75: mol_type = other DNA
ccgataaatgcccctacttctacttttctgatctggtggtcggtgaaaccacctgcgacggcaaaaagaaaatgt

SEQ ID NO: 293555 - DNA, 75 bp, synthetic construct
  source 1..75: mol_type = other DNA
tcagcaaaaggggatgataagtttatcaccaccgactatttgcaacagtgccaaatcatgtcacttgtcaccgat

SEQ ID NO: 293556 - DNA, 75 bp, synthetic construct
  source 1..75: mol_type = other DNA
aggcgttcggtattccggcagtctggcgatgggggggcctggcggcgattcaatccttggtgcgggggctgggtc

SEQ ID NO: 293557 - DNA, 75 bp, synthetic construct
  source 1..75: mol_type = other DNA
acttcatcattcgggtagtgcgaaatccgttttatttacgtagttattattcgcaattaaaacagcaggttgatg

SEQ ID NO: 293558 - DNA, 75 bp, synthetic construct
  source 1..75: mol_type = other DNA
agaatgatgaactgatcagccccgacagcttcttgccggtcgcgcacgaatttggtttatcgtcgagtatcgaca

SEQ ID NO: 293559 - DNA, 75 bp, synthetic construct
  source 1..75: mol_type = other DNA
ccgtcagcgagcggtggtcagacgcattcaacggcttgcctatgtggacccggttgttcatctgccaaatattcg

SEQ ID NO: 293560 - DNA, 75 bp, synthetic construct
  source 1..75: mol_type = other DNA
atgtgtatccaccttaacttaatgatttttaccaaaatcattaggggattcatcagtgcagagctgggtttttac

SEQ ID NO: 293561 - DNA, 75 bp, synthetic construct
  source 1..75: mol_type = other DNA
ccgtcagcgagcggtggtcagacgcattcaacggcttgcatatgtggatccggttgttcatctgccaaacattcg

SEQ ID NO: 293562 - DNA, 75 bp, synthetic construct
  source 1..75: mol_type = other DNA
gctctgatgatcagcatgatgatgttttttagctgggctgcattaccgggtatagcattaggcatttttgttcgt

SEQ ID NO: 293563 - DNA, 75 bp, synthetic construct
  source 1..75: mol_type = other DNA
ccatattttacttaacaacgcttatcttggtttgattcgtcaatcacaacgtgcatttgatattgattattgcgt

SEQ ID NO: 293564 - DNA, 75 bp, synthetic construct
  source 1..75: mol_type = other DNA
ggcttctcatggcataaagttagttctggaagccattaatacaaaagatattcccggtttttttgttaacaacac

SEQ ID NO: 293565 - DNA, 75 bp, synthetic construct
  source 1..75: mol_type = other DNA
ttttagatctcccttttgatgttcagatgaccgaaattgagtttgatatcgatctctatcagccactaaccccct

SEQ ID NO: 293566 - DNA, 75 bp, synthetic construct
  source 1..75: mol_type = other DNA
tccactttatttacgtggctattattcgcagttaaaacagcaggttgacagaaaagtgaccaaaaaagaatttgc

SEQ ID NO: 293567 - DNA, 75 bp, synthetic construct
  source 1..75: mol_type = other DNA
ccgcccgtgtttgcgaacaggtacgcgccgctattcagtcgctgccgcgtgggcaaaaaaatgccgcgctggcga

SEQ ID NO: 293568 - DNA, 75 bp, synthetic construct
  source 1..75: mol_type = other DNA
gtttgcgaacaggtacgcgccgccattcagtcgctgccgcgcgggcaaaaaaatgccgcgctggcgatgggtctg

SEQ ID NO: 293569 - DNA, 75 bp, synthetic construct
  source 1..75: mol_type = other DNA
aaatgtaagtgacgtgctcgggaaaggatttgaagacttctctgaaggtgtttcacgcagcctggataaaacgct

SEQ ID NO: 293570 - DNA, 75 bp, synthetic construct
  source 1..75: mol_type = other DNA
tcgccattggataaaattgccggtgcggttcagaccgccagcggtgatcaaagcggcatggtacaaaacatgctg

SEQ ID NO: 293571 - DNA, 75 bp, synthetic construct
  source 1..75: mol_type = other DNA
accccagcacaccggagcaggtctccagcagcgtcaataatctgctgcgcgatgtgctgtacgcctttctgggtt

SEQ ID NO: 293572 - DNA, 75 bp, synthetic construct
  source 1..75: mol_type = other DNA
acgctgatgtcgctttcatcgcctttgcaggccggtgtcgacttcaccctctttcaatgtactgatgcggcaatc

SEQ ID NO: 293573 - DNA, 75 bp, synthetic construct
  source 1..75: mol_type = other DNA
ctgcctcttctggcaccgctgttgttggatcatggggttgagcatgtccgcattgggcgcgctgttcagcggcgg

SEQ ID NO: 293574 - DNA, 75 bp, synthetic construct
  source 1..75: mol_type = other DNA
gggaattatcggtaccttctacggtctgatgattggcctcaaccacttcgatcctagcacaccagagcaggtctc

SEQ ID NO: 293575 - DNA, 75 bp, synthetic construct
  source 1..75: mol_type = other DNA
gtagcgaagcgcgtgagcaggcggcggctgagcaacagcaacagtttatgacgtcgttacagcaaaccatgcatt

SEQ ID NO: 293576 - DNA, 75 bp, synthetic construct
  source 1..75: mol_type = other DNA
tcaacagtgatatcgtcaatcactttttcagccgtgcagcccggctgttccctgtcggtatcagccagatcatca

SEQ ID NO: 293577 - DNA, 75 bp, synthetic construct
  source 1..75: mol_type = other DNA
aaagaagcaggcgtttccagagagcaaaaagtaaaactgatgaattttaattgcgagaaacttcagtcctggtaa

SEQ ID NO: 293578 - DNA, 75 bp, synthetic construct
  source 1..75: mol_type = other DNA
cagcggcctgaactcaggcatgcgtggaatgagttcgaagaatcgttgcactcacaatatgaactggaggatggc

SEQ ID NO: 293579 - DNA, 75 bp, synthetic construct
  source 1..75: mol_type = other DNA
gggattaacattatacggtgtaggcattctcagttattacggtccgtactgggctttaccctcagctttactttc

SEQ ID NO: 293580 - DNA, 75 bp, synthetic construct
  source 1..75: mol_type = other DNA
ttaagttcttcggttgagattatcggtgaaagcgtggatacgctggaaacagtactccgtcatcgtcgcgcgtaa

SEQ ID NO: 293581 - DNA, 75 bp, synthetic construct
  source 1..75: mol_type = other DNA
aatccaggaacgttatggttatcagaaagatcaggcagaaaaagaggtcgtggattgggaaaccgcaatgaatat

SEQ ID NO: 293582 - DNA, 75 bp, synthetic construct
  source 1..75: mol_type = other DNA
cagcaatcagggtatggccccggccatcgccagtacgacgatcaataccgcgctctggttgcgcagcgctccgct

SEQ ID NO: 293583 - DNA, 75 bp, synthetic construct
  source 1..75: mol_type = other DNA
gttgactcctgaacttcatgggctgatggggcagtttcaccagtctgtcgaaagccagctagggcaggggacagt

SEQ ID NO: 293584 - DNA, 75 bp, synthetic construct
  source 1..75: mol_type = other DNA
gttcagtatctgcaagagcgtatggccgctggctctgccactggttatgtcccgtcgcaggggaacacatatggt

SEQ ID NO: 293585 - DNA, 75 bp, synthetic construct
  source 1..75: mol_type = other DNA
atctgaaacagacttagttctttgtaaaagaaatacagatattcacgtgacaggtagtgctcatgccccttcagg

SEQ ID NO: 293586 - DNA, 75 bp, synthetic construct
  source 1..75: mol_type = other DNA
atgtctgaccagaatgttaatccgtacctttccggtgctgatgctgcgccgcagcaatcgccatacatggctgca

SEQ ID NO: 293587 - DNA, 75 bp, synthetic construct
  source 1..75: mol_type = other DNA
ggccccggtcatcgccagtacgacgaacaataccgcgatctggttgcgcagcgctccgctggcaagcgcgctggc

SEQ ID NO: 293588 - DNA, 75 bp, synthetic construct
  source 1..75: mol_type = other DNA
gaaagcatggtaactggcggtaatgactccaacttattgatagtgttttatgttcagataatgcccgatgacttt

SEQ ID NO: 293589 - DNA, 75 bp, synthetic construct
  source 1..75: mol_type = other DNA
aaggattctttttgggagaaccgaaagaaatagatgcatttatttgtaaatataatcagcgtggtttctataacc

SEQ ID NO: 293590 - DNA, 75 bp, synthetic construct
  source 1..75: mol_type = other DNA
ccggtggtttctgcatcagactttactgtgtccggtgcagagcttctggttcgctggcacatgcctgcaggcgaa

SEQ ID NO: 293591 - DNA, 75 bp, synthetic construct
  source 1..75: mol_type = other DNA
ttcaaagtgcgtacgctgaagaatttcaaaggcgaactgtaccgaaaatgcatgccgggtgcgtcaaatgcagca

SEQ ID NO: 293592 - DNA, 75 bp, synthetic construct
  source 1..75: mol_type = other DNA
gtgagttggttaatctcaagccagaggatctctccgactcacttgaagcagggggtagttggggattaactaaca

SEQ ID NO: 293593 - DNA, 75 bp, synthetic construct
  source 1..75: mol_type = other DNA
agaagatgagatcctctccgaattaccagacgttaatttttcccgcctctggcgcattgccaatttagccaataa

SEQ ID NO: 293594 - DNA, 75 bp, synthetic construct
  source 1..75: mol_type = other DNA
agctctcagagtaatggaatggcagaaaggttagtgaaaacgatgaaggaagactacattgcgttcataccgaaa

SEQ ID NO: 293595 - DNA, 75 bp, synthetic construct
  source 1..75: mol_type = other DNA
agctggctgaaaaaggcgcttatgaccgcgttatggcagaaaaagcctacaacaaccagatgcaggaactaaccg

SEQ ID NO: 293596 - DNA, 75 bp, synthetic construct
  source 1..75: mol_type = other DNA
tgaaattgagcattttgatgccgccccgtctatgccggagccagaaccagaaatggccgccgatcctgaagctga

SEQ ID NO: 293597 - DNA, 75 bp, synthetic construct
  source 1..75: mol_type = other DNA
atggacgcatttgatgtactggcaaataaaggcgcggaactggtagagcagcgaaataaatgcaccgacgaaggt

SEQ ID NO: 293598 - DNA, 75 bp, synthetic construct
  source 1..75: mol_type = other DNA
agaaaggggcgtatgaccgtgtgatggcgcagaacgcttacaacaatgaaatggcggagctgaataacattcagg

SEQ ID NO: 293599 - DNA, 75 bp, synthetic construct
  source 1..75: mol_type = other DNA
cgacgccatgaacagcagttcaggtatcacttcatctgctcaatccatgctgaaggaatttcagtcgcagattga

SEQ ID NO: 293600 - DNA, 75 bp, synthetic construct
  source 1..75: mol_type = other DNA
caattgctgaagcaggagcaaacgctggcttccttaaccggcagctctggtatcggtaatttgctgaatggcgat

SEQ ID NO: 293601 - DNA, 75 bp, synthetic construct
  source 1..75: mol_type = other DNA
gtcagcttgaagaaattgctcgtggagactcaccaaaacagctaattgaagaaattggcgagcgacttctcgctg

SEQ ID NO: 293602 - DNA, 75 bp, synthetic construct
  source 1..75: mol_type = other DNA
ttactgcccgctctgtgccgggtaaaaccgtgtcggatgattttattaattctgttctcagtaactgtaccacaa

SEQ ID NO: 293603 - DNA, 75 bp, synthetic construct
  source 1..75: mol_type = other DNA
ctgaatcattgccgcacaattttaatatggcagctgtcggtgtgatgaagaagggtatgtcgatgagcttatttt

SEQ ID NO: 293604 - DNA, 75 bp, synthetic construct
  source 1..75: mol_type = other DNA
ccagccaagagcttgaaacttaccttgaagaaaactcgggtgaagacggtttactaaacgatgcgctaaacgata

SEQ ID NO: 293605 - DNA, 75 bp, synthetic construct
  source 1..75: mol_type = other DNA
cgtcatcgacgaagccgactttaacgacgaagataagctcggcaaaggcaaggaaatgattgaccgcctgagcaa

SEQ ID NO: 293606 - DNA, 75 bp, synthetic construct
  source 1..75: mol_type = other DNA
attcttccctgtgggcaagctgcgacgaactgcgtggcgggatggacgccagccagtacaaagactatgtactga

SEQ ID NO: 293607 - DNA, 75 bp, synthetic construct
  source 1..75: mol_type = other DNA
ttcatcgccgccgcctcccgttcctgtagcgtgggataaagccgctgagccattaaacacccgtttaccgcaatg

SEQ ID NO: 293608 - DNA, 75 bp, synthetic construct
  source 1..75: mol_type = other DNA
ttaggtttaggtattgctaccggtgtattaggtggtgttactgcgcttggcggcggattagcgatgaaatatgcc

SEQ ID NO: 293609 - DNA, 75 bp, synthetic construct
  source 1..75: mol_type = other DNA
atggaagcagcaaatttaagtccttctggtacagtattaccactggcagccacaatcaatggaaataatctagtg

SEQ ID NO: 293610 - DNA, 75 bp, synthetic construct
  source 1..75: mol_type = other DNA
ataaggcatatgaaacaaaagaaaaaattaaagatacgttattcataagtaataaaaaccatgtaaaagggttgg

SEQ ID NO: 293611 - DNA, 75 bp, synthetic construct
  source 1..75: mol_type = other DNA
ttgcagaaatgatcgattccccgcaacagcaggtgtttggtgaagataaatttaagcagttaccggcgcagtgtc

SEQ ID NO: 293612 - DNA, 75 bp, synthetic construct
  source 1..75: mol_type = other DNA
tcgcaaaaccaagaaagctggtgctgaactgctgaaagagaacatgaagcgcaaagagaaagagcgcacattggc

SEQ ID NO: 293613 - DNA, 75 bp, synthetic construct
  source 1..75: mol_type = other DNA
gttctgctttcctgcgtgacaaagttctgatgactccggctaaggcacgcgttatctacggctctcatttcgaag

SEQ ID NO: 293614 - DNA, 75 bp, synthetic construct
  source 1..75: mol_type = other DNA
taacaatttagcagtaataaagtcatggagcaaagctggcagttcatatgtggttgttggtaaaaataaacataa

SEQ ID NO: 293615 - DNA, 75 bp, synthetic construct
  source 1..75: mol_type = other DNA
tctgcccgctgattaaaagcagctacggctttggcaaaaccgataaatgcccctacttctacttttcggatctgg

SEQ ID NO: 293616 - DNA, 75 bp, synthetic construct
  source 1..75: mol_type = other DNA
tcgttctcagggcggttgttgctgtggctaacgcagtgatagcaatcctggaactgatccgggaactggttgact

SEQ ID NO: 293617 - DNA, 75 bp, synthetic construct
  source 1..75: mol_type = other DNA
agccgatatttcgtacatccctgtataatacagtaaaaacaatcatgcctgattcttttgatgtcgataaaatta

SEQ ID NO: 293618 - DNA, 75 bp, synthetic construct
  source 1..75: mol_type = other DNA
cgaaattggaatccagcgacgcattgttaaaccagaagtttgagacgatgcagaataaccatactcagattgctg

SEQ ID NO: 293619 - DNA, 75 bp, synthetic construct
  source 1..75: mol_type = other DNA
atggatctggagaagttcttcgaccgggtggatcacagactcctgatgacgcgtctggccagaacgataaaggac

SEQ ID NO: 293620 - DNA, 75 bp, synthetic construct
  source 1..75: mol_type = other DNA
aatgtaattaatgaagaaacattattgcaacaacctgaagaacgttttgcatggttaaggtcaaagaaagatagg

SEQ ID NO: 293621 - DNA, 75 bp, synthetic construct
  source 1..75: mol_type = other DNA
ggaagttgagatcctcaaagaagcggtggagtatggtcagttgcgaaaatggatagcgcatgcgcccttgttgcc

SEQ ID NO: 293622 - DNA, 75 bp, synthetic construct
  source 1..75: mol_type = other DNA
gaagctggtggaaaacggcaagctgaaaaccaatccaatgaaagggatggtagccgcggtttctgtcgggattgt

SEQ ID NO: 293623 - DNA, 75 bp, synthetic construct
  source 1..75: mol_type = other DNA
agatggagagagaacattcacttttatggttcgtccctcagcagatcttttccttaccccggcagacttacctgt

SEQ ID NO: 293624 - DNA, 75 bp, synthetic construct
  source 1..75: mol_type = other DNA
ggcgacactctgttttctggcggttgcggtagactattcgaaggcactgcatcacagatgtatcaatcacttaaa

SEQ ID NO: 293625 - DNA, 75 bp, synthetic construct
  source 1..75: mol_type = other DNA
caactggcaaccagtagcgattttcctcacccaccatcaccacgatcacgttggcggtgtaaaagaactggtaga

SEQ ID NO: 293626 - DNA, 75 bp, synthetic construct
  source 1..75: mol_type = other DNA
gcctgttggttcgcaatggggttgcttggcatcacaatggcggacatcaccgccatctggcacaacatcgagtcg

SEQ ID NO: 293627 - DNA, 75 bp, synthetic construct
  source 1..75: mol_type = other DNA
gtcactcgttcgtaatgggagccagtggtaaaggtaagtctgtcttctccgaacaagtacggaagaatgcgagac

SEQ ID NO: 293628 - DNA, 75 bp, synthetic construct
  source 1..75: mol_type = other DNA
accgtaaatggcgtcacccttgaacgccaattggtggcagatgcaagagaccagttggaaatgcaaacaggcgtc

SEQ ID NO: 293629 - DNA, 75 bp, synthetic construct
  source 1..75: mol_type = other DNA
aaaactaatccaatgaaagggatggtagccgcggtctctgtcgggattgtgaacggcgaagcggtttgcgatctg

SEQ ID NO: 293630 - DNA, 75 bp, synthetic construct
  source 1..75: mol_type = other DNA
tattgaagaaggcgtgccgcgcttcctgaaaggtcagggccagggctggatcaccgcagagtacggcatgctgcc

SEQ ID NO: 293631 - DNA, 75 bp, synthetic construct
  source 1..75: mol_type = other DNA
ccagtaatggttttgaagggtttaatccgacaagtcattttccgtccaatcctggcgcaccatattttaactcta

SEQ ID NO: 293632 - DNA, 75 bp, synthetic construct
  source 1..75: mol_type = other DNA
caccatgcacttatgctgacagacgtagttaaagtctctgaagatgaactgttttttattagcggtgaaagaaat

SEQ ID NO: 293633 - DNA, 75 bp, synthetic construct
  source 1..75: mol_type = other DNA
caaattaaaattaaatggactagatgccaagagggtttttagtgaagatatttcaccatttaaatacgccatatg

SEQ ID NO: 293634 - DNA, 75 bp, synthetic construct
  source 1..75: mol_type = other DNA
gcctgttcgtttggggtaatcaccgcgctggcgcttgaacacgtcgaatcaggcaaagccggtcaagaagacatc

SEQ ID NO: 293635 - DNA, 75 bp, synthetic construct
  source 1..75: mol_type = other DNA
atgttaatacgcaacaatcccatcgattcaaaacaatttcagacagatattatctccgtgaatcccccgccacct

SEQ ID NO: 293636 - DNA, 75 bp, synthetic construct
  source 1..75: mol_type = other DNA
tggtcgatgacgacatgcgcctgcgcgcgctgctggaacgttatctcaccgaacaaggcttccaggttcgaagcg

SEQ ID NO: 293637 - DNA, 75 bp, synthetic construct
  source 1..75: mol_type = other DNA
gattacattccgaaaccgtttaacccacgtgaactgctggctcgtattcgtgcggtactgcgtcgtcaggcgaac

SEQ ID NO: 293638 - DNA, 75 bp, synthetic construct
  source 1..75: mol_type = other DNA
aaatgatgttgcgaaatcttcaccagtaactattagttgcaatactgatgtgaaggcaaaggtgagtattaaagg

SEQ ID NO: 293639 - DNA, 75 bp, synthetic construct
  source 1..75: mol_type = other DNA
atgcagcgtacgggttcatttaaaattcgtggcgcatttaataaattaagttcactgaccgatgcggaaaaacgt

SEQ ID NO: 293640 - DNA, 75 bp, synthetic construct
  source 1..75: mol_type = other DNA
ttggtggcgtagggctgactcaatcactggcgctggatctggcggagtacggcattacggtgcattcgctgatgc

SEQ ID NO: 293641 - DNA, 75 bp, synthetic construct
  source 1..75: mol_type = other DNA
gattatcaggatgtgctgaatatgctgctgttctacgccagtccaaaggcatcgtactgcactggacagtcgatt

SEQ ID NO: 293642 - DNA, 75 bp, synthetic construct
  source 1..75: mol_type = other DNA
tcctatttcaatttgcaaataatctcaatataggtttttggaatggtactcaaaagcaatttaatactaatttaa

SEQ ID NO: 293643 - DNA, 75 bp, synthetic construct
  source 1..75: mol_type = other DNA
atgcgccggatattatcagtattactcgaaaatgaatcaggcgcgttatcccgcgtgattggccttttttcccag

SEQ ID NO: 293644 - DNA, 75 bp, synthetic construct
  source 1..75: mol_type = other DNA
cttgtaccgaaatcgagcaattacgtaaagggacagggttaaaaattgatgatttcgcccgggttttgggcgtat

SEQ ID NO: 293645 - DNA, 75 bp, synthetic construct
  source 1..75: mol_type = other DNA
caaaaacaccatcatacactaaatcagtaagttggcagcatcacccgggttcatttaaaattcgtggcgcattta

SEQ ID NO: 293646 - DNA, 75 bp, synthetic construct
  source 1..75: mol_type = other DNA
gtgccggtttactgcaccggcacattccccctccggcaaaatttgtccaaccctccctacggtgagcgtggtgtt

SEQ ID NO: 293647 - DNA, 75 bp, synthetic construct
  source 1..75: mol_type = other DNA
gaaatgtttatgcactggataagggtcgcgtatgaggctggcaactatccggtaactccggatggttggataagc

SEQ ID NO: 293648 - DNA, 75 bp, synthetic construct
  source 1..75: mol_type = other DNA
actggaaaataaacatgccgattacccgcaccagctactggctggattaatgtccgccactcaggattgccagca

SEQ ID NO: 293649 - DNA, 75 bp, synthetic construct
  source 1..75: mol_type = other DNA
tcagcgacgagctggacgccgatccgtttatgaaaaatatctacctgatggccgcgccgccgaatatcaaagtgg

SEQ ID NO: 293650 - DNA, 75 bp, synthetic construct
  source 1..75: mol_type = other DNA
tgaagcaagtacgcaaaattgtatcgattggcgaacccttcttctttagagtcatagtgccctttaagattaagg

SEQ ID NO: 293651 - DNA, 75 bp, synthetic construct
  source 1..75: mol_type = other DNA
ctacagtgatgctctggataagcgtctggcgatgtttaaatcaggcaaaaacaggcaacgaataaaaggaagcta

SEQ ID NO: 293652 - DNA, 75 bp, synthetic construct
  source 1..75: mol_type = other DNA
ctgggatttgttgctgacggatgtgttccataaaacatggccgctggcttctgatccggatgtgcgcatgcgtct

SEQ ID NO: 293653 - DNA, 75 bp, synthetic construct
  source 1..75: mol_type = other DNA
ctggctggggcggtggttttacgatgagctgacctatgaagagcgcggcagtgacggaaaatggcgaaaaccggg

SEQ ID NO: 293654 - DNA, 75 bp, synthetic construct
  source 1..75: mol_type = other DNA
gcctggcagtatttaaactcatcacaaaaaacagtacaaacagaacaaaaggcaccggagaaaaaggtacttttc

SEQ ID NO: 293655 - DNA, 75 bp, synthetic construct
  source 1..75: mol_type = other DNA
tgcctccaaaacgcgtgcagacagaggtggtcattaccggagcaggtatgagtgccgatcgcacggcgttaacgc

SEQ ID NO: 293656 - DNA, 75 bp, synthetic construct
  source 1..75: mol_type = other DNA
atgggtaagttagcgttagccgccaagatcacgcacgtaccgtcgatgtatctctctgagctgcctgggaaaaac

SEQ ID NO: 293657 - DNA, 75 bp, synthetic construct
  source 1..75: mol_type = other DNA
cgctttccggaagatatcgacggggagggggatgctttttcactggcatcgaaacgaaccacgacattcatgtcc

SEQ ID NO: 293658 - DNA, 75 bp, synthetic construct
  source 1..75: mol_type = other DNA
catcagctgtgccatcaggcatccgcgcagtattagcggaaaacttaatttgctcatcgctggatctggaatgcg

SEQ ID NO: 293659 - DNA, 75 bp, synthetic construct
  source 1..75: mol_type = other DNA
atgcagtttctgccgggcaccgactttatctcttccggtttttccgcagtaccaaactacgacaacatgtttgcc

SEQ ID NO: 293660 - DNA, 75 bp, synthetic construct
  source 1..75: mol_type = other DNA
agtggtgatgagagggtttttgaacagatagtaaaacaacttcataaacttataccgacttataaagttatagat

SEQ ID NO: 293661 - DNA, 75 bp, synthetic construct
  source 1..75: mol_type = other DNA
caaaatagccggacttcccgcgccagaggtgtttgtgaccgctgagcgggtgaagcgcggaaaaccagagcctga

SEQ ID NO: 293662 - DNA, 75 bp, synthetic construct
  source 1..75: mol_type = other DNA
agatatccttgtggcaggcgattaccactctgcgatccataatctcgagatacttaaagcagaactcttgcgcca

SEQ ID NO: 293663 - DNA, 75 bp, synthetic construct
  source 1..75: mol_type = other DNA
gcaggcaggaacggcgtcggaaaaactgctcgcaaggcttaaaaatatcggcgtaaatgactggcaaccgcatgc

SEQ ID NO: 293664 - DNA, 75 bp, synthetic construct
  source 1..75: mol_type = other DNA
ccgtaacggactggaagtggtaaaagcgctggcacagggcgggttcaccgacgtggcccaggatatgctcaatat

SEQ ID NO: 293665 - DNA, 75 bp, synthetic construct
  source 1..75: mol_type = other DNA
atccagaccctgagcgccagttatcaacacctgcaacaacagaccgccacgtgcagccgcgcaaaggcaaaacgc

SEQ ID NO: 293666 - DNA, 75 bp, synthetic construct
  source 1..75: mol_type = other DNA
ccaatgaccagaccttttcccactctgatattcgccgtaccgcccgtaccctgatgcaaatgcttcccggcaccg

SEQ ID NO: 293667 - DNA, 75 bp, synthetic construct
  source 1..75: mol_type = other DNA
gcgggtttgatgaacaggaaaccaccgttgccgttgctagctatgcaccgttcaacgccatcgccctgctggtcg

SEQ ID NO: 293668 - DNA, 75 bp, synthetic construct
  source 1..75: mol_type = other DNA
aaagtaatttcattagccaactggttgatattggaagatttgacgaatcttatcaacagtcagttgcgttcctga

SEQ ID NO: 293669 - DNA, 75 bp, synthetic construct
  source 1..75: mol_type = other DNA
accctcaccggaaccggtatccacgcctgttaaaaaacaaaaacggaagaaaacagtaactgacgatgttaaccc

SEQ ID NO: 293670 - DNA, 75 bp, synthetic construct
  source 1..75: mol_type = other DNA
cccgtcaatacggttcttgctgcacgcttacgaacattccttgctggcaactacctgaaaatcggctggccgtca

SEQ ID NO: 293671 - DNA, 75 bp, synthetic construct
  source 1..75: mol_type = other DNA
cataaggactggctgagtcgtcgccaacgccaaaaacagggaattgaacgagctcatacgttgggtaaataccgg

SEQ ID NO: 293672 - DNA, 75 bp, synthetic construct
  source 1..75: mol_type = other DNA
tcgccgagcgggcaaaagagatgctggagcagttcgttcaggaacgggggcataaaatcgccagctactaccggg

SEQ ID NO: 293673 - DNA, 75 bp, synthetic construct
  source 1..75: mol_type = other DNA
gcgcgccgcaagttcgctggcgaaaaccggttacggtcaatatctgctggagttactccgtgcccgtccgcgcca

SEQ ID NO: 293674 - DNA, 75 bp, synthetic construct
  source 1..75: mol_type = other DNA
actgcggattgtcagcctggatgtccccacgtcatggcaggcgctgtcagataaagacccttcacagactgaccc

SEQ ID NO: 293675 - DNA, 75 bp, synthetic construct
  source 1..75: mol_type = other DNA
aggtgccgcaggtgttatgcagcaaattataaaactggaacctattcgtatagtttatgtatcctgtaaccctgc

SEQ ID NO: 293676 - DNA, 75 bp, synthetic construct
  source 1..75: mol_type = other DNA
gacgcacgacgacgcgtcagatcataaccgtttcagtcaacgacctcgactcttttggtcagggcgtggcacgac

SEQ ID NO: 293677 - DNA, 75 bp, synthetic construct
  source 1..75: mol_type = other DNA
cgcacgcaaggcgcgacggtatttggctatcaggtgatggatccggaacgctttggcgtggtggagtttgacgac

SEQ ID NO: 293678 - DNA, 75 bp, synthetic construct
  source 1..75: mol_type = other DNA
gcgtgctgccagttcattagcgaaaactggctacggtcaatatctgctggagttacttcgtgcccgtccgcgcca

SEQ ID NO: 293679 - DNA, 75 bp, synthetic construct
  source 1..75: mol_type = other DNA
ggcgtatcagcggttccggagccggaaggtatcgcgggtgacgggagtgcttcagatggcggtgaacccacacct

SEQ ID NO: 293680 - DNA, 75 bp, synthetic construct
  source 1..75: mol_type = other DNA
ctggaagagatcgcctggcgtaacggctggcttgatgacgaaggcgtgaagcgcgccgccagctcgctggcgaaa

SEQ ID NO: 293681 - DNA, 75 bp, synthetic construct
  source 1..75: mol_type = other DNA
acggcctggcgcaggcgtttatcatcggtgaaaccttccttaacggtgaaccttcctgcctggtgctgggcgata

SEQ ID NO: 293682 - DNA, 75 bp, synthetic construct
  source 1..75: mol_type = other DNA
acctgaccgttgaactgctcgggcgcggatttgcctggctggataccggcactcacgacagcctgattgaagcca

SEQ ID NO: 293683 - DNA, 75 bp, synthetic construct
  source 1..75: mol_type = other DNA
atcaataatatgcttatcgacctgatggctgcgatgtcgcataaggactggctgagccgccgccagcggcaaaaa

SEQ ID NO: 293684 - DNA, 75 bp, synthetic construct
  source 1..75: mol_type = other DNA
tttgaaccagaagtcaaacgtcaggctgtcatggcactctgtacacgacaagtatcagccagtgaaatcgccagg

SEQ ID NO: 293685 - DNA, 75 bp, synthetic construct
  source 1..75: mol_type = other DNA
cgttacggattgttgaaaccgcagcgcacagacggcggtcatcgcctgttcaacgatgccgatatcgaccggatc

SEQ ID NO: 293686 - DNA, 75 bp, synthetic construct
  source 1..75: mol_type = other DNA
acggcgtgcaggtcagcaaagtaaaaatgctgctcagtaatgaaaatgttgatgtgcagaacggctggcgcgatc

SEQ ID NO: 293687 - DNA, 75 bp, synthetic construct
  source 1..75: mol_type = other DNA
atgatcaaagataacagcaaagctgatgacagcgctgaccgactgtcatttacagaaaccctgtttgtagcacat

SEQ ID NO: 293688 - DNA, 75 bp, synthetic construct
  source 1..75: mol_type = other DNA
actggcgtttggcgatcatgttcactgcttttttgccgaaccaacgcactccccttgtatgttgttaggcgtcca

SEQ ID NO: 293689 - DNA, 75 bp, synthetic construct
  source 1..75: mol_type = other DNA
aacccactctggcgcagtatattgtacaacccaatggactgttgaaggctctcgagcagagggtaaaaaaatgac

SEQ ID NO: 293690 - DNA, 75 bp, synthetic construct
  source 1..75: mol_type = other DNA
tcttgctgataaatatctggcgattggctgttcctgtgtttcgccgaacgatcagcgcctgaaaatgctcagtca

SEQ ID NO: 293691 - DNA, 75 bp, synthetic construct
  source 1..75: mol_type = other DNA
aaagacatgcccgtcagtgatgccagtgtgtcggcgctgaaaaaatatctctcgatctttagtgatggcgatagc

SEQ ID NO: 293692 - DNA, 75 bp, synthetic construct
  source 1..75: mol_type = other DNA
ttgtatcggctggaacttattgatccgaataacccggatgtgattgctgcccgttttcgttctctgttacgtcag

SEQ ID NO: 293693 - DNA, 75 bp, synthetic construct
  source 1..75: mol_type = other DNA
caacttttgaccacccagtttcagacgctccgtaacgctattattaaagttaagcgagacagaccttgtgaaatt

SEQ ID NO: 293694 - DNA, 75 bp, synthetic construct
  source 1..75: mol_type = other DNA
cgtgccatacctacgcggtggaatcgctggcgattaaacgtcatgtgcgccagcagcacaacattccttatatcg

SEQ ID NO: 293695 - DNA, 75 bp, synthetic construct
  source 1..75: mol_type = other DNA
gaaagctgaaatgctgcgcttgcaaaaggtagtggaagaacgtttcggacaagagatcacagaagacgcgttgcg

SEQ ID NO: 293696 - DNA, 75 bp, synthetic construct
  source 1..75: mol_type = other DNA
ctgctgaggcagtgaaggaagtcattcgctctgaagaagtcagaagcgtcctgaaacaaaaactccgccagaatc

SEQ ID NO: 293697 - DNA, 75 bp, synthetic construct
  source 1..75: mol_type = other DNA
attaataaatatacaagaacaattggatacgtttaacaatacactacaaaaagttgaatcgcagccttacaaaat

SEQ ID NO: 293698 - DNA, 75 bp, synthetic construct
  source 1..75: mol_type = other DNA
tacgcagccggtaattgattctgtatgggatatttatgaacagcaaatttttcaacttctcgaccaagctgttac

SEQ ID NO: 293699 - DNA, 75 bp, synthetic construct
  source 1..75: mol_type = other DNA
gagggagtgcaccatggtttttacttactagtacttcaggtgaaaatacttctttgctaaaagacattaagcttc

SEQ ID NO: 293700 - DNA, 75 bp, synthetic construct
  source 1..75: mol_type = other DNA
tgaactcatgggggagaaggacaaaaactgtatttttgctgatatccttatttccgagatactgccacaaataca

SEQ ID NO: 293701 - DNA, 75 bp, synthetic construct
  source 1..75: mol_type = other DNA
tcttttgtgtttttgtttgtttattggttttatctatttgctatggtattggggttttaagaaactggacagata

SEQ ID NO: 293702 - DNA, 75 bp, synthetic construct
  source 1..75: mol_type = other DNA
aaaaaaagaatagtaacgctagatgctcattttaggaatggtttcaggattataagtaaaaaaggaaaaggaaag

SEQ ID NO: 293703 - DNA, 75 bp, synthetic construct
  source 1..75: mol_type = other DNA
gttgctgctcggtaacatgggtatggctggtggcggcgtgaacgcattgcgtggtcactccaacattcagggcct

SEQ ID NO: 293704 - DNA, 75 bp, synthetic construct
  source 1..75: mol_type = other DNA
aaatcaacgccgaatacgttaagcattacaccaacgccaacctgctggtgcgtgatgattttgctttcgaagatg

SEQ ID NO: 293705 - DNA, 75 bp, synthetic construct
  source 1..75: mol_type = other DNA
actctcactgccaaagcaaattattctgttagtactatatactggcggattcaattttttaatattatacgactt

SEQ ID NO: 293706 - DNA, 75 bp, synthetic construct
  source 1..75: mol_type = other DNA
aaatggtttggttccaaattaagtaagcaaaaagagcttgatatattaagaggaaaattaatgaatataagccat

SEQ ID NO: 293707 - DNA, 75 bp, synthetic construct
  source 1..75: mol_type = other DNA
tgatgaagaaaatgggcagaaaatacatcgtattgaaatcggtgattttgataaccttcatgtcacagcaacaac

SEQ ID NO: 293708 - DNA, 75 bp, synthetic construct
  source 1..75: mol_type = other DNA
gaagtattccgtctgccttcgacctgctttgctgaagaagatggttctatcgctaactccggtcgctggttgcag

SEQ ID NO: 293709 - DNA, 75 bp, synthetic construct
  source 1..75: mol_type = other DNA
atggcgcgttactgaatataagaagaatttcatgcaagcttcaccatcaggaaagcgagaactaattctgtcgct

SEQ ID NO: 293710 - DNA, 75 bp, synthetic construct
  source 1..75: mol_type = other DNA
cgtttatcggcgtgtttgtttttatgatgcccgccattctcctttccggttacgtttctccggtggaaaacatgc

SEQ ID NO: 293711 - DNA, 75 bp, synthetic construct
  source 1..75: mol_type = other DNA
ccaccattgtgctggcgattggtatctgggcgtatcaaatccccttcgccggatcgctggcgctgttctacttta

SEQ ID NO: 293712 - DNA, 75 bp, synthetic construct
  source 1..75: mol_type = other DNA
gaatagtttgtggccgttactggtgataacggccacaacaggatcagcggcgtacgcgatgtttagacgcaaggt

SEQ ID NO: 293713 - DNA, 75 bp, synthetic construct
  source 1..75: mol_type = other DNA
tgtttgccgataaaggtttggtggtcgcgcaatatattcgtaaccgtcgtctcgatttttgtgcagatgcgattc

SEQ ID NO: 293714 - DNA, 75 bp, synthetic construct
  source 1..75: mol_type = other DNA
gatgcccgccattctcctttccggttacgtttcgccggtggaaaacatgccagtatggctgcaaaacctgacgtg

SEQ ID NO: 293715 - DNA, 75 bp, synthetic construct
  source 1..75: mol_type = other DNA
ccactatcggcgtgatgatcgtcacctcgctttccgtcgcccgcgaacgtgaacaaggtacgctcgatcaattgc

SEQ ID NO: 293716 - DNA, 75 bp, synthetic construct
  source 1..75: mol_type = other DNA
gagatcctgcagtttccagataaattgaatgatataaaacaatcactggatgcctttatttccacattctgtata

SEQ ID NO: 293717 - DNA, 75 bp, synthetic construct
  source 1..75: mol_type = other DNA
ttgatccagacggtgtcagactgttgtccttcagggaaagaagtatacctttttccccttcattcattactttca

SEQ ID NO: 293718 - DNA, 75 bp, synthetic construct
  source 1..75: mol_type = other DNA
gttgggagaaaatggttaaagatgaatcactgagcgatttaacaacatctccaggtattaatgaatcaataaaaa

SEQ ID NO: 293719 - DNA, 75 bp, synthetic construct
  source 1..75: mol_type = other DNA
tcatgaatcactaaaaataaccagaccttatgataaaatatcatcaatagcttcactagctatagaaagagatga

SEQ ID NO: 293720 - DNA, 75 bp, synthetic construct
  source 1..75: mol_type = other DNA
ctgtcgtcacacttacatcataatatcccggtttttctggttataagtggatgcgagcacatcagtgggtattca

SEQ ID NO: 293721 - DNA, 75 bp, synthetic construct
  source 1..75: mol_type = other DNA
aaaacgcaaaataaagatgagctaataaatatcaaagaacaattagatatacttaatcagaccttacaaaaggtt

SEQ ID NO: 293722 - DNA, 75 bp, synthetic construct
  source 1..75: mol_type = other DNA
ccatcaaaccttctggcatagttggcaggggccacttcttgaagggcaacaaagtaacaacatcactctgattga

SEQ ID NO: 293723 - DNA, 75 bp, synthetic construct
  source 1..75: mol_type = other DNA
ttaccggatatgcagcaaacgctgctggataagcactatctgcgtaagcatggcgcaaaagcctattacggccag

SEQ ID NO: 293724 - DNA, 75 bp, synthetic construct
  source 1..75: mol_type = other DNA
ttagcaatctgattgccttgcgccgtgatgctgaaattgaaattgcgcgaattaacgcgctcaagattccgtgtt

SEQ ID NO: 293725 - DNA, 75 bp, synthetic construct
  source 1..75: mol_type = other DNA
atattggcggtcatggatatggctctatttatccagggccaattggtgcggtgatttctccgctacttggcggct

SEQ ID NO: 293726 - DNA, 75 bp, synthetic construct
  source 1..75: mol_type = other DNA
atcagaatggctgctgccgtctgctgagcgggggacgacacgagattcaggccggggcagcaatgcagtttgccc

SEQ ID NO: 293727 - DNA, 75 bp, synthetic construct
  source 1..75: mol_type = other DNA
ctgcgtgaacgctgggagcgttacgtggtactcaatgctgaatgggcagcaagagggcgcaggggatttgaacgt

SEQ ID NO: 293728 - DNA, 75 bp, synthetic construct
  source 1..75: mol_type = other DNA
gcgattttgcagccagagcagtttgtggaaatcggggagtcgctggcgaataaacttggcattgcccagggcgat

SEQ ID NO: 293729 - DNA, 75 bp, synthetic construct
  source 1..75: mol_type = other DNA
gcaggaaggcatggggcgtctgtttgccctcgataagatggcggaaggtccgttcccggaacactacgagccgtt

SEQ ID NO: 293730 - DNA, 75 bp, synthetic construct
  source 1..75: mol_type = other DNA
gcggtcactccaacattcaggggctgacggatctggggctgctgtcgcaaagcctgccgggttacatgacgctgc

SEQ ID NO: 293731 - DNA, 75 bp, synthetic construct
  source 1..75: mol_type = other DNA
ctggcagacaaccagcaggttaatccggacaatatatcctggggctaccgggggggggggttctggatgttaacg

SEQ ID NO: 293732 - DNA, 75 bp, synthetic construct
  source 1..75: mol_type = other DNA
attgccaatacgttaacgccattcgttggtgatgcaaacacgcagacgccggagtttaagtccttccttgtgaat

SEQ ID NO: 293733 - DNA, 75 bp, synthetic construct
  source 1..75: mol_type = other DNA
atgtatgccgaacagggtggcgcgaacccggaccaggtgctgaacatgacctggaactacgccatcccgcatgag

SEQ ID NO: 293734 - DNA, 75 bp, synthetic construct
  source 1..75: mol_type = other DNA
accggcttgccgtcagactgtcgatgattattggacgtctggtagcaggtgaaacgctggatatgcgtaaactgg

SEQ ID NO: 293735 - DNA, 75 bp, synthetic construct
  source 1..75: mol_type = other DNA
cactcgactgggtacaggaagtgcaaaaacgcggggccggagaaatcgtcctcaacatgatgaatcaggacggtg

SEQ ID NO: 293736 - DNA, 75 bp, synthetic construct
  source 1..75: mol_type = other DNA
tccacaagcaaattattaatattggtgaattaaaagcgtacctggccgcacagggcgtggagatacgggtatgtt

SEQ ID NO: 293737 - DNA, 75 bp, synthetic construct
  source 1..75: mol_type = other DNA
gtctggacgtccgtgatgggcaggtggtaaaaggtgtccagttccgcaatcacgagattattggtgacatcgtcc

SEQ ID NO: 293738 - DNA, 75 bp, synthetic construct
  source 1..75: mol_type = other DNA
cagatggctgccctgatgcttctgatgaaggtccgtcagcggaagggcgatctgatggcgcagcttgactttctg

SEQ ID NO: 293739 - DNA, 75 bp, synthetic construct
  source 1..75: mol_type = other DNA
ccacaccacatgatgcggcgttcagagcgatgatggaatgtccctctgttgcgagggatttcctgaaaggcgcgt

SEQ ID NO: 293740 - DNA, 75 bp, synthetic construct
  source 1..75: mol_type = other DNA
acaccagacggacatttcacccgcatcctgtcacgcccggattttttacaggcgttacctcattttcatcttttt

SEQ ID NO: 293741 - DNA, 75 bp, synthetic construct
  source 1..75: mol_type = other DNA
gaatcaatataccggcgatgaaagccgcacccgcgtcactcagtgggaaacgctcgactgggtacaggaagtgca

SEQ ID NO: 293742 - DNA, 75 bp, synthetic construct
  source 1..75: mol_type = other DNA
cgggcgttgagtccctgtttccgggacttgacggacatctggtcagttcacttctgggtgggccgggtgaatctc

SEQ ID NO: 293743 - DNA, 75 bp, synthetic construct
  source 1..75: mol_type = other DNA
atctggttcaacccctgcaggagtcttttcgccgcaacgacagtctgtgcagtctggttgaagacccggtgttta

SEQ ID NO: 293744 - DNA, 75 bp, synthetic construct
  source 1..75: mol_type = other DNA
ctcaacatgatgaaccaggacggcgtgcgtaatggctacgacctggcgcaactgaaaaaagtgcgtgacgtctgc

SEQ ID NO: 293745 - DNA, 75 bp, synthetic construct
  source 1..75: mol_type = other DNA
tcgcgtggcggaagtgatcgacattccgttctgcgtggcgggtgggattaagtcgctggatgacgccgcgaaaat
